United States Patent Application Publication US 2021/0199660 A1 - sequence listing, part 43

SEQ ID NO: 612821 - DNA, 120 bp, Artificial Sequence
  ENSG00000176542_20 (sequence is synthesized)
ctttaaatggacagctctttgctttgcagcctgtgatgtcttcatcaggaactacaaatcaaacccctatgcaaattattcaacccaccaccagcgaagatccaaataccaatgttgccc

SEQ ID NO: 612822 - DNA, 120 bp, Artificial Sequence
  ENSG00000176542_21 (sequence is synthesized)
tgaatacatttggtgctttggccagcctcaatcaaagcatatcacagatggctgggcaaagctgtgtacaattgtctattagccagcctgccaattctcaaactgctgcaaatagtcaaa

SEQ ID NO: 612823 - DNA, 120 bp, Artificial Sequence
  ENSG00000176542_22 (sequence is synthesized)
ccactacagctaactgtgtttcattaacaacaactgcagcacctcctgtgacaacagatagttcagccacactagctagtacttataatctagtgagtacttcctcaatgaacactgttg

SEQ ID NO: 612824 - DNA, 120 bp, Artificial Sequence
  ENSG00000176542_23 (sequence is synthesized)
cttgtttgcctaacatgaaatctaaaaggttgaataagaagccaggtggcaggaaacacttagcagcaaacaagtcagcgtgtcccctgaattcagtcagagatgtgagcaagttagact

SEQ ID NO: 612825 - DNA, 120 bp, Artificial Sequence
  ENSG00000176542_24 (sequence is synthesized)
gccccaacactgaaggctcagcagagccaccctgtaatgatggactgctagaaagcttccctgctgtgttaccatctgtctctgtgtctcaggcaaatagtgtgagtgtttctgcttcac

SEQ ID NO: 612826 - DNA, 120 bp, Artificial Sequence
  ENSG00000176542_25 (sequence is synthesized)
attctttgggtgttctaagctctgaatcattaatacctgagtctgtatcgaaatctaagtcagcagaaaagtccagcccaccctcccaagaatctgtaacaagtgaacattttgcaatgg

SEQ ID NO: 612827 - DNA, 120 bp, Artificial Sequence
  ENSG00000176542_26 (sequence is synthesized)
ccgcagcaaaatccaaagattctacccctaatctacaacaagagacatctcaggataaaccaccaagtagtttagcattatcagatgctgccaaaccctgcgcttcagccaatgtattga

SEQ ID NO: 612828 - DNA, 120 bp, Artificial Sequence
  ENSG00000176542_27 (sequence is synthesized)
ttccatctccaagtgatcctcacattttggtttctcaggttcctggtttgtcatctacaacaagcactacaagtactgactgtgtttctgaggtagaaatcattgctgaaccttgcagag

SEQ ID NO: 612829 - DNA, 120 bp, Artificial Sequence
  ENSG00000176542_28 (sequence is synthesized)
ttgagcaagattcatcagatacaatgcaaaccacaggtctcttaaaggggcaaggtttaactacattgctatctgatcttgctaaaaaaaaaaaccctcagaaatcatctctttctgatc

SEQ ID NO: 612830 - DNA, 120 bp, Artificial Sequence
  ENSG00000176542_29 (sequence is synthesized)
agatggatcatcctgacttttcttcagaaaatcctaaaatagttgattcaagtgtgaatttacatcccaaacaggaactattactgatgaacaatgatgatagagatcctccacagcatc

SEQ ID NO: 612831 - DNA, 120 bp, Artificial Sequence
  ENSG00000176542_30 (sequence is synthesized)
attcctgcctccctgatcaagaggttattaatggttctttgatcaacggtagacaggccgactctcccatgtcaaccagctctggcagtagtcgtagtttctcagttgcatccatgcttc

SEQ ID NO: 612832 - DNA, 120 bp, Artificial Sequence
  ENSG00000176542_31 (sequence is synthesized)
ctgaaacaacaagagaagatgtgaccagcaatgcaacaactaatacatgtgacagctgtacctttgtagagcaaactgatatagtagctcttgcagcaagagctatttttgaccaggaga

SEQ ID NO: 612833 - DNA, 120 bp, Artificial Sequence
  ENSG00000176542_32 (sequence is synthesized)
accttgagaaggggagagttggcctccaggctgatataagggaagttgcttcaaagccttctgaagcatcattgttagagggagacccacccttcaaatcacagatacctaaagagagtg

SEQ ID NO: 612834 - DNA, 120 bp, Artificial Sequence
  ENSG00000176542_33 (sequence is synthesized)
gcacaggacaggcagaagcaacaccaaatgaatttaattctcagggttcaattgaagcaactatggagaggccccttgagaaaccaagttgttctctaggaattaaaacatcaaatgcat

SEQ ID NO: 612835 - DNA, 120 bp, Artificial Sequence
  ENSG00000176542_34 (sequence is synthesized)
ctttacaggattcaacttctcagccaccaagcatcaccagtttaagtgtgaataatcttatccatcagagcagcatcagccatcctctggccagctgtgcgggtttatccccaacttcag

SEQ ID NO: 612836 - DNA, 120 bp, Artificial Sequence
  ENSG00000176542_35 (sequence is synthesized)
agcaaacaactgtgcctgcaacggttaatctgaccgtttcatctagctcctatggcagtcaacctcctggaccatctctgatgactgaatattcccaagaacagctaaatactatgacta

SEQ ID NO: 612837 - DNA, 120 bp, Artificial Sequence
  ENSG00000176542_36 (sequence is synthesized)
gtaccataccaaattcacagattcaagagccactcttaaagccaagccatgaaagccgtaaggattctgctaagcgtgctgtccaagatgaccttttactgtcttcagctaaacgtcaaa

SEQ ID NO: 612838 - DNA, 120 bp, Artificial Sequence
  ENSG00000176542_37 (sequence is synthesized)
agcactgtcagccagcccccctcaggcttgaaagtatgtccctgatgagcagaactccagacaccatttctgaccaaactcaaatgatggtcagtcagatccctcctaattcttcaaact

SEQ ID NO: 612839 - DNA, 120 bp, Artificial Sequence
  ENSG00000176542_38 (sequence is synthesized)
cagttgtgcctgttagcaacccagctcatggagatggccttacacgattatttccacctagtaacaactttgtgactcctgcattgaggcaaactgaagttcagtgtggttctcagcctt

SEQ ID NO: 612840 - DNA, 120 bp, Artificial Sequence
  ENSG00000176542_39 (sequence is synthesized)
cagttgctgaacagcagcaaacccaggcaagtcagcatctacaggccctgcagcagcatgttccagctcaaggtgtatctcaccttcatagtaaccatctctacataaagcagcagcagc

SEQ ID NO: 612841 - DNA, 120 bp, Artificial Sequence
  ENSG00000176542_40 (sequence is synthesized)
gcagcagcagcagcagcagcaacagcaacaacaacaagcagggcagttaagagagaggcatcacttatatcaaatgcagcatcatgtacctcatgcagagagctctgtccactctcagcc

SEQ ID NO: 612842 - DNA, 120 bp, Artificial Sequence
  ENSG00000176542_41 (sequence is synthesized)
agccccataatgtccaccaacagaggactctgcaacaggaagttcagatgcagaaaaagaggaatcttgttcagggcacccagacctctcagctttccttacaaccaaagcaccatggaa

SEQ ID NO: 612843 - DNA, 120 bp, Artificial Sequence
  ENSG00000176542_42 (sequence is synthesized)
ctgaccaatcccgatccaagactggccagccacatccccaccatcagcagatgcagcaacaaatgcagcaacactttggaagctcccagacagagaagagctgtgaaaacccttcaacta

SEQ ID NO: 612844 - DNA, 120 bp, Artificial Sequence
  ENSG00000176542_43 (sequence is synthesized)
gtcggaaccatcataaccatccccagaaccatctcaatcaagatattatgcaccaacagcaggatgttggaagcagacagcaaggttcaggggtttcatctgaacatgtatctggccata

SEQ ID NO: 612845 - DNA, 120 bp, Artificial Sequence
  ENSG00000176542_44 (sequence is synthesized)
atccaatgcagaggcttttgacatcaagaggcttagagcagcaaatggtgtcccaaccaagtattgtgactagatcttcagacatgacctgtactccacacaggccagagagaaatagag

SEQ ID NO: 612846 - DNA, 120 bp, Artificial Sequence
  ENSG00000176542_45 (sequence is synthesized)
tttcaagttattctgctgaggcactcattggaaagacatcttctaattcagagcagagaatggggatatcaattcagggttccagagtttcagatcagcttgaaatgagaagctatcttg

SEQ ID NO: 612847 - DNA, 120 bp, Artificial Sequence
  ENSG00000176542_46 (sequence is synthesized)
atgttcccagaaataagagtttggctattcataatatgcagggtcgtgtggaccatactgtggcctcagatatccgcctttctgattgtcagacgtttaaaccaagtggagctagtcaac

SEQ ID NO: 612848 - DNA, 120 bp, Artificial Sequence
  ENSG00000176542_47 (sequence is synthesized)
agccccagagtaattttgaagtacaatcttcaagaaacaatgaaataggtaaccctgtatcatcattgcggagtatgcagtcccaggcttttcgaattagtcaaaacactggccccccac

SEQ ID NO: 612849 - DNA, 120 bp, Artificial Sequence
  ENSG00000176542_48 (sequence is synthesized)
caattgaccgtcaaaagagattatcttacccaccagttcagagcatcccaacaggaaatggtattccatcaagggacagtgaaaatacttgtcaccaaagtttcatgcagagcttacttg

SEQ ID NO: 612850 - DNA, 120 bp, Artificial Sequence
  ENSG00000176542_49 (sequence is synthesized)
cccctcacctcagtgatcaggtcattgggagccagaggtcactctcagaacatcagaggaatacacagtgtggtccatcctctgcaattgaatataattgtcccccaactcatgaaaatg

SEQ ID NO: 612851 - DNA, 120 bp, Artificial Sequence
  ENSG00000176542_50 (sequence is synthesized)
tccatattagaagagagagtgagagtcagaatagggaaagttgtgacatgtcgttaggtgcaattaacaccaggaacagcaccttgaatattcctttttcaagttcctcttcctcaggag

SEQ ID NO: 612852 - DNA, 120 bp, Artificial Sequence
  ENSG00000176542_51 (sequence is synthesized)
atattcaaggtcgaaacacaagccccaatgtttctgtacagaaatccaatcccatgaggattactgagagtcatgccaccaagggccacatgaaccctccagtcacaaccaacatgcatg

SEQ ID NO: 612853 - DNA, 120 bp, Artificial Sequence
  ENSG00000176542_52 (sequence is synthesized)
gggttgcaaggccagcgttgccacatccatctgtgtctcatggaaatggcgatcaaggccctgctgtacgtcaagctaattcttcagttccccagagatcaaggcatcccctgcaagaca

SEQ ID NO: 612854 - DNA, 120 bp, Artificial Sequence
  ENSG00000176542_53 (sequence is synthesized)
gcagtggttccaaaattcgtcagcctgaaaggaatcgttctggaaaccaaaggcaaagtactgtctttgatccaagtcttccccatcttcctctctctactggtggcagtatgattcttg

SEQ ID NO: 612855 - DNA, 120 bp, Artificial Sequence
  ENSG00000176542_54 (sequence is synthesized)
gacgtcaacaacctgccacagagaagagaggaagtattgttcgtttcatgcctgatagcccacaagtacctaatgataattcaggtcctgaccagcatacactatcacaaaattttggtt

SEQ ID NO: 612856 - DNA, 120 bp, Artificial Sequence
  ENSG00000176542_55 (sequence is synthesized)
tttcttttattcctgagggtggcatgaatccaccaataaatgctaatgcttctttcattccacaggttactcagcctagtgccactcgaactccagccctcatcccggtagatccgcaaa

SEQ ID NO: 612857 - DNA, 120 bp, Artificial Sequence
  ENSG00000176542_56 (sequence is synthesized)
atactctgccctccttctatcctccatactctcctgctcatcctacactgtccaatgatatttcaatcccctattttcctaatcagatgttctcaaatcctagcacagagaaggtaaaca

SEQ ID NO: 612858 - DNA, 120 bp, Artificial Sequence
  ENSG00000176542_57 (sequence is synthesized)
gatcaattttatctcctcccagacctgttgggtttgctcaaccaagttttcctcttctcccagatatgccaccaatgcacatgaccaactctcacttatccaattttaatatgacatctt

SEQ ID NO: 612859 - DNA, 120 bp, Artificial Sequence
  ENSG00000176542_58 (sequence is synthesized)
tgtttccagaaatagccacagcgcttcctgatggctcagcaatgtcacctttgcttacaatagcaaattcctctgcctctgactcttccaagcagtcctcaaacagacctgcccataaca

SEQ ID NO: 612860 - DNA, 120 bp, Artificial Sequence
  ENSG00000176542_59 (sequence is synthesized)
taagccatattctaggtcatgattgcagttcagctgtttaaatactgataaacaaaatgtaaaggtaatgagtgagattacaaatgtatttgtgcgtgcatgtgcacagacatgtacatg

SEQ ID NO: 612861 - DNA, 120 bp, Artificial Sequence
  ENSG00000176542_60 (sequence is synthesized)
aagagaaggattgtgtgtgtgtgtctgtataatcagttttcagttatcttctgaatgtagggaagccatgtcagatgcagatactgggttgtcagaaaacaagttatctttcgttttcaa

SEQ ID NO: 612862 - DNA, 120 bp, Artificial Sequence
  ENSG00000176542_61 (sequence is synthesized)
ctgcatggtgtacttttttattttccaagtagatttacatttccaagttgatatttcctaaatactaattagctggaaattgggggagatcatcttgtcatgtactgggtagtaggaggg

SEQ ID NO: 612863 - DNA, 120 bp, Artificial Sequence
  ENSG00000176542_62 (sequence is synthesized)
agcctagactttaaacttgattgttgataacttatggaatatgtaggtaagttgctactgaaaaatataggcagcttgataaaacacagtggctcataatcaagtgctggctaatgtcag

SEQ ID NO: 612864 - DNA, 120 bp, Artificial Sequence
  ENSG00000176542_63 (sequence is synthesized)
catctagaacagcttcttacctatgacagatgttgaactgatgttgagtttaatgtccgtagttaaagtcaagcagttagcaaataaataaaagcaatcagcctttattctcaaagtttg

SEQ ID NO: 612865 - DNA, 120 bp, Artificial Sequence
  ENSG00000176542_64 (sequence is synthesized)
gtttagatacaggcttctttctaaattataacaatgcataaattatctgaattttatgtcttgttcttcaaattagggagctgtgttaccctttaatgtgccaagattatttaaagcaaa

SEQ ID NO: 612866 - DNA, 120 bp, Artificial Sequence
  ENSG00000176542_65 (sequence is synthesized)
ggtcttccttagacaattatttagccgtaaatatagaaagctaaaaagttaagtacatacatattctccgttttgtgcttgcattttgcatcgggtcataagggtaaaagcagttagttg

SEQ ID NO: 612867 - DNA, 120 bp, Artificial Sequence
  ENSG00000176542_66 (sequence is synthesized)
tattgtggagttttgcatgggtgcagttaacaatggatgtttcatcagctgagtttaatttagtattctctcttcattctatttatttggtcttgaaataaattcttttgcattcattta

SEQ ID NO: 612868 - DNA, 120 bp, Artificial Sequence
  ENSG00000176542_67 (sequence is synthesized)
aatattaggattgatcaggaaatagtgtttgtaatctacacgtttatttgagccttactttaaaaatatttctgaacagagatttaagctctgtcagtattttcatttactgatagcatt

SEQ ID NO: 612869 - DNA, 120 bp, Artificial Sequence
  ENSG00000176542_68 (sequence is synthesized)
tatattttaaatatggcattgtatatttcattattatccttcataacagaattataatgagaatatgaatttgttatttttcttgttggtagatgtgaaatggtgcttcaaaaaatatat

SEQ ID NO: 612870 - DNA, 120 bp, Artificial Sequence
  ENSG00000176542_69 (sequence is synthesized)
agtctttctgtatgtctctgtgtgtgtaagtatgtgtgtgtgtgtgtacacatattttaaagtatgaattggtcctttaaaaacaggcctgccatctgaaaatgggaaattgagacctga

SEQ ID NO: 612871 - DNA, 120 bp, Artificial Sequence
  ENSG00000176542_70 (sequence is synthesized)
ctgccatctgaaaatgggaaattgagacctgagacctgctaaagcatagaagaacttgatataggtagggttttttttttttttttttttttaatagatggagtctggctctgttgccca

SEQ ID NO: 612872 - DNA, 120 bp, Artificial Sequence
  ENSG00000176542_71 (sequence is synthesized)
aagccccacagaagtttataatacgtttaaaaacccatattaaaatttgaaaacttaaaaaaaaaactaagaaaacaatggcatatattccttttcttaaacctgtgaagtccattactt

SEQ ID NO: 612873 - DNA, 120 bp, Artificial Sequence
  ENSG00000176542_72 (sequence is synthesized)
tttgttcttgttatattctgccaaaaatgggatggggtgggagagatgcatagaaattgttttatctgccttgttaacaaagtgaactcaaggaccagcttttcttttctttcttctttt

SEQ ID NO: 612874 - DNA, 120 bp, Artificial Sequence
  ENSG00000176542_73 (sequence is synthesized)
cttttttttttgagactctgtcacccaggctggagtgtcgttaggtgcaactaacaccaggaacagcaccttgaatattcctttttcaagttcctcttcctcaggagatattcaaggtca

SEQ ID NO: 612875 - DNA, 77 bp, Artificial Sequence
  ENSG00000176542_74 (sequence is synthesized)
ctttttcaagttcctcttcctcaggagatattcaaggtcactttgtcacccaggctggagtctacaatggcaattct

SEQ ID NO: 612876 - DNA, 120 bp, Artificial Sequence
  ENSG00000176542_75 (sequence is synthesized)
gaattacaggcatgagtcacccctcccaggcccccccctttttttttaatcctaaaaagcttcctaagggttggtcagagcagttaactccagtgaatacctcttctaaagactcagcaa

SEQ ID NO: 612877 - DNA, 120 bp, Artificial Sequence
  ENSG00000176542_76 (sequence is synthesized)
aagggtcatttgtgcctctttaactgttcttaccaaactgtcctgtctcttttctgctgccaactaagcagcttcctagggacaaaaaaatatacaatatttttttttttcttgcttaca

SEQ ID NO: 612878 - DNA, 120 bp, Artificial Sequence
  ENSG00000176542_77 (sequence is synthesized)
aagcaagaacaacctgtattttctttcttcaaaatggtcttggggaagaataggagagcttcatgaataagttactcaagacaacagataaacacagtagtcaaaactttttattgagga

SEQ ID NO: 612879 - DNA, 120 bp, Artificial Sequence
  ENSG00000176542_78 (sequence is synthesized)
aaaatgtggcatttatgacttgctttttaattctcttaactgaattttaagctgcaacgttcaaatttttctttgtacttgaaaggtccagtgtgccaatttcaagaaggacagttttcc

SEQ ID NO: 612880 - DNA, 120 bp, Artificial Sequence
  ENSG00000176542_79 (sequence is synthesized)
ttcaagaaggacagttttccatgtgtttggctattcatttccctctctccctctctcatctgtctgtctctcactgcctctgtctctgtctctcatacacatatacacacacacacacac

SEQ ID NO: 612881 - DNA, 120 bp, Artificial Sequence
  ENSG00000176542_80 (sequence is synthesized)
tctctctctctctctctctccagtggctgttaagttctgaaggactggggactgctagacataattgaaagtaaggtaacaggctaaggagaagctcagtttgaacattgcaatgtaaag

SEQ ID NO: 612882 - DNA, 120 bp, Artificial Sequence
  ENSG00000176542_81 (sequence is synthesized)
tcctcaaagcctgtgactttcaagtatttctgttgcattaattgtattttcctgcttagctgtgttcagacatagtatttgcatttcttggagctttcattccaacagtctaacattttg

SEQ ID NO: 612883 - DNA, 120 bp, Artificial Sequence
  ENSG00000176542_82 (sequence is synthesized)
atcttgaaagagtctcaataagccttatttgaccatctgaggaaaaatgtgaccatctgtgaataattggctcctgcttacgtgtagctctcattactttacagatgtatgcatgtgtat

SEQ ID NO: 612884 - DNA, 120 bp, Artificial Sequence
  ENSG00000176542_83 (sequence is synthesized)
gtaagacttcagttcatacatggcttaattctgaaagtgttcagaccatagtacccttatttgatttaaaagcatgaatatatgagatttactagcagtattaagtatttgatagagcta

SEQ ID NO: 612885 - DNA, 120 bp, Artificial Sequence
  ENSG00000176542_84 (sequence is synthesized)
cgtgatttttgggaagaaatttgttatatggtatgtagtgttaatttggatataatttttggtaaagggatggcagaaaacatagtcaattttggttataataaacgtaaccttattctt

SEQ ID NO: 612886 - DNA, 120 bp, Artificial Sequence
  ENSG00000176542_85 (sequence is synthesized)
ggcctgctccatgtgaaatagggctcagggaagctggtcttttccttagcgggatgattactcctttgccttgaaacatttattgggcccaccatgtatggatcagcatgtggtggtaag

SEQ ID NO: 612887 - DNA, 120 bp, Artificial Sequence
  ENSG00000176542_86 (sequence is synthesized)
tcatactcccaaatcagtgattcccaagtcttggctttgggaaccagtatgcctcgtattctcttaaagagcaacaagaatttcttgaaacaaaattagttcagaattgatttaaatttt

SEQ ID NO: 612888 - DNA, 120 bp, Artificial Sequence
  ENSG00000176542_87 (sequence is synthesized)
ttaacttctggaaatacacgaagttatgtctgagtcatgagtgacagtcattgattaaatcatttctctgtctcttttttagcattattgatcacagagtccgttataaaaagtggttga

SEQ ID NO: 612889 - DNA, 120 bp, Artificial Sequence
  ENSG00000176542_88 (sequence is synthesized)
ttcctttcaacatttaacaataacttctaatgaagggtaaaattccagattctcttcatgcgtaaacatttaatgtgtcaatcatagatgaaaggaatctagtttgatgttgtttctttc

SEQ ID NO: 612890 - DNA, 120 bp, Artificial Sequence
  ENSG00000176542_89 (sequence is synthesized)
tttcttttttttggaaaacacaagttgctctgggatggcttatatgttgttttataccggttcaggaaatttatttttgtttttattgtaagaccttttgcggtaccagagatggcacct

SEQ ID NO: 612891 - DNA, 120 bp, Artificial Sequence
  ENSG00000176542_90 (sequence is synthesized)
tttttctaggtaaggtgtaggaattcctcaatggtcttgcttcgtaaaatttaacatatcagaactggggaaagagaaaggagggggttatttttttgcagcattttccagtcacatatc

SEQ ID NO: 612892 - DNA, 120 bp, Artificial Sequence
  ENSG00000176542_91 (sequence is synthesized)
agggttatactgaactgcaacaaagatcaacttttaaaaattagccttcttaaaatacaaaatgatttaagtattttaaagataatttatttgccttgctcttgccttctaacattagcc

SEQ ID NO: 612893 - DNA, 120 bp, Artificial Sequence
  ENSG00000176542_92 (sequence is synthesized)
atttcatggagaggctaaaacttatactccaaaaaatgtggaagcacattttaatgggagtaaaattaaaaaattttgagaaagggtaaaatcttatgaatatgcatcttcttagcttta

SEQ ID NO: 612894 - DNA, 120 bp, Artificial Sequence
  ENSG00000176542_93 (sequence is synthesized)
tcttccctttgataggtaggcacttatgctcttccatctgctccatgtcaaatagggctcagggaagccagtcatttccttagcgagatgattactcctttgccttgaaacatttattgg

SEQ ID NO: 612895 - DNA, 120 bp, Artificial Sequence
  ENSG00000176542_94 (sequence is synthesized)
gcccaccatgtatggatcagtgtgtggtagtgagtcatactcccaaatcagtgattcccaagtcttggctttgggaaccagtatgccttgtattctcttaaaaagcaacaataatttctt

SEQ ID NO: 612896 - DNA, 120 bp, Artificial Sequence
  ENSG00000176542_95 (sequence is synthesized)
gaaacaaaattagttcagaattgatttaaaatatttcagtgtgccatatagctctgtcccttggtttggttggccttgttttttcctgtgaagaatgaaagggcaaaggtgataccaaaa

SEQ ID NO: 612897 - DNA, 120 bp, Artificial Sequence
  ENSG00000176542_96 (sequence is synthesized)
tgaaacagctttggagtgatatctttaggagcctggaagccatttttgtaattttgttgtctatataaatgctacctttgcctggaggtagtgcgcctgtggctgtgtacatccagaggg

SEQ ID NO: 612898 - DNA, 120 bp, Artificial Sequence
  ENSG00000176542_97 (sequence is synthesized)
caacagtaatagccaacaaccagacaaactagtgaagttaatctgtgagtgatgattttatgatacttatatgcaaattaaaggcagaagttagtttcttctcaagatgcctttttggct

SEQ ID NO: 612899 - DNA, 120 bp, Artificial Sequence
  ENSG00000176542_98 (sequence is synthesized)
gaacattaccatttttctttccccagggtttgaaagaaaagggccttttttggatttaactatattctgtctgcattctattcttcatgcgtaggtttctactagaacctgtggaggggg

SEQ ID NO: 612900 - DNA, 120 bp, Artificial Sequence
  ENSG00000176542_99 (sequence is synthesized)
gacaccaaatttagattgagtcagtccatgctgataagaagcgtgaggaccttgttggacacagagcttctagatctttccacctgtagcctctaccctgttcctgcactttacctgaaa

SEQ ID NO: 612901 - DNA, 120 bp, Artificial Sequence
  ENSG00000176542_100 (sequence is synthesized)
ctgtgcctctggtctttagaccagctgttggaacatatcactcacccactcctctgttatagcaaagggccagctgggatggtacacgctgtgtaatcagacaccttctcgacaagtaca

SEQ ID NO: 612902 - DNA, 120 bp, Artificial Sequence
  ENSG00000176542_101 (sequence is synthesized)
cacgctgtgtaatcagacaccttctcgacaagtacagctgatgtttctcactgttgccttaccattctctgagccatctttgatgttgatttgtaaaaaaaaacaaaaaacaaaaaaaaa

SEQ ID NO: 612903 - DNA, 120 bp, Artificial Sequence
  ENSG00000176542_102 (sequence is synthesized)
tatgtggtggtcattcaacatccttatttctagatttacacaaactgtaccaactgtaatctttttctggcacgcgtatgtggtcagatgcttcataaacgtgagccaacttgggttgta

SEQ ID NO: 612904 - DNA, 120 bp, Artificial Sequence
  ENSG00000176542_103 (sequence is synthesized)
aacattggacataatatacaaattggggaattttggatgactgcataatcctgtcattagagatttcataagacagaagataactgtttatttgtaatttaacacatttttagaaaagat

SEQ ID NO: 612905 - DNA, 120 bp, Artificial Sequence
  ENSG00000176542_104 (sequence is synthesized)
gatctttaatttctttccctcagttgtgtatacagctatacaccatactaacaccgtactatgtcataggaacttaaagttagatgtatctaaatcccttcacttttctaagacttctct

SEQ ID NO: 612906 - DNA, 120 bp, Artificial Sequence
  ENSG00000176542_105 (sequence is synthesized)
gtgctcccacccctgaagtcttcaaatcatttttcatctgtgaagtcactgaggtactgggcttgactatagtggtaacagttaaggggagttgaactattgatcttccaagaagaaagg

SEQ ID NO: 612907 - DNA, 120 bp, Artificial Sequence
  ENSG00000176542_106 (sequence is synthesized)
gaccagatagtgttaagatgctgcagttgtgttactgtgaagaaaagattcgcttccactttcagcaggctatataaatatatatacatatatatatatattttcactttggtaaaaaaa

SEQ ID NO: 612908 - DNA, 120 bp, Artificial Sequence
  ENSG00000176542_107 (sequence is synthesized)
agttgaaaaatctgaggagaacataattaccttcacaaattatttatagatacactgggtgagaagcttactgtagggcagtcacccaaaaaaaactaattttagtgctttcaatagtgt

SEQ ID NO: 612909 - DNA, 120 bp, Artificial Sequence
  ENSG00000176542_108 (sequence is synthesized)
aatatttgtatctattaccatggcagcagtgtctgctgcacactgtgtcctattactgtaaatctcctggtttataattcttatggaaactaatttgttttgtaatggaatccagagcag

SEQ ID NO: 612910 - DNA, 120 bp, Artificial Sequence
  ENSG00000176542_109 (sequence is synthesized)
atatgtataatatgatcaggattgtcctacagttgtaaataagaataggtcctgtttattttgacatctttttacaaatgcattgtattagggtgtgaatattctgaaccatcctcttgt

SEQ ID NO: 612911 - DNA, 120 bp, Artificial Sequence
  ENSG00000176542_110 (sequence is synthesized)
tagggtgtgaatattctgaaccatcctcttgtttaaagtttggaaatttttattgttaaatgtaacattttaatggttgtaataattatttgtatagatatgaatatagtattttattta

SEQ ID NO: 612912 - DNA, 120 bp, Artificial Sequence
  ENSG00000176547_0 (sequence is synthesized)
aacttgcaatgtttttcccccatgcaattagttctattacttatgtttctccttgtctttataggcaatactgcacctgcattctcagtgaccttggaatctatggacataccacaaaat

SEQ ID NO: 612913 - DNA, 120 bp, Artificial Sequence
  ENSG00000176547_1 (sequence is synthesized)
atcacagaatttttcatgctggggctctcacagaactcagaggtacagagagttctctttgtggtctttttgctgatctatgtggtcacggtttgtggcaacatgctcattgtggtcact

SEQ ID NO: 612914 - DNA, 120 bp, Artificial Sequence
  ENSG00000176547_2 (sequence is synthesized)
atcacctccagccccacgctggcttcccctgtgtattttttcctggccaacctatcctttattgacaccttttattcttcttctatggctcctaaactcattgctgactcattgtatgag

SEQ ID NO: 612915 - DNA, 120 bp, Artificial Sequence
  ENSG00000176547_3 (sequence is synthesized)
gggagaaccatctcttatgagtgctgcatggctcagctctttggagctcattttttgggaggtgttgagatcattctgctcacagtgatggcttatgaccgctatgtggccatctgtaag

SEQ ID NO: 612916 - DNA, 120 bp, Artificial Sequence
  ENSG00000176547_4 (sequence is synthesized)
tgcattcattggttcagctcctcctggtcctttggttgcccttctgtgggcccaatgtgatcaatcactttgcctgtgacttgtaccctttgctggaagttgcctgcaccaatacgtatg

SEQ ID NO: 612917 - DNA, 120 bp, Artificial Sequence
  ENSG00000176547_5 (sequence is synthesized)
tcattggtctgctggtggttgccaacagtggtttaatctgcctgttgaacttcctcatgctggctgcctcctacattgtcatcctgtactccttgaggtcccacagtgcagatgggagat

SEQ ID NO: 612918 - DNA, 120 bp, Artificial Sequence
  ENSG00000176547_6 (sequence is synthesized)
gcaaagccctctccacctgtggagcccacttcattgttgttgccttgttctttgtgccctgtatatttacttatgtgcatccattttctactttacctatagacaaaaatatggcattat

SEQ ID NO: 612919 - DNA, 120 bp, Artificial Sequence
  ENSG00000176547_7 (sequence is synthesized)
tttatggtattctgacacctatgttgaatccactcatttataccctgagaaatgaagaggtaaaaaatgccatgagaaagctctttacatggtaagaaattgcaggtggaaaatgagtgg

SEQ ID NO: 612920 - DNA, 120 bp, Artificial Sequence
  ENSG00000176555_0 (sequence is synthesized)
atgggtgccaagaacaatgtgactgagtttgttttatttggcctttttgagagcagagagatgcagcatacatgctttgtggtattcttcctctttcatgtgctcactgtcctggggaac

SEQ ID NO: 612921 - DNA, 120 bp, Artificial Sequence
  ENSG00000176555_1 (sequence is synthesized)
cttctggtcatcatcaccatcaatgctagaaagaccctgaagtctcccatgtatttcttcctgagccagttgtcttttgctgacatatgttatccatccactaccatacccaagatgatt

SEQ ID NO: 612922 - DNA, 120 bp, Artificial Sequence
  ENSG00000176555_2 (sequence is synthesized)
gctgacacttttgtggagcataagatcatctccttcaatggctgcatgacccagctcttttctgcccacttctttggtggcactgagatcttcctccttacagccatggcctatgaccgc

SEQ ID NO: 612923 - DNA, 120 bp, Artificial Sequence
  ENSG00000176555_3 (sequence is synthesized)
ttcctgcattccatcctgcagaccctcctcacggttcagctgcctttttgtgggcccaatgagatagacaacttcttctgtgatgttcatcccctgctcaagttggcctgtgcagacacc

SEQ ID NO: 612924 - DNA, 120 bp, Artificial Sequence
  ENSG00000176555_4 (sequence is synthesized)
tacatggtaggtctcatcgtggtggccaacagcggtatgatttctttagcatccttttttatccttatcatttcctatgttatcatcttactgaacctaagaagccagtcatctgaggac

SEQ ID NO: 612925 - DNA, 120 bp, Artificial Sequence
  ENSG00000176555_5 (sequence is synthesized)
cggcgtaaggctgtctccacatgtggctcacacgtaatcactgtccttttggttctcatgccccccatgttcatgtacattcgtccctccaccaccctggctgctgacaaacttatcatc

SEQ ID NO: 612926 - DNA, 120 bp, Artificial Sequence
  ENSG00000176555_6 (sequence is synthesized)
ctctttaacattgtgatgccacctttgctgaaccctttgatctatacactaaggaacaacgatgtgaaaaatgccatgaggaagctgtttagggtcaagaggagcttaggggagaagtga

SEQ ID NO: 612927 - DNA, 120 bp, Artificial Sequence
  ENSG00000176563_0 (sequence is synthesized)
gaggagtccgtggccgttggggcgggaaaaagctgtggagggttcgaggctgtggtggtaattgggttttcctcagacttgaggcgacgacacactcattggaaggggacgaggaatcca

SEQ ID NO: 612928 - DNA, 120 bp, Artificial Sequence
  ENSG00000176563_1 (sequence is synthesized)
gggtgtggcagaagactggagaggagctaagggggtcggtatgtggatccagtgaacccgtccaggtgccccaagaggctcgtgaatatggacggacccatgaggccacgatcggcctcc

SEQ ID NO: 612929 - DNA, 120 bp, Artificial Sequence
  ENSG00000176563_2 (sequence is synthesized)
ctcgttgactttcagtttggagttgtcgccacagagacgattgaagacgccctgcttcacttggcccagcagaatgagcaagcagtgagggaggcttcggggcggctgggccgcttcagg

SEQ ID NO: 612930 - DNA, 120 bp, Artificial Sequence
  ENSG00000176563_3 (sequence is synthesized)
gagccccagatcgtggagtttgtttttctcctgtctgaacaatggtgtctggagaaatctgtgagctaccaggctgtagaaatcctagaaaggtttatggtaaaacaggcagagaacatc

SEQ ID NO: 612931 - DNA, 120 bp, Artificial Sequence
  ENSG00000176563_4 (sequence is synthesized)
tgcaggcaagccacaatccagccaagagataataagagagagtctcagaattggagggctctgaaacagcagcttgtcaacaagtttactctccgtcttgtgtcatgtgttcagctggcc

SEQ ID NO: 612932 - DNA, 120 bp, Artificial Sequence
  ENSG00000176563_5 (sequence is synthesized)
agcaaactttccttccgaaacaaaataatcagcaacattacagtcttgaatttcctccaggctctaggctatctacacactaaagaagaactgctggaatcagagcttgatgttttgaag

SEQ ID NO: 612933 - DNA, 120 bp, Artificial Sequence
  ENSG00000176563_6 (sequence is synthesized)
tccttgaacttccgaattaatctgcccactcccctggcatatgtggagacgctcctagaggttttaggatacaatggctgtttggttccagccatgaggctgcatgcaacctgcctgaca

SEQ ID NO: 612934 - DNA, 120 bp, Artificial Sequence
  ENSG00000176563_7 (sequence is synthesized)
ctgctcgacctggtctatcttctgcatgaacccatatatgagagcctgttgagggcttcaattgagaactccactcccagtcagctgcaaggggaaaagtttacttcagtgaaggaagac

SEQ ID NO: 612935 - DNA, 120 bp, Artificial Sequence
  ENSG00000176563_8 (sequence is synthesized)
ttcatgctgttggcagtaggaatcattgcagcaagtgctttcatccaaaaccatgagtgttggagccaggttgtggggcatttgcagagcatcactggtattgccttggcaagcattgct

SEQ ID NO: 612936 - DNA, 120 bp, Artificial Sequence
  ENSG00000176563_9 (sequence is synthesized)
gagttctcttatgcaatcctgactcacggagtgggagccaacactccggggagacagcagtctattcctccccacctggcagccagagctctgaagactgttgcttcctctaacacatga

SEQ ID NO: 612937 - DNA, 120 bp, Artificial Sequence
  ENSG00000176563_10 (sequence is synthesized)
gggaggctgaatccaccaaatataaacagccatccgtcactgcactcatgcctccctctgtttactttcatactaagggtacaaaaattccaagtctcttttgaactgtattttgtatgc

SEQ ID NO: 612938 - DNA, 120 bp, Artificial Sequence
  ENSG00000176563_11 (sequence is synthesized)
caatttcatgcttatttttcctttatcagagagagttaaggtggacgagcatgccctttttgtcatatcagcctgaaaatgttaaaaagctaggtggagacagattagttgtttcatttt

SEQ ID NO: 612939 - DNA, 120 bp, Artificial Sequence
  ENSG00000176563_12 (sequence is synthesized)
tgtttaacaaggtatttatacttttagcttaatttcattaagaggaacatcaggcattgcaatcagtattaatcaggggctcaaatacagactatctgggtgaccttgactaagcatcaa

SEQ ID NO: 612940 - DNA, 120 bp, Artificial Sequence
  ENSG00000176563_13 (sequence is synthesized)
tatttccccttaaaattagtttaacatctctgttccattattcagatctacacaaacaaggcttcctcaacagctatctatttttactagagtctttttttaaaactaaaactaactcta

SEQ ID NO: 612941 - DNA, 120 bp, Artificial Sequence
  ENSG00000176563_14 (sequence is synthesized)
aagaagtttcaacagaatttccacatacctgcattcattagaacttgattctcccagaatacaaagtactctattttaaagaaaaacccaacagtgcacccctgggcagttttcagactg

SEQ ID NO: 612942 - DNA, 120 bp, Artificial Sequence
  ENSG00000176563_15 (sequence is synthesized)
cagcaaatcttttattacaaataattaaatctctccataatgtctcaaacagtatcaaacaccatttcatatctctaacacagagcagagtcggcattcagtataagaaccaagtgaaaa

SEQ ID NO: 612943 - DNA, 120 bp, Artificial Sequence
  ENSG00000176563_16 (sequence is synthesized)
gtgttaaatttcaagcatctgatcacatcacatggtgaccaggtaaagcttagatgtcattttcccacattatccaactgtgcatctcaaacatatcctcatctcagtaaagacaaaagt

SEQ ID NO: 612944 - DNA, 120 bp, Artificial Sequence
  ENSG00000176563_17 (sequence is synthesized)
ttctatttcatattgttaagtgcaggaagttgagagagataaaaatccagtgaaaacacatcaatctcaattcaactcagttaaaaaaaagaaaagcaaatttaaattagtttttttcag

SEQ ID NO: 612945 - DNA, 120 bp, Artificial Sequence
  ENSG00000176563_18 (sequence is synthesized)
agaagaaagggaaaggagtccatggggttaagaatcaaaactgaccagggctggcaactatagatggcatgttgtagctctggaaagtatctgtcacatgatattttaaaataaagtggc

SEQ ID NO: 612946 - DNA, 120 bp, Artificial Sequence
  ENSG00000176563_19 (sequence is synthesized)
ttttgtggattttttcttttttggtattgtaaacatgtactgtttaatattacccgaatttaatttaaaacatgtttgcaaacaaaacaaaattaaaagcctttaaggcaaacctccccc

SEQ ID NO: 612947 - DNA, 120 bp, Artificial Sequence
  ENSG00000176563_20 (sequence is synthesized)
taaggaaaaaagtcatttgttataaaattgtgaggacacccaagcaagaccccacttaagattcgtcagcatgaacttgagagcttttgtccactgctcctcagagttaaactgggtttt

SEQ ID NO: 612948 - DNA, 120 bp, Artificial Sequence
  ENSG00000176563_21 (sequence is synthesized)
gatggaataggagccgccactgcctcctgtgtcttcaatcttgcctttctccacatccatcctgcagatggacagagcaaaactcattagtaactgagatctgagttaagtaagttcggg

SEQ ID NO: 612949 - DNA, 120 bp, Artificial Sequence
  ENSG00000176563_22 (sequence is synthesized)
gcagggacttgatcatgggaccattcacgtcattttatctattaaagaacacttggtgaggaatgatagtgtattttggatttgcttgaaagccaaaaatcaagaagactgtcacaagag

SEQ ID NO: 612950 - DNA, 120 bp, Artificial Sequence
  ENSG00000176563_23 (sequence is synthesized)
cctcattgtcattgcagagtacagggacaggacacacacccaaagagaagagaagcctggagtaggggtgagtgagggttacagtacttcttgctgttttcctaggcatccctgaacttg

SEQ ID NO: 612951 - DNA, 120 bp, Artificial Sequence
  ENSG00000176563_24 (sequence is synthesized)
gcgggggagaaaggaggcagaagaaaagaaatgctttgttttggggtgatagaagcagccttactctaagtaaaaactagagtttccatccatcaatgggatcctagaaaaatcaaaaga

SEQ ID NO: 612952 - DNA, 120 bp, Artificial Sequence
  ENSG00000176563_25 (sequence is synthesized)
agcattcctgtgtatttccaagggcttcagggaaaaaccttcttgaaactggagaggaggcttgagctctatgccaagaaaaccccctaaaccatctaaggcaacattcttctactccaa

SEQ ID NO: 612953 - DNA, 120 bp, Artificial Sequence
  ENSG00000176563_26 (sequence is synthesized)
ggactaggtggtcacattctgtcctgcttgcagtactgggtcagtctctgcccatcaatgtcatgtgattctgtgccatttttttgctttcccaccatttatactgttttgcctccatta

SEQ ID NO: 612954 - DNA, 120 bp, Artificial Sequence
  ENSG00000176566_0 (sequence is synthesized)
gggacagaacttcccctcaggagggagaacatccgccgaacgaaatggagagcaaaagaccgcgactgctcgaggaagcagacaagcagaaaaagacagtcagagtgggactcaatgcac

SEQ ID NO: 612955 - DNA, 120 bp, Artificial Sequence
  ENSG00000176566_1 (sequence is synthesized)
cttccatgctacgaaagaaccagctaggtttcctcagattcgccaactattgccgtatagctcgcgagctgcgtgtaagctgcatgcagaggaaaaaggtccagattcatagctgggatc

SEQ ID NO: 612956 - DNA, 120 bp, Artificial Sequence
  ENSG00000176566_2 (sequence is synthesized)
cctcctctttggcaagcgaccgatttaaccgcatactggcgaataccaacactgaccagctcttcacagtgaaccaagtcgaagctggaggctccaagtacggcatcatcaccatgcgag

SEQ ID NO: 612957 - DNA, 120 bp, Artificial Sequence
  ENSG00000176566_3 (sequence is synthesized)
gcctgacgacccctgagctccgggtatacccgcacaaaaccctctacgtccctaatcggaaggtgaattctatgtgctgggcctcactgaatcacttggattcccaccttctgctgtgct

SEQ ID NO: 612958 - DNA, 120 bp, Artificial Sequence
  ENSG00000176566_4 (sequence is synthesized)
tcgtgggacttgcagatactccaagctgtgccgtgctgctcccagcgtcgctgttcataggtagcttcccaggaatgcgtcggcctggcatgctttgcagtttccagatccctgatgcct

SEQ ID NO: 612959 - DNA, 120 bp, Artificial Sequence
  ENSG00000176566_5 (sequence is synthesized)
ggtcctgtgcctggtccctgagcatccacgcgtatcactctttcagtacaggcttgtctcagcaggtcctgttgaccaacgtggtgacgggacaccagcagtcatttgggactagcagtg

SEQ ID NO: 612960 - DNA, 120 bp, Artificial Sequence
  ENSG00000176566_6 (sequence is synthesized)
atgtcttggcccagcagtttgcaatcatgactcctttgctgtttaatggctgtcgctctggggagatctttggcattgatctgcgctgtggaaatcaaggcagcgggtggaaggccattt

SEQ ID NO: 612961 - DNA, 120 bp, Artificial Sequence
  ENSG00000176566_7 (sequence is synthesized)
gcctgtcccatgattcagcagtgacttctctgcaaatcctccaagatggccaattcctggtgtcatcagacatgactggaactatcaagctgtgggacttgagggccactaaatgtgtaa

SEQ ID NO: 612962 - DNA, 120 bp, Artificial Sequence
  ENSG00000176566_8 (sequence is synthesized)
cacagtacgaaggtcatgtgaataactccgcctacctacccgtgcatgtgaacgaagaagaaggagtcgtggcggccgtgggccaggactgctacacgagaatctggagcctccgtcatg

SEQ ID NO: 612963 - DNA, 120 bp, Artificial Sequence
  ENSG00000176566_9 (sequence is synthesized)
gccacctgctcacaaccataccctccccataccccgcctcggagaacgacattcccagtgtggccttctcttctcgcctcgggggcttccgaggagcaccagggctgctcatggctgtcc

SEQ ID NO: 612964 - DNA, 120 bp, Artificial Sequence
  ENSG00000176566_10 (sequence is synthesized)
gggaggacctttattgtttctcctacggttaattcttcaggatgcagcccggaggaacgtggatttgacttaaagaagtaaagagcatcgtattaccgtttctatgagcgcattttaaga

SEQ ID NO: 612965 - DNA, 120 bp, Artificial Sequence
  ENSG00000176566_11 (sequence is synthesized)
gatgttcggtgtttgtagatcccatccatccggctgctaggggtaaggtgctgttttatgtgaagatagttctgtaaagttgtttcagttaaactgggctgagagagcttgaaagtcctt

SEQ ID NO: 612966 - DNA, 120 bp, Artificial Sequence
  ENSG00000176566_12 (sequence is synthesized)
ttcataaaagataactatttccttttcttgttgaataccttagaatagttatccccccctttttttttttttttaacaaaaaaacacttttctaaggactgaagattggcaaaaactaaa

SEQ ID NO: 612967 - DNA, 120 bp, Artificial Sequence
  ENSG00000176566_13 (sequence is synthesized)
ttttagagaagcatgagactgtttgactagtcctacctgggttccggaaatacatgcatcatctgtacttgaagaggccagtgggagaggagaggagggggaggtcatttatctgagtct

SEQ ID NO: 612968 - DNA, 120 bp, Artificial Sequence
  ENSG00000176566_14 (sequence is synthesized)
ctccagaagtttttaaggctacattttggaatcattaaacttggccttctcaaactcaatagcagatctctgagattctccttttattattttccataggcaatgggaggaaaggtggat

SEQ ID NO: 612969 - DNA, 120 bp, Artificial Sequence
  ENSG00000176566_15 (sequence is synthesized)
ctttttaaataatagaagttttaaacagtccttaacgtgcttttgttgaggcatcttccagaatgtaaggtacagcagctccggtttctattattgtgacttgaatgtcaggattcaagg

SEQ ID NO: 612970 - DNA, 120 bp, Artificial Sequence
  ENSG00000176566_16 (sequence is synthesized)
gctcagtgtcaaagataattggctttgactttttgtaatctaggagcagcagtttgtgagatgtttattcaaagtgttagcctgtttttctaccaacaataagctagaaaagacaaaaaa

SEQ ID NO: 612971 - DNA, 120 bp, Artificial Sequence
  ENSG00000176566_17 (sequence is synthesized)
aacaaaaaacaaaaaaacgtgtaataaagttagtggctacttcttaatagccaaagcctggaaatgatctcactttacaatatgctaaaattgataaataatttgtgctgtagtcataca

SEQ ID NO: 612972 - DNA, 120 bp, Artificial Sequence
  ENSG00000176566_18 (sequence is synthesized)
attggataaagcataatataaaataaggcacaattgctatatgaaactgtggattaatctcaacatgttgattgtaaatgtaggtagaaatgagtacaaactgattcagttctaaagttc

SEQ ID NO: 612973 - DNA, 120 bp, Artificial Sequence
  ENSG00000176566_19 (sequence is synthesized)
caaagcactaaaaacttatctatggtgattacagtttgaatagtaggtatctctgtggaaggaagaaaggatattgtttgtttttttcccttttatttttaggatattgtttggaaagta

SEQ ID NO: 612974 - DNA, 120 bp, Artificial Sequence
  ENSG00000176566_20 (sequence is synthesized)
acacggggaaactttagaaatgctgttttctttttcttgatccttgatacatacatattttgtatgtctatacacttcacactttatataatacctcaaaaataaaaatatgaaaacagt

SEQ ID NO: 612975 - DNA, 120 bp, Artificial Sequence
  ENSG00000176566_21 (sequence is synthesized)
acactgttgtaggttggtcaggaaagggaatgattgtggcttggacctgactatgagaagtagaaataatcagaaaaatcagaaatgattgcattggaagatcattcgaaggtagtatta

SEQ ID NO: 612976 - DNA, 120 bp, Artificial Sequence
  ENSG00000176566_22 (sequence is synthesized)
gtaagatttgctgatgagagtaatctagaaagtgaaagacagcataaagattgcagcttttttgttaactttaggactggtggatggttggtgtcatttactaaaatggggaggatttga

SEQ ID NO: 612977 - DNA, 120 bp, Artificial Sequence
  ENSG00000176566_23 (sequence is synthesized)
ggtgaaaaaattttaggtgaagagaataatgctgagttttaggcaactattaaaatgtccattctgtagattagaggtgatgtcaggacataaatgaggttaatgtaatattacatattg

SEQ ID NO: 612978 - DNA, 120 bp, Artificial Sequence
  ENSG00000176566_24 (sequence is synthesized)
atagaggaataggtcaatagagaagatacaaaagagtggttaggtgcatagatttttgaaatcagttaaattagtttttgatacttgatgtgtgacaggggaaactgtgtaagctgtact

SEQ ID NO: 612979 - DNA, 120 bp, Artificial Sequence
  ENSG00000176566_25 (sequence is synthesized)
tgttatttctttgtaaaatgtcttagataataaaactaaatcataaagtagatattggtttaaaggatgtatacattgtcccttttacattgtaagcattcaataagaactagctgcgga

SEQ ID NO: 612980 - DNA, 120 bp, Artificial Sequence
  ENSG00000176566_26 (sequence is synthesized)
tgtaattttttttaaaaaagtccaaaagcagctatgggcagttgacaaaagaaaatgtaatgactacgtaacttgcgaatctgtttaccctcacttgcaaataaaataagtgcaaataaa

SEQ ID NO: 612981 - DNA, 120 bp, Artificial Sequence
  ENSG00000176567_0 (sequence is synthesized)
atggttgctacaaacaatgtgactgaaataattttcgtgggattttcccagaattggagtgagcagagggtcatttctgtgatgtttctcctcatgtacacagctgttgtgctgggcaat

SEQ ID NO: 612982 - DNA, 120 bp, Artificial Sequence
  ENSG00000176567_1 (sequence is synthesized)
ggcctcattgtggtgaccatcctggccagcaaagtgctcacctcccccatgtatttctttctcagctacttatcctttgtggagatctgctactgttctgtcatggcccccaagcttatc

SEQ ID NO: 612983 - DNA, 120 bp, Artificial Sequence
  ENSG00000176567_2 (sequence is synthesized)
tttgactcctttatcaagaggaaagtcatttctctcaagggctgcctcacacagatgttttccctccatttctttggtggcactgaggcctttctcctgatggtgatggcctatgaccgc

SEQ ID NO: 612984 - DNA, 120 bp, Artificial Sequence
  ENSG00000176567_3 (sequence is synthesized)
tggggcgggggcctgctgcattctgttgggcaaaccttcctgattttccagctcccgttctgtggccccaacatcatggaccactacttctgtgatgtccacccagtgctggagctggcc

SEQ ID NO: 612985 - DNA, 120 bp, Artificial Sequence
  ENSG00000176567_4 (sequence is synthesized)
tgcgcagacaccttcttcattagcctgctgatcatcaccaatggcggctccatctccgtagtcagtttcttcgtgctgatggcttcctacctgatcatcctgcacttcctgagaagccac

SEQ ID NO: 612986 - DNA, 120 bp, Artificial Sequence
  ENSG00000176567_5 (sequence is synthesized)
aacttggaggggcagcacaaggccctctccacctgtgcctctcatgtcacagttgtcgacctgttcttcataccttgctccttggtctatattaggccctgtgtcaccctccctgcagac

SEQ ID NO: 612987 - DNA, 120 bp, Artificial Sequence
  ENSG00000176567_6 (sequence is synthesized)
aagatagttgctgtattttatacagtggtcacacctctcttaaaccctgtgatttactccttcaggaatgctgaagtgaaaaatgccatgaggagatttattgggggaaaagtaatttga

SEQ ID NO: 612988 - DNA, 120 bp, Artificial Sequence
  ENSG00000176571_0 (sequence is synthesized)
gctttatgagcctgcaggcaaagagtgatcatttgcctctcaagcagcctctggtcatctatctgcctttgagccatcaagatgccgatgtcttctcttccagcagctattttgtctcac

SEQ ID NO: 612989 - DNA, 120 bp, Artificial Sequence
  ENSG00000176571_1 (sequence is synthesized)
atgacagctattaacaatgtgcctcctcctccacttcacagtataccaaacttgaaaaagtctaagcacattaattatggccagttgaatgcattatgccacattagaggacaacacagc

SEQ ID NO: 612990 - DNA, 120 bp, Artificial Sequence
  ENSG00000176571_2 (sequence is synthesized)
cggagtatgagcaatatcttatcagctcacgatacatttatgaagcaatatcctaaagtattcctgcaccaaaaacccagacttcctaaacttttcaaacaggaggaacaaagggaactc

SEQ ID NO: 612991 - DNA, 120 bp, Artificial Sequence
  ENSG00000176571_3 (sequence is synthesized)
aatgaaggcaaagaggaaagtcaacatcaacaacctgatgattctaacaatatagctgtccatgttcagagagcacatggtggccatattttatatagaccaaaaagagccacagagaaa

SEQ ID NO: 612992 - DNA, 120 bp, Artificial Sequence
  ENSG00000176571_4 (sequence is synthesized)
tttgaagaattcctagctatcttaaagaaattgcccattcacaggacgccatatgaacacaaaactgtgtggaagttcctgaaaacaattccagatttaacctttcagctaaatgataag

SEQ ID NO: 612993 - DNA, 120 bp, Artificial Sequence
  ENSG00000176571_5 (sequence is synthesized)
catctgaaaacacttagtaagactgtcttttccgaaacctggttgaaaggcagcacagtggttgcaaatgatggattttatgtaatactgaaaggcctagctcgacctcaaacaaacgtg

SEQ ID NO: 612994 - DNA, 120 bp, Artificial Sequence
  ENSG00000176571_6 (sequence is synthesized)
tcatttggagtgaagaattcaaaaactctacacttgctgagatgtacctaccttcatatgactcaatgcttagcaaatggagtacctttgggactctggaagttatgcctcagaatgaat

SEQ ID NO: 612995 - DNA, 120 bp, Artificial Sequence
  ENSG00000176571_7 (sequence is synthesized)
cggaaacacagatgttctcggtggtgacagaagacgattgtgaaattcttaaaatcccagcaaagggatatgcaaagataaaggaggaaaaaataaaacttgaaaatatgcaaaagttga

SEQ ID NO: 612996 - DNA, 120 bp, Artificial Sequence
  ENSG00000176571_8 (sequence is synthesized)
aattaatccgtatgtgtccttattatgaggaatggcctactttatccatatatgagctaattgcactccttaaatggaaaaaatttcctccaggtcatgtgatagtggaaagtggaaata

SEQ ID NO: 612997 - DNA, 120 bp, Artificial Sequence
  ENSG00000176571_9 (sequence is synthesized)
taatttcttttgtgggttatattaactctggatgctgtaacatttatagaagtattataggatttgtgaaactacgatcaaataaagtgaaaagatctcaaaaacttgtttatatgggga

SEQ ID NO: 612998 - DNA, 120 bp, Artificial Sequence
  ENSG00000176571_10 (sequence is synthesized)
aacttaaggagaaggagtcctttggtgagattagcgtccttcttcaagttcctttcacgtgcacaatcattaccaaaaaagaagttgagatggcaatcattgaagataaggacctatttg

SEQ ID NO: 612999 - DNA, 120 bp, Artificial Sequence
  ENSG00000176571_11 (sequence is synthesized)
tggcctagatctagaaacaacctcagtgaacattaattaagaaagtattgactaaataatggaataattgcattctggaatactatcaaactaccagcaatgaatttggtctattgtgac

SEQ ID NO: 613000 - DNA, 120 bp, Artificial Sequence
  ENSG00000176571_12 (sequence is synthesized)
tacatatcctggattccccaggaaagtcccactttcgaattgcctttcaaacacagtttttattagcagtctttcttggtttggatactaaaataaatatagttatcattgcttgattta

SEQ ID NO: 613001 - DNA, 120 bp, Artificial Sequence
  ENSG00000176571_13 (sequence is synthesized)
aaggtaacgggcttttgtaaaactttatctcttccagacattaagatccaatatctttagagtcctgaaatatttacgataatatagcctttaaaatataaatgatattattaatactta

SEQ ID NO: 613002 - DNA, 120 bp, Artificial Sequence
  ENSG00000176571_14 (sequence is synthesized)
aaaccaacttttggccatctgacagatgaggatgtcaaaaatgaatatttgaaaaaggaacaacaaaaagaatggaaagatttcaaggataagactgtgaaaaactccttgtattataaa

SEQ ID NO: 613003 - DNA, 120 bp, Artificial Sequence
  ENSG00000176571_15 (sequence is synthesized)
ggaattattccaggctttggaaaatgggaccattactgcaccagcattcctaggaacctcaaggacactctagtaaattattaaaagtaccagctcgtaagaagctggggatttcagcat

SEQ ID NO: 613004 - DNA, 120 bp, Artificial Sequence
  ENSG00000176571_16 (sequence is synthesized)
taccaaaaattgcacatttagagagaatcaccaaaagaattaagaataacagcatccttattcacttggaatgagcaagaaaattcactggtctagtaacaaaagaggatacagcaagaa

SEQ ID NO: 613005 - DNA, 120 bp, Artificial Sequence
  ENSG00000176571_17 (sequence is synthesized)
gacaaaaatctacaagctaggaagacagccctcaccagaatctgaccatgctggcaacttgatttcagacttcccagcctccagaacgagaaaaaaaaaaaaaaatctgttgtttaggtc

SEQ ID NO: 613006 - DNA, 120 bp, Artificial Sequence
  ENSG00000176571_18 (sequence is synthesized)
aaaagaagacagctctccatagcagagggatcctggacaagttgacattttacagtggaatgccaacttttataagaaactcctctcatctctgtagctgtttgagtaacttttcttatg

SEQ ID NO: 613007 - DNA, 120 bp, Artificial Sequence
  ENSG00000176595_0 (sequence is synthesized)
gcagcctggagccggagcgctggctccgcgcggcctggagaggcggagaggcctgtccaccgccccctctgccgcccacgccccgctgcgggtcggaggagcagctcccgctcgcaggtg

SEQ ID NO: 613008 - DNA, 120 bp, Artificial Sequence
  ENSG00000176595_1 (sequence is synthesized)
cgcggctcccacaggtgccgggaagcggccgcgcgcatgcgccggagcccacccgcctggctgcgcgtcccgggcccggcggctgaagaggagccgcggcgaggaacaagagtgtggtga

SEQ ID NO: 613009 - DNA, 120 bp, Artificial Sequence
  ENSG00000176595_2 (sequence is synthesized)
gaagaggagccgcggcgaggaacaagagtgtggtgagaggacgcggaaacacctgatatcccagcaaaggaagctgcagaggaagggtcctgccccgtgagcgaggacagcctccaggag

SEQ ID NO: 613010 - DNA, 120 bp, Artificial Sequence
  ENSG00000176595_3 (sequence is synthesized)
cacagcggcttctcctaacatccccctggcagtgaattacggatgaccccgtatatgaggaggtgtggatgccgacacacggggagagctcctgagaccagcacacaggaccagtgtcct

SEQ ID NO: 613011 - DNA, 120 bp, Artificial Sequence
  ENSG00000176595_4 (sequence is synthesized)
ccccgtgaccttgcagttgtgtagccacaagtgggagccacagagaaggagagcccataaggggactcttttcaagacacggtgttaaatcaaggctctgaagttggggccacagccggt

SEQ ID NO: 613012 - DNA, 120 bp, Artificial Sequence
  ENSG00000176595_5 (sequence is synthesized)
ctcagctttctgtgttctgggggcgcggtgatatgacagcatgtgaagtgagtgggtgagcacggactcctgagagcgagggcgcacccaatacctggttatctggtactgcagagagac

SEQ ID NO: 613013 - DNA, 120 bp, Artificial Sequence
  ENSG00000176595_6 (sequence is synthesized)
acctagtcagccagcgttgcaaagagggatagctagtcactcaggctgcagagagagacacctggtcacccaggctgcagaaacaaccgcagtcaactgcagctccagtcattgctggat

SEQ ID NO: 613014 - DNA, 120 bp, Artificial Sequence
  ENSG00000176595_7 (sequence is synthesized)
gttggctgacgcggtcctggcgccagctggagatccattcaccaagactttctgggcagatttaaagtggctggggttcagaagttcagcaagtcggacacacccctcctcgctggagag

SEQ ID NO: 613015 - DNA, 120 bp, Artificial Sequence
  ENSG00000176595_8 (sequence is synthesized)
gagagggcaaaggcgaggcgggggagcagcgtgtgagattccccccttcacacacacaacaacaaagcgtggacacacagaagtgaaatctgatcgcgtgccaggaaaagctgtgaggct

SEQ ID NO: 613016 - DNA, 120 bp, Artificial Sequence
  ENSG00000176595_9 (sequence is synthesized)
ggaaaccccggagtaaggctcgaccttggccagacctgcaggctgcggaaccgggggcgcgcgggcgcagcgcagcacagcccggccatggagcacgcggtggccccctgcgtcctctac

SEQ ID NO: 613017 - DNA, 120 bp, Artificial Sequence
  ENSG00000176595_10 (sequence is synthesized)
ccagggactgagcccggggctgccggggagagcgagagcgagggcgccgcgtccccggcgcagacaccctgcagtctcggcgcgtccctgtgcttcagctccggggaagagtccccgccg

SEQ ID NO: 613018 - DNA, 120 bp, Artificial Sequence
  ENSG00000176595_11 (sequence is synthesized)
cttcagctccggggaagagtccccgccgcagtccctcgcctcagcggcggaaggcgcggccacctccccgccctccagcggtggcccgcgggtggtggagcggcagtgggaggccggcag

SEQ ID NO: 613019 - DNA, 120 bp, Artificial Sequence
  ENSG00000176595_12 (sequence is synthesized)
gtccccggaggagctcgcgtcccctgaggagcgcgcgtgcccggaagagcccgcggcgccgtcccccgaaccgcgcgtttggcttgaggaccccgcgtcccccgaggagcccggggagcc

SEQ ID NO: 613020 - DNA, 120 bp, Artificial Sequence
  ENSG00000176595_13 (sequence is synthesized)
gggttcggggcggtgtacggggagccggacctggtgctggaggtgtcggggcgccggctgcgcgcgcacaaggcggtgctggcggcgcgcagcgactacttccgcgcgcgcgcgtcgcgg

SEQ ID NO: 613021 - DNA, 120 bp, Artificial Sequence
  ENSG00000176595_14 (sequence is synthesized)
gacgtgctgcgggtgcagggagtgagcctgacggcgctgcggctgctcctcgccgacgcctacagcgggcgcatggcgggcgtgcggcccgacaacgtggccgaggtggtggccggcgcg

SEQ ID NO: 613022 - DNA, 120 bp, Artificial Sequence
  ENSG00000176595_15 (sequence is synthesized)
cgccgcctgcagctgcccggcgccgcgcagcgcgccaccgacgccgtggggccgcagctgagcctggccaactgctacgaggtcctgagcgcggccaagcggcagcggctgaacgagctg

SEQ ID NO: 613023 - DNA, 120 bp, Artificial Sequence
  ENSG00000176595_16 (sequence is synthesized)
cgcgacgccgcctactgcttcatgagcgaccactatctggaggtgctgcgcgagcccgccgtgttcggccgcctgtcgggcgcagagcgggacctgctgctgcgccgccgcctgcgcgcc

SEQ ID NO: 613024 - DNA, 80 bp, Artificial Sequence
  ENSG00000176595_17 (sequence is synthesized)
gggagcgcgcgggcagccggcctcagagcccctcgggggacgcggacgcgcgcggggacgcggccgtctactgcttccac

SEQ ID NO: 613025 - DNA, 120 bp, Artificial Sequence
  ENSG00000176595_18 (sequence is synthesized)
gcttccacgcggcggccggagagtggcgcgagctgacgcggctgcccgagggcgcgccggcgcggggctgcggcctgtgcgtcctctacaactacctcttcgtggcgggcggcgtggcgc

SEQ ID NO: 613026 - DNA, 120 bp, Artificial Sequence
  ENSG00000176595_19 (sequence is synthesized)
cccgacggccgcgcgcgcccgtccgaccaggtcttctgctacaacccggccacggacagctggagcgccgtgaggcccctgcgccaggcgcgctcgcagctgcggctgctggccctggac

SEQ ID NO: 613027 - DNA, 120 bp, Artificial Sequence
  ENSG00000176595_20 (sequence is synthesized)
ggtcacctctacgccgtgggcggcgagtgcctgctcagcgtggagcgctacgacccgcgcgccgaccgctgggcccccgtggcgccgctgccccggggcgccttcgccgtggcgcatgag

SEQ ID NO: 613028 - DNA, 120 bp, Artificial Sequence
  ENSG00000176595_21 (sequence is synthesized)
gccaccacctgccacggcgagatctacgtgtccgggggctccctcttctatcgcctgctcaagtatgacccgcggcgcgacgagtggcaggagtgcccgtgcagcagcagccgcgagcgc

SEQ ID NO: 613029 - DNA, 120 bp, Artificial Sequence
  ENSG00000176595_22 (sequence is synthesized)
tcggccgacatggtggctctcgacggcttcatctaccgcttcgatctgagcggcagccgcggcgaggcgcaggcggcggggccgagcggggtcagcgtgtcccgataccactgcctggcc

SEQ ID NO: 613030 - DNA, 120 bp, Artificial Sequence
  ENSG00000176595_23 (sequence is synthesized)
cactgcctggccaagcagtggagcccgtgcgtcgcgcccctgcgcctccccggcggccccacgggcctgcagcccttccgctgcgccgccctggacggcgccatctactgcgtgagccgc

SEQ ID NO: 613031 - DNA, 120 bp, Artificial Sequence
  ENSG00000176595_24 (sequence is synthesized)
cgcttccagcctgcccgggaaggcgaggccggcggcgacgcaggccagggcggcggcttcgaggcgctgggcgcccccttggacgtccggggtgtgctcatcccgttcgctctcagcctg

SEQ ID NO: 613032 - DNA, 120 bp, Artificial Sequence
  ENSG00000176595_25 (sequence is synthesized)
gttcgctctcagcctgcctgagaagccgccccgaggggagcagggcgccccgtaggccggcggggtcggcgggcgtctccctcggcaggggtttgcggggcccaggtccctttgggcccg

SEQ ID NO: 613033 - DNA, 120 bp, Artificial Sequence
  ENSG00000176595_26 (sequence is synthesized)
ggggagtcggggccgctggccacgctggtggtttggacacttcgaaggagccccgaggacgctctcagggccgctttcgctttgctttccttttgcttgtctttgcttctgggggtggat

SEQ ID NO: 613034 - DNA, 120 bp, Artificial Sequence
  ENSG00000176595_27 (sequence is synthesized)
gccttgagacccaggaggtgtgcggatgggtcccttgacagacaggacacagagaaggctgtgggatccaaagggtcagcctcagggtacagtgggggttcctgaggcagcctgcagccg

SEQ ID NO: 613035 - DNA, 120 bp, Artificial Sequence
  ENSG00000176595_28 (sequence is synthesized)
ccgcgaactatcgggggaagcacgcagagagggtcacgccttttatttttggcttgagatttaaaattataactgataagtaaagctctttctgatttagttgaaaatttcgtaccatgt

SEQ ID NO: 613036 - DNA, 120 bp, Artificial Sequence
  ENSG00000176595_29 (sequence is synthesized)
gctcgctttggttggctcaactccaaaaagagtaatttaataagcattaaaggtaaaatctttgattaccagtaaggtttcttgttcaatatgcattggaagtatttccttccccacacc

SEQ ID NO: 613037 - DNA, 120 bp, Artificial Sequence
  ENSG00000176595_30 (sequence is synthesized)
attgctactcaaactcacatgcctagagcagctccgtctcactgttggaccgagggggctttcatattttcagttgaaaggatgttaactgatgtagcgatgatttaccattatttaaat

SEQ ID NO: 613038 - DNA, 120 bp, Artificial Sequence
  ENSG00000176595_31 (sequence is synthesized)
tttaagtcttcagtggctaaatgtgaccaaacagcacatcataagtaggaaaaacttaccagggtgcttgtctatctaaaaagcaatctttgatagtccactctgtatgcccagccgctt

SEQ ID NO: 613039 - DNA, 120 bp, Artificial Sequence
  ENSG00000176595_32 (sequence is synthesized)
tcataatctggaacgagataaaatattcctaaaaagcggggaaaatcattttgctttgacagttctataaaaaaaagtgtaggcacattttaaacccactgtatatgatgttttcaatgt

SEQ ID NO: 613040 - DNA, 120 bp, Artificial Sequence
  ENSG00000176595_33 (sequence is synthesized)
ggatcgtgtagttctgatgagggagattaatttttacaatcagtattctaagtgtggccgagtgacagtgggcatagatttataacaaggaagtgacgtgcttatcaccatagatttgca

SEQ ID NO: 613041 - DNA, 120 bp, Artificial Sequence
  ENSG00000176595_34 (sequence is synthesized)
agtaaactgcatgtatttaattgtattgaattgagttccaaaataccctaatagaattaacacgaggctcactgcattgacagggtatgaggattaaaaacaaatcagttgggtcgtttc

SEQ ID NO: 613042 - DNA, 120 bp, Artificial Sequence
  ENSG00000176595_35 (sequence is synthesized)
tcatttaacattttacttttcaagtgtgtatacagaggacttactattatgactttgaggatgagatccatgctcacaaatagaggcgaacatttgaactccgaatccaacccattttct

SEQ ID NO: 613043 - DNA, 120 bp, Artificial Sequence
  ENSG00000176595_36 (sequence is synthesized)
tactgtaagaggaaaagttactggaacgtaactagttgaaatcctgcctactttaatattatttgtttgttaatccagtaatgggaactgccatctctgtagaaatcagtgggtaattga

SEQ ID NO: 613044 - DNA, 120 bp, Artificial Sequence
  ENSG00000176595_37 (sequence is synthesized)
aaaataggttatgctttttaaagagtctgtggttatgagaggtctcagttaagtgtgtttagaagtgatcagcttgaaccttatgcatgactcgggggctggaatttatgatctgggtta

SEQ ID NO: 613045 - DNA, 120 bp, Artificial Sequence
  ENSG00000176595_38 (sequence is synthesized)
cggtatgttctggggacgtgtctgcttgcccatggttactcatgaactgaggggatagcttggcaacttggttaatcatcttgggaaagaaaaacagacttcatatcgcctgacttgatt

SEQ ID NO: 613046 - DNA, 120 bp, Artificial Sequence
  ENSG00000176595_39 (sequence is synthesized)
ggccttttataggagtatactggagaaatggttgtagaaacagtatttacagcaaaaggaaacaaataatgttcattttaagcaatgtaccattcacactgtcctgccttttcctctaga

SEQ ID NO: 613047 - DNA, 120 bp, Artificial Sequence
  ENSG00000176595_40 (sequence is synthesized)
attttattaatggtagaaatttttatatgaaatgggaccaggaccaggctaatattttcagtccttaaatatcaaactcatatgctgttatcactgtgattttacttgtgaaatcattcc

SEQ ID NO: 613048 - DNA, 120 bp, Artificial Sequence
  ENSG00000176595_41 (sequence is synthesized)
tgtaatgtttattgtttgaaaatgaaatattgaaattaggcttccagagtaacactgtccccggaaaaggatatgagaagtggtggatgttggatgggggtggttgcacagtcctgtgcg

SEQ ID NO: 613049 - DNA, 120 bp, Artificial Sequence
  ENSG00000176595_42 (sequence is synthesized)
gttcccatggctttccagcgtttcatttagtgaaggaatgctcacactagatgtagcacagcttcctgtggggcccggcagcaaagccccaggtgctccctgtcacctcacaacaaaatg

SEQ ID NO: 613050 - DNA, 120 bp, Artificial Sequence
  ENSG00000176595_43 (sequence is synthesized)
cactaagaaacgtaaagaataagaggaattaatacccaccattaaaggatgtccggccaacctattgtggaaatttatagaatagtatacaccacagttctgaatagtgatatcacataa

SEQ ID NO: 613051 - DNA, 120 bp, Artificial Sequence
  ENSG00000176595_44 (sequence is synthesized)
aaatacatactagaggacctgccacgccatgagcagtgtttttgctttttgggggccagtccctggggtgtggagccgctagggtttgcacccatgaaacagagaaaagccacaccctcc

SEQ ID NO: 613052 - DNA, 120 bp, Artificial Sequence
  ENSG00000176595_45 (sequence is synthesized)
aaggtgtggctttcattttgggactgctgcagggagggcagaggcattgctgagactgcctggcaacggctgatgccccaggtaggaccttttccaattcaaagtggtgttctaagtctg

SEQ ID NO: 613053 - DNA, 120 bp, Artificial Sequence
  ENSG00000176595_46 (sequence is synthesized)
cgtccaacactgtgtaggaaaaaggttggtgcaaaaatattcctggtcatccacccattaaaatagttagatgaggctattgccttgatgacagctgtccacactcctcatgaaattaac

SEQ ID NO: 613054 - DNA, 120 bp, Artificial Sequence
  ENSG00000176595_47 (sequence is synthesized)
ccgtatgccggggcatttccaaatgtctgactcgtgaaattaacccatacgcaggggcctttccaaatgtctgaaaaggcagtggtgtcttttggggaaaatgttatgcatggaagcctg

SEQ ID NO: 613055 - DNA, 120 bp, Artificial Sequence
  ENSG00000176595_48 (sequence is synthesized)
accttttgcttagttgacagcaatcccttctgtattgccaatcaaggttcatttgagatgcagaggaatgagcttgagccttcctccttttccttccggttttattcttcctcttgggaa

SEQ ID NO: 613056 - DNA, 120 bp, Artificial Sequence
  ENSG00000176595_49 (sequence is synthesized)
catccctccactccgcactgcttcctgcagctttgtagagctggatttggaacttcgggatttggtttctgagtctgtggaggcaccgacttctgctgtaagaaaatgaatgttgtggaa

SEQ ID NO: 613057 - DNA, 120 bp, Artificial Sequence
  ENSG00000176595_50 (sequence is synthesized)
attctttggctacttaactaaaactcgtgactgtataagtttggctacaaataagtaagaaattaatcatctgctctgtttctgctaatttctggtgtcacttcagtaattctggtagca

SEQ ID NO: 613058 - DNA, 120 bp, Artificial Sequence
  ENSG00000176595_51 (sequence is synthesized)
gccgttgaatctgtcagtctcttaggtaacttcctgtaaacgatttggaaataggatgttttcaacgttcttttgtcttttgctgaagtcaggatagattcaagacataatctcttgtaa

SEQ ID NO: 613059 - DNA, 120 bp, Artificial Sequence
  ENSG00000176595_52 (sequence is synthesized)
gatctaaatagagcaaatgtaaacaaaagtgcatttttgtattcttgttaattttagatgctttcctagcttacaaaaagttctgtttttgggttaaaaatcaatcaactttctgatatt

SEQ ID NO: 613060 - DNA, 120 bp, Artificial Sequence
  ENSG00000176595_53 (sequence is synthesized)
tccccttctgcaatgttattgttcataagaaaacacgagctgaaaatggaaatctgcagttgtttcagttgtcttgaatttctttcagtggccacatcatttccacgttttccacatccg

SEQ ID NO: 613061 - DNA, 120 bp, Artificial Sequence
  ENSG00000176595_54 (sequence is synthesized)
ggaggaagcctggactgtgcagccttcgggcacccggcacagacactgtgctggcaggagcttcagacacgccaagtggatggatttggattgaacgcatatgaaacaggagacgggttc

SEQ ID NO: 613062 - DNA, 120 bp, Artificial Sequence
  ENSG00000176595_55 (sequence is synthesized)
tcatgtgagatcaaagctcctccaaagcctgttcaagctctaagcgattctcaaatgttaccatttattaaaggtaaactacacctgttgaaggccaagttcagggcagctgttgtgatc

SEQ ID NO: 613063 - DNA, 120 bp, Artificial Sequence
  ENSG00000176595_56 (sequence is synthesized)
tgtgtagttaatgtatttattaatgcttgacttttaaaatcctgggcataaatagtgcagagcctcgtatgtttgtcagttcatgccgagatgaaataaatcacgcagaaagtgccagtc

SEQ ID NO: 613064 - DNA, 120 bp, Artificial Sequence
  ENSG00000176597_0 (sequence is synthesized)
gcatacagcccgcatcccgccggggaagcgagcccagtccagcgctgcccgtccagtcctcgcccaagatttaaagcccgcaagttttgttcttgagaccagcgactttagctccgatgc

SEQ ID NO: 613065 - DNA, 120 bp, Artificial Sequence
  ENSG00000176597_1 (sequence is synthesized)
gggaaggaaagccgacctccgatttggacatttaaagagctgggcttgaacttcgtgagtttcgctctaaactgcccttgaaatgaagctggacttggaggtggcatggaatattcacat

SEQ ID NO: 613066 - DNA, 120 bp, Artificial Sequence
  ENSG00000176597_2 (sequence is synthesized)
gggagagccgcatgaggccgcccaccacgcttcctgaaggatgcccgtgtggaagaattttgacgtgccagtgtcctcgttctacagggtgttccattcttccgcaatctcagaaaaatg

SEQ ID NO: 613067 - DNA, 120 bp, Artificial Sequence
  ENSG00000176597_3 (sequence is synthesized)
ggactaaaagaaactattttgtaaaataagaagacttccatttttaatgaccaacatgtattaagatggacacctactctacgaaacacgaagttctatggtctcgaagaagcccgtgcc

SEQ ID NO: 613068 - DNA, 120 bp, Artificial Sequence
  ENSG00000176597_4 (sequence is synthesized)
tgtttaaaactgatcctaactaaaaacagacttgagtggatatgagaatgttggttagtggcagaagagtcaaaaaatggcagttaattattcagttatttgctacttgttttttagcga

SEQ ID NO: 613069 - DNA, 120 bp, Artificial Sequence
  ENSG00000176597_5 (sequence is synthesized)
gcctcatgtttttttgggaaccaatcgataatcacattgtgagccatatgaagtcatattcttacagatacctcataaatagctatgactttgtgaatgataccctgtctcttaagcaca

SEQ ID NO: 613070 - DNA, 120 bp, Artificial Sequence
  ENSG00000176597_6 (sequence is synthesized)
cctcagcggggcctcgctaccaatacttgattaaccacaaggaaaagtgtcaagctcaagacgtcctccttttactgtttgtaaaaactgctcctgaaaactatgatcgacgttccggaa

SEQ ID NO: 613071 - DNA, 120 bp, Artificial Sequence
  ENSG00000176597_7 (sequence is synthesized)
ttagaaggacgtggggcaatgaaaattatgttcggtctcagctgaatgccaacatcaaaactctgtttgccttaggaactcctaatccactggagggagaagaactacaaagaaaactgg

SEQ ID NO: 613072 - DNA, 120 bp, Artificial Sequence
  ENSG00000176597_8 (sequence is synthesized)
cttgggaagatcaaaggtacaatgatataattcagcaagactttgttgattctttctacaatcttactctgaaattacttatgcagttcagttgggcaaatacctattgtccacatgcca

SEQ ID NO: 613073 - DNA, 120 bp, Artificial Sequence
  ENSG00000176597_9 (sequence is synthesized)
aatttcttatgactgctgatgatgacatatttattcacatgccaaatctgattgagtaccttcaaagtttagaacaaattggtgttcaagacttttggattggtcgtgttcatcgtggtg

SEQ ID NO: 613074 - DNA, 120 bp, Artificial Sequence
  ENSG00000176597_10 (sequence is synthesized)
cccctcccattagagataaaagcagcaaatactacgtgtcctatgaaatgtaccagtggccagcttaccctgactacacagccggagctgcctatgtaatctccggtgatgtagctgcca

SEQ ID NO: 613075 - DNA, 120 bp, Artificial Sequence
  ENSG00000176597_11 (sequence is synthesized)
aagtctatgaggcatcacagacactaaattcaagtctttacatagacgatgtgttcatgggcctctgtgccaataaaatagggatagtaccgcaggaccatgtgtttttttctggagagg

SEQ ID NO: 613076 - DNA, 120 bp, Artificial Sequence
  ENSG00000176597_12 (sequence is synthesized)
gtaaaactccttatcatccctgcatctatgaaaaaatgatgacatctcatggacacttagaagatctccaggacctttggaagaatgctacagatcctaaagtaaaaaccatttccaaag

SEQ ID NO: 613077 - DNA, 120 bp, Artificial Sequence
  ENSG00000176597_13 (sequence is synthesized)
gtttttttggtcaaatatactgcagattaatgaagataattctcctttgtaaaattagctatgtggacacatacccttgtagggctgcgtttatctaatagtacttgaatgttgtatgtt

SEQ ID NO: 613078 - DNA, 120 bp, Artificial Sequence
  ENSG00000176597_14 (sequence is synthesized)
ttcactgtcactgagtcaaacctggatgaaaaaaacctttaaatgttcgtctataccctaagtaaaatgaggacgaaagacaaatattttgaaagcctagtccatcagaatgtttctttg

SEQ ID NO: 613079 - DNA, 120 bp, Artificial Sequence
  ENSG00000176597_15 (sequence is synthesized)
attctagaagctgtttaatatcacttatctacttcattgcctaagttcatttcaaagaatttgtatttagaaaaggtttatattattagtgaaaacaaaactaaagggaagttcaagttc

SEQ ID NO: 613080 - DNA, 120 bp, Artificial Sequence
  ENSG00000176597_16 (sequence is synthesized)
tcatgtaatgccacatatatacttgaggtgtagagatgttattaagaagttttgatgttagaataattgcttttggaaaataccaaatgaacgtacagtacaacatttcaaggaaatgaa

SEQ ID NO: 613081 - DNA, 120 bp, Artificial Sequence
  ENSG00000176597_17 (sequence is synthesized)
atttttgttaaagagcacttggtggaggtagtaggggcagggaaaggtcagcataggagagaaagttcatgaatctggtaaaacagtctcttgttcttaagaggagatgtagaaaaatgt

SEQ ID NO: 613082 - DNA, 120 bp, Artificial Sequence
  ENSG00000176597_18 (sequence is synthesized)
gtacaatgttattataaacagacaaatcacgtcttaccacatccatgtagctactggtgttagagtcattaaaatacctttttttgcatcttttttcaaagtttaatgtgaacttttaga

SEQ ID NO: 613083 - DNA, 120 bp, Artificial Sequence
  ENSG00000176597_19 (sequence is synthesized)
aaagtgattaatgttgccctaatactttatatgtttttaatggatttttttttaagtattagaaaatgacacataacacgggcagctggttgctcatagggtccttctctagggagaaac

SEQ ID NO: 613084 - DNA, 120 bp, Artificial Sequence
  ENSG00000176597_20 (sequence is synthesized)
cattgttaattcaaataagctgattttaatgacgttttcaactggtttttaaatattcaatattggtctgtgtttaagtttgttatttgaatgtaatttacatagaggaatataataatg

SEQ ID NO: 613085 - DNA, 120 bp, Artificial Sequence
  ENSG00000176597_21 (sequence is synthesized)
gagagacttcaaatggaaagacagaacattacaagcctaatgtctccataattttataaaatgaaatcttagtgtctaaatccttgtactgattactaaaattaacccactcctccccaa

SEQ ID NO: 613086 - DNA, 120 bp, Artificial Sequence
  ENSG00000176597_22 (sequence is synthesized)
caaggtcttataaaccacagcactttgttccaagttcagagttttaaattgagagcattaaacatcaaagttataatatctaaaacaatttatttttcatcaataactgtcagaggtgat

SEQ ID NO: 613087 - DNA, 120 bp, Artificial Sequence
  ENSG00000176597_23 (sequence is synthesized)
ctttattttctaaatatttcaaacttgaaaacagagtaaaaaagtgatagaaaagttgccagtttggggttaaagcatttttaaagctgcatgttccttgtaatcaaagagatgtgtctg

SEQ ID NO: 613088 - DNA, 120 bp, Artificial Sequence
  ENSG00000176597_24 (sequence is synthesized)
agatctaatagagtaagttacatttattttacaaagcaggataaaaatgtggctataatacacactacctcccttcactacagaaagaactaggtggtgtctactgctagggagattata

SEQ ID NO: 613089 - DNA, 120 bp, Artificial Sequence
  ENSG00000176597_25 (sequence is synthesized)
tgaaggccaaaataatgacttcagcaagagtgactgaactcactctaaggcctttgactgcagaggcacctgttagggaaaatcagatgtctcatataataaggtgatgtcggaaacacg

SEQ ID NO: 613090 - DNA, 120 bp, Artificial Sequence
  ENSG00000176597_26 (sequence is synthesized)
caaaacaaaacgaaaaaagatttctcagtatacacaactgaatgatgatacttacaatttttagcaggtagctttttaatgtttacagaaattttaatttttttctattttgaaatttga

SEQ ID NO: 613091 - DNA, 120 bp, Artificial Sequence
  ENSG00000176597_27 (sequence is synthesized)
ggcttgtttacattgcttagataatttagaatttttaactaatgtcaaaactacagtgtcaaacattctaggttgtagttactttcagagtagatacagggttttagatcattacagttt

SEQ ID NO: 613092 - DNA, 120 bp, Artificial Sequence
  ENSG00000176597_28 (sequence is synthesized)
aagttttctgaccaattaaaaaaacatagagaacaaaagcatatttgaccaagcaacaagcttataattaatttttattagttgattgattaatgatgtattgccttttgcccatatata

SEQ ID NO: 613093 - DNA, 120 bp, Artificial Sequence
  ENSG00000176597_29 (sequence is synthesized)
ccctgtgtatctatacttggaagtgtttaaggttgccattggttgaaaacataagtgtctctggccatcaaagtgatcttgtttacagcagtgcttttgtgaaacaattatttatttgct

SEQ ID NO: 613094 - DNA, 120 bp, Artificial Sequence
  ENSG00000176597_30 (sequence is synthesized)
gaaagagctcttctgaactgtgtccttttaatttttgcttagaatagaatggaacaagtttaaatttcaaggaaatatgaaggcacttcctttttttctaagaaggaagttgctagatga

SEQ ID NO: 613095 - DNA, 120 bp, Artificial Sequence
  ENSG00000176597_31 (sequence is synthesized)
ttccttcatcacacttacttaaagtactgagaagagtatctgtaaataaaagggttccaaccttttaaaaaagaaggaaaaaactttttggtgctccagtgtagggctatctttttaaaa

SEQ ID NO: 613096 - DNA, 120 bp, Artificial Sequence
  ENSG00000176597_32 (sequence is synthesized)
aatgtcaacaaagggaaaataaactatcagcttggatggtcacttgaatagaagatggttatacacagtgttattgttaaaatttttttaccttttggttggtttgcatcttttttccat

SEQ ID NO: 613097 - DNA, 120 bp, Artificial Sequence
  ENSG00000176597_33 (sequence is synthesized)
attgttaattttataccaaaatgttaaatatttgtattacttgaattttgctcttgtatggcaaaataattagtgagtttaaaaaaaatctatagtttccaataaacaactgaaaaatta

SEQ ID NO: 613098 - DNA, 120 bp, Artificial Sequence
  ENSG00000176597_34 (sequence is synthesized)
ctgggccggtggttccgcgcggagttagtctgtggtcagttacgtggtgaaaacacggctgtgccgcggccgcatctttccgcggccgaggcctctctgggtgggagtgttggcttcctt

SEQ ID NO: 613099 - DNA, 120 bp, Artificial Sequence
  ENSG00000176597_35 (sequence is synthesized)
tccggatcgctaaatggggaaagttctggccgctcggcgggatacgtctccaggccacggatggttcgttctccgtgccgcggccccgagctgggctccctgggtctccagcgcgggctc

SEQ ID NO: 613100 - DNA, 120 bp, Artificial Sequence
  ENSG00000176597_36 (sequence is synthesized)
cccctccgccccgcccccgccccgccgcgcctcctcggccgagcggctcgcggtctccggcgcgggaggctccgagtctgcccactccgggccgagcgaggtctctggaggagaagagtg

SEQ ID NO: 613101 - DNA, 120 bp, Artificial Sequence
  ENSG00000176597_37 (sequence is synthesized)
tgcacccacagcagtctgttgtggatggttgctgagctgcgcattcggcattgggcttgctttgtttcctgccaggcccagcattttcttctaccagatcggcaggcttgtgggcttctt

SEQ ID NO: 613102 - DNA, 120 bp, Artificial Sequence
  ENSG00000176597_38 (sequence is synthesized)
cctaggtccctcccctgcactctgaataggaaagctggaagctgtgctttagagaagctttaagacgccgaaagaaaccagaagagtgagcgccagttgtatgtggcatggaatattcac

SEQ ID NO: 613103 - DNA, 120 bp, Artificial Sequence
  ENSG00000176597_39 (sequence is synthesized)
gaacgccgcgcccaccaattcggttgccggccgggggccccaggcttgcggccacccgcctccggctggagggctgaattcgagtcgaaagcccgtgtcgggctggaaagaagaaaccgc

SEQ ID NO: 613104 - DNA, 120 bp, Artificial Sequence
  ENSG00000176597_40 (sequence is synthesized)
gtggctgatcaggacagtatgaaatttcatacagtttcctaacttgagaaaacatggtgatgcaattcctccaaccaggagggatttatggacagcggtggctacgtcctaatctgccca

SEQ ID NO: 613105 - DNA, 120 bp, Artificial Sequence
  ENSG00000176597_41 (sequence is synthesized)
aaccctcgttcccactctgtttctgcctccaagaagaaaagcctaaaactcactttcttccggactctttcaaggaagctgattaaaagaagctcctaaaccagaggtgcagacaaggtg

SEQ ID NO: 613106 - DNA, 120 bp, Artificial Sequence
  ENSG00000176597_42 (sequence is synthesized)
atgatgtggctctcagaggaaggtgtgctacctacaaccctgctggcttcatggaagaatatgcttctcaaatgcaaatccaatcaagttatctccctgcttaaatccaaactcgctcat

SEQ ID NO: 613107 - DNA, 120 bp, Artificial Sequence
  ENSG00000176597_43 (sequence is synthesized)
tttggaacagctgaaaaaatacaggaaaataagataaatacgtacatgttgagggtggggacaaaatgaaggttctgaaccagctgccggcttacagtagccatataagcaacagcagca

SEQ ID NO: 613108 - DNA, 120 bp, Artificial Sequence
  ENSG00000176597_44 (sequence is synthesized)
ggctgatgttcacttttgaagaggaccacaatgaaacccttttaatattactcaatgattccacagacctcctgggtgttaaatcaggtgaatctatttttaaaaattgctatttacttt

SEQ ID NO: 613109 - DNA, 120 bp, Artificial Sequence
  ENSG00000176597_45 (sequence is synthesized)
aaaacacacttccattgctctctaggttccagcaccctgaccttttggtctgcactgtgccaggctccctccagccctgaagcctttgcacatgctgttcctcctgtctggaaaggctct

SEQ ID NO: 613110 - DNA, 120 bp, Artificial Sequence
  ENSG00000176597_46 (sequence is synthesized)
cccatcttgtctattcgttctccaggctcaagtgactcttcctgagagccttctctgaccccagtccaggtcaagttcctctgtcacatgcctgaccctgcatccctccttgacagcact

SEQ ID NO: 613111 - DNA, 120 bp, Artificial Sequence
  ENSG00000176597_47 (sequence is synthesized)
tatatcagcttgtaacacatttttgtgtgattattttgttaatgtcagcctctcccacaaactgtaagctcagtgagggatggaagcatgcctatttttaatcatcatggtatcctcagc

SEQ ID NO: 613112 - DNA, 120 bp, Artificial Sequence
  ENSG00000176597_48 (sequence is synthesized)
actcagcacagcacatggtacatcaggaatgctcataagcattaatagagaaatgactgatttgagtcagacgaagactcagtatgccaggacgttcaggccgagagtctaagaggccgc

SEQ ID NO: 613113 - DNA, 120 bp, Artificial Sequence
  ENSG00000176597_49 (sequence is synthesized)
cggagggcttcggaaccagtgagcccactcaattcagcctgctcagtaccctgtgtgtactttatcaggaagaaggtacagtccctccctcccctatccgtttcccaaccacaggatcaa

SEQ ID NO: 613114 - DNA, 120 bp, Artificial Sequence
  ENSG00000176597_50 (sequence is synthesized)
aataacccggaagcattacctttgcatcgagggtgagcagcaactcaaactcgttgtaaaactccttggggctgagcaacgggtactccttgactgtgcccaggaatgtcgcaatgtcgt

SEQ ID NO: 613115 - DNA, 120 bp, Artificial Sequence
  ENSG00000176597_51 (sequence is synthesized)
tgccctgtgcacttcgcctgaccacaactcagagccaccgtaatcctcagcaggtctgagcttgtaaggtgtctacaaggattcccagacaatgggaaattgtcatgggacggcatcgag

SEQ ID NO: 613116 - DNA, 120 bp, Artificial Sequence
  ENSG00000176597_52 (sequence is synthesized)
tttaaggggtctaaccactgtaaattacactatgagggggacaaacccaaaccagctgatacctgtccacttctcagggaagtcactcggtcagcaaaatgagtctcttccattaacagt

SEQ ID NO: 613117 - DNA, 87 bp, Artificial Sequence
  ENSG00000176597_53 (sequence is synthesized)
agtcactcggtcagcaaaatgagtctcttccattaacagtaattgctacatctccaggaggagacagctaaatatatatttaattaa

SEQ ID NO: 613118 - DNA, 70 bp, Artificial Sequence
  ENSG00000176597_54 (sequence is synthesized)
tacagtagtgcaattatggcttaatgcagcctggagaggtctaccccaggctcaggtgattcttaggcta

SEQ ID NO: 613119 - DNA, 120 bp, Artificial Sequence
  ENSG00000176597_55 (sequence is synthesized)
ttccttccttccttccttcctctttctttctctctgtctctctttctttctttcctttttttgagacaggttttggccatgttgccgaggctgctctcgaactcctgggctcaagcaatc

SEQ ID NO: 613120 - DNA, 120 bp, Artificial Sequence
  ENSG00000176597_56 (sequence is synthesized)
gattacaggtgtgaggcactgcacccacccagccttatagctaaatatctcttaggctggtctaaccatagagaaatgtaatcaatggcttttggggtttacctgctagtccactcttct

SEQ ID NO: 613121 - DNA, 120 bp, Artificial Sequence
  ENSG00000176597_57 (sequence is synthesized)
gtccactcttcttgcatccgaattggttaccagaacacagggtgattaataagacattagacctggcccttacatttcctgggagaagggcatgtcccttttaacaaaaacacaactttc

SEQ ID NO: 613122 - DNA, 120 bp, Artificial Sequence
  ENSG00000176597_58 (sequence is synthesized)
atctttggattcccaggtgatccctatttgcatttactggcgtttgtctttcgtaaggaagcaagaatgcaaagctttgtaactcagcacagcgatactcaagagtttctggatgctggg

SEQ ID NO: 613123 - DNA, 120 bp, Artificial Sequence
  ENSG00000176597_59 (sequence is synthesized)
aggacattagataggtgatgagttctaattattcaatttttaaaaaagactcattttctttgctcttttgaactccactgagacacttgaacagaaagacagggagcccttatgctacct

SEQ ID NO: 613124 - DNA, 120 bp, Artificial Sequence
  ENSG00000176597_60 (sequence is synthesized)
gaagagttatatgaaaagaagtttccagtgccaatacctctgcatttccatttaccatgtgacctgaaaagcaatataaagtaactatacagagaaaaaagatcaaaatgcaacacgcca

SEQ ID NO: 613125 - DNA, 120 bp, Artificial Sequence
  ENSG00000176597_61 (sequence is synthesized)
aagtggttgtctttctaagtgggaaaatgataggcaacttaagtttttgtcttatttttttcctagattatttacagtgaatatgtaccacatttagaataataaaaaatcataaagata

SEQ ID NO: 613126 - DNA, 120 bp, Artificial Sequence
  ENSG00000176597_62 (sequence is synthesized)
agtttgctgtaagtttccttactttgttactgaggcccccagagctccacgcataagtggtgtgaccagaaaccttttaacaagacccgcctgagcctgcgttagagctcccgctcggaa

SEQ ID NO: 613127 - DNA, 120 bp, Artificial Sequence
  ENSG00000176601_0 (sequence is synthesized)
ttcaaagaaacagcagcttttggacattttaatgagttctatgccaaaaccagaaagacatgctgagtcattgcttgacatttgtcatgatacaaactcttctccaactgatttgatgac

SEQ ID NO: 613128 - DNA, 120 bp, Artificial Sequence
  ENSG00000176601_1 (sequence is synthesized)
agttaccaaaaatcaaaacatcatcttgcaaagcatcagcagaagtgaggagttcgaccaagatggtgactgcagtcattccacactggttaatgaagaagaagatcccagtggtggtag

SEQ ID NO: 613129 - DNA, 120 bp, Artificial Sequence
  ENSG00000176601_2 (sequence is synthesized)
acaggactggcaacccaggacagaaggtgttgagatcactgtaacttttccaagagatgtcagtcctccccaagaaatgagccaagaagacttaaaagaaaagaatctgataaactcatc

SEQ ID NO: 613130 - DNA, 120 bp, Artificial Sequence
  ENSG00000176601_3 (sequence is synthesized)
gcttcaagaatgggcacaagcacatgcagtttctcatccaaatgaaatagaaacggtggagctcaggaaaaagaagctgaccatgcggcccttagttttgcaaaaagaggaaagttccag

SEQ ID NO: 613131 - DNA, 120 bp, Artificial Sequence
  ENSG00000176601_4 (sequence is synthesized)
ggagctctgcaatgtgaacttgggctttttgctaccaagatcttgtttagaactgaacatttccaagtctgtaaccagagaagatgctcctcattttctgaaggagcagcaaagaaaatc

SEQ ID NO: 613132 - DNA, 120 bp, Artificial Sequence
  ENSG00000176601_5 (sequence is synthesized)
tgaagagttttcgacctctcatatgaagtacagtggccgaagcatcaagttccttctgccaccactgtcactcttgcccacgcgatctggtgtccttactatcccccaaaatcacaagtt

SEQ ID NO: 613133 - DNA, 120 bp, Artificial Sequence
  ENSG00000176601_6 (sequence is synthesized)
tccaaaagaaaaagaaagaaacattccaagtctcacatcttttgtgcctaagctctcagtgtctgttcgtcaatctgatgagctcagcccatcaaacgagcctccgggagccctagttaa

SEQ ID NO: 613134 - DNA, 120 bp, Artificial Sequence
  ENSG00000176601_7 (sequence is synthesized)
gtcgttgatggatccgactctcaggtcttctgatggcttcatttggtcaagaaacatgtgctcttttcctaagactaaccatcacaggcaatgcctggagaaggaggaaaactggaaatc

SEQ ID NO: 613135 - DNA, 120 bp, Artificial Sequence
  ENSG00000176601_8 (sequence is synthesized)
caaggaaatagaagaatgtaacaaaattgaaatcactcactttgaaaaagggcagtctttggtgtcttttgagaatttgaaggaaggcaatattcctgcagttagggaagaggatattga

SEQ ID NO: 613136 - DNA, 120 bp, Artificial Sequence
  ENSG00000176601_9 (sequence is synthesized)
ctgccatggtagtaaaacgcgaaaacctgaagaagagaactctcaatatctttcatcaagaaagaatgagagttcagtagccaaaaactatgaacaagatccagaaatagtatgtaccat

SEQ ID NO: 613137 - DNA, 120 bp, Artificial Sequence
  ENSG00000176601_10 (sequence is synthesized)
tccaagcaagttccaagaaacccagcattcagaaataactccaagccaggatgaagagatgagaaataataaagctgcttcaaaaagagtttcattacataaaaatgaagcaatggaacc

SEQ ID NO: 613138 - DNA, 120 bp, Artificial Sequence
  ENSG00000176601_11 (sequence is synthesized)
aaacaatattttagaagagtgtactgtacttaaaagcttatccagtgtagtctttgatgaccccattgataaactcccagaaggttgtagcagcatggagacaaacataaaaatatcaat

SEQ ID NO: 613139 - DNA, 120 bp, Artificial Sequence
  ENSG00000176601_12 (sequence is synthesized)
agcagaaagagccaaaccagaaatgagtaggatggtgcctcttatccacatcaccttccctgtggatggaagccccaaggaaccagtgatagccaaaccaagcctccaaacaagaaaggg

SEQ ID NO: 613140 - DNA, 120 bp, Artificial Sequence
  ENSG00000176601_13 (sequence is synthesized)
aaccattcataacaaccatagtgtcaacatacctgtacaccaagaaaatgacaagcataagatgaattcccataggagtaagttggattcaaagaccaagacaagtaagaagacacctca

SEQ ID NO: 613141 - DNA, 120 bp, Artificial Sequence
  ENSG00000176601_14 (sequence is synthesized)
gaattttgtgatttctactgaaggtcccattaagcctaccatgcataaaaccagcataaaaacacaaattttcccggctttgggacttgtggaccccaggccttggcaattgcccaggtt

SEQ ID NO: 613142 - DNA, 120 bp, Artificial Sequence
  ENSG00000176601_15 (sequence is synthesized)
tcaaaagaaaatgccacagatagcaaagaagcaatcaactcaccggactcagaaacctaaaaagcaatcatttccttgcatctgtaaaaatccaggaacacagaagtcatgtgttcctct

SEQ ID NO: 613143 - DNA, 120 bp, Artificial Sequence
  ENSG00000176601_16 (sequence is synthesized)
ctctgttcaaccgacagagccaagactaaattacctagatcttaagtatagtgatatgttcaaagaaatcaattcaactgctaatggacctggaatctatgaaatgtttgggacccctgt

SEQ ID NO: 613144 - DNA, 120 bp, Artificial Sequence
  ENSG00000176601_17 (sequence is synthesized)
ttattgtcatgtgcgagagactgaaagggatgaaaacacgtattaccgtgagatatgttcggctccatcaggcagacgtatcaccaataaatgtcgatcttcacacagtgagaggaagag

SEQ ID NO: 613145 - DNA, 120 bp, Artificial Sequence
  ENSG00000176601_18 (sequence is synthesized)
aagacttcatttggcattaaacaagagcacaaagtcttaatttctaaagaaaagagttccaaggctgtacatagcaacctacatgacattgaaaatggtgatggtatttcagaaccagac

SEQ ID NO: 613146 - DNA, 120 bp, Artificial Sequence
  ENSG00000176601_19 (sequence is synthesized)
tggcagataaagtcttcaggaaatgagtttctatcttccaaagatgaaattcatcccatgaacttggctcagacacctgagcagtccatgaaacagaatgaattccctcctgtctcagat

SEQ ID NO: 613147 - DNA, 120 bp, Artificial Sequence
  ENSG00000176601_20 (sequence is synthesized)
ttatccattgttgaagaagtttctatggaagagtctactggtgatagagacatttctaacaatcaaatactcaccacaagcctcagagatctgcaagaacttgaagagctacatcaccag

SEQ ID NO: 613148 - DNA, 120 bp, Artificial Sequence
  ENSG00000176601_21 (sequence is synthesized)
atcccatttatcccttcagaagacagctgggcagtgcccagtgagaagaattctaacaagtatgtacagcaagaaaagcagaatacagcatctcttagtaaagtaaatgccagccgaatt

SEQ ID NO: 613149 - DNA, 120 bp, Artificial Sequence
  ENSG00000176601_22 (sequence is synthesized)
ttaactaatgatctagagtttgatagtgtttcagatcactctaaaacacttacaaatttctctttccaagcaaaacaagaaagtgcatcttcccagacatatcaatattgggtacattat

SEQ ID NO: 613150 - DNA, 120 bp, Artificial Sequence
  ENSG00000176601_23 (sequence is synthesized)
ttggatcatgatagtttagcaaataagtcaatcacatatcaaatgtttggaaaaaccttaagtggcacaaattcaatttcccaagaaattatggactctgtaaataatgaagaattgaca

SEQ ID NO: 613151 - DNA, 120 bp, Artificial Sequence
  ENSG00000176601_24 (sequence is synthesized)
gatgaactattaggttgtctagctgcagaattattagctcttgatgagaaagataacaactcttgccaaaaaatggcaaatgaaacagatcctgaaaacctaaatcttgtcctcagatgg

SEQ ID NO: 613152 - DNA, 120 bp, Artificial Sequence
  ENSG00000176601_25 (sequence is synthesized)
agaggaagtaccccaaaagaaatgggcagagagacaacaaaagtcaaaatacagaggcatagtagtgggctcaggatatatgacagggaggagaaatttctcatctcaaatgaaaagaag

SEQ ID NO: 613153 - DNA, 120 bp, Artificial Sequence
  ENSG00000176601_26 (sequence is synthesized)
atattttctgaaaatagtttaaagtctgaagaacctatcctatggaccaagggtgagattcttggaaagggagcctacggcacagtatactgtggtctcactagtcaaggacagctaata

SEQ ID NO: 613154 - DNA, 120 bp, Artificial Sequence
  ENSG00000176601_27 (sequence is synthesized)
gctgtaaaacaggtggctttggatacctctaataaattagctgctgaaaaggaataccggaaactacaggaagaagtagatttgctcaaagcactgaaacatgtcaacattgtggcctat

SEQ ID NO: 613155 - DNA, 120 bp, Artificial Sequence
  ENSG00000176601_28 (sequence is synthesized)
ttggggacatgcttgcaagagaacactgtgagcattttcatggagtttgttcctggtggctcaatctctagtattataaaccgttttgggccattgcctgagatggtgttctgtaaatat

SEQ ID NO: 613156 - DNA, 120 bp, Artificial Sequence
  ENSG00000176601_29 (sequence is synthesized)
acgaaacaaatacttcaaggtgttgcttatctccatgagaactgtgtggtacatcgcgatatcaaaggaaataatgttatgctcatgccaactggaataataaagctgattgactttggc

SEQ ID NO: 613157 - DNA, 120 bp, Artificial Sequence
  ENSG00000176601_30 (sequence is synthesized)
tgtgccaggcgtttggcctgggcaggtttaaatggcacccacagtgacatgcttaagtccatgcatgggactccatattggatggccccagaagtcatcaatgagtctggctatggacgg

SEQ ID NO: 613158 - DNA, 120 bp, Artificial Sequence
  ENSG00000176601_31 (sequence is synthesized)
aaatcagatatctggagcattggttgtactgtgtttgagatggctacagggaagcctccactggcttccatggacaggatggccgccatgttttacatcggagcacaccgagggctgatg

SEQ ID NO: 613159 - DNA, 120 bp, Artificial Sequence
  ENSG00000176601_32 (sequence is synthesized)
cctcctttaccagaccacttctcagaaaatgcagcagactttgtgcgcatgtgcctgaccagggaccagcatgagcgaccttctgctctccagctcctgaagcactccttcttggagaga

SEQ ID NO: 613160 - DNA, 120 bp, Artificial Sequence
  ENSG00000176601_33 (sequence is synthesized)
agtcactgaatatacatcaagactttcttcccagttccactgcagatgctcccttgcttaattgtggggaatgatggctaagggatctttgtttccccactgaaaattcagtctaaccca

SEQ ID NO: 613161 - DNA, 120 bp, Artificial Sequence
  ENSG00000176601_34 (sequence is synthesized)
gtttaagcagatcctatggagtcattaactgaaagttgcagttacatattagcctcctcaagtgtcagacattattactcatagtatcagaaaacatgttcttaataacaacaaaaaact

SEQ ID NO: 613162 - DNA, 120 bp, Artificial Sequence
  ENSG00000176601_35 (sequence is synthesized)
atttcagtgtttacagttttgattgtccaggaactacattctctattgttttatatgacatttctttttatttttggcctgtcctgtcaattttaatgttgttagtttaaaataaattgt

SEQ ID NO: 613163 - DNA, 120 bp, Artificial Sequence
  ENSG00000176601_36 (sequence is synthesized)
tctatttgcagctaactaaagggtttgtgcatgcaggaccagcttaattaaagacaaaatttaaaaggaaaaattatttgggctgtacaacactgaaaaaaaaatctgaatctatgctgt

SEQ ID NO: 613164 - DNA, 120 bp, Artificial Sequence
  ENSG00000176601_37 (sequence is synthesized)
ttttaaatggatccctggttgaagtgtgggttacagctgtcccagaaatcagtgccacaatgaattaggatgatgttggctactgtttggcttggtgtttcttcaactgtgtgccacgtc

SEQ ID NO: 613165 - DNA, 120 bp, Artificial Sequence
  ENSG00000176601_38 (sequence is synthesized)
cctcagcaaaacacagcacagaagtggtttcaagaggtgatgtggaactcatctgtgactatattaccgaagtccaatccatcctcggaaaccttgactttcagcacccagagacgtgga

SEQ ID NO: 613166 - DNA, 120 bp, Artificial Sequence
  ENSG00000176601_39 (sequence is synthesized)
atacgcctctcattactgcagcagaggaaaatctaacagaggttgttggatttcttctggaaaagtgagtagatatcaccctttgcaattacagcaatcgaaccgcaattcatgtagcta

SEQ ID NO: 613167 - DNA, 120 bp, Artificial Sequence
  ENSG00000176601_40 (sequence is synthesized)
attgcaatatccaaagacaactcttggcagtcaatagaatccaggctccccaaatgcaacttctacaaagttcatggcaaggtgatcttgagcaagttcaacatttactgagatcctaaa

SEQ ID NO: 613168 - DNA, 120 bp, Artificial Sequence
  ENSG00000176601_41 (sequence is synthesized)
aatctctgaggcaagtattgttacctcagttttacagatgagaaaaactgaagtcaaaagattacacatttatcccaagttatatagctggggaaagatgaagccaggattctagccaat

SEQ ID NO: 613169 - DNA, 120 bp, Artificial Sequence
  ENSG00000176601_42 (sequence is synthesized)
tcaagccacttgactttaagccaatatgacatccatccaccatgtttctcatacccatcttggctccactgaaacactgaatttgcttaaacactttgcatttaggaagggaggtatcaa

SEQ ID NO: 613170 - DNA, 120 bp, Artificial Sequence
  ENSG00000176601_43 (sequence is synthesized)
cttagagaaagacaagggtttagaaagagaagggaaagtcaagtgtcacctgaggcattttgtgaataagttatgtcattaatttaataacaaggtattattgatttgcttctaggtata

SEQ ID NO: 613171 - DNA, 120 bp, Artificial Sequence
  ENSG00000176601_44 (sequence is synthesized)
agttttcgacctctcatatgaagtacagtggccgaagcatcaaggtaagattagtgctagcatttttgacttgagaattaaaaccaaacaactctattcactaatttagaaccaaatcct

SEQ ID NO: 613172 - DNA, 120 bp, Artificial Sequence
  ENSG00000176601_45 (sequence is synthesized)
cagcaattacacttgacccttcaacaatgcagggggtagggtcactgatgtccccaacacagtcaaaaatccacacataagctttgattcccccaaaacttagctactaatagcctaccg

SEQ ID NO: 613173 - DNA, 120 bp, Artificial Sequence
  ENSG00000176601_46 (sequence is synthesized)
ctggaataggtctggctctgggtccaggaggcttcagggatcagacaatgtcatcaggatctggtctctctctctctttgcctggctttttctcaggcacatatagtgactcaatggcca

SEQ ID NO: 613174 - DNA, 120 bp, Artificial Sequence
  ENSG00000176601_47 (sequence is synthesized)
ctgcatttctaacctctcatcctcccaggttcaagtccaatgggaaagaaatatcttccttcaacagctgaatatgttactggaagtttggagaatcattactagatggcaaaaacaaaa

SEQ ID NO: 613175 - DNA, 120 bp, Artificial Sequence
  ENSG00000176601_48 (sequence is synthesized)
tgtgcctgaccaggtaagaaactgaaagcaagaggaggaagataaatgcccggagattccaagtggcagacatttccctttcaatttatggcccattaaaagctctgttttggttatgaa

SEQ ID NO: 613176 - DNA, 120 bp, Artificial Sequence
  ENSG00000176601_49 (sequence is synthesized)
agaaaattgcagagggctgagccgaggaggtgcacccgcagatagagaggagcggtggggacatcaggactcaggaagtgagaggaggaggagaatcagaagagagttgcgggaagaaag

SEQ ID NO: 613177 - DNA, 120 bp, Artificial Sequence
  ENSG00000176601_50 (sequence is synthesized)
caattaaatgtcttatcaagttctgtcaatacttgcccaaatcaatgggtttgcaaaatttgttaaagatctacttatttaccaatgagacatcttcctaggaactggctagggtgaaat

SEQ ID NO: 613178 - DNA, 120 bp, Artificial Sequence
  ENSG00000176601_51 (sequence is synthesized)
gacatcatcttgcatttaaagtgaggggaaacattttgagccaaagaaacaaattggagatttcaagcgtcaagtgggggagtatttggtgaatcggaaaagccttagaaaattgcctgt

SEQ ID NO: 613179 - DNA, 120 bp, Artificial Sequence
  ENSG00000176601_52 (sequence is synthesized)
tttccccttccttatcttctctcctatctatggaattaaattgtgggtaaaatgttagaactgtaactgtaatgtaatggaaattaactagtgctgtgattttcaaatttttagccaggt

SEQ ID NO: 613180 - DNA, 120 bp, Artificial Sequence
  ENSG00000176601_53 (sequence is synthesized)
actctgctcatagaaatcttaaatcaaagaataaaataaaagcagacagatggctctagttaaagtgtgtatccatggggcggggaagagttaaggagtagggctgtgggtgctggagcc

SEQ ID NO: 613181 - DNA, 120 bp, Artificial Sequence
  ENSG00000176601_54 (sequence is synthesized)
cactctaggatactgcacagcagccccaaacccacctacctagcaaggctcaactttaattggaggacaagaaaggcctgagactcaaagtcaatttcctgtctttcaagtaagtttgcc

SEQ ID NO: 613182 - DNA, 120 bp, Artificial Sequence
  ENSG00000176601_55 (sequence is synthesized)
ttcttatccctagatgaaaaactccagtgtcccatcttttagcaagcacatatggcaacccccaactcccagggggttcattttgcctttctgaataaatcttagaatctacaggtctcc

SEQ ID NO: 613183 - DNA, 120 bp, Artificial Sequence
  ENSG00000176601_56 (sequence is synthesized)
ctctctgccaatgaatgtgcctctctttcagtctctgtctctctctcccagcacatgtgtatcagcctgtcctggctgatttcaggatgattacatgggccagggcaggaatgccactcc

SEQ ID NO: 613184 - DNA, 120 bp, Artificial Sequence
  ENSG00000176601_57 (sequence is synthesized)
aggggtacagtttttggcattgctagatgcagagaacccttaggtttccagcgtggattttgtggacagagccccagtcactgagctgcccaccctctccaaaaaaaaaaaaaaaaaaaa

SEQ ID NO: 613185 - DNA, 120 bp, Artificial Sequence
  ENSG00000176601_58 (sequence is synthesized)
agggcctgtctccttctcactccagagagcttgggagctgaaccagctctattttacatattatcaggagcttttccaaaccaccatctcatgtagtcatcatagaaatctgggaggcag

SEQ ID NO: 613186 - DNA, 120 bp, Artificial Sequence
  ENSG00000176601_59 (sequence is synthesized)
agaactgcgagatgtgatgttgacagcggagacacagagacaaccgctgagaaacttgagtcaaagatgactaaattttaaggcctggaaagtgcaggagatggaaatacaaccaacaaa

SEQ ID NO: 613187 - DNA, 120 bp, Artificial Sequence
  ENSG00000176601_60 (sequence is synthesized)
atgggagcacattggaactttcaagtagcaagtttctgtaggactgggcttgtgggaaaggaccggttgaaagaaagacatgctgagtcattgcttgacatttgtcatgatacaaactct

SEQ ID NO: 613188 - DNA, 120 bp, Artificial Sequence
  ENSG00000176601_61 (sequence is synthesized)
tttttttttaaataagagggttaataagcaatctcttatgttacaattgcagtttcctaaagctgttacttagttatcttgtcatcaaataagaacagatggcctgagctctttctcagt

SEQ ID NO: 613189 - DNA, 120 bp, Artificial Sequence
  ENSG00000176601_62 (sequence is synthesized)
acttcatatgaattttgttttgaaaaaaaaaggaggagggagcttcaagaacaaaattatagtcaagaatacaagatattgtaaaaggatcagttagtataatggaatgaaaagggaatt

SEQ ID NO: 613190 - DNA, 120 bp, Artificial Sequence
  ENSG00000176601_63 (sequence is synthesized)
ttgaagctacttcagcctagtgttgagaaatagtttggccaattgataaaagtggagattcctggacgtcatcccagagatgttcagtaggtctggattggggtccagaatactggaaat

SEQ ID NO: 613191 - DNA, 120 bp, Artificial Sequence
  ENSG00000176605_0 (sequence is synthesized)
aagatgcattatcatggctgtaaacacaggttctgcacgtgtctaagttcagccccaaacccacatgaagaacttatttccagacagctcctactcttatggtggctccagaccctgccc

SEQ ID NO: 613192 - DNA, 120 bp, Artificial Sequence
  ENSG00000176605_1 (sequence is synthesized)
catgcagaaggcacttctcaagttccaggaccagggcttcagccacagcactcgcaaaaccccacagatacagtgccaatgacagaaattaagattaactgggggcgacacagatttctg

SEQ ID NO: 613193 - DNA, 120 bp, Artificial Sequence
  ENSG00000176605_2 (sequence is synthesized)
tgaatgccagtgctgtcagatgcttcctgatagtactttctagagtaaaagaacttcgggaaaagtaaaagcagcaaatggtaacaccctcatggagatctcagggtgtagaggcaagca

SEQ ID NO: 613194 - DNA, 120 bp, Artificial Sequence
  ENSG00000176605_3 (sequence is synthesized)
ctgaaggcccatgatcagccgtgggagccacgggaatcaattgcttccagtacgactggatgcatcggaaagagcctggggcaaggctggaggccacaagaggagctgccaggccacata

SEQ ID NO: 613195 - DNA, 120 bp, Artificial Sequence
  ENSG00000176605_4 (sequence is synthesized)
agcagggaacaaagccgatgatcacacgcccatcagtgagccaacttggtgaagggaaatgcccaagttctcagcacctgcagagcctaagacataacaagcagcatgccctgacgctca

SEQ ID NO: 613196 - DNA, 120 bp, Artificial Sequence
  ENSG00000176605_5 (sequence is synthesized)
tcatgtaatcaccaaataatgtctgcttcgaccatctctgcattttgtgctacaccaagatttaagcagctgttcaaaggaactgtagaacagatgtcacagatgtaactattcttgaaa

SEQ ID NO: 613197 - DNA, 120 bp, Artificial Sequence
  ENSG00000176605_6 (sequence is synthesized)
ggaagtcagatttcatagatggaaagactgcccttttccatttgcctcctccagacccataactttggataggggggttttattgtccgtgaggcttatgcatatgtcagaagaatgtcc

SEQ ID NO: 613198 - DNA, 120 bp, Artificial Sequence
  ENSG00000176605_7 (sequence is synthesized)
aagcagaggaatctaagtggcagaccccccaggataggaaagaagaaggacgctcgtgctgacacttccagaacactcttcacgttttgtgacatatgtgcttgtcgagtgatcttaaga

SEQ ID NO: 613199 - DNA, 120 bp, Artificial Sequence
  ENSG00000176605_8 (sequence is synthesized)
cagctggatgtccgaaccatgcagtaatagcagagaacctgcggaaggagaagcttcccaggacgttctgagggcttatgccgggtgcaggctttccttcccgcaacatccctgagtcca

SEQ ID NO: 613200 - DNA, 120 bp, Artificial Sequence
  ENSG00000176605_9 (sequence is synthesized)
gagaagaaataatcccctgccctgtgggccaagcacttacagcaacagcactttgagtttgctgtgcttagattcacttgtggaacttgttaaaaatataaaattccagaccccacctcc

SEQ ID NO: 613201 - DNA, 120 bp, Artificial Sequence
  ENSG00000176605_10 (sequence is synthesized)
gattccaggatccacacatcagaggcatctgccactgagctgggtgtgaaatctgaagaccagggtgtagaggcaagcactgaaggcccatgatcagccgtgggagccacgggaatcaat

SEQ ID NO: 613202 - DNA, 80 bp, Artificial Sequence
  ENSG00000176619_0 (sequence is synthesized)
atcttgcagccggcggcgcggattgaatgagcccgccgagcccgggccgccgtcgggagcagcgcaggccgcgagccgcc

SEQ ID NO: 613203 - DNA, 120 bp, Artificial Sequence
  ENSG00000176619_1 (sequence is synthesized)
ccgccacgccgctgtcgcccacgcgcctgtcgcggctgcaggagaaggaggagctgcgcgagctcaacgaccgcctggcgcactacatcgaccgcgtccgcgcgctggagctggagaacg

SEQ ID NO: 613204 - DNA, 120 bp, Artificial Sequence
  ENSG00000176619_2 (sequence is synthesized)
accggctcctgctcaagatctcagagaaggaggaggtgaccacgcgcgaggtgagtggcatcaaggcgctgtacgagtcggagctggccgatgcccggagagtcctggatgagacggctc

SEQ ID NO: 613205 - DNA, 120 bp, Artificial Sequence
  ENSG00000176619_3 (sequence is synthesized)
gagagcgtgcccggctgcagatagagattgggaagctgagggcagagttggacgaggtcaacaagagcgccaagaagagggagggcgagcttacggtggcccagggccgtgtgaaggacc

SEQ ID NO: 613206 - DNA, 120 bp, Artificial Sequence
  ENSG00000176619_4 (sequence is synthesized)
tggagtccctgttccaccggagcgaggtggagctggcagctgccctcagcgacaagcgcggcctggagagtgacgtggctgagctgcgggcccagctggccaaggccgaggacggtcatg

SEQ ID NO: 613207 - DNA, 120 bp, Artificial Sequence
  ENSG00000176619_5 (sequence is synthesized)
cagtggccaaaaagcagctggagaaggagacgctgatgcgtgtggacctggagaaccgctgccagagcctgcaggaggagctggacttccggaagagtgtgttcgaggaggaggtgcggg

SEQ ID NO: 613208 - DNA, 120 bp, Artificial Sequence
  ENSG00000176619_6 (sequence is synthesized)
agacgcggcggcggcacgagcggcgcctggtggaggtggacagcagccggcagcaggagtacgacttcaagatggcacaggcgctggaggagctgcggagccagcacgacgagcaagtgc

SEQ ID NO: 613209 - DNA, 120 bp, Artificial Sequence
  ENSG00000176619_7 (sequence is synthesized)
ggctctacaagctggagctggagcagacctaccaggccaagctggacagcgccaagctgagctctgaccagaacgacaaggcggccagtgcggctcgcgaggagctgaaggaggcccgca

SEQ ID NO: 613210 - DNA, 120 bp, Artificial Sequence
  ENSG00000176619_8 (sequence is synthesized)
tgcgcctggagtccctcagctaccagctctccggcctccagaagcaggccagtgccgctgaagatcgcattcgggagctggaggaggccatggccggggagcgggacaagttccggaaga

SEQ ID NO: 613211 - DNA, 120 bp, Artificial Sequence
  ENSG00000176619_9 (sequence is synthesized)
tgctggacgccaaggagcaggagatgacggagatgcgggacgtgatgcagcagcagctggccgagtaccaggagctgctggacgtgaagctggccctggacatggagatcaacgcctacc

SEQ ID NO: 613212 - DNA, 120 bp, Artificial Sequence
  ENSG00000176619_10 (sequence is synthesized)
ggaagctcctggagggcgaggaggagaggctgaagctgtcccccagcccatcctcgcgcgtcaccgtctcacgagccacctcgagcagcagcggcagcttgtccgccaccgggcgcctgg

SEQ ID NO: 613213 - DNA, 120 bp, Artificial Sequence
  ENSG00000176619_11 (sequence is synthesized)
gccgcagtaagcggaagcggctggaggtggaggagcccttgggcagcggcccaagcgtcctgggcacgggcacgggtggcagcggtggcttccacctggcccagcaggcctcggcctcgg

SEQ ID NO: 613214 - DNA, 120 bp, Artificial Sequence
  ENSG00000176619_12 (sequence is synthesized)
gtagcgtcagcatcgaggagatcgacctggagggcaagtttgtgcagctcaagaacaactcggacaaggatcagtctctggggaactggagaatcaagaggcaggtcttggagggggagg

SEQ ID NO: 613215 - DNA, 120 bp, Artificial Sequence
  ENSG00000176619_13 (sequence is synthesized)
agatcgcctacaagttcacgcccaagtacatcctgcgcgccggccagatggtcacggtgtgggcagctggtgcgggggtggcccacagccccccctcgacgctggtgtggaagggccaga

SEQ ID NO: 613216 - DNA, 120 bp, Artificial Sequence
  ENSG00000176619_14 (sequence is synthesized)
gcagctggggcacgggcgagagcttccgcaccgtcctggttaacgcggatggcgaggaagtggccatgaggactgtgaagaagtcctcggtgatgcgtgagaatgagaatggggaggaag

SEQ ID NO: 613217 - DNA, 120 bp, Artificial Sequence
  ENSG00000176619_15 (sequence is synthesized)
aggaggaggaagccgagtttggcgaggaggatcttttccaccaacagggggacccgaggaccacctcaagaggctgctacgtgatgtgaacccacactcctcatccacacacctttcttt

SEQ ID NO: 613218 - DNA, 120 bp, Artificial Sequence
  ENSG00000176619_16 (sequence is synthesized)
acccagagccactgaaaactatttttatatcattggctttctttagttcttgatacatttctagagaatttctaagcgaactgccagaacgtgtgggtgggtctcccccagccctccctc

SEQ ID NO: 613219 - DNA, 120 bp, Artificial Sequence
  ENSG00000176619_17 (sequence is synthesized)
ctggcgggtctcctccagcctcacttcgctgccacttcgccgctgccccggagacttttcaatcccaccccactcctcatctcaccatttggtcaaattggaagcccagggccaggaccc

SEQ ID NO: 613220 - DNA, 120 bp, Artificial Sequence
  ENSG00000176619_18 (sequence is synthesized)
ggaggtttagaagatgcttgggcttggagggaggagggccggcgaggctagcgaggggacaggagacggccctgctgcggacggagcgcggaaactgcgtaggaattcagtggtggtggg

SEQ ID NO: 613221 - DNA, 120 bp, Artificial Sequence
  ENSG00000176619_19 (sequence is synthesized)
attctggctgcccagcttcggacagcgggaactcctcaggcagccacgcagcgggtgtgggccagcatggggatggcgtggcccccagggcgggttttcactccgctgcctgggcttcca

SEQ ID NO: 613222 - DNA, 120 bp, Artificial Sequence
  ENSG00000176619_20 (sequence is synthesized)
gattcccgttctggcagcgcaccggccgggtttctcggaccgttgactttatttgggggagttttcccgcagttcagttcctgactgtgcaaggccaacagggcaggggaggggaagacc

SEQ ID NO: 613223 - DNA, 120 bp, Artificial Sequence
  ENSG00000176619_21 (sequence is synthesized)
tggggaaggaagaatgaggacagtcccgtcgtaagacctgtcacaacaataagcagggaggggagatgtggaggggacacatctggttgccttggaggcagaagctgtgagtttcagaac

SEQ ID NO: 613224 - DNA, 120 bp, Artificial Sequence
  ENSG00000176619_22 (sequence is synthesized)
agctgtctgcagggaacgccaccatgttgaccctctggaggagagcgctgtggagcccctcccgtgttccagctccgtctgccctgtgcctatatatacacatgcgtctatccatactgt

SEQ ID NO: 613225 - DNA, 120 bp, Artificial Sequence
  ENSG00000176619_23 (sequence is synthesized)
gcttttatctgtgattttctcgctgaaaccatgtttctcagacaggccaaggccacctgactcctatcacgacgcacccaagcccctcagtccagcttcccaatgcctggcacccccctt

SEQ ID NO: 613226 - DNA, 120 bp, Artificial Sequence
  ENSG00000176619_24 (sequence is synthesized)
cggcaatagctcaccgtttacaccctccctcatagatacacagaagttatttttttaatggatatttatttttttacattggtcagtacacaggtcaggagctcacgccagggccttgag

SEQ ID NO: 613227 - DNA, 120 bp, Artificial Sequence
  ENSG00000176619_25 (sequence is synthesized)
gacaggctgaccctcctccccggggtggcgtggggctggggcaccctccgacggcagagcctccttcagaaagtgcagctcaagtcttaaagacaccaaaactgagccatgggcacgcgc

SEQ ID NO: 613228 - DNA, 120 bp, Artificial Sequence
  ENSG00000176619_26 (sequence is synthesized)
cgtctccgggccatggcgttcactgcagggcgggggcggcaccgctcccctgtgactgcatcccgcctccctggggacctgcctgtggcaggaaggaatggggggccccagccccaggcc

SEQ ID NO: 613229 - DNA, 120 bp, Artificial Sequence
  ENSG00000176619_27 (sequence is synthesized)
gggaaggagccagcggccgacaaagcagaaacacccgctgctccacgtagcccctgctcgctgtccttgctctcagaagtcccggtcccatgtagatagaggggggcgcatcttaccaaa

SEQ ID NO: 613230 - DNA, 120 bp, Artificial Sequence
  ENSG00000176619_28 (sequence is synthesized)
gcatttcctcctggaggctacgccgctgtgctcccagtcaggcggctggtagggagctttgcctgccccggggataccctctgccagccgctggaagtgggaatgctggcgacagactgt

SEQ ID NO: 613231 - DNA, 120 bp, Artificial Sequence
  ENSG00000176619_29 (sequence is synthesized)
gtcctctttcccaccttcatagcaggaatcacccggacccgactggctgggcttcgtgctagcgagggttctgggggtgggtcttggtgatcttgtcctatggggagtctgcagtggtct

SEQ ID NO: 613232 - DNA, 120 bp, Artificial Sequence
  ENSG00000176619_30 (sequence is synthesized)
cagccacatcctatgtattttggctctggaggagcaaagctgtatcctggagttggtctgtgatttgccgacagccttgcaggctgggctcagggacaaagtcccccccaaaacccgcag

SEQ ID NO: 613233 - DNA, 120 bp, Artificial Sequence
  ENSG00000176619_31 (sequence is synthesized)
gtcctcatgtccagacgctgcccagtcctgtcctgaaaacagcacgccccaggcccacagaaccccccaccctacatttgccttgggtggagctgggggtggtcctaggactgcgggtgc

SEQ ID NO: 613234 - DNA, 120 bp, Artificial Sequence
  ENSG00000176619_32 (sequence is synthesized)
ccttagctgaagggggtggggagaagcgtggactgggcagcctgtgggtaattggaggttcattgagaattgagtctttggaaacactaagaaaatcaaatttttaaaagttatttatgg

SEQ ID NO: 613235 - DNA, 120 bp, Artificial Sequence
  ENSG00000176619_33 (sequence is synthesized)
cctgggaaacaatttgcatttgtccccaaatacgcttagctgtgtgccgcttagaacgatgcgaaaccatccctctgtgtaagcccgtgccgtgtgactcgaagcctagcgccctccctg

SEQ ID NO: 613236 - DNA, 120 bp, Artificial Sequence
  ENSG00000176619_34 (sequence is synthesized)
cgaagcatcagacgccacccagccctggggggaggcccacgcctgctggaccaacgcgggttctggggtgcacagcgccaggttaacgctgaagcctgccccgctgagcccaggagccgg

SEQ ID NO: 613237 - DNA, 120 bp, Artificial Sequence
  ENSG00000176619_35 (sequence is synthesized)
gaggcctgcgggctgacccagaatccgatcatgcacctgtcctcatgccagcggctttggctggggttggtctgaagcctgcacgcggcagttctttgttaaagatctgagggactcctc

SEQ ID NO: 613238 - DNA, 120 bp, Artificial Sequence
  ENSG00000176619_36 (sequence is synthesized)
agtcctggggcgtcgccgcctgcagcctcttccaagccctgcgtccagcgagcgtcacagcacaacctgcaaaaacggagctgggctgcagctggggctggcatggactttcatttcaga

SEQ ID NO: 613239 - DNA, 120 bp, Artificial Sequence
  ENSG00000176619_37 (sequence is synthesized)
gattcggtttttaagaagatgcatgcctaatgtgttcttttttttttccaatgatttgtaatatacattttatgactggaaacttttttgtacaacactccaataaacattttgatttta

SEQ ID NO: 613240 - DNA, 120 bp, Artificial Sequence
  ENSG00000176619_38 (sequence is synthesized)
tggtggagggatgtccaggccgctcaggagctgcgccccgctctggccaggcccagggagtggggggggccccacaggagccagaggggaggccgccagggcagttgtgaaggggcctgt

SEQ ID NO: 613241 - DNA, 120 bp, Artificial Sequence
  ENSG00000176619_39 (sequence is synthesized)
ggggaaacctgtgagacagcccgtgaagagactcacgagagcttctgtgcgggggcccaggaacgtgccccaggtggaacccacagggcacctgggaaaagacccacgaaggcggtgcag

SEQ ID NO: 613242 - DNA, 120 bp, Artificial Sequence
  ENSG00000176619_40 (sequence is synthesized)
acagtgagcctccgacgctgttgcacaagctgactcttcgtcacgtgatgcgaccgggctccgccccggcggcaacacgctgtatagacgcgccgggtgcctcgtgcgcatgcgcggcag

SEQ ID NO: 613243 - DNA, 120 bp, Artificial Sequence
  ENSG00000176619_41 (sequence is synthesized)
gcccttcgggacgagctggaggcagagcgtgagtacaaagtgatcggcctcggccgcacgtagtagcccccctactccccggccaagtcagggcctccctcttcccgcggagtcgcaacc

SEQ ID NO: 613244 - DNA, 120 bp, Artificial Sequence
  ENSG00000176619_42 (sequence is synthesized)
acgggtagctcgtgtaggtaacggcaggtccaggcctccgcatgagcggagggccccccgcgcgaccttgaatggcccgggcgcgcgcggtcgtgtgggagttgtagtcctccgtccccg

SEQ ID NO: 613245 - DNA, 120 bp, Artificial Sequence
  ENSG00000176623_0 (sequence is synthesized)
cctttagccccgcccgcctccgtagctgcctgaagtagtgcagggtcagcccgcaagttgcaggtcatggcgctggctgctcgactgtggcgccttctgcctttccgacgtggagccgcc

SEQ ID NO: 613246 - DNA, 120 bp, Artificial Sequence
  ENSG00000176623_1 (sequence is synthesized)
ccggggtctcgtctccctgcggggacttcgggcagccgcgggcattgcggcccctgtcgattccgcggcttcgaggtaatgggaaacccaggaactttcaaaagaggccttttactctca

SEQ ID NO: 613247 - DNA, 120 bp, Artificial Sequence
  ENSG00000176623_2 (sequence is synthesized)
gctttgtcgtatttgggttttgaaacttaccaggttatctctcaggctgctgtggttcatgccacagccaaagttgaagaaatacttgaacaagcagactacctgtatgaaagcggagaa

SEQ ID NO: 613248 - DNA, 120 bp, Artificial Sequence
  ENSG00000176623_3 (sequence is synthesized)
acagaaaaactttatcagttgctaacccaatacaaggaaagtgaagatgcagagttactgtggcgtttggcacgggcatcacgtgatgtagctcagcttagcagaacctcagaagaggag

SEQ ID NO: 613249 - DNA, 120 bp, Artificial Sequence
  ENSG00000176623_4 (sequence is synthesized)
aaaaagctattggtgtatgaagccctagagtatgcaaaaagagcactagaaaaaaatgaatcaagttttgcatctcataagtggtatgcaatctgccttagtgatgttggagattatgaa

SEQ ID NO: 613250 - DNA, 120 bp, Artificial Sequence
  ENSG00000176623_5 (sequence is synthesized)
ggcatcaaggctaaaattgcaaatgcatatatcatcaaggagcattttgagaaagcaattgaactgaaccctaaagatgctacttcaattcaccttatgggtatttggtgctatacattt

SEQ ID NO: 613251 - DNA, 120 bp, Artificial Sequence
  ENSG00000176623_6 (sequence is synthesized)
gccgaaatgccttggtatcaaagaagaattgctaaaatgctgtttgcaactcctcctagttccacctatgagaaggccttaggctactttcacagggcagaacaagtggatccaaacttc

SEQ ID NO: 613252 - DNA, 120 bp, Artificial Sequence
  ENSG00000176623_7 (sequence is synthesized)
tacagcaaaaacttacttcttttaggaaagacatacttgaaactacacaacaaaaagcttgctgctttctggctaatgaaagccaaggactatccagcacacacagaggaggataaacag

SEQ ID NO: 613253 - DNA, 120 bp, Artificial Sequence
  ENSG00000176623_8 (sequence is synthesized)
atacagacagaagctgctcagttgcttacaagtttcagtgagaagaattgagaacttttcagagaagatttatgaaatagctaataaacattgccttttcttttaattctaaacttaata

SEQ ID NO: 613254 - DNA, 120 bp, Artificial Sequence
  ENSG00000176623_9 (sequence is synthesized)
tatgaactataactgttctacggctttttaaatgttgtgaccatttaaccgtgtaaatataaaatattctaggcttcttcacaaataatagggtaaaataaataatcgccataagagtgg

SEQ ID NO: 613255 - DNA, 120 bp, Artificial Sequence
  ENSG00000176623_10 (sequence is synthesized)
tagaaataaatctccatggctcaggcaaagagattattttgcatcctggataccagcaatgcaaaatggtatgagatttctaaggattgatcacattgggatgggagatcaagcaaagaa

SEQ ID NO: 613256 - DNA, 120 bp, Artificial Sequence
  ENSG00000176623_11 (sequence is synthesized)
atatttgtagaggaggggaaatggatctataggggatatacagggggatggattttcaaattggattgattctaagttgaaatcttgaagagaaggtgtggtgacagtggttaggatgtt

SEQ ID NO: 613257 - DNA, 90 bp, Artificial Sequence
  ENSG00000176623_12 (sequence is synthesized)
gatgactaaaaatggagtagtttccttgtttcccaggctggtgtgcagtggcacaatctcggcccactgcagcctccgcctcccgggttc

SEQ ID NO: 613258 - DNA, 90 bp, Artificial Sequence
  ENSG00000176623_13 (sequence is synthesized)
actttaaatgtggtgtagtctcatggtaaactgaatttgtcatcagatgcaaagttctattccctaatggaatggaaggaacacaaaact

SEQ ID NO: 613259 - DNA, 120 bp, Artificial Sequence
  ENSG00000176623_14 (sequence is synthesized)
aaagttctattccctaatggaatggaaggaacacaaaacttaagagtgaaatggaatactaagatgtttttaaataggcaggactatgctactcacttgaggctggagtgccaccactgc

SEQ ID NO: 613260 - DNA, 120 bp, Artificial Sequence
  ENSG00000176623_15 (sequence is synthesized)
aaaatctttttaagttttgtaaaaaggagcatcttgaatccacttagataaagacagactgtgtgtgtaggtggatttttcccaaaggatttgggaattgtaatgttacaatgaactgta

SEQ ID NO: 613261 - DNA, 120 bp, Artificial Sequence
  ENSG00000176623_16 (sequence is synthesized)
tggatatgtttgtcatgtacattttcaaacaaaaaggaaaactgaaagtagtgatctttgtatacccatctcttagattcagtgattttgctatataggttgtgtatcccttatctgaaa

SEQ ID NO: 613262 - DNA, 120 bp, Artificial Sequence
  ENSG00000176623_17 (sequence is synthesized)
tacttgggactagtagaagcatcttggatttgggatgtttttccaaattttggaatacctgcatacacacaataagatatcttggagatgggacccaagtttaaacacaaattcacttgt

SEQ ID NO: 613263 - DNA, 120 bp, Artificial Sequence
  ENSG00000176623_18 (sequence is synthesized)
ttcatatataccttatgcacatagcttgaaggtaactttatataacattatttttaataattttgtgcattgagaccaagtttgcataccttgaaccatcagaaagcaaaggtgtcatta

SEQ ID NO: 613264 - DNA, 120 bp, Artificial Sequence
  ENSG00000176623_19 (sequence is synthesized)
tctcagccactcatgtgggtaatttgtggttggttgatgtcaccatcattcctgactgaatgtatatgctaccaataagcagttattttcttatacttattcatgcataagtacttaaca

SEQ ID NO: 613265 - DNA, 120 bp, Artificial Sequence
  ENSG00000176623_20 (sequence is synthesized)
gtaaaaaatatgacataactcgcacaggaacaaggatggcaaaaaaaaaaatatgacacaccactgatacagtgaaaaaataatgtggtcagggtagctaggcaacagtagcatcaccag

SEQ ID NO: 613266 - DNA, 120 bp, Artificial Sequence
  ENSG00000176623_21 (sequence is synthesized)
aaacctgtatcagctgttaaacggcaacaacaatggcaggctttcagtttcccacttaatgatgctgtattttaaaaggttattgtatactgtaattttatttttgtaggtgaagagaaa

SEQ ID NO: 613267 - DNA, 120 bp, Artificial Sequence
  ENSG00000176623_22 (sequence is synthesized)
cagaagcagctgaagggccaggaagtgggtctttctagggatgtggcattctgctggatggctttttaaaatgggttttttcctttagggagaccgaataaactgtgttgtgcacctgca

SEQ ID NO: 613268 - DNA, 120 bp, Artificial Sequence
  ENSG00000176623_23 (sequence is synthesized)
gactccgggctgcatgtcagctccttgccagtaggctggcgcttcgaggccattctggaggccagtcgcttactgaaaaggcaaaactgactttaaggtaatgggaaacccaggaacttt

SEQ ID NO: 613269 - DNA, 120 bp, Artificial Sequence
  ENSG00000176623_24 (sequence is synthesized)
gcccccacctgattgttcttgtgtggattccagagctgactgctggattgagatgcttatttccccacgtacatgtatatcaaagcttgaaaattaccagagtgttcataataaggattt

SEQ ID NO: 613270 - DNA, 120 bp, Artificial Sequence
  ENSG00000176623_25 (sequence is synthesized)
ggaaaaggagtctattcaaccaagcagatctctgcctttctttcgtctttactatgaattctgaataaaatggagaacacactctcaatatgtagaaaaataaaattttggcaaaacaat

SEQ ID NO: 613271 - DNA, 120 bp, Artificial Sequence
  ENSG00000176623_26 (sequence is synthesized)
acagcgccattctaccatgtgttcacacatgtggagctctgattcagtgagggacttgagcaatttctaatgatccaattcaactgtgttatcacaaggcttaacacttattatccttga

SEQ ID NO: 613272 - DNA, 120 bp, Artificial Sequence
  ENSG00000176623_27 (sequence is synthesized)
ccattattttaagatgatttacttcctgacttaaatataatatagcagtagatctttgagacaatgcttttttaatattgtcttctttaatcttttttattatgtttgggctctttgtgt

SEQ ID NO: 613273 - DNA, 120 bp, Artificial Sequence
  ENSG00000176623_28 (sequence is synthesized)
agagaaggagtggggtttgcccccacgcgccccagaagctgcctgctacccgcccttcttgtgcgaaatgtaaaacaggacgggaaagaaccttgaccgctgtgaaattattctccctgt

SEQ ID NO: 613274 - DNA, 120 bp, Artificial Sequence
  ENSG00000176623_29 (sequence is synthesized)
aacttaagtggtggcggccccgcgctgcctaaggaatgtggtgaaccgaggaaagaactcggggccactgtgcctggaacgcccggacaggtcccttccattttgcaaacctccactatc

SEQ ID NO: 613275 - DNA, 120 bp, Artificial Sequence
  ENSG00000176623_30 (sequence is synthesized)
cttatttccccacgtacatgtatatcaaaggttctgtgtagcctcacctagtgcatcgtaatttcttacttgagggagaccagcaccctgaaaacgaactggaaagctgccttcttcagt

SEQ ID NO: 613276 - DNA, 120 bp, Artificial Sequence
  ENSG00000176623_31 (sequence is synthesized)
caaatctgctaaatcatacctacaatgaatgatattcaataacttctgtcatggcaaaatttatacagcagtggtaccatttgtaattctaatacttaactcttttatggtatacgcagt

SEQ ID NO: 613277 - DNA, 120 bp, Artificial Sequence
  ENSG00000176623_32 (sequence is synthesized)
atttagttactatcaccaggtggatgttacgggttgcctgctacaatgcagaattattcctgtttgacacacatggcagatcgagttaacatttctaaaacataaaagtcatgggatgtg

SEQ ID NO: 613278 - DNA, 120 bp, Artificial Sequence
  ENSG00000176623_33 (sequence is synthesized)
tactaaagtggaagagctgagagtctcatctggtcactgtcaagacattttattgttataatgtcctatctggtttttggaaactcttagaaaccccactttataaacttaaatttcaca

SEQ ID NO: 613279 - DNA, 79 bp, Artificial Sequence
  ENSG00000176623_34 (sequence is synthesized)
atgcccagttgaagaaatacttgaacaagcagactacctgtatgaaagcggagaaacagaaaaactttatcagttgcta

SEQ ID NO: 613280 - DNA, 120 bp, Artificial Sequence
  ENSG00000176623_35 (sequence is synthesized)
tttaaaagtcatatttttctgaatagatttttgttttcattatctattgctgtatatcaaaccacctatgataacagtggagtagagccatgacagtttgttatttcttttttttttttt

SEQ ID NO: 613281 - DNA, 120 bp, Artificial Sequence
  ENSG00000176623_36 (sequence is synthesized)
ccaaagtgcggcaatattagaacccaaggaaggaaaaactggcaaagttgtcatatgccaagtggccattgcctcctgaaatgaaggtaggttcacttggtctctcctaagcagaagaga

SEQ ID NO: 613282 - DNA, 120 bp, Artificial Sequence
  ENSG00000176623_37 (sequence is synthesized)
tgggataagaaaggaatcaagtagcagcattcagaagcagtcctgggttcatcctgatgaggtctctcattcagggagaggtggctttcccatgctgggagggaggtggaaggaggcatg

SEQ ID NO: 613283 - DNA, 120 bp, Artificial Sequence
  ENSG00000176623_38 (sequence is synthesized)
acttagacattggtggtggtctccttagcagcctggatgctgttcatctccatgatgccatccttcccagatctatctgcaccatgtgcctgccttttaaaggcccatgtgatatcctca

SEQ ID NO: 613284 - DNA, 120 bp, Artificial Sequence
  ENSG00000176623_39 (sequence is synthesized)
aaagccctgccatgggtctcagggactttgaagaaggtaaaggtcaagaaggtgatgaggaagctggcgaagataataaaaatacaggctcctaaataataagcagcagaggggaagagc

SEQ ID NO: 613285 - DNA, 120 bp, Artificial Sequence
  ENSG00000176624_0 (sequence is synthesized)
attcggagagcggcgtggggcgtagccgccgccgccgcgcgcgccgggggctggttaaggccatgaaacaaaagaaacactgagaggggagccgctgccacctccaccagcccgccccgc

SEQ ID NO: 613286 - DNA, 120 bp, Artificial Sequence
  ENSG00000176624_1 (sequence is synthesized)
cgccgtccccacccacccacctagttacctacctctgcctccttcccctgcccctccaccccgccctctccggtctccgggcggccctggcgctcctcggcccgggtccccagccccgcc

SEQ ID NO: 613287 - DNA, 120 bp, Artificial Sequence
  ENSG00000176624_2 (sequence is synthesized)
gcctccccagaggaaaggtgtttgcgagctgagcagggccctggccctgtccgccatggggctcgccgcctgccgcgcctgacccggccgccgccgccgccattgacagcgcgccgccgc

SEQ ID NO: 613288 - DNA, 80 bp, Artificial Sequence
  ENSG00000176624_3 (sequence is synthesized)
ccgccgccaccgccgcctctgccgccgccctcgggcggcccggagctcgagggggacgggctcctgctgagggagcgctt

SEQ ID NO: 613289 - DNA, 80 bp, Artificial Sequence
  ENSG00000176624_4 (sequence is synthesized)
gctcgagggggacgggctcctgctgagggagcgcttggccgcgctaggcctcgacgaccccagcccggcggagcccggcg

SEQ ID NO: 613290 - DNA, 120 bp, Artificial Sequence
  ENSG00000176624_5 (sequence is synthesized)
cggcgggcggcggagctgtctccagaggagcgggctccgcccggccggcccggggccccggaggcggccgagctggagctggaagaggacgaggaggagggggaggaagcggagctggac

SEQ ID NO: 613291 - DNA, 120 bp, Artificial Sequence
  ENSG00000176624_6 (sequence is synthesized)
ggacggagacctgctggaggaggaggagctggaggaagcagaggaggaggaccggtcgtcgctgctgctgctgtcgccgcccgcggccaccgcctctcagacccagcagatcccgggcgg

SEQ ID NO: 613292 - DNA, 120 bp, Artificial Sequence
  ENSG00000176624_7 (sequence is synthesized)
gtccctggggtctgtgctgctgccagccgccaggttcgatgcccgggaggcggcggccgcggcggcggcggcgggggtgctgtacggaggggacgatgcccagggcatgatggcggcgat

SEQ ID NO: 613293 - DNA, 120 bp, Artificial Sequence
  ENSG00000176624_8 (sequence is synthesized)
gctgtcccacgcctacggccccggcggttgtggggcggcggcggccgccctgaacggggagcaggcggccctgctccggagaaagagcgtcaacaccaccgagtgcgtcccggtgcccag

SEQ ID NO: 613294 - DNA, 120 bp, Artificial Sequence
  ENSG00000176624_9 (sequence is synthesized)
ctccgagcacgtcgccgagatcgtcggccgccagggttgtaaaattaaagcactgagagccaagacaaacacgtatatcaagactcctgttcgtggtgaagagcccatttttgttgtcac

SEQ ID NO: 613295 - DNA, 120 bp, Artificial Sequence
  ENSG00000176624_10 (sequence is synthesized)
tggaaggaaagaagatgttgccatggccaaaagagagatcctctcagctgcagagcacttctccatgattcgtgcatctcgaaacaaaaatgggcctgccctgggaggattatcatgtag

SEQ ID NO: 613296 - DNA, 120 bp, Artificial Sequence
  ENSG00000176624_11 (sequence is synthesized)
tcctaatctgcccggtcaaaccaccgtccaagtcagggtcccttatcgtgtggtaggattagtggttggacccaaaggagcaactattaaaagaattcagcagcagacccacacctacat

SEQ ID NO: 613297 - DNA, 120 bp, Artificial Sequence
  ENSG00000176624_12 (sequence is synthesized)
agtaactccgagcagagataaggaacctgtctttgaagtgacagggatgcctgaaaatgttgaccgagcacgggaagaaatagaaatgcatattgccatgcgtacaggaaactatataga

SEQ ID NO: 613298 - DNA, 120 bp, Artificial Sequence
  ENSG00000176624_13 (sequence is synthesized)
gctcaatgaagagaatgatttccattacaatggtaccgatgtaagctttgaaggtggcactcttggctctgcgtggctctcctccaatcctgttcctcctagccgcgcaagaatgatatc

SEQ ID NO: 613299 - DNA, 120 bp, Artificial Sequence
  ENSG00000176624_14 (sequence is synthesized)
caattatcgaaatgatagttccagttctctaggaagtggctctacagattcctactttggaagcaataggctggctgactttagtccaacaagcccatttagcacaggaaacttctggtt

SEQ ID NO: 613300 - DNA, 120 bp, Artificial Sequence
  ENSG00000176624_15 (sequence is synthesized)
tggagatacactaccatctgtaggctcagaagacctagcagttgactctcctgcctttgactctttaccaacatctgctcaaactatctggactccatttgaaccagttaacccactctc

SEQ ID NO: 613301 - DNA, 120 bp, Artificial Sequence
  ENSG00000176624_16 (sequence is synthesized)
tggctttgggagtgatccttctggtaacatgaagactcagcgcagaggaagtcagccatctactcctcgtctgtctcctacatttcctgagagcatagaacatccacttgctcggagggt

SEQ ID NO: 613302 - DNA, 120 bp, Artificial Sequence
  ENSG00000176624_17 (sequence is synthesized)
ctaatggtaccaatagttactcctcttccaatggtggttccacctctagctcacctccagaatcaagacgaaagcacgactgtgtgatttgctttgagaatgaggttattgctgccctag

SEQ ID NO: 613303 - DNA, 120 bp, Artificial Sequence
  ENSG00000176624_18 (sequence is synthesized)
ttccatgtggccacaacctcttctgcatggaatgtgccaacaagatctgtgaaaagagaacgccatcatgtccagtttgccagacagctgttactcaggcaatccaaattcactcttaac

SEQ ID NO: 613304 - DNA, 120 bp, Artificial Sequence
  ENSG00000176624_19 (sequence is synthesized)
tatatatatatacataaatactatatctctatatggactcgtaaaggcatgggtataatggtaccccccagtaaacttcctaatgatttcttatgactgttatcaggctttattgggatt

SEQ ID NO: 613305 - DNA, 120 bp, Artificial Sequence
  ENSG00000176624_20 (sequence is synthesized)
aggctaaagttgttagtaaacttataaaaggctgctatggtaacactaaacctaagtggtctcttgtctattagtttggtttgaattattagtactatcctgtagacccagagacatagt

SEQ ID NO: 613306 - DNA, 120 bp, Artificial Sequence
  ENSG00000176624_21 (sequence is synthesized)
ttatataagaattgctaaagctgaagttcaacttggctgagtgaagataatcataggttgtgtgagcctatgaaaaagtgtatacgtctaagatttcaaaacaatgggtcccaaagccta

SEQ ID NO: 613307 - DNA, 120 bp, Artificial Sequence
  ENSG00000176624_22 (sequence is synthesized)
accactttaagagtttatggagggtacttggcattacagacgattcatacacttccagtgctgccttctttacactgccagttttgacaaaacaggtttgttttttattttacaacaaca

SEQ ID NO: 613308 - DNA, 120 bp, Artificial Sequence
  ENSG00000176624_23 (sequence is synthesized)
tatgcctaattctgcaggattgcaagtaactttttaatgcattgtgattacttattggtaatgatagggctgatggcagtttactagatcactggttataatttgggacaaaaactgcta

SEQ ID NO: 613309 - DNA, 120 bp, Artificial Sequence
  ENSG00000176624_24 (sequence is synthesized)
catcaactttcatctcgcccagagtgctcaaggctggtatgatcagtggatcaggaatgcaattgtgaattcctgcccattgcctctcttggtgaatgtggaaatggccacctgggtttt

SEQ ID NO: 613310 - DNA, 120 bp, Artificial Sequence
  ENSG00000176624_25 (sequence is synthesized)
cccatatcaggaagggctttgggatggcacctatattggctgataattgaggatgcaaacattccattcattagtgtgatcgagctgttaatttttagactatagatcaaaatgtgaaac

SEQ ID NO: 613311 - DNA, 120 bp, Artificial Sequence
  ENSG00000176624_26 (sequence is synthesized)
attttatgttcaatccatatttgtcttgcacattataaatatatttttattttttagtaatttaggggagggaggagggagaaagggataatgatgcccttggcataattcacaaaagca

SEQ ID NO: 613312 - DNA, 120 bp, Artificial Sequence
  ENSG00000176624_27 (sequence is synthesized)
gctgtgacaacctccaatcagtttacttcatttcaaaactatttccaatcacaaggaaagatttatttaaaatatactcgtacatttcacctgtggatgtctataacttcatcctcagta

SEQ ID NO: 613313 - DNA, 120 bp, Artificial Sequence
  ENSG00000176624_28 (sequence is synthesized)
tgttcccaaatctgtgctggcattgaaaggacaaaacattatactagtgggtttttctactaattattttttgaagcattattttcccaacacaaaagagcttttttctcggtataatga

SEQ ID NO: 613314 - DNA, 120 bp, Artificial Sequence
  ENSG00000176624_29 (sequence is synthesized)
aaattgaaatcctatgtgtattcaatagtaaatagacaaattttattttttatttccacttgaagagttacatttcgtataaaagtttacaaataacggtttttattttgattttttcag

SEQ ID NO: 613315 - DNA, 120 bp, Artificial Sequence
  ENSG00000176624_30 (sequence is synthesized)
tataaaaaaagttgccttgatggcatattatgatgtaatgctaattgcttgtaggatagtaaatggtcagtattgaaacctaatctctagctgccgtcttgtagatatgaacgaatgttc

SEQ ID NO: 613316 - DNA, 120 bp, Artificial Sequence
  ENSG00000176624_31 (sequence is synthesized)
accaagcatgtattttgtattttgttgcattgtacactgcaactaataagccaaggaatcgacatatattaggtgcgtgtactgtttctaaaaaccacaaactaagaatgataaattatc

SEQ ID NO: 613317 - DNA, 120 bp, Artificial Sequence
  ENSG00000176624_32 (sequence is synthesized)
aatatagtttagtatttgctaattttactacactcttttgttatgtatatgtagggaagtcatagggattataaattcaatttgagtaaaatttaaaaccatatattttatgataaaggg

SEQ ID NO: 613318 - DNA, 120 bp, Artificial Sequence
  ENSG00000176624_33 (sequence is synthesized)
cctttaacttaagatggccaaagcactgatattatatatttgctgtaaagagaattataagagttttatttttctgatattaaaagttacttaataaagacttgtttccattaacttgaa

SEQ ID NO: 613319 - DNA, 120 bp, Artificial Sequence
  ENSG00000176624_34 (sequence is synthesized)
ggtggggagacgagagaaaggagcgtgggacggaaaaggcgaacccggcgaggcccccaagtccaccgcgaaggggtctgggaggagccgagggtcgaccagatgtgaagatgggtcacc

SEQ ID NO: 613320 - DNA, 120 bp, Artificial Sequence
  ENSG00000176624_35 (sequence is synthesized)
ttgcgaaaacccacgcttttccgcccgtcttgcctggtaaaaagtgtgaagtttctcgggcgacccagtccggtggtgttcacgttacttgggctgtattcgtggaacaccaggctggcg

SEQ ID NO: 613321 - DNA, 120 bp, Artificial Sequence
  ENSG00000176624_36 (sequence is synthesized)
tggcaccagaaacctcagtgaggtggtaaaaggtcgggctcgaggagttgtgggttcgctgttgggtacggaaagcttcgagattgcaagtttgcgccgccgagtgtcttctaaaagcgt

SEQ ID NO: 613322 - DNA, 120 bp, Artificial Sequence
  ENSG00000176624_37 (sequence is synthesized)
tcagcctcccttacaagaacttgttcagatggagaaaagaacagaaatggaggcctgtagacagagctcactggggagggaaggggtgttcaaatggtcggtatcaccgccatcccctgc

SEQ ID NO: 613323 - DNA, 120 bp, Artificial Sequence
  ENSG00000176624_38 (sequence is synthesized)
ccctccgctgttgagaaacttagctttggaaaagcagcccaactcactgccgcctatcttaactgtatttctctcggtacgtttcaactctcggaaagacacactgacacactggctgtc

SEQ ID NO: 613324 - DNA, 120 bp, Artificial Sequence
  ENSG00000176624_39 (sequence is synthesized)
ttttaaaactgttcagtgtgcaggatgaagaaaaaatggacactaaggtaattaagaaacttcatcggtttatacagttttcagttaattctcctcttcacttgccagcacaccagtact

SEQ ID NO: 613325 - DNA, 120 bp, Artificial Sequence
  ENSG00000176624_40 (sequence is synthesized)
gcagacagactcctcccacattgttcagacaaaggacctgtgtctcagattccaggagtagatttgtgaaggtgggggaaggggatgcctggggtacctctgtatccgacatttttaggg

SEQ ID NO: 613326 - DNA, 120 bp, Artificial Sequence
  ENSG00000176624_41 (sequence is synthesized)
aaggtcctaagttctttatggtagcatttcccctttatgaaaggggcagatgttacctgctgccaccgcatgacaatgtggtttagcctggttgttgcatgcctctttactgttaggttg

SEQ ID NO: 613327 - DNA, 120 bp, Artificial Sequence
  ENSG00000176624_42 (sequence is synthesized)
agagcattgttggggtcaaataaagagagatgatggcgctgccgcttaaatgatctcatctttcccaggtggtctaaagtacacataaataagagctctgtcgaaatggtggtttcacat

SEQ ID NO: 613328 - DNA, 120 bp, Artificial Sequence
  ENSG00000176624_43 (sequence is synthesized)
atcagacttggcttatttctttcctatctgtaggattttaataaaaactcatctgaaatctggataaaggagatagcttagttcagactgcctgatgattggcacttacagacactgttc

SEQ ID NO: 613329 - DNA, 120 bp, Artificial Sequence
  ENSG00000176624_44 (sequence is synthesized)
aaagctggacctttcaattgaaaggtagcttatgcttgtcgttcttctggttaatgagtttcagattcctggattgtttggttttggcgatacttagagtaataatccaggagaaaactt

SEQ ID NO: 613330 - DNA, 120 bp, Artificial Sequence
  ENSG00000176624_45 (sequence is synthesized)
ttgtttacatgggataaaattacaacatctcaatttggatcagaatgagttgaccattcatgtaagaacactgaggaatcgctatgtaccaagcttgtattttgccaggttttgagtttg

SEQ ID NO: 613331 - DNA, 120 bp, Artificial Sequence
  ENSG00000176624_46 (sequence is synthesized)
tggtattgagaatgtgaagttaattcagactttctgcccttaagaagataacagtctaataaacagtagaatggcactaactatagtgtatttagtatgacaaagtctcaggtaagagaa

SEQ ID NO: 613332 - DNA, 120 bp, Artificial Sequence
  ENSG00000176624_47 (sequence is synthesized)
catctatggagagggccttggaaaatgggtaggaaggagtctaacaaatggagattgaaaaactgtggaggaacaatgtgaggaggggtgtggaggactagcctaggtataattgccaag

SEQ ID NO: 613333 - DNA, 120 bp, Artificial Sequence
  ENSG00000176624_48 (sequence is synthesized)
ttgatacttgaggtctgtaaaggggagtggtggaaaagggggaaggcaggcgttcacaccagaatgtgaagaagcctgaatgccatatgaagatgccacttctcaggacaagttgcttcc

SEQ ID NO: 613334 - DNA, 120 bp, Artificial Sequence
  ENSG00000176624_49 (sequence is synthesized)
gtgtgcttatggtaacagtctagggtaacaaaggaagaaaacatttacgtgccagttttactgaaggacaagataacatattttatagatttagtttaatacaaactttagtccttcatt

SEQ ID NO: 613335 - DNA, 120 bp, Artificial Sequence
  ENSG00000176624_50 (sequence is synthesized)
atagtagacaccccttaaagcactgctaaatggcccttacttgtgtatgttgttaatctttatagaaatcagttttttaaaagtaaagtgaattccaagtttttattttgtaccagctat

SEQ ID NO: 613336 - DNA, 120 bp, Artificial Sequence
  ENSG00000176624_51 (sequence is synthesized)
tacgtgataggaaatgagataaagccttagtttttcttttgagggctgtgtttatttggttaataaggaaatgttgaatttaattatgtcttagatcatggagacaaattgctggctctt

SEQ ID NO: 613337 - DNA, 120 bp, Artificial Sequence
  ENSG00000176624_52 (sequence is synthesized)
ccatttaaaccttgtattttcccagagttgacaatactgttaaaagtatgtcatcatcctctatcttaaaagcagaaaatctggtccttttgctgttctgaaccatacaacttgtggatc

SEQ ID NO: 613338 - DNA, 120 bp, Artificial Sequence
  ENSG00000176624_53 (sequence is synthesized)
attgacccctttgccacccccatgtcccagcagcatagtaataaacctgtaaagtgtttgctcactcgtatggagaacgaagtgacttctaatgttcacattcttttacagtattatatt

SEQ ID NO: 613339 - DNA, 120 bp, Artificial Sequence
  ENSG00000176624_54 (sequence is synthesized)
tccccacgggagagaatctgtcctaagtaagtaaaacagggcaaatcatttcattttcttgtttgctttgaaggagctaaactttcatccttaagattaaattatccatttctgccattt

SEQ ID NO: 613340 - DNA, 120 bp, Artificial Sequence
  ENSG00000176624_55 (sequence is synthesized)
tatgtattacctgaagccataattttctatttgacatctcttaattgattttggaaataattatgtcacagatggagacatttatgacttcagctctgaagcaaagagcaggacaaatgg

SEQ ID NO: 613341 - DNA, 120 bp, Artificial Sequence
  ENSG00000176624_56 (sequence is synthesized)
aattctgagtcacatagactagcaactcatgtagatggcctctgagttccagtgtttttctaaaacacaaactaccgcttttgatactgatgaaagttggcagagtgtttgacctcgaat

SEQ ID NO: 613342 - DNA, 120 bp, Artificial Sequence
  ENSG00000176624_57 (sequence is synthesized)
ttatactccccagtagcatatggtcatttgtaaatgttaaattggccttgttttttaaagcattgcatctgttgtgaaacaacaatactgtaaaataaagccaggaactgaagaggcttg

SEQ ID NO: 613343 - DNA, 120 bp, Artificial Sequence
  ENSG00000176624_58 (sequence is synthesized)
ttgatataatcaaagaagttttagaatatggacatcaaaaataaacctgacaacagattttaagacctaattttataaacttagaacgtctctgtttttaagtatagtacctgcaagaca

SEQ ID NO: 613344 - DNA, 120 bp, Artificial Sequence
  ENSG00000176624_59 (sequence is synthesized)
tattaacagtgattaacaggtctaattttagtcagcaggttttgttccaatttgtacagtcatttatatccatttagactaaaaagtgaattaaaatagaactgtatacccattcttaat

SEQ ID NO: 613345 - DNA, 120 bp, Artificial Sequence
  ENSG00000176624_60 (sequence is synthesized)
acattataaattaatactaaatgtcataaattcagttgtttagagacttgtaacccaagattttgtattactattaggataaatgtgtatctttcattagactttaattaatggtctatg

SEQ ID NO: 613346 - DNA, 120 bp, Artificial Sequence
  ENSG00000176624_61 (sequence is synthesized)
tgtgttctctagccacatagtctagaaaagtcgtctctagcttctttttattgtacaccctgtccaaaaaaaatgtgcatactcccaatatctggatatttatgtatgaatagtaagtgt

SEQ ID NO: 613347 - DNA, 120 bp, Artificial Sequence
  ENSG00000176624_62 (sequence is synthesized)
gcttaatatattacacattataaaacaaaattctttattaacaattaatactttacactgtttcaatttgtcttcccaatttcttagggtggaaccacccttcaagctctaacacaactg

SEQ ID NO: 613348 - DNA, 120 bp, Artificial Sequence
  ENSG00000176624_63 (sequence is synthesized)
aaatagggtttatacgtctgtgaccaggagaaaaagagaaagcttggtcttgctgtacataaattttctcttcaaggagaagtacatatttcatgagaataaatagtttcagaatgatgc

SEQ ID NO: 613349 - DNA, 120 bp, Artificial Sequence
  ENSG00000176635_0 (sequence is synthesized)
gttgtataggtggcccaggctggcggcccctgaccgaaggtcgcgtcgggtcagtgtgcagcccgtggctgagaggcggctgctgaggggccgggcgggctaggggccggctagccgccg

SEQ ID NO: 613350 - DNA, 120 bp, Artificial Sequence
  ENSG00000176635_1 (sequence is synthesized)
ttcgcccctgctttgcatattcatgaagtctagcgaggccggtcgcccaggctagccgtggacgggtcatgaattattcatgaggaaacctctggtcccgcccagaaaggcctcgttgac

SEQ ID NO: 613351 - DNA, 120 bp, Artificial Sequence
  ENSG00000176635_2 (sequence is synthesized)
tattcatgagccgaggagcgggtttgggccggaaaaggccgttgacccccggtgggagggaagcgtcgacgagctgaggttggacttgttgaaataatcctgatacattcctacaatggc

SEQ ID NO: 613352 - DNA, 120 bp, Artificial Sequence
  ENSG00000176635_3 (sequence is synthesized)
cactgctcagctttctcactgcatcacaatacacaaggcttctaaggaaacagttttcccatcccaaatcactaatgagcatgagtcattgaaaatggtgaagaaactttttgctacttc

SEQ ID NO: 613353 - DNA, 120 bp, Artificial Sequence
  ENSG00000176635_4 (sequence is synthesized)
catctcatgtataacatacctaaggggcctgtttccagagagctcttatggagaacgccatttggatgacctcagtttaaaaatcctccgagaagataaaaaatgtcccgggtcactgca

SEQ ID NO: 613354 - DNA, 120 bp, Artificial Sequence
  ENSG00000176635_5 (sequence is synthesized)
tattatcagatggattcaaggttgttttgatgctttggaaaagagatacctacgtatggcagtactgacactttacacagatcccatgggatctgagaaggtgactgagatgtaccagtt

SEQ ID NO: 613355 - DNA, 120 bp, Artificial Sequence
  ENSG00000176635_6 (sequence is synthesized)
caaattcaaatacacgaaagaaggagccactatggattttgacagtcatagcagcagtacaagctttgaaagtggaacaaacaatgaagatattaagaaagccagtgttctactgatccg

SEQ ID NO: 613356 - DNA, 120 bp, Artificial Sequence
  ENSG00000176635_7 (sequence is synthesized)
taaattgtatatactgatgcaggaccttgagccacttcctaataatgttgtacttactatgaaactccactactataatgcagtgaccccacatgattaccaacccctcggttttaaaga

SEQ ID NO: 613357 - DNA, 120 bp, Artificial Sequence
  ENSG00000176635_8 (sequence is synthesized)
aggggtaaattcacacttcctgctgtttgacaaggagcctatcaacgtgcaagtgggatttgtctccactggctttcatagcatgaaagtaaaagtcatgacagaggctacaaaagtgat

SEQ ID NO: 613358 - DNA, 120 bp, Artificial Sequence
  ENSG00000176635_9 (sequence is synthesized)
gaacagcactactgagatcgcccatcagggtctagactgtgatgaggaagaagaatgcaatgaccatattcaaagaatgaattttgtgtgcagtcagcaaagttctgagtgctccaggaa

SEQ ID NO: 613359 - DNA, 120 bp, Artificial Sequence
  ENSG00000176635_10 (sequence is synthesized)
gaagaggaaggtcagtgaaccagtgaaggtcttcatccctaacagaaaatgaaagctaaatattccttctacatttattttaaaataagtttattttgtaaaaacatgcataaactgtct

SEQ ID NO: 613360 - DNA, 120 bp, Artificial Sequence
  ENSG00000176635_11 (sequence is synthesized)
tagcaggaaagtacattcctgttaccaaaacctttttctaaattttttgctcaattttttttgtcagttgctaagtgctaaattactggccaggtaggacgcgagtccactttgccataa

SEQ ID NO: 613361 - DNA, 120 bp, Artificial Sequence
  ENSG00000176635_12 (sequence is synthesized)
ggaaagcgggtcaatagggctgcctctggatagcattacttcaaagctgggttagagatgaggcaccttttatattatatttgtaaaagaaccacagcagctattttggaaagaagctgt

SEQ ID NO: 613362 - DNA, 120 bp, Artificial Sequence
  ENSG00000176635_13 (sequence is synthesized)
tgttctcaaaggaaagaaggatttttttgcataattaaactcttcagctatttagactactgtgaaatgttttgacttgttgtaacctgtatactggaatccctctctagctgtattaaa

SEQ ID NO: 613363 - DNA, 120 bp, Artificial Sequence
  ENSG00000176635_14 (sequence is synthesized)
aattcccacagagttgcataggatgtgtggaggtgcttatccaggtgtgatttatgtgttaacctcagtcacgaggttgatcagctaattgtgggaccaaaatgtgccctgcctcaactc

SEQ ID NO: 613364 - DNA, 120 bp, Artificial Sequence
  ENSG00000176635_15 (sequence is synthesized)
tggccccaggccctgttctgttatccaatccgaaacacggaacatgctgcaattcaggagtctggctctcttcttaagacctatattaaatatttcccaagaagcacttcagtttatcag

SEQ ID NO: 613365 - DNA, 120 bp, Artificial Sequence
  ENSG00000176635_16 (sequence is synthesized)
tctgtaacctgcaaatgatgctattagttccctccttattctggaagaatttggatagacttaattgatgattagtatgagatgaacaatagatgacttaaagtgttatttctattattt

SEQ ID NO: 613366 - DNA, 120 bp, Artificial Sequence
  ENSG00000176635_17 (sequence is synthesized)
actttagtgaggatttgccaattaatccctatggactttagttccctaaacagagggagagagtcttgaacctcaggattagccaatcgccaaaatgtgtccgagtacgcagggcactgg

SEQ ID NO: 613367 - DNA, 120 bp, Artificial Sequence
  ENSG00000176635_18 (sequence is synthesized)
acaggctgtgcagtacatcgtgtactcagctggtagaaatgaggggtggttctggcccctaaaggggtttttaatctcagcaggatcataatctaatttctcctccattggaccatcaat

SEQ ID NO: 613368 - DNA, 120 bp, Artificial Sequence
  ENSG00000176635_19 (sequence is synthesized)
acactggaatcaaaggcttgtcttttattctttaaaaaaagaaattagacatttattttgtttttgtgtttaacagtataagtgtctacgtttgcatccataaactaatttcttatctta

SEQ ID NO: 613369 - DNA, 120 bp, Artificial Sequence
  ENSG00000176641_0 (sequence is synthesized)
acccgctccagccccgtctgcccaggagggcgcttggatttccttctccgcggcgcgtatctaacccttcctgcatgtatttcactgcaggctgaagaaagctcagtctcaattgtgttt

SEQ ID NO: 613370 - DNA, 120 bp, Artificial Sequence
  ENSG00000176641_1 (sequence is synthesized)
cctgcctgtcagcctcttgcctcctaaacgtgtaccatttccacttgatgtcatcacgcagaaggggtgaaagagactcggtgacagatacagaaatgaacacacctgtgagtactggat

SEQ ID NO: 613371 - DNA, 120 bp, Artificial Sequence
  ENSG00000176641_2 (sequence is synthesized)
gcctgtgagcttgccattacctgcactgcaaagacacagggcggtggcctctgagaagcagctccttccccttcaccttggccttgcccttcctgctcacggtccaccatggagacgctg

SEQ ID NO: 613372 - DNA, 120 bp, Artificial Sequence
  ENSG00000176641_3 (sequence is synthesized)
tcccaggactctctgctggaatgtcagatctgtttcaattactacagcccccggcgcaggcccaagttgctggactgcaagcacacctgctgttcagtgtgcctgcagcagatgaggacc

SEQ ID NO: 613373 - DNA, 120 bp, Artificial Sequence
  ENSG00000176641_4 (sequence is synthesized)
agccagaaggatgtgcggtgcccctggtgccgcggtgtcaccaagctgcctcccggcttctccgtgtcgcagctcccggacgacccggaggtcctggctgtcatcgccattccacacact

SEQ ID NO: 613374 - DNA, 120 bp, Artificial Sequence
  ENSG00000176641_5 (sequence is synthesized)
tccgaacacaccccggtcttcatcaaacttcccagcaatgggtgctacatgctgcccctgcccatctccaaggagcgtgcgctgctgcccggagacatgggctgccgcctgctgcccggg

SEQ ID NO: 613375 - DNA, 120 bp, Artificial Sequence
  ENSG00000176641_6 (sequence is synthesized)
agccagcagaagtccgtcaccgtggtgaccatccctgctgaacagcagcctctgcaaggtggggctccccaggaggcggtggaggaggagcaggacaggcggggcgtggtgaaaagctcc

SEQ ID NO: 613376 - DNA, 120 bp, Artificial Sequence
  ENSG00000176641_7 (sequence is synthesized)
acctggtcgggggtgtgcactgtcatcttggtggcttgcgtcttggtcttcctcctcggcatcgtgcttcacaacatgtcttgcatttctaagcgcttcactgtgatatcctgtggctga

SEQ ID NO: 613377 - DNA, 120 bp, Artificial Sequence
  ENSG00000176641_8 (sequence is synthesized)
agagggctgcagggaagtctcttgtgggtgccaacttaggggttgagcaggttgatgatgagatcccagtgagaagatggggggcaacactgaccatttggtgctgagcgctggcctctg

SEQ ID NO: 613378 - DNA, 120 bp, Artificial Sequence
  ENSG00000176641_9 (sequence is synthesized)
ggttgcctcttgattaccccaagacagacacaaagggcagaaggtgcggtctcaacaagataccaggtgaattgttctgagtgttgatggcaacagcttggaagatgattgcatgcatcc

SEQ ID NO: 613379 - DNA, 120 bp, Artificial Sequence
  ENSG00000176641_10 (sequence is synthesized)
tcataatcatgtattcaatggactgtaatttatgatttttcaaaatcatgttacaagatagacatattctacttagacgttaaactgtacaagtgcgtacaatgtgaccttctctaaatg

SEQ ID NO: 613380 - DNA, 120 bp, Artificial Sequence
  ENSG00000176641_11 (sequence is synthesized)
cggtagattcaaacaaagatgctctgtagacaagtagaattaaacctgcgaatccgtgtaaaaattcagtgaagacatgcactgctggcttctttattttttttttctttttattgaaac

SEQ ID NO: 613381 - DNA, 120 bp, Artificial Sequence
  ENSG00000176641_12 (sequence is synthesized)
ccagtcttcatttagttgctaaggcttttaatacattttgaatggcaccaaaacaaaataagtcaaaatggacagtcattttatttggaggaaatatttgaacaagtgtctccaatgtgt

SEQ ID NO: 613382 - DNA, 120 bp, Artificial Sequence
  ENSG00000176641_13 (sequence is synthesized)
tgtgttttgtcatgaaccttcattttcttcacttgtaattagagcttgctacgtgtttatggaactgaaagctcaacaggggagcaataaaccgagaaatcatgagaaatgtctaatccc

SEQ ID NO: 613383 - DNA, 120 bp, Artificial Sequence
  ENSG00000176641_14 (sequence is synthesized)
atgggaaaacctgtatgccgattttcctcaagccatctcacaaaataagaatttcaaatgtaaatattgtgtatttgtgtgtgtatgtgtgtgtgtctaatttgatttacctcaggtgtt

SEQ ID NO: 613384 - DNA, 120 bp, Artificial Sequence
  ENSG00000176641_15 (sequence is synthesized)
tgagtctttgctgaagaatcctgggatgaagacttcattgggcatgaatgagtcaagtctctgaagcggtggccacttcttggacatcttgacccagcgagtggtctcctacacgtcacc

SEQ ID NO: 613385 - DNA, 120 bp, Artificial Sequence
  ENSG00000176641_16 (sequence is synthesized)
tgcaacactcgctcctcttctgtgtatttaagtcctgcattttgtaagaggcaaatggagagtaacagaagagtgtcttttctcctggttttggagtcttgcactggccatgagtgttgt

SEQ ID NO: 613386 - DNA, 120 bp, Artificial Sequence
  ENSG00000176641_17 (sequence is synthesized)
gactgatggtcaacccaggcgggcattttaataaatggcctgtgattcttttttgaaagatgctcttccacaagagttaagccagttagaattcctgtttcctcttgttgatatgagaga

SEQ ID NO: 613387 - DNA, 120 bp, Artificial Sequence
  ENSG00000176641_18 (sequence is synthesized)
agatctcctgtattttaacacgtttttaccaagaaaggtggcaaggtaaactaacagctcaaattcccaatataagtggaccagttcctcataaactgtcaaatgttcttaaatgtgtaa

SEQ ID NO: 613388 - DNA, 120 bp, Artificial Sequence
  ENSG00000176641_19 (sequence is synthesized)
tgatctatagatgctcatgaagaaagatctgctacaagtacgtgataaattcctatccctgggtgcatgtgcattcagaaatagctgtgagctttacagctctcatctaacttcttttat

SEQ ID NO: 613389 - DNA, 120 bp, Artificial Sequence
  ENSG00000176641_20 (sequence is synthesized)
ggaattcatgaagcaagtggtatgtgacaaggactccacttataaatataactgtttttatgttccactgaatccctgaaaatggtgaggagggtggggggaagtgaaggaaagacaagc

SEQ ID NO: 613390 - DNA, 120 bp, Artificial Sequence
  ENSG00000176641_21 (sequence is synthesized)
agggctaattccaaaaagcaaggctagaaaatagccctgtgaggtcaagacaatttaatttatttacatgctgtctgttatcttcaagcagcacaaaatatgcatataaaagtgatggaa

SEQ ID NO: 613391 - DNA, 120 bp, Artificial Sequence
  ENSG00000176641_22 (sequence is synthesized)
ttaatgtgaaataaaacaaaaatataatggctagaatacaaagctaatactgctaattggcatgagaattcaacataaaattgtgagctctgatttttcaaattgatcataaaaccttta

SEQ ID NO: 613392 - DNA, 120 bp, Artificial Sequence
  ENSG00000176641_23 (sequence is synthesized)
ggaaatgtatttgaaagctcaaaatagaaattaggttaaaatgccattttattgtgtaagctcttgggcattatacaacaaataatctaggatttatttggtattaataatttaggtgtc

SEQ ID NO: 613393 - DNA, 120 bp, Artificial Sequence
  ENSG00000176641_24 (sequence is synthesized)
atattagctgaatactatcctctattacataacataatatactgttgggttagtgtcaatttctcaaactctcccaggctgccataatgcatgtctgacctaatttctatttctcttgga

SEQ ID NO: 613394 - DNA, 120 bp, Artificial Sequence
  ENSG00000176641_25 (sequence is synthesized)
ggaaaatacacacacacacacaccacagaagtgttgcattaagaatgctacatttcgaatagactttgcccttgcaattttaagctatgccatattcagattaattttgtgagtgatatc

SEQ ID NO: 613395 - DNA, 120 bp, Artificial Sequence
  ENSG00000176641_26 (sequence is synthesized)
tgcatatgtttctgtacagtgtgaaatgactgaccctgtagtatagtacgtgatagagttctacttgttaaagtaggttagatatagacactaatgtgtgtgatgatagtgtcctgtgtt

SEQ ID NO: 613396 - DNA, 120 bp, Artificial Sequence
  ENSG00000176641_27 (sequence is synthesized)
tcttagtgcaaatctgtagagtaaaaatgtccatagaacttttacttaaaaacaatcccatgctagagttgccattaagcagtgcaaaattaatcggctgtatggtagattcttgacctt

SEQ ID NO: 613397 - DNA, 120 bp, Artificial Sequence
  ENSG00000176641_28 (sequence is synthesized)
aaatttaacaacaacaaccaaaatcagattttttttgtgagtcttactgacctaagaaacattgtttaaattgtttaaatggatctgcttgcagttatttgtgtacctgtttgttggggt

SEQ ID NO: 613398 - DNA, 84 bp, Artificial Sequence
  ENSG00000176641_29 (sequence is synthesized)
ctcagtctcccagatagaattttataggcttaatgatgttttaatgttgcttggcatcccattgctctggcctcttctggcatt

SEQ ID NO: 613399 - DNA, 120 bp, Artificial Sequence
  ENSG00000176641_30 (sequence is synthesized)
tgttgcttggcatcccattgctctggcctcttctggcatttaccaatgacccttaacaaacacatctacccatgtgaccaaagtccactgacacaagaggccaggattcatacttgcaca

SEQ ID NO: 613400 - DNA, 120 bp, Artificial Sequence
  ENSG00000176641_31 (sequence is synthesized)
ttaatgaaaagtcacaactggaaagcacagaaagagctgaaagcagcctccggtggcttcattttgtagatgagtccgttttgtaattctgcagaaagggggggatatgaacttcgcact

SEQ ID NO: 613401 - DNA, 120 bp, Artificial Sequence
  ENSG00000176641_32 (sequence is synthesized)
gcagtgtcttcttgctccatcctaggtctgtctatatctctatctggctatgatcctttctagggttgatgaataccctttactgagtcaactattgctttaaagaattttttttgtagg

SEQ ID NO: 613402 - DNA, 120 bp, Artificial Sequence
  ENSG00000176641_33 (sequence is synthesized)
tttatgtactcattttagttagcatctacctctctgggaaaatgaaaggagggttgacttagggatgagtatagatgttgaaagacaactatcaaaccatgtggtttgaatttttaaaat

SEQ ID NO: 613403 - DNA, 120 bp, Artificial Sequence
  ENSG00000176641_34 (sequence is synthesized)
tgtaaaacattggtgtccaaacctcccaccccacttgtatgtaaaggacagtgagtgttgtataaatagtaaactataagaagcatgaattttcatctttattaatgatcttgaaataag

SEQ ID NO: 613404 - DNA, 120 bp, Artificial Sequence
  ENSG00000176641_35 (sequence is synthesized)
gaagagaatgcttaatatgttaagtagagccaagaatgctactaagaagcattgtctttggaaaaattttgtataatgacttggggcataagttgtgatgaaaaggcaacttggtttttg

SEQ ID NO: 613405 - DNA, 120 bp, Artificial Sequence
  ENSG00000176641_36 (sequence is synthesized)
aaccatgtgatggtataacctgtgagatcttctagattggcactgttcaatagggctttctgtgatgatggaaatgctcgaaaacctgtgccgtctggtacggtagccaccaggcacatt

SEQ ID NO: 613406 - DNA, 120 bp, Artificial Sequence
  ENSG00000176641_37 (sequence is synthesized)
gacttttaggcagttaaaatggggttactacaagggaagaactggatttcaaattttatttaattttaattagcttaaatttaaatagccctatgtgtctagtggctgccatattgaacg

SEQ ID NO: 613407 - DNA, 120 bp, Artificial Sequence
  ENSG00000176641_38 (sequence is synthesized)
atgcagttctgggtgatagcgcttggggatccagcatcaaggtattaatggagtaacagtgaggctaaggtgagagtttgtgggctagtgacatgcagttggcaaaaggcaaaacattcc

SEQ ID NO: 613408 - DNA, 120 bp, Artificial Sequence
  ENSG00000176641_39 (sequence is synthesized)
tttctgggcttaaaaagtatgtgatctcaagtatgacagtaaaaattcattgttgccctttggaactgttgcttatagattttaggccaaggaatgatcagtgaagcttaaagaatgctt

SEQ ID NO: 613409 - DNA, 120 bp, Artificial Sequence
  ENSG00000176641_40 (sequence is synthesized)
tattaagccccttttctgggatcattagctgcatgttaacctattgtccaaaaatagtagttagacagtacctgtaaaacgtttgacttgcaagctatgcatgatctgtactgtgaaatt

SEQ ID NO: 613410 - DNA, 120 bp, Artificial Sequence
  ENSG00000176641_41 (sequence is synthesized)
gtgtctagggtcttgtggccaaaaagtaaatgttacaggaaaaaaaaagcctaatgaaatccctgttcacttccagtatcctatccaaacttcattgctgtattagtaaggtgcaaatat

SEQ ID NO: 613411 - DNA, 120 bp, Artificial Sequence
  ENSG00000176641_42 (sequence is synthesized)
aagagcaagcatgttttgcagtgttcagactggttttgtttgcccttgaagttggccagcttgtcgttgtatttggtgtgggcatatgtgggcatcatttttcagatgccaaactaaaat

SEQ ID NO: 613412 - DNA, 120 bp, Artificial Sequence
  ENSG00000176641_43 (sequence is synthesized)
gtaggtagtatttttagaatgagatttgacattgttttagtgtctttcttttttaagcaaaaatttcagttatccctgaaagagttgaagatttgaagctttgcacaaaagcactttttt

SEQ ID NO: 613413 - DNA, 120 bp, Artificial Sequence
  ENSG00000176641_44 (sequence is synthesized)
taacagtaaaaaatactgcccatgaaatttaaagacttgaagtttactaaagctacaataattactttttagctaaataaaaggaagcagaaaattcagtttgagatatatttcctataa

SEQ ID NO: 613414 - DNA, 120 bp, Artificial Sequence
  ENSG00000176641_45 (sequence is synthesized)
agaccagattcttactgataatctggtatttattccagtctagattttgattttaagagttcccatccctttatttgaaaacttatgttgtttcaaaattggttagtctgcttttcattg

SEQ ID NO: 613415 - DNA, 120 bp, Artificial Sequence
  ENSG00000176641_46 (sequence is synthesized)
ttttccaaatggaatatatacaaaatacatttacttcattttagcagaaatgggttgattttttttttctagaactcatcaatgtgcaagactttccttcttagcttgcctttaaaaatc

SEQ ID NO: 613416 - DNA, 120 bp, Artificial Sequence
  ENSG00000176641_47 (sequence is synthesized)
atttaatttttttttttttgccaagatactaatctttctttagccttaataggaagatagaagttcaaaagttatcggtgcaaaaggagtgatacacaaaagacttcaatttctatcttt

SEQ ID NO: 613417 - DNA, 120 bp, Artificial Sequence
  ENSG00000176641_48 (sequence is synthesized)
tctcagaaaagtgatgctgcccaccagtcagcattttgtttccacataagaagtgtcaggtagtcagtctgtcatccctgacttagatagagaagctgttccttgacatttccatcattc

SEQ ID NO: 613418 - DNA, 120 bp, Artificial Sequence
  ENSG00000176641_49 (sequence is synthesized)
tcagtaaattgtcacctacaaggtaattcttaccaaaacagaaactattgagaataataagatagtcgagataattcagtagctgttttgaaagtagtagtctatttaaaaagcaacgat

SEQ ID NO: 613419 - DNA, 80 bp, Artificial Sequence
  ENSG00000176641_50 (sequence is synthesized)
agctgttttgaaagtagtagtctatttaaaaagcaacgatgttcagttgctggattttgttcaacatgagacatcttggt

SEQ ID NO: 613420 - DNA, 120 bp, Artificial Sequence
  ENSG00000176641_51 (sequence is synthesized)
aaagataagtggaaattcaagccattgatttttctgacacaactgacttactacacacacacacacacacacaccacgatttagctgtaattggagttaaaattcagtaaaaaactgtta

SEQ ID NO: 613421 - DNA, 120 bp, Artificial Sequence
  ENSG00000176641_52 (sequence is synthesized)
ttagtcatgttttccaatttgtgagttatacaatattggattagatgctaatttcttaactgttgctatgggctgcatacattatgtcaaactaactacctttgggagtgtctatataaa

SEQ ID NO: 613422 - DNA, 120 bp, Artificial Sequence
  ENSG00000176641_53 (sequence is synthesized)
cacttgaaacttttcaaatatatgaagaggtaggttctactgtatacattttattggaaagccattaatcattgaagaacttaagcaggtggggcatttaatttcttccaaataccttat

SEQ ID NO: 613423 - DNA, 120 bp, Artificial Sequence
  ENSG00000176641_54 (sequence is synthesized)
tttttggatctgctcaagtggttagggcgagtgcaccattattcccgaatccctgcaatttggttcccatttttctgcacaaattttcttgctcagtcgagccaatgacttttttttttt

SEQ ID NO: 613424 - DNA, 120 bp, Artificial Sequence
  ENSG00000176641_55 (sequence is synthesized)
ttttttttttcaggattcactgcctggggtatcccactatatatatctcacctatgatgtagtggtgcttgaaatactcatctcattagctcgattttattattctaatctaaggttttt

SEQ ID NO: 613425 - DNA, 120 bp, Artificial Sequence
  ENSG00000176641_56 (sequence is synthesized)
tatattattcatactatgatatttttagggacaatcagtaatatttggggcagagtactgagggacctcttgaagtctgcaacagcatgcattttctttgtttttgtgggagtgcttccc

SEQ ID NO: 613426 - DNA, 120 bp, Artificial Sequence
  ENSG00000176641_57 (sequence is synthesized)
tgtagctgtctttgttctagaacactgctccaaatttatttccatgggatgtagggctagtagcccatgtgaaagtcttctgtaatctccttggggtgtgagttattgggttattctaac

SEQ ID NO: 613427 - DNA, 120 bp, Artificial Sequence
  ENSG00000176641_58 (sequence is synthesized)
aggagttttccaaagggatggcccatttttaattcaacatttgctttttgaaaatccagaagtagacagttggatataatagtggtggaagagcatgggctgtaagcagaaggaaataga

SEQ ID NO: 613428 - DNA, 120 bp, Artificial Sequence
  ENSG00000176641_59 (sequence is synthesized)
gatgacaaatgcctcttaaaggggatctagttgatacctctgttaaatagtgggagaacacagtagctggtaccttacactgtgctttaggaaaatcctatgaggatttcatttacaaat

SEQ ID NO: 613429 - DNA, 120 bp, Artificial Sequence
  ENSG00000176641_60 (sequence is synthesized)
cctcataggattttctgggttgagggacaatgcaactattaagtagagggagagggagagggaaagggagacatgaagcactgggtctatgtgaagggacaggcagatatacccaaagag

SEQ ID NO: 613430 - DNA, 120 bp, Artificial Sequence
  ENSG00000176641_61 (sequence is synthesized)
ggagaaaatacttaataaaggaagagtatagctgcaaaacaagacatataggagctgaaggccagatatggcagaaaccagctggagaaagaagcacaggacaactaggacaacttagtc

SEQ ID NO: 613431 - DNA, 120 bp, Artificial Sequence
  ENSG00000176641_62 (sequence is synthesized)
aagcacaatctgtcattccagtacggactaccaagttcaattcaggatgcttcagttgaagacatgtggggtaatgtgctcagctcatgagggtccaaggagtccccattttccctatca

SEQ ID NO: 613432 - DNA, 120 bp, Artificial Sequence
  ENSG00000176641_63 (sequence is synthesized)
ccctatcctatgctcgtggtttggattgttagcacactaggcaatttcagagtccgctctagagttggttgccacgtcagtgcagacagactctagaatcctcttaaccatggaatgcaa

SEQ ID NO: 613433 - DNA, 120 bp, Artificial Sequence
  ENSG00000176641_64 (sequence is synthesized)
ggcctgttcctgtggatctatcctgacttgagtatgtcagtactgttgggaaaatgagttcaagaatatttcagtttatatatcctggttgccgtcatatattttttcatttcaccactt

SEQ ID NO: 613434 - DNA, 120 bp, Artificial Sequence
  ENSG00000176641_65 (sequence is synthesized)
gtttgtgtttgcctcactcaacagtcatgggtgtagaagctggtttcagcttggggctgttacaaactccctacataagccatgtagctgcaatccagggttcctcccaccctacggctt

SEQ ID NO: 613435 - DNA, 120 bp, Artificial Sequence
  ENSG00000176641_66 (sequence is synthesized)
tagcggtgggttctctggccctcttgataacaaatactccagtctaatggctatattaatgctgctcagaggctattaactcaaatccttgatgtgtttcatttacaattatgtggatta

SEQ ID NO: 613436 - DNA, 120 bp, Artificial Sequence
  ENSG00000176641_67 (sequence is synthesized)
tttttttttttttttttttttttaagggccaaatagccctacagataaatgagctgctgggctgtgtagaaaatattgtccaaatgttgccaaatattgacttcgtaaaggggatatcaa

SEQ ID NO: 613437 - DNA, 120 bp, Artificial Sequence
  ENSG00000176641_68 (sequence is synthesized)
gtaaaggggatatcaagctgctgtttataaatctgaatgtcttaaaagcattcttgcttgctctctctgttatagatggtgtcttagccagtcctgagttttccaatgaacccaatttta

SEQ ID NO: 613438 - DNA, 120 bp, Artificial Sequence
  ENSG00000176641_69 (sequence is synthesized)
atatatggtatttttgtatgccaaactggtgtcttgtcctttgtatatgtggtaatgttgattttatgactaccgtaaaaacacatttgctatgattaaagttcataaaatgatttcaaa

SEQ ID NO: 613439 - DNA, 120 bp, Artificial Sequence
  ENSG00000176641_70 (sequence is synthesized)
gtctggctgaaaggagcgggcgcgccgggaccacccggcgatgctgtcgccgccgccgccgcctctgtagcgagcacccgagcccgccgcggagaaaggctgaagaaagctcagtctcaa

SEQ ID NO: 613440 - DNA, 120 bp, Artificial Sequence
  ENSG00000176641_71 (sequence is synthesized)
acagtgtggttggcaggtggaccctgctcatcgtagtcactcaaggactcaaactgatggagtcttggtcttgatgtgagcttgcaagatcattgcagcatcgggaaggaaatgctgcag

SEQ ID NO: 613441 - DNA, 120 bp, Artificial Sequence
  ENSG00000176641_72 (sequence is synthesized)
ggtcttgctctagcaattatgtgatcctacccagagatcacgtttggctgctaaggcctggactacgttcttcgtggagttgtgagggggctgcttgtgatcgcctaggagtggagagga

SEQ ID NO: 613442 - DNA, 120 bp, Artificial Sequence
  ENSG00000176641_73 (sequence is synthesized)
agttgcgcccccggcccgcacacaccccggctcatcttctcccggtccccttgtctcgcgccttctccagccctagaagttgccccagggcccctcccgggattagagagcgctgtgaag

SEQ ID NO: 613443 - DNA, 120 bp, Artificial Sequence
  ENSG00000176641_74 (sequence is synthesized)
ggccagatgttgggggtcttttgtgcagacacacgcgcctggggcgcttgctcctggaaggacagcggcaggacaaagccagctggactcgtggggcgctgctcgggaagcggcggtccc

SEQ ID NO: 613444 - DNA, 120 bp, Artificial Sequence
  ENSG00000176641_75 (sequence is synthesized)
cccattgtgacgtcatggaaaccggaaaggaagaaggtgttggttttcctgcttcttttcccatggcttcgagagttacactgtgtgatccagcagtctgactccatgattgaaatcaca

SEQ ID NO: 613445 - DNA, 120 bp, Artificial Sequence
  ENSG00000176641_76 (sequence is synthesized)
attgggataaagttggtagagatgcttcttaatttacagtggggttatatcctcataaacccctcataagttaaaaatattgtaagtggaaaatgcatttaatacacctactgacatcat

SEQ ID NO: 613446 - DNA, 120 bp, Artificial Sequence
  ENSG00000176641_77 (sequence is synthesized)
agctcagccttgtctgccttaactgtgcccagaaatgcgcattagcctacaatgggggcaaaatcatgtaacaagaagcctattttgtattaaagcatcaaatatctcatgtagtttatt

SEQ ID NO: 613447 - DNA, 120 bp, Artificial Sequence
  ENSG00000176641_78 (sequence is synthesized)
ttgttttcacaccattgtaaagtcaaaaaatcaaaggtcataggtcaaacagttgtaagtagggaaccgtctgtgcttgttacatgcttagggattttcaatttctaattgactcactgt

SEQ ID NO: 613448 - DNA, 120 bp, Artificial Sequence
  ENSG00000176641_79 (sequence is synthesized)
cattgtaggatttaaagagggagacctcaaatagtgtatctgtgacctgcatctcctttgggtggttcttgatgtccatgatttcttggcctagatcacgtttggctgctaaggcctgga

SEQ ID NO: 613449 - DNA, 120 bp, Artificial Sequence
  ENSG00000176641_80 (sequence is synthesized)
ctacgttcttcgtggagttgtgagggggctgcttgtgatcgcctaggagtggagaggatgccttatttaccccttgatatactaatgcctgcataaataaaactcattgcaaacatcctg

SEQ ID NO: 613450 - DNA, 120 bp, Artificial Sequence
  ENSG00000176658_0 (sequence is synthesized)
cgcccggcagccgcggcgggaggagcggaaactgtcgggtgcgtcccgttcggagccgcgccggccgagaaggcgccgaggagcagcgaggcggcctctgtccggcccggacccgccgag

SEQ ID NO: 613451 - DNA, 80 bp, Artificial Sequence
  ENSG00000176658_1 (sequence is synthesized)
ctcccgagctcatcgcgggcccacggagcggccccggaggcccgagcgcgcccacctgagcccccgcgctggcgccatgg

SEQ ID NO: 613452 - DNA, 120 bp, Artificial Sequence
  ENSG00000176658_2 (sequence is synthesized)
cgcgctggcgccatggcggagcaggagagcctggaattcggcaaggcagacttcgtgctgatggacaccgtctccatgcccgagttcatggccaacctcaggctcagatttgaaaaaggg

SEQ ID NO: 613453 - DNA, 120 bp, Artificial Sequence
  ENSG00000176658_3 (sequence is synthesized)
cgcatctatacgttcattggagaagtcgtcgtttctgtgaacccttacaagttgttgaacatctatggaagagacacaattgagcagtataaaggccgtgagctgtatgagagaccgcct

SEQ ID NO: 613454 - DNA, 120 bp, Artificial Sequence
  ENSG00000176658_4 (sequence is synthesized)
cacctttttgctattgcggatgctgcttacaaggctatgaagaggcgatcaaaagacacttgtattgtgatatcaggggaaagtggagctggtaaaacggaagccagtaagtacattatg

SEQ ID NO: 613455 - DNA, 120 bp, Artificial Sequence
  ENSG00000176658_5 (sequence is synthesized)
cagtatattgcggccatcaccaaccccagtcagagagcagaggttgaaagagtgaagaatatgttgcttaagtccaactgtgttttggaagcttttggaaatgccaaaaccaaccgtaat

SEQ ID NO: 613456 - DNA, 120 bp, Artificial Sequence
  ENSG00000176658_6 (sequence is synthesized)
gacaactcaagcaggtttggaaaatacatggatatcaactttgacttcaagggtgaccctattggtgggcatatcaataactacttactagaaaagtctcgagtgattgtgcaacagcca

SEQ ID NO: 613457 - DNA, 120 bp, Artificial Sequence
  ENSG00000176658_7 (sequence is synthesized)
ggagaaagaagctttcattctttctatcagctactccaaggaggttcagaacaaatgctacgctctctacatctccagaaatccctttcatcctacaactatattcatgtgggagctcaa

SEQ ID NO: 613458 - DNA, 120 bp, Artificial Sequence
  ENSG00000176658_8 (sequence is synthesized)
ttaaagtcttctatcaatgatgctgccgaattcagagttgttgctgatgccatgaaagtcattggcttcaaacctgaggagatccaaacagtgtataagattttggctgctattctgcac

SEQ ID NO: 613459 - DNA, 120 bp, Artificial Sequence
  ENSG00000176658_9 (sequence is synthesized)
ttgggaaatttaaaatttgtagtagatggtgacacgcctcttattgagaatggcaaagtagtatctatcatagcagaattgctctctactaagacagatatggttgagaaagcccttctt

SEQ ID NO: 613460 - DNA, 120 bp, Artificial Sequence
  ENSG00000176658_10 (sequence is synthesized)
taccggactgtggccacaggccgtgacatcattgacaagcagcacacagaacaagaggccagctacggcagagacgcctttgccaaggcaatatatgagcgccttttttgttggatcgtt

SEQ ID NO: 613461 - DNA, 120 bp, Artificial Sequence
  ENSG00000176658_11 (sequence is synthesized)
actcgcatcaatgatattattgaggtcaagaactatgacaccacaatccatgggaaaaacactgttattggtgtcttggatatctatggctttgaaatctttgacaacaacagttttgaa

SEQ ID NO: 613462 - DNA, 120 bp, Artificial Sequence
  ENSG00000176658_12 (sequence is synthesized)
caattctgtatcaattactgcaatgagaaactgcagcagctatttattcagctggttctgaagcaagaacaagaggaataccagcgggaagggatcccctggaaacatattgactacttc

SEQ ID NO: 613463 - DNA, 120 bp, Artificial Sequence
  ENSG00000176658_13 (sequence is synthesized)
aacaatcagatcattgttgacctcgtggagcaacagcacaaagggatcattgcaatccttgatgatgcttgcatgaatgtcggcaaagtcaccgatgaaatgtttcttgaagcacttaac

SEQ ID NO: 613464 - DNA, 120 bp, Artificial Sequence
  ENSG00000176658_14 (sequence is synthesized)
agtaaattgggcaaacacgcccatttttccagccgaaagctctgtgcctcagacaaaattctggagtttgatcgagattttcgaattcgacattatgcaggcgatgtagtctattctgtc

SEQ ID NO: 613465 - DNA, 120 bp, Artificial Sequence
  ENSG00000176658_15 (sequence is synthesized)
attggttttattgacaaaaataaagatactttatttcaagatttcaagcgccttatgtataacagttcaaatcctgtgctcaagaatatgtggcctgaaggcaaactgagcattacagag

SEQ ID NO: 613466 - DNA, 120 bp, Artificial Sequence
  ENSG00000176658_16 (sequence is synthesized)
gtgaccaagcgacctctgactgctgctaccttgtttaagaattctatgattgctctagtagacaaccttgcatcaaaggaaccatattacgttcgttgcatcaaacccaatgacaagaaa

SEQ ID NO: 613467 - DNA, 120 bp, Artificial Sequence
  ENSG00000176658_17 (sequence is synthesized)
tctccacagatatttgatgatgaacgctgccggcaccaagtagaatatcttggactactggaaaatgtgagagtgcgtcgggcaggatttgccttccgccagacatacgagaagtttctt

SEQ ID NO: 613468 - DNA, 120 bp, Artificial Sequence
  ENSG00000176658_18 (sequence is synthesized)
cacaggtataagatgatctctgaattcacctggcccaaccatgaccttccttcagacaaagaggctgtcaagaaactaattgaacggtgtggttttcaggatgatgtagcttatgggaag

SEQ ID NO: 613469 - DNA, 120 bp, Artificial Sequence
  ENSG00000176658_19 (sequence is synthesized)
accaaaattttcattcgaacaccccgaacattgtttaccttggaagaactccgtgcccagatgctcataaggattgtcctctttctacaaaaggtgtggcggggcaccctggcccgcatg

SEQ ID NO: 613470 - DNA, 120 bp, Artificial Sequence
  ENSG00000176658_20 (sequence is synthesized)
cggtacaaaagaaccaaggcagctctgacaataatcaggtactaccggcgctacaaagtgaagtcgtacatccacgaggtggccagacgcttccatggcgtcaagaccatgcgagactac

SEQ ID NO: 613471 - DNA, 120 bp, Artificial Sequence
  ENSG00000176658_21 (sequence is synthesized)
gggaagcacgtgaagtggccaagccctcctaaagttcttcgccgttttgaggaggccctgcagacgattttcaatagatggagagcatcccagctcatcaagagcattccggcctcagac

SEQ ID NO: 613472 - DNA, 120 bp, Artificial Sequence
  ENSG00000176658_22 (sequence is synthesized)
tacacctcagacctcaggcacttttgtccctgttgctaatgaattgaaacggaaggacaaatacatgaatgtcctcttttcctgtcacgtccgtaaggtaaatcgatttagtaaggtgga

SEQ ID NO: 613473 - DNA, 120 bp, Artificial Sequence
  ENSG00000176658_23 (sequence is synthesized)
agacagagcaatttttgtcactgaccgtcacctgtataaaatggatcccactaaacagtacaaggtgatgaagactatccctctatacaatttgactggtctgagtgtctccaatggaaa

SEQ ID NO: 613474 - DNA, 120 bp, Artificial Sequence
  ENSG00000176658_24 (sequence is synthesized)
ggaccaacttgtagtgttccatacgaaagacaacaaagacctcattgtctgcctcttcagcaaacagccaacccatgagagtcgaattggagaacttgttggagtgctggtgaatcattt

SEQ ID NO: 613475 - DNA, 120 bp, Artificial Sequence
  ENSG00000176658_25 (sequence is synthesized)
caagagtgagaagcgccaccttcaagtgaacgtcaccaacccagtacagtgcagcctgcacgggaagaagtgcaccgtctccgtggagacgcggctcaaccagccccagcccgacttcac

SEQ ID NO: 613476 - DNA, 120 bp, Artificial Sequence
  ENSG00000176658_26 (sequence is synthesized)
caagaatcgctcgggcttcatcctcagcgtgcccgggaactgacgccccgcggaggcctggcccggagcccggccacactccgagtcctgggtcccagtccagctgctgcctcccaaccc

SEQ ID NO: 613477 - DNA, 120 bp, Artificial Sequence
  ENSG00000176658_27 (sequence is synthesized)
atgcccgctagaaacctgctgcgagggcccctcccagaggagccccgcccctgtaagatttccttcctggttttctgcctttggtatcatcttcctctgtccttactgtccacggtccct

SEQ ID NO: 613478 - DNA, 120 bp, Artificial Sequence
  ENSG00000176658_28 (sequence is synthesized)
gttcaataagccaaagaccctggtgccccgcccagacccctgggctgacgtccagaccaatctcaccccagaggcaactggatggtgcctttagttggtgcggatgccccgtggccaggt

SEQ ID NO: 613479 - DNA, 120 bp, Artificial Sequence
  ENSG00000176658_29 (sequence is synthesized)
caagtcagagcacctggacaggtgtcctccctgctgctgaccctgcagagggaaggggtggggatgcaggaccccactctgcgggagccccatagccacctctcttgcccaaggtgagcc

SEQ ID NO: 613480 - DNA, 120 bp, Artificial Sequence
  ENSG00000176658_30 (sequence is synthesized)
agccctggggacccagctcagggaggctctgctcagagttcggcggacccaccccaacccaactcccagccgccagccaaagccactgggtgagcagagtcacccacagggccagcccct

SEQ ID NO: 613481 - DNA, 120 bp, Artificial Sequence
  ENSG00000176658_31 (sequence is synthesized)
cagccaggagccagtggcaggagcggaacagcccatccagcagagtgagtccatccttcccaggttctcccctgggagactccctttgccaccaaggcccccaccagggcctctgaccac

SEQ ID NO: 613482 - DNA, 120 bp, Artificial Sequence
  ENSG00000176658_32 (sequence is synthesized)
cgctctggagaggacagtgtggcatgctccaaggatcatcttacttaactcgcagcctgtggctgtggtcctcttatagatactttcaccgtttgcagggttgctaatcagatacctgct

SEQ ID NO: 613483 - DNA, 120 bp, Artificial Sequence
  ENSG00000176658_33 (sequence is synthesized)
gtcaccacacttgggtcaggaaccctaatgagaacggggagctgccagggtgagggcagccctcagggtcggccgctttccctctggaccacctcccgctgcgtttcctactcagagaaa

SEQ ID NO: 613484 - DNA, 120 bp, Artificial Sequence
  ENSG00000176658_34 (sequence is synthesized)
cagcaagggcggggtcaagacacgggatgacgggaagcaggaagcggggcagcagcacagcgtggggtcctggcactgcaggccaggccaggatgcccaccccgccctctacacggcccc

SEQ ID NO: 613485 - DNA, 120 bp, Artificial Sequence
  ENSG00000176658_35 (sequence is synthesized)
ttggggcctgcgcccgtgaaactggtgccagggagcactgccagcttgccagtttctgcccagcaaaagcacgtatgcttcaggggccttctgagaccaccttccccactgagccccagc

SEQ ID NO: 613486 - DNA, 120 bp, Artificial Sequence
  ENSG00000176658_36 (sequence is synthesized)
tgctgagaaggccttgagggaagtagaggctgggagcaaatgccccatgcggtgagaggatgaggggagcctacgcctcaggcatgtggtgagaggatgagggggagggagccaacgcct

SEQ ID NO: 613487 - DNA, 120 bp, Artificial Sequence
  ENSG00000176658_37 (sequence is synthesized)
caggtggagtgggcagaggtgcaagagagggatgtactgaagcttcttcccgtcctgccacagacacttctcctgccttcccaccctgacccggcagaacccaccaagtgcctgtgtgca

SEQ ID NO: 613488 - DNA, 120 bp, Artificial Sequence
  ENSG00000176658_38 (sequence is synthesized)
gcctcctgtgcctcacccagggcctgaccccagagtggtcccaacaacccggtctcatgcccactccccatccctgcttcccaaaaattgcactgtgtgcagtttgcaacaaagaatccc

SEQ ID NO: 613489 - DNA, 120 bp, Artificial Sequence
  ENSG00000176658_39 (sequence is synthesized)
gctggcatcctgtccttgggaaccctttctcattctccaagcctggtcagctgcctgcacaggcagaggtgccctcagcccagattagcaacactcatagttttgccaattaccagtaga

SEQ ID NO: 613490 - DNA, 120 bp, Artificial Sequence
  ENSG00000176658_40 (sequence is synthesized)
cactagtggaaccatctaactggaacttcctctctccttccacttatttcctcaaacttgttgctttacactagacacatgcaaatgtatgttttaaacacaccaaaacagatcatgcca

SEQ ID NO: 613491 - DNA, 120 bp, Artificial Sequence
  ENSG00000176658_41 (sequence is synthesized)
aatgagttgcctgtcaaaggctggagggcaggaggagggcctgggtttgggttctttcctcccagcctttggatggtgccttgggccccttagccccagcgccagggcctcccagctgag

SEQ ID NO: 613492 - DNA, 120 bp, Artificial Sequence
  ENSG00000176658_42 (sequence is synthesized)
gccacaggacaagcacttttttatgatgtactaaaagccacagtatgtggcaactgcaaaaggatcaggaatttagggtatgatctcggtcacgtgtcccgggcgctgaggggaaaggaa

SEQ ID NO: 613493 - DNA, 120 bp, Artificial Sequence
  ENSG00000176658_43 (sequence is synthesized)
gcgggcatgattgtagacaatgagggggttctcttgatgtaatgaaatgcaattttatggtttggtgcaaaaactcctattttccagtaaattaactttatttctaaagcatattttgat

SEQ ID NO: 613494 - DNA, 120 bp, Artificial Sequence
  ENSG00000176658_44 (sequence is synthesized)
ttgccatcaagagcaataaagcattaaatcttatttttaaaggtgttctgcttatctgtcactgaaaacttggtgaaatttttgcttaaataaagtcaaccattatctgggaggatagaa

SEQ ID NO: 613495 - DNA, 120 bp, Artificial Sequence
  ENSG00000176658_45 (sequence is synthesized)
ttcttcaacttcttgatttaccctaggctggggttcccaaatccagctttgtgtcatgatcacccagcttttaaaatacgcagattccccggactctgtcttctggagatggtgatttat

SEQ ID NO: 613496 - DNA, 120 bp, Artificial Sequence
  ENSG00000176658_46 (sequence is synthesized)
taagcctccttagtgcccagctcaaatgaagaaatattgcaccagaagaagaaagccaagaaatgaagtcacaacgtcagtcatttaatccaccacctgtggtcctaactagttcttatg

SEQ ID NO: 613497 - DNA, 120 bp, Artificial Sequence
  ENSG00000176658_47 (sequence is synthesized)
tcctgtggaacacacagtctaacaaggggataaaactaattgactccatcacatggaaaccatgatttttgccaagagaagcagaaacaagatgctttcacccttgggagagattctcat

SEQ ID NO: 613498 - DNA, 120 bp, Artificial Sequence
  ENSG00000176658_48 (sequence is synthesized)
aggaggccctgcagacgattttcaataggtaagaacgtgctgctgtgtgctgcatccatttatggtggcacagttaatactatgcaaagtcacaagtctgagaccgtgatattgactcag

SEQ ID NO: 613499 - DNA, 120 bp, Artificial Sequence
  ENSG00000176658_49 (sequence is synthesized)
ctatttgctgttatgacatttacctttaccttatgttttcagttttgtagatttggctttcaaagagcatctgcttacccctcaaaataaaggaactgccaatttgtttttcctgtagca

SEQ ID NO: 613500 - DNA, 120 bp, Artificial Sequence
  ENSG00000176658_50 (sequence is synthesized)
cccctggacacaagccatagttaagataagctactagcatgctgtttctacttacttttattagctaaaaataaaaccaccacgcataactcaaactagaaaatccattaatcctttcaa

SEQ ID NO: 613501 - DNA, 120 bp, Artificial Sequence
  ENSG00000176658_51 (sequence is synthesized)
agcagtggttctcaattctgctgcaccttagaataacaaggagtttaggaaatatgccagcacccaggtcctaccaccagagagtcctgtttaatggcgctggaggggtggggcccaggc

SEQ ID NO: 613502 - DNA, 120 bp, Artificial Sequence
  ENSG00000176658_52 (sequence is synthesized)
agaggtccttttttaaagtttcccacgtgattttaaagtgcagccaaaggggaaaataactgtttttagagcgagctgtcttttaaataaataaaaacccaagtaaaatttggtaccttt

SEQ ID NO: 613503 - DNA, 120 bp, Artificial Sequence
  ENSG00000176658_53 (sequence is synthesized)
aaacacgcccatttttccagccgaaagctctgtgcctcagacaaaattctggagtttgatcgagattttcgaattcgacattatgcaggcgatgtagtttcttcttggaatcttttatcc

SEQ ID NO: 613504 - DNA, 120 bp, Artificial Sequence
  ENSG00000176658_54 (sequence is synthesized)
taccctcaacactgagtgaaccttaggcaagtcacttgacctccctacggatgagactgttagttcctgtatgttgctgttttgcttttatcttaggaatgctggatgataaatacagct

SEQ ID NO: 613505 - DNA, 120 bp, Artificial Sequence
  ENSG00000176658_55 (sequence is synthesized)
tggagatacacggagcccagaggaagcagggagggtggaggcaggggccaccctgctgagcgggagtcaggagagccctgcacggaggagcatgccccgattgtctgaacacgagaggtg

SEQ ID NO: 613506 - DNA, 120 bp, Artificial Sequence
  ENSG00000176658_56 (sequence is synthesized)
tcactttatggctgctaccacgtggacttactggtttatatctgtctgttaggtttagcatactttattaagttataccttaaattggctgaactttgcttcagaatctagtttcttctt

SEQ ID NO: 613507 - DNA, 120 bp, Artificial Sequence
  ENSG00000176658_57 (sequence is synthesized)
ccctttttcctcctttttctcctcttctactttgtagactatatggtattttattgtcttcagttaatgttgtttatattctctgaaacctacacattaaaatacttgttttactttgca

SEQ ID NO: 613508 - DNA, 120 bp, Artificial Sequence
  ENSG00000176658_58 (sequence is synthesized)
catctgcttatactctgaataaaattcaagaaagcatagattctacataaacaggcccaagattacatggcaaactgagatgaagaggatgctggctgagaaacaaacaaaagtgttcaa

SEQ ID NO: 613509 - DNA, 120 bp, Artificial Sequence
  ENSG00000176658_59 (sequence is synthesized)
ttatttgaatgaagtaaggaaagatattttaaaatgtaaatcaacattaaaatctgaaaatggcacagttgatattgcagaaaatagaattgatgtgaaaggaaagtttgaagtctctca

SEQ ID NO: 613510 - DNA, 120 bp, Artificial Sequence
  ENSG00000176658_60 (sequence is synthesized)
gtgtgcagaatttactgttataatgggcaacatgttaactttcttagcaatatacaaaataagggtacatcttacagagaaggcatcttatattcaataaaatatggtaatttaaaacat

SEQ ID NO: 613511 - DNA, 120 bp, Artificial Sequence
  ENSG00000176658_61 (sequence is synthesized)
tgtgttcttgtcagcagttgggaggaaagggctcaaaacttcccaaggctgaggcaagaaccagctaagaggaccagagggaacagtgcccagcctcacaaagagccaggagtagtttct

SEQ ID NO: 613512 - DNA, 120 bp, Artificial Sequence
  ENSG00000176658_62 (sequence is synthesized)
acccacctcggcctcctaaagcgctggcattgcagatgtgagccaccatgctcagccatctcaactattttgaagaagtgcatatacagatacagttttcatcttcaaagcaagtaaaat

SEQ ID NO: 613513 - DNA, 120 bp, Artificial Sequence
  ENSG00000176678_0 (sequence is synthesized)
agggctaagtcaacatataacagcaaacttacaacaattatttaacatttttaaagccatgaagaagggacagagcacggagcggccggggagagcggcagagccagaggcagaggcacg

SEQ ID NO: 613514 - DNA, 120 bp, Artificial Sequence
  ENSG00000176678_1 (sequence is synthesized)
gctggctccccgggagggcccttgcggcgcggggcgcagtgcctaggccgcccgggtctcctgcgttgcggggagcgcagcgcaggctctcgcttgccatgagtcacctcttcgatcccc

SEQ ID NO: 613515 - DNA, 120 bp, Artificial Sequence
  ENSG00000176678_2 (sequence is synthesized)
ggctgcctgccctggccgcctcgcccatgctgtatctgtacggtcccgagagacccggcctccctctggccttcgcccccgcggctgctctagctgcctcgggccgggccgagaccccgc

SEQ ID NO: 613516 - DNA, 120 bp, Artificial Sequence
  ENSG00000176678_3 (sequence is synthesized)
agaagcctccctacagctacatcgcgctcatcgccatggcgatccaggacgcgcccgagcagagggtcacgctcaacggcatctaccagttcatcatggaccgcttccccttctaccacg

SEQ ID NO: 613517 - DNA, 120 bp, Artificial Sequence
  ENSG00000176678_4 (sequence is synthesized)
acaaccggcagggctggcagaacagcatccgccacaacctctcgctcaacgactgcttcgtcaaggtgccccgcgagaaagggcggccgggcaagggcagctactggacgctggaccccc

SEQ ID NO: 613518 - DNA, 120 bp, Artificial Sequence
  ENSG00000176678_5 (sequence is synthesized)
gctgcctggacatgtttgagaacggcaactaccggcgccggaagaggaagcccaagccgggccccggggccccggaggccaagaggccccgcgccgagacgcaccagcgcagcgcggagg

SEQ ID NO: 613519 - DNA, 80 bp, Artificial Sequence
  ENSG00000176678_6 (sequence is synthesized)
cgcaatctcccgcctgcaggcagcgcccgcgggcccctcgcccctcctggacggcccctctccgccggcgcccctccact

SEQ ID NO: 613520 - DNA, 120 bp, Artificial Sequence
  ENSG00000176678_7 (sequence is synthesized)
aacgaggacgctggtgacgctgcccagggcgcagcggccgtggcggtcggccaggcagcgcgcacaggggacggcccggggtcccctctgcgccccgcctcccgcagctctccgaagagc

SEQ ID NO: 613521 - DNA, 120 bp, Artificial Sequence
  ENSG00000176678_8 (sequence is synthesized)
cccgcagctctccgaagagctccgacaagtccaagagcttcagcatagacagcatcctggcgggaaagcagggccagaagccgccttcaggggacgaactcctagggggtgccaagcctg

SEQ ID NO: 613522 - DNA, 120 bp, Artificial Sequence
  ENSG00000176678_9 (sequence is synthesized)
ggcccggcggccgtctgggtgcctcgctcctggccgcctcctccagcctccgtccgcctttcaacgcttccctgatgctcgacccgcatgtccagggcggcttttaccagctcgggatcc

SEQ ID NO: 613523 - DNA, 120 bp, Artificial Sequence
  ENSG00000176678_10 (sequence is synthesized)
ccttcctctcttatttccccctgcaggttcccgacacggtactccacttccagtaaagcaaacaatggcacggttcttctcccggcccagcctgagcctccgctgagcgaaaggccacag

SEQ ID NO: 613524 - DNA, 120 bp, Artificial Sequence
  ENSG00000176678_11 (sequence is synthesized)
ctcccaccggcggaggattttaaaatgatctttgcctgggtcggcctgtgggttcagggaagtgttaccaaccattgcgcgcaggtgggcgcgctcgcctgccttctccgaagcaaactt

SEQ ID NO: 613525 - DNA, 120 bp, Artificial Sequence
  ENSG00000176678_12 (sequence is synthesized)
ttcccagcaactgggagcagctacggagacttaaaagatccccgcggggtcgtgggcaccgcacgtgggccctgcagggacctccaccgcgggagattccttgacgtttgacctgtctaa

SEQ ID NO: 613526 - DNA, 120 bp, Artificial Sequence
  ENSG00000176678_13 (sequence is synthesized)
tggagtgtggtcttcagccgcccaccgcaggtcctgcgagtcccgggcatgcaagggcccgcagaccacccaaggcaggccttacaggtgcagttgaggtcctttcgaccggggaccccc

SEQ ID NO: 613527 - DNA, 120 bp, Artificial Sequence
  ENSG00000176678_14 (sequence is synthesized)
gtatgaccgtcgcctgcttcgctgttgccgtgtggctcaggccttggttttgagcccatctgggtggtgggtggtcacagctgggtttgttcctgacttgaagttgtggaggtgccgggg

SEQ ID NO: 613528 - DNA, 120 bp, Artificial Sequence
  ENSG00000176678_15 (sequence is synthesized)
accaatgttcagctatagaagctgataaccacccagagcaataacacttttattttaaacagagactttttctcttaatttctttctgggtagtaaaaagaacatgtttcattctttgca

SEQ ID NO: 613529 - DNA, 120 bp, Artificial Sequence
  ENSG00000176678_16 (sequence is synthesized)
taaatacttgactctaagcattgacctttgaaaacgcttgtattaacaatttttattaagaaagtgcactctatataacatcttcttgcattacgatagctcattagccaatacacatgc

SEQ ID NO: 613530 - DNA, 120 bp, Artificial Sequence
  ENSG00000176678_17 (sequence is synthesized)
agctatgtaagccacaacagcagacgtcctatccttttgcttttgtttttaagggatcaaaatatttcaagggataccatgaggaagggtgtgaggggaaggggatatgccttggacaat

SEQ ID NO: 613531 - DNA, 120 bp, Artificial Sequence
  ENSG00000176678_18 (sequence is synthesized)
gtcagagttttgatttccatgttttttcaagatccaggcttggtggtcgctatatttttcagaaacagataatgaaagactacatttaatttaaaaagttgggtgaaacaaccaaaagca

SEQ ID NO: 613532 - DNA, 120 bp, Artificial Sequence
  ENSG00000176678_19 (sequence is synthesized)
gatgcagagagagagagggatgaatgcgggggaagaataaggggacgtgctggtgtccgctggaaggggcctctctgggccccagaggacctgaggtttgatggcaggaatctcccagac

SEQ ID NO: 613533 - DNA, 120 bp, Artificial Sequence
  ENSG00000176678_20 (sequence is synthesized)
actcctggcccccgcaccccctgcagccgcccgctcttccctcccagccctgccaggcaggcctggaggctgatactaaatcaaaaccttaaagaggtgactggcagtctggggagggga

SEQ ID NO: 613534 - DNA, 120 bp, Artificial Sequence
  ENSG00000176678_21 (sequence is synthesized)
gaagaggtctgcaacgaaaatctaattaagaacattgagatgttcacaaccaagttcagcttgcagcttccggggaaatgcaaccgacctctatgccatctctagctgggtaatcttcga

SEQ ID NO: 613535 - DNA, 120 bp, Artificial Sequence
  ENSG00000176678_22 (sequence is synthesized)
ggccctgaaatgcaattttctgaacctctaagtcacttttattttatgtcatgtgataaagacacaagtagtcacgcactattggaaataggttgggagggaggtctttaagatcgcttt

SEQ ID NO: 613536 - DNA, 120 bp, Artificial Sequence
  ENSG00000176678_23 (sequence is synthesized)
taaaatagtttccaggacttgtctaaaaatgatgacaaactttgaatccagagggcctgttggtcaatgtgttggaaaggacatttcaggccggcagagtaattggataattcacaggca

SEQ ID NO: 613537 - DNA, 120 bp, Artificial Sequence
  ENSG00000176678_24 (sequence is synthesized)
tagaggtgacttttggaaaattcattctcctatccatgctgaaccaggcttccacgactgggttctacccaggccagtgggaagactctgggaaacttcaggccagccttgattggaaga

SEQ ID NO: 613538 - DNA, 120 bp, Artificial Sequence
  ENSG00000176678_25 (sequence is synthesized)
acttccaggaggagccattgctgagatccaggctcactgtgattcactgaaaatgtagcgaaagggctgtcactggatattttgctatcccaaactctcagcctctgtgaataaagttgt

SEQ ID NO: 613539 - DNA, 120 bp, Artificial Sequence
  ENSG00000176678_26 (sequence is synthesized)
tttttcattaacctctcagtgactggttcagtggattactggagggaaataaacaaacagtgtaataagaaagaggagactgggattatatctgggagtcgtgttagcatctcaggaggc

SEQ ID NO: 613540 - DNA, 120 bp, Artificial Sequence
  ENSG00000176678_27 (sequence is synthesized)
tctggcttctgaggggtaaacacacagatggaggggaaggagtggagaggatgccgggcccaggaagctgcctccatatcagaaagcacgatgagttaattctgccgtattgaatcggtt

SEQ ID NO: 613541 - DNA, 120 bp, Artificial Sequence
  ENSG00000176678_28 (sequence is synthesized)
tttaatctttcctttttcttttttgtgtttgtatgttatcttgggaggttttgttaatttgtgatggctatgttttgaagaagcaaataatttgatactgcagttttaaaagggtcgtat

SEQ ID NO: 613542 - DNA, 120 bp, Artificial Sequence
  ENSG00000176678_29 (sequence is synthesized)
tttaaagttactattccaaaaagtattgtacgaatgttacttttatgacacagaaaaaatgcagatgtatccactttgtgtgtttatacatgcataaagagaaattctatttaatcccaa

SEQ ID NO: 613543 - DNA, 120 bp, Artificial Sequence
  ENSG00000176678_30 (sequence is synthesized)
ggcgggagtttcggtagaggcagggatgtgcgtgctggacttcgggtgccgcgtggggagctccaggaggggctgtgggataggaagccatgaagaagggacagagcacggagcggccgg

SEQ ID NO: 613544 - DNA, 120 bp, Artificial Sequence
  ENSG00000176679_0 (sequence is synthesized)
aagaaaggatgtgacgtcactgagataaccagctcggctgttagcaactctgttagcaaagctgtttgtctttctcggaaacaacagtaacgataagcctctttgaatatggaggccgct

SEQ ID NO: 613545 - DNA, 120 bp, Artificial Sequence
  ENSG00000176679_1 (sequence is synthesized)
gcagacggcccggctgagacccaaagcccggtggaaaaagacagcccggcgaagacccaaagcccagcccaagacacctcaatcatgtcgagaaataacgcagatacaggcagagttctt

SEQ ID NO: 613546 - DNA, 120 bp, Artificial Sequence
  ENSG00000176679_2 (sequence is synthesized)
gccttaccagagcacaagaagaagcgcaagggaaacttgccagccgagtccgttaagatcctccgcgactggatgtataagcatcggtttaaggcctacccttcagaagaagagaagcaa

SEQ ID NO: 613547 - DNA, 120 bp, Artificial Sequence
  ENSG00000176679_3 (sequence is synthesized)
acgcattctcccggatatgcttcaacagcgtagaaacgaccccatcattggccacaaaacgggcaaagatgcccatgccacccacctgcagagcaccgaggcgtctgtgccggccaagtc

SEQ ID NO: 613548 - DNA, 120 bp, Artificial Sequence
  ENSG00000176679_4 (sequence is synthesized)
agggccagtggtccagacaatgtacaaagcctgcccctgtggcccttgccaaagggccagatgtcaagagagaagcaaccagatccggagtcggcccctagccagaagctcaccggaata

SEQ ID NO: 613549 - DNA, 120 bp, Artificial Sequence
  ENSG00000176679_5 (sequence is synthesized)
gcccagccaaagaaaaaggtcaagatttctatcacttccccgtcttctccagaacttgtgtctccagaggagtacgccgacttcagcagcttcctgctgctagtcgatgcagcagtacaa

SEQ ID NO: 613550 - DNA, 120 bp, Artificial Sequence
  ENSG00000176679_6 (sequence is synthesized)
acggctgccgagctggagctagagaagaagcaagagcctaatccatgattgatgatgttccaaaaacccaagtagtcagtcccttgtgtactgtggtaaacctgtttatgttcaccccaa

SEQ ID NO: 613551 - DNA, 120 bp, Artificial Sequence; identical to SEQ ID NO: 439652
  ENSG00000176679_7 (sequence is synthesized)

SEQ ID NO: 613552 - DNA, 120 bp, Artificial Sequence
  ENSG00000176681_0 (sequence is synthesized)
agaatgtcttctgctcagtgcccggcactagtgtgtgtcatgtcccggctgcgtttctggggcccatggcccctccttatgtggcaactattgtggctactagtcaaggaggctcagcct

SEQ ID NO: 613553 - DNA, 120 bp, Artificial Sequence
  ENSG00000176681_1 (sequence is synthesized)
ctggagtgggtcaaggacccgctccagctcacctctaatcccctggggccgcctgagtcctggtcttcccactcctcccatttcccacgggaatctccccatgcgcctactctcccagca

SEQ ID NO: 613554 - DNA, 120 bp, Artificial Sequence
  ENSG00000176681_2 (sequence is synthesized)
gacccgtgggactttgatcacctggggccctctgcttcctcagagatgccagccccaccccaggaatcgactgaaaatttggttccattcctggacacctgggattcagctggagagcag

SEQ ID NO: 613555 - DNA, 120 bp, Artificial Sequence
  ENSG00000176681_3 (sequence is synthesized)
cccctggagccagagcagttcttggcttcacagcaggatttaaaggacaagctgagtccacaggaaaggctccctgtttcgcccaagaagctgaagaaagatccagctcagcgttggagc

SEQ ID NO: 613556 - DNA, 120 bp, Artificial Sequence
  ENSG00000176681_4 (sequence is synthesized)
cttgctgagattattggaattacacgccaattatccacacctcagagtcagaaacagactttgcagaatgaatattccagtacagatacaccgtatcccggtagcctgcctccagaactc

SEQ ID NO: 613557 - DNA, 120 bp, Artificial Sequence
  ENSG00000176681_5 (sequence is synthesized)
cgggtgaagtcagatgagcctccagggccctctgagcaagttggaccttctcaattccatctagagcccgaaactcaaaatccagagacccttgaagacatccagtcctcttcactccag

SEQ ID NO: 613558 - DNA, 120 bp, Artificial Sequence
  ENSG00000176681_6 (sequence is synthesized)
caagaagccccagcacagcttccacagctccttgaggaagaaccttcttcaatgcagcaggaggccccagctctgcctccagagtcctctatggagagtctaactctaccgaatcatgag

SEQ ID NO: 613559 - DNA, 120 bp, Artificial Sequence
  ENSG00000176681_7 (sequence is synthesized)
gtgtcagttcaacctccaggtgaggatcaagcttattatcacttgcccaacattacagttaaacctgcagatgtggaggttaccataacttcagagcctaccaatgagacagaatcttcc

SEQ ID NO: 613560 - DNA, 120 bp, Artificial Sequence
  ENSG00000176681_8 (sequence is synthesized)
caagcccagcaggagaccccaattcagtttccagaggaggtggaaccttctgcaacccaacaggaggccccaattgagcctccagttcctcctatggagcatgaactttccatcagtgag

SEQ ID NO: 613561 - DNA, 120 bp, Artificial Sequence
  ENSG00000176681_9 (sequence is synthesized)
cagcagcagccagttcagccttctgagtctcctagggaggtcgaatcttctccgacccagcaggagaccccaggtcagcctccagaacatcatgaagtcacagtttcacctccaggtcac

SEQ ID NO: 613562 - DNA, 120 bp, Artificial Sequence
  ENSG00000176681_10 (sequence is synthesized)
catcaaactcatcatttagcttcacccagtgtctctgtgaagcctccagacgtgcagctcaccatagcagcagagcctagtgcagaggtgggaacttctctagtccaccaggaggctaca

SEQ ID NO: 613563 - DNA, 120 bp, Artificial Sequence
  ENSG00000176681_11 (sequence is synthesized)
actcggctctcagggtcaggtaatgatgtagaacctcccgccatccagcacgggggcccacctctgcttccagagtcatcagaagaagctggacctttagcagttcaacaggagacttca

SEQ ID NO: 613564 - DNA, 120 bp, Artificial Sequence
  ENSG00000176681_12 (sequence is synthesized)
tttcaatctccggaacctattaataatgagaacccctctccaacccagcaggaggctgcagctgagcatccacagaccgctgaggagggtgagtcttccctaacccatcaggaggcccca

SEQ ID NO: 613565 - DNA, 120 bp, Artificial Sequence
  ENSG00000176681_13 (sequence is synthesized)
gctcagactccagagttccctaatgtagttgtagctcaacctccagagcattcacacctgactcaagccacagttcaacctttggatctggggtttaccatcactccagaatccaagaca

SEQ ID NO: 613566 - DNA, 120 bp, Artificial Sequence
  ENSG00000176681_14 (sequence is synthesized)
gaggttgaactttctccaaccatgaaggagaccccaactcagcctcctaagaaagttgtaccccaacttcgagtatatcaaggggtaacaaatccaacaccaggtcaggatcaagctcag

SEQ ID NO: 613567 - DNA, 120 bp, Artificial Sequence
  ENSG00000176681_15 (sequence is synthesized)
catccagtgtcacccagcgttacagttcaacttttggacctgggacttaccatcactccagaacctactacggaggttggacattctacacccccgaagaggactatagtttctccaaag

SEQ ID NO: 613568 - DNA, 120 bp, Artificial Sequence
  ENSG00000176681_16 (sequence is synthesized)
catcctgaggtgacacttccacatccagaccaggttcagactcagcattcacacctgactcgagccacagttcaacctttggacctggggtttaccatcactccaaaatccatgacagag

SEQ ID NO: 613569 - DNA, 120 bp, Artificial Sequence
  ENSG00000176681_17 (sequence is synthesized)
gttgaaccttctacagccctgatgactacagctcctcctccaggacaccctgaggtgacacttccaccttcagacaagggtcaggctcagcattcacacctgactcaagccaccgttcaa

SEQ ID NO: 613570 - DNA, 120 bp, Artificial Sequence
  ENSG00000176681_18 (sequence is synthesized)
cctctggacctggagcttaccataactacaaaacctactacagaggttaaaccatctccaaccacggaggagacctcaactcagcctccagacctgggacttgccatcattccagaaccc

SEQ ID NO: 613571 - DNA, 120 bp, Artificial Sequence
  ENSG00000176681_19 (sequence is synthesized)
actacagagactggacattctacagccctggagaagactacagctcctcgtccagaccgggttcagactctgcatcgaagcctgactgaagtcacaggtccacctactgaactagaacct

SEQ ID NO: 613572 - DNA, 120 bp, Artificial Sequence
  ENSG00000176681_20 (sequence is synthesized)
gctcaggattcactggtgcagtctgaaagttacacccaaaataaggctttaactgcaccagaggaacacaaggcctccacaagcaccaacatatgtgagctctgtacctgcggagatgag

SEQ ID NO: 613573 - DNA, 120 bp, Artificial Sequence
  ENSG00000176681_21 (sequence is synthesized)
tctcaacccagagcagaggctccgccaagtgcctgtgccagagcccaacacccacaatggcaccttcaccatcttaaatttccaaggaaactatatttcttacattgatggaaatgtatg

SEQ ID NO: 613574 - DNA, 120 bp, Artificial Sequence
  ENSG00000176681_22 (sequence is synthesized)
gaaagcatacagttggactgagaaactaattctcagagaaaataacttgactgaattacacaaggattcatttgaaggcctgctatccctccagtatttagatttatcctgcaataaaat

SEQ ID NO: 613575 - DNA, 120 bp, Artificial Sequence
  ENSG00000176681_23 (sequence is synthesized)
acagtctattgaaagacatacatttgaaccactaccatttttgaagtttataaatcttagttgcaatgtaattacagaactcagctttggaacatttcaggcctggcacggaatgcagtt

SEQ ID NO: 613576 - DNA, 120 bp, Artificial Sequence
  ENSG00000176681_24 (sequence is synthesized)
tttacataagttaattctcaatcacaatcctctgacaactgttgaagatccgtatctctttaaattgccagcattaaaatatctagacatgggaacaacgctagtcccacttacaacact

SEQ ID NO: 613577 - DNA, 120 bp, Artificial Sequence
  ENSG00000176681_25 (sequence is synthesized)
taagaacattctcatgatgactgttgaactggaaaaactgatcttacctagccatatggcctgctgcctctgccaatttaaaaacagcattgaggctgtctgcaagacagtcaagctgca

SEQ ID NO: 613578 - DNA, 120 bp, Artificial Sequence
  ENSG00000176681_26 (sequence is synthesized)
ttgcaacagtgcatgtctgacaaacaccacacattgtcctgaagaagcatcggtagggaatccagaaggagcgttcatgaaggtgttacaagcccggaagaactacacaagcactgagct

SEQ ID NO: 613579 - DNA, 120 bp, Artificial Sequence
  ENSG00000176681_27 (sequence is synthesized)
gattgttgagccagaggagccctcagacagcagtggcatcaacttgtcaggctttgggagtgagcagctagacaccaatgacgagagtgattttatcagtacactaagttacatcttgcc

SEQ ID NO: 613580 - DNA, 120 bp, Artificial Sequence
  ENSG00000176681_28 (sequence is synthesized)
ttatttctcagcggtaaacctagatgtgaaatcactgttactaccgttcattaaactgccaaccacaggaaacagcctggcaaagattcaaactgtaggccaaaaccggcagagagtgaa

SEQ ID NO: 613581 - DNA, 120 bp, Artificial Sequence
  ENSG00000176681_29 (sequence is synthesized)
gagagtcctcatgggcccaaggagcatccagaaaaggcacttcaaagaggtaggaaggcagagcatcaggagggaacagggtgcccaggcatctgtggagaacgctgccgaagaaaaaag

SEQ ID NO: 613582 - DNA, 120 bp, Artificial Sequence
  ENSG00000176681_30 (sequence is synthesized)
gctcacgagtccagccccaagggaggtggaacagccccacacacagcaggggcctgagaagttagcgggaaacgccgtctacaccaagccttcgttcacccaagagcataaggcagcagt

SEQ ID NO: 613583 - DNA, 120 bp, Artificial Sequence
  ENSG00000176681_31 (sequence is synthesized)
ctctgtgctgaaacccttctccaagggcacgccttctacctccagccctgcaaaagccctaccacaggtgagagacagatcgaaagacttaacccacgctatttccattttagaaagtgc

SEQ ID NO: 613584 - DNA, 120 bp, Artificial Sequence
  ENSG00000176681_32 (sequence is synthesized)
aaaggctagagttacaaatacgaagacgtctaaaccaatcgtacatgccagaaaaaaataccgctttcacaaaactcgctcccacgtgacccacagaacaaccaaagtcaaaaagagtcc

SEQ ID NO: 613585 - DNA, 120 bp, Artificial Sequence
  ENSG00000176681_33 (sequence is synthesized)
aaaggtcagaaagaaaagttatctgagtagactgatgctcgcaaacaggcttccattctctgcagcgaagagcctcataaattccccttcacaaggggctttttcatccttaggagacct

SEQ ID NO: 613586 - DNA, 120 bp, Artificial Sequence
  ENSG00000176681_34 (sequence is synthesized)
gagtcctcaagaaaacccttttctggaagtatctgctctttcagaacattttatagagaagaataatacaaaacacacaactgcaagaaatgcctttgaagaaaatgattttatggaaaa

SEQ ID NO: 613587 - DNA, 120 bp, Artificial Sequence
  ENSG00000176681_35 (sequence is synthesized)
cactaacatgccagaaggaaccatctctgaaaacacaaactacaatcatcctcctgaggcagattccgctgggactgcattcaacttagggccaactgttaaacaaactgagacaaaatg

SEQ ID NO: 613588 - DNA, 120 bp, Artificial Sequence
  ENSG00000176681_36 (sequence is synthesized)
ggaatacaacaacgtgggcactgacctgtcccccgagcccaaaagcttcaattacccattgctctcgtccccaggtgatcagtttgaaattcagctaacccagcagctacagtcccttat

SEQ ID NO: 613589 - DNA, 120 bp, Artificial Sequence
  ENSG00000176681_37 (sequence is synthesized)
ccccaacaacaatgtgagaaggctcattgctcatgttatccggaccttgaagatggactgctctggggcccatgtgcaagtgacctgtgccaagctcatctccaggacaggccacctgat

SEQ ID NO: 613590 - DNA, 120 bp, Artificial Sequence
  ENSG00000176681_38 (sequence is synthesized)
gaagcttctcagtgggcagcaggaagtaaaggcatccaagatagaatgggatacggaccaatggaagattgagaactacattaatgagagcacagaagcccagagtgaacagaaagagaa

SEQ ID NO: 613591 - DNA, 120 bp, Artificial Sequence
  ENSG00000176681_39 (sequence is synthesized)
gtcgcttgagctcaaaaaagaagttccaggatatggctatactgacaaactcatcttggcattaattgttactggaatactaacgattttgattatacttttctgcctcattgtgatatg

SEQ ID NO: 613592 - DNA, 120 bp, Artificial Sequence
  ENSG00000176681_40 (sequence is synthesized)
ttgtcaccgaaggtcattacaagaagatgaagaaggattctcaaggggcattttcagatttctgccatggaggggatgctcttcgcgaagggagagtcaggatggactttcctcatttgg

SEQ ID NO: 613593 - DNA, 120 bp, Artificial Sequence
  ENSG00000176681_41 (sequence is synthesized)
acagccgctctggtttaaagatctgtacaaacctctcagtgccacaagaataaataatcatgcatggaagctgcacaagaagtcatctaatgaggacaagatcctcaacagggaccctgg

SEQ ID NO: 613594 - DNA, 120 bp, Artificial Sequence
  ENSG00000176681_42 (sequence is synthesized)
ggacagcgaagccccaacggaggaggaggagagtgaagccctgccataggaggagaacacagcccacctcaggcctcctgcaaaaatacatagaataaacaacaacagttactaaatgaa

SEQ ID NO: 613595 - DNA, 120 bp, Artificial Sequence
  ENSG00000176681_43 (sequence is synthesized)
gaagaaggattctcaagggacagcgaagccccaacggaggaggaggagagtgaagccctgccataggaggagaacacagcccacctcaggcctcctgcaaaaatacatagaataaacaac

SEQ ID NO: 613596 - DNA, 120 bp, Artificial Sequence
  ENSG00000176681_44 (sequence is synthesized)
gaaaactataatgcctttcaaatatggcttattgcttggatctcaatatctcccacgtatcttgggtggaatattttgccgaagatctttctgtcaatcatttacaatcatgtgctgcaa

SEQ ID NO: 613597 - DNA, 120 bp, Artificial Sequence
  ENSG00000176681_45 (sequence is synthesized)
catgtgctgcaaaatgaagtttgggtcaacagtagaccacatatatgatggtggttctgtaagcgtataatggagctatccctatataggtataccatttttatcttttttttttttttt

SEQ ID NO: 613598 - DNA, 120 bp, Artificial Sequence
  ENSG00000176681_46 (sequence is synthesized)
attacaggcatgagccactgtgcccaggccccatttttatcttttacacagtattttaactatatattttccatgtttacatacacaaatacctgccattctgtgacagttgcctttagt

SEQ ID NO: 613599 - DNA, 120 bp, Artificial Sequence
  ENSG00000176681_47 (sequence is synthesized)
gttgcctttagtattcagtacagtaacatacagtacaggtttgtagcctaggagtcctaagccataccgtgtaccctaggtatggtggctacaccacctaggtttgtgtaagtatacgct

SEQ ID NO: 613600 - DNA, 120 bp, Artificial Sequence
  ENSG00000176681_48 (sequence is synthesized)
atgatattagcacaatggtgaaatcacctagtgacacatttctcaagctcctcacgtggcaagcaatgcatgactgcatatgaaagctcttaaatagagattgtttctaaattaatctca

SEQ ID NO: 613601 - DNA, 120 bp, Artificial Sequence
  ENSG00000176681_49 (sequence is synthesized)
aaacagtcattatttactatttatggaattttttttaaaaaaaggagcaaaagtatcatttcagtgggaacttaacttggggctacagtgttttatttaacttttaccccaaagttgcaa

SEQ ID NO: 613602 - DNA, 120 bp, Artificial Sequence
  ENSG00000176681_50 (sequence is synthesized)
agtgttttgaaatttttccctgtaaaataattattttaattcaatttaaataaaacccaccaaggagacttcaagctttaagaagtctagcttcctgtgaaatgtgagaggaagtcagca

SEQ ID NO: 613603 - DNA, 120 bp, Artificial Sequence
  ENSG00000176681_51 (sequence is synthesized)
gtgaaatgtgagaggaagtcagcactcatttcagaaatctgattataacgatagctccatccctaaatgaggtgaatcttggactctcttccattttattttattttatttttttgagat

SEQ ID NO: 613604 - DNA, 90 bp, Artificial Sequence
  ENSG00000176681_52 (sequence is synthesized)
tggcctcctgagtagctgggattgcagaaatttccaaggaaactatatttcttacattgatggaaatgtatggaaagcatacagttggac

SEQ ID NO: 613605 - DNA, 120 bp, Artificial Sequence
  ENSG00000176692_0 (sequence is synthesized)
gaaacttttcccaatccctaaaagggacttggcctctttttctgggctcagcggggcagccgctcggaccccggcgcgctgaccctcggggctgccgattcgctgggggcttggagagcc

SEQ ID NO: 613606 - DNA, 80 bp, Artificial Sequence
  ENSG00000176692_1 (sequence is synthesized)
agcctcctgcgcccctcctcgcgcgggccgagggtccacctgggtccccaggccgcggcgtctccgctgggtccgcggcc

SEQ ID NO: 613607 - DNA, 80 bp, Artificial Sequence
  ENSG00000176692_2 (sequence is synthesized)
ggagcggggccggcgctgcgcttgcccggggcgcgccctccaggatgccgatccgcccggtccgctgaaagcgcgcgccc

SEQ ID NO: 613608 - DNA, 120 bp, Artificial Sequence
  ENSG00000176692_3 (sequence is synthesized)
ggaggctgccaggagcccggggccgcccctcccgctcccctcctctccccctctggctctctcgcgctctctcgctctcagggcccccctcgctcccccggccgcagtccgtgcgcgagg

SEQ ID NO: 613609 - DNA, 120 bp, Artificial Sequence
  ENSG00000176692_4 (sequence is synthesized)
gcgccggcgagccgtctcggaagcagcatgcaggcgcgctactccgtgtccgaccccaacgccctgggagtggtgccctacctgagcgagcagaattactaccgggctgcgggcagctac

SEQ ID NO: 613610 - DNA, 120 bp, Artificial Sequence
  ENSG00000176692_5 (sequence is synthesized)
ggcggcatggccagccccatgggcgtctattccggccacccggagcagtacagcgcggggatgggccgctcctacgcgccctaccaccaccaccagcccgcggcgcctaaggacctggtg

SEQ ID NO: 613611 - DNA, 120 bp, Artificial Sequence
  ENSG00000176692_6 (sequence is synthesized)
aagccgccctacagctacatcgcgctcatcaccatggccatccagaacgcgcccgagaagaagatcaccttgaacggcatctaccagttcatcatggaccgcttccccttctaccgggag

SEQ ID NO: 613612 - DNA, 120 bp, Artificial Sequence
  ENSG00000176692_7 (sequence is synthesized)
aacaagcagggctggcagaacagcatccgccacaacctctcgctcaacgagtgcttcgtcaaggtgccccgcgacgacaagaagcccggcaagggcagttactggaccctggacccggac

SEQ ID NO: 613613 - DNA, 120 bp, Artificial Sequence
  ENSG00000176692_8 (sequence is synthesized)
tcctacaacatgttcgagaacggcagcttcctgcggcgccggcggcgcttcaaaaagaaggacgtgtccaaggagaaggaggagcgggcccacctcaaggagccgcccccggcggcgtcc

SEQ ID NO: 613614 - DNA, 120 bp, Artificial Sequence
  ENSG00000176692_9 (sequence is synthesized)
aagggcgccccggccaccccccacctagcggacgcccccaaggaggccgagaagaaggtggtgatcaagagcgaggcggcgtccccggcgctgccggtcatcaccaaggtggagacgctg

SEQ ID NO: 613615 - DNA, 120 bp, Artificial Sequence
  ENSG00000176692_10 (sequence is synthesized)
tgcagggcagcccgcgcagcgcggcctccacgcccgccggctcccccgacggctcgctgccggagcaccacgccgcggcgcccaacgggctgcctggcttcagcgtggagaacatcatga

SEQ ID NO: 613616 - DNA, 120 bp, Artificial Sequence
  ENSG00000176692_11 (sequence is synthesized)
gcttcagcgtggagaacatcatgaccctgcgaacgtcgccgccgggcggagagctgagcccgggggccggacgcgcgggcctggtggtgccgccgctggcgctgccctacgccgccgcgc

SEQ ID NO: 613617 - DNA, 120 bp, Artificial Sequence
  ENSG00000176692_12 (sequence is synthesized)
tcagggcctggaggccggggccgccgggggctaccagtgcagcatgcgagcgatgagcctgtacaccggggccgagcggccggcgcacatgtgcgtcccgcccgccctggacgaggccct

SEQ ID NO: 613618 - DNA, 120 bp, Artificial Sequence
  ENSG00000176692_13 (sequence is synthesized)
ccctctcggaccacccgagcggccccacgtcgcccctgagcgctctcaacctcgccgccggccaggagggcgcgctcgccgccacgggccaccaccaccagcaccacggccaccaccacc

SEQ ID NO: 613619 - DNA, 120 bp, Artificial Sequence
  ENSG00000176692_14 (sequence is synthesized)
ccggctccccagccccagccgacgccgcagcccggggccgccgcggcgcaggcggcctcctggtatctcaaccacagcggggacctgaaccacctccccggccacacgttcgcggcccag

SEQ ID NO: 613620 - DNA, 120 bp, Artificial Sequence
  ENSG00000176692_15 (sequence is synthesized)
cacgttcgcggcccagcagcaaactttccccaacgtgcgggagatgttcaactcccaccggctggggattgagaactcgaccctcggggagtcccaggtgagtggcaatgccagctgcca

SEQ ID NO: 613621 - DNA, 120 bp, Artificial Sequence
  ENSG00000176692_16 (sequence is synthesized)
gctgccctacagatccacgccgcctctctatcgccacgcagccccctactcctacgactgcacgaaatactgacgtgtcccgggacctcccctccccggcccgctccggcttcgcttccc

SEQ ID NO: 613622 - DNA, 120 bp, Artificial Sequence
  ENSG00000176692_17 (sequence is synthesized)
agccccgacccaaccagacaattaaggggctgcagagacgcaaaaaagaaacaaaacatgtccaccaaccttttctcagacccgggagcagagagcgggcacgctagcccccagccgtct

SEQ ID NO: 613623 - DNA, 120 bp, Artificial Sequence
  ENSG00000176692_18 (sequence is synthesized)
gtgaagagcgcaggtaactttaattcgccgccccgtttctgggatcccaggaaacccctccaaagggacgcagcccaacaaaatgagtattgatcttaaaatccccctcccctaccagga

SEQ ID NO: 613624 - DNA, 120 bp, Artificial Sequence
  ENSG00000176692_19 (sequence is synthesized)
cggctgtgctgtgctcgacctgagctttcaaaagttaagttatggaccaaatcccatagcgagcccctagtgactttctgtaggggtccccataggtgtatgggggtctctatagataat

SEQ ID NO: 613625 - DNA, 120 bp, Artificial Sequence
  ENSG00000176692_20 (sequence is synthesized)
atatgtgctgtgtgtaattttaaatttctccaaccgtgctgtacaaatgtgtggatttgtaatcaggctattttgttgttgttgttgttgttcagagccattaatataatatttaaagtt

SEQ ID NO: 613626 - DNA, 120 bp, Artificial Sequence
  ENSG00000176692_21 (sequence is synthesized)
gagttcactggataagtttttcatcttgcccaaccatttctaactgccaaattgaattcaagaaaccgatgtgggttttgtttcctgtacaattatgagatataattctttttcccattg

SEQ ID NO: 613627 - DNA, 120 bp, Artificial Sequence
  ENSG00000176692_22 (sequence is synthesized)
taggtcttttacaaaacaagaaaataatttatttttttgttggtggataaagaagtcaagtatctgatactttttatttacaaagtgtgatggttttgtatagtaggttccaccctgagt

SEQ ID NO: 613628 - DNA, 120 bp, Artificial Sequence
  ENSG00000176692_23 (sequence is synthesized)
attcctaaaagaaaaaaaaaaaaaaagcttaaaaactctaacttcatctgtgtttgtcttacgtggtcttaatcgttgtacttaccttaaaataaacccatgttgttttttctgcccaaa

SEQ ID NO: 613629 - DNA, 120 bp, Artificial Sequence
  ENSG00000176695_0 (sequence is synthesized)
tcctggaatgaatcaacgagtgaaacgaataactctatggtgactgaattcatttttctgggtctctctgattctcagggactccagaccttcctatttatgttgttttttgtattctat

SEQ ID NO: 613630 - DNA, 120 bp, Artificial Sequence
  ENSG00000176695_1 (sequence is synthesized)
ggaggaatcgtgtttggaaaccttcttattgtcataacagtggtatctgactcccaccttcactctcccatgtacttcctgctagccaacctctcactcattgatctgtctctgtcttca

SEQ ID NO: 613631 - DNA, 120 bp, Artificial Sequence
  ENSG00000176695_2 (sequence is synthesized)
gtcacagcccccaagatgattactgactttttcagccagcgcaaagtcatctctttcaagggctgccttgttcagatatttctccttcacttctttggtgggagtgagatggtgatcctc

SEQ ID NO: 613632 - DNA, 120 bp, Artificial Sequence
  ENSG00000176695_3 (sequence is synthesized)
atagccatgggctttgacagatatatagcaatatgcaaacccctacactacactacaattatgtgtggcaacgcatgtgtcggcattatggctgtcgcatggggaattggctttctccat

SEQ ID NO: 613633 - DNA, 120 bp, Artificial Sequence
  ENSG00000176695_4 (sequence is synthesized)
ttgcctgtacagatacctacaggctagatattatggtcattgctaacagtggtgtgctcactgtgtgttcttttgttcttctaatcatctcatacactatcatcctaatgaccatccagc

SEQ ID NO: 613634 - DNA, 120 bp, Artificial Sequence
  ENSG00000176695_5 (sequence is synthesized)
atcgccctttagataagtcgtccaaagctctgtccactttgactgctcacattacagtagttcttttgttctttggaccatgtgtctttatttatgcctggccattccccatcaagtcat

SEQ ID NO: 613635 - DNA, 120 bp, Artificial Sequence
  ENSG00000176695_6 (sequence is synthesized)
tagataaattccttgctgtattttattctgtgatcacccctctcttgaacccaattatatacacactgaggaacaaagacatgaagacggcaataagacagctgagaaaatgggatgcac

SEQ ID NO: 613636 - DNA, 120 bp, Artificial Sequence
  ENSG00000176695_7 (sequence is synthesized)
attctagtgtaaagttttagatcttatataactgtgagattaatctcagataatgacacaaaatatagtgaagttggtaagttatttagtaaagctcatgaaaattgtgccctccattcc

SEQ ID NO: 613637 - DNA, 120 bp, Artificial Sequence
  ENSG00000176695_8 (sequence is synthesized)
tttttatgcctcattctgtgaaaattgctgtagtctcttccagttatgaagaaggtccggtgttttcttacccacctccttccctcctttttataataccagtgaaacttggtttggagc

SEQ ID NO: 613638 - DNA, 120 bp, Artificial Sequence
  ENSG00000176695_9 (sequence is synthesized)
gaaaggcataaatatattagtatttgtgtacatctgttccttcctgtgtgaccctaagtttagtagaagaaaggagagaaaatatagcctagcttataaatttaaaaaaaaatttatttg

SEQ ID NO: 613639 - DNA, 120 bp, Artificial Sequence
  ENSG00000176695_10 (sequence is synthesized)
gtccattttgtgaaaaacataaaaaaagaactgtcacatcttaatttaaaaaatatatgcttagtggtaaggagatatatgtcaacttttaagaggttgaaaaacaaacgcctcccatta

SEQ ID NO: 613640 - DNA, 120 bp, Artificial Sequence
  ENSG00000176695_11 (sequence is synthesized)
taagtttatacttcacctcccaccactataacaacccagaatccatgagggcattatcaggagtgagtggaagagtaagtttgccaatgtgaaatgtgccttctaggtcctagacatctg

SEQ ID NO: 613641 - DNA, 120 bp, Artificial Sequence
  ENSG00000176695_12 (sequence is synthesized)
tggtataactgctcataagcagtagaaagaatttagagggatccaggctctcatcacgttggcacaaagtatattacttggatccatctatgtcattttccatggttaatgtttaaaacc

SEQ ID NO: 613642 - DNA, 120 bp, Artificial Sequence
  ENSG00000176695_13 (sequence is synthesized)
acaggctttaaagtaaaaaacaaagagctggattcaactctactgactcttattaatcatgattttgggcacattacgtagctttcatgagctttagtttctacatttataaacaggaga

SEQ ID NO: 613643 - DNA, 120 bp, Artificial Sequence
  ENSG00000176695_14 (sequence is synthesized)
ttatacctattatgcacggttattatgaaggaaaatgacaaaatagatataaatcaaatagcccacttcgagacatattaagcatgaataaacattagatactattaaaatcctatatat

SEQ ID NO: 613644 - DNA, 120 bp, Artificial Sequence
  ENSG00000176695_15 (sequence is synthesized)
taacaaagccaaaagtttcaaactttactttttcccaacattcttgtgaaatatgacacatcccaatcttaacagatgctcatttgggatactgtacttgtgagtggaagtgtgtatatt

SEQ ID NO: 613645 - DNA, 120 bp, Artificial Sequence
  ENSG00000176695_16 (sequence is synthesized)
tgtgtgcaagtgtgtactcatatacttccaccttaccaccctagaaaggcatgatgaaaatttaagatagaaggaaaatataaattgaaaaaaaaaaaccttaacaaatgattctgacaa

SEQ ID NO: 613646 - DNA, 120 bp, Artificial Sequence
  ENSG00000176695_17 (sequence is synthesized)
atatcttctctttccagggagaatcactgagccagaataaaattgaacactaaatattctaagaaaaaaggaatctagtttgtcaaaatgtgacttgaattaatagataaggagagtcag

SEQ ID NO: 613647 - DNA, 120 bp, Artificial Sequence
  ENSG00000176695_18 (sequence is synthesized)
atgataagagggtcaaaattatgtttatcttaggaaaagtagaatagaaaatttataagcagattaaaaacacataataaaagtagtaaataataatgacagtatctcaaatcagtgcag

SEQ ID NO: 613648 - DNA, 120 bp, Artificial Sequence
  ENSG00000176695_19 (sequence is synthesized)
gggggaaaggcctactaatgtgatggtgggataattggatagcaatatgggaaaagatatatttaatttatttgctacaccaaatgccaggacaatctctaagtgaattcaagacataac

SEQ ID NO: 613649 - DNA, 120 bp, Artificial Sequence
  ENSG00000176695_20 (sequence is synthesized)
agtgaaacttggtttggagcatttctttcacataaaggtaactgcagaggctatttcctggaatgaatcaacgagtgaaacgaataactctatgaaatacaaactaccatcagagaatac

SEQ ID NO: 613650 - DNA, 120 bp, Artificial Sequence
  ENSG00000176697_0 (sequence is synthesized)
attattaaagcggtagtctgccggcgctgataagcaacaagttccccagcggtcttcccgccctagcctgacaaggcgaaggttttcttacctggcgacagggaaatctcccgagccgaa

SEQ ID NO: 613651 - DNA, 120 bp, Artificial Sequence
  ENSG00000176697_1 (sequence is synthesized)
ttcagcttcgccggagccccaggtgtgacctgcgtagtgggcaagggagcggtgtgcaggctgagtttttttttttacaggggtaccctgaaactcctcactttctctgggaactttcag

SEQ ID NO: 613652 - DNA, 120 bp, Artificial Sequence
  ENSG00000176697_2 (sequence is synthesized)
tgccaggacccagtaacgggcggttagaaggcagccctaggaaacacctgctacatagcagggcagttgggcaatcattggtaacctcgctcattcattagaatcacgtaagaactcaaa

SEQ ID NO: 613653 - DNA, 120 bp, Artificial Sequence
  ENSG00000176697_3 (sequence is synthesized)
aggaaacgtgtctctcggagtgagggcgtttgcgtaaatctataggtttttcgacatcgatgccagttgctttgtcttctgtagtcgccaaggtggttgagagtttaagcttgcggatat

SEQ ID NO: 613654 - DNA, 120 bp, Artificial Sequence
  ENSG00000176697_4 (sequence is synthesized)
tgcaaagggttattagattcataagtcacaccaagtggtgggcgatccactgagcaaagccgaacttctcacatgatgacttcaaacaagacacattaccttccagcatctgttggggag

SEQ ID NO: 613655 - DNA, 120 bp, Artificial Sequence
  ENSG00000176697_5 (sequence is synthesized)
acgagattttaagacacttgagtctccaggacagcaaaggcacaatgttccaccaggtgagaagagtgatgaccatccttttccttactatggttatttcatactttggttgcatgaagg

SEQ ID NO: 613656 - DNA, 120 bp, Artificial Sequence
  ENSG00000176697_6 (sequence is synthesized)
ctgcccccatgaaagaagcaaacatccgaggacaaggtggcttggcctacccaggtgtgcggacccatgggactctggagagcgtgaatgggcccaaggcaggttcaagaggcttgacat

SEQ ID NO: 613657 - DNA, 120 bp, Artificial Sequence
  ENSG00000176697_7 (sequence is synthesized)
cattggctgacactttcgaacacgtgatagaagagctgttggatgaggaccagaaagttcggcccaatgaagaaaacaataaggacgcagacttgtacacgtccagggtgatgctcagta

SEQ ID NO: 613658 - DNA, 120 bp, Artificial Sequence
  ENSG00000176697_8 (sequence is synthesized)
gtcaagtgcctttggagcctcctcttctctttctgctggaggaatacaaaaattacctagatgctgcaaacatgtccatgagggtccggcgccactctgaccctgcccgccgaggggagc

SEQ ID NO: 613659 - DNA, 120 bp, Artificial Sequence
  ENSG00000176697_9 (sequence is synthesized)
tgagcgtgtgtgacagtattagtgagtgggtaacggcggcagacaaaaagactgcagtggacatgtcgggcgggacggtcacagtccttgaaaaggtccctgtatcaaaaggccaactga

SEQ ID NO: 613660 - DNA, 120 bp, Artificial Sequence
  ENSG00000176697_10 (sequence is synthesized)
agcaatacttctacgagaccaagtgcaatcccatgggttacacaaaagaaggctgcaggggcatagacaaaaggcattggaactcccagtgccgaactacccagtcgtacgtgcgggccc

SEQ ID NO: 613661 - DNA, 120 bp, Artificial Sequence
  ENSG00000176697_11 (sequence is synthesized)
ttaccatggatagcaaaaagagaattggctggcgattcataaggatagacacttcttgtgtatgtacattgaccattaaaaggggaagatagtggatttatgttgtatagattagattat

SEQ ID NO: 613662 - DNA, 120 bp, Artificial Sequence
  ENSG00000176697_12 (sequence is synthesized)
attgagacaaaaattatctatttgtatatatacataacagggtaaattattcagttaagaaaaaaataattttatgaactgcatgtataaatgaagtttatacagtacagtggttctaca

SEQ ID NO: 613663 - DNA, 120 bp, Artificial Sequence
  ENSG00000176697_13 (sequence is synthesized)
atctatttattggacatgtccatgaccagaagggaaacagtcatttgcgcacaacttaaaaagtctgcattacattccttgataatgttgtggtttgttgccgttgccaagaactgaaaa

SEQ ID NO: 613664 - DNA, 120 bp, Artificial Sequence
  ENSG00000176697_14 (sequence is synthesized)
cataaaaagttaaaaaaaataataaattgcatgctgctttaattgtgaattgataataaactgtcctctttcagaaaacagaaaaaaaacacacacacacacaacaaaaatttgaaccaa

SEQ ID NO: 613665 - DNA, 120 bp, Artificial Sequence
  ENSG00000176697_15 (sequence is synthesized)
aacattccgtttacattttagacagtaagtatcttcgttcttgttagtactatatctgttttactgcttttaacttctgatagcgttggaattaaaacaatgtcaaggtgctgttgtcat

SEQ ID NO: 613666 - DNA, 120 bp, Artificial Sequence
  ENSG00000176697_16 (sequence is synthesized)
gttggaattaaaacaatgtcaaggtgctgttgtcattgctttactggcttaggggatgggggatggggggtatatttttgtttgttttgtgtttttttttcgtttgtttgttttgttttt

SEQ ID NO: 613667 - DNA, 120 bp, Artificial Sequence
  ENSG00000176697_17 (sequence is synthesized)
ctacaatatatattctggctgataaaagatacatttgtatgttgtgaagatgtttgcaatatcgatcagatgactagaaagtgaataaaaattaaggcaactgaacaaaaaaatgctcac

SEQ ID NO: 613668 - DNA, 120 bp, Artificial Sequence
  ENSG00000176697_18 (sequence is synthesized)
cctcccaggccccgctcattctttgggcgttggtcagagtaagctgcttttgacggaaggacctatgtttgctcagaacacattctttccccccctccccctctggtctcctctttgttt

SEQ ID NO: 613669 - DNA, 120 bp, Artificial Sequence
  ENSG00000176697_19 (sequence is synthesized)
tgttttaaggaagaaaaatcagttgcgcgttctgaaatattttaccactgctgtgaacaagtgaacacattgtgtcacatcatgacactcgtataagcatggagaacagtgatttttttt

SEQ ID NO: 613670 - DNA, 120 bp, Artificial Sequence
  ENSG00000176697_20 (sequence is synthesized)
tagaacagaaaacaacaaaaaataaccccaaaatgaagattattttttatgaggagtgaacatttgggtaaatcatggctaagcttaaaaaaaactcatggtgaggcttaacaatgtctt

SEQ ID NO: 613671 - DNA, 120 bp, Artificial Sequence
  ENSG00000176697_21 (sequence is synthesized)
gtaagcaaaaggtagagccctgtatcaacccagaaacacctagatcagaacaggaatccacattgccagtgacatgagactgaacagccaaatggaggctatgtggagttggcattgcat

SEQ ID NO: 613672 - DNA, 120 bp, Artificial Sequence
  ENSG00000176697_22 (sequence is synthesized)
ttaccggcagtgcgggaggaatttctgagtggccatcccaaggtctaggtggaggtggggcatggtatttgagacattccaaaacgaaggcctctgaaggacccttcagaggtggctctg

SEQ ID NO: 613673 - DNA, 120 bp, Artificial Sequence
  ENSG00000176697_23 (sequence is synthesized)
gaatgacatgtgtcaagctgcttggacctcgtgctttaagtgcctacattatctaactgtgctcaagaggttctcgactggaggaccacactcaagccgacttatgcccaccatcccacc

SEQ ID NO: 613674 - DNA, 120 bp, Artificial Sequence
  ENSG00000176697_24 (sequence is synthesized)
tctggataattttgcataaaattggattagcctggagcaggttgggagccaaatgtggcatttgtgatcatgagattgatgcaatgagatagaagatgtttgctacctgaacacttattg

SEQ ID NO: 613675 - DNA, 120 bp, Artificial Sequence
  ENSG00000176697_25 (sequence is synthesized)
ctttgaaactagacttgaggaaaccagggtttatcttttgagaacttttggtaagggaaaagggaacaggaaaagaaaccccaaactcaggccgaatgatcaaggggacccataggaaat

SEQ ID NO: 613676 - DNA, 120 bp, Artificial Sequence
  ENSG00000176697_26 (sequence is synthesized)
cttgtccagagacaagacttcgggaaggtgtctggacattcagaacaccaagacttgaaggtgccttgctcaatggaagaggccaggacagagctgacaaaattttgctccccagtgaag

SEQ ID NO: 613677 - DNA, 120 bp, Artificial Sequence
  ENSG00000176697_27 (sequence is synthesized)
gccacagcaaccttctgcccatcctgtctgttcatggagagggtccctgcctcacctctgccattttgggttaggagaagtcaagttgggagcctgaaatagtggttcttggaaaaatgg

SEQ ID NO: 613678 - DNA, 120 bp, Artificial Sequence
  ENSG00000176697_28 (sequence is synthesized)
atccccagtgaaaactagagctctaagcccattcagcccatttcacacctgaaaatgttagtgatcaccacttggaccagcatccttaagtatcagaaagccccaagcaattgctgcatc

SEQ ID NO: 613679 - DNA, 120 bp, Artificial Sequence
  ENSG00000176697_29 (sequence is synthesized)
ttagtagggtgagggataagcaaaagaggatgttcaccataacccaggaatgaagataccatcagcaaagaatttcaatttgttcagtctttcatttagagctagtctttcacagtacca

SEQ ID NO: 613680 - DNA, 120 bp, Artificial Sequence
  ENSG00000176697_30 (sequence is synthesized)
tctgaatacctctttgaaagaaggaagactttacgtagtgtagatttgttttgtgttgtttgaaaatattatctttgtaattatttttaatatgtaaggaatgcttggaatatctgctgt

SEQ ID NO: 613681 - DNA, 120 bp, Artificial Sequence
  ENSG00000176697_31 (sequence is synthesized)
atgtcaactttatgcagcttccttttgagggacaaatttaaaacaaacaaccccccatcacaaacttaaaggattgcaagggccagatctgttaagtggtttcataggagacacatccag

SEQ ID NO: 613682 - DNA, 120 bp, Artificial Sequence
  ENSG00000176697_32 (sequence is synthesized)
caattgtgtggtcagtggctcttttacccaataagatacatcacagtcacatgcttgatggtttatgttgacctaagatttattttgttaaaatctctctctgttgtgttcgttcttgtt

SEQ ID NO: 613683 - DNA, 120 bp, Artificial Sequence
  ENSG00000176697_33 (sequence is synthesized)
ctgttttgttttgttttttaaagtcttgctgtggtctctttgtggcagaagtgtttcatgcatggcagcaggcctgttgcttttttatggcgattcccattgaaaatgtaagtaaatgtc

SEQ ID NO: 613684 - DNA, 120 bp, Artificial Sequence
  ENSG00000176697_34 (sequence is synthesized)
tgtggccttgttctctctatggtaaagatattattcaccatgtaaaacaaaaaacaatatttattgtattttagtatatttatataattatgttattgaaaaaaattggcattaaaactt

SEQ ID NO: 613685 - DNA, 80 bp, Artificial Sequence
  ENSG00000176697_35 (sequence is synthesized)
attggcattaaaacttaaccgcatcagaagcctattgtaaatacaagttctatttaagtgtactaattaacatataatat

SEQ ID NO: 613686 - DNA, 120 bp, Artificial Sequence
  ENSG00000176697_36 (sequence is synthesized)
gcccgggcgcacccgcccgctcgctgtcccgcgcaccccgtagcgcctcgggctcccgggccggacagaggagccagcccggtgcgcccctccacctcctgctcggggggctttaatgag

SEQ ID NO: 613687 - DNA, 120 bp, Artificial Sequence
  ENSG00000176697_37 (sequence is synthesized)
ggtgcgcccctccacctcctgctcggggggctttaatgagacacccaccgctgctgtggggccggcggggagcagcaccgcgacggggaccggggctgggcgctggagccagaatcggaa

SEQ ID NO: 613688 - DNA, 120 bp, Artificial Sequence
  ENSG00000176697_38 (sequence is synthesized)
gtgtgtaatccgggcgataggagtccattcagcaccttggacagagccaacggatttgtccgaggtggcggtacccccaggtagtcttcttggccccgctgtaaagccaaccctgtgtcg

SEQ ID NO: 613689 - DNA, 120 bp, Artificial Sequence
  ENSG00000176697_39 (sequence is synthesized)
cccttaaaaagcgtcttttctgaggttcggctcacactgagatcggggctggagagagagtcagattttggagcggagcgtttggaaagcgagccccagtttggtcccctcattgagctc

SEQ ID NO: 613690 - DNA, 120 bp, Artificial Sequence
  ENSG00000176697_40 (sequence is synthesized)
acccactttcccattcaccgcggagagggctgctctcgctgccgctccccccggcgaactagcatgaaatctccctgcctctgccgagatcaaatggagcttctcgctgatggggtgcga

SEQ ID NO: 613691 - DNA, 120 bp, Artificial Sequence
  ENSG00000176697_41 (sequence is synthesized)
gtattacctccgccatgcaatttccactatcaataatttaacttctttgctgcagaacagaaggagtacataccgggcaccaaagactcgcgccccctcccccctttaattaagcgaagg

SEQ ID NO: 613692 - DNA, 120 bp, Artificial Sequence
  ENSG00000176697_42 (sequence is synthesized)
gaacgtgaaaaaataatagagtgtgggagttttggggccgaagtctttcccggagcagctgccttgatggttactttgacaagtagtgactgaaaagttccaccaggtgagaagagtgat

SEQ ID NO: 613693 - DNA, 120 bp, Artificial Sequence
  ENSG00000176697_43 (sequence is synthesized)
gctgaagttggcttcctagcggtgtaggctggaatagactcttggcaagctccgggttggtatactgggttaactttgggaaatgcaagtgtttatctccaggatctagccaccggggtg

SEQ ID NO: 613694 - DNA, 120 bp, Artificial Sequence
  ENSG00000176697_44 (sequence is synthesized)
gtaaaccaatagcccccatgctctgtgcgatttcattgtgtgctcgcgttcgcaagctccgtagtgcaggaaggtgcgggaagttccaccaggtgagaagagtgatgaccatccttttcc

SEQ ID NO: 613695 - DNA, 120 bp, Artificial Sequence
  ENSG00000176697_45 (sequence is synthesized)
gtaaaccaatagcccccatgctctgtgcgatttcattgtgtgctcgcgttcgcaagctccgtagtgcaggaaggtgcgggaagttaagtaattaaaagaaattatagagtgggatgcaaa

SEQ ID NO: 613696 - DNA, 120 bp, Artificial Sequence
  ENSG00000176697_46 (sequence is synthesized)
aataacccgaaggacaactggatgtgtggagccaccagttttctccatgagtgcacaaggttaatccttgttactactcagaatgctgagtttctacagaaagggttgcaggtccacaca

SEQ ID NO: 613697 - DNA, 120 bp, Artificial Sequence
  ENSG00000176697_47 (sequence is synthesized)
tgttttggcgtctacccacacgcttctgtatggcatgactgtgcatcccagaagaagggctgtgctgtgtacctccacgtttcagtggaatttaacaaactgatccctgaaaatggtttc

SEQ ID NO: 613698 - DNA, 120 bp, Artificial Sequence
  ENSG00000176697_48 (sequence is synthesized)
ataaagggatggtaataaagtctcttagtggttgaaaatgttatttcttacaaaagtggagaacatttgcttttcaataccagagttttcagccatttctgcattctgacctattgactg

SEQ ID NO: 613699 - DNA, 120 bp, Artificial Sequence
  ENSG00000176697_49 (sequence is synthesized)
gcgcgcacacacacacacacacacagagagaacatctctagtaaaaagaaaagttgagctttcttagctagatgtgtgtattagccagaaaaagccaaggagtgaagggttttagagaac

SEQ ID NO: 613700 - DNA, 120 bp, Artificial Sequence
  ENSG00000176697_50 (sequence is synthesized)
gaactggaggagataaagtggagtctgcatatgggaggcatttgaaatggacttaaatgtctttttaatgctgactttttcagttttctccttaccagacacattgttttcatgacatta

SEQ ID NO: 613701 - DNA, 120 bp, Artificial Sequence
  ENSG00000176697_51 (sequence is synthesized)
gccccaggcatagacacatcattaaaatgaacatgtcaaaaaatgatttctgtttagaaataagcaaaacattttcagttgtgaccacccaggtgtagaataaagaacagtggaattggg

SEQ ID NO: 613702 - DNA, 120 bp, Artificial Sequence
  ENSG00000176697_52 (sequence is synthesized)
agccctgagttctaacataaactttcttcatgacataaggcaagtcttctatggcctttggtttccttacctgtaaaacaggatggctcaatgaaattatctttcttctttgctataata

SEQ ID NO: 613703 - DNA, 120 bp, Artificial Sequence
  ENSG00000176697_53 (sequence is synthesized)
gagtatctctgtgggaagaggaaaaaaaaagtcaatttaaaggctccttatagttccccaactgctgttttattgtgctattcatgcctagacatcacatagctagaaaggcccatcaga

SEQ ID NO: 613704 - DNA, 120 bp, Artificial Sequence
  ENSG00000176697_54 (sequence is synthesized)
cccctcaggccactgctgttcctgtcacacattcctgcaaaggaccatgttgctaacttgaaaaaaattactattaattacacttgcagttgttgcttagtaacatttatgattttgtgt

SEQ ID NO: 613705 - DNA, 120 bp, Artificial Sequence
  ENSG00000176697_55 (sequence is synthesized)
ttctcgtgacagcatgagcagagatcattaaaaattaaacttacaaagctgctaaagtgggaagaaggagaacttgaagccacaatttttgcacttgcttagaagccatctaatctcagt

SEQ ID NO: 613706 - DNA, 120 bp, Artificial Sequence
  ENSG00000176697_56 (sequence is synthesized)
tttatatgctagatcttgggggaaacactgcatgtctctggtttatattaaaccacatacagcacactactgacactgatttgtgtctggtgcagctggagtttatcaccaagacataaa

SEQ ID NO: 613707 - DNA, 120 bp, Artificial Sequence
  ENSG00000176697_57 (sequence is synthesized)
aaaaccttgaccctgcagaatggcctggaattacaatcagatgggccacatggcatcccggtgaaagaaagccctaaccagttttctgtcttgtttctgctttctccctacagttccacc

SEQ ID NO: 613708 - DNA, 120 bp, Artificial Sequence
  ENSG00000176697_58 (sequence is synthesized)
aatatcaagtatcacttaattagagatttttaagccttttcctcctgctgtgccgggtgtgtaatccgggcgataggagtccattcagcaccttggacagagccaacggatttgtccgag

SEQ ID NO: 613709 - DNA, 120 bp, Artificial Sequence
  ENSG00000176697_59 (sequence is synthesized)
agagttgaaagctaggggagcgagacctcggggcgtgcgattctcactcgctccctcccgccccagcgcccacagccggggtttctgcagagggcgcgggacgcggggttccccggggct

SEQ ID NO: 613710 - DNA, 120 bp, Artificial Sequence
  ENSG00000176697_60 (sequence is synthesized)
gaggctggggctggaacacccctcgaagccgcgggcgtcctgtccaaggcgccccaggagggcgcaggactcgcagggcgatgtcgcggggccctaggggaggagttccaccaggtgaga

SEQ ID NO: 613711 - DNA, 120 bp, Artificial Sequence
  ENSG00000176697_61 (sequence is synthesized)
cttccaccccgccccctcctccagcctccatccctccctcattctatctcttcctctccgtcgccctcgctcctcgctggatgcttctttctgggttttcttttttttttcccttctgtc

SEQ ID NO: 613712 - DNA, 120 bp, Artificial Sequence
  ENSG00000176697_62 (sequence is synthesized)
ctccctccccgcgagtttcgggcgctggcttagagggttcccgctttctcaagggaaggggagctgccgagaccgcgctccgctccccagccgggccggatgcctcactgagcccagttc

SEQ ID NO: 613713 - DNA, 120 bp, Artificial Sequence
  ENSG00000176697_63 (sequence is synthesized)
acacggctacctgctccccaggaattgagactgaagtggacttacaagtccgaagccaatgtagcttggaaaacttgggaggcggaattcctaccgctgggaactgaaagggtctgcgac

SEQ ID NO: 613714 - DNA, 120 bp, Artificial Sequence
  ENSG00000176697_64 (sequence is synthesized)
actctcgggcaggccgaacccacatctctacccatcctgcgcccctcttctgaagcgccctccagggaagttaagagttttgactttcggggagtggttgggatgtacgtgggggattct

SEQ ID NO: 613715 - DNA, 120 bp, Artificial Sequence
  ENSG00000176714_0 (sequence is synthesized)
agagaaacttccgcaatgttctgggctgcgaacgaaaaccaccacagcgtcagaaaggagcgggtttgctgagggccccagaaggctccttccaccgtatcatagtctaataaataattt

SEQ ID NO: 613716 - DNA, 120 bp, Artificial Sequence
  ENSG00000176714_1 (sequence is synthesized)
tgtcaagccagagaagctaacaaaggtagagacaaggcttaaagaaaagatagtggcggaaatgacggatctgaacaagcatataaaacaagctcaaacccagcggaaacagctactgga

SEQ ID NO: 613717 - DNA, 120 bp, Artificial Sequence
  ENSG00000176714_2 (sequence is synthesized)
ggaatccagggagctacaccgagaaaagttacttgtccaggctgaaaacagattctttctggaatacctgactaacaaaactgaagagtacacagagcaacctgagaaggtatggaacag

SEQ ID NO: 613718 - DNA, 120 bp, Artificial Sequence
  ENSG00000176714_3 (sequence is synthesized)
ctatttacaaaaaagtggagagattgaacgaagaagacaagaatcagcctccagatatgcagaacaaatttcagtgcttaaaacagcgctcttgcaaaaggaaaatatccaatccagttt

SEQ ID NO: 613719 - DNA, 120 bp, Artificial Sequence
  ENSG00000176714_4 (sequence is synthesized)
gaagcggaagttgcaggcaatgagggacattgctatattaaaggaaaagcaggagaaagaaatacagacattacaggaggagacaaagaaagtccaagctgagacagcttcaaagacacg

SEQ ID NO: 613720 - DNA, 120 bp, Artificial Sequence
  ENSG00000176714_5 (sequence is synthesized)
ggaagtacaggcccagctcctccaggagaaaagattactggagaaacaactgagcgagccagacaggaggctactgggaaagagaaaaagaagagagcttaatatgaaggcccaggcctt

SEQ ID NO: 613721 - DNA, 120 bp, Artificial Sequence
  ENSG00000176714_6 (sequence is synthesized)
gaagttggcagcaaagcggtttatttttgaatactcctgtggcatcaacagagagaaccagcagttcaagaaggaattactgcagctaattgagcaagcccagaaactaacggctactca

SEQ ID NO: 613722 - DNA, 120 bp, Artificial Sequence
  ENSG00000176714_7 (sequence is synthesized)
aagccacttagaaaacaggaagcagcagctgcagcaggaacagtggtatctggagtccttaatccaggcgaggcagagactgcaaggaagtcataatcagtgcctaaatagacaggatgt

SEQ ID NO: 613723 - DNA, 120 bp, Artificial Sequence
  ENSG00000176714_8 (sequence is synthesized)
tccaaagaccacacccagtcttccccaaggcaccaaatcaaggattaatccaaagtaacttctaaaataacactgattaaataagaactggagcaagtactcttaagtgctacattaacc

SEQ ID NO: 613724 - DNA, 120 bp, Artificial Sequence
  ENSG00000176714_9 (sequence is synthesized)
gtgaaggattagatggttttatccaacagtcctactagatatttggtaaccagcttcccttaactagctttttctttaaatactcgttaataagctattccacaaacctccagttaacct

SEQ ID NO: 613725 - DNA, 120 bp, Artificial Sequence
  ENSG00000176714_10 (sequence is synthesized)
aacacatgaccctaacctagccatttaccatacatcaaactagctaaaggaaaccaacctaaggaagtgaaaacagttgtgatttatttcatctagctaaattgtatttctttatagaga

SEQ ID NO: 613726 - DNA, 120 bp, Artificial Sequence
  ENSG00000176714_11 (sequence is synthesized)
aagtacctttaaggatagcattccaaatagactttgaatagcgttctgccagtttatcctcattccttttgaccaacttagcagacaaaagcagtttttacaagctctttgtgagtttgt

SEQ ID NO: 613727 - DNA, 120 bp, Artificial Sequence
  ENSG00000176714_12 (sequence is synthesized)
gccagtgaccaggtagctccttctagttttctcatgagtgaaaaagcattctgataacagcaagtccagtaagtgctaggcagagtgacctttcatctgatgctaagcccctacaagttt

SEQ ID NO: 613728 - DNA, 120 bp, Artificial Sequence
  ENSG00000176714_13 (sequence is synthesized)
gagaaggtaagaaaagatgaaggagacatatattaggtcagctcttacttttgaaaatgttttatttgaagaaacacctgtagcattgaggtgactgaatgcctccacttatttcaggaa

SEQ ID NO: 613729 - DNA, 120 bp, Artificial Sequence
  ENSG00000176714_14 (sequence is synthesized)
aacgtatccaaaaaaagttgaaatatttggacaactttttttttaagtgccatcgatttccctagcagcattctaaaagatagcaagtaaaatgatgtttgttatcctaaatgctttagt

SEQ ID NO: 613730 - DNA, 120 bp, Artificial Sequence
  ENSG00000176714_15 (sequence is synthesized)
tttaggtcatttattaattttcttacaggtgcactttctagtacatgaagtatcctttgtaattaatgtgtgccatatgtttattcccatttagtataactataaattatattttaaatt

SEQ ID NO: 613731 - DNA, 120 bp, Artificial Sequence
  ENSG00000176714_16 (sequence is synthesized)
atatatttttaggatagttatattttttttgggttctacgacattgaagttggactagtgatttatttgaatgctgaatcctagtataggggaatataatcttatattttaacaggggtc

SEQ ID NO: 613732 - DNA, 120 bp, Artificial Sequence
  ENSG00000176714_17 (sequence is synthesized)
ctctatgggaaaataggatgaactttgtttcccagaaattgttaagtgatgaaaaacttcaaaataattttcctgcattttctgctttatttacatgtaaagtgaattccctgaaaattg

SEQ ID NO: 613733 - DNA, 120 bp, Artificial Sequence
  ENSG00000176714_18 (sequence is synthesized)
gatttaaaaagcattctccttcaatgtgcctttaccttgtagctttaacaacttttctgttaaatatgtagttttttattaaacaatgttattaaataaaaacatttatccactgatttt

SEQ ID NO: 613734 - DNA, 120 bp, Artificial Sequence
  ENSG00000176714_19 (sequence is synthesized)
ggcgaggaagtgggggcgctgagcaagcgagaggaaggctgaagggagctaggaaaagggcgctgatctctgcagcctgggagggcttttgtctcccggaggaaggccagaagagatggg

SEQ ID NO: 613735 - DNA, 120 bp, Artificial Sequence
  ENSG00000176714_20 (sequence is synthesized)
gtcccgagggcagggctcacacagcaagaaaacgaggagcatgcctgtcattttgagcccacagagaacggggagcggagccactggaggaccggctgctcgggcttattcggtagccga

SEQ ID NO: 613736 - DNA, 120 bp, Artificial Sequence
  ENSG00000176714_21 (sequence is synthesized)
ggcggttaaacagttcagggctggaccagccgggactggagcagggtgcagtctccagggttgctgggcagcaccgagaccctttgagcaccgaacgaataaactacgggagctttccac

SEQ ID NO: 613737 - DNA, 120 bp, Artificial Sequence
  ENSG00000176714_22 (sequence is synthesized)
acttgcacattgttcccgcgagttgcagacgcaggttcctgatgctagcgctcattccttggcagtcaccctcagtgaactacacagttgccgtgaccttcaggatgaatgcttggattc

SEQ ID NO: 613738 - DNA, 120 bp, Artificial Sequence
  ENSG00000176715_0 (sequence is synthesized)
cgcgccggggaagctgttgggcgccggaactggtccggcccgactcacgaccccgcgggacccggccggaacccggcccgaccccggcgcgcgcgcggcggaggacgaggaagagttgtg

SEQ ID NO: 613739 - DNA, 120 bp, Artificial Sequence
  ENSG00000176715_1 (sequence is synthesized)
gcgcggcggaggacgaggaagagttgtggcgaggcagatcctgccccgtggccgcggccgtctcgtgtcccaccggccttccgggttccagcgccaggcctggtgcctgccccaggagga

SEQ ID NO: 613740 - DNA, 120 bp, Artificial Sequence
  ENSG00000176715_2 (sequence is synthesized)
tgagcatttgcattgcctgcaccttatcgtgcccttccacctgctgaagcagctgtgcctgccgctcttgtgaactgcgaacttccccttacctcctctctctggctcgggagctggctc

SEQ ID NO: 613741 - DNA, 120 bp, Artificial Sequence
  ENSG00000176715_3 (sequence is synthesized)
ggccgcctgtcagtgcaatgctgccccatgtggtgctcaccttccggcgcctgggctgcgccttggcgtcctgccggctggcgcctgcgagacacagaggaagtggtcttctgcacacag

SEQ ID NO: 613742 - DNA, 120 bp, Artificial Sequence
  ENSG00000176715_4 (sequence is synthesized)
ccccagtggcccgctcggacaggagcgccccggtgttcacccgtgccctggcctttggggacagaatcgccctggttgaccagcacggccgccacacgtacagggagctttattcccgca

SEQ ID NO: 613743 - DNA, 120 bp, Artificial Sequence
  ENSG00000176715_5 (sequence is synthesized)
gccttcgcctgtcccaggagatctgcaggctctgcgggtgtgtcggcggggacctccgggaggagagggtctccttcctatgcgctaacgatgcctcctacgtcgtggcccagtgggcgt

SEQ ID NO: 613744 - DNA, 120 bp, Artificial Sequence
  ENSG00000176715_6 (sequence is synthesized)
catggatgagtggcggtgtggcagtccccctctacaggaagcatcccgcggcccagctggagtatgtcatctgcgactcccagagctctgtggtccttgccagccaggagtacctggagc

SEQ ID NO: 613745 - DNA, 120 bp, Artificial Sequence
  ENSG00000176715_7 (sequence is synthesized)
tcctgagcccggtggtcaggaagctgggggtcccgctgctgccgctcacaccagccatctacactggagcagtagaggaaccggcagaggtcccggtcccagagcagggatggaggaaca

SEQ ID NO: 613746 - DNA, 120 bp, Artificial Sequence
  ENSG00000176715_8 (sequence is synthesized)
agggcgccatgatcatctacaccagtgggaccacggggaggcccaagggcgtgctgagcacgcaccaaaacatcagggctgtggtgaccgggctggtccacaagtgggcatggaccaaag

SEQ ID NO: 613747 - DNA, 120 bp, Artificial Sequence
  ENSG00000176715_9 (sequence is synthesized)
acgacgtgatcctccacgtgctcccgctgcaccacgtccatggtgtggtcaacgcgctgctctgtcctctctgggtgggagccacctgtgtgatgatgcctgagttcagccctcagcagg

SEQ ID NO: 613748 - DNA, 120 bp, Artificial Sequence
  ENSG00000176715_10 (sequence is synthesized)
tttgggaaaagttcttaagttctgaaacgccgcggatcaatgtctttatggcagtgcctacaatatacaccaagctgatggagtactacgacaggcattttacccagccgcacgcccagg

SEQ ID NO: 613749 - DNA, 120 bp, Artificial Sequence
  ENSG00000176715_11 (sequence is synthesized)
atttcttgcgtgcagtttgtgaagaaaaaattaggctgatggtctcaggctcagctgccctgcccctcccagtgctggagaagtggaagaacatcacgggccacaccctgctggagcggt

SEQ ID NO: 613750 - DNA, 120 bp, Artificial Sequence
  ENSG00000176715_12 (sequence is synthesized)
atggcatgaccgagatcggcatggctctgtccgggcccctgaccactgccgtgcgcctgccaggttccgtggggaccccactgcctggagtacaggtgcgcattgtctcagaaaacccac

SEQ ID NO: 613751 - DNA, 120 bp, Artificial Sequence
  ENSG00000176715_13 (sequence is synthesized)
agagggaagcctgctcctacaccatccacgcagagggagacgagagggggaccaaggtgaccccagggtttgaagaaaaggagggggagctgctggtgaggggaccctccgtgtttcgag

SEQ ID NO: 613752 - DNA, 120 bp, Artificial Sequence
  ENSG00000176715_14 (sequence is synthesized)
aatactggaataaaccagaagaaactaagagtgcattcaccctggatggctggtttaagacaggggacaccgtggtgtttaaggatggccagtactggatccgaggccggacctcagtgg

SEQ ID NO: 613753 - DNA, 120 bp, Artificial Sequence
  ENSG00000176715_15 (sequence is synthesized)
ccccagcatcacagatgtggctgtgattggagttccggatatgacatggggccagcgggtcactgctgtggtgaccctccgagaaggacactcactgtcccacagggagctcaaagagtg

SEQ ID NO: 613754 - DNA, 120 bp, Artificial Sequence
  ENSG00000176715_16 (sequence is synthesized)
ggccagaaatgtcctggccccgtacgcggtgccctcggagctggtgctggtggaggagatcccgcggaaccagatgggcaagattgacaagaaggcgctcatcaggcacttccacccctc

SEQ ID NO: 613755 - DNA, 120 bp, Artificial Sequence
  ENSG00000176715_17 (sequence is synthesized)
atgacccggcagactgggactgcgggtctggtggggagcagcagacgtccccttcacaccgagaaccacgggggcccgtccaagacctggcctcccttaaacctgaaccccccaaatcag

SEQ ID NO: 613756 - DNA, 120 bp, Artificial Sequence
  ENSG00000176715_18 (sequence is synthesized)
gtcacgtagaatcaagaactgtttgggatgaaatcaccatgtggggtccccagcctcgggccagttgttgcagctcaaggagaccgtccctggtgtcacctctgcctggtcaccgccgac

SEQ ID NO: 613757 - DNA, 120 bp, Artificial Sequence
  ENSG00000176715_19 (sequence is synthesized)
ctcatctgtgcagcgcggtgcagccagcccctggccccacgtgctgaggcacctcccgccccacagtgccctgcagttgccaggctctccagggcaggtcccagaggtttcccacaaaaa

SEQ ID NO: 613758 - DNA, 120 bp, Artificial Sequence
  ENSG00000176715_20 (sequence is synthesized)
acaaagactccactggaggaaacaagcccctgtcccacgccgtctgcacgtgcctgtgcctcacccagagccagtgtctcccggcccacataggaggtctgggcagccacccagggggcc

SEQ ID NO: 613759 - DNA, 120 bp, Artificial Sequence
  ENSG00000176715_21 (sequence is synthesized)
ctcctgggaggagctgagggttcacaagcctcccagaaccagccctgtcccatgggttccgtgcatttcctggtgctgctcttggaggagagcagctcccactgtggggacacctgccac

SEQ ID NO: 613760 - DNA, 120 bp, Artificial Sequence
  ENSG00000176715_22 (sequence is synthesized)
cctgcacactactgtgtgtccatcagcatgtgtcacagaaagtgcgtggacggatggccccggagctgctctgccgtgaccctgcctcaccccccagcgcagggactttccaggtcatct

SEQ ID NO: 613761 - DNA, 120 bp, Artificial Sequence
  ENSG00000176715_23 (sequence is synthesized)
ccacaccagcccctcagccggtgaaccctctctcccatcaccgtctccacccagacccccacctgccccatggcccccatttcatgtctgtggctcaccagcttttccccagacccagct

SEQ ID NO: 613762 - DNA, 120 bp, Artificial Sequence
  ENSG00000176715_24 (sequence is synthesized)
ccggagcccacaggcgtggccgatgcagaaacctcaggaaggtgtgttgtgaatgttgggtgcacccacgttgcatttacttagcggggccaattcagatgcacaggggccacatgcaga

SEQ ID NO: 613763 - DNA, 120 bp, Artificial Sequence
  ENSG00000176715_25 (sequence is synthesized)
atccagaagtttctggacaattttcagaagaataggctgcctcctccccacagcctgggggaagtaacagtcatcgcccagcagtgtctggcctgaacttacccagaacattctgccccc

SEQ ID NO: 613764 - DNA, 120 bp, Artificial Sequence
  ENSG00000176715_26 (sequence is synthesized)
ggaatgcacgtctgaaagagtggccagaaacgagtgtgccgggcaggaggccagccccatctcaggctcacgtgcctctgacaggagaccagccccatctcaggctcacatgcctcgcgg

SEQ ID NO: 613765 - DNA, 120 bp, Artificial Sequence
  ENSG00000176715_27 (sequence is synthesized)
acagttggacgtggcctggggcccctgctcacttgagcatgtcgcccaccaagcttgtctgaggccacagagcagcgtcccagccctgttttccaggactggtgggtgccccagtccacg

SEQ ID NO: 613766 - DNA, 120 bp, Artificial Sequence
  ENSG00000176715_28 (sequence is synthesized)
gccctgccccacccgaactcctgcctcacggtgtggccttgtgcatccccatggcctgaccccgggaacagtcagaggaaggggtcccgccctcccgccagaggcctggacccaagggaa

SEQ ID NO: 613767 - DNA, 120 bp, Artificial Sequence
  ENSG00000176715_29 (sequence is synthesized)
cggcagtcagagactacagtccagacgtttgtgtctaggccttgctggtagctaaggaaatgccttctgttgggaaaaggtcaaatttaacatagcaaaatttttacttaattccactaa

SEQ ID NO: 613768 - DNA, 120 bp, Artificial Sequence
  ENSG00000176715_30 (sequence is synthesized)
agtttccagggggctcattaagggagatgtggacagaatccgtggcggggtggtgattcccacccagcctctgccagtttccagggagctccattaggccagaggtgaccgggctggtcc

SEQ ID NO: 613769 - DNA, 120 bp, Artificial Sequence
  ENSG00000176715_31 (sequence is synthesized)
gagccacagagcgatgggagagggaggtgccacgcactctcaaacatgcaggtcttgtgagaactcactcactagcacgagaacagcaaggggaaaatccacccctgtgatgcagtcacc

SEQ ID NO: 613770 - DNA, 80 bp, Artificial Sequence
  ENSG00000176715_32 (sequence is synthesized)
gttcctccctggcccctcccaaatcttacgtcctttttacattgcaaaatacaatcctacttcccaacagtcccccaagt

SEQ ID NO: 613771 - DNA, 120 bp, Artificial Sequence
  ENSG00000176715_33 (sequence is synthesized)
attgcaaaatacaatcctacttcccaacagtcccccaagtcttcactcatttcagcattaattcagaagtccacagtccaaagtctcgtctgagacaaggcaagtccttttcacctatga

SEQ ID NO: 613772 - DNA, 120 bp, Artificial Sequence
  ENSG00000176715_34 (sequence is synthesized)
gcctgtaaaatcaaagacaagttacttcccagatacagtgggggtgcaggcattgggtaaatacaccagtgccaaaagagagccgccagccaaaacaaaggggctgcgagccccaggcag

SEQ ID NO: 613773 - DNA, 80 bp, Artificial Sequence
  ENSG00000176715_35 (sequence is synthesized)
agccgccagccaaaacaaaggggctgcgagccccaggcaggtccaaaacctagcaaggcagtcactgaattgttttttga

SEQ ID NO: 613774 - DNA, 75 bp, Artificial Sequence
  ENSG00000176715_36 (sequence is synthesized)
gtcttgatagcctctgcctgcaagcaattctcctacctcagcctccctaagtagctgggactataggcatgcacc

SEQ ID NO: 613775 - DNA, 90 bp, Artificial Sequence
  ENSG00000176715_37 (sequence is synthesized)
tgacctcaagtgatccacctgcctcagataaccccacccagcccaataaatcttaaagccccaaaataatctcctaagacccatgtctca

SEQ ID NO: 613776 - DNA, 120 bp, Artificial Sequence
  ENSG00000176715_38 (sequence is synthesized)
tcttaaagccccaaaataatctcctaagacccatgtctcacatccaggctacactgatgcatggaggtggctcccaaggccatgggtatctctgctcctgtggctctgtagggtacagcc

SEQ ID NO: 613777 - DNA, 120 bp, Artificial Sequence
  ENSG00000176715_39 (sequence is synthesized)
cccatgctgctttcataggctgctgttgtgtgcctgcaacttttctaggtgcaccacacagtgcaagctgtcggtgggttattctggggtctggagaacggtggccctcttctcacagct

SEQ ID NO: 613778 - DNA, 120 bp, Artificial Sequence
  ENSG00000176715_40 (sequence is synthesized)
gcagtagccagggccccactggggactctgtgtgggggctccaaccccatctttctcctcttcactgccctggagcagtggcctgagctctatctggagcccttttagccccagagcaac

SEQ ID NO: 613779 - DNA, 120 bp, Artificial Sequence
  ENSG00000176715_41 (sequence is synthesized)
agggatgcaggggccagtgtccctcagggcagtggcccacaaaaccattcttccctccgaggcctccaggcctatgatgagaggcacttccatgaaggtctctgacacgcctagagacat

SEQ ID NO: 613780 - DNA, 120 bp, Artificial Sequence
  ENSG00000176715_42 (sequence is synthesized)
tttcctcattgtcttggcgattaatattcagctcctctttacttacgcacatttctgcagccagcttgaattcctccccagaaaattgtttgtttgtttgttttctaccatgtgatcagg

SEQ ID NO: 613781 - DNA, 120 bp, Artificial Sequence
  ENSG00000176715_43 (sequence is synthesized)
ctgcaaattttccaaattttatgctctgcttaccttttaaatctaagttccggtttcaggtcatctctttgctcatgcttaacaaaagcaatctttgctccagttcccaataagttcctc

SEQ ID NO: 613782 - DNA, 120 bp, Artificial Sequence
  ENSG00000176715_44 (sequence is synthesized)
cagttcccaataagttcctcatctccctccgagtctacctcagcctggacttcattgtccatatcgctattagcattttagtcacaacaatttaacaagtctttaggaagttccaaactt

SEQ ID NO: 613783 - DNA, 120 bp, Artificial Sequence
  ENSG00000176715_45 (sequence is synthesized)
tacccagttccaaagctgcttccacatttccagatgtcttaacagcagtgccccacttccctgtaccagttttctgtgttagtccagtcttgcattgctataaatgaagccagatttttc

SEQ ID NO: 613784 - DNA, 120 bp, Artificial Sequence
  ENSG00000176715_46 (sequence is synthesized)
cagtcttgcattgctataaatgaagccagatttttctcagccactttgccaaccggggacctccgtggctggtgacacccccaacccaggcctgccacagaaggcacccacacactcgac

SEQ ID NO: 613785 - DNA, 120 bp, Artificial Sequence
  ENSG00000176715_47 (sequence is synthesized)
ccactgggccatgcttggcttatgcactggctcagcccacctgtgttatagcttatacctgcattcatcggttcccaagttcttgtcccgcgtccaagaagaatgaggttacactgacaa

SEQ ID NO: 613786 - DNA, 120 bp, Artificial Sequence
  ENSG00000176715_48 (sequence is synthesized)
ttcaaagggtgaggagagtggagaagaattttattgagcaatgaaacagctctcagcggagagggtatgcgagggtgctgaaccgcccagagttgggtgtggctgggtctagggcttttc

SEQ ID NO: 613787 - DNA, 120 bp, Artificial Sequence
  ENSG00000176715_49 (sequence is synthesized)
tgggcacagaatggggaggggcaggctgtaggtagcactggaaaaggtaacctttggttggttaaaaagcattattcagaaagaaccagtgggaaagagtgggcaaacaggaatagaagt

SEQ ID NO: 613788 - DNA, 120 bp, Artificial Sequence
  ENSG00000176715_50 (sequence is synthesized)
tctcactccaggctgcaggtttcaggctgtttttggcttgaaggtggggtttcaccagggacccacccctgtctatctgggcatttgactgcttcctgttgctttcataaggaactaccc

SEQ ID NO: 613789 - DNA, 120 bp, Artificial Sequence
  ENSG00000176715_51 (sequence is synthesized)
ttgactgcttcctgttgctttcataaggaactacccaagatggtaatttataaagaaaagaggtttaagtggctcacagttccacaggctataaggaagcatggctggggaggcctcagg

SEQ ID NO: 613790 - DNA, 120 bp, Artificial Sequence
  ENSG00000176715_52 (sequence is synthesized)
tcccacatggtggagcaggaggaagagctcacctacagcaaattatttaagaccgagcatttgtctctgttctgttccctctctggacgcaccctcctgcctccaccctgacttgccgtc

SEQ ID NO: 613791 - DNA, 120 bp, Artificial Sequence
  ENSG00000176715_53 (sequence is synthesized)
tcctgagcactgaagatatttttggcttgtccgatgtgactccacagacagcagaaacgcttgcttgatcagggcagcatcagggcaccacacatgcctgggcttgcacaacacagcggg

SEQ ID NO: 613792 - DNA, 120 bp, Artificial Sequence
  ENSG00000176715_54 (sequence is synthesized)
agcactgccactcagcagcagctgctgctttcattaaacagttaccttgagaagaaaagataggtgtcgagggctgagagctgtgctagagtttcagggtccgagttggcaggaactgaa

SEQ ID NO: 613793 - DNA, 120 bp, Artificial Sequence
  ENSG00000176715_55 (sequence is synthesized)
gtcccgatgctcctcagcccttggctgtcctcagggctgccctctgcgtggggacaccaggccgcccctgcccagggacaccaggccgcctgctcctgctctgtgcatctctcacatcag

SEQ ID NO: 613794 - DNA, 120 bp, Artificial Sequence
  ENSG00000176715_56 (sequence is synthesized)
gctcctcacccagcattgtttgggctatgacagtggctgtgacaagaccctaagacgggaagctgcgtgcagggcacttgagggcccgctgaggagaagccgcctgtgagggacaggact

SEQ ID NO: 613795 - DNA, 120 bp, Artificial Sequence
  ENSG00000176715_57 (sequence is synthesized)
gggcagggaaggccaccagccatgcggtcacagcccaggactccgccagtcctgcaggagccctggagccaggcccttgctgtccaggccacttgctgtacctggcccacagctacctcc

SEQ ID NO: 613796 - DNA, 120 bp, Artificial Sequence
  ENSG00000176715_58 (sequence is synthesized)
cctgcagccctgagtcctgcttgctgtgcccggctcaggctgagactgcagtgcttgtccattcaccatgaaagaaagaagaacaggaagggaggcaggaggaagtaagttagaggatta

SEQ ID NO: 613797 - DNA, 120 bp, Artificial Sequence
  ENSG00000176715_59 (sequence is synthesized)
atccaaatgttccaactgtctaatgggagttccaacaagaagatatccagggaggaaattcacagtcaaatttccccaaaccaaaggtcatgagttttcaggttgaaagaacacccaacc

SEQ ID NO: 613798 - DNA, 120 bp, Artificial Sequence
  ENSG00000176715_60 (sequence is synthesized)
cgggctctgacgggcaggatggcggcacggagggctgctgtatccagtgaagtcagcagttcagatgaaacagataactcccttaaaagacacaaattgccaagactgacgcaaacactg

SEQ ID NO: 613799 - DNA, 120 bp, Artificial Sequence
  ENSG00000176715_61 (sequence is synthesized)
aaacagactgaacagttctgagttaccaatttaaaactgcaaagcaaatagcaggcccaaaaggcttcactgataaattatctcaaacattgaaggcaaaaaataaaaccagacacagca

SEQ ID NO: 613800 - DNA, 120 bp, Artificial Sequence
  ENSG00000176715_62 (sequence is synthesized)
aagtaagtctctgatgaaacagagtggggaggaacacttcctaactccccgtatgggaccagcactaccctgaaatcaaaaccagacaagaaaacgagaggacagtgttcccaatgggca

SEQ ID NO: 613801 - DNA, 120 bp, Artificial Sequence
  ENSG00000176715_63 (sequence is synthesized)
gacacacaaaatcctaaacaaaacgttagcaaattaaatccagttaatgcacaaaaagacaacacgtcatgatcaagcagcatttaagccaggaatagagggttactttcatattcaaaa

SEQ ID NO: 613802 - DNA, 78 bp, Artificial Sequence
  ENSG00000176715_64 (sequence is synthesized)
catttaagccaggaatagagggttactttcatattcaaaaatcagtctgtgtaattcaccatatattttttttttttt

SEQ ID NO: 613803 - DNA, 120 bp, Artificial Sequence
  ENSG00000176715_65 (sequence is synthesized)
gaactcctgacttcaagtaatcctcccgcctcggcctcccgaagtcctggaattacaagcgtgagccactggtaattcaccatatttacagaatgaagaagaaagatcatatcatttcaa

SEQ ID NO: 613804 - DNA, 120 bp, Artificial Sequence
  ENSG00000176715_66 (sequence is synthesized)
tagatacagaaaaagcatttgcaaatgtcaaaacccttttataacaagcactcttagcaaactaggagaagaaggaaaatccttgaacctgatgagggagtctctcaaaagctaccagat

SEQ ID NO: 613805 - DNA, 120 bp, Artificial Sequence
  ENSG00000176715_67 (sequence is synthesized)
gacatcctgctcgatggggagctgctgggcgttttcctcctgtgaccaggaaggggcgcctgccctcaccactgccacccagtctcattcaacacagagtttgtcccctgttagaaaccg

SEQ ID NO: 613806 - DNA, 120 bp, Artificial Sequence
  ENSG00000176715_68 (sequence is synthesized)
agacgttggttacacgtggaggttgggagtggctcaggcaggcagaggggcttctgggaacctggccatgttccctttcagtctgggcgctacttagagcagggggcagttgcttcaata

SEQ ID NO: 613807 - DNA, 70 bp, Artificial Sequence
  ENSG00000176715_69 (sequence is synthesized)
gtctgggcgctacttagagcagggggcagttgcttcaataaaactttagattcccacacaggccaggcgt

SEQ ID NO: 613808 - DNA, 120 bp, Artificial Sequence
  ENSG00000176715_70 (sequence is synthesized)
gcggcaagccgagactgcaccactgcaatccagcctgggcgacagggcaagcctctgtctcaaaagaaaaaaaaatctacacatccctcaccacactgtacataggacagctgggtgtaa

SEQ ID NO: 613809 - DNA, 120 bp, Artificial Sequence
  ENSG00000176715_71 (sequence is synthesized)
attacatctccatttaaatgcctgtcatagttttatacaactataaaatatatacgtgccaaaataaatttgataggaacattggaaccaggtaaggtgacgcatacctgtagcacttcg

SEQ ID NO: 613810 - DNA, 120 bp, Artificial Sequence
  ENSG00000176715_72 (sequence is synthesized)
ggaggatcctttgagcccaggaagtcgaggcttcagtgagccatgactgcaccactgcactctggcccaggcaacagtgagatcctgtcctagaaagaaaagagaaaaaaagaaaaatgc

SEQ ID NO: 613811 - DNA, 120 bp, Artificial Sequence
  ENSG00000176715_73 (sequence is synthesized)
gatttggaaatgtggaggtcgaggttgacagcgacaccgaggtcgaagccagttgcccctggagagcgagagactgggctgggccgactcccacctctgtcgcgagaggcctacgggcag

SEQ ID NO: 613812 - DNA, 120 bp, Artificial Sequence
  ENSG00000176715_74 (sequence is synthesized)
gggcaggtgggcagggggactgtgctgggtctctggccgcgtctggacggcaggcgacactttctccacaaaaagcgtcaagaaaccacgacacttggtttctggacttttccgcggaac

SEQ ID NO: 613813 - DNA, 120 bp, Artificial Sequence
  ENSG00000176715_75 (sequence is synthesized)
agtaaccagaacaatcgccatgaaggttcgtttctgtcatggctcagtgcagcctggacgccctggaccagcccctcctgcgcctgggccacggccgctgccttcagggcatcactggtg

SEQ ID NO: 613814 - DNA, 120 bp, Artificial Sequence
  ENSG00000176715_76 (sequence is synthesized)
ggcggcacaaccatcctccctttggggggttaatttcatttctttcctcccttctttaatggtgaatggaggagcaccgagcaccactgcagtctcagtttcagatcccagcgcctcgtc

SEQ ID NO: 613815 - DNA, 120 bp, Artificial Sequence
  ENSG00000176715_77 (sequence is synthesized)
cctgcccactgccctcggccccgcccgcctgcattggcagtgccctggccccacccacccgtgtcagcaccgcccaccgccctggcaccacccaccgagttctcgcccatgaggaagggg

SEQ ID NO: 613816 - DNA, 120 bp, Artificial Sequence
  ENSG00000176715_78 (sequence is synthesized)
gaccctgagtggaggtttcaaaccttaggggccgtccctgccgtgcagggctctgtgaggcctcttgccacataggcttgtgtctgcaggactgtgcggcatttactcccatctcaaata

SEQ ID NO: 613817 - DNA, 120 bp, Artificial Sequence
  ENSG00000176715_79 (sequence is synthesized)
ccccatacagggcagactgcccctgccccacctgcccacccactccccagcctcttccgcacgcctcctctggaaggggaacgggccacagagtgaaatggggccttccagctccagtgc

SEQ ID NO: 613818 - DNA, 120 bp, Artificial Sequence
  ENSG00000176715_80 (sequence is synthesized)
ggggacttggaaggcctggcccggtgtgggggcccctctgccctgcaggccactctgtgcaggcctatcctcaggtgtgccctcgcccaaggcctgcacgcaccatggcttctgtggtac

SEQ ID NO: 613819 - DNA, 120 bp, Artificial Sequence
  ENSG00000176715_81 (sequence is synthesized)
cagtgataacaccatgccgggcacctcctgcagtcaccacccctgggctgctagggcagagacagctgcggtggcccggtgcacctgcctggcctcaggatggccgaggcgcctggcaag

SEQ ID NO: 613820 - DNA, 120 bp, Artificial Sequence
  ENSG00000176715_82 (sequence is synthesized)
ggaacccggcccgaccccggcgcgcgcgcggcggaggacgaggaagagttgtggcgaggcagatcctgccccgtggccgcggccgtctcgtgttggaggacataagatgaggcttccctt

SEQ ID NO: 613821 - DNA, 120 bp, Artificial Sequence
  ENSG00000176715_83 (sequence is synthesized)
acggaatgagcaaagcccggctcgctgaggctgcaggctgcagcattgctttgtgggcgtcctctcttttgatcttctcgaaacagcccctgcgatggggtcatattttgcactcacata

SEQ ID NO: 613822 - DNA, 120 bp, Artificial Sequence
  ENSG00000176715_84 (sequence is synthesized)
tttcgaaataatgagtgtaactttctgctgacaatactacaaactacagaaagcctggagctcattgaccagaaactgcagagagcctggagctcgttgaccacaaactacagaaagcct

SEQ ID NO: 613823 - DNA, 120 bp, Artificial Sequence
  ENSG00000176715_85 (sequence is synthesized)
ggagctcgttgaccagccggttgaccagaatacggtgctccaaggacatgcggttgaatgccgtgttctaaagtcacgagtgactctccagctggtccctgtgccaggctggtcggcctt

SEQ ID NO: 613824 - DNA, 120 bp, Artificial Sequence
  ENSG00000176715_86 (sequence is synthesized)
cgtgcacacagtccgccagtgcccagccaggcccctggttcccctctgctccaccagccgagaacaagcccgtcctggagggaactcatcctctcctccctccccattaaagcccagttt

SEQ ID NO: 613825 - DNA, 120 bp, Artificial Sequence
  ENSG00000176715_87 (sequence is synthesized)
attccccatcttggcctctggtgctgacctggcctctggagacacaggccggggggtgctgtttgcgaactcaccgtgactgagctccatgaggataccacagtcccacgtggctggcag

SEQ ID NO: 613826 - DNA, 120 bp, Artificial Sequence
  ENSG00000176715_88 (sequence is synthesized)
cgcccaccccacacaccctgccccttgctgggcggccccatgccacaaaagttagacccaggagcaggtgccctgggagcaggctgccaccagctgggtcagaagcccctctacatgcct

SEQ ID NO: 613827 - DNA, 120 bp, Artificial Sequence
  ENSG00000176715_89 (sequence is synthesized)
ggtgcttttgacctcctagggaggctggcttgaatctggaaagtcaccagttctgaccccagccagacacaggggtgctgccaggagctgctcccaggcgggtggcccagcttctctcag

SEQ ID NO: 613828 - DNA, 120 bp, Artificial Sequence
  ENSG00000176715_90 (sequence is synthesized)
gcaccaggggatggcaggactcctggtgaccagctggtccccaaagccgtggcaccgcgcctgctgctgccagcaaagtcccacacacagcctgtggcaggtgccgccccattctttctg

SEQ ID NO: 613829 - DNA, 120 bp, Artificial Sequence
  ENSG00000176715_91 (sequence is synthesized)
cccctccctcatcaggggccagggtgaagcccctgccgccctctgccttccctccacctgcggcttccctggcagggagaccatggacccagctcctgcctcctccattcgtttaacaga

SEQ ID NO: 613830 - DNA, 120 bp, Artificial Sequence
  ENSG00000176715_92 (sequence is synthesized)
tagggcccaggccagcagcccaggcattaggctggccggtccactgaggcctagacaggccaggcctgaggcagctcaggagtgccaagctggccccacgttcccacccaacagcggccc

SEQ ID NO: 613831 - DNA, 120 bp, Artificial Sequence
  ENSG00000176715_93 (sequence is synthesized)
ttggggctgccttcctgccaggtgtccaggcccaacacacaagacctgagcctgctctgcctcagtttccctactctgtgaactgcggctgctgctctctcggggcccttctagccctgg

SEQ ID NO: 613832 - DNA, 120 bp, Artificial Sequence
  ENSG00000176715_94 (sequence is synthesized)
ccaaggggtgggggctttgttccctcgggcgtcctgtccctggggactggccacacacacaccacacactgccctcccacctggactctgtcccagcggcaccagggtcaggagcaggag

SEQ ID NO: 613833 - DNA, 120 bp, Artificial Sequence
  ENSG00000176715_95 (sequence is synthesized)
cctcaggacccacgcagcaccaggcacagcacggagtgaggcagtgggcggtgtggcaagcgctgtgtgcaccactaacctggaggagccacggctcccggaccctcgtgtcaaagctgc

SEQ ID NO: 613834 - DNA, 120 bp, Artificial Sequence
  ENSG00000176715_96 (sequence is synthesized)
cggcctcctttgctgggagcctgagaggaggtcctggtgcagaacagcagcttgttgccagccacagtgagaaggtggtgagtgtgccagccactgagttaaccatcagtaacaggaggc

SEQ ID NO: 613835 - DNA, 120 bp, Artificial Sequence
  ENSG00000176715_97 (sequence is synthesized)
gtgtgcagacaggtgtggaccacagcagccacaagagagacgaggtcactggaggataaacatccgtgactgcacctcatgatccatcacgcacgacggccgcagcatctcctgccagct

SEQ ID NO: 613836 - DNA, 120 bp, Artificial Sequence
  ENSG00000176715_98 (sequence is synthesized)
gccggcacagacaagagcacgggatggacgaccgcggtagcaacgtggggctcatctgcctctctctgagcaggaagcccgtcactctgtgcggtgtgcactgaccccagccagtggatg

SEQ ID NO: 613837 - DNA, 120 bp, Artificial Sequence
  ENSG00000176715_99 (sequence is synthesized)
ttccccgtccaagagcaaagctacagtcggctgcaggtgcagtgacttttgcacagtggaagaatttctccagaagatattcctgcaggtggaatcactggatcgtaggcccagatgtct

SEQ ID NO: 613838 - DNA, 120 bp, Artificial Sequence
  ENSG00000176715_100 (sequence is synthesized)
tccacttacttgattttgcctgatgccttccaaggaggctgtgcacagcaggtgtgagatgccccatctcaccaaccggccaacatcccgatgggagatgttgagttttcaccacgctgc

SEQ ID NO: 613839 - DNA, 120 bp, Artificial Sequence
  ENSG00000176715_101 (sequence is synthesized)
tgagtgtgacgtggaatcttcttattttagcttgcatttccctgattacaagtcaggtggaacatctcgaatatgtttctgggccatttgattttcctgcaagtcacctgttccagttct

SEQ ID NO: 613840 - DNA, 120 bp, Artificial Sequence
  ENSG00000176715_102 (sequence is synthesized)
ttgcccatttcctgttgggttggtcaatattttttgtgattacacgttggatacgtggctggcctttggcttgcctttgacttcgtttgttctatcgaagcatgtgcagaattgttaaat

SEQ ID NO: 613841 - DNA, 72 bp, Artificial Sequence
  ENSG00000176715_103 (sequence is synthesized)
cttcgtttgttctatcgaagcatgtgcagaattgttaaattttaatgtattcaaatgcattaatctcatttc

SEQ ID NO: 613842 - DNA, 120 bp, Artificial Sequence
  ENSG00000176715_104 (sequence is synthesized)
agcaatcctcctgcctcagcttcctgagaagctgggaccacaggcatgtgccatcatgtccggctaattttctttttaaaatgttgtagcaatggagcctgggctcaagccatcttccca

SEQ ID NO: 613843 - DNA, 120 bp, Artificial Sequence
  ENSG00000176715_105 (sequence is synthesized)
gcaatggagcctgggctcaagccatcttcccacctcagcctgccaagtagctgggaccacagacatgtgccactgctgcgcccagctagcctttaatatttttaaatgctgtaagatctg

SEQ ID NO: 613844 - DNA, 120 bp, Artificial Sequence
  ENSG00000176715_106 (sequence is synthesized)
caggtttttttccaaccaagtttatagcttttcaccccacggatccccgaggccatgacaggcagtgacctccttggggcacccgcagagtcctcccccccatcttgggagggcttgtcc

SEQ ID NO: 613845 - DNA, 120 bp, Artificial Sequence
  ENSG00000176715_107 (sequence is synthesized)
ttggagttccggatatgacatggggccagcgggtcactgctgtggtgaccctccgagaaggacactcactgtcccacagggagctcaaagagtgggccaggttgaaagaacacccaacca

SEQ ID NO: 613846 - DNA, 120 bp, Artificial Sequence
  ENSG00000176715_108 (sequence is synthesized)
agcccctcctgccacacggattctggcataagccggcgggcacaggggacagccagggatggctggacacagctgaggatggccgaggccggcctgcagctccccaacggcctcctccgg

SEQ ID NO: 613847 - DNA, 120 bp, Artificial Sequence
  ENSG00000176715_109 (sequence is synthesized)
gtcaggatgagaggagaggttgccagctttgatgccagccgctcctgcctcccccacctgcctctgtgcctacagcccgcttctgcctcaagatcacacagcgggcttgtgaggccaggg

SEQ ID NO: 613848 - DNA, 120 bp, Artificial Sequence
  ENSG00000176715_110 (sequence is synthesized)
gtctccgctgctgctcaaggagatggcaaaggtctgtttcagtgatcgcaagttgccctggagccctctgaaccttctgagtcgccctcgctgccgcaggacctcctcccgcggggtgtc

SEQ ID NO: 613849 - DNA, 120 bp, Artificial Sequence
  ENSG00000176715_111 (sequence is synthesized)
cgacccgctcttgcttggctgagactttgtttaaaccctggctccgatgcctctgagcccttgatagcagcgtcccagcctggaagaacaaaaccagccacttttccccttggcaaaggc

SEQ ID NO: 613850 - DNA, 120 bp, Artificial Sequence
  ENSG00000176715_112 (sequence is synthesized)
aggacaccgtggtgtttaaggacggccagttaaccagagccccttttcctcaggggacaccgtggtgtttaaggatggccagttaaccagagccccttttcctcaggggacaccgtggtg

SEQ ID NO: 613851 - DNA, 120 bp, Artificial Sequence
  ENSG00000176715_113 (sequence is synthesized)
ccggccggaacccggcccgaccccggcgcgcgcgcggcggaggacgaggaagagttgtggcgaggcagatcctgccccgtggccgcggccgtctcgtgaccgggctggtccacaagtggg

SEQ ID NO: 613852 - DNA, 120 bp, Artificial Sequence
  ENSG00000176715_114 (sequence is synthesized)
ggagacgagagggggaccaagggccccagcccatgctgttgtcctgacatgcctctcctgggattcctgcctctgccctgctggtactaggctgctggccacaccccacatctcaggttc

SEQ ID NO: 613853 - DNA, 120 bp, Artificial Sequence
  ENSG00000176715_115 (sequence is synthesized)
ctgaatacaccggcccttcctggctctcaagtctgtgccctgcagtgcccctgcccccaactcgaggacctcccagctcagccagttccaaccctgtctgcagggacggggctcagcctg

SEQ ID NO: 613854 - DNA, 120 bp, Artificial Sequence
  ENSG00000176715_116 (sequence is synthesized)
tgcctgggttggggacaccatctagtcagaaatgtccccagcagagagcagaacgtgagtggcgtgtggaggagtgagacgccccgtggctgtgcagccctctccaggtgtcagtcagct

SEQ ID NO: 613855 - DNA, 120 bp, Artificial Sequence
  ENSG00000176715_117 (sequence is synthesized)
gacactcctgcctctgagcacctgctctgccggaaatggcagaaatgttgccagagaaaggggcggagcgggggtggggagcatttctgtcttaaattaaaacaaaacttaactgcttca

SEQ ID NO: 613856 - DNA, 80 bp, Artificial Sequence
  ENSG00000176720_0 (sequence is synthesized)
ctctcgccagctgggagtcgcgcgctgcccacctcgctgcccaggcccccgacgccgcggcaggagccccccaagagcgc

SEQ ID NO: 613857 - DNA, 120 bp, Artificial Sequence
  ENSG00000176720_1 (sequence is synthesized)
acggggcgggcgccggggcggggcgcgcgtcctcgcgggtctgaatggaagggtcgaggtcgtcgtcggcggcgagcagatcctgaagccagaactccaccccggcgcccgcgccatgcg

SEQ ID NO: 613858 - DNA, 120 bp, Artificial Sequence
  ENSG00000176720_2 (sequence is synthesized)
gcgggagaggtgcggcgccccccacccgcgtcgccgccatggaggtgctgcggcgctcctcggtcttcgccgccgagatcatggacgcctttgaccgctcgcccacagacaaggagctgg

SEQ ID NO: 613859 - DNA, 120 bp, Artificial Sequence
  ENSG00000176720_3 (sequence is synthesized)
gctcgcccacagacaaggagctggtggcccaggccaaggcgctgggccgggagtacgtgcacgcgcggctgctgcgcgccggcctctcctggagcgcgcccgagcgtgccgcgccggtcc

SEQ ID NO: 613860 - DNA, 120 bp, Artificial Sequence
  ENSG00000176720_4 (sequence is synthesized)
cggtgctgctgcgcctgggcgatgagctggagatgatccggcccagcgtctaccgcaacgtggcgcgtcagctgcacatctccctgcagtctgagcctgtggtgaccgatgcgttcctgg

SEQ ID NO: 613861 - DNA, 120 bp, Artificial Sequence
  ENSG00000176720_5 (sequence is synthesized)
ccgtggctggccacatcttctctgcaggcatcacgtggggcaaggtggtgtccctgtatgcggtggccgcggggctggccgtggactgtgtgaggcaggcccagcctgccatggtccacg

SEQ ID NO: 613862 - DNA, 120 bp, Artificial Sequence
  ENSG00000176720_6 (sequence is synthesized)
ccctcgtggactgcctgggggagttcgtgcgcaagaccctggcaacctggctgcggagacgcggcggatggactgatgtcctcaagtgtgtggtcagcacagaccctggcctccgctccc

SEQ ID NO: 613863 - DNA, 120 bp, Artificial Sequence
  ENSG00000176720_7 (sequence is synthesized)
actggctggtggctgcactctgcagcttcggccgcttcctgaaggctgccttcttcgtgctgctgccagagagatgagctgcccacctggcagtggccgcagcctggccctctgggccca

SEQ ID NO: 613864 - DNA, 120 bp, Artificial Sequence
  ENSG00000176720_8 (sequence is synthesized)
acgcaggaggccctcagcacccgaacacatcttcctcctccccacccgagcctggagcactctaaccctcggagaccccctaagccccgttcctccgcagacccaggccctccggaaggg

SEQ ID NO: 613865 - DNA, 120 bp, Artificial Sequence
  ENSG00000176720_9 (sequence is synthesized)
gtgagtggggaggggctttcctgagcctggagctgggctttggggcagcctgcgaccctccccgcttgtgtcccttctcctgtgatctctgtgttttcccttttctttctggggccagga

SEQ ID NO: 613866 - DNA, 85 bp, Artificial Sequence
  ENSG00000176720_10 (sequence is synthesized)
acctgagccccaggtgaaggggcccggaacacctgctctcacctgagcccccggtgaaggggcccggaacactacacctcctctc

SEQ ID NO: 613867 - DNA, 120 bp, Artificial Sequence
  ENSG00000176720_11 (sequence is synthesized)
cccaggtgaaggggcccggaacacctcctgtcacctgagccccaggtgaaggggcccgggaacacctctcacctgaacccgggggtcccatcccaggaagaagggccatctcaggacatg

SEQ ID NO: 613868 - DNA, 120 bp, Artificial Sequence
  ENSG00000176720_12 (sequence is synthesized)
agtcctcaggggccctgcacattcaatctgaaggtgaccctggcctggctgaagctggaagagctgtggggactcagcctgtaaacagagcgtaaggttcacatgctggttgcttaatcc

SEQ ID NO: 613869 - DNA, 120 bp, Artificial Sequence
  ENSG00000176720_13 (sequence is synthesized)
gtttctggaggaagagtatgacacccacttgtgatggggtccttgtgcggtggggaccggggccggcgggctccaggccagcacacctaacccatggatgtggaacctacggccgagaag

SEQ ID NO: 613870 - DNA, 120 bp, Artificial Sequence
  ENSG00000176720_14 (sequence is synthesized)
gaatgttgcatgagtcggatcccagtccattgtcagtggagggtgagggtgaccccatctgctatttttgtgctcatcctcatacaaccatttggggatgtgcctattagggctccgtaa

SEQ ID NO: 613871 - DNA, 120 bp, Artificial Sequence
  ENSG00000176720_15 (sequence is synthesized)
gaactcagatgcctgggaagcccagcccctcaggtgcccccacacacagccttcccttgacgcctacatttctaggcacatgtgaggcatctttcctggagccccgagccagccctgtcc

SEQ ID NO: 613872 - DNA, 120 bp, Artificial Sequence
  ENSG00000176720_16 (sequence is synthesized)
ctccccagtgcagcatggcactcaggagatacaggctggacatggggcagtcgttctggggaggcctggcctagcagccacccacctgagccctcccggccaggcttcgtgctggggtgg

SEQ ID NO: 613873 - DNA, 120 bp, Artificial Sequence
  ENSG00000176720_17 (sequence is synthesized)
gccatgtgccaggacaggagggtcccggcggaaagccagccccggactcatcgtgacattgagatcccactggagggtaggggtggtaataaacttctccaaacgatcgttgtcatttta

SEQ ID NO: 613874 - DNA, 120 bp, Artificial Sequence
  ENSG00000176723_0 (sequence is synthesized)
gggtcctcgccacgtccccttcccggagctacgcgcccggctgggttccgatccgccgtgtctctcgggggcggctcgcggggcaggggcgctcccggctcggccgcacgcccaagtgtc

SEQ ID NO: 613875 - DNA, 120 bp, Artificial Sequence
  ENSG00000176723_1 (sequence is synthesized)
atgcgggaggtacgcgggcacgggacctcaccggagagaatgatggctctgggatctgaaatctttccttccgcaggaactggacacggcagtgaggaccagcgtatccaagaggatgga

SEQ ID NO: 613876 - DNA, 120 bp, Artificial Sequence
  ENSG00000176723_2 (sequence is synthesized)
cttagtgatggggaacacccagggacatgcccgagagcctcaagaaacaccttcagatgacattgcccagcgtcttacattagagaactctccagacagcccccgaggcctggggccggg

SEQ ID NO: 613877 - DNA, 120 bp, Artificial Sequence
  ENSG00000176723_3 (sequence is synthesized)
tgctgctcccagactgtgagctcgtggccacgggaagcctgagtgcggcagaggccccacagctgcgccaagtgcggcaaagcctcccgtacagttactccctgagcggtcatctccgaa

SEQ ID NO: 613878 - DNA, 120 bp, Artificial Sequence
  ENSG00000176723_4 (sequence is synthesized)
gccctgctcatgagaagcctcccctttgccctgactgtggaaagcgtttcagccagagctcctacctgctgcagcaccggcagattcacccagggccgtcagccctgcaagtgcaaggcc

SEQ ID NO: 613879 - DNA, 120 bp, Artificial Sequence
  ENSG00000176723_5 (sequence is synthesized)
tgcgggaggggttttactcagagcgcatccctcctccagcactggcgggtccacagcgactggcgagagaccttgtcgctgtccccagtgcggcaagacctgctgtggccgctccaacct

SEQ ID NO: 613880 - DNA, 120 bp, Artificial Sequence
  ENSG00000176723_6 (sequence is synthesized)
catcaagcaccagcgagtccactcgggagaagccattcgtctgcgggagtgcggcaagggtttagcggccagctctgctgctggctcaccaaggagcacacactggccgaagccctgcgt

SEQ ID NO: 613881 - DNA, 120 bp, Artificial Sequence
  ENSG00000176723_7 (sequence is synthesized)
agtgtcaatgagaagacctccctctcccagcgcgtccttccgcacccaggggagaagacctgcaggggtgggagcgtggagagcgtcagcctcgcacccagctcagtcgccccggacagc

SEQ ID NO: 613882 - DNA, 120 bp, Artificial Sequence
  ENSG00000176723_8 (sequence is synthesized)
acctctgggctccggccctgtgggagccccgggtccttccttcaacatctgcccccatccacactcctgccccgacctcccttcctttatcctggccccccactcagtctccagcctctg

SEQ ID NO: 613883 - DNA, 120 bp, Artificial Sequence
  ENSG00000176723_9 (sequence is synthesized)
gttccatccggccttcccgcagtgcctgcagtgcctctgggaggcctggaagttgcccaggttccgccagccacccagccggcagctcagcaggagggggcgatggggcccagaagctgt

SEQ ID NO: 613884 - DNA, 120 bp, Artificial Sequence
  ENSG00000176723_10 (sequence is synthesized)
gcgagcgcgggacgggactcgcgggaggcggttcaggccccaggctaccctgagccagcccggaaggcctcgcagcacagagcggccggaccgctcggcgaggccagggccaggcttcag

SEQ ID NO: 613885 - DNA, 120 bp, Artificial Sequence
  ENSG00000176723_11 (sequence is synthesized)
cgacagtgccgagctcctccaccgccctcgaacccacactggagaggagccctaccagtgtttccggtgtggaaggcctccagccggaggtccaacctggcccgacactgaagaaccagc

SEQ ID NO: 613886 - DNA, 120 bp, Artificial Sequence
  ENSG00000176723_12 (sequence is synthesized)
gtgctgcagccctgggtggaattgttgcagccgccggtggactgtggatctgagatgcagtcccctccctccacacagacccgctcaggacggcttttctgtatggcagatctttctcag

SEQ ID NO: 613887 - DNA, 120 bp, Artificial Sequence
  ENSG00000176723_13 (sequence is synthesized)
aagtgctgggggctattttgtttgttttttttcccctgaattctcgctcctttcccttatacattaagggatttaggcaggtgcggctgcgggcggtgactcacacctgtaatcccagcg

SEQ ID NO: 613888 - DNA, 120 bp, Artificial Sequence
  ENSG00000176723_14 (sequence is synthesized)
ctttaagagaccgaggtgggaggatcgcgtgagcccgaagaatttgagactagcctgggcagcctagcgagaccgcatctctgtgaaataaaaataaaacgagctggtgtggtggcgctg

SEQ ID NO: 613889 - DNA, 120 bp, Artificial Sequence
  ENSG00000176723_15 (sequence is synthesized)
tcgtttctccctgtcttggtgagggccaggggacaggtcggggcagtatttgggggaagcgagaggcaagcagggcgggctggatacggagcgccctatgactgaggttagggaggacgc

SEQ ID NO: 613890 - DNA, 86 bp, Artificial Sequence
  ENSG00000176723_16 (sequence is synthesized)
agcctcccaaagtggctcttgtgctttttagataagtatttttaaaagtgtttgttagttgtcggctgggcgtggtggctcacgcc

SEQ ID NO: 613891 - DNA, 120 bp, Artificial Sequence
  ENSG00000176723_17 (sequence is synthesized)
gacagcgagactccgaatcaaaaaaaaaaaaaaaaaaaaagtgtttgttggtttgttggttgtcttaatgatgtgctattagagtgaggaagaaaagttaccctatgagaatttaaactg

SEQ ID NO: 613892 - DNA, 120 bp, Artificial Sequence
  ENSG00000176723_18 (sequence is synthesized)
catgaaagtctgtggtagcattactggttcagttccaagcttgctacctcagtccttgatgcctctttctcccaatccaagtagtatcaggcactgccgtctacttgttgtacctcagaa

SEQ ID NO: 613893 - DNA, 120 bp, Artificial Sequence
  ENSG00000176723_19 (sequence is synthesized)
gagtttttcgacagcaccccgtgccctctgtggcctgtgctctctcacaggtgcaagtcctgtcatcatgagcctggactgttgcagaagactcctagccaatctcccctgcttcccgcc

SEQ ID NO: 613894 - DNA, 120 bp, Artificial Sequence
  ENSG00000176723_20 (sequence is synthesized)
tctgcattctggttcagcatccatagaacctaccagttattatagattcctccctcagactccagactccaacactaaatctgatgtcagtctcctgcctgaaaggatctcctgcctgcc

SEQ ID NO: 613895 - DNA, 120 bp, Artificial Sequence
  ENSG00000176723_21 (sequence is synthesized)
actcccacccctccaccccctccgctgaccccagcagggcctacagaacagggttcaaatgctttagcgtggcatgcatgcttctccattgggcttcgcctgacctctgtgcctttgctg

SEQ ID NO: 613896 - DNA, 120 bp, Artificial Sequence
  ENSG00000176723_22 (sequence is synthesized)
gccagggcctcctgcacctctgtgtctttgcacttgatttatttctttccactgcccaaaatgacctttccccttttctgtctcccagacttgccctactcattcatatgagccccactt

SEQ ID NO: 613897 - DNA, 120 bp, Artificial Sequence
  ENSG00000176723_23 (sequence is synthesized)
ccacttagagactgccccacctctcgtgtcacacctgacgtggtgagtgctccagtggcattaagaacatagggcatgtctgtctggtaacctatctccccagcagactgagctccacga

SEQ ID NO: 613898 - DNA, 120 bp, Artificial Sequence
  ENSG00000176723_24 (sequence is synthesized)
gagcagagaccctggtgcagggcctggctcacagtgggtgctcaattaatattacttatgtgaaggaaccacttccagctgctcaagtattctatgctaaaacttgggtttctttcatcc

SEQ ID NO: 613899 - DNA, 120 bp, Artificial Sequence
  ENSG00000176723_25 (sequence is synthesized)
ttgttgtcctcccaagatacaatgtgtacataattggaaagttagccaaggtgactatgaaggtgaccccacccaatcaatctatgtcttcctggttactgtgcctgtcattcgatgatt

SEQ ID NO: 613900 - DNA, 120 bp, Artificial Sequence
  ENSG00000176723_26 (sequence is synthesized)
ccacggttatgtctatagtgataacagaaaaaagcaactgaaaacaatattatttactcgggtctcgtgcatctcctccacacatttgtagaaatgagattaccacaaattgccaagatg

SEQ ID NO: 613901 - DNA, 120 bp, Artificial Sequence
  ENSG00000176723_27 (sequence is synthesized)
gttacatcaaattttcagcagcatcagtcataggacaaaaaggcctttgagtgtatttttaataatcagcatttactggtggcaaaatactggtttagaaaatatctgagattatggtca

SEQ ID NO: 613902 - DNA, 71 bp, Artificial Sequence
  ENSG00000176723_28 (sequence is synthesized)
tgagatatggcacacatctacaattccagctactcaggaggctgaggctgcagtgagctgagatcgcacca

SEQ ID NO: 613903 - DNA, 120 bp, Artificial Sequence
  ENSG00000176723_29 (sequence is synthesized)
gcaacacagtgagactccatctaaaaaaaaatctgagattaataggttgccattttaggcgctctttatagaccagctggcctagtggtcctggttctgtaatatgtgaagtaaaggtct

SEQ ID NO: 613904 - DNA, 120 bp, Artificial Sequence
  ENSG00000176723_30 (sequence is synthesized)
cgcaggggagcaccagtttcaaactctgtcctagtttgcagccttggctggagtgaccccagtcatgaggcaaactgagcacaagtgtgcaagtgtcatggattcagccagaacatcagt

SEQ ID NO: 613905 - DNA, 120 bp, Artificial Sequence
  ENSG00000176723_31 (sequence is synthesized)
gttcccagcatcagacacagattcgggagaaatcaagtcacagtgtagagatgtattgtgatgtgtcactacactattatgaaatggaagaaaataaaattacaagcctcaacctttaaa

SEQ ID NO: 613906 - DNA, 120 bp, Artificial Sequence
  ENSG00000176731_0 (sequence is synthesized)
agaattagatacatactctgtactcaaagagcagaaaatctactaggagtgaaagacttggaaataatatatgcaccaactttaaaaataatcaagagtaagatagaattttttagattt

SEQ ID NO: 613907 - DNA, 120 bp, Artificial Sequence
  ENSG00000176731_1 (sequence is synthesized)
aattggtacctttaaaaacttaaaattgacttacggttcataaatgtgggcaatttaattgaatttattttcttttctagacaatggccaagaacaaattaagagggccgaagtccagga

SEQ ID NO: 613908 - DNA, 120 bp, Artificial Sequence
  ENSG00000176731_2 (sequence is synthesized)
attatgaatgaggaaaaagttaacagagtaaataaagcttttgtaaatgtacaaaaggaacttgcacatttcgcaaaaagcatttcacttgaacctctgcagaaagaactgattcctcag

SEQ ID NO: 613909 - DNA, 120 bp, Artificial Sequence
  ENSG00000176731_3 (sequence is synthesized)
cagcgtcatgaaagcaaaccagttaatgttgatgaagctacaagattaatggctctgttgtaatatactggtgatgcatctaattctccacaaagaccaataaattgaatgttttataca

SEQ ID NO: 613910 - DNA, 120 bp, Artificial Sequence
  ENSG00000176731_4 (sequence is synthesized)
cctagacgccgtacgtgccagatggtgttacctggagcttaaaaagctgcacgcaagtgttaaacttctgtaggaggaatactgttggcgttcaaaagcattgctgtttcaacaatggcc

SEQ ID NO: 613911 - DNA, 120 bp, Artificial Sequence
  ENSG00000176731_5 (sequence is synthesized)
ccggaacttcctagacgccgtacgtgccagatggtgttacctggagcttaaaaagctgcacgcaagtgttaaacttctgtaggaggaatactgttggcgttcaaaagcattgctgtttca

SEQ ID NO: 613912 - DNA, 120 bp, Artificial Sequence
  ENSG00000176731_6 (sequence is synthesized)
gttaagtagttccttaattacttacaatgtagtaaggctacattgaaggaagatataaatttcagtcaagactacgactgagcaaagacaatggccaagaacaaattaagagggccgaag

SEQ ID NO: 613913 - DNA, 120 bp, Artificial Sequence
  ENSG00000176731_7 (sequence is synthesized)
ctagacgccgtacgtgccagatggtgttacctggagcttaaaaagctgcacgcaagtgttaaacttctgacaatggccaagaacaaattaagagggccgaagtccaggaatgtatttcac

SEQ ID NO: 613914 - DNA, 120 bp, Artificial Sequence
  ENSG00000176731_8 (sequence is synthesized)
atgtcagaagtcaacaaaatgtgataaacttaaagtgctaaaacagaaggcacttcacaaaatctgttcactgaaacagttatatatcctcgtttacatccttcactttacaagtggcag

SEQ ID NO: 613915 - DNA, 120 bp, Artificial Sequence
  ENSG00000176731_9 (sequence is synthesized)
tgaacgtctgtttggatagaaggacatacagaaatacaggcagtttagtggcagtaaaaatataagacaagtaatgagtccttggccaacttgtttttgatgacctgtagtgtcctttaa

SEQ ID NO: 613916 - DNA, 120 bp, Artificial Sequence
  ENSG00000176731_10 (sequence is synthesized)
ctttcctccttaagaagaaaaaacagaaggattcacaattagaagaaaagttgaaatccagaatatagttacttttgggagtggggacgtttgtggatattaaatcacttatcccctaaa

SEQ ID NO: 613917 - DNA, 120 bp, Artificial Sequence
  ENSG00000176731_11 (sequence is synthesized)
aagagaacagttagaccaggctggctagagcagtgtttatagggacgtaacaggagatatgtgtggcagatttagggtagattcagagtgccagtaatatgccaagccaaggcacgttgc

SEQ ID NO: 613918 - DNA, 120 bp, Artificial Sequence
  ENSG00000176731_12 (sequence is synthesized)
cccttatacattgggaaaactgttgaaggtttttaacattgggaaggtcgatcgcatagcttggtgccagatagccactgtgcagatggcttaagccaggagttggcagactttctgtta

SEQ ID NO: 613919 - DNA, 120 bp, Artificial Sequence
  ENSG00000176731_13 (sequence is synthesized)
tgtgggtcatagttatagcaggaaagcagccatatcagcatatgattgaatggacataactgtattccaattaaactttattttttaattaattaatttttttgagacagagtcttgctc

SEQ ID NO: 613920 - DNA, 90 bp, Artificial Sequence
  ENSG00000176731_14 (sequence is synthesized)
ttcgccttccggattcaagcgattctccttacaatggccaagaacaaattaagagggccgaagtccaggaatgtatttcacatagccagc

SEQ ID NO: 613921 - DNA, 120 bp, Artificial Sequence
  ENSG00000176731_15 (sequence is synthesized)
cctagaaaggtaaggatggtttcaagcatttgtctaaaaaaatataaaaaaaaaggaagaaaaataacctccctttcttgaaaacaaatgttgaaaagaaataaacattttaactacaaa

SEQ ID NO: 613922 - DNA, 120 bp, Artificial Sequence
  ENSG00000176731_16 (sequence is synthesized)
tagaggcaagacatgggatgtcagtgagcacccattctttttctcctcagtaattcttgtatctttgaagacatctgcaattcaaacaaaaacctgtaaaatgaagataaaaaatattta

SEQ ID NO: 613923 - DNA, 120 bp, Artificial Sequence
  ENSG00000176731_17 (sequence is synthesized)
ttgaaatgcacaatttgaaaggggtttcttttctttgtttatatttcaaaatacctgagaaatttctacaagatttaagaaaaatttttaagaaaatgttttcaagtttcagtagtagat

SEQ ID NO: 613924 - DNA, 120 bp, Artificial Sequence
  ENSG00000176732_0 (sequence is synthesized)
aatcctgccgccgccacccacccgcaaccgcgtccgttgacggtcgggtccttggtcgccgggtccttgcgggcaccacagagcggggtggcgtccgctccctcgagtcctcggtgccag

SEQ ID NO: 613925 - DNA, 120 bp, Artificial Sequence
  ENSG00000176732_1 (sequence is synthesized)
ggaattcaccgctcaccaccccctgccccgccttgggtcctgctcggggaccaaaccactggaaggcagtggcgggaaacgggcgcctgtgccggagagttgagggaacatgagccattt

SEQ ID NO: 613926 - DNA, 120 bp, Artificial Sequence
  ENSG00000176732_2 (sequence is synthesized)
gcagagcttattgttagacaccctcttgggaaccaagcatgtggacagtgcagccctcatcaaaatccaggagcggagcttgtgtgtagcatcaccaggtttcaatgtaacgcccagtga

SEQ ID NO: 613927 - DNA, 120 bp, Artificial Sequence
  ENSG00000176732_3 (sequence is synthesized)
tgtccgaacactggtgaatggatttgccaagaaccctttgcaagcccgaagagaaggactgtatttcaagggaaaagattacagatgtgtccgggcagatgaatattctctttatgccaa

SEQ ID NO: 613928 - DNA, 120 bp, Artificial Sequence
  ENSG00000176732_4 (sequence is synthesized)
aaatgagaacactggtgtggttgtcgtgaagacccatctgtatcttctggtagcaacttacactgagggcatgtatcctagcatctgtgtggaagccacagagagcctgggagactacct

SEQ ID NO: 613929 - DNA, 120 bp, Artificial Sequence
  ENSG00000176732_5 (sequence is synthesized)
cctaaagaaaaaatattttatggttgaaaaaacactagacagaaggcactaaaaaagaagaatgaattaagggagcaatttttattacttccagagatcctcttctttcactggaattac

SEQ ID NO: 613930 - DNA, 120 bp, Artificial Sequence
  ENSG00000176732_6 (sequence is synthesized)
ttgatcaactgttttttaataagtgttggtcatcggcatggaatgagagagcactgatcatttcacagagcatatctattgggaggctcctttctgtgaggctcttgtactcctacacac

SEQ ID NO: 613931 - DNA, 120 bp, Artificial Sequence
  ENSG00000176732_7 (sequence is synthesized)
cttgctaagtatgccaagaatgcaaggctctcaccactctttatccaagacatttctcagggttaggttgcagcaagcaaccttgaaaaatgaagggatgtctcccatcaggacagagag

SEQ ID NO: 613932 - DNA, 120 bp, Artificial Sequence
  ENSG00000176732_8 (sequence is synthesized)
caagcttgcttactgtttgctataaaagcagtggagtccctgagctcagtgttacccctcctgtaatacaactccctgcatgtgtgacatctgtctggctcacatcaccccggtgagact

SEQ ID NO: 613933 - DNA, 120 bp, Artificial Sequence
  ENSG00000176732_9 (sequence is synthesized)
tgggagaagggattgcaaaggccattcaacaatggaccactagtcaaggtattcaatggacatttcacactcccatttgcaggtatctggtatcattttgaacattggaaaggccttctc

SEQ ID NO: 613934 - DNA, 120 bp, Artificial Sequence
  ENSG00000176732_10 (sequence is synthesized)
aaaaatcaactcaaaaagatttctgactctaaccctaactctcactgcacaccttagtaaggcagtatggtcactaaatgcacccttccccagaaagagttcatctcctcttggtctcct

SEQ ID NO: 613935 - DNA, 120 bp, Artificial Sequence
  ENSG00000176732_11 (sequence is synthesized)
gggcggtgccggggcggcggaggacggcttcaggcccaaaggggattgggcggcggctctaggtggcgggtcttggtttgcggaaggggctggagtcgctgcttctcggtgaccggcgcg

SEQ ID NO: 613936 - DNA, 120 bp, Artificial Sequence
  ENSG00000176732_12 (sequence is synthesized)
atcctgatgtaaaccattgacatagccagaaaatcaccaggctgtgattttccaaactcagcttcataacctattctgtagttgagggaacatgagccatttgcagagcttattgttaga

SEQ ID NO: 613937 - DNA, 120 bp, Artificial Sequence
  ENSG00000176742_0 (sequence is synthesized)
atgtttctcagttccagaatgattacttcagtaagccctagcaccagcacgaattcttcctttcttctcactggattttctggcatggagcagcaatacccctggctttccatccccttc

SEQ ID NO: 613938 - DNA, 120 bp, Artificial Sequence
  ENSG00000176742_1 (sequence is synthesized)
tcctcaatctatgccatggtgcttttgggcaattgcatggttctccatgtgatatggactgagccaagcctgcaccagcctatgttttacttcctgtccatgctggccctcactgacctg

SEQ ID NO: 613939 - DNA, 120 bp, Artificial Sequence
  ENSG00000176742_2 (sequence is synthesized)
tgcatggggctgtccactgtgtacacagtgctggggatcctgtgggggatcattcgagagatcagcttggattcctgcattgcccagtcctatttcatccatggtctgtccttcatggag

SEQ ID NO: 613940 - DNA, 120 bp, Artificial Sequence
  ENSG00000176742_3 (sequence is synthesized)
tcctctgtcctcctcactatggcctttgaccggtacattgcaatttgcaatccactacgttattcctccatcctgactaattccagaattatcaaaattgggctcactataataggtagg

SEQ ID NO: 613941 - DNA, 120 bp, Artificial Sequence
  ENSG00000176742_4 (sequence is synthesized)
ttctttattacaccccccatcatctgtctgaaattttttaattactgtcatttccacatcctttctcactctttctgcctgcaccaggatcttctccgcttagcctgttcagacatccga

SEQ ID NO: 613942 - DNA, 120 bp, Artificial Sequence
  ENSG00000176742_5 (sequence is synthesized)
ttcaatagttactatgccctgatgctggttatttgcatactgttgttggatgctatactcatccttttctcctacatcctgattcttaagtcagtcctggcagttgcctctcaggaagag

SEQ ID NO: 613943 - DNA, 120 bp, Artificial Sequence
  ENSG00000176742_6 (sequence is synthesized)
aggcataaattatttcagacctgcatctcccacatctgtgctgtccttgtgttctacatccctatcattagcctcacaatggtgcaccgttttggcaagcacctttcccccgtggcccac

SEQ ID NO: 613944 - DNA, 120 bp, Artificial Sequence
  ENSG00000176742_7 (sequence is synthesized)
gttctcattggcaacatctacatccttttcccacctttaatgaatcccatcatctacagtgtcaagacccaacagattcataccagaatgcttagactcttttctctgaaaagatattga

SEQ ID NO: 613945 - DNA, 120 bp, Artificial Sequence
  ENSG00000176746_0 (sequence is synthesized)
aataaaggggtctgagccggtcgcctgagcctgaaaagtgctgtcacgtcagcggaaggaggcgtcccagatcttctcagctgtcttggtgccagccttcctagtcttcctacccacact

SEQ ID NO: 613946 - DNA, 120 bp, Artificial Sequence
  ENSG00000176746_1 (sequence is synthesized)
cctacctgctgtcacaggccacagccatcatgcctcggggtcacaagagtaagctccgtacctgtgagaaacgccaagagaccaatggtcagccacagggtctcacgggtccccaggcca

SEQ ID NO: 613947 - DNA, 120 bp, Artificial Sequence
  ENSG00000176746_2 (sequence is synthesized)
ctgcagagaagcaggaagagtcccactcttcctcatcctcttctcgcgcttgtctgggtgattgtcgtaggtcttctgatgcctccattcctcaggagtctcagggagtgtcacccactg

SEQ ID NO: 613948 - DNA, 120 bp, Artificial Sequence
  ENSG00000176746_3 (sequence is synthesized)
ggtctcctgatgcagttgtttcatattcaaaatccgatgtggctgccaacggccaagatgagaaaagtccaagcacctcccgtgatgcctccgttcctcaggagtctcagggagcttcac

SEQ ID NO: 613949 - DNA, 120 bp, Artificial Sequence
  ENSG00000176746_4 (sequence is synthesized)
ccactggctctcctgatgcaggtgtttcaggctcaaaatatgatgtggctgccaacggccaagatgagaaaagtccaagcacttcccatgatgtctccgttcctcaggagtctcagggag

SEQ ID NO: 613950 - DNA, 120 bp, Artificial Sequence
  ENSG00000176746_5 (sequence is synthesized)
cttcacccactggctcgcctgatgcaggtgtttcaggctcaaaatatgatgtggctgccgagggtgaagatgaggaaagtgtaagcgcctcacagaaagccatcatttttaagcgcttaa

SEQ ID NO: 613951 - DNA, 120 bp, Artificial Sequence
  ENSG00000176746_6 (sequence is synthesized)
gcaaagatgctgtaaagaagaaggcgtgcacgttggcgcaattcctgcagaagaagtttgagaagaaagagtccattttgaaggcagacatgctgaagtgtgtccgcagagagtacaagc

SEQ ID NO: 613952 - DNA, 120 bp, Artificial Sequence
  ENSG00000176746_7 (sequence is synthesized)
cctacttccctcagatcctcaacagaacctcccaacatttggtggtggcctttggcgttgaattgaaagaaatggattccagcggcgagtcctacacccttgtcagcaagctaggcctcc

SEQ ID NO: 613953 - DNA, 120 bp, Artificial Sequence
  ENSG00000176746_8 (sequence is synthesized)
gcgctgccgaagtcgggtctcctgatgtcgctcctggttgtgatcttcatgaacggcaactgtgccactgaagaggaggtctgggagttcctgggtctgttggggatatatgatgggatc

SEQ ID NO: 613954 - DNA, 120 bp, Artificial Sequence
  ENSG00000176746_9 (sequence is synthesized)
ctgcattcaatctatggggatgctcggaagatcattactgaagatttggtgcaagataagtacgtggtttaccggcaggtgtgcaacagtgatcctccatgctatgagttcctgtggggt

SEQ ID NO: 613955 - DNA, 120 bp, Artificial Sequence
  ENSG00000176746_10 (sequence is synthesized)
ccacgagcctatgctgaaaccaccaagatgagagtcctgcgtgttttggccgacagcagtaacaccagtcccggtttatacccacatctgtatgaagacgctttgatagatgaggtagag

SEQ ID NO: 613956 - DNA, 120 bp, Artificial Sequence
  ENSG00000176746_11 (sequence is synthesized)
agagcattgagactgagagcttaaggcagggctggcactatttccttggccagggtaccttatggggccatatcctacagatcctcccatttctagggaggtctgaagtagaattttcac

SEQ ID NO: 613957 - DNA, 120 bp, Artificial Sequence
  ENSG00000176746_12 (sequence is synthesized)
tttatgttagaagagagtagtgagctttctaagtagtgcagtatagtagaggctggagggaacaagatatgtatctttcttttgttacacatgagtaacttgcagatttatgttttatct

SEQ ID NO: 613958 - DNA, 120 bp, Artificial Sequence
  ENSG00000176746_13 (sequence is synthesized)
ctgtcagttatcaacattgttcctgttaagtgaaggtttattttgcttcagattatacaattatcaataacatagctctcacattcatggctgtttaaccaatctgaaagttacggtttg

SEQ ID NO: 613959 - DNA, 120 bp, Artificial Sequence
  ENSG00000176746_14 (sequence is synthesized)
ggaattaataaaacaaagtcatacaacacattttctttgtaattgagaactagataacatggtaacagagaattgattttcatatgaatcttaactccacagtaaaatagttgacatcat

SEQ ID NO: 613960 - DNA, 120 bp, Artificial Sequence
  ENSG00000176746_15 (sequence is synthesized)
aatatgaagagaaagaaaaggaaaaacagaaatgtaaaagttgtttaattcttggtttgcctaattcgttttcctatttcttttcatacaaataaaggatacctggatttatttaggtta

SEQ ID NO: 613961 - DNA, 120 bp, Artificial Sequence
  ENSG00000176749_0 (sequence is synthesized)
tgcggagggcgcggagcgcaggagctgccgcctgccgggcagatccaagggggcagcacgcttcccgggagcgcccccgcctcctctccggggccgccgcaggctcggtgagcggtttta

SEQ ID NO: 613962 - DNA, 120 bp, Artificial Sequence
  ENSG00000176749_1 (sequence is synthesized)
tgagcggttttatccctccggccggcaggctgggcgcgcaggggcgcgagcccccgcccggcgcgcagcagcaccatgggcacggtgctgtccctgtctcccagctaccggaaggccacg

SEQ ID NO: 613963 - DNA, 120 bp, Artificial Sequence
  ENSG00000176749_2 (sequence is synthesized)
ctgtttgaggatggcgcggccaccgtgggccactatacggccgtacagaacagcaagaacgccaaggacaagaacctgaagcgccactccatcatctccgtgctgccttggaagagaatc

SEQ ID NO: 613964 - DNA, 120 bp, Artificial Sequence
  ENSG00000176749_3 (sequence is synthesized)
gtggccgtgtcggccaagaagaagaactccaagaaggtgcagcccaacagcagctaccagaacaacatcacgcacctcaacaatgagaacctgaagaagtcgctgtcgtgcgccaacctg

SEQ ID NO: 613965 - DNA, 120 bp, Artificial Sequence
  ENSG00000176749_4 (sequence is synthesized)
tccacattcgcccagcccccaccggcccagccgcctgcacccccggccagccagctctcgggttcccagaccgggggctcctcctcagtcaagaaagcccctcaccctgccgtcacctcc

SEQ ID NO: 613966 - DNA, 120 bp, Artificial Sequence
  ENSG00000176749_5 (sequence is synthesized)
gcagggacgcccaaacgggtcatcgtccaggcgtccaccagtgagctgcttcgctgcctgggtgagtttctctgccgccggtgctaccgcctgaagcacctgtcccccacggaccccgtg

SEQ ID NO: 613967 - DNA, 120 bp, Artificial Sequence
  ENSG00000176749_6 (sequence is synthesized)
ctctggctgcgcagcgtggaccgctcgctgcttctgcagggctggcaggaccagggcttcatcacgccggccaacgtggtcttcctctacatgctctgcagggatgttatctcctccgag

SEQ ID NO: 613968 - DNA, 120 bp, Artificial Sequence
  ENSG00000176749_7 (sequence is synthesized)
gtgggctcggatcacgagctccaggccgtcctgctgacatgcctgtacctctcctactcctacatgggcaacgagatctcctacccgctcaagcccttcctggtggagagctgcaaggag

SEQ ID NO: 613969 - DNA, 120 bp, Artificial Sequence
  ENSG00000176749_8 (sequence is synthesized)
gccttttgggaccgttgcctctctgtcatcaacctcatgagctcaaagatgctgcagataaatgccgacccacactacttcacacaggtcttctccgacctgaagaacgagagcggccag

SEQ ID NO: 613970 - DNA, 120 bp, Artificial Sequence
  ENSG00000176749_9 (sequence is synthesized)
gaggacaagaagcggctcctcctaggcctggatcggtgagcactgtagcctgcgtcatggctcaaggattcaatgcatttttaagaatttattattaaatcagttttgtgtacagtatgt

SEQ ID NO: 613971 - DNA, 120 bp, Artificial Sequence
  ENSG00000176749_10 (sequence is synthesized)
gtctagcaaagccaccaagggcctcacctttcccacagtctctccctggggtttttttcatccctgccaagaactctgggcacttttgaactcacgagccttgcgcaaaacccagaagat

SEQ ID NO: 613972 - DNA, 120 bp, Artificial Sequence
  ENSG00000176749_11 (sequence is synthesized)
gtattcagagccacccaggccactgacctcccactttggggaactcaaaggactgacctgcccctgccgcctgtgcccttgctgggtccagggtaggcaaggctgccggctgcaccctgt

SEQ ID NO: 613973 - DNA, 120 bp, Artificial Sequence
  ENSG00000176749_12 (sequence is synthesized)
atggagctagagaggggcctctggctgcctggcccagggaggaattggggtttctggttggaggcccttttctggctcctgtgtggagttattcactctcccagaggctcctggagccag

SEQ ID NO: 613974 - DNA, 120 bp, Artificial Sequence
  ENSG00000176749_13 (sequence is synthesized)
ccaccctaactgagctgccagtggggtcgtgaggcaagatccccgccacccggggacatcttcaatctaggcgaggcgaagctgagcgggtctagtggaaagattgtgtctggtcgtttg

SEQ ID NO: 613975 - DNA, 120 bp, Artificial Sequence
  ENSG00000176749_14 (sequence is synthesized)
accacacaccgccctgatttgctgttttctttttttagggagaagggcttttctttagtggagaaatggaactcgcccccctacccccttgtctgctgctcccagccacgttggtggtat

SEQ ID NO: 613976 - DNA, 120 bp, Artificial Sequence
  ENSG00000176749_15 (sequence is synthesized)
atgtagtgcagtcaccctgtggcaaatgccaggacagctgcaggtgcccattagcaacgcctgccttctgggcaaggtgagggatgccataccttgagaccaagccggtgcccacctaag

SEQ ID NO: 613977 - DNA, 120 bp, Artificial Sequence
  ENSG00000176749_16 (sequence is synthesized)
ggctaaggcctcttgctggtgcacatgacatttgtcctgcagagctggggggaaggcgatgtggtgaccccacccccacccgttaatttaaagctgtttctaaacagttgagtttcttct

SEQ ID NO: 613978 - DNA, 120 bp, Artificial Sequence
  ENSG00000176749_17 (sequence is synthesized)
aaagaggaagccttgcccagcaaggaccagtgagacagccggatcttggagacaattacaagacggggagtgagactcctgattgctctggaagcctgctgatttctacaactgatcatt

SEQ ID NO: 613979 - DNA, 120 bp, Artificial Sequence
  ENSG00000176749_18 (sequence is synthesized)
tgcagctgctggttttggtttccaccttaccctactggctgtaaaaacacaaatgtgtactttattgattttctttctaattctcccgcattggtggcttgggacttgggagagggagca

SEQ ID NO: 613980 - DNA, 120 bp, Artificial Sequence
  ENSG00000176749_19 (sequence is synthesized)
agccttcctccatggcccatcactcggctgtggagaacaaagaccaatgtgaagacactacagaggattctgtcttccaggcccagtccactggggagtgctggaatggggacctggggt

SEQ ID NO: 613981 - DNA, 120 bp, Artificial Sequence
  ENSG00000176749_20 (sequence is synthesized)
ggggaggcagagggtcactttacataggattaagttcgaggtggctaccgatttcagcacatgcactactgaaatttacacaaaaagaaagctgtgaaattgaagtcccaatttaagagt

SEQ ID NO: 613982 - DNA, 120 bp, Artificial Sequence
  ENSG00000176749_21 (sequence is synthesized)
cctgaggcagaacctggtggctggaggcattcccagaggtggggaagagagcctgcccggccggagaacatctgccttgctgcacctgaggcccagcagagccgttcctgggactgtcag

SEQ ID NO: 613983 - DNA, 120 bp, Artificial Sequence
  ENSG00000176749_22 (sequence is synthesized)
ataatcggtgcagcggtggaaggagcctgcggctgctggcacagacttcacacagcacctcctctctgctgggtttccacacagcctgtcttcagatcctgctgccgcgtgcgaccagag

SEQ ID NO: 613984 - DNA, 120 bp, Artificial Sequence
  ENSG00000176749_23 (sequence is synthesized)
gtgggaggcccctggtggcatggaagagggagggtcagtgccaagtctcaggaggagggcgcatgtgtgtatcaccctcagctggcggaacctggctgcgaactgtgcagttacgttgca

SEQ ID NO: 613985 - DNA, 120 bp, Artificial Sequence
  ENSG00000176749_24 (sequence is synthesized)
tccacaggattccagttgcgtgtctgtttccttctctttctccgtatttatttttttattcttcggaggaggtggacatttcggaagtggtggggactaagggaagaactctctagttcc

SEQ ID NO: 613986 - DNA, 120 bp, Artificial Sequence
  ENSG00000176749_25 (sequence is synthesized)
ctcagtgtgaagcctgtcgtgttctctccccttgcactggtcatcagtattgtgtaaaggaacaactgatatacttgagtgtgcaagcaaagaacccatttgccatgctgctatgaagac

SEQ ID NO: 613987 - DNA, 120 bp, Artificial Sequence
  ENSG00000176749_26 (sequence is synthesized)
tacttttagatcaacaataaaaaaaaacctacaaaaaaacctttattctttaattgttgcttttacggtgatattgtgcatgcaaaccaggagcattttgtgtcttaagaaaaataatct

SEQ ID NO: 613988 - DNA, 120 bp, Artificial Sequence
  ENSG00000176749_27 (sequence is synthesized)
tagaacagatggctgtgaaaattacacccatgcacagaacaagccacaggaataatagttcaggatttggtttttctctttttcttgtaaacctggagggttgatatattctttccatgc

SEQ ID NO: 613989 - DNA, 120 bp, Artificial Sequence
  ENSG00000176749_28 (sequence is synthesized)
agttattagaacttagttttgttccaacagttaaacttgcaatgaaaagaaaatgtgccatttttttcactcagaattattcatagctgtatatttgaaactgctaattacacacgtgtg

SEQ ID NO: 613990 - DNA, 120 bp, Artificial Sequence
  ENSG00000176749_29 (sequence is synthesized)
atgtatgttggttttttagtgcaatttcttctgtagctattctttgaccaaactgtgggtattgttaatattaatttatatttgtctcattttgtatgtatgtgtagtgtgtttgtgagt

SEQ ID NO: 613991 - DNA, 120 bp, Artificial Sequence
  ENSG00000176749_30 (sequence is synthesized)
atgtgtggtttataatctgacaaagtcatgaagctcagtttggctgtaatttaattccccttcccttatttttatttatttttgtactgtgctgattcaataaaatgcactgaccatcca

SEQ ID NO: 613992 - DNA, 80 bp, Artificial Sequence
  ENSG00000176769_0 (sequence is synthesized)
cgccgcccccgccgccgccgtcagcgcggggatgtaggatgcaggcgggcgccaggttccagcggcggcggcggcagctg

SEQ ID NO: 613993 - DNA, 120 bp, Artificial Sequence
  ENSG00000176769_1 (sequence is synthesized)
cagcctctcctctggccgatggacgcagagccgccgccgccgccgccctgggtctggatggtgccgggctcggccgggctgctccggctcagcgcgggggtcgtggttcccccggtgctg

SEQ ID NO: 613994 - DNA, 80 bp, Artificial Sequence
  ENSG00000176769_2 (sequence is synthesized)
cgctgctccccggtctccccggctggccggccccgagcgagccggtgctcccgctgctgccgctgccctctgcgccagac

SEQ ID NO: 613995 - DNA, 120 bp, Artificial Sequence
  ENSG00000176769_3 (sequence is synthesized)
cgctgccctctgcgccagactccgccgccgccgccgccgcgcaccccttccccgcgctccacgggcagtggctgtttggtggccattctccgtccctaggactgcccccctcttccacag

SEQ ID NO: 613996 - DNA, 120 bp, Artificial Sequence
  ENSG00000176769_4 (sequence is synthesized)
tggagctggtgcccgtcttcccacatctctgcccttctgctcttgcaacccctattgggaaaagttggatagacaaaaggattcctaactgtaagatcttttttaataattcctttgctc

SEQ ID NO: 613997 - DNA, 120 bp, Artificial Sequence
  ENSG00000176769_5 (sequence is synthesized)
tggactcaacgtggatacatcctgaggagtcaaggtttttccatgggcatgaaaagcctcgtttgctggcaaatcaagtagctgtgtctctgtccaggccggctcctgcctccaggccgc

SEQ ID NO: 613998 - DNA, 120 bp, Artificial Sequence
  ENSG00000176769_6 (sequence is synthesized)
tccccacggtggtgttagcacctcagcccatcccaggtggctgccataacagccttaaggtgaccagcagccccgccattgccatcgccaccgccgccgccgctgccatggtctccgtgg

SEQ ID NO: 613999 - DNA, 120 bp, Artificial Sequence
  ENSG00000176769_7 (sequence is synthesized)
accctgagaacctccggggcccgtccccctccagcgtgcagccgcgccacttcctgaccttggcacccatcaaaatacccctccggacgtcccccgtctcagatacaaggacagagcggg

SEQ ID NO: 614000 - DNA, 120 bp, Artificial Sequence
  ENSG00000176769_8 (sequence is synthesized)
gccgagtggcccgccctcctgccctgatgctgcgggcccagaagagccgggatggagacaaagaagacaaggagcctccaccgatgctggggggaggagaggacagcacagccagaggca

SEQ ID NO: 614001 - DNA, 120 bp, Artificial Sequence
  ENSG00000176769_9 (sequence is synthesized)
acaggccagtggcctccaccccggtgcccggatccccctggtgtgtggtctggacgggcgatgaccgagttttcttcttcaacccaacgatgcacctgtctgtctgggagaagcccatgg

SEQ ID NO: 614002 - DNA, 120 bp, Artificial Sequence
  ENSG00000176769_10 (sequence is synthesized)
tctgaagacaacagggaagaccaagatgtgaaaaccaagaggaaccggaccgaaggctgcgggagtcccaagccagaggaggcaaagagagaggacaaaggcacaaggacgccgcccccg

SEQ ID NO: 614003 - DNA, 120 bp, Artificial Sequence
  ENSG00000176769_11 (sequence is synthesized)
cagatcctcctgcctctggaggagcgtgtgacccacttccgagacatgctgctggagagaggggtatcagcattttctacctgggagaaagaattacacaaaatcgtgtttgacccacgc

SEQ ID NO: 614004 - DNA, 120 bp, Artificial Sequence
  ENSG00000176769_12 (sequence is synthesized)
tatctcctgctcaactctgaggaacgaaagcagatatttgaacagtttgtcaagacaagaataaaagaagaatacaaggaaaagaaaagtaaattgctgctagccaaagaagaattcaag

SEQ ID NO: 614005 - DNA, 120 bp, Artificial Sequence
  ENSG00000176769_13 (sequence is synthesized)
aaacttctagaggaatctaaagtgtctcccaggaccacgtttaaggagtttgcagagaaatacggccgggatcagaggttccgacttgttcaaaaaagaaaggaccaggagcattttttc

SEQ ID NO: 614006 - DNA, 120 bp, Artificial Sequence
  ENSG00000176769_14 (sequence is synthesized)
aaccaattcatacttattcttaagaaacgggacaaggaaaacagactaaggctgcggaaaatgagatgagtttgtgaaaaaatgcaataagcccgggggttgaccctgggcgtgccgggg

SEQ ID NO: 614007 - DNA, 120 bp, Artificial Sequence
  ENSG00000176769_15 (sequence is synthesized)
gcgagggggtcacggtggagacggacacgggcgtggggcggccgagacctgcacggcccagcgggcaccggcactgcggggtcttcgttctcagaggattactgtttcatattgaagctc

SEQ ID NO: 614008 - DNA, 120 bp, Artificial Sequence
  ENSG00000176769_16 (sequence is synthesized)
tctcttttgtacattcagagtttgatgcatttctaatcaccgtgatacgtcgatcccttaattgttttaattatgcaaattacttgtaatatacacaaattatcaatccactgcaggact

SEQ ID NO: 614009 - DNA, 120 bp, Artificial Sequence
  ENSG00000176769_17 (sequence is synthesized)
gtggggaagcaggaacgggagcctctgtaacaatctcaaggcatttgtgtcatcacctaagacgattggcgaaaacttttctgaaaacctttgtgaattacttcgtttctccaggattcc

SEQ ID NO: 614010 - DNA, 120 bp, Artificial Sequence
  ENSG00000176769_18 (sequence is synthesized)
cgcagtgttgaggaattccttactctgtccctaggtctcagtctcgtttctgagtagcagcaatagggttttcatcattcatcatagtgacaactgtgagcattccacacctggaccgtg

SEQ ID NO: 614011 - DNA, 120 bp, Artificial Sequence
  ENSG00000176769_19 (sequence is synthesized)
gatcacttacaggtttccaagggtggccgcgcgttcctcccagaggggcgtcccggcctggagcagggagccgtgttggttgccaccggtcctacttcaaaagaattattttgtacaaaa

SEQ ID NO: 614012 - DNA, 120 bp, Artificial Sequence
  ENSG00000176769_20 (sequence is synthesized)
tcatcatattaatatttgagttatttttattgtatgcccggagtttgcatgagattttttctcatcacctttgtataaaaaatttttaattttttttaatcaataaatattttaaaccag

SEQ ID NO: 614013 - DNA, 120 bp, Artificial Sequence
  ENSG00000176769_21 (sequence is synthesized)
gccgagtggcccgccctcctgccctgatgctgcgggcccagaagagccgggatggagacaaagaagacaagagtctcactctgtcccccaggccggagtgcagtggtgtaatctcggctc

SEQ ID NO: 614014 - DNA, 120 bp, Artificial Sequence
  ENSG00000176769_22 (sequence is synthesized)
cccgagtagctgggactacaggagcctccaccgatgctggggggaggagaggacagcacagccagaggcaacaggccagtggcctccaccccggtgcccggatccccctggtgtaattct

SEQ ID NO: 614015 - DNA, 120 bp, Artificial Sequence
  ENSG00000176769_23 (sequence is synthesized)
cccggatccccctggtgtaattctgcactgtggtcacattctgcagaaagaaaaaaacagcatttaagcgatgagctatcctgctctgatctgtctgtgaatatatattaaaatgataat

SEQ ID NO: 614016 - DNA, 120 bp, Artificial Sequence
  ENSG00000176769_24 (sequence is synthesized)
gctgttgcatgtctatcagcgaaaggcagtggctgaagaaagtgtagcatgccttatgcttcaaaagatctgttttccctccactccaagaagaatcgtaactgaatggcagttaattaa

SEQ ID NO: 614017 - DNA, 120 bp, Artificial Sequence
  ENSG00000176769_25 (sequence is synthesized)
agacgtgcctgttctctctgtcgccctgcgtggctgcttgctctcggaatatgccacactccagacaccctccacgagggagctacagtttttggtttttaaaaatgcccttttataatg

SEQ ID NO: 614018 - DNA, 120 bp, Artificial Sequence
  ENSG00000176769_26 (sequence is synthesized)
gagtcatttggaagcagaataaaaggttattacagtaaaaattaagtttcaagcctgaagatgagagtgcagtacacagctgggaggcacagctaatttaaagaacagaaataacaacca

SEQ ID NO: 614019 - DNA, 120 bp, Artificial Sequence
  ENSG00000176769_27 (sequence is synthesized)
cttgtgtcagctcaatgtgccagccaggtacagaaggcagccggctaaggagcgcagggcccccaccagccttgcatagcgagtgagcacatccctgctgactgggcctgctgtgccatg

SEQ ID NO: 614020 - DNA, 120 bp, Artificial Sequence
  ENSG00000176769_28 (sequence is synthesized)
ccctggtcctctgatgattcgggtgaacttggctccaatctggacagactggcacccctggcttctatgccatggtcagtgtcggtggcaggctcctggtgcctccagccttccatttgt

SEQ ID NO: 614021 - DNA, 120 bp, Artificial Sequence
  ENSG00000176769_29 (sequence is synthesized)
agctaaagctcctctgtaccctgggagtgcctcggggtgagacctctttgtactaatattatgctgttttccagccacccattctccaacccttacaatttagctcgattctgatgctaa

SEQ ID NO: 614022 - DNA, 120 bp, Artificial Sequence
  ENSG00000176769_30 (sequence is synthesized)
ctactgggagttagagccaaaccccacaggctggggtcagtccctctggctgccctgctttagacattggctgcaaatggggccccccagctgcctgcacatctgcccagctgaccacag

SEQ ID NO: 614023 - DNA, 120 bp, Artificial Sequence
  ENSG00000176769_31 (sequence is synthesized)
atctggggttcccatgacctcctctccacttcagtggtgatttgctaggaccactcacagaactcaggaagcgctttacttaggattacagttgttttatcaaggatacaactcaggaac

SEQ ID NO: 614024 - DNA, 120 bp, Artificial Sequence
  ENSG00000176769_32 (sequence is synthesized)
agccagtggaagcaatgctcagggtaaggtgtggacctgactgagcttctgggcctcgccggcgccaccctcccagtgctgcagcgttcaccagcctggaagcactctgaacctcaatgt

SEQ ID NO: 614025 - DNA, 120 bp, Artificial Sequence
  ENSG00000176769_33 (sequence is synthesized)
tttagaattttaatggagatgtaactacataggcatgactgatgaaatcatcggccaagtgaaaggactcagagggttgggcagcgctgaaagtgacggccctccagtcacgtggttggt

SEQ ID NO: 614026 - DNA, 120 bp, Artificial Sequence
  ENSG00000176769_34 (sequence is synthesized)
gtttctggagaccagcaccctccctgaagctactcaggggtcctgaagtcacatggttggtgtctctggagaccagcaccctccctgaagctactcaggggtcctgaagtcatttcattt

SEQ ID NO: 614027 - DNA, 120 bp, Artificial Sequence
  ENSG00000176769_35 (sequence is synthesized)
gcgcagcctcaggcacaggtgttattcctaccaggtcagggacttggtaggaataacaagatgctttcttcgctcaggaaattctaagagtttgggaagctctgtgtcaggaatctggaa

SEQ ID NO: 614028 - DNA, 120 bp, Artificial Sequence
  ENSG00000176769_36 (sequence is synthesized)
caaagaccgtatacatccctctgctgcttaacgacaggggtatattctggaaaggcatccttaggcagtggcatccgacatccttttatgcacatcacagggtgtgctcacacaggcctg

SEQ ID NO: 614029 - DNA, 120 bp, Artificial Sequence
  ENSG00000176769_37 (sequence is synthesized)
gtggcacagcctcctgcacgcctgggctgcatggtgtagaccgtggctcccaggctgcagaccacacagcgctgactgcacagaggcagttgtgacacagtggtagggatgtgtgtgtct

SEQ ID NO: 614030 - DNA, 120 bp, Artificial Sequence
  ENSG00000176769_38 (sequence is synthesized)
tcagtccatggttgagagaaatgtcactctgcggcacatgactgcatatacattttacgatgccacgaactggttgagagcttctacaggcaaactctccagtgtctccaaggcaggcac

SEQ ID NO: 614031 - DNA, 120 bp, Artificial Sequence
  ENSG00000176769_39 (sequence is synthesized)
actgccgcatatcacgctgcaggatggggaaacgttccccaagaccctgtggaatcctcacacagcttccgccaagctcccctggggcgttgcagggatccagaagacttgaccttgagc

SEQ ID NO: 614032 - DNA, 120 bp, Artificial Sequence
  ENSG00000176769_40 (sequence is synthesized)
cctagaaccttctcactgcgaaagctgcggctttcttccccagcgatattgtgttaccatgagcaaggcttcgtgcgatccagcaaatgaaaacggttccctggctgctgcactcccctc

SEQ ID NO: 614033 - DNA, 120 bp, Artificial Sequence
  ENSG00000176769_41 (sequence is synthesized)
cctcggcgtgggtctttgccgatgaatcctgggtattgagcatgtttgacttttgaaaaactagtatcaaaatcatgttctgagatgaagttggtagaacttttctaaaaagaaaggaaa

SEQ ID NO: 614034 - DNA, 120 bp, Artificial Sequence
  ENSG00000176769_42 (sequence is synthesized)
agtttcccaagacatgatacatgtggatgatgttcaagaagaaaaaggtgattagaaatgatggtgattacgagagatgcggggctcggtcacatcagcctgtgtcactttctcccgtgc

SEQ ID NO: 614035 - DNA, 120 bp, Artificial Sequence
  ENSG00000176771_0 (sequence is synthesized)
gaagcaactacggagccgcagcccagggagcaagtctccgcaaacttgctccgcattcacggcaggacttcccagccgctgtggatgttcaggaaaaccgagtctgttctgttagcgtgg

SEQ ID NO: 614036 - DNA, 120 bp, Artificial Sequence
  ENSG00000176771_1 (sequence is synthesized)
cctttgaatgcttcaaaaataaacagaggataaccaaccgcgggaggaaatttttagctggagagagttgtagttcctgtgtctgtctccaggactgtgatatgtgttgactgaagagct

SEQ ID NO: 614037 - DNA, 120 bp, Artificial Sequence
  ENSG00000176771_2 (sequence is synthesized)
aactacaagttcatcgtgaagaataaatgagataagctacctcaagtgcctgtaccaaaatagactcacaatacattgaccctggaaacagacgggggattcttataagtcacaaaagaa

SEQ ID NO: 614038 - DNA, 120 bp, Artificial Sequence
  ENSG00000176771_3 (sequence is synthesized)
aataaataacttcatccatggagggaaagagacagcttgagaaaagggactttggaaaaaggctgtctctagacagcagtcttgtggaatacatggactccaataaatacattgagcatc

SEQ ID NO: 614039 - DNA, 120 bp, Artificial Sequence
  ENSG00000176771_4 (sequence is synthesized)
tgctgactcagcttgaggagcaacacaggagtctctggagggagaagttggcagtggcccgactacagcgagaagttgcccaaagaacaagtgagggggccatgcatgagaagctgatac

SEQ ID NO: 614040 - DNA, 120 bp, Artificial Sequence
  ENSG00000176771_5 (sequence is synthesized)
atgaactggaagaggagagacacttacgtcttcaaagcgagaagcggttgcaggaggtgaccctagagtctgaacgcaacagaattcagatgcgtagcttgcagcagcagttctccagga

SEQ ID NO: 614041 - DNA, 120 bp, Artificial Sequence
  ENSG00000176771_6 (sequence is synthesized)
tggaagaaacagtacgaaatctattgcagagtcaaggatctccagagcagaaaaaagaagaaactgttaatataatggtctatcaggaaaagctgtcagaggaagagagaaaacataagg

SEQ ID NO: 614042 - DNA, 120 bp, Artificial Sequence
  ENSG00000176771_7 (sequence is synthesized)
aagctttggaagatcttcacatggtggttgatgaggattcgaggagtgaaagcagcagtacagatgagggaaaagaaaagaccaaattgctattagagagattgaaagctctagaggcag

SEQ ID NO: 614043 - DNA, 120 bp, Artificial Sequence
  ENSG00000176771_8 (sequence is synthesized)
agaattcagcgttggctttggagaatgaaaatcaaagggaacaatatgagcgatgtcttgatgaggtagccaaccaagttgttcaagctctgcttactcaaaaggatctaagagaggaat

SEQ ID NO: 614044 - DNA, 120 bp, Artificial Sequence
  ENSG00000176771_9 (sequence is synthesized)
gtgtgaagttgaaaacaagagtgtttgatttggaacagcagaatcgaacactaagcatcctattccaacagcgagtcagacccacttctgatctgctcctccagaaacttcactcacgtc

SEQ ID NO: 614045 - DNA, 120 bp, Artificial Sequence
  ENSG00000176771_10 (sequence is synthesized)
tcttggatctttcatctggagatttgctttcagaggtggaaagaaaccgaagtctgacacagtcacgaactgatgctgaggtgcacgaacaccaactaaatacaaaatcggccttgaaat

SEQ ID NO: 614046 - DNA, 120 bp, Artificial Sequence
  ENSG00000176771_11 (sequence is synthesized)
gccctggcttgggggctgtcatccctggtcatctctgtcctcgaaacagctacagtagcagcagtgaactgtctctttcaagcacctgcagcgagtactccagtggctcctcctacacgt

SEQ ID NO: 614047 - DNA, 120 bp, Artificial Sequence
  ENSG00000176771_12 (sequence is synthesized)
ggcacgatgggaagaacctcaggaaaaggcaatcatcacaaaactgggataaaaggctaagtattgattcttcgctcccaagtggctttgctagtcctacaaatgaactacctccaactc

SEQ ID NO: 614048 - DNA, 120 bp, Artificial Sequence
  ENSG00000176771_13 (sequence is synthesized)
gtatcaaggaaagccacattttggaagggctaagaaagctacagaagcgaaaagtgttacttgaacccccatcagtgataaccaaatggggttataaagattgcatgaactcgaatgaag

SEQ ID NO: 614049 - DNA, 120 bp, Artificial Sequence
  ENSG00000176771_14 (sequence is synthesized)
gaatatattctcctggaattaaaagtagcagcctcaaggagtatcccccctgcaaaacagctgacctggggagcccctgcaaggaaccccacaagacatttgtttatgatctagattccc

SEQ ID NO: 614050 - DNA, 120 bp, Artificial Sequence
  ENSG00000176771_15 (sequence is synthesized)
acgttgatgcggacgatgacccttccaccttagcattgctccaagcagttccaaaccagagctgcaggccacatggcagtaaattaacccacagtgtttccgacagtctgtttggctggg

SEQ ID NO: 614051 - DNA, 120 bp, Artificial Sequence
  ENSG00000176771_16 (sequence is synthesized)
agacaaacagaaaacactttctggaaggcacatcctcagtttatcccaaggaaaggcctgaaaagctgacaagttgcgccagcagctgtcccttagagatgaagctgtgcccaagtgtgc

SEQ ID NO: 614052 - DNA, 120 bp, Artificial Sequence
  ENSG00000176771_17 (sequence is synthesized)
agacgcctcaggtacagagggagaggggcccacagggccaaggccatggccgcatggctctcaacctccagctttcagacactgatgacaatgaaacgtttgatgagctgcacatagaga

SEQ ID NO: 614053 - DNA, 120 bp, Artificial Sequence
  ENSG00000176771_18 (sequence is synthesized)
gcagtgatgagaaaagtccttcagacgtgtcattggctgccgacaccgataagtccgtggagaacctggatgtccttgtggggtttggaaaatctctatgtgggtctcctgaagaggagg

SEQ ID NO: 614054 - DNA, 120 bp, Artificial Sequence
  ENSG00000176771_19 (sequence is synthesized)
aaaaacaagtgcccatcccttcagagactaggccaaagacttttagtttcattaagcagcaaagagttgtaaaaaggacttcttcagaagaatgtgtgactgtgatatttgatgcggaag

SEQ ID NO: 614055 - DNA, 120 bp, Artificial Sequence
  ENSG00000176771_20 (sequence is synthesized)
acggtgagcccattgaattcagctctcaccagactggggttgtcactgttaccagaaatgagatttccatcaattcaactcctgctggacccaaggcagaacatactgagcttttacctc

SEQ ID NO: 614056 - DNA, 120 bp, Artificial Sequence
  ENSG00000176771_21 (sequence is synthesized)
agggaattgcttgtttacagccaagagctgctgcaagagactatactttctttaaaaggtctgaagaggacactgagaaaaacattccaaaagataatgtagataatgttcccagggtgt

SEQ ID NO: 614057 - DNA, 120 bp, Artificial Sequence
  ENSG00000176771_22 (sequence is synthesized)
ccactgaatctttcagctccaggacagtgacacaaaatcctcagcagcaaaagctggtcaaaccaacacacaatatatcatgccagagtaattccaggtcttcggcacccatgggcatct

SEQ ID NO: 614058 - DNA, 120 bp, Artificial Sequence
  ENSG00000176771_23 (sequence is synthesized)
atcaaaagcaaaatctgacaaaaatacctcccaggggcaagtcttcacctcagaaatcaaaactaatggagcccgaagccaccacactactcccttcatctggcctggtgactcttgaaa

SEQ ID NO: 614059 - DNA, 120 bp, Artificial Sequence
  ENSG00000176771_24 (sequence is synthesized)
aatcaccagccttagctcctgggaaactctcacgattcatgaagactgagagctcagggcccctctttgaattacgatcagatccacacattccaaaacattccgcccaacttccgcaca

SEQ ID NO: 614060 - DNA, 120 bp, Artificial Sequence
  ENSG00000176771_25 (sequence is synthesized)
gctccaggatgcccagcaggagggactgggtccagtgccccaagagtcagactccagggtcacggtcaaggcctgccattgagtctagtgacagtggagagccccccacgagggatgaac

SEQ ID NO: 614061 - DNA, 120 bp, Artificial Sequence
  ENSG00000176771_26 (sequence is synthesized)
actgtggctctgggccggaggcaggggtgaaatccccttcccctccgccccctccaggcaggtccgtctccctgctggccaggcccagctatgactattcaccagcaccttcatccacca

SEQ ID NO: 614062 - DNA, 120 bp, Artificial Sequence
  ENSG00000176771_27 (sequence is synthesized)
agtccgaaaccagggtccccagtgaaacagcaaggaccccattcaaatccccgctgctgaaaggaatttctgctccagttatttcttctaatccggccacgacagaagtgcagaggaaga

SEQ ID NO: 614063 - DNA, 120 bp, Artificial Sequence
  ENSG00000176771_28 (sequence is synthesized)
aaccttctgtggccttcaaaaagcctatcttcactcaccctatgccctccccagaagcagtcattcaaacccgatgccctgctcatgccccctccagctccttcaccgtaatggctctgg

SEQ ID NO: 614064 - DNA, 120 bp, Artificial Sequence
  ENSG00000176771_29 (sequence is synthesized)
ggcctccaaaggtctctccgaagagaggtgtccccaaaacctctcctcgccaaacacttgggaccccacaaagggacataggattacagactcccaggatctctccttcaacccatgagc

SEQ ID NO: 614065 - DNA, 120 bp, Artificial Sequence
  ENSG00000176771_30 (sequence is synthesized)
cactggaaatgacgtcctccaaaagtgtatctccagggagaaaaggacaattgaatgatagcgcctccacaccccccaagccttccttcttaggggtaaatgagtcaccatcatctcagg

SEQ ID NO: 614066 - DNA, 120 bp, Artificial Sequence
  ENSG00000176771_31 (sequence is synthesized)
ctcatggttgtcaaagtgctcatgagaaaggactgaaaactcgccttccagtgggactcaaagtgctcatgaagtctccccagctgctcaggaaaagttccaccgtgccagggaaacatg

SEQ ID NO: 614067 - DNA, 120 bp, Artificial Sequence
  ENSG00000176771_32 (sequence is synthesized)
aaaaagacagtttaaatgaagcctccaaaagttccgtggctgtgaacaagtctaagccagaggactccaagaatccagcaagcatggagatcacagcgggtgaaagaaatgtgaccctac

SEQ ID NO: 614068 - DNA, 120 bp, Artificial Sequence
  ENSG00000176771_33 (sequence is synthesized)
cggattcacaagcacagggcagtttagctgatgggcttcccctggaaacagcactacaagagccattggaaagtagcatccctgggagtgatggaagggatggggtagataatagatcca

SEQ ID NO: 614069 - DNA, 120 bp, Artificial Sequence
  ENSG00000176771_34 (sequence is synthesized)
tgagaagatccctttcctccagcaaaccacacctaaaaccagctctgggtatgaatggcgccaaagcccgcagccacagcttcagtacacactcaggagacaagccttctacgcccccca

SEQ ID NO: 614070 - DNA, 120 bp, Artificial Sequence
  ENSG00000176771_35 (sequence is synthesized)
tcgaagggtcaggcaaagtccgcactcagatcattaccaataccgccgagagaggcaattctcttacccggcagaactcttccacggaaagctctcccaacaaggccccttctgctccca

SEQ ID NO: 614071 - DNA, 120 bp, Artificial Sequence
  ENSG00000176771_36 (sequence is synthesized)
tgttggagagtctccccagtgttgggaggccctcggggcacccctcctccgggaagggctccctggggagctcaggcagcttcagcagtcagcatgggagcccaagtaagttgcctttga

SEQ ID NO: 614072 - DNA, 120 bp, Artificial Sequence
  ENSG00000176771_37 (sequence is synthesized)
ggatccctccaaagtctgagggactcctcatcccacctggaaaggaagaccagcaggccttcacccagggagagtgccccagtgccaatgtggctgtacttggggaaccaggcagtgacc

SEQ ID NO: 614073 - DNA, 120 bp, Artificial Sequence
  ENSG00000176771_38 (sequence is synthesized)
gccgcagttgcccacccaccccaacagactgccctgaagccctgcagagcccagggaggactcagcatccaagcacttttgaaacaagcagtacatccaagctagaaacttctggaaggc

SEQ ID NO: 614074 - DNA, 120 bp, Artificial Sequence
  ENSG00000176771_39 (sequence is synthesized)
atccagatgcctctgcaaccgcgactgatgctgtgagttcagaagcccccctctcacccacaatcgaagaaaaggtcatgttgtgcattcaggaaaatgtggaaaagggccaagtgcaaa

SEQ ID NO: 614075 - DNA, 120 bp, Artificial Sequence
  ENSG00000176771_40 (sequence is synthesized)
caaagcccacctctgtggaagcaaagcagaagcctgggccttcttttgccagctggtttggttttcggaagagtagacttccagctctgagtagcaggaaaatggacatctccaaaacca

SEQ ID NO: 614076 - DNA, 120 bp, Artificial Sequence
  ENSG00000176771_41 (sequence is synthesized)
aagtagaaaagaaagatgcaaaagtcttggggtttggaaacagacaactaaaatcagaaagaaaaaaagagaaaaagaagcctgaactacagtgtgagacagaaaatgagcttatcaagg

SEQ ID NO: 614077 - DNA, 120 bp, Artificial Sequence
  ENSG00000176771_42 (sequence is synthesized)
acaccaagtcagcagataatccagatggcggtttacaaagcaaaaataatcggagaacaccacaagacatttacaaccaactgaagattgaaccaaggaatagacacagccctgttgcat

SEQ ID NO: 614078 - DNA, 120 bp, Artificial Sequence
  ENSG00000176771_43 (sequence is synthesized)
gttcaacgaaagacaccttcatgacggaactcttgaacagagttgataagaaagcagctccacagacagaaagtggatcaagtaatgcttcctgcaggaatgtgttaaagggcagttctc

SEQ ID NO: 614079 - DNA, 120 bp, Artificial Sequence
  ENSG00000176771_44 (sequence is synthesized)
agggctcctgtctcatcggcagctctatcagtactcaaggaaaccacaagaaaaacatgaaaatcaaagccgatatggaagtaccaaaagactccctggtaaaagaggcaaatgaaaact

SEQ ID NO: 614080 - DNA, 120 bp, Artificial Sequence
  ENSG00000176771_45 (sequence is synthesized)
tgcaagaggatgaagacgatgcagttgcagattctgtatttcagagccacatcatagaatccaactgccagatgagaacattggacagtgggatcggaacctttccactcccagactcgg

SEQ ID NO: 614081 - DNA, 120 bp, Artificial Sequence
  ENSG00000176771_46 (sequence is synthesized)
gaaatcgctcgacaggacgctacctatgccagccagactccccagaggacgctgagcctctcctgcctctccagtcagccctttctgcagtttcttccatgagagcccaaacccttgaac

SEQ ID NO: 614082 - DNA, 120 bp, Artificial Sequence
  ENSG00000176771_47 (sequence is synthesized)
gtgaagtgccttcctccacagacggccagcgccctgcagatagcgccattgttcattccacatccgaccccatcatgaccgccagagggatgaggcctcttcagagccgcctccccaaac

SEQ ID NO: 614083 - DNA, 120 bp, Artificial Sequence
  ENSG00000176771_48 (sequence is synthesized)
cagcttcctcaggaaaagtcagttcccaaaagcagaatgaagcagagccaaggcctcagacatgctcatcattcggatatgctgaagacccaatggcaagccagccgcttccagactggg

SEQ ID NO: 614084 - DNA, 120 bp, Artificial Sequence
  ENSG00000176771_49 (sequence is synthesized)
ggagtgaagttgctgccaccgggacccaggacaaggcacccagaatgtgtacgtactctgccagcggtggcagtaatagtgacagtgacctggactatggagataatggttttggagctg

SEQ ID NO: 614085 - DNA, 120 bp, Artificial Sequence
  ENSG00000176771_50 (sequence is synthesized)
gaaggggacagttagtgaaagcactgaagagcgctgccccagaaattgagacaacttgaagaaacaaaagacgatcccgagaatagattatcgaaaatttccctagagtcattcaataaa

SEQ ID NO: 614086 - DNA, 120 bp, Artificial Sequence
  ENSG00000176771_51 (sequence is synthesized)
tttaacagcaatactgtgattttattagaaaaagagaagaactctctgaacaaggttgaaggacagaaggaagaaaaagaaaaaaatgaagagacatctttgagtagttcagataggcct

SEQ ID NO: 614087 - DNA, 120 bp, Artificial Sequence
  ENSG00000176771_52 (sequence is synthesized)
ggggtagacaacttggaatctttgagtgattctttatatgatagcttctcttcctgtgccagtcaaggttcaaatgatgtataaaggacatctcttcccttagtgagctgggactggagc

SEQ ID NO: 614088 - DNA, 120 bp, Artificial Sequence
  ENSG00000176771_53 (sequence is synthesized)
gcttaagaaatgatgggtggggggtggggggtgcaccgcttgatagagataacaataaactattgcagtaccagagccttccttgtcaaattcacagcaggcaacccaccagagcttatt

SEQ ID NO: 614089 - DNA, 120 bp, Artificial Sequence
  ENSG00000176771_54 (sequence is synthesized)
tctctgacagggcaataaagatagactccatttattgtgtttcaagaggattaagcgtaaacacatctatgatacagaatccttaattttgcactttttttgaatatttgtacagaagtt

SEQ ID NO: 614090 - DNA, 120 bp, Artificial Sequence
  ENSG00000176771_55 (sequence is synthesized)
gtaaattttttggaagagaaattatatttgtagcaaaaaaagacagcaataaatggaatcagtgccatgctcttgaaataatgtactaagtcttagaagttgatgataatatatattttt

SEQ ID NO: 614091 - DNA, 120 bp, Artificial Sequence
  ENSG00000176771_56 (sequence is synthesized)
taaaatcccaactgaagtttttgtgaagttcgttgtcctggtcctcaaattgtttgtgggtacactctgtaaacctacaacagggcctgccaaaaaatcggagggttcctcctcatctcc

SEQ ID NO: 614092 - DNA, 120 bp, Artificial Sequence
  ENSG00000176771_57 (sequence is synthesized)
atctcacaaatctcaatttgatggaaatgttcattttagtgtaatttcagattcgttgccagagattcaggtgatagtaataagtgtcattctgcttctgctgaaaaatgaaaagggtcc

SEQ ID NO: 614093 - DNA, 120 bp, Artificial Sequence
  ENSG00000176771_58 (sequence is synthesized)
tgaagtgtggacactgattgggagtgtgacattgtatcagaaatgaccgaattctattcccaataccagtttttccttccagacatttctttagattgtcttttacttagtgcttctcta

SEQ ID NO: 614094 - DNA, 120 bp, Artificial Sequence
  ENSG00000176771_59 (sequence is synthesized)
tgatcctgaatattatttgatttttatcttcttgctctttttattaaaatctgggcactctaaaaatgaaaacaaatttctatttgcaatgttcacttttaaaaataaaattaatggtgc

SEQ ID NO: 614095 - DNA, 120 bp, Artificial Sequence
  ENSG00000176771_60 (sequence is synthesized)
gtgctacgaagaattctttttaatatccttttttttctacaaagactgtttatatgtaaggataaattctattttaaaggttatgtgtattttttctagatgtgaactatttataattac

SEQ ID NO: 614096 - DNA, 120 bp, Artificial Sequence
  ENSG00000176771_61 (sequence is synthesized)
gtacaggagcttgtaaactaggcccaatagaaatatttttaggatctatatggctactttagcacataattgtttctttaaagagtattgtatgatcagtgttatttggttaatttgtgc

SEQ ID NO: 614097 - DNA, 120 bp, Artificial Sequence
  ENSG00000176771_62 (sequence is synthesized)
aatttgttttattttatcttaaatgaaaattatgtaaaatgtccttgtctttcagactttaaaaaatctttttgtttcctttctgaataaaagttatatcacatttgcaccctctgaaaa

SEQ ID NO: 614098 - DNA, 120 bp, Artificial Sequence
  ENSG00000176771_63 (sequence is synthesized)
caggctttgcagagtttagagcatattctacccaactggccccagatggaaaatactgtcttgaaattggatggctttttaagtgtagctctccacagcctgctcaaagaaaaaaaaaaa

SEQ ID NO: 614099 - DNA, 120 bp, Artificial Sequence
  ENSG00000176771_64 (sequence is synthesized)
taccaaaagactccctgaatccaactgccagatgagaacattggacagtgggatcggaacctttccactcccagactcgggaaatcgctcgacaggacgctacctatgccagccagactc

SEQ ID NO: 614100 - DNA, 120 bp, Artificial Sequence
  ENSG00000176771_65 (sequence is synthesized)
gtcaattgacctttggacaagcatcagcacagagctcttctcctcttctgcacttgttcccatgtctgactgttcgtcaactttgacctgtctcagaggctggctctcctgagtgccttg

SEQ ID NO: 614101 - DNA, 120 bp, Artificial Sequence
  ENSG00000176771_66 (sequence is synthesized)
ctcctcctgatgaatacagagggcaattttctgttgatttggaattgctatttccacatcatcagcaatatttctgcctgagacttttcataaaaattggggcctctcatctgctgctct

SEQ ID NO: 614102 - DNA, 120 bp, Artificial Sequence
  ENSG00000176771_67 (sequence is synthesized)
gtgtgaatctaccagaagttgaagatggtaaagcaacattggttcaaggataaattttcttcaaattacaacagatggaagaaaagattttaaatgacctcttttaaaatgcctggataa

SEQ ID NO: 614103 - DNA, 120 bp, Artificial Sequence
  ENSG00000176771_68 (sequence is synthesized)
cataatatggatcatattttggtgtcagaagtttgtatcttagtgatctagcatgtaagctctcccttaagcaatgcaaaggaaagccaaaaccaattatgtagcaaactggaaagaaag

SEQ ID NO: 614104 - DNA, 120 bp, Artificial Sequence
  ENSG00000176771_69 (sequence is synthesized)
gctgttttcggctccttgggcaaatactaacttactgaaagctgaacattactttattgttttgtatttctctttctgcctaataaatgatgaaatggtcacatgtttcttcttaaattt

SEQ ID NO: 614105 - DNA, 120 bp, Artificial Sequence
  ENSG00000176771_70 (sequence is synthesized)
ctatcttatttaatgggttgtccaggacctggtgtcagtgtacctctaagtagcttaataactctggttaagtaatttgacccttttgggtctcaatttgctcatctgtaacatgagtaa

SEQ ID NO: 614106 - DNA, 120 bp, Artificial Sequence
  ENSG00000176771_71 (sequence is synthesized)
attcaattgcattatagttttataatgctttttatgctttttaaaaggccctgcattagaaatgaaatgtacttacttattgggtgaagtaataatttcacatttgtaaccaggccttct

SEQ ID NO: 614107 - DNA, 120 bp, Artificial Sequence
  ENSG00000176771_72 (sequence is synthesized)
tgaagattctaacaatgagttttatgttgaggtcttggaggagactgtcttattgtccatgctgtaatcacagggaggctctgtgggactgggttttggccatgtctattttggttactt

SEQ ID NO: 614108 - DNA, 120 bp, Artificial Sequence
  ENSG00000176771_73 (sequence is synthesized)
gactctggagaagttgagattagaaaactgccgagcctagatgaaaaatttctgttgggaacagccaaaattaaatactggggaacttggctggcaaaaggaagttaagatactctgctg

SEQ ID NO: 614109 - DNA, 120 bp, Artificial Sequence
  ENSG00000176771_74 (sequence is synthesized)
tgaacatataaccaagattgctcttggctctgatgttgtccactttaggatttatttgaactggtttggtaaaaagtctaaacagagataactttatgacaaccagaattgttttcactt

SEQ ID NO: 614110 - DNA, 120 bp, Artificial Sequence
  ENSG00000176771_75 (sequence is synthesized)
tttaacaatttctctgaagaaagagccatcaataaaaataccaatgatttagtctctcctctaaatatgttttaataacatattataacttctgatacattactgttcctactccaacac

SEQ ID NO: 614111 - DNA, 120 bp, Artificial Sequence
  ENSG00000176771_76 (sequence is synthesized)
attttttcctttaagaaaatgtgtgagatacagaataatgttttaaaactgaaaactgaattgatttctactttcaataataaatgttttattttttggtgtggtttatagaaaatccac

SEQ ID NO: 614112 - DNA, 120 bp, Artificial Sequence
  ENSG00000176771_77 (sequence is synthesized)
ttttcttacgtttatagtttagataagtttggacaatcattgaccctcatgtaactaccaccacaattaaaatacagaatattttcatgtcctggaccagttctctccctccctctttgt

SEQ ID NO: 614113 - DNA, 120 bp, Artificial Sequence
  ENSG00000176771_78 (sequence is synthesized)
tctcatttccctcccaagcccctggtaactactagtcttatttctctccttatagttttgccttttccagaaaggcttataaatgacgaagtcataaagtatggaactttttggtctggc

SEQ ID NO: 614114 - DNA, 120 bp, Artificial Sequence
  ENSG00000176774_0 (sequence is synthesized)
aaagtgggcgtggccggacatgtttctcttgacctatcttccacatcatcaagctgttacgggcgaaaccttggtctgaaacatgcggccagagaaataaatctcaggatccggcaggtg

SEQ ID NO: 614115 - DNA, 120 bp, Artificial Sequence
  ENSG00000176774_1 (sequence is synthesized)
tcaaaggtgccctcttcatcaattcaactgcctgcactattgtctgtagtccctgacaagagtaattatgcctcgaggtcagaagagtaagctccgtgcccgtgagaaacgccaccaggc

SEQ ID NO: 614116 - DNA, 120 bp, Artificial Sequence
  ENSG00000176774_2 (sequence is synthesized)
tcgttgtgagaatcaggatctgggagctacgcaggccactgtggcagaaggagagtcaccctcccctgcctatcttctctttggtgacagaccccagaatttgcctgctgctgagacacc

SEQ ID NO: 614117 - DNA, 120 bp, Artificial Sequence
  ENSG00000176774_3 (sequence is synthesized)
tagcatccctgaagcgcttcagggagccccatccaccaccaatgctattgcacctgtttcatgcagttcaaatgaaggtgccagcagccaagatgagaaaagtctaggttcctcaaggga

SEQ ID NO: 614118 - DNA, 120 bp, Artificial Sequence
  ENSG00000176774_4 (sequence is synthesized)
agctgagggctggaaagaagatcctttaaacaagaaagtagtgtcgctggtgcatttcttgcttcagaagtatgaaacgaaagagccaattacaaagggagatatgataaagtttgttat

SEQ ID NO: 614119 - DNA, 120 bp, Artificial Sequence
  ENSG00000176774_5 (sequence is synthesized)
caggaaggataagtgtcacttcaatgagatcctcaagagagcctctgagcacatggagctggcacttggtgttgatttgaaggaagtggatcccatcaggcactactatgcctttttcag

SEQ ID NO: 614120 - DNA, 120 bp, Artificial Sequence
  ENSG00000176774_6 (sequence is synthesized)
caaattagacctcacctatgatgaaacaaccagtgatgaagaaaaaattcccaagactggcctcctgatgattgcactgggtgtgatctttctgaatggcaaccgtgccccagaagaggc

SEQ ID NO: 614121 - DNA, 120 bp, Artificial Sequence
  ENSG00000176774_7 (sequence is synthesized)
tatgaatatgatgggtgtatatgccgataggaagcacttcctctatggggatcccaggaaggtcatgaccaaagatttggtgcagctaaagtacctggagtaccagcaagtgcccaacag

SEQ ID NO: 614122 - DNA, 120 bp, Artificial Sequence
  ENSG00000176774_8 (sequence is synthesized)
tgatcctccacgctatgaattcctgtggggtccaagagctcacgctgaaactagcaagatgaaagtcctggagtttgtagccaagatacatgataccgtccctagtgccttcccatcctg

SEQ ID NO: 614123 - DNA, 120 bp, Artificial Sequence
  ENSG00000176774_9 (sequence is synthesized)
ctatgaagaggctttgagggatgaggaacagagaacccaagccagagctgcagccagggctcatactgctgccatggcaaatgcacgttccagaaccacgtctagcagcttctcccatgc

SEQ ID NO: 614124 - DNA, 120 bp, Artificial Sequence
  ENSG00000176774_10 (sequence is synthesized)
taagtgaaatctgaggcttgttcttcactttttggtcgaaaaggttacatttcaaatgttcaagtctgaagattgttttctttgtggaagagaagagcagtcaacattctaagtagtgaa

SEQ ID NO: 614125 - DNA, 120 bp, Artificial Sequence
  ENSG00000176774_11 (sequence is synthesized)
tggccagagtgcgtctggagggaacacagcatatatcattttgtgttaatagtctatagtaactcggagttgtatctttttctttcttttttttttggtgttatatttcaaatgttgttg

SEQ ID NO: 614126 - DNA, 120 bp, Artificial Sequence
  ENSG00000176774_12 (sequence is synthesized)
cttataatagaagttttagataacttcagaatctatatttattaatgactttggttacacacgtattgctatttaagagtaggagttttattgttctgtaaaacaaattgggaaaccttc

SEQ ID NO: 614127 - DNA, 120 bp, Artificial Sequence
  ENSG00000176774_13 (sequence is synthesized)
tttcatatttaatgagccagaacaaggaaacacagtattggaataggtatttccttaaaaaatgtgagatgatttagcagtaaaattttggagatcaaaacataggtgagaaaaagtaaa

SEQ ID NO: 614128 - DNA, 120 bp, Artificial Sequence
  ENSG00000176774_14 (sequence is synthesized)
cttttcagttcttggttttctttttccattttagtctgttatataaaaataaaagtcatacctggattggcttagcttactgaagaaggtaggaagaaataaaatgtttatgaaccagca

SEQ ID NO: 614129 - DNA, 120 bp, Artificial Sequence
  ENSG00000176782_0 (sequence is synthesized)
ggtgattccctccgacttgcgtctgcttctcgccagcagccccagcattatgcagagacttgtgctgctattagccatttctcttctactctatcaagatcttccagtgagaagcgaatt

SEQ ID NO: 614130 - DNA, 120 bp, Artificial Sequence
  ENSG00000176782_1 (sequence is synthesized)
agatgtcccaacacctatgcatgctgtttgagaaaatgggatgagagcttactgaatcgtacaaaaccctgaaacgcagtagtgctggtccctagagtcgctggaagtaggacctcagta

SEQ ID NO: 614131 - DNA, 120 bp, Artificial Sequence
  ENSG00000176783_0 (sequence is synthesized)
aaaaatggaaccggggttgcgggagaagccaaacgcggcgagtcttgctaaagccgtcgccgtagcaacgcgcggagccgtctgggagaggcctctggagcaggaggcccagtggctctt

SEQ ID NO: 614132 - DNA, 120 bp, Artificial Sequence
  ENSG00000176783_1 (sequence is synthesized)
ctgacccaaggccccgccgtccagcttctaagtgccagatgatggaggagcgtgccaacctgatgcacatgatgaaactcagcatcaaggtgttgctccagtcggctctgagcctgggcc

SEQ ID NO: 614133 - DNA, 120 bp, Artificial Sequence
  ENSG00000176783_2 (sequence is synthesized)
gcagcctggatgcggaccatgcccccttgcagcagttctttgtagtgatggagcactgcctcaaacatgggctgaaagttaagaagagttttattggccaaaataaatcattctttggtc

SEQ ID NO: 614134 - DNA, 120 bp, Artificial Sequence
  ENSG00000176783_3 (sequence is synthesized)
ctttggagctggtggagaaactttgtccagaagcatcagatatagcgactagtgtcagaaatcttccagaattaaagacagctgtgggaagaggccgagcgtggctttatcttgcactca

SEQ ID NO: 614135 - DNA, 120 bp, Artificial Sequence
  ENSG00000176783_4 (sequence is synthesized)
tgcaaaagaaactggcagattatctgaaagtgcttatagacaataaacatctcttaagcgagttctatgagcctgaggctttaatgatggaggaagaagggatggtgattgttggtctgc

SEQ ID NO: 614136 - DNA, 120 bp, Artificial Sequence
  ENSG00000176783_5 (sequence is synthesized)
tggtgggactcaatgttctcgatgccaatctctgcttgaaaggagaagacttggattctcaggttggagtaatagatttttccctctaccttaaggatgtgcaggatcttgatggtggca

SEQ ID NO: 614137 - DNA, 120 bp, Artificial Sequence
  ENSG00000176783_6 (sequence is synthesized)
aggagcatgaaagaattactgatgtccttgatcaaaaaaattatgtggaagaacttaaccggcacttgagctgcacagttggggatcttcaaaccaagatagatggcttggaaaagacta

SEQ ID NO: 614138 - DNA, 120 bp, Artificial Sequence
  ENSG00000176783_7 (sequence is synthesized)
actcaaagcttcaagaagagctttcagctgcaacagaccgaatttgctcacttcaagaagaacagcagcagttaagagaacaaaatgaattaattcgagaaagaagtgaaaagagtgtag

SEQ ID NO: 614139 - DNA, 120 bp, Artificial Sequence
  ENSG00000176783_8 (sequence is synthesized)
agataacaaaacaggataccaaagttgagctggagacttacaagcaaactcggcaaggtctggatgaaatgtacagtgatgtgtggaagcagctaaaagaggagaagaaagtccggttgg

SEQ ID NO: 614140 - DNA, 120 bp, Artificial Sequence
  ENSG00000176783_9 (sequence is synthesized)
aactggaaaaagaactggagttacaaattggaatgaaaaccgaaatggaaattgcaatgaagttactggaaaaggacacccacgagaagcaggacacactagttgccctccgccagcagc

SEQ ID NO: 614141 - DNA, 120 bp, Artificial Sequence
  ENSG00000176783_10 (sequence is synthesized)
agagcagtttgcagcagaagaatgaagccatcacatcctttgaaggaaaaaccaaccaagttatgtccagcatgaaacaaatggaagaaaggttgcagcactcggagcgggcgaggcagg

SEQ ID NO: 614142 - DNA, 120 bp, Artificial Sequence
  ENSG00000176783_11 (sequence is synthesized)
gggctgaggagcggagccacaagctgcagcaggagctgggcgggaggatcggcgccctgcagctgcagctctcccagctgcacgagcaatgctcaagcctggagaaagaattgaaatcag

SEQ ID NO: 614143 - DNA, 120 bp, Artificial Sequence
  ENSG00000176783_12 (sequence is synthesized)
aaaaagagcaaagacaggctcttcagcgcgaattacagcacgagaaagacacttcctctctactcaggatggagctgcaacaagtggaaggactgaaaaaggagttgcgggagcttcagg

SEQ ID NO: 614144 - DNA, 120 bp, Artificial Sequence
  ENSG00000176783_13 (sequence is synthesized)
acgagaaggcagagctgcagaagatctgcgaggagcaggaacaagccctccaggaaatgggcctgcacctcagccagtccaagctgaagatggaagatataaaagaagtgaaccaggcac

SEQ ID NO: 614145 - DNA, 120 bp, Artificial Sequence
  ENSG00000176783_14 (sequence is synthesized)
tgaagggccacgcctggctgaaagatgacgaagcgacacactgtaggcagtgtgagaaggagttctccatttcccggagaaagcaccactgccggaactgtggccacatcttctgcaaca

SEQ ID NO: 614146 - DNA, 120 bp, Artificial Sequence
  ENSG00000176783_15 (sequence is synthesized)
cctgctccagcaacgagctggccctgccctcctaccccaagccggtgcgagtgtgcgacagctgccacaccctgctcctgcagcgctgctcctccacggcctcctgaacgtccgtcctca

SEQ ID NO: 614147 - DNA, 120 bp, Artificial Sequence
  ENSG00000176783_16 (sequence is synthesized)
ggagcacagcctcacggacagtgccaaaccctgtgggtctccaggggcttgggaaatgtgttctttcccaagagtatcaaaggaaagaatcaaatttcttgcccggtcactggcactcca

SEQ ID NO: 614148 - DNA, 120 bp, Artificial Sequence
  ENSG00000176783_17 (sequence is synthesized)
gaagacagcgtgccggaaccggcagctctcacctttctgtgacttgttcggaattaactcctctggatggaaacttccatcttacttggttacatcacggctctggttcagatacaactt

SEQ ID NO: 614149 - DNA, 120 bp, Artificial Sequence
  ENSG00000176783_18 (sequence is synthesized)
catgattttgctactatcatttttcacttttcaaagaatttaacctattttacagcagttcagttctgctagtgagtagttttcctctcctaccttccttctaaaaacctgattcatgca

SEQ ID NO: 614150 - DNA, 120 bp, Artificial Sequence
  ENSG00000176783_19 (sequence is synthesized)
cagcgtttgacacacatggagtctgccagtgtgccttctctgcttcagacaagagatctgccatttcatgcccttgtgactacctatcattggccctgcaataaaatcatttatttttca

SEQ ID NO: 614151 - DNA, 120 bp, Artificial Sequence
  ENSG00000176783_20 (sequence is synthesized)
ctgacccaaggccccgccgtccaggtagggggctgtggcctctagggatcagggactacttacctgcgaatcccggttgcccgcccgccagcacgtccgttccctaagcagaccgcctgg

SEQ ID NO: 614152 - DNA, 120 bp, Artificial Sequence
  ENSG00000176783_21 (sequence is synthesized)
cctgcacctcagccagtaagaaccccactccccttgtctgccactgcaggcacaccaggctacccaccacatccctcaggccccaaacctacctccttttggcgaacggagggtgggcca

SEQ ID NO: 614153 - DNA, 120 bp, Artificial Sequence
  ENSG00000176783_22 (sequence is synthesized)
tttaggagctcagtccgccgttcacggatgagctctcaggaagcccggcctcagaggggcccagcactgatctctgctacccacatggggtgtcagcgagctcttagttaattcaggaag

SEQ ID NO: 614154 - DNA, 120 bp, Artificial Sequence
  ENSG00000176783_23 (sequence is synthesized)
cacgttcattcctagtgaccaggacactcctattccttagcttcatatccagggcctgagggaacagatgggcaatgagaggatcgcttggtcagcctacagtcaggccagagggagcag

SEQ ID NO: 614155 - DNA, 120 bp, Artificial Sequence
  ENSG00000176783_24 (sequence is synthesized)
ggctggtttgggaacggaagcctggcacagtagaggtgcactcacccgccttgcacagcacagcccccttcctttcggggaactggccactgcatccgccagagtctgtctgtctctgct

SEQ ID NO: 614156 - DNA, 120 bp, Artificial Sequence
  ENSG00000176783_25 (sequence is synthesized)
gcaggtgctgatggggtgcagaccctggtagttctgctcccctctgacttgacagctctcctccttggtgtcccagtctagataggttgctgtggacgcctgggccttggggtggatcac

SEQ ID NO: 614157 - DNA, 120 bp, Artificial Sequence
  ENSG00000176783_26 (sequence is synthesized)
tcaaacatgggctgaaaggacagctgtgggaagaggccgagcgtggctttatcttgcactcatgcaaaagaaactggcagattatctgaaagtgcttatagacaataaacatctcttaag

SEQ ID NO: 614158 - DNA, 120 bp, Artificial Sequence
  ENSG00000176783_27 (sequence is synthesized)
acatgacacggccaagatggccgaccgggaaggcggctgcgctgctgggcgggggcgggagctggagccggagctggagccggggccggggcccgggtcagcgcttgagccgggagaaga

SEQ ID NO: 614159 - DNA, 120 bp, Artificial Sequence
  ENSG00000176783_28 (sequence is synthesized)
gtttgagatcgtggaccgaagccagctgcccggcccaggcgacctgcggagcgcaacgaggccgcgggcggccgagggctggtcggcgcccatcctgaccctggcacgcagggccaccgg

SEQ ID NO: 614160 - DNA, 85 bp, Artificial Sequence
  ENSG00000176783_29 (sequence is synthesized)
ggctgggcggcggggacagcggggacggcacggcgcgcgcagccggcgttttgctcgtcacggcaacctccgcctcccaggttca

SEQ ID NO: 614161 - DNA, 120 bp, Artificial Sequence
  ENSG00000176783_30 (sequence is synthesized)
ctacatacattttcatgtctttggaatttggaaccatgtattattacctattgaaaacaaggaaataaaatatcaaacctgtgaacatacattgtcaactgtgaagatgccaaattaatg

SEQ ID NO: 614162 - DNA, 120 bp, Artificial Sequence
  ENSG00000176783_31 (sequence is synthesized)
cttctctggaacaccccagtccctaagcccaaataaatcacaggtgctgcttcgccctgagaaagccctctgaggggccacctttcaaagcctcagccgcctcccctgtggaatggagtc

SEQ ID NO: 614163 - DNA, 120 bp, Artificial Sequence
  ENSG00000176783_32 (sequence is synthesized)
catgtgctccccagggctggtcaagaatcagggctttggcccgcatggagaagggcttcctcaggcctgtgggacgcagtgcccgctgtccatcaccttctgtctctccacaaggatcag

SEQ ID NO: 614164 - DNA, 120 bp, Artificial Sequence
  ENSG00000176783_33 (sequence is synthesized)
cgtcaacaagtgtcttagtctcactcagatttggcccttcttccgcgcctgccagttcagctagcacttcggccagtgtctcaggcagggtctagggttgcaggcaccagaagctcgctc

SEQ ID NO: 614165 - DNA, 120 bp, Artificial Sequence
  ENSG00000176783_34 (sequence is synthesized)
aaagggaactgattgaaagtgggagtgtgcctgagtgagcagatgctggagaccgcctggaggccccagggcagcctgcagaggccaagaggtggagcacggagctaggatgcagaaatc

SEQ ID NO: 614166 - DNA, 120 bp, Artificial Sequence
  ENSG00000176783_35 (sequence is synthesized)
ccggctgcggccagacggggaaagagccccttgatgacagtcctgtgaggccccatctgatggagaaacagtgcctcactaggaaacaggtgctatgagggacaatggatgtggccagaa

SEQ ID NO: 614167 - DNA, 120 bp, Artificial Sequence
  ENSG00000176783_36 (sequence is synthesized)
caggtggccgaagctgagcctaggtcttccgactccagttcctccaccatcagctgtgctttcaaaataggcctgatgggcattccctaagggggaagcaggtggcggagaggagggacc

SEQ ID NO: 614168 - DNA, 120 bp, Artificial Sequence
  ENSG00000176783_37 (sequence is synthesized)
cgcggatatctttaaacagtggaaaacaggcccttctgttgaagtgaggggccagaggccagccagccccactgcagtgccctgtgccattgctagggaccactcaagccaagccctgag

SEQ ID NO: 614169 - DNA, 120 bp, Artificial Sequence
  ENSG00000176783_38 (sequence is synthesized)
ttgggccaggtttccgcaccctggtggggagggcagaatgacacattccaccgaaaagcaggagtttgcaggtggcccggtgtgggtgcgggtgccaggctgagctgcagggcggagagt

SEQ ID NO: 614170 - DNA, 120 bp, Artificial Sequence
  ENSG00000176783_39 (sequence is synthesized)
gtgggagaggaggcagacattcgggggcacggcagcctggccttcaagacagccttgcctgcaggagcaccccgcttcggcctcagctgtgccgtggcagcaatgcaaaagcagtccctt

SEQ ID NO: 614171 - DNA, 120 bp, Artificial Sequence
  ENSG00000176783_40 (sequence is synthesized)
tgccaatttgatgattttaaaaactccctcatatttactcatttctcaattccttgctgatgaagccctttctaattggaaagagctctgctgctcattatccacatgatctctagcaag

SEQ ID NO: 614172 - DNA, 120 bp, Artificial Sequence
  ENSG00000176783_41 (sequence is synthesized)
acttgactctctctgagcctcagtttccttttctttaaaatggggacagtgattcctgcttgccacacaggccaaataggttgaaaaggtgttgtcaaccaaagggcactcacaggagga

SEQ ID NO: 614173 - DNA, 120 bp, Artificial Sequence
  ENSG00000176783_42 (sequence is synthesized)
tgacgaagcgacacactgtaggcagtgtgagaaggagttctccatttcccggagaaagcctagctctgtggaagagaggaagccacagctaccccacccgctccccaacccgagtttcag

SEQ ID NO: 614174 - DNA, 120 bp, Artificial Sequence
  ENSG00000176783_43 (sequence is synthesized)
gcagtgccttgcagtaagctcagagctagaaaccacgtcctgaggctgcctttgagatcacatgtgtctacaaggcctggctgtccccatctgtggagtcagaagcagaggctgcacagc

SEQ ID NO: 614175 - DNA, 120 bp, Artificial Sequence
  ENSG00000176787_0 (sequence is synthesized)
atgttccttcccaatgacacccagtttcacccctcctccttcctgttgctggggatcccaggactagaaacacttcacatctggatcggctttcccttctgtgctgtgtacatgatcgca

SEQ ID NO: 614176 - DNA, 120 bp, Artificial Sequence
  ENSG00000176787_1 (sequence is synthesized)
ctcatagggaacttcactattctacttgtgatcaagactgacagcagcctacaccagcccatgttctacttcctggccatgttggccaccactgatgtgggtctctcaacagctaccatc

SEQ ID NO: 614177 - DNA, 120 bp, Artificial Sequence
  ENSG00000176787_2 (sequence is synthesized)
cctaagatgcttggaatcttctggatcaacctcagagggatcatctttgaagcctgcctcacccagatgttttttatccacaacttcacacttatggagtcagcagtccttgtggcaatg

SEQ ID NO: 614178 - DNA, 120 bp, Artificial Sequence
  ENSG00000176787_3 (sequence is synthesized)
gcttatgacagctatgtggccatctgcaatccactccaatatagcgccatcctcaccaacaaggttgtttctgtgattggtcttggtgtgtttgtgagggctttaattttcgtcattccc

SEQ ID NO: 614179 - DNA, 120 bp, Artificial Sequence
  ENSG00000176787_4 (sequence is synthesized)
cggttgcccttctgtgggaatcatgtaattccccacacctactgtgagcacatgggtcttgctcatctatcttgtgccagcatcaaaatcaatattatttatggtttatgtgccatttgt

SEQ ID NO: 614180 - DNA, 120 bp, Artificial Sequence
  ENSG00000176787_5 (sequence is synthesized)
aatctagtgtttgacatcacagtcattgccctttcttatgtgcatattctttgtgctgttttccgtcttcctactcatgaagcccgactcaagtccctcagcacatgtggttcacatgtg

SEQ ID NO: 614181 - DNA, 120 bp, Artificial Sequence
  ENSG00000176787_6 (sequence is synthesized)
tgtgtaatccttgccttctatacaccagccctcttttcctttatgactcatcgctttggccgaaatgtgccccgctatatccatatactcctagccaatctctatgttgtggtgccacca

SEQ ID NO: 614182 - DNA, 120 bp, Artificial Sequence
  ENSG00000176787_7 (sequence is synthesized)
atgctcaatcctgtcatatatggagtcagaaccaagcagatctataaatgtgtgaagaaaatattattgcaggaacaaggaatggaaaaggaagagtacctaatacatacgaggttctga

SEQ ID NO: 614183 - DNA, 120 bp, Artificial Sequence
  ENSG00000176788_0 (sequence is synthesized)
agtagcggcagcggcgacgacggcggcggcagcgctccaactggctcctcgctccgggctccgccgtcgagccgggagagagcctccgccagcggccaggcaccagccagacgacgccag

SEQ ID NO: 614184 - DNA, 120 bp, Artificial Sequence
  ENSG00000176788_1 (sequence is synthesized)
cgaccccggcctctcggcggcaccgcgctaactcaggggctgcataggcacccagagccgaactccaagatgggaggcaagctcagcaagaagaagaagggctacaatgtgaacgacgag

SEQ ID NO: 614185 - DNA, 120 bp, Artificial Sequence
  ENSG00000176788_2 (sequence is synthesized)
aaagccaaggagaaagacaagaaggccgagggcgcggcgacggaagaggaggggaccccgaaggagagtgagccccaggcggccgcagagcccgccgaggccaaggagggcaaggagaag

SEQ ID NO: 614186 - DNA, 120 bp, Artificial Sequence
  ENSG00000176788_3 (sequence is synthesized)
cccgaccaggacgccgagggcaaggccgaggagaaggagggcgagaaggacgcggcggctgccaaggaggaggccccgaaggcggagcccgagaagacggagggcgcggcagaggccaag

SEQ ID NO: 614187 - DNA, 80 bp, Artificial Sequence
  ENSG00000176788_4 (sequence is synthesized)
caaggctgagcccccgaaggcgcccgagcaggagcaggcggcccccggccccgctgcgggcggcgaggcccccaaagctg

SEQ ID NO: 614188 - DNA, 120 bp, Artificial Sequence
  ENSG00000176788_5 (sequence is synthesized)
ggggaggagcccagcaaggaggaaggggaacccaaaaagactgaggcgcccgcagctcctgccgcccaggagaccaaaagtgacggggccccagcttcagactcaaaacccggcagctcg

SEQ ID NO: 614189 - DNA, 120 bp, Artificial Sequence
  ENSG00000176788_6 (sequence is synthesized)
gaggctgccccctcttccaaggagacccccgcagccacggaagcgcctagttccacacccaaggcccagggccccgcagcctctgcagaagagcccaagccggtggaggccccggcagct

SEQ ID NO: 614190 - DNA, 120 bp, Artificial Sequence
  ENSG00000176788_7 (sequence is synthesized)
accaaaccgtaaccgtgaaagagtgacaaggacagcctataggaaaaacaataccacttaaaacaatctcctctctctctctctctctctctctctatctctctctctatctcctctctc

SEQ ID NO: 614191 - DNA, 120 bp, Artificial Sequence
  ENSG00000176788_8 (sequence is synthesized)
tctctcctctcctatctctcctctctctctctcctatactaacttgtttcaaattggaagtaatgatatgtattgcccaaggaaaaatacaggatgttgtcccatcaagggagggagggg

SEQ ID NO: 614192 - DNA, 120 bp, Artificial Sequence
  ENSG00000176788_9 (sequence is synthesized)
gtgggagaatccaaatagtatttttgtggggaaatatctaatataccttcagtcaactttaccaagaagtcctggatttccaagatccgcgtctgaaagtgcagtacatcgtttgtacct

SEQ ID NO: 614193 - DNA, 120 bp, Artificial Sequence
  ENSG00000176788_10 (sequence is synthesized)
gaaactgccgccacatgcactcctccaccgctgagagttgaatagcttttcttctgcaatgggagttgggagtgatgcgtttgattctgcccacagggcctgtgccaaggcaatcagatc

SEQ ID NO: 614194 - DNA, 120 bp, Artificial Sequence
  ENSG00000176788_11 (sequence is synthesized)
tttatgagagcagtattttctgtgttttctttttaatttacagcctttcttattttgatatttttttaatgttgtggatgaatgccagctttcagacagagcccacttagcttgtccaca

SEQ ID NO: 614195 - DNA, 120 bp, Artificial Sequence
  ENSG00000176788_12 (sequence is synthesized)
tggatctcaatgccaatcctccattcttcctctccagatatttttgggagtgacaaacattctctcatcctacttagcctacctagatttctcatgacgagttaatgcatgtccgtggtt

SEQ ID NO: 614196 - DNA, 120 bp, Artificial Sequence
  ENSG00000176788_13 (sequence is synthesized)
gggtgcacctgtagttctgtttattggtcagtggaaatgaaaaaaaaaaaaaaaaaaagtctgcgttcattgcagttccagtttctcttccattctgtgtcacagacaccaacacaccac

SEQ ID NO: 614197 - DNA, 80 bp, Artificial Sequence
  ENSG00000176788_14 (sequence is synthesized)
tcattggcaatggatgcattgaaattatatgtaattgtataaatggtgcaacagtaataaagttaaacaattaaaaagaa

SEQ ID NO: 614198 - DNA, 120 bp, Artificial Sequence
  ENSG00000176788_15 (sequence is synthesized)
gcgcaactcgtttgcagcggcgcagcccagacgcgcctgcagctggggctcaccccaacctcgctgccagccgagaactccaagatgggaggcaagctcagcaagaagaagaagggctac

SEQ ID NO: 614199 - DNA, 120 bp, Artificial Sequence
  ENSG00000176788_16 (sequence is synthesized)
tgtttggcatcccactgaccccacatctgtttcgctgctaatgctctgctgccagaactatccaagctgcctccctctgggcccagggactattgctgaagagatgacatctctgtatgt

SEQ ID NO: 614200 - DNA, 120 bp, Artificial Sequence
  ENSG00000176788_17 (sequence is synthesized)
ctggaactctgggctcaagccatcctcctgcctcacctcctgaagtgttgggattacaggaaagggtcccaatccagaccccaagggaggattcttggatctcatgcaagaaagaattca

SEQ ID NO: 614201 - DNA, 120 bp, Artificial Sequence
  ENSG00000176797_0 (sequence is synthesized)
caaatccatagggagctctgccttaccattgggttcctaattaactgagtgagtgggtgtgttctgcatggtgagaggcattggaatgatgcatcagaaaacatgtcataatgtcatcac

SEQ ID NO: 614202 - DNA, 120 bp, Artificial Sequence
  ENSG00000176797_1 (sequence is synthesized)
tgtaatatgacaagaattgcagctgtggctggaacctttataaagtgaccaagcacaccttttcatccagtctcagcgtggggtgaagcctagcagctatgaggatccattatcttctgt

SEQ ID NO: 614203 - DNA, 120 bp, Artificial Sequence
  ENSG00000176797_2 (sequence is synthesized)
catggaggaatcataaacacattacagaaatattattgcagagtcagaggcggccggtgtgctgtgctcagctgccttccaaaggaggaacagatcggcaagtgctcgacgcgtggccga

SEQ ID NO: 614204 - DNA, 120 bp, Artificial Sequence
  ENSG00000176797_3 (sequence is synthesized)
aaatgctgccgaagaaagaaataaaaaccctgaaacatgacgagagtgttgtaaagtgtggaaatgccttcttaaagtttataaaagtaaaatcaaattacatttttttttcaaaaaaaa

SEQ ID NO: 614205 - DNA, 120 bp, Artificial Sequence
  ENSG00000176798_0 (sequence is synthesized)
atgggagactggaataacagtgatgctgtggagcccatatttatcctgaggggttttcctggactggagtatgttcattcttggctctccatcctcttctgtcttgcatatttggtagca

SEQ ID NO: 614206 - DNA, 120 bp, Artificial Sequence
  ENSG00000176798_1 (sequence is synthesized)
tttatgggtaatgttaccatcctgtctgtcatttggatagaatcctctctccatcagcccatgtattactttatttccatcttagcagtgaatgacctggggatgtccctgtctacactt

SEQ ID NO: 614207 - DNA, 120 bp, Artificial Sequence
  ENSG00000176798_2 (sequence is synthesized)
cccaccatgcttgctgtgttatggttggatgctccagagatccaggcaagtgcttgctatgctcagctgttcttcatccacacattcacattcctggagtcctcagtgttgctggccatg

SEQ ID NO: 614208 - DNA, 120 bp, Artificial Sequence
  ENSG00000176798_3 (sequence is synthesized)
gttgtacttcccacacctttgctactgagacactatcactactgccatggcaatgccctctctcacgccttctgtttgcaccaggatgttctaagattatcctgtacagatgccaggacc

SEQ ID NO: 614209 - DNA, 120 bp, Artificial Sequence
  ENSG00000176798_4 (sequence is synthesized)
aacagtatttatgggctttgtgtagtcattgccacactaggtgtggattcaatcttcatacttctttcttatgttctgattcttaatactgtgctggatattgcatctcgtgaagagcag

SEQ ID NO: 614210 - DNA, 120 bp, Artificial Sequence
  ENSG00000176798_5 (sequence is synthesized)
ctaaaggcactcaacacatgtgtatcccatatctgtgtggtgcttatcttctttgtgccagttattggggtgtcaatggtccatcgctttgggaagcatctgtctcccatagtccacatc

SEQ ID NO: 614211 - DNA, 120 bp, Artificial Sequence
  ENSG00000176798_6 (sequence is synthesized)
ctcatggcagacatctaccttcttcttcccccagtccttaaccctattgtctatagtgtcagaacaaagcagattcgtctaggaattctccacaagtttgtcctaaggaggaggttttaa

SEQ ID NO: 614212 - DNA, 120 bp, Artificial Sequence
  ENSG00000176798_7 (sequence is synthesized)
gtcgaaggttttcaaaacctgaggttcatagagacttaaaattgtagcatctttaatcagtacaggtttgattttcaggtagagatgggaagttttctcaggtgagagataagcccgtaa

SEQ ID NO: 614213 - DNA, 120 bp, Artificial Sequence
  ENSG00000176798_8 (sequence is synthesized)
gagcagcaacttaaaccacagacacacaaagagaaattagaagaaagaaacagccaatcaaagggaccggaaaaaatagaggattacatgctgaaaagacacaaacttagataaaaacaa

SEQ ID NO: 614214 - DNA, 120 bp, Artificial Sequence
  ENSG00000176798_9 (sequence is synthesized)
aatataaaaaaatggcagcaggaaggaggctagaaaagatagtaaagataatttgacacataaaatgagataaagagagaaaaagccacagacataggaacagaaagaaaatatgacttt

SEQ ID NO: 614215 - DNA, 120 bp, Artificial Sequence
  ENSG00000176798_10 (sequence is synthesized)
aactatagtgaagaaaagtttagtcagagaaagacaaaatggaactgtggatcatttgagaaatgggctactgattgcaaattaactaggcatattgattcaattgccttatatttaaat

SEQ ID NO: 614216 - DNA, 120 bp, Artificial Sequence
  ENSG00000176798_11 (sequence is synthesized)
ttcaggtcagagactaagggtccagaaggagggttgagggaattactgagatgttgctacagagagatgttgctgaagtctatgaggcccagactctaagggacaagggccgacaagaga

SEQ ID NO: 614217 - DNA, 120 bp, Artificial Sequence
  ENSG00000176798_12 (sequence is synthesized)
taccagcttccttcctctgtgaggttagacgaaagatgtatttttgtcctcattccattatttgtactcaaaagagataactttgagggatcaggaaggaaaacacgaaccattcctcac

SEQ ID NO: 614218 - DNA, 120 bp, Artificial Sequence
  ENSG00000176798_13 (sequence is synthesized)
tttcacttcttatacatgtaatttcagttaatctttaaccaatatgaaactcaggatttttttggacaaattgtgacaactatggccttacgttgtccccaggtcattacaagacttata

SEQ ID NO: 614219 - DNA, 120 bp, Artificial Sequence
  ENSG00000176798_14 (sequence is synthesized)
atagaaaatgtatgtgctaagtcaagttttttgaaaactatacaaaattattaatgttattaagttgtcattgttgttaatgataacagtattttccttcttaaatgtagctgtgtttat

SEQ ID NO: 614220 - DNA, 120 bp, Artificial Sequence
  ENSG00000176798_15 (sequence is synthesized)
attgtttctcatgttaattatctaaaactcagaaatcaatctctatctcttttactagtactgctgcacgtattttgttgttcatgctacaatgtcataactgtttatgaaaaatttgag

SEQ ID NO: 614221 - DNA, 120 bp, Artificial Sequence
  ENSG00000176798_16 (sequence is synthesized)
tccttagggcaagtttggaacttgagttcctgacaggattttgacctgctgctgtggccatttgctatgtacaagttctaatctcatcacttagtgatgtgtcctttctctcattgctat

SEQ ID NO: 614222 - DNA, 120 bp, Artificial Sequence
  ENSG00000176798_17 (sequence is synthesized)
tctagatctatcagcttcctcaatttgccagcaaatactgagttagatacatgggagtgttaccaaatatagtttcagttgatgccacttgcaaaatcatataacaagaatgaaggtggt

SEQ ID NO: 614223 - DNA, 120 bp, Artificial Sequence
  ENSG00000176798_18 (sequence is synthesized)
aagaagaatgttactattccagagcttagtgatgagaaagggccagatttgtactgaaaggagacacttcagcattctgggcagaaagcagggttttaataagagaaattttggtatgca

SEQ ID NO: 614224 - DNA, 120 bp, Artificial Sequence
  ENSG00000176798_19 (sequence is synthesized)
ggccatgcagaaggcacatagacttgtggggtctataaggcttgctcacggatgtttatcttgggtcatctggtgggtcatccagtagtctggccagtgggggagaatttggtagggtgc

SEQ ID NO: 614225 - DNA, 90 bp, Artificial Sequence
  ENSG00000176798_20 (sequence is synthesized)
tccagtagtctggccagtgggggagaatttggtagggtgcttggtttgttttaagacttggtctatggaacttctttttctttctttttc

SEQ ID NO: 614226 - DNA, 90 bp, Artificial Sequence
  ENSG00000176798_21 (sequence is synthesized)
agcaattctcctgccccagcctcccgaatagctgggatgacaggtctgcgccaccatccggggtttcaccatgttgggcaggctggactc

SEQ ID NO: 614227 - DNA, 76 bp, Artificial Sequence
  ENSG00000176798_22 (sequence is synthesized)
cctagaccagctggcctatggaacttctaagaaaacgtagagtaatataaggaagtcgtgcttgcaggtggtttgg

SEQ ID NO: 614228 - DNA, 120 bp, Artificial Sequence
  ENSG00000176798_23 (sequence is synthesized)
gtagagtaatataaggaagtcgtgcttgcaggtggtttggccagtggaaagaaaggaatgtaaaggtcgtaattgcattactaaagagcaaaataagaggtgacggaaaaggggaaaaat

SEQ ID NO: 614229 - DNA, 120 bp, Artificial Sequence
  ENSG00000176798_24 (sequence is synthesized)
tgtaaaatatacatatatattttaaagaaaatggggtactcagttacaggaattgttgaagaaagcctgacagtacatgtctaaccatctgggcaattgtgttgactctgttcaatacta

SEQ ID NO: 614230 - DNA, 120 bp, Artificial Sequence
  ENSG00000176798_25 (sequence is synthesized)
taggacaggattttgtgtcttaatttgtgaatgggttaagagttgtgcacaatctcaaccctcatcttttaataatacttttacctcttgttctacatgcctgtgtggatctgtagtatt

SEQ ID NO: 614231 - DNA, 120 bp, Artificial Sequence
  ENSG00000176798_26 (sequence is synthesized)
gtgtttttaatcaatttatttttgataacccattacttttttctttttcactagaatgaactacagatatgtttttatgggtgatattttattatttcatataaattcactttcttttca

SEQ ID NO: 614232 - DNA, 120 bp, Artificial Sequence
  ENSG00000176798_27 (sequence is synthesized)
gctgtatagcacactttttgaatatggggccatgtctattaccttatcacagcactatacagctggtcttccccaacaatcatgagtactcattaaataattgaaataactattatagtt

SEQ ID NO: 614233 - DNA, 120 bp, Artificial Sequence
  ENSG00000176798_28 (sequence is synthesized)
aaattaagtgtaatcaatggtattattggaacaggtaccttttataatattgatatattaataagtggtcaatttcacttgaggatttaagaatcagtaatcagagtagttgacactttc

SEQ ID NO: 614234 - DNA, 120 bp, Artificial Sequence
  ENSG00000176798_29 (sequence is synthesized)
actgtgcattgtgagtcaaattcattcttgaccagttgaacacagttggaaataaagtggcgtaccaaagctggcacataagagacaattgtgcatatcttgttctgcttttgtgctctg

SEQ ID NO: 614235 - DNA, 120 bp, Artificial Sequence
  ENSG00000176798_30 (sequence is synthesized)
taatgtcatataggttaatgaaattggttatgatggaagtatttaaaccacagaaattggtaaacattatatatcaggacttgaaattttttcttagagaggaggtggttaaacacttac

SEQ ID NO: 614236 - DNA, 120 bp, Artificial Sequence
  ENSG00000176798_31 (sequence is synthesized)
caacacatcactgggaaaggtattctagaaagaggaggtaacatgaagaaagcaaagaggttagaaagagtatgtgttagcaacgttcttcagtctaacttaaaacttacccaaagcatt

SEQ ID NO: 614237 - DNA, 120 bp, Artificial Sequence
  ENSG00000176798_32 (sequence is synthesized)
ttgcatttcctcccacaaaaaaagggctctgacatgggctatgatggacaaagatatgtagtttcagccccatttcaatgaaagacttgtagccccagctgctggcagtaagtccagtag

SEQ ID NO: 614238 - DNA, 120 bp, Artificial Sequence
  ENSG00000176798_33 (sequence is synthesized)
aaagccttcaatttttttttttttaccttttcaggaattgcctcagctggagaaatgagccttgcctggggtcatccactgacacattcaatgactaatgtagaaagttggaaaggtctg

SEQ ID NO: 614239 - DNA, 120 bp, Artificial Sequence
  ENSG00000176798_34 (sequence is synthesized)
gccccttcagcccagtgaatttcactgggcaattttatatccaggactccccgtgatgttggacaaggctatcttcaggcctgattcacaggtcaacttttccctctgcccaatcctacc

SEQ ID NO: 614240 - DNA, 120 bp, Artificial Sequence
  ENSG00000176798_35 (sequence is synthesized)
cactttcattccttttcatttaagatgattatcccagggattctcttattaaacaaactgcacactaaattttacctcaaagtctgcttcccagagaaccctgaaatgagaagttctcag

SEQ ID NO: 614241 - DNA, 120 bp, Artificial Sequence
  ENSG00000176798_36 (sequence is synthesized)
aaaacctgtgacgtaaaggtgttaggggtggctaatatccaagtctcatgacatcaaatatattactggtggaaggtattcaagttaccagtggcaaatccatacgggtctgcagcaacc

SEQ ID NO: 614242 - DNA, 120 bp, Artificial Sequence
  ENSG00000176798_37 (sequence is synthesized)
tcaatttttgcctcctcagaagaaagaaattgactgaggggcataaggcagagaaagagatcaaggcaagtttcgagcaggagtggaagtttatttaaaaatgctttagaagaggaaaaa

SEQ ID NO: 614243 - DNA, 120 bp, Artificial Sequence
  ENSG00000176798_38 (sequence is synthesized)
aggaaagtacgcttggaagagacccaagggtaaattgaaggacaagtgctgtgtttaaccttaatcctaggaccttatagtctggcgcctttcccgtgatccttcccttagagtgggcta

SEQ ID NO: 614244 - DNA, 120 bp, Artificial Sequence
  ENSG00000176798_39 (sequence is synthesized)
cccacatgcacagtgccctccttacccttaggaagtgagcatgcacagtgtgtttaggaagttgtacacgtgcccatctgaggctttcttccctttctcggtggtgtgccctcagaaggt

SEQ ID NO: 614245 - DNA, 120 bp, Artificial Sequence
  ENSG00000176798_40 (sequence is synthesized)
catactccttcattttgtctcttaatgcacatgtctagaaagttacttccttttggcatctgcattctattagcagtttagtgcaacaggtgtggaccatcaggaaatggcctctccctg

SEQ ID NO: 614246 - DNA, 120 bp, Artificial Sequence
  ENSG00000176798_41 (sequence is synthesized)
acttttagagaggcaatgtgataattgcccaaccattgcctaacattactagtgggtaagctagagccctttcctgccccactcatgcctaactacctgtaacatagaaagataaaataa

SEQ ID NO: 614247 - DNA, 120 bp, Artificial Sequence
  ENSG00000176798_42 (sequence is synthesized)
aacatagaaagataaaataaaattctcaaggattcctttttttcaggcagatgaaacaggatgagaattcaagagcaaatatccatggtttttaaatctcttaagtttcaagcggaagat

SEQ ID NO: 614248 - DNA, 120 bp, Artificial Sequence
  ENSG00000176798_43 (sequence is synthesized)
caaacacagtgtgtaagcctggagaactaaaaataacctataattcaagttgacattgtgagatgtatgtatacaaccatcttctacaatctatgtactttcttaatagtatgtctgatg

SEQ ID NO: 614249 - DNA, 120 bp, Artificial Sequence
  ENSG00000176798_44 (sequence is synthesized)
actagaaatgttcttaattttaattaagtccaacttataaatttgcttttatgtttagtgcttttgtgtatttttaaggagatatttgcctattctgtcattcaggatccagtaagaaga

SEQ ID NO: 614250 - DNA, 120 bp, Artificial Sequence
  ENSG00000176798_45 (sequence is synthesized)
caaaaatcacacagtaatttgaatagagtttataaatacaaatacttattaatttcataaggaaatcaactttaaagaaggtaaagacaacgctgagtaataccctagagctaagagaga

SEQ ID NO: 614251 - DNA, 120 bp, Artificial Sequence
  ENSG00000176798_46 (sequence is synthesized)
atattgaaagaaaaaacaaacttggaaaatggggaaggtactccccaagcccgaggttgaaacttcatttgagaatgcatagtcttagcatcctggatgccagaaaaggtcattacattg

SEQ ID NO: 614252 - DNA, 120 bp, Artificial Sequence
  ENSG00000176798_47 (sequence is synthesized)
catgtgtttagaaagacacttctgtggggtataggtgaaccaaggctgagagactaagattccttttcaggactgagtagtaggaagcaccaggtgagctgaggcttgtaggcagggaac

SEQ ID NO: 614253 - DNA, 120 bp, Artificial Sequence
  ENSG00000176798_48 (sequence is synthesized)
tatagttggcattggcaagcaaatgataacccccctttgaagtacaggtgggcagcaaatcacagtttggactgacaagctggaaacacccctccagggtccaaataggttatttgggaa

SEQ ID NO: 614254 - DNA, 120 bp, Artificial Sequence
  ENSG00000176798_49 (sequence is synthesized)
gccagtccctagagtaactgcaagactcagtaagagtctagccatatgggtattgttgaaatttgataggatgagtattactaaatatttctcattacacgcctctggtagaagagagag

SEQ ID NO: 614255 - DNA, 120 bp, Artificial Sequence
  ENSG00000176798_50 (sequence is synthesized)
aataatcaaagagaagtacacacgaacttctcttacaagtgtccctgcggcaccctctgctggccaagtttaacatcatgaatctgtgaaggaaaaaatgtccattgagcccagttccat

SEQ ID NO: 614256 - DNA, 120 bp, Artificial Sequence
  ENSG00000176798_51 (sequence is synthesized)
tgttgcagagtaagcaatgaagtctatatttgaaactgggacaataaataaataactgacacatttgctgatattatcaatgatgtccttctgtgtaatttttgaaagttgtaaggcttt

SEQ ID NO: 614257 - DNA, 120 bp, Artificial Sequence
  ENSG00000176798_52 (sequence is synthesized)
ccttttgatatttctaaatacaacacatgtagaatttatttttatgaatgatgaggtaaggtcaaggcatattttttgatatgaatacatagttcagtcagaactatgtaaaagaaaata

SEQ ID NO: 614258 - DNA, 120 bp, Artificial Sequence
  ENSG00000176798_53 (sequence is synthesized)
aaaattgaaggaccccccaaacttgtgcagaagtaaagactaagtcctgaagctgaatcattgcaacactctcttccacatgaataactgttactaacattatatatcagccagactgga

SEQ ID NO: 614259 - DNA, 120 bp, Artificial Sequence
  ENSG00000176798_54 (sequence is synthesized)
aaggtaaatggcctcaggcatctgggaagggctacccacagatcattcataagtaaattctttgcttgcctcccataaacaaggacacgctagttgtaaatttaggtccacaatccaggt

SEQ ID NO: 614260 - DNA, 120 bp, Artificial Sequence
  ENSG00000176798_55 (sequence is synthesized)
ctagctcctaaaactccacaccgattatgtcacttacaagtttatcttcccaggtgcagaaaagtcaagattcattttcttcacctacccagagacgactacatgattgagtcttccttt

SEQ ID NO: 614261 - DNA, 120 bp, Artificial Sequence
  ENSG00000176798_56 (sequence is synthesized)
actccctttctcgcttcagacattcaccttatcttacgtaaaatgtagatttactgaacactaactgaagtctcaggaatgtaactatttcccctactgcccaacctacatgcctccccc

SEQ ID NO: 614262 - DNA, 120 bp, Artificial Sequence
  ENSG00000176798_57 (sequence is synthesized)
ttcccccttttaaggaaatggataaatacacaatgtcctgaaaacctttgtggaaatagccacagatgtgtcggtggcttttgtttttcccagaagtgccctaaacctggcttaataaac

SEQ ID NO: 614263 - DNA, 120 bp, Artificial Sequence
  ENSG00000176809_0 (sequence is synthesized)
ttgcaggtcagttgctctccctggaaggaagagtgttctcggatttcaccttaaaggaggaaggctgccagaactgaactagcacttctgaatatcctgaggcgaggtccggtgacttcc

SEQ ID NO: 614264 - DNA, 120 bp, Artificial Sequence
  ENSG00000176809_1 (sequence is synthesized)
ttgggaagctctgccgcgcccccatcccaccctaccccaccctaccccaccacagcaggcgctggagtcctgggaccaccaggatctgaggcccaaatccttcctcactaaggggaggag

SEQ ID NO: 614265 - DNA, 120 bp, Artificial Sequence
  ENSG00000176809_2 (sequence is synthesized)
aggggtgctccggcagggcaggatgggaaggcgtgcttgggcgggattgtgacataagagtgccctggtgacatggagcagatctgtggcataaataaaggtgtcataaagacagggcgg

SEQ ID NO: 614266 - DNA, 120 bp, Artificial Sequence
  ENSG00000176809_3 (sequence is synthesized)
gactcatgcttacaaggggcacgagcgtctcggagctgccagaatgacttccgctcagtgcccggcactagcgtgtgtcatgtccccgctgcgtttctggggcccatggcccctccttat

SEQ ID NO: 614267 - DNA, 120 bp, Artificial Sequence
  ENSG00000176809_4 (sequence is synthesized)
gtggcaactattgtggctactagtcaaggaggctcagcctctggagtgggtcaaggacccgctccagctgacctctaaccccctggggccgcctgagccctggtcttcccactcctccca

SEQ ID NO: 614268 - DNA, 120 bp, Artificial Sequence
  ENSG00000176809_5 (sequence is synthesized)
tttcccacgggaatctccccatgcgcctactctcccagcagacccgtgggactttgatcacctggggccctctgcttcctcagagatgccagccccaccccaggaatcgactgaaaattt

SEQ ID NO: 614269 - DNA, 120 bp, Artificial Sequence
  ENSG00000176809_6 (sequence is synthesized)
ggttccattcctggacacctgggattcagctggagagctgcccctggagccagagcagttcttggcttcacagcaggatttaaaggacaagctgagtccacaggaaaggctccctgtttc

SEQ ID NO: 614270 - DNA, 120 bp, Artificial Sequence
  ENSG00000176809_7 (sequence is synthesized)
gcccaagaagctgaagaaagatccagctcagcgttggagccttgctgagattattggaattatacaccaattatccacacctcagagtcagaaacagactttgcagaatgaatattccag

SEQ ID NO: 614271 - DNA, 120 bp, Artificial Sequence
  ENSG00000176809_8 (sequence is synthesized)
tacagatacaccgtatcccggtagcctgcctccagaactccgggtgaagtcagatgagcctccagggccctctgagcaagttggaccttctcaattccatctagagcccgaaactcaaaa

SEQ ID NO: 614272 - DNA, 120 bp, Artificial Sequence
  ENSG00000176809_9 (sequence is synthesized)
tccagagacccttgaagacatccagtcctcttcactccagcaagaagccccagcacagcttccacagctccttgaggaagaaccttcttcaatgcagcaggaggccccagctctgcctcc

SEQ ID NO: 614273 - DNA, 120 bp, Artificial Sequence
  ENSG00000176809_10 (sequence is synthesized)
agagtcctctatggagagtctaactctaccgaatcatgaggtgtcagttcaacctccaggtgaggatcaagcttattatcacttgcccaacattacagttaaacctgcagatgtggaggt

SEQ ID NO: 614274 - DNA, 120 bp, Artificial Sequence
  ENSG00000176809_11 (sequence is synthesized)
taccataacttcagagcctaccaatgagacagaatcttcccaagcccagcaggagaccccaattcagtttccagaggaggtggaaccttctgcaacccaacaggaggccccaattgagcc

SEQ ID NO: 614275 - DNA, 120 bp, Artificial Sequence
  ENSG00000176809_12 (sequence is synthesized)
tccagttcctcctatggagcatgaactttccatcagtgagcagcagcagccagttcagccttctgagtcttctagggaggtcgaatcttctccgacccagcaggagaccccaggtcagcc

SEQ ID NO: 614276 - DNA, 120 bp, Artificial Sequence
  ENSG00000176809_13 (sequence is synthesized)
tccagaacatcatgaagtcacagtttcacctccaggtcaccatcaaactcatcatttagcttcacccagtgtctctgtgaagcctccagacgtgcagctcaccatagcagcagagcctag

SEQ ID NO: 614277 - DNA, 120 bp, Artificial Sequence
  ENSG00000176809_14 (sequence is synthesized)
tgcagaggtgggaacttctctagtccaccaggaggctacaactcggctctcagggtcaggtaatgatgtagaacctcccgccatccagcacgggggcccacctctgcttccagagtcatc

SEQ ID NO: 614278 - DNA, 120 bp, Artificial Sequence
  ENSG00000176809_15 (sequence is synthesized)
agaagaagctggacctttagcagttcaacaggagacttcatttcaatctccggaacctattaataatgagaacccctctccaacccagcaggaggctgcagctgagcatccacagaccgc

SEQ ID NO: 614279 - DNA, 120 bp, Artificial Sequence
  ENSG00000176809_16 (sequence is synthesized)
tgaggagggtgagtcttccctaacccatcaggaggccccagctcagactccagagttccctaatgtagttgtagctcaacctccagagcattcacacctgactcaagccacagttcaacc

SEQ ID NO: 614280 - DNA, 120 bp, Artificial Sequence
  ENSG00000176809_17 (sequence is synthesized)
tttggatctggggtttaccatcactccagaatccatgacagaggttgaactttctccaaccatgaaggagaccccaactcagcctcctaagaaagttgtaccccaacttcgagtatatca

SEQ ID NO: 614281 - DNA, 120 bp, Artificial Sequence
  ENSG00000176809_18 (sequence is synthesized)
aggggtaacaaatccaacaccaggtcaggatcaagctcagcatccagtgtcacccagcgttacagttcaacttttggacctgggacttaccatcactccagaacccactacggaggttgg

SEQ ID NO: 614282 - DNA, 120 bp, Artificial Sequence
  ENSG00000176809_19 (sequence is synthesized)
acattctacacccccgaagaggactatagtttctccaaagcatcctgaggtgacacttccacatccagaccaggttcagactcagcattcacacctgactcgagccacagttcaaccttt

SEQ ID NO: 614283 - DNA, 120 bp, Artificial Sequence
  ENSG00000176809_20 (sequence is synthesized)
ggacctggggtttaccatcactccaaaatccatgacagaggttgaaccttctacagccctgatgactacagctcctcctccaggacaccctgaggtgacacttccaccttcagacaaggg

SEQ ID NO: 614284 - DNA, 120 bp, Artificial Sequence
  ENSG00000176809_21 (sequence is synthesized)
tcaggctcagcattcacacctgactcaagccaccgttcaacctctggacctggagcttaccataactacaaaacctactacagaggttaaaccatctccaaccacggaggagacctcaac

SEQ ID NO: 614285 - DNA, 120 bp, Artificial Sequence
  ENSG00000176809_22 (sequence is synthesized)
tcagcttccagacctgggacttgccatcattccagaacccactacagagactggacattctacagccctggagaagactacagctcctcgtccagaccgggttcagactctgcatcgaag

SEQ ID NO: 614286 - DNA, 120 bp, Artificial Sequence
  ENSG00000176809_23 (sequence is synthesized)
gtccacctactgaactagaacctgctcaggattcactggtgcagtctgaaagttacacccaaaataaggctttaactgcaccagaggaacacaaggcctccacaagcaccaacatatgtg

SEQ ID NO: 614287 - DNA, 120 bp, Artificial Sequence
  ENSG00000176809_24 (sequence is synthesized)
agctctgtacctgcggagatgagatgttgtcatgtattgatctcaacccagagcagaggctccgccaagtgcctgtgccagagcccaacacccacaatggcaccttcaccatcttaaatt

SEQ ID NO: 614288 - DNA, 120 bp, Artificial Sequence
  ENSG00000176809_25 (sequence is synthesized)
tccaaggaaactatatttcttacattgatggaaatgtatggaaagcatacagttggaccgagaaactaattctcagagaaaataacttgactgaattacacaaggattcatttgaaggcc

SEQ ID NO: 614289 - DNA, 120 bp, Artificial Sequence
  ENSG00000176809_26 (sequence is synthesized)
tgctatccctccagtatttagatttatcctgcaataaaatacagtctattgaaagacatacatttgaaccactaccatttttgaagtttataaatcttagttgcaatgtaattacagaac

SEQ ID NO: 614290 - DNA, 120 bp, Artificial Sequence
  ENSG00000176809_27 (sequence is synthesized)
tcagctttggaacatttcaggcctggcacggaatgcagtttttacataagttaattctcaatcacaatcctctgacaactgttgaagatccatatctctttaaattgccagcattaaaat

SEQ ID NO: 614291 - DNA, 120 bp, Artificial Sequence
  ENSG00000176809_28 (sequence is synthesized)
atctagacatgggaacaacgctagtcccacttacaacacttaagaacattctcatgatgactgttgaactggaaaaactgatcgtacctagccatatggcctgctgcctctgccaattta

SEQ ID NO: 614292 - DNA, 120 bp, Artificial Sequence
  ENSG00000176809_29 (sequence is synthesized)
aaaacagcattgaggctgtctgcaagacagtcaagctgcattgcaacagtgcatgtctgacaaacaccacacattgtcctgaagaagcatctgtagggaatccagaaggagcgttcatga

SEQ ID NO: 614293 - DNA, 120 bp, Artificial Sequence
  ENSG00000176809_30 (sequence is synthesized)
aggtgttacaagcccggaagaattacacaagcactgagctgattattgagccggaggagccctcagacagcagtggcatcaacttgtcaggctttgggagtgagcagctagacaccaatg

SEQ ID NO: 614294 - DNA, 120 bp, Artificial Sequence
  ENSG00000176809_31 (sequence is synthesized)
acgagagtgatgttaccagtacactaagttacatcttaccttatttctcagccgttaacctagatgtgaaatcactgttactaccgttcattaaactgccaaccacaggaaacagcctgg

SEQ ID NO: 614295 - DNA, 120 bp, Artificial Sequence
  ENSG00000176809_32 (sequence is synthesized)
caaagattcaaactgtaggcaaaaaccggcagagactgaatagagtcctcatgggcccaaggagcatccagaaaaggcacttcaaagaggtaggaaggcagagcatcaggagggaacagg

SEQ ID NO: 614296 - DNA, 120 bp, Artificial Sequence
  ENSG00000176809_33 (sequence is synthesized)
gtgcccaggcatctgtggagaacactgccgaagaaaaaaggctcggaagtccagccccaagggagctgaaacagcctcacacacagcaggggcctgagaagttagcgggaaacgccgtct

SEQ ID NO: 614297 - DNA, 120 bp, Artificial Sequence
  ENSG00000176809_34 (sequence is synthesized)
acaccaagccttcgttcacccaagagcataaggcagcagtctctgtgctgaaacccttctccaagggcgcgccttctacctccagccctgcaaaagccctaccacaggtgagagacagat

SEQ ID NO: 614298 - DNA, 120 bp, Artificial Sequence
  ENSG00000176809_35 (sequence is synthesized)
ggaaagacttaacccacgctatttccattttagaaagtgcaaaggctagagttacaaatatgaagacatctaaacccatcgtacattccagaaaaaaataccgctttcacaaaactcgct

SEQ ID NO: 614299 - DNA, 120 bp, Artificial Sequence
  ENSG00000176809_36 (sequence is synthesized)
cccgcatgacccacagaacacccaaggtcaaaaagagtccaaaggtcagaaagaaaagttatctgagtagactgatgctctcaaacaggcttccgttctctgcagcgaagagcctcataa

SEQ ID NO: 614300 - DNA, 120 bp, Artificial Sequence
  ENSG00000176809_37 (sequence is synthesized)
attccccttcacaaggggctttttcatccttaagagacctgagtcctcaagaaaatccttttctggaagtatctgctccttcagaacattttatagaaaacaataatacaaaagacacaa

SEQ ID NO: 614301 - DNA, 120 bp, Artificial Sequence
  ENSG00000176809_38 (sequence is synthesized)
ctgcaagaaatgcctttgaagaaaatgtttttatggaaaacactaacatgccagaaggaaccatctctgaaaacacaaactacaatcatcctcctgaggcagattccgctgggactgcat

SEQ ID NO: 614302 - DNA, 120 bp, Artificial Sequence
  ENSG00000176809_39 (sequence is synthesized)
tcaacttagggccaactgttaaacaaactgagacaaaatgggaatacaacaacgtgggcactgacctgtcccccgagcccaaaagcttcaattacccattgctctcgtccccaggtgatc

SEQ ID NO: 614303 - DNA, 120 bp, Artificial Sequence
  ENSG00000176809_40 (sequence is synthesized)
agtttgaaattcagctaacccagcagctgcagtccgttatccccaacaacaatgtgagaaggctcattgctcatgttatccggaccttgaagatggactgctctggggcccatgtgcaag

SEQ ID NO: 614304 - DNA, 120 bp, Artificial Sequence
  ENSG00000176809_41 (sequence is synthesized)
tgacctgtgccaagctcgtctccaggacaggccacctgatgaagcttctcagtgggcagcaggaagtaaaggcatccaagatagaatgggatacggaccaatggaagactgagaactaca

SEQ ID NO: 614305 - DNA, 120 bp, Artificial Sequence
  ENSG00000176809_42 (sequence is synthesized)
ttaatgagagcacagaagcccagagtgaacagaaagagaagtcgcttgagttcacaaaagaacttccaggatatggctataccaaaaaactcatcttggcgttaattgtgactggaatac

SEQ ID NO: 614306 - DNA, 120 bp, Artificial Sequence
  ENSG00000176809_43 (sequence is synthesized)
taacgattttgattatacttctctgcctcattgagatctgttgtcaccgaaggtcattacaagaagatgaagaaggattctcaagggacagcgaagccccaacggaggaggagagtgaag

SEQ ID NO: 614307 - DNA, 120 bp, Artificial Sequence
  ENSG00000176809_44 (sequence is synthesized)
ccctgccataggaggagaacccagcccacctcaggcctcctgcaaaaatacatagcgtaaacaacggccatcaaaaaagcaggactgaagccagcggcccacacatccacagaggcagcg

SEQ ID NO: 614308 - DNA, 120 bp, Artificial Sequence
  ENSG00000176809_45 (sequence is synthesized)
ggcagagcaagcacagggccatcgttcctgcccttgtttcccagtctaattagtcacccagacctgaaaacatatgctcagggggtggagattttacaattaaataacattgtttttggt

SEQ ID NO: 614309 - DNA, 64 bp, Artificial Sequence
  ENSG00000176809_46 (sequence is synthesized)
aagtgcaatgttggcctcctgagtagctgggattgcaggtcagttgctctccctggaaggaaga

SEQ ID NO: 614310 - DNA, 120 bp, Artificial Sequence
  ENSG00000176809_47 (sequence is synthesized)
accgagaaactaattctcaatcacaatcctctgacaactgttgaagatccatatctctttaaattgccagcattaaaatatctagacatgggaacaacgctagtcccacttacaacactt

SEQ ID NO: 614311 - DNA, 120 bp, Artificial Sequence
  ENSG00000176809_48 (sequence is synthesized)
aacggaagaaacaagatggcggctgaaggcgatccgcatagagatggagtttcaccgtgttgcccaggctggtgtcgaactcctgagctcaggcgatccgcccgcctcagcttcccaaag

SEQ ID NO: 614312 - DNA, 120 bp, Artificial Sequence
  ENSG00000176809_49 (sequence is synthesized)
attttccatgtttacatacacaaatacctgccattctgtgacagttgcctttagtattcagtacagtaacatacagtacaggtttgtagcctaggagtcctaagccataccgtgtaccct

SEQ ID NO: 614313 - DNA, 120 bp, Artificial Sequence
  ENSG00000176809_50 (sequence is synthesized)
aggtatggtggctacaccacctaggtttgtgtaagtatacgctatgatattagcacaatggtgaaataacctagtgacccatttctcaagctcctcacgtggcaagcaatgcatgactgc

SEQ ID NO: 614314 - DNA, 120 bp, Artificial Sequence
  ENSG00000176809_51 (sequence is synthesized)
atatgaaagctcttaaatagggattgtttctaaattaatctcaaaacagtcattatttactatttatggaattttttttaaaaaaaggagcaaaagtatcatttcagtgggaacttaact

SEQ ID NO: 614315 - DNA, 120 bp, Artificial Sequence
  ENSG00000176809_52 (sequence is synthesized)
tggggctacagtgttttatttaacttttaccccaaagttgcaaagtgttttgaaatttttccctgtaaaataattattttaattcaatttaaataaaacccaccaaggagacttcaagct

SEQ ID NO: 614316 - DNA, 120 bp, Artificial Sequence
  ENSG00000176809_53 (sequence is synthesized)
ttaagaagtctagcttcctgtgaaatgtgagaggaagtcagcactcatttcagaaatctgattataataatagctccatccctaaatgaggtgaatcttggaatctcttccattttattt

SEQ ID NO: 614317 - DNA, 120 bp, Artificial Sequence
  ENSG00000176809_54 (sequence is synthesized)
aggcctggcacggaatgcagtttttacataagttgatcgtacctagccatatggcctgctgcctctgccaatttaaaaacagcattgaggctgtctgcaagacagtcaagctgcattgca

SEQ ID NO: 614318 - DNA, 120 bp, Artificial Sequence
  ENSG00000176809_55 (sequence is synthesized)
agggaggggatgtgagaggccccctgccattgaggataagtggacatgtctgaattggcctgctacctaaaattaataatctcaatcacttggatggtggtgtccataattttctccact

SEQ ID NO: 614319 - DNA, 120 bp, Artificial Sequence
  ENSG00000176809_56 (sequence is synthesized)
gtttgtgtggcatataataagtaatggttgcacctagcaattcatttacaaatcttacttgattttgaagccatagaacacctcaactgttagcttgaatgactggagtttagtttttat

SEQ ID NO: 614320 - DNA, 120 bp, Artificial Sequence
  ENSG00000176809_57 (sequence is synthesized)
tgccacttccgaagcaaaggctgaagttctgtgctttagaggtggtgttgccatcctatgattgcaggagtctggccttggcttggtggaggagcctgtggataaggcgaaggaaggctg

SEQ ID NO: 614321 - DNA, 120 bp, Artificial Sequence
  ENSG00000176809_58 (sequence is synthesized)
attattatcggcttcatgtttacagaatactccgttgaatttggtttgacagattttgtcaagcatttttccatctacattcataagaaatactgaattctcaatcacaatcctctgaca

SEQ ID NO: 614322 - DNA, 120 bp, Artificial Sequence
  ENSG00000176809_59 (sequence is synthesized)
tttttcaatatcactcttcgtggattcttctttatattaaatatgttgtaacttattgttgttattcttttgaatgctcaaattgtccagatttgaccaatgcagtctttgttatttttt

SEQ ID NO: 614323 - DNA, 120 bp, Artificial Sequence
  ENSG00000176809_60 (sequence is synthesized)
aactccgcaatccaggttaaactaagctatttttaatgcccagagtaatttataatatttcccactcccaacaggaattgagaaagggactccggaagttgggggcttattcagacttct

SEQ ID NO: 614324 - DNA, 120 bp, Artificial Sequence
  ENSG00000176809_61 (sequence is synthesized)
taaaagtctaccttcttcctctgtactttcagcccaaagtgagacttttgagttgggaagagatacttctgaaactactaatcactgtcacccaattctaatcccaaccatctttattct

SEQ ID NO: 614325 - DNA, 120 bp, Artificial Sequence
  ENSG00000176809_62 (sequence is synthesized)
aggcataccatactcactgccatgcttacccttcagttgggcacttttgtcctccttcctattggccttctggttcctacccaactgtccagtccacaggcttcaatgatacctttttcc

SEQ ID NO: 614326 - DNA, 120 bp, Artificial Sequence
  ENSG00000176809_63 (sequence is synthesized)
cacccctgtggtagtgttggctgcctcctttacctactcaagtaaccgctttaccgctaatttattgctctctgttttcatctataggatcgtacctagccatatggcctgctgcctctg

SEQ ID NO: 614327 - DNA, 120 bp, Artificial Sequence
  ENSG00000176834_0 (sequence is synthesized)
agaggaagttgggctcccgcctggctgggaggcgggagggatcccgctcctgttgttttccgccggcaggagtaggctggcgggcgcagggggcggggtgcgccctccctccccggccag

SEQ ID NO: 614328 - DNA, 120 bp, Artificial Sequence
  ENSG00000176834_1 (sequence is synthesized)
ggcgctcgggagcggggacccgagcctgcagccgagctccgctgccggccctggacactcggctcagccaagcatccttcctgggggccgaggaagtggggccactctgccgttccgagg

SEQ ID NO: 614329 - DNA, 120 bp, Artificial Sequence
  ENSG00000176834_2 (sequence is synthesized)
acctgggaggagccctcggtaccccgggccccggggccctggggcacacacgtccagcccagcccgagcctgcgtttcctgagccgggatctggggcgagatggccgcaggcggcagtgc

SEQ ID NO: 614330 - DNA, 120 bp, Artificial Sequence
  ENSG00000176834_3 (sequence is synthesized)
gcccgagccccgcgtcctcgtctgcctcggggcgctcctggccggctgggtcgccgtaggattggaggctgttgtcattggagaagttcatgagaatgttactctgcactgtggcaacat

SEQ ID NO: 614331 - DNA, 120 bp, Artificial Sequence
  ENSG00000176834_4 (sequence is synthesized)
ctcgggactgaggggccaggtgacctggtaccggaacaactcggagcctgtcttccttctctcgtccaactctagcctccggccagctgagcctcgcttctctctagtggatgccacctc

SEQ ID NO: 614332 - DNA, 120 bp, Artificial Sequence
  ENSG00000176834_5 (sequence is synthesized)
cctgcacattgaatcgctgagcctgggagatgagggaatctacacctgccaggagatcctgaatgtgactcagtggttccaagtgtggctgcaggtggccagcggcccctatcagattga

SEQ ID NO: 614333 - DNA, 120 bp, Artificial Sequence
  ENSG00000176834_6 (sequence is synthesized)
ggtccacatcgtggccaccggcacactccccaacggcaccctctacgcagccaggggctcccaggtggacttcagctgcaacagcagctccaggccaccacccgtggttgaatggtggtt

SEQ ID NO: 614334 - DNA, 120 bp, Artificial Sequence
  ENSG00000176834_7 (sequence is synthesized)
ccaggccctgaattccagcagcgagtcctttggccacaacctgacagtcaactttttctcactgttactgatatcgccaaacctccaagggaactacacctgtttagccttgaatcagct

SEQ ID NO: 614335 - DNA, 120 bp, Artificial Sequence
  ENSG00000176834_8 (sequence is synthesized)
cagcaagagacatcgaaaggtgaccaccgagctcctggtctactatccccctccatcagctccccagtgctgggcacagatggcatcaggatcgttcatgttgcagcttacctgtcgctg

SEQ ID NO: 614336 - DNA, 120 bp, Artificial Sequence
  ENSG00000176834_9 (sequence is synthesized)
ggatgggggataccctgaccctgacttcctgtggatagaagagccaggaggtgtaatcgtggggaagtcaaagctgggggtggaaatgctgagcgagtcccagctgtcggatggcaagaa

SEQ ID NO: 614337 - DNA, 120 bp, Artificial Sequence
  ENSG00000176834_10 (sequence is synthesized)
gttcaagtgtgttacaagccacatagttgggccagagtcgggcgccagctgcatggtgcagatcaggggtccctcccttctctctgagcccatgaagacttgcttcactgggggcaatgt

SEQ ID NO: 614338 - DNA, 120 bp, Artificial Sequence
  ENSG00000176834_11 (sequence is synthesized)
gacgcttacatgccaggtgtctggggcctacccccctgccaagatcctgtggctgaggaaccttacccagcccgaggtgatcatccagcctagcagccgccatctcattacccaggatgg

SEQ ID NO: 614339 - DNA, 120 bp, Artificial Sequence
  ENSG00000176834_12 (sequence is synthesized)
ccagaactccaccctcactatccacaactgctcccaggacctggatgagggctactacatctgccgagctgacagccctgtaggggtgagggagatggaaatctggctgagtgtgaaaga

SEQ ID NO: 614340 - DNA, 120 bp, Artificial Sequence
  ENSG00000176834_13 (sequence is synthesized)
acctttaaatatcggggggattgtgggaaccattgtgagcctccttctgctgggactggccattatctcagggcttctgttgcattatagccctgtgttctgctggaaagtaggaaacac

SEQ ID NO: 614341 - DNA, 89 bp, Artificial Sequence
  ENSG00000176834_14 (sequence is synthesized)
tgcattatagccctgtgttctgctggaaagtaggaaacacttccaggggacaaaacatggatgatgtcatggttttggtggattcagaa

SEQ ID NO: 614342 - DNA, 120 bp, Artificial Sequence
  ENSG00000176834_15 (sequence is synthesized)
agaggagttgccaaaagaaatacctaagcaggaccacattcacagagtgaccgccttggtgaatgggaacatagaacagatgggaaatggattccaggatcttcaagatgacagcagtga

SEQ ID NO: 614343 - DNA, 120 bp, Artificial Sequence
  ENSG00000176834_16 (sequence is synthesized)
ggagcaaagtgacattgttcaagaagaagacaggccagtctgaagaagaggatggtccatggttgtcttgctctgaaagcttggagagctacattgaagacgagctcttcattcagcttt

SEQ ID NO: 614344 - DNA, 120 bp, Artificial Sequence
  ENSG00000176834_17 (sequence is synthesized)
gactccacctgcacccctggcgggggcttgcactaacaatgtttgggtctcagcaaaaaacaaaaccaagcacacacatctttccttccatgtattgaaaaacattggtttgatttgctc

SEQ ID NO: 614345 - DNA, 120 bp, Artificial Sequence
  ENSG00000176834_18 (sequence is synthesized)
taagttttcccaatgatgtttaaaagctttgagaaggaaagctgctttggtgtctgaggtgccacttctgctgtgaatcctggctttatccaggttgatctactgtgatagatgctgatt

SEQ ID NO: 614346 - DNA, 81 bp, Artificial Sequence
  ENSG00000176834_19 (sequence is synthesized)
tggctttatccaggttgatctactgtgatagatgctgatttagagggaacagaggtcagggaagcactgggtcttggtgcc

SEQ ID NO: 614347 - DNA, 120 bp, Artificial Sequence
  ENSG00000176834_20 (sequence is synthesized)
acaggtgaagttccaggtaccaatgccaatcagaggaaggcagtttggttcaggctttggagttagaaacacctgaagttgaatctgggctctgttgcttccttctttcatgggctagag

SEQ ID NO: 614348 - DNA, 120 bp, Artificial Sequence
  ENSG00000176834_21 (sequence is synthesized)
cacgactctttacctctctcttggcctcaatttcctcacctgtaaaatagatgaggaagctgctcacttattattgtctcgttctgaaagcttggaaagctacatcgaagatgagctctt

SEQ ID NO: 614349 - DNA, 120 bp, Artificial Sequence
  ENSG00000176834_22 (sequence is synthesized)
cattcagctttgatttgacctgtacccctggtgggggattgcactggcaacatttgggtctcagcaaaaaaaccaagcacacacatctttccttccatttattgaaaaacatctttgtaa

SEQ ID NO: 614350 - DNA, 120 bp, Artificial Sequence
  ENSG00000176834_23 (sequence is synthesized)
gatccattcattgaaaaacataatccatttattgaaaaatatctttgtaagatcacctgctaaatatgaaaatctgacttgaatttgtactctttaaagttgcgtatctgctctagtggg

SEQ ID NO: 614351 - DNA, 120 bp, Artificial Sequence
  ENSG00000176834_24 (sequence is synthesized)
caggacctagggcttaaaggggaacttcctttctccatttctaagaactgggactctaaaatgagaagctggttgtctgaagtaaccctgcaggtgtggttggggaaggtctgttttctt

SEQ ID NO: 614352 - DNA, 120 bp, Artificial Sequence
  ENSG00000176834_25 (sequence is synthesized)
ggatgaaggaactaaactaagcatatcagagcactgtcttaaccagttttatttccctggagatagaattcttttaaaaagagttagggagctggtaataggaagtgcctttcattataa

SEQ ID NO: 614353 - DNA, 120 bp, Artificial Sequence
  ENSG00000176834_26 (sequence is synthesized)
ctacattttgcagagcttcatatttatatacaagcctcctaggtgatacactgttagcttgcagactttcctatgcttcatttctcctgttgctttcaaagaaggcaggagacacgttta

SEQ ID NO: 614354 - DNA, 120 bp, Artificial Sequence
  ENSG00000176834_27 (sequence is synthesized)
ataacggagtatctggtgataagaattgcttgggcaaaccagctcatctggactctttctcagtcttggaagtgggaagaggaaaacttgtttccttcctgcttcttaaggatattctga

SEQ ID NO: 614355 - DNA, 120 bp, Artificial Sequence
  ENSG00000176834_28 (sequence is synthesized)
gggtacactgatcaataacactaaatttggaatgaaaataccatgtgatgagtttagcctgctgatgcttccagtagatccttgtatagtttcaagatttaagttttccgatttcatata

SEQ ID NO: 614356 - DNA, 120 bp, Artificial Sequence
  ENSG00000176834_29 (sequence is synthesized)
aatttcttaaagtcgaggaccttataagggtgcaatggatgtttgctaaatatgaaaaactgacttgaatttgcactctttaatgttgcgtatctgctctagtgggcaggacctagggct

SEQ ID NO: 614357 - DNA, 120 bp, Artificial Sequence
  ENSG00000176834_30 (sequence is synthesized)
taaaggggaacttcctttctccaattctaggaactgggactctaaaatgagaagctggttgtctgaagtaaccctgcaggtgtggttggggaaggtctgttttcttggatgaagggatta

SEQ ID NO: 614358 - DNA, 120 bp, Artificial Sequence
  ENSG00000176834_31 (sequence is synthesized)
aactgagcaaatcactagaagtatgccctgtcccctgctcagaacactggggagctcaagagtgggctgcaatgtgcacccctcaggaatagctgtgaattgcaggtctactggcttttt

SEQ ID NO: 614359 - DNA, 120 bp, Artificial Sequence
  ENSG00000176834_32 (sequence is synthesized)
gctttttgtcttttgctgcaaggtaccccacgtacttaaccattctcaacagtgtaaatcagtgtcattttagaatgagatactcagcttgcttctaaagtcactgaattactgagtgag

SEQ ID NO: 614360 - DNA, 120 bp, Artificial Sequence
  ENSG00000176834_33 (sequence is synthesized)
tctctcctttagagtcttcggcaaccaaattccagaattgaagagtctactactcagaggcaacaagattaaaaaaagaaaacacaaaaactgttgaggtgaaaaaaaaaaaaaacccta

SEQ ID NO: 614361 - DNA, 120 bp, Artificial Sequence
  ENSG00000176834_34 (sequence is synthesized)
gctaggaacacagagaatgttttgtaggatcactgggatattttccacaacttcctcttctctagcacacacatctgttgataggaaatatttgagggtttttccactaccaaatgggag

SEQ ID NO: 614362 - DNA, 120 bp, Artificial Sequence
  ENSG00000176834_35 (sequence is synthesized)
cttcatggtcctggtgtcaaacactataaacctttgaccagctgagctgtgactgctgtcacatatctgagtcctgtgtgcacagtaatatcctgggtcaggtaaaatccaggtcttcaa

SEQ ID NO: 614363 - DNA, 120 bp, Artificial Sequence
  ENSG00000176834_36 (sequence is synthesized)
gttttaaggattttttgaagaattcgggcttctttaagacgatccatgcccaaatccacaagcttgttgacagtggattacagtttgtgtggcaaagtccaagttgttacactgtgcttt

SEQ ID NO: 614364 - DNA, 120 bp, Artificial Sequence
  ENSG00000176834_37 (sequence is synthesized)
aaaaaaaatcttatctgcatgtattgttaacttagagaccatgagatctatttatcaggaccaggaagatacacacttcaggtccattgcaactgacttttttcttgtttttctcaaacc

SEQ ID NO: 614365 - DNA, 120 bp, Artificial Sequence
  ENSG00000176834_38 (sequence is synthesized)
ctggtggagcctgggaagggggcctccacaattctgtggctttgatattagccccaattctcacaagcacatacaagccccataattgccgcaggaaaacacaagatggaaaattgcaat

SEQ ID NO: 614366 - DNA, 120 bp, Artificial Sequence
  ENSG00000176834_39 (sequence is synthesized)
aacccatgcactgagacttagaaaatcatccttactaggcaaaatgtattatgatgcaataagtgccaactgatatttctcacgttgggactggccaggaactgctgcaaagaaaaataa

SEQ ID NO: 614367 - DNA, 120 bp, Artificial Sequence
  ENSG00000176834_40 (sequence is synthesized)
gcagctccttctccattatttacattttaagatgtggtggggggaggttgggagaaattagttctgaggttatcatatgccttttttaaaagataatggaataaagctatttttaagtaa

SEQ ID NO: 614368 - DNA, 120 bp, Artificial Sequence
  ENSG00000176834_41 (sequence is synthesized)
ggcctctgattggccgaagctggcagagcagggcctctcgcgctcctgggtccatgcaacctgctccctgtggctgccgagttctcgggaacagcggctcggcctgcaaggctgttgttt

SEQ ID NO: 614369 - DNA, 120 bp, Artificial Sequence
  ENSG00000176834_42 (sequence is synthesized)
caagaaatgaaaatgaagggcgccctggaataggttcgccgaagagagagcttgcaggcctctgggaagcaagccatcgtgtggcagaggcccaggtggcaaggaaccaagggcggcttc

SEQ ID NO: 614370 - DNA, 120 bp, Artificial Sequence
  ENSG00000176834_43 (sequence is synthesized)
ccttcccccgaaagcccggctttcagctcagagaatggaaaaatatctcttcctaaagacacagagaaacataaacaaacctgaccaatagaaggaccaaaacctctgcacagtgcctca

SEQ ID NO: 614371 - DNA, 120 bp, Artificial Sequence
  ENSG00000176834_44 (sequence is synthesized)
cccctcggaggaattaacaaaaatacggaggctggtgggacctcaaccccagctggtatccaggctcttgacaccatctggagaaggaattcaagagtgtgtcagaaaatgatgaaagta

SEQ ID NO: 614372 - DNA, 120 bp, Artificial Sequence
  ENSG00000176834_45 (sequence is synthesized)
caaagatttattgcaaagcgaaaaatacacactcaagaaaggggagtatgggtggactcaagacagagtccgatgggacttggggtttctaccttttgggtttctttttttttttttttt

SEQ ID NO: 614373 - DNA, 120 bp, Artificial Sequence
  ENSG00000176834_46 (sequence is synthesized)
tttttattttgaaatacttggctgacttacaaaagacttcccctcacacttgacatgattgacaaaagctgtttgcagtgtttcctgcacgatgaacaccaggaacctgggaagtgagaa

SEQ ID NO: 614374 - DNA, 78 bp, Artificial Sequence
  ENSG00000176834_47 (sequence is synthesized)
ggctttcaggctgactgccacccgccccatggggaacctatctccactgctatggccagctatttttttcgagccagg

SEQ ID NO: 614375 - DNA, 120 bp, Artificial Sequence
  ENSG00000176834_48 (sequence is synthesized)
ctacaggcgtgcaccaccacgcctagctaatttctaaaatttttttgtagagacggtctctacaatcgcttgagcccaggctggtcttaaactcctggacccaagcgatcctcctgtctc

SEQ ID NO: 614376 - DNA, 120 bp, Artificial Sequence
  ENSG00000176834_49 (sequence is synthesized)
ctatcacctgtcatattgagtcagttttcttatttgttcctctagtaaatgtttgcctgattaagaacctgtcaggttgaagtggatgttactggatattaatggtttttcctttctctc

SEQ ID NO: 614377 - DNA, 120 bp, Artificial Sequence
  ENSG00000176834_50 (sequence is synthesized)
ttcagtaggaaacacttccaggtgagtgttccctagaatcaaaccaaacacccattcccgcatctgtcttcacttctgttttgttcccttcctttcacaagaacaataatagcaactacc

SEQ ID NO: 614378 - DNA, 120 bp, Artificial Sequence
  ENSG00000176834_51 (sequence is synthesized)
cttcaaagcggggtcttccgcctttacttttggaaaagctttttattttgaaatacttggctgacttacaaaagacttcccctcacacttgacatgattgacaaaagcctccggccagct

SEQ ID NO: 614379 - DNA, 120 bp, Artificial Sequence
  ENSG00000176834_52 (sequence is synthesized)
gagttctcgggaacagcggctcggcctgcaaggctgttgtttcaagaaatgaaaatgaagggcgccctggaataggttcgccgaagagagagcaacatggcctgtcgcggtggctcatgc

SEQ ID NO: 614380 - DNA, 90 bp, Artificial Sequence
  ENSG00000176834_53 (sequence is synthesized)
gacaaggcctctgggaagcaagccatcgtgtggcagaggcccaggtggcaaggaaccaagggcggcttctggccaacagccagcgaggac

SEQ ID NO: 614381 - DNA, 120 bp, Artificial Sequence
  ENSG00000176834_54 (sequence is synthesized)
gctacgaaaaaagaattggaggggtgcttacaaaaatatgtagaatgtaaaaagattgaactatttatatatatttgaatttaattcaccagcatgcctactgtgcatgcctactgtgtg

SEQ ID NO: 614382 - DNA, 120 bp, Artificial Sequence
  ENSG00000176834_55 (sequence is synthesized)
gcgtcctcgtctgcctcggggcgctcctggccggctgggtcgccgtaggttgaactcgccttacacctgtaaccggtggacttccctacacacctttgcaagtcttcctgtgccgaccag

SEQ ID NO: 614383 - DNA, 120 bp, Artificial Sequence
  ENSG00000176834_56 (sequence is synthesized)
gcgctactttttgtgttcccgggtctgctccacccaacgggtctcctcttgcacgtttctggagatgggttgtaaagtatgctggagcttcttagcagcaagtgccaagagttcctaatt

SEQ ID NO: 614384 - DNA, 120 bp, Artificial Sequence
  ENSG00000176834_57 (sequence is synthesized)
tctagatttccagtttatctggaaaaatctgaaggtctggcaacacggggcctgctttcccagttggaattgggcagtggtcatcctcttatctagggcatatgagcccaaatttgttcc

SEQ ID NO: 614385 - DNA, 120 bp, Artificial Sequence
  ENSG00000176834_58 (sequence is synthesized)
acctctccctgttgtaatatttgccccgccaccttcagtcatgggtgttacctgctggccctgcaggcatttggctgagtaatcactgtgctggggtgtgggtgatgggggaggacagtt

SEQ ID NO: 614386 - DNA, 120 bp, Artificial Sequence
  ENSG00000176834_59 (sequence is synthesized)
cctagttggtcatctctggacgtgaaaggtggttgtcaagtattcccatctccccagctgtttgcagtgtttcctgcacgatgaacaccaggaacctgggaagtgagaagaaccctggga

SEQ ID NO: 614387 - DNA, 120 bp, Artificial Sequence
  ENSG00000176834_60 (sequence is synthesized)
agctattttgatgcccagacctgcttcacctttgtgtatgatgccagggggcttcctgagcttggtgtatttttgttgtgtgtttgttttttaagttgggagtttttggggaaaaaaatt

SEQ ID NO: 614388 - DNA, 120 bp, Artificial Sequence
  ENSG00000176834_61 (sequence is synthesized)
tttctcctgacattcaatgccagacaacttatatgcatccactagctaccccggattgtaaatcctaggttattcttgggaaaagttgctttaaaaaaataaataaatgtttgggtataa

SEQ ID NO: 614389 - DNA, 83 bp, Artificial Sequence
  ENSG00000176834_62 (sequence is synthesized)
tgggtgtgggatttagtatattaatgagtgtataatgaggtccttggtgaaacctacatcaaatccagcaccgtgttgggtcc

SEQ ID NO: 614390 - DNA, 120 bp, Artificial Sequence
  ENSG00000176834_63 (sequence is synthesized)
tggtccacaccctggttttttagggtcttattggccccttacttctgcagcaaaagtttccttttgctagtcatgtgaaactgccacctggaattttctattctctagtgaccaccctgt

SEQ ID NO: 614391 - DNA, 120 bp, Artificial Sequence
  ENSG00000176834_64 (sequence is synthesized)
attattcctgtctcactgggaccctaagaaattgggaattccaactacacatccaaaatagtttgactaaaactgttgaaaaaagaaaaaaataatggcataaagtattgcttgactaaa

SEQ ID NO: 614392 - DNA, 120 bp, Artificial Sequence
  ENSG00000176842_0 (sequence is synthesized)
agcatcttggcaggacctttgcaaaggcaaaagcagagccccccggtgcaaagagcgaggggaaaaaagagaaagcagcaagggaggggaggggaggggaaaaaaagcccagctggggcg

SEQ ID NO: 614393 - DNA, 80 bp, Artificial Sequence
  ENSG00000176842_1 (sequence is synthesized)
ctggggcgagcgaggcgcgcagaggagcgggcgcggcggtcgcagccggaggcgcgcgggaagccagcgaggaggcgccg

SEQ ID NO: 614394 - DNA, 120 bp, Artificial Sequence
  ENSG00000176842_2 (sequence is synthesized)
gccagaggccaggtgcccgcccgctcgccctcgcagggcgccgcccggctcgttggcggccgcggcgcggcgcgccccatgcccgtgtgtggccatgtcctatccgcagggctacttgta

SEQ ID NO: 614395 - DNA, 120 bp, Artificial Sequence
  ENSG00000176842_3 (sequence is synthesized)
ccagccgtccgcctcgctggcgctctactcgtgcccggcgtacagcaccagcgtcatttcggggccccgcacggatgagctcggccgctcttcttcgggctccgcgttctcgccctacgc

SEQ ID NO: 614396 - DNA, 120 bp, Artificial Sequence
  ENSG00000176842_4 (sequence is synthesized)
tggctcgactgccttcacggcgccctcgccgggctacaactcgcacctccagtacggcgccgaccccgcggccgccgccgccgccgccttctcctcgtacgtgggctctccctacgacca

SEQ ID NO: 614397 - DNA, 120 bp, Artificial Sequence
  ENSG00000176842_5 (sequence is synthesized)
cacacccggcatggcgggctccttggggtaccatccttacgcggcgcccctgggatcgtacccttacggggacccagcgtaccggaagaacgccacaagggacgccacggctaccctcaa

SEQ ID NO: 614398 - DNA, 120 bp, Artificial Sequence
  ENSG00000176842_6 (sequence is synthesized)
ggcctggctcaacgagcaccgcaagaacccctaccccaccaagggcgagaagatcatgctggccatcatcaccaagatgaccctcacccaggtgtccacctggttcgccaacgcgcgccg

SEQ ID NO: 614399 - DNA, 120 bp, Artificial Sequence
  ENSG00000176842_7 (sequence is synthesized)
gcgcctcaagaaagagaataaaatgacgtggacgccgcggaaccgcagcgaggacgaggaagaggaggagaacattgacctggagaagaacgacgaggacgagccccagaagcccgagga

SEQ ID NO: 614400 - DNA, 120 bp, Artificial Sequence
  ENSG00000176842_8 (sequence is synthesized)
caagggcgaccccgagggccccgaagcaggaggagctgagcagaaggcggcttcgggctgcgaacggcttcagggaccacccacccctgcaggcaaggagacggagggcagcctcagcga

SEQ ID NO: 614401 - DNA, 120 bp, Artificial Sequence
  ENSG00000176842_9 (sequence is synthesized)
gccggcgcccggcccgcatccagccgcgggcgaggtgcctccgggtcccggcgggccctcggttatccattcgccgcctccgccgccgcctcctgcggtgctcgccaagcccaaactgtg

SEQ ID NO: 614402 - DNA, 120 bp, Artificial Sequence
  ENSG00000176842_10 (sequence is synthesized)
ctcgccaagcccaaactgtggtctttggcagagatcgccacatcgtcggacaaggtcaaggacgggggcggcgggaacgagggctctccatgcccaccgtgtcccgggcccatagccggg

SEQ ID NO: 614403 - DNA, 120 bp, Artificial Sequence
  ENSG00000176842_11 (sequence is synthesized)
caagccctaggaggcagccgggcgtcgccggccccggcgccgtcacgctcgccctcggcgcagtgtccttttccaggcgggacggtgctgtcccggcctctctactacaccgcgcccttc

SEQ ID NO: 614404 - DNA, 120 bp, Artificial Sequence
  ENSG00000176842_12 (sequence is synthesized)
tatcccggctacacgaactatggctccttcggacaccttcatggccacccggggcccgggccaggccccacaaccggtccggggtctcatttcaatggattaaaccagaccgtgttgaac

SEQ ID NO: 614405 - DNA, 120 bp, Artificial Sequence
  ENSG00000176842_13 (sequence is synthesized)
cgagcggacgctttggctaaagacccgaaaatgttgcggagccagtctcagctagacctgtgcaaagactctccctatgaattgaagaaaggtatgtccgacatttaacgcgggctgcgt

SEQ ID NO: 614406 - DNA, 120 bp, Artificial Sequence
  ENSG00000176842_14 (sequence is synthesized)
cggtcccggacttttctaatttattaaaaacatggccttggcagttatttttccatcaccgagagagagagacagagagagaaaataaactacccctcctattcagaagtttatagttta

SEQ ID NO: 614407 - DNA, 120 bp, Artificial Sequence
  ENSG00000176842_15 (sequence is synthesized)
tggagatggatgacataaaaatgtaaacatctccacacaaaaaaaaaaatgtcttaaccaaccgaaaagaaaaattaaaaaaggatttgtattaaatcttattctgtatatttaatgtag

SEQ ID NO: 614408 - DNA, 120 bp, Artificial Sequence
  ENSG00000176842_16 (sequence is synthesized)
catttttgtatttaaattgataattcaatatctttgaagtaaattatgaaatcaagacacctgtacaggcatttaatgtttttttgtaatataaatatatacatttgtgtttcccccaaa

SEQ ID NO: 614409 - DNA, 120 bp, Artificial Sequence
  ENSG00000176842_17 (sequence is synthesized)
actgtttcatagttaaaaaatacaagtttaatttaattttttacacctattgattctgctgggtatgagctaaagtattacagaaaggaaacaggttatactcttagatttaaaaagtga

SEQ ID NO: 614410 - DNA, 120 bp, Artificial Sequence
  ENSG00000176842_18 (sequence is synthesized)
aagaaactgcaggcgcctttgtaaaatgcaaaatatttaattaaaagagattttaacataatgagagccactcattactttttagaagcctcaataaactgtccattgccttggtcaaaa

SEQ ID NO: 614411 - DNA, 120 bp, Artificial Sequence
  ENSG00000176842_19 (sequence is synthesized)
tcgtacgtgctgttgaaaaaagaaaaaaagagccttgacttcccttgttttccccccttgcgcccaacgtgcgtccgctcccccgccgagcgcggagtcgcctcagttgcccaggcctct

SEQ ID NO: 614412 - DNA, 120 bp, Artificial Sequence
  ENSG00000176842_20 (sequence is synthesized)
gccagatctgcgcacggggtacggacgtgcccgggcagatgggggcctacggggtgacaccgaggccgggacagcttcaggggccccagaaggacctgacccagaaattgaggtccccgc

SEQ ID NO: 614413 - DNA, 120 bp, Artificial Sequence
  ENSG00000176842_21 (sequence is synthesized)
tgccttctgaggagggggaggagttgctcctaggtctgaaccccgccagccttgccccgtaggaagctggagtgcgggcctcgtccacccacagaccccggggagcgcagggaaaagggt

SEQ ID NO: 614414 - DNA, 80 bp, Artificial Sequence
  ENSG00000176845_0 (sequence is synthesized)
ggctccagcgggccgggatgggcgggcggccgcgcggaggacgcggggggcgcgcgacgtgaccacccggactcgaagcc

SEQ ID NO: 614415 - DNA, 80 bp, Artificial Sequence
  ENSG00000176845_1 (sequence is synthesized)
acgtgaccacccggactcgaagcccgccccgcccccgcccggctcgccggctccggggtctgctccgggggtcgcggacg

SEQ ID NO: 614416 - DNA, 120 bp, Artificial Sequence
  ENSG00000176845_2 (sequence is synthesized)
ccccgccgccgctcccgctgctgctcctgctcctggccgggctgctgggcggcgcgggcgcgcagtactccagcgaccggtgcagctggaaggggagcgggctgacgcacgaggcacaca

SEQ ID NO: 614417 - DNA, 120 bp, Artificial Sequence
  ENSG00000176845_3 (sequence is synthesized)
tgcagctggaaggggagcgggctgacgcacgaggcacacaggaaggaggtggagcaggtgtatctgcgctgtgcggcgggtgccgtggagtggatgtacccaacaggtgctctcatcgtt

SEQ ID NO: 614418 - DNA, 120 bp, Artificial Sequence
  ENSG00000176845_4 (sequence is synthesized)
aacctgcggcccaacaccttctcgcctgcccggcacctgaccgtgtgcatcaggtccttcacggactcctcgggggccaatatttatttggaaaaaactggagaactgagactgctggta

SEQ ID NO: 614419 - DNA, 120 bp, Artificial Sequence
  ENSG00000176845_5 (sequence is synthesized)
ccagacggggacggcaggcccggccgggtgcagtgttttggcctggagcagggcggcctgttcgtggaggccacgccgcagcaggatatcggccggaggaccacaggcttccagtacgag

SEQ ID NO: 614420 - DNA, 120 bp, Artificial Sequence
  ENSG00000176845_6 (sequence is synthesized)
ctggttaggaggcacagggcgtcggacctgcacgagctgtctgcgccgtgccgtccctgcagtgacaccgaggtgctcctagccgtctgcaccagcgacttcgccgttcgaggctccatc

SEQ ID NO: 614421 - DNA, 120 bp, Artificial Sequence
  ENSG00000176845_7 (sequence is synthesized)
cccacgagcctgagcggcaggactcagccatccacctgcgcgtgagcagactctatcggcagaaaagcagggtcttcgagccggtgcccgagggtgacggccactggcaggggcgcgtca

SEQ ID NO: 614422 - DNA, 120 bp, Artificial Sequence
  ENSG00000176845_8 (sequence is synthesized)
ggacgctgctggagtgtggcgtgcggccggggcatggcgacttcctcttcactggccacatgcacttcggggaggcgcggctcggctgtgccccacgcttcaaggacttccagaggatgt

SEQ ID NO: 614423 - DNA, 120 bp, Artificial Sequence
  ENSG00000176845_9 (sequence is synthesized)
acagggatgcccaggagagggggctgaacccttgtgaggttggcacggactgactccgtgggccgctgcccttcctctcctgatgagtcacaggctgcggtgggcgctgcggtcctggtg

SEQ ID NO: 614424 - DNA, 120 bp, Artificial Sequence
  ENSG00000176845_10 (sequence is synthesized)
gggccgtgcggtgagggccgcgcgctgggagccgcatgccctgggcccaggcctgaccctggtaccgaagctgtggacgttctcgccacactcaaccccatgagcttccagccaaggatg

SEQ ID NO: 614425 - DNA, 120 bp, Artificial Sequence
  ENSG00000176845_11 (sequence is synthesized)
ccctggccgattggaaatgctgtaaaatgcaaactaagttattatatttttttttggtaaaaaagaaatgtccataggaaacaaattcccgtgtcttaaaacgccttggtgtgccgtctg

SEQ ID NO: 614426 - DNA, 120 bp, Artificial Sequence
  ENSG00000176845_12 (sequence is synthesized)
atactgttctctaaagacgttaggagtcacggcatctggcctgcggttgggtgaagcactggccgttgggcacagtggatgtgtgaaaaggtgccattcagagttgttattctcatgacg

SEQ ID NO: 614427 - DNA, 120 bp, Artificial Sequence
  ENSG00000176845_13 (sequence is synthesized)
gaagttttggagccaaataatacgttttttattttcattttatttttaaaggatgagctttggtccttttcaggccgccggttgtttccgttcccgagaataaagacgaggatccgacca

SEQ ID NO: 614428 - DNA, 120 bp, Artificial Sequence
  ENSG00000176845_14 (sequence is synthesized)
ttctgtttagcatgtatgagggtgaacttagcttgctactcacacactactcaccctgtggaggaagttcgcctcgcttttgtggtgagtcttgctgtaatgatagcttatatttacaaa

SEQ ID NO: 614429 - DNA, 120 bp, Artificial Sequence
  ENSG00000176845_15 (sequence is synthesized)
taccgtcggcagtgcagggtcttcaggcttgcagaaaacggtcaagtcattactttgagaaatgtacaaacatctatgcttaatgaggtgctaaaagacaaaactcatctacaacctcct

SEQ ID NO: 614430 - DNA, 120 bp, Artificial Sequence
  ENSG00000176845_16 (sequence is synthesized)
tccccccaaactgccaacactctggattaacttaaaagctgctctctgggcaggttgcatcccagggctcctccttcacacgtggtggggccccaccttcgctttacctctagcgtccca

SEQ ID NO: 614431 - DNA, 120 bp, Artificial Sequence
  ENSG00000176845_17 (sequence is synthesized)
gccctcgtggtcatctggaaccagggttggtacacagggcctgctggcattcctgtgatactccgtgatattctggaggaatccatcccttccctggggctccatcccactgccccagca

SEQ ID NO: 614432 - DNA, 120 bp, Artificial Sequence
  ENSG00000176845_18 (sequence is synthesized)
cctccagccaccctgattcagggacatcgcagagattggtgtttgacgctacggcagcagaggcgcagactcttgagtgttggagggtgtctggagggcctggggacaagcaccgcctgc

SEQ ID NO: 614433 - DNA, 120 bp, Artificial Sequence
  ENSG00000176845_19 (sequence is synthesized)
actcccgggagctcggccccgccccaccatggctcttggtgcaggtgcactggaaggaactgggtggggcccttgtgccgaagggcggagatggcgccggcctgcctcacgggcaggggt

SEQ ID NO: 614434 - DNA, 120 bp, Artificial Sequence
  ENSG00000176845_20 (sequence is synthesized)
ccgtgtggcacctgtggccggcagcgggtgggtccaggagccgccatcatttggagcgggtatcgtcctcactgactctctgtgggtgcgggtggggtgtgtgacgggagctccgggcct

SEQ ID NO: 614435 - DNA, 120 bp, Artificial Sequence
  ENSG00000176845_21 (sequence is synthesized)
tccttttgggtgccgctgccgtcgcgacccagggaagtgggcagcagagctgtggggagtgtctgcccttcgaggaagctgggaaatgagggtggtcccggcgccgtgggccgtggagcg

SEQ ID NO: 614436 - DNA, 120 bp, Artificial Sequence
  ENSG00000176853_0 (sequence is synthesized)
agagccatttccggcggcccgaaactaggaagaaacttggagctgttcaggcgatccagcctccaatcgctgctgctcttgtactcggttggcccgggcggcgctgaactgtcgggagcc

SEQ ID NO: 614437 - DNA, 120 bp, Artificial Sequence
  ENSG00000176853_1 (sequence is synthesized)
taggccatggggcagcctgggccttctgcagtgtgaggcgcggggcctcccgcgtcgctccgctgacaggctgcgggcgggcaggcgggaggcgtagtgtgggtcgcggtggcggccccg

SEQ ID NO: 614438 - DNA, 120 bp, Artificial Sequence
  ENSG00000176853_2 (sequence is synthesized)
gccgccggccctggccgcggcatcatgaacatagacgtggagttccacatccggcacaactacccctggaacaagttgccggccaacgtgagacagagtcttggaaattcacagagagaa

SEQ ID NO: 614439 - DNA, 120 bp, Artificial Sequence
  ENSG00000176853_3 (sequence is synthesized)
tatgaaaagcaggttgtcctgtacagtatccgcaatcagttacgatatagaaataacttagttaaacatgtcaagaaagatgaacgcagatactatgaggaactgctaaagtacagccga

SEQ ID NO: 614440 - DNA, 120 bp, Artificial Sequence
  ENSG00000176853_4 (sequence is synthesized)
gatcatctcatgctgtacccttaccatctatcggatattatggtgaaaggcttgaggataacaccattttcatattatactgggattatggaggatattatgaacagtgagaaaagttat

SEQ ID NO: 614441 - DNA, 120 bp, Artificial Sequence
  ENSG00000176853_5 (sequence is synthesized)
gattcattgcccaattttactgctgctgactgtctaaggcttcttggcataggaagaaaccagtatattgatcttatgaatcagtgtagatcatcaaaaaaattcttcagaaggaaaaca

SEQ ID NO: 614442 - DNA, 120 bp, Artificial Sequence
  ENSG00000176853_6 (sequence is synthesized)
gcccgtgatcttctaccaataaagccagtggaaattgccatagaggcgtggtgggtggtgcaggctggctatatcacagaagatgacatcaagatatgcactttgcctgagaaatgcgct

SEQ ID NO: 614443 - DNA, 120 bp, Artificial Sequence
  ENSG00000176853_7 (sequence is synthesized)
gttgataagatcatcgattcaggccctcaactctctggatcactagattacaatgtagtacatagtttgtataacaaaggatttatttatctggatgtaccaatatctgatgacagttgt

SEQ ID NO: 614444 - DNA, 120 bp, Artificial Sequence
  ENSG00000176853_8 (sequence is synthesized)
atagcagttccacctcttgaaggttttgtaatgaatcgagtgcaaggtgattattttgaaactctactctataagatatttgtttcaatagatgagcacacaaatgttgcagagcttgca

SEQ ID NO: 614445 - DNA, 120 bp, Artificial Sequence
  ENSG00000176853_9 (sequence is synthesized)
aatgtccttgagattgacttatccctggttaagaatgctgtttcaatgtattgccgattgggctttgcccataagaagggacaagtaattaatttggatcaacttcattcatcatggaag

SEQ ID NO: 614446 - DNA, 120 bp, Artificial Sequence
  ENSG00000176853_10 (sequence is synthesized)
aatgttccatccgtaaacagattaaagagtaccttagatccacagaagatgctcttgtcatgggatggaggggaaagtaggagtcctgtacaagaagcttcatcggcaactgacactgat

SEQ ID NO: 614447 - DNA, 120 bp, Artificial Sequence
  ENSG00000176853_11 (sequence is synthesized)
acaaatagtcaagaagatccagctgacacagccagtgtaagcagcctgagtctgtctacaggacacacgaagcgcatcgcattcctgtttgactccactcttactgccttcttaatgatg

SEQ ID NO: 614448 - DNA, 120 bp, Artificial Sequence
  ENSG00000176853_12 (sequence is synthesized)
ggaaatctttcaccaaacttgaaaagtcatgcagtcacaatgtttgaagtaggcaaactctcagatgagtctctggacagctttcttatagaactagaaaaggttcagagcactggtgaa

SEQ ID NO: 614449 - DNA, 120 bp, Artificial Sequence
  ENSG00000176853_13 (sequence is synthesized)
ggagaagcacagagatattttgatcatgcacttactctgagaaacacaatactgtttctgcgtcataacaaagatctagttgcgcaaactgcacagccagaccaacccaattatggtttt

SEQ ID NO: 614450 - DNA, 120 bp, Artificial Sequence
  ENSG00000176853_14 (sequence is synthesized)
cctctggatctcttacgctgtgaaagccttcttggtttggaccctgcaacttgcagcagagttctaaacaaaaattacacgctgcttgtttccatggctcccctcaccaatgaaatccgg

SEQ ID NO: 614451 - DNA, 120 bp, Artificial Sequence
  ENSG00000176853_15 (sequence is synthesized)
cctgtcagcagctgcacccctcagcatattggaccagctatcccagaagtcagctctgtctggtttaaactgtacatttatcatgtcactggacaaggaccaccatcccttttattgtcc

SEQ ID NO: 614452 - DNA, 120 bp, Artificial Sequence
  ENSG00000176853_16 (sequence is synthesized)
aaaggtacaagacttcgaaaactgccagatatatttcagagttatgatcgattgctaataacatcttggggtcatgatcctggagtagttcctacctcaaatgtgctcacgatgttgaat

SEQ ID NO: 614453 - DNA, 120 bp, Artificial Sequence
  ENSG00000176853_17 (sequence is synthesized)
gatgctttaacacattctgcagttttaattcaggggcatggtctgcatgggataggagaaactgtccatgtcccatttccatttgatgaaacagaactacaaggagagttcactcgtgtc

SEQ ID NO: 614454 - DNA, 120 bp, Artificial Sequence
  ENSG00000176853_18 (sequence is synthesized)
aatatgggtgttcataaagcattgcagatactaaggaacagagtggacttacagcatctctgtggatatgtcaccatgttgaatgcttccagccaacttgcagatagaaaactcagtgat

SEQ ID NO: 614455 - DNA, 120 bp, Artificial Sequence
  ENSG00000176853_19 (sequence is synthesized)
gcttctgatgagagaggagaacctgatttggcttctggctcagatgtaaatgggagtacagagtcatttgaaatggtcattgaggaagcaactatagattcagcaacaaagcaaacctct

SEQ ID NO: 614456 - DNA, 120 bp, Artificial Sequence
  ENSG00000176853_20 (sequence is synthesized)
ggtgccacaacagaagcagattgggttcctctcgagctgtgctttggaattccactgttcagttccgaattaaaccggaaagtttgtaggaaaattgctgcacatggcctttgcagaaaa

SEQ ID NO: 614457 - DNA, 120 bp, Artificial Sequence
  ENSG00000176853_21 (sequence is synthesized)
gagagccttcaaaacctcttacattccagtagaaaactctctctgcaagtccttaactttgttcactcattccaggaaggtgcttcaatattggatattcacacagagcccagtttttca

SEQ ID NO: 614458 - DNA, 120 bp, Artificial Sequence
  ENSG00000176853_22 (sequence is synthesized)
agtttgctttcacagtcatcgtgtgctgacatgggtgttccacttcctgcaaaaaacttaatatttaaagatggtgtcttatcagaatggagtggacggtcaccttcctcacttcttatt

SEQ ID NO: 614459 - DNA, 120 bp, Artificial Sequence
  ENSG00000176853_23 (sequence is synthesized)
catttgcaataatttggttacaccatttgttgctcacactttctgccttttttctttcttaacgttagctttatagtgtcagccactaaaaagcatcctgctgctgcagtgcaattcttg

SEQ ID NO: 614460 - DNA, 120 bp, Artificial Sequence
  ENSG00000176853_24 (sequence is synthesized)
cttaactaatattaaaagttggggaacatattcatgttttctgaagttttgctcattattgcacatcttattgcgacaaagtgctttttagcagccagcactgtattttttaccttgaga

SEQ ID NO: 614461 - DNA, 120 bp, Artificial Sequence
  ENSG00000176853_25 (sequence is synthesized)
caatctgcatttcttttataaaactaagtatatactttataggctttatgatgactgttatgtttataagcagtcactatgaaaattgcaatggtaattttatatgttagtttatcaaac

SEQ ID NO: 614462 - DNA, 120 bp, Artificial Sequence
  ENSG00000176853_26 (sequence is synthesized)
ataaatcttgtttaattttatattttgttacctatactttgggggatcaagggaagagatggaactcttcctctgaaaaggcttcttggtacttaaagtagtaaaactataaaacaataa

SEQ ID NO: 614463 - DNA, 120 bp, Artificial Sequence
  ENSG00000176853_27 (sequence is synthesized)
acatccagtattgagagatgatatgatagggcattatgaattcctatgggtgtctgtaaattatgtatgtcagttggacattgtagaaggtatgtaaatcagcatagttgtgtataactt

SEQ ID NO: 614464 - DNA, 120 bp, Artificial Sequence
  ENSG00000176853_28 (sequence is synthesized)
aaccttgatttataaggtcttaagattatgactattcattgacatctcatgagaagctttagaagactttctatttttaaacaccatttatatgtggacttctgttgtcactgactttgg

SEQ ID NO: 614465 - DNA, 120 bp, Artificial Sequence
  ENSG00000176853_29 (sequence is synthesized)
gctttatattttcatagagtctttatggaaaaaatagaatttattttccactcttgtagctatagctgctgcacactttcaccctgatttatttttttgtttcttagctttgatgttttc

SEQ ID NO: 614466 - DNA, 120 bp, Artificial Sequence
  ENSG00000176853_30 (sequence is synthesized)
aaaccaaggattgtgattttaggttagaattacatattagaagcattaagactatgtctttggatcagaatgctttagtgataaacctactttgaagacatactcttaagcaatctggat

SEQ ID NO: 614467 - DNA, 120 bp, Artificial Sequence
  ENSG00000176853_31 (sequence is synthesized)
cttaaatttatgtgaatacttttttagaaaatgataaagaaaaatggaattacttcaaagtgtttcttgagtcattgattcttttagcatctcaaatgttaattagaataattggaatca

SEQ ID NO: 614468 - DNA, 120 bp, Artificial Sequence
  ENSG00000176853_32 (sequence is synthesized)
ctttttagacttttcaagttaccttccttgggaagtttgtgcagtgttatagtttagtttagctcctcttacagggtaatggtttgctagtttaaaactgtaaccaaacgaactggtcag

SEQ ID NO: 614469 - DNA, 120 bp, Artificial Sequence
  ENSG00000176853_33 (sequence is synthesized)
acaacatatatctaaaacacttaaaatgttaggaagtttgggaatgttataacctaaacgtttttgctggtaactttttgttatttatagatatttgtgtatttaacatacatacttcag

SEQ ID NO: 614470 - DNA, 120 bp, Artificial Sequence
  ENSG00000176853_34 (sequence is synthesized)
gaaatatatgcctttcctaaaacttaaccatgcattcaataccatggcctatctatagaattgaatattttggaccatgttatctgtggcacagtcagtgctgtgtttgaggtaaatgca

SEQ ID NO: 614471 - DNA, 120 bp, Artificial Sequence
  ENSG00000176853_35 (sequence is synthesized)
gtaacggttagttttctactttgtcttatagaaggtagaaaccatgtgtatgttatgtttgtctataaaagaaaaaatactaatattaaataatttcttacgactctgagtcactcactt

SEQ ID NO: 614472 - DNA, 120 bp, Artificial Sequence
  ENSG00000176853_36 (sequence is synthesized)
atttttccaataattgatattgtacattcctagtgccattaggtatgtatgtatgtaacttttacagtttttcagctgaaagttgtaagtattttttttttttgatcggggctctttaat

SEQ ID NO: 614473 - DNA, 120 bp, Artificial Sequence
  ENSG00000176853_37 (sequence is synthesized)
ctcattttaatttcctttgtttgaactgtagttattttatttattcctatattaaccatctaaaccaactgtaatgacatgtacactaatacagaattgaacatttgtagttgttggcag

SEQ ID NO: 614474 - DNA, 120 bp, Artificial Sequence
  ENSG00000176853_38 (sequence is synthesized)
tgaacccagttgttggtgaatttaaagcttaaaatatgggaatgatttgctgctatatttcctttgagagagaaaggaggaagaaatagaacctaatagtgatcatgaattttagggaaa

SEQ ID NO: 614475 - DNA, 120 bp, Artificial Sequence
  ENSG00000176853_39 (sequence is synthesized)
gtaccgaagaaccatggggtcccctctggtttcttgtgttgaatgaggcaagggtaatcatctgattccgagctgaagacctctggtcctcttaaggagggagagtgcatttttagagct

SEQ ID NO: 614476 - DNA, 120 bp, Artificial Sequence
  ENSG00000176853_40 (sequence is synthesized)
tttagcaaaatgtgaaaagctgatgtttgcgccttgctttgtgaatttggctttgttttacttatacattaactcatgtaatctcttaaatcttacaagcattgatccatttcaacaaaa

SEQ ID NO: 614477 - DNA, 120 bp, Artificial Sequence
  ENSG00000176853_41 (sequence is synthesized)
aggtaaatttaaaatgcagactttgttatttgccaaagaagattcatgaaaaatttacgtccaattattttgcaaatagttaatttcatttggctttttaccatgttccttcctttcttt

SEQ ID NO: 614478 - DNA, 120 bp, Artificial Sequence
  ENSG00000176853_42 (sequence is synthesized)
ttcccgcttccttaatgtaatttaaaccctggcaaacattctttagaaaccaagaggaaagaaagaacaaatatcaaaaaagacatagaatttaatattgatacaatttcacctctaaaa

SEQ ID NO: 614479 - DNA, 120 bp, Artificial Sequence
  ENSG00000176853_43 (sequence is synthesized)
tggatttgaagaaatgcaactttatatcaaaaaatgtcatctgatttcctttgtttcttttttaaattatgtaatcagatgattttatgtttttttttcaggggagcggaatattggttt

SEQ ID NO: 614480 - DNA, 120 bp, Artificial Sequence
  ENSG00000176853_44 (sequence is synthesized)
cttttacttgttgttttcagttttctctgccattcatgtttcttttttgtgttcagtgtttcaaatacaatttgtatttaaggattttaaaataccaaactgtaactgagtacagtggat

SEQ ID NO: 614481 - DNA, 120 bp, Artificial Sequence
  ENSG00000176853_45 (sequence is synthesized)
cgttttctgttaggatgttaatattatacaatgaaatctataaagtgttgtcaatttgattattgacacatataacatgtttacaaataaactgtggtattgatcaagttactatgaaaa

SEQ ID NO: 614482 - DNA, 120 bp, Artificial Sequence
  ENSG00000176853_46 (sequence is synthesized)
atggaagaatgttccatccgtaaacagattaaaaggtggggtttcaccatgttagccaggctggtgtcgaactcctggccccaactgatccacccaccttggccttccaaagtgttggga

SEQ ID NO: 614483 - DNA, 120 bp, Artificial Sequence
  ENSG00000176853_47 (sequence is synthesized)
aaccaaaaagtccaaatggtacttgtactgagctttaagtatgcacaacacttctgtgtttgtttttgagtcaccacagcagcaagatatgaaataaacattaattttattgtacaaatg

SEQ ID NO: 614484 - DNA, 120 bp, Artificial Sequence
  ENSG00000176853_48 (sequence is synthesized)
tctccatgtggggagatcataccattattacacttaaatgtcattattcttaacgttcttataaatgtatattaaaatttaagttaataatttatagtttggttaactttttatatgact

SEQ ID NO: 614485 - DNA, 120 bp, Artificial Sequence
  ENSG00000176853_49 (sequence is synthesized)
aagcccactggtggatatcagtggggcaggaggaatctatgaacttcaggttaagaaacccttgtcagttatatataatatatacataagtagatatatatgataaaaaaataagtttat

SEQ ID NO: 614486 - DNA, 120 bp, Artificial Sequence
  ENSG00000176853_50 (sequence is synthesized)
tctttgttctgtgccagtgctttattcaacagaaatgtgttaagtgtcttttatgggctgtgtgccatgctaggtgttagtttttggttatagcgcacttcccaataactaaagcgattc

SEQ ID NO: 614487 - DNA, 120 bp, Artificial Sequence
  ENSG00000176853_51 (sequence is synthesized)
tccactgctgggatgggctgtctgttgtggcagcgaaggccagtgctctggacttcttgtttttcccccatccccaaggaaagaaagaatattctagacttgatttataggtaaactttt

SEQ ID NO: 614488 - DNA, 120 bp, Artificial Sequence
  ENSG00000176853_52 (sequence is synthesized)
ttacttcattcattcagttggtaaatgcttgaccctgacctatgccagattctttgctgagtgctgtggaaacagtgatgtgtaagatactaatggaacttagagaatgttgtgggagac

SEQ ID NO: 614489 - DNA, 120 bp, Artificial Sequence
  ENSG00000176853_53 (sequence is synthesized)
aataatcagataaatattaagatatataagttctaaaagattttaaaaagtactttgaagaagccaactatgatgaaatctgcaggtagacctaatttcaataggtgcaggataatataa

SEQ ID NO: 614490 - DNA, 120 bp, Artificial Sequence
  ENSG00000176853_54 (sequence is synthesized)
gctgaagccaaaaagttggaaaagaatattccggcagagcttaggtctgtacttcctgtgtctgggaaatgtccagtgaacaaagaaacaaatgaagcccagtgtggcagaaacttcatg

SEQ ID NO: 614491 - DNA, 120 bp, Artificial Sequence
  ENSG00000176853_55 (sequence is synthesized)
aaagaggggtagaagcaagaggtaaggttgaagaagagggccggagcacggtgtgcagggccttctggcatatgttagagaactagtattttacgttgagtgcaaagagaaatgattaaa

SEQ ID NO: 614492 - DNA, 120 bp, Artificial Sequence
  ENSG00000176853_56 (sequence is synthesized)
gacttttaaacaggggagagaggttatttctgaaggactattttataaaaataggcaaaaatggaaattttataaggatgcaataaatggaaaaatttcaaaattctgtcaatactggcc

SEQ ID NO: 614493 - DNA, 80 bp, Artificial Sequence
  ENSG00000176871_0 (sequence is synthesized)
catgtgacgggaagcagctgatggcctctccgggcggcggcggcggcctggccggggcgggcggcgcgggggcggcatga

SEQ ID NO: 614494 - DNA, 120 bp, Artificial Sequence
  ENSG00000176871_1 (sequence is synthesized)
gcgggggccgctcgcgtcctccatggaggccggagaggaaccgctgctgctggccgaactcaagcccgggcgcccccaccagtttgattggaagtccagctgtgaaacctggagcgtcgc

SEQ ID NO: 614495 - DNA, 120 bp, Artificial Sequence
  ENSG00000176871_2 (sequence is synthesized)
cttctccccagatggctcctggtttgcttggtctcaaggacactgcatcgtcaaactgatcccctggccgttggaggagcagttcatccctaaagggtttgaagccaaaagccgaagtag

SEQ ID NO: 614496 - DNA, 120 bp, Artificial Sequence
  ENSG00000176871_3 (sequence is synthesized)
caaaaatgagacgaaagggcggggcagcccaaaagagaagacgctggactgtggtcagattgtctgggggctggccttcagcccgtggccttccccacccagcaggaagctctgggcacg

SEQ ID NO: 614497 - DNA, 120 bp, Artificial Sequence
  ENSG00000176871_4 (sequence is synthesized)
ccaccacccccaagtgcccgatgtctcttgcctggttcttgctacgggactcaacgatgggcagatcaagatctgggaggtgcagacagggctcctgcttttgaatctttccggccacca

SEQ ID NO: 614498 - DNA, 120 bp, Artificial Sequence
  ENSG00000176871_5 (sequence is synthesized)
agatgtcgtgagagatctgagcttcacacccagtggcagtttgattttggtctccgcgtcacgggataagactcttcgcatctgggacctgaataaacacggtaaacagattcaagtgtt

SEQ ID NO: 614499 - DNA, 120 bp, Artificial Sequence
  ENSG00000176871_6 (sequence is synthesized)
atcgggccacctgcagtgggtttactgctgttccatctccccagactgcagcatgctgtgctctgcagctggagagaagtcggtctttctatggagcatgaggtcctacacgttaattcg

SEQ ID NO: 614500 - DNA, 120 bp, Artificial Sequence
  ENSG00000176871_7 (sequence is synthesized)
gaagctagagggccatcaaagcagtgttgtctcttgtgacttctcccccgactctgccctgcttgtcacggcttcttacgataccaatgtgattatgtgggacccctacaccggcgaaag

SEQ ID NO: 614501 - DNA, 120 bp, Artificial Sequence
  ENSG00000176871_8 (sequence is synthesized)
gctgaggtcactccaccacacccaggttgaccccgccatggatgacagtgacgtccacattagctcactgagatctgtgtgcttctctccagaaggcttgtaccttgccacggtggcaga

SEQ ID NO: 614502 - DNA, 120 bp, Artificial Sequence
  ENSG00000176871_9 (sequence is synthesized)
tgacagactcctcaggatctgggccctggaactgaaaactcccattgcatttgctcctatgaccaatgggctttgctgcacattttttccacatggtggagtcattgccacagggacaag

SEQ ID NO: 614503 - DNA, 120 bp, Artificial Sequence
  ENSG00000176871_10 (sequence is synthesized)
agatggccacgtccagttctggacagctcctagggtcctgtcctcactgaagcacttatgccggaaagcccttcgaagtttcctaacaacttaccaagtcctagcactgccaatccccaa

SEQ ID NO: 614504 - DNA, 120 bp, Artificial Sequence
  ENSG00000176871_11 (sequence is synthesized)
gaaagagttcctcacatacaggactttttaagcaacaccacatcttgtgcttctttgtagcagggtaaatcgtcctgtcaaagggagttgctggaataatgggccaaacatctggtcttg

SEQ ID NO: 614505 - DNA, 120 bp, Artificial Sequence
  ENSG00000176871_12 (sequence is synthesized)
cattgaaatagcatttctttgggattgtgaatagaatgtagcaaaaccagattccagtgtactagtcatggatctttctctccctggcatgtgaaagtcagtcttagaggaagagattcc

SEQ ID NO: 614506 - DNA, 120 bp, Artificial Sequence
  ENSG00000176871_13 (sequence is synthesized)
acttgcacggcaacagagccttacgttaaattttcagtccagttatgaacagcaagtgttgaactctttctgcttgttttgattcaaagtgcagttactgatgttgttttgattatgcaa

SEQ ID NO: 614507 - DNA, 120 bp, Artificial Sequence
  ENSG00000176871_14 (sequence is synthesized)
ctaagtaggcctccagagcctctctagtggcagagcagctcacactccctccgctgggaacgatggcttctgcctagtacctatccttgtgtttctgatgcagtggtagcattggttcaa

SEQ ID NO: 614508 - DNA, 120 bp, Artificial Sequence
  ENSG00000176871_15 (sequence is synthesized)
gttctctcctgctgtggtcagagttgcttcgatgttggccaagtgcttttcttcttgggctcccttctgacctgcaggacagttttcctggagccatttggtatgaggtattaatttagc

SEQ ID NO: 614509 - DNA, 120 bp, Artificial Sequence
  ENSG00000176871_16 (sequence is synthesized)
ttaactaaattacaggggactcagaggccgtgctcctgaccgatccagacactattactggctttttttttttttttttaacaatggtgtgcatgtgcaggaaatgacaaatttgtatgt

SEQ ID NO: 614510 - DNA, 120 bp, Artificial Sequence
  ENSG00000176871_17 (sequence is synthesized)
cagattatacaaggatgtattcttaaaccgcatgactattcagatggctactgagttatcagtggccatttattagcatcatatttatttgtattttctcaacagatgttaaggtacaac

SEQ ID NO: 614511 - DNA, 120 bp, Artificial Sequence
  ENSG00000176871_18 (sequence is synthesized)
tgtgtttttctcgattatctaaaaaccatagtacttaaattgaacagttgcaaagatgtcttaattgtgtaaagaattggtgtagtcatgactttagctgatactcttatgtacgagatc

SEQ ID NO: 614512 - DNA, 120 bp, Artificial Sequence
  ENSG00000176871_19 (sequence is synthesized)
tgtctctgctgtttaacttcattggattaatcagctggtttcaactctactgcgaaacaaaaatagctccttaaaagtactgttctccttcagtggcatgtagttatctaatcaagacac

SEQ ID NO: 614513 - DNA, 120 bp, Artificial Sequence
  ENSG00000176871_20 (sequence is synthesized)
ctcattcaaacaaaacctgccttaggaaaatttaatatattttaaattattttaaaagaaatacaacatcttattctttagctttcttaatcggtgctttatggaggccagtgtaacgtt

SEQ ID NO: 614514 - DNA, 120 bp, Artificial Sequence
  ENSG00000176871_21 (sequence is synthesized)
acatgactcgttgagaaagttgaggaatttcctctaccacctttgttgcttgaagaaaaacatgtcttttcaaaatgagaggctttcattgaagaaaagaaaaaaacaacagttaaaagc

SEQ ID NO: 614515 - DNA, 120 bp, Artificial Sequence
  ENSG00000176871_22 (sequence is synthesized)
aagtgacaactccctctgggaatggatagtgtggctctttgccacagggagacagtggctttcctgtgtctgggtggtcagggagcaagggggtgtgtgtttgaagcatgttgtctcctg

SEQ ID NO: 614516 - DNA, 120 bp, Artificial Sequence
  ENSG00000176871_23 (sequence is synthesized)
gtgattatgtgggacccctacaccggcgaaaggctgaggtcactccagtaaggactgaatccctgctatgacttttttgtggggggactgatgaggaacctgcctgggattagacatgtc

SEQ ID NO: 614517 - DNA, 120 bp, Artificial Sequence
  ENSG00000176871_24 (sequence is synthesized)
ggactgatgaggaacctgcctgggattagacatgtctcttttagaatctgggacatgggaggggacaagctggataaaaaggcacagtgggtctcttttgagacggagtctcgctctgtc

SEQ ID NO: 614518 - DNA, 71 bp, Artificial Sequence
  ENSG00000176871_25 (sequence is synthesized)
agtctcccaaactgctattataggcatgagccactgcgcctggcctggttcattgcttcttagtgatgcct

SEQ ID NO: 614519 - DNA, 120 bp, Artificial Sequence
  ENSG00000176871_26 (sequence is synthesized)
cactgcgcctggcctggttcattgcttcttagtgatgccttgtcaattaagccctctcaagtagctttgagtgtcttccagtctcctgattcaggtggctgtgtgtacttcttcggaatc

SEQ ID NO: 614520 - DNA, 120 bp, Artificial Sequence
  ENSG00000176871_27 (sequence is synthesized)
agcattatgaagcctcaatatgactctttatttccatttactaataactgtagtaacaagttcagaaagagcctcttatcgaaactgtgctttccaaaatgagtttcatgttctcacaaa

SEQ ID NO: 614521 - DNA, 120 bp, Artificial Sequence
  ENSG00000176871_28 (sequence is synthesized)
gcaactccaaaaatactgtatttgctttctccactttaccagtgtcatttttatctaaaacagtgtttcttgatgtttttttctgtgattgccccttaaggagccttttagacagttttt

SEQ ID NO: 614522 - DNA, 120 bp, Artificial Sequence
  ENSG00000176871_29 (sequence is synthesized)
tcctaatcgcccctgcccgccccaaagataatactataccaaatagagtttaataccgaacatatactgtgtgtctatttaggctattttaatatcgaagatatattgtatatctactta

SEQ ID NO: 614523 - DNA, 120 bp, Artificial Sequence
  ENSG00000176871_30 (sequence is synthesized)
tgtgctgaatgcatgtctatgctttgtatgtaaaaaaatgttaagatttttttggctaccaagaactagtttgtaccctcttggggtgaattgcccctgttaaaaatatttgatctagaa

SEQ ID NO: 614524 - DNA, 120 bp, Artificial Sequence
  ENSG00000176871_31 (sequence is synthesized)
aaggccctcttggtctggccctgggtcagctaatatccagatgttctctctccccatccagactcctcaggatctgggccctggaactgaaaactcccattgcatttgctcctatgacca

SEQ ID NO: 614525 - DNA, 120 bp, Artificial Sequence
  ENSG00000176871_32 (sequence is synthesized)
atgggctttgctgcacattttttccacatggtggagtcattgccacagggtatgtatttgttagctgaacagatgggtggtgctttctgctgagtataccatggagctttttaaggaaag

SEQ ID NO: 614526 - DNA, 120 bp, Artificial Sequence
  ENSG00000176871_33 (sequence is synthesized)
aaaccatctagaattttcttgcctatgaggaaagctttaaggcaattcaagattatataaaactcaaatgatcgattttgctaataacggtgtcccattttctctgaatatttaacctaa

SEQ ID NO: 614527 - DNA, 120 bp, Artificial Sequence
  ENSG00000176871_34 (sequence is synthesized)
atgtaattaaagatctgtaagtcatgccacctaatgggccaagttcacaagggagaataaaattgagatgatgcataatatatgggaaaccatttagggctaaaagaccactttacaggt

SEQ ID NO: 614528 - DNA, 80 bp, Artificial Sequence
  ENSG00000176884_0 (sequence is synthesized)
gcagtcgccgcagcgtccggaccggaaccagcgccgtccgcggagccgccgccgccgccgccgggccctttccaagccgg

SEQ ID NO: 614529 - DNA, 80 bp, Artificial Sequence
  ENSG00000176884_1 (sequence is synthesized)
cagcgccggccgcgtggggctgagccccgagcccccgcgcacgcttcagcgccccttccctcggccgacgtcccgggacc

SEQ ID NO: 614530 - DNA, 120 bp, Artificial Sequence
  ENSG00000176884_2 (sequence is synthesized)
cggaagccccgcgggggatgcgccgagggccccgcgttcgcgccgcgcagagccaggcccgcggcccgagcccatgagcaccatgcgcctgctgacgctcgccctgctgttctcctgctc

SEQ ID NO: 614531 - DNA, 120 bp, Artificial Sequence
  ENSG00000176884_3 (sequence is synthesized)
gccctgctgttctcctgctccgtcgcccgtgccgcgtgcgaccccaagatcgtcaacattggcgcggtgctgagcacgcggaagcacgagcagatgttccgcgaggccgtgaaccaggcc

SEQ ID NO: 614532 - DNA, 120 bp, Artificial Sequence
  ENSG00000176884_4 (sequence is synthesized)
aacaagcggcacggctcctggaagattcagctcaatgccacctccgtcacgcacaagcccaacgccatccagatggctctgtcggtgtgcgaggacctcatctccagccaggtctacgcc

SEQ ID NO: 614533 - DNA, 120 bp, Artificial Sequence
  ENSG00000176884_5 (sequence is synthesized)
atcctagttagccatccacctacccccaacgaccacttcactcccacccctgtctcctacacagccggcttctaccgcatacccgtgctggggctgaccacccgcatgtccatctactcg

SEQ ID NO: 614534 - DNA, 120 bp, Artificial Sequence
  ENSG00000176884_6 (sequence is synthesized)
gacaagagcatccacctgagcttcctgcgcaccgtgccgccctactcccaccagtccagcgtgtggtttgagatgatgcgtgtctacagctggaaccacatcatcctgctggtcagcgac

SEQ ID NO: 614535 - DNA, 120 bp, Artificial Sequence
  ENSG00000176884_7 (sequence is synthesized)
gaccacgagggccgggcggctcagaaacgcctggagacgctgctggaggagcgtgagtccaaggcagagaaggtgctgcagtttgacccagggaccaagaacgtgacggccctgctgatg

SEQ ID NO: 614536 - DNA, 120 bp, Artificial Sequence
  ENSG00000176884_8 (sequence is synthesized)
gaggcgaaagagctggaggcccgggtcatcatcctttctgccagcgaggacgatgctgccactgtataccgcgcagccgcgatgctgaacatgacgggctccgggtacgtgtggctggtc

SEQ ID NO: 614537 - DNA, 120 bp, Artificial Sequence
  ENSG00000176884_9 (sequence is synthesized)
ggcgagcgcgagatctcggggaacgccctgcgctacgccccagacggcatcctcgggctgcagctcatcaacggcaagaacgagtcggcccacatcagcgacgccgtgggcgtggtggcc

SEQ ID NO: 614538 - DNA, 120 bp, Artificial Sequence
  ENSG00000176884_10 (sequence is synthesized)
caggccgtgcacgagctcctcgagaaggagaacatcaccgacccgccgcggggctgcgtgggcaacaccaacatctggaagaccgggccgctcttcaagagagtgctgatgtcttccaag

SEQ ID NO: 614539 - DNA, 120 bp, Artificial Sequence
  ENSG00000176884_11 (sequence is synthesized)
tatgcggatggggtgactggtcgcgtggagttcaatgaggatggggaccggaagttcgccaactacagcatcatgaacctgcagaaccgcaagctggtgcaagtgggcatctacaatggc

SEQ ID NO: 614540 - DNA, 120 bp, Artificial Sequence
  ENSG00000176884_12 (sequence is synthesized)
acccacgtcatccctaatgacaggaagatcatctggccaggcggagagacagagaagcctcgagggtaccagatgtccaccagactgaagattgtgacgatccaccaggagcccttcgtg

SEQ ID NO: 614541 - DNA, 120 bp, Artificial Sequence
  ENSG00000176884_13 (sequence is synthesized)
tacgtcaagcccacgctgagtgatgggacatgcaaggaggagttcacagtcaacggcgacccagtcaagaaggtgatctgcaccgggcccaacgacacgtcgccgggcagcccccgccac

SEQ ID NO: 614542 - DNA, 120 bp, Artificial Sequence
  ENSG00000176884_14 (sequence is synthesized)
acggtgcctcagtgttgctacggcttttgcatcgacctgctcatcaagctggcacggaccatgaacttcacctacgaggtgcacctggtggcagatggcaagttcggcacacaggagcgg

SEQ ID NO: 614543 - DNA, 120 bp, Artificial Sequence
  ENSG00000176884_15 (sequence is synthesized)
gtgaacaacagcaacaagaaggagtggaatgggatgatgggcgagctgctcagcgggcaggcagacatgatcgtggcgccgctaaccataaacaacgagcgcgcgcagtacatcgagttt

SEQ ID NO: 614544 - DNA, 120 bp, Artificial Sequence
  ENSG00000176884_16 (sequence is synthesized)
tccaagcccttcaagtaccagggcctgactattctggtcaagaaggagattccccggagcacgctggactcgttcatgcagccgttccagagcacactgtggctgctggtggggctgtcg

SEQ ID NO: 614545 - DNA, 120 bp, Artificial Sequence
  ENSG00000176884_17 (sequence is synthesized)
gtgcacgtggtggccgtgatgctgtacctgctggaccgcttcagccccttcggccggttcaaggtgaacagcgaggaggaggaggaggacgcactgaccctgtcctcggccatgtggttc

SEQ ID NO: 614546 - DNA, 120 bp, Artificial Sequence
  ENSG00000176884_18 (sequence is synthesized)
gcgcatcctgggcatggtgtgggccggctttgccatgatcatcgtggcctcctacaccgccaacctggcggccttcctggtgctggaccggccggaggagcgcatcacgggcatcaacga

SEQ ID NO: 614547 - DNA, 120 bp, Artificial Sequence
  ENSG00000176884_19 (sequence is synthesized)
ccctcggctgaggaacccctcggacaagtttatctacgccacggtgaagcagagctccgtggatatctacttccggcgccaggtggagctgagcaccatgtaccggcatatggagaagca

SEQ ID NO: 614548 - DNA, 120 bp, Artificial Sequence
  ENSG00000176884_20 (sequence is synthesized)
caactacgagagtgcggcggaggccatccaggccgtgagagacaacaagctgcatgccttcatctgggactcggcggtgctggagttcgaggcctcgcagaagtgcgacctggtgacgac

SEQ ID NO: 614549 - DNA, 120 bp, Artificial Sequence
  ENSG00000176884_21 (sequence is synthesized)
tggagagctgtttttccgctcgggcttcggcataggcatgcgcaaagacagcccctggaagcagaacgtctccctgtccatcctcaagtcccacgagaatggcttcatggaagacctgga

SEQ ID NO: 614550 - DNA, 120 bp, Artificial Sequence
  ENSG00000176884_22 (sequence is synthesized)
caagacgtgggttcggtatcaggaatgtgactcgcgcagcaacgcccctgcgacccttacttttgagaacatggccggggtcttcatgctggtagctgggggcatcgtggccgggatctt

SEQ ID NO: 614551 - DNA, 120 bp, Artificial Sequence
  ENSG00000176884_23 (sequence is synthesized)
cctgattttcatcgagattgcctacaagcggcacaaggatgctcgccggaagcagatgcagctggcctttgccgccgttaacgtgtggcggaagaacctgcaggatagaaagagtggtag

SEQ ID NO: 614552 - DNA, 120 bp, Artificial Sequence
  ENSG00000176884_24 (sequence is synthesized)
agcagagcctgaccctaaaaagaaagccacatttagggctatcacctccaccctggcttccagcttcaagaggcgtaggtcctccaaagacacgagcaccgggggtggacgcggcgcttt

SEQ ID NO: 614553 - DNA, 120 bp, Artificial Sequence
  ENSG00000176884_25 (sequence is synthesized)
gcaaaaccaaaaagacacagtgctgccgcgacgcgctattgagagggaggagggccagctgcagctgtgttcccgtcatagggagagctgagactccccgcccgccctcctctgccccct

SEQ ID NO: 614554 - DNA, 120 bp, Artificial Sequence
  ENSG00000176884_26 (sequence is synthesized)
ccctcccccgcagacagacagacagacggacgggacagcggcccggcccacgcagagccccggagcaccacggggtcgggggaggagcacccccagcctcccccaggctgcgcctgcccg

SEQ ID NO: 614555 - DNA, 120 bp, Artificial Sequence
  ENSG00000176884_27 (sequence is synthesized)
ccggttggccggctggccggtccaccccgtcccggccccgcgcgtgcccccagcgtggggctaacgggcgccttgtctgtgtatttctattttgcagcagtaccatcccactgatatcac

SEQ ID NO: 614556 - DNA, 120 bp, Artificial Sequence
  ENSG00000176884_28 (sequence is synthesized)
gggcccgctcaacctctcagatccctcggtcagcaccgtggtgtgaggcccccggaggcgcccacctgcccagttagcccggccaaggacactgatgggtcctgctgctcgggaaggcct

SEQ ID NO: 614557 - DNA, 120 bp, Artificial Sequence
  ENSG00000176884_29 (sequence is synthesized)
gagggaagcccacccgccccagagactgcccaccctgggcctcccgtccgtccgcccgcccaccccgctgcctggcgggcagcccctgctggaccaaggtgcggaccggagcggctgagg

SEQ ID NO: 614558 - DNA, 120 bp, Artificial Sequence
  ENSG00000176884_30 (sequence is synthesized)
acggggcagagctgagtcggctgggcagggccgcagggcgctccggcagaggcagggccctggggtctctgagcagtggggagcgggggctaactggccccaggcggaggggcttggagc

SEQ ID NO: 614559 - DNA, 120 bp, Artificial Sequence
  ENSG00000176884_31 (sequence is synthesized)
agagacggcagccccatccttcccgcagcaccagcctgagccacagtggggcccatggccccagctggctgggtcgcccctcctcgggcgcctgcgctcctctgcagcctgagctccacc

SEQ ID NO: 614560 - DNA, 120 bp, Artificial Sequence
  ENSG00000176884_32 (sequence is synthesized)
ctcccctcttcttgcggcaccgcccacccacaccccgtctgccccttgaccccacacgccggggctggccctgccctcccccacggccgtccctgacttcccagctggcagcgcctcccg

SEQ ID NO: 614561 - DNA, 120 bp, Artificial Sequence
  ENSG00000176884_33 (sequence is synthesized)
ccgcctcgggccgcctcctccagactcgagagggctgagcccctcctctcctcgtccggcctgcagcccagaacgggcctccccgggggtccccggacgctggctcgggactgtcttcaa

SEQ ID NO: 614562 - DNA, 120 bp, Artificial Sequence
  ENSG00000176884_34 (sequence is synthesized)
ccctgccctgcaccttgggcacgggagagcgccacccgcccgcccccgccctcgctccgggtgcgtgaccggcccgccaccttgtacagaaccagcactcccagggcccgagcgcgtgcc

SEQ ID NO: 614563 - DNA, 120 bp, Artificial Sequence
  ENSG00000176884_35 (sequence is synthesized)
ttccccgtgcggcccgtgcgcagccgcgctctgcccctccgtccccagggtgcaggcgcgcaccgcccaacccccacctcccggtgtatgcagtggtgatgcctaaaggaatgtcacgca

SEQ ID NO: 614564 - DNA, 120 bp, Artificial Sequence
  ENSG00000176884_36 (sequence is synthesized)
gcactggctctggctctggtgggcaggactggagctaggagccatggccaggggcagtggtgagtgctcccagggcacgggggcagcaccggtggggggctgcctgcaggtggctgccca

SEQ ID NO: 614565 - DNA, 120 bp, Artificial Sequence
  ENSG00000176884_37 (sequence is synthesized)
ctgcaaagccggggccgagggaggccacgcaccctgctccaagcctccgcctggcccctctgtctccagagtcgcccgccggtacccattccataggaaggcaatcaggcagggtaagac

SEQ ID NO: 614566 - DNA, 120 bp, Artificial Sequence
  ENSG00000176884_38 (sequence is synthesized)
aggggcccgcctgtgtatggcacgtgagtccaagatgcattttgccctccgccgacccaagccccttgacacccttcggagacccccccctttcctgctatgtccttgtgctccgtgact

SEQ ID NO: 614567 - DNA, 120 bp, Artificial Sequence
  ENSG00000176884_39 (sequence is synthesized)
ctaatccgaattgggccaggtccggtcctgcctggtgcccaggttgtatccatgagaatttgccaccagcaagggcagccacggcccacctgggacagggtgggcagtgggcctgtacag

SEQ ID NO: 614568 - DNA, 120 bp, Artificial Sequence
  ENSG00000176884_40 (sequence is synthesized)
gcctaagggctcgtggcccgcggtcgagttccggttcactccgtctcttctctttctctgggtgccgtcctggagcctgtgtcctgagatgaagccgacagtgcggccagggctgctggg

SEQ ID NO: 614569 - DNA, 120 bp, Artificial Sequence
  ENSG00000176884_41 (sequence is synthesized)
ggatgggggttgctggaggctccacacctctcatccgcccgctcttgctcttggcccccacaggtcccctggggacctggccgctgccagcactggcgggcacaggccacctggccatca

SEQ ID NO: 614570 - DNA, 120 bp, Artificial Sequence
  ENSG00000176884_42 (sequence is synthesized)
gacctgaggccagagtcccgggagctgcctctgtcactccaattccacctcgacacctgcctccagccctcggccccttcctgaatcttggtgtgtgccccttgggggtcagtggcctcc

SEQ ID NO: 614571 - DNA, 120 bp, Artificial Sequence
  ENSG00000176884_43 (sequence is synthesized)
acgcagacagctggtgtggcctgaggggcaactcctccagtcctcagaggactcctcctcctcgggacgcctgtaagccagggccacccaggagccagggagccaggcggacctcccagg

SEQ ID NO: 614572 - DNA, 120 bp, Artificial Sequence
  ENSG00000176884_44 (sequence is synthesized)
aagagccagccgagagcccccaagcccagccccagcacgagcaaggtcaggcccgagaccccgggcaggagaagaggccaccctcgaacgtccgctgtcggcccgtctgtccagcacagg

SEQ ID NO: 614573 - DNA, 120 bp, Artificial Sequence
  ENSG00000176884_45 (sequence is synthesized)
gaggcaggcaggagcgagggcccaagtggccggccaggctgggcagcggcccatgcaggagcaggcgagggcaggtgtggccaccaccctagccatctaatcacttatacatattcattt

SEQ ID NO: 614574 - DNA, 120 bp, Artificial Sequence
  ENSG00000176884_46 (sequence is synthesized)
gggagagcaccccagtcccgcgtccgactccacctgccctgccctgcgtgtgtctcccgccccatcaccccgccccggaccctgggctcctgtggcccactctgcccctgtctccctgtg

SEQ ID NO: 614575 - DNA, 120 bp, Artificial Sequence
  ENSG00000176884_47 (sequence is synthesized)
ccatctcatactcccacccccaggtcatccctaatgacaggaagatcatctggccaggcggagagacagagaagcctcgagggtaccagatgtccaccagactgaaggtgggggccccac

SEQ ID NO: 614576 - DNA, 120 bp, Artificial Sequence
  ENSG00000176884_48 (sequence is synthesized)
cagaaacgcctggagacgctgctggaggagcgtgagtccaagagtaaaaaaaggaactatgaaaacctcgaccaactgtcctatgacaacaagcgcggacccaaggcagagaaggtgctg

SEQ ID NO: 614577 - DNA, 120 bp, Artificial Sequence
  ENSG00000176884_49 (sequence is synthesized)
caccctgggcctcccgtccgtccgcccgcccaccccgctgcctggcgggcagcccctgctggaccaagcccagaacgggcctccccgggggtccccggacgctggctcgggactgtcttc

SEQ ID NO: 614578 - DNA, 120 bp, Artificial Sequence
  ENSG00000176887_0 (sequence is synthesized)
gcagaaggagcgcgcgcgcctgggagagctcggggtccggcgcttgcggtaggagccacgagccggagagaggggtcccgggctgcctcgaccgccgtcgccaccgcctctcctgtcgcg

SEQ ID NO: 614579 - DNA, 120 bp, Artificial Sequence
  ENSG00000176887_1 (sequence is synthesized)
cagctcccaccgcgccggcggccgtcgtcgccgaagccaccacagccgctgtgtgcagcctggaagggggggcgggggggagggggggagccgcgaaagcggggtgccgaggactttgca

SEQ ID NO: 614580 - DNA, 120 bp, Artificial Sequence
  ENSG00000176887_2 (sequence is synthesized)
tgcaacttgcccaggaaggtggaggggtgggagggggagggggacctccgcacgagacccagcggcccgggttggagcgtccagccctgcagcggatcatggtgcagcaggcggagagct

SEQ ID NO: 614581 - DNA, 120 bp, Artificial Sequence
  ENSG00000176887_3 (sequence is synthesized)
tggaagcggagagcaacctgccccgggaggcgctggacacggaggagggcgaattcatggcttgcagcccggtggccctggacgagagcgacccagactggtgcaagacggcgtcgggcc

SEQ ID NO: 614582 - DNA, 120 bp, Artificial Sequence
  ENSG00000176887_4 (sequence is synthesized)
acatcaagcggccgatgaacgcgttcatggtatggtccaagatcgaacgcaggaagatcatggagcagtctccggacatgcacaacgccgagatctccaagaggctgggcaagcgctgga

SEQ ID NO: 614583 - DNA, 120 bp, Artificial Sequence
  ENSG00000176887_5 (sequence is synthesized)
aaatgctgaaggacagcgagaagatcccgttcatccgggaggcggagcggctgcggctcaagcacatggccgactaccccgactacaagtaccggccccggaaaaagcccaaaatggacc

SEQ ID NO: 614584 - DNA, 120 bp, Artificial Sequence
  ENSG00000176887_6 (sequence is synthesized)
cctcggccaagcccagcgccagccagagcccagagaagagcgcggccggcggcggcggcgggagcgcgggcggaggcgcgggcggtgccaagacctccaagggctccagcaagaaatgcg

SEQ ID NO: 614585 - DNA, 120 bp, Artificial Sequence
  ENSG00000176887_7 (sequence is synthesized)
gcaagaaatgcggcaagctcaaggcccccgcggccgcgggcgccaaggcgggcgcgggcaaggcggcccagtccggggactacgggggcgcgggcgacgactacgtgctgggcagcctgc

SEQ ID NO: 614586 - DNA, 120 bp, Artificial Sequence
  ENSG00000176887_8 (sequence is synthesized)
cgggcggcggcggcgcgggcaagacggtcaagtgcgtgtttctggatgaggacgacgacgacgacgacgacgacgacgagctgcagctgcagatcaaacaggagccggacgaggaggacg

SEQ ID NO: 614587 - DNA, 120 bp, Artificial Sequence
  ENSG00000176887_9 (sequence is synthesized)
aggaaccaccgcaccagcagctcctgcagccgccggggcagcagccgtcgcagctgctgagacgctacaacgtcgccaaagtgcccgccagccctacgctgagcagctcggcggagtccc

SEQ ID NO: 614588 - DNA, 120 bp, Artificial Sequence
  ENSG00000176887_10 (sequence is synthesized)
ccgagggagcgagcctctacgacgaggtgcgggccggcgcgacctcgggcgccgggggcggcagccgcctctactacagcttcaagaacatcaccaagcagcacccgccgccgctcgcgc

SEQ ID NO: 614589 - DNA, 120 bp, Artificial Sequence
  ENSG00000176887_11 (sequence is synthesized)
agcccgcgctgtcgcccgcgtcctcgcgctcggtgtccacctcctcgtccagcagcagcggcagcagcagcggcagcagcggcgaggacgccgacgacctgatgttcgacctgagcttga

SEQ ID NO: 614590 - DNA, 120 bp, Artificial Sequence
  ENSG00000176887_12 (sequence is synthesized)
atttctctcaaagcgcgcacagcgccagcgagcagcagctggggggcggcgcggcggccgggaacctgtccctgtcgctggtggataaggatttggattcgttcagcgagggcagcctgg

SEQ ID NO: 614591 - DNA, 120 bp, Artificial Sequence
  ENSG00000176887_13 (sequence is synthesized)
gctcccacttcgagttccccgactactgcacgccggagctgagcgagatgatcgcgggggactggctggaggcgaacttctccgacctggtgttcacatattgaaaggcgcccgctgctc

SEQ ID NO: 614592 - DNA, 120 bp, Artificial Sequence
  ENSG00000176887_14 (sequence is synthesized)
gctctttctctcggagggtgcagagctgggttccttgggaggaagttgtagtggtgatgatgatgatgataatgatgatgatgatggtggtgttgatggtggcggtggtagggtggaggg

SEQ ID NO: 614593 - DNA, 120 bp, Artificial Sequence
  ENSG00000176887_15 (sequence is synthesized)
gagagaagaagatgctgatgatattgataagatgtcgtgacgcaaagaaattggaaaacatgatgaaaattttggtggagttaaagtgaaatgagtagtttttaaacatttttcctgtcc

SEQ ID NO: 614594 - DNA, 120 bp, Artificial Sequence
  ENSG00000176887_16 (sequence is synthesized)
tttttttgtcccccctcccttcctttatcgtgtctcaaggtagttgcatacctagtctggagttgtgattattttcccaaaaaatgtgtttttgtaattactatttctttttcctgaaat

SEQ ID NO: 614595 - DNA, 120 bp, Artificial Sequence
  ENSG00000176887_17 (sequence is synthesized)
tcgtgattgcaacaaaggcagagggggcggggcgggggaggggaggtaggacccgctccggaaggcgctgtttgaagcttgtcggtctttgaagtctggaagacgtctgcagaggaccct

SEQ ID NO: 614596 - DNA, 120 bp, Artificial Sequence
  ENSG00000176887_18 (sequence is synthesized)
tttggcagcacaactgttactctagggagttggtggagatatttttttttcttaagagaacttaaagaactggtgatttttttttaacaaaaaaagggaccattgcaacttttgttaatt

SEQ ID NO: 614597 - DNA, 120 bp, Artificial Sequence
  ENSG00000176887_19 (sequence is synthesized)
tttttttttttttttttttttttggagggagaaaactgatgtcttctatgcatccgattcttaacaaaactgcagggagcttgaaaaaatgcagactgtacaaacgcttacaaaaaaaaa

SEQ ID NO: 614598 - DNA, 120 bp, Artificial Sequence
  ENSG00000176887_20 (sequence is synthesized)
tacaaaaaaaaaaactgtgaactgacttaagatcagagtttacttttcagatcaaattgtttatggttttacaaatgtgatttctacttgccaactttttttttgtaacttgttccctta

SEQ ID NO: 614599 - DNA, 120 bp, Artificial Sequence
  ENSG00000176887_21 (sequence is synthesized)
tacctccttgattgaataccagacagcctagacctcagtacaaaaggtattgaaacatttttgatacataacagacctcagtcttttttaaaaattaatatattttcaggcgtatttttg

SEQ ID NO: 614600 - DNA, 120 bp, Artificial Sequence
  ENSG00000176887_22 (sequence is synthesized)
tacagtgaaaagggaacattcttgctgtgttttttcagtaagactttcaggcacttcttcccttttgatttcttttttttcctctgttttttagcatgcaagtatgttggtacgttatgt

SEQ ID NO: 614601 - DNA, 120 bp, Artificial Sequence
  ENSG00000176887_23 (sequence is synthesized)
cctggtttaaaaaggattaaaattttaaaataatccttgcatctaaaggccttgtggtttaaaaaaaaaaagcaaacttttttttgtacagctatagtagagatttgttcaatatttgta

SEQ ID NO: 614602 - DNA, 120 bp, Artificial Sequence
  ENSG00000176887_24 (sequence is synthesized)
ggtaaagatttattgaaaatggtgatatagacctcagagctgttatcttagtttaaagattgtatatgtactgtactatagtaggactttatgtatctcatacgctgtgatgtggatggg

SEQ ID NO: 614603 - DNA, 120 bp, Artificial Sequence
  ENSG00000176887_25 (sequence is synthesized)
gccccagatggaaggtttgaaactggattctcgatttttagcaaaaaagaaaaaaaaaaggcacatagtttaaaaagtttctcattttgtgcaatataatctaaataaagtacagaccat

SEQ ID NO: 614604 - DNA, 120 bp, Artificial Sequence
  ENSG00000176887_26 (sequence is synthesized)
ctgcatattttgtagcaaatggtggcaaagcagactcaatgcactgtcgacatcattgcctgtttttttttttttttttttgtgctggaagtctgtatcttgacaattttaataaatcag

SEQ ID NO: 614605 - DNA, 120 bp, Artificial Sequence
  ENSG00000176887_27 (sequence is synthesized)
ctggaactgatagaaactcgcatcgccaatagtctctatggaagtcaaactggaggtcctgttgtcgcagagcattcggtggtgaggctgttgtgtgcgcggatgaggggaggtggcagg

SEQ ID NO: 614606 - DNA, 120 bp, Artificial Sequence
  ENSG00000176887_28 (sequence is synthesized)
agagaattctacatttagggggttaggctgaaaagtgttcaattagcaggctgatttctttttcctcttccgctagttgtgaaagacaggggaagggtgttctttctctctgccctccct

SEQ ID NO: 614607 - DNA, 120 bp, Artificial Sequence
  ENSG00000176887_29 (sequence is synthesized)
ttccatctccagctccccatttcctttctcacctcctcctccactccctgcctcttctccccacccatcctggcgggcgggctgcgcggaggctcgggagctggccggggaggggcggat

SEQ ID NO: 614608 - DNA, 120 bp, Artificial Sequence
  ENSG00000176887_30 (sequence is synthesized)
ggaggggcctgggttgccagctcccttggtcggggtcctgctcgctggggcttgtgtgttctctgcggcgggccgcgtccccgctgagcctcgcggtgacagccgcctttggcagcgagc

SEQ ID NO: 614609 - DNA, 120 bp, Artificial Sequence
  ENSG00000176887_31 (sequence is synthesized)
gctcggggcacttctatccccgcctctcaaagggtggggacagccgtttccagatttgaattttttctgttctttatttttaacgctgcatcttcgcgtgtgctcagaggtggttgttgg

SEQ ID NO: 614610 - DNA, 120 bp, Artificial Sequence
  ENSG00000176887_32 (sequence is synthesized)
cggagaacgccgccgcagtgtttgacctctagcggtgaagggggaaggggaagaggaaaggagagaagtggtcggtgtctgtttccttctgtcccccggggccgtggagctgtcggaggg

SEQ ID NO: 614611 - DNA, 120 bp, Artificial Sequence
  ENSG00000176887_33 (sequence is synthesized)
gcagggggcgcggggcgcggcgggacccaggctacgagcgggagggaggcgggagtcgggggaagacgcggcaggccggccgagggcaccccgaggaacatggcatggcctctgtgcgat

SEQ ID NO: 614612 - DNA, 120 bp, Artificial Sequence
  ENSG00000176887_34 (sequence is synthesized)
tggcatggcctctgtgcgatccgagtcgcggtctccggggtgcctgggagggccgaaccactggtgagggcgtggggagcagggggtggcagagggcacccgggcggtagtccgggacgc

SEQ ID NO: 614613 - DNA, 120 bp, Artificial Sequence
  ENSG00000176887_35 (sequence is synthesized)
gcaaggcagagccctgacgctccgggtccccgtgcctggctcttcttgcctcgccaccgcgtgctcctgggcgcgccccgccgcgggcccttgaggcgcgcggagacaccagcgctggct

SEQ ID NO: 614614 - DNA, 120 bp, Artificial Sequence
  ENSG00000176887_36 (sequence is synthesized)
cggggagggaagcctcggggctgcggggtgagaggaagaaagcaaacccggggagcaggcggctgccgcacccgcgcaccccgggccctcaccacgccctccccgcgcgccggctcaggg

SEQ ID NO: 614615 - DNA, 120 bp, Artificial Sequence
  ENSG00000176887_37 (sequence is synthesized)
gcgccggctcaggggctgccccggaatcagctccccggggccgccgcaacgaaggtggatccgcatcttgattgttctccgggagcctcctgggggctccggcggcggcgcgggcgcgac

SEQ ID NO: 614616 - DNA, 120 bp, Artificial Sequence
  ENSG00000176887_38 (sequence is synthesized)
ccatcccgctggcgctccccgctcgctgaaccccgtttgcctgtccacaccccctcgctccccaccatttttcctgaccggcctgtgtccccgagccctcgcggcaggcccgagcaggcg

SEQ ID NO: 614617 - DNA, 120 bp, Artificial Sequence
  ENSG00000176887_39 (sequence is synthesized)
cgggcacgcgcgccccgggctcccgccccccttccgagcatccgccgcctcttttctgctgggtctgggaggagggaggctgggaggccgctcggggcccagcgtgccagccccggagtt

SEQ ID NO: 614618 - DNA, 120 bp, Artificial Sequence
  ENSG00000176887_40 (sequence is synthesized)
ccggagttcagcctcccgagctgcggcgcccgcagcggaggaggttttcagtggctgattgaaactcactgcaaaatcaccacgactctttcacctactgagatgattgaccgaggtttg

SEQ ID NO: 614619 - DNA, 120 bp, Artificial Sequence
  ENSG00000176887_41 (sequence is synthesized)
gccttccatttttactgagatttggcgagaccgaatggaagcgtccgcacagtaactgcagctgctaggccagaggggccccggcgcccttcccgcctcccctcccgcttgcttttgcct

SEQ ID NO: 614620 - DNA, 120 bp, Artificial Sequence
  ENSG00000176887_42 (sequence is synthesized)
tactcgatcttaccaccacccctcccccggccccccgactgagaactcgggcctctcacccgccccccagcctcccgctctgggcgagcctcctccccagcccccacccctgggatgcga

SEQ ID NO: 614621 - DNA, 120 bp, Artificial Sequence
  ENSG00000176887_43 (sequence is synthesized)
agccagcaagcttttgctgcagatggacaggtttcttttctgtggctttttcctttcgataaaccatcagatttcagtagtacatttgggaaaagaaggggctgatggcgttaaccaggt

SEQ ID NO: 614622 - DNA, 120 bp, Artificial Sequence
  ENSG00000176887_44 (sequence is synthesized)
tctcaatatagaactggatttctggagttgtttaccttaccccacaccccctcaacatgtagactaatgcagccattggtggtacatttattttagccacggataattgaaccagcggtt

SEQ ID NO: 614623 - DNA, 120 bp, Artificial Sequence
  ENSG00000176887_45 (sequence is synthesized)
tacaattgacacgtgctccgtgctggtgattttatgtggcagccctctgctgcagttccgaaacttgttggcaacgtaaacccattgataggctgatctatgtattttgaaagcctgaaa

SEQ ID NO: 614624 - DNA, 120 bp, Artificial Sequence
  ENSG00000176887_46 (sequence is synthesized)
acttggcatgtcttttctgttttaatcatagatgaatcttggacattttctgtggtgaggtggaaactttaagtaaattagtaaagtaataatttggcttcagaatgggaagagatagtc

SEQ ID NO: 614625 - DNA, 120 bp, Artificial Sequence
  ENSG00000176887_47 (sequence is synthesized)
aagattttttttttttaaagccatgtggcctaacttgatacaaaaataaaagtaattgtttggcaatctaaatttaaaacctgttagaactcaggacaggcgcttcaatgcgctttttaa

SEQ ID NO: 614626 - DNA, 120 bp, Artificial Sequence
  ENSG00000176887_48 (sequence is synthesized)
caatatttaaggctgttttgatgagtgcgttgtgagaatcatcttaatgaattctttattgagtgtctaaaacatagtataatacacatggtattcttgccactggatagtcttcaataa

SEQ ID NO: 614627 - DNA, 120 bp, Artificial Sequence
  ENSG00000176887_49 (sequence is synthesized)
aagtttaattgatttttttttgttggtctcttaagtaagtcttatttttaactaagcattgacagaatatcttaaaatggtaacctgggggtggcgggtgggtgctgtgtgcacggcagc

SEQ ID NO: 614628 - DNA, 120 bp, Artificial Sequence
  ENSG00000176887_50 (sequence is synthesized)
ctagccagtggggatcctgctgtttattataagtagttcacagactctgatggcattttggtaagctttccatctttaagaaattgaaccagcattctcttattaattctttaaactgtg

SEQ ID NO: 614629 - DNA, 120 bp, Artificial Sequence
  ENSG00000176887_51 (sequence is synthesized)
gaagtaatttccagttcttacactctgatacgcatcccttttatttaaaaaaaaaaaaaatgctaataaaaggcagtgtacttaaactgtgctttgcaaatattgtgtatgttatgaatg

SEQ ID NO: 614630 - DNA, 120 bp, Artificial Sequence
  ENSG00000176887_52 (sequence is synthesized)
actacagacactgggcaaattatttgtagaatgattatcctttagctagagaaagaaatcattacaactcttttgggcagagatgtttctttttaatgttaatcaaggggaagtgattta

SEQ ID NO: 614631 - DNA, 120 bp, Artificial Sequence
  ENSG00000176887_53 (sequence is synthesized)
aatatgcataaatgtagcagtcagggtgatttagttgcttttttcatgaaagaaaaagactcaaaagacaagacttatttttctcttctgggacttgaaatcataatcatctgatattag

SEQ ID NO: 614632 - DNA, 120 bp, Artificial Sequence
  ENSG00000176887_54 (sequence is synthesized)
tacagtacaagaaatttacatttgttttttacttcagaatttaagtgacttttgcccaaggaatttgagaaataaggcaaataagttgctctattttaaagtagtcattcaatataaata

SEQ ID NO: 614633 - DNA, 120 bp, Artificial Sequence
  ENSG00000176887_55 (sequence is synthesized)
tattatatcaatcttaacttttttattctctgatatgattaataatatgtatattcttacttttcttctaatgggcatatgtatccttgtggacactttgagagaggttttcttggactc

SEQ ID NO: 614634 - DNA, 120 bp, Artificial Sequence
  ENSG00000176887_56 (sequence is synthesized)
tcccatttatagaatctttatactcttttactgtgtggttccctgcttttaacagatttctgaggcaaatatatttgtgcttttttcttatgtaggaagaccagcgaaaatagtttactg

SEQ ID NO: 614635 - DNA, 120 bp, Artificial Sequence
  ENSG00000176887_57 (sequence is synthesized)
agttgtcaattttatcagtagataagaaactttctttattacagtttcagggaagattttttcaggatatttctcagttattctaagggccaaattttgtaaaatttccattaggaatgt

SEQ ID NO: 614636 - DNA, 120 bp, Artificial Sequence
  ENSG00000176887_58 (sequence is synthesized)
cagtttcaaataccctttgtatagcctaagcctgtgaggataacaagaatgagccttacctatcctaacacagggatttacaagttcccaaagtaaccgtctccatgtaactcttgacat

SEQ ID NO: 614637 - DNA, 120 bp, Artificial Sequence
  ENSG00000176887_59 (sequence is synthesized)
acttttctgagatttggcttatttttattattggttatttctcactgttcattctatttgatttattctacaacatccccttttatttaatgatctggaaaattctgctctttgataaca

SEQ ID NO: 614638 - DNA, 120 bp, Artificial Sequence
  ENSG00000176887_60 (sequence is synthesized)
actcaggatttttttgttcagttttggtttttgccccttcctgtggagcctacattttcaaccacaataaagatgaaacaaaatttatgaaactgagctctcttccattttacttactgc

SEQ ID NO: 614639 - DNA, 120 bp, Artificial Sequence
  ENSG00000176887_61 (sequence is synthesized)
tggcttttttttttttttttttccttgattcctaccataccttcgtttttttcattgtacttttttaacactacctatatccattagctgcctaattagttttatctgttccatgtggat

SEQ ID NO: 614640 - DNA, 120 bp, Artificial Sequence
  ENSG00000176887_62 (sequence is synthesized)
gcagtgagtttataagagaatttcacaaacaagtagttttttagtgaacttaaaataaacagaattttaaaggagacctatttttatactcaataaaagcacaaaagtgcagaaagtata

SEQ ID NO: 614641 - DNA, 120 bp, Artificial Sequence
  ENSG00000176887_63 (sequence is synthesized)
aaacggcttacaaagggagacacaagctcataatgttccatgtataaaagtaataactttattgggtagagatattcttacaagatctagcacctctgccagtgcacagataggactgtt

SEQ ID NO: 614642 - DNA, 120 bp, Artificial Sequence
  ENSG00000176887_64 (sequence is synthesized)
ttaaatgatttgggaacttttggttgcctgcagttgtgaacagagaacttctctacagagaaacaaaccactaaaagcaatatgaccgagttgagatgtggtttccaatgagcaattggt

SEQ ID NO: 614643 - DNA, 120 bp, Artificial Sequence
  ENSG00000176887_65 (sequence is synthesized)
gaatttaagcaacctggatgtgcatatgtggaggctcccgtctcactgtttgatcaaacttcttttatgtagtcacgtagacttgattttttctgctgtgaaaatgaaaaaataaagcaa

SEQ ID NO: 614644 - DNA, 120 bp, Artificial Sequence
  ENSG00000176887_66 (sequence is synthesized)
tatgacaaaaagtttaaaaatgcataaaaaataggatttcctctaggctcctcgaagagatttttttaatatgatgcttgtcttactttcttagacacgttacatttccccttccaaaaa

SEQ ID NO: 614645 - DNA, 120 bp, Artificial Sequence
  ENSG00000176887_67 (sequence is synthesized)
aaaaaaaaaggacaactggaagtaatttatcatataaagaattttgatcaaatagatattgacaaagggccctctgtcacatttttcttcatccagcttttgttcaaaaacagtatgcct

SEQ ID NO: 614646 - DNA, 120 bp, Artificial Sequence
  ENSG00000176887_68 (sequence is synthesized)
cctcccttgaatcacatagggagaaacgttatactccattctcattaatttcccattttgtctacttttactcttgtacatatgttgtgggtttaagagtcttttgcatttgttctgtga

SEQ ID NO: 614647 - DNA, 120 bp, Artificial Sequence
  ENSG00000176887_69 (sequence is synthesized)
cacctttttttgaattgactgttttaaaacggaggcctattttttccggtttgggactcctagtggttatggcatcccataatgcttcgtgacggccaccaggacagaaccacctgatgt

SEQ ID NO: 614648 - DNA, 120 bp, Artificial Sequence
  ENSG00000176887_70 (sequence is synthesized)
tttagagcagttttcagcatgacactgttaacaagtgtgtattttccaaggccacatgaaacttactttcttagccactccaggtttgggagcagaaaagctgaaaaacccttttgtgta

SEQ ID NO: 614649 - DNA, 120 bp, Artificial Sequence
  ENSG00000176887_71 (sequence is synthesized)
gaagtctgagtggtttgtgggggggaccttttttagagtttgcatgccagcgcacggcctattgctgtgaaacagagagaaggtaaagctacctgaggcagtgcgctggaggatgaagtg

SEQ ID NO: 614650 - DNA, 120 bp, Artificial Sequence
  ENSG00000176887_72 (sequence is synthesized)
tttgatagcactaggggggaaagaaaatgcatggcaaagtttcgtcttctcgtagactatctagcatgcagagtgtagtgtgttgaaacggtgtatgacattgctgtatcaaagttgtaa

SEQ ID NO: 614651 - DNA, 120 bp, Artificial Sequence
  ENSG00000176887_73 (sequence is synthesized)
aattaagcattatttattgaaaactatgtatttttttgtaaaaacctgatcacatagagaatatcagtggcttgtgcttgtgcttcgatctaaccagcttcttgacccacccccccttgg

SEQ ID NO: 614652 - DNA, 120 bp, Artificial Sequence
  ENSG00000176887_74 (sequence is synthesized)
tatgcagtgttaatgctcagggttgaaaatagtacactccaatgtctcttttgcaagagtttttcacagaggattacatttgttcaaaagactctaataaaattgtgtgatcaatcttca

SEQ ID NO: 614653 - DNA, 80 bp, Artificial Sequence
  ENSG00000176890_0 (sequence is synthesized)
acttggcctgcctccgtcccgccgcgccacttggcctgcctccgtcccgccgcgccacttcgcctgcctccgtcccccgc

SEQ ID NO: 614654 - DNA, 120 bp, Artificial Sequence
  ENSG00000176890_1 (sequence is synthesized)
cggcccttgccccccgccgcacaggagcgggacgccgagccgcgtccgccgcacggggagctgcagtacctggggcagatccaacacatcctccgctgcggcgtcaggaaggacgaccgc

SEQ ID NO: 614655 - DNA, 120 bp, Artificial Sequence
  ENSG00000176890_2 (sequence is synthesized)
acgggcaccggcaccctgtcggtattcggcatgcaggcgcgctacagcctgagagatgaattccctctgctgacaaccaaacgtgtgttctggaagggtgttttggaggagttgctgtgg

SEQ ID NO: 614656 - DNA, 120 bp, Artificial Sequence
  ENSG00000176890_3 (sequence is synthesized)
tttatcaagggatccacaaatgctaaagagctgtcttccaagggagtgaaaatctgggatgccaatggatcccgagactttttggacagcctgggattctccaccagagaagaaggggac

SEQ ID NO: 614657 - DNA, 120 bp, Artificial Sequence
  ENSG00000176890_4 (sequence is synthesized)
ttgggcccagtttatggcttccagtggaggcattttggggcagaatacagagatatggaatcagattattcaggacagggagttgaccaactgcaaagagtgattgacaccatcaaaacc

SEQ ID NO: 614658 - DNA, 120 bp, Artificial Sequence
  ENSG00000176890_5 (sequence is synthesized)
aaccctgacgacagaagaatcatcatgtgcgcttggaatccaagagatcttcctctgatggcgctgcctccatgccatgccctctgccagttctatgtggtgaacagtgagctgtcctgc

SEQ ID NO: 614659 - DNA, 120 bp, Artificial Sequence
  ENSG00000176890_6 (sequence is synthesized)
cagctacgccctgctcacgtacatgattgcgcacatcacgggcctgaagccaggtgactttatacacactttgggagatgcacatatttacctgaatcacatcgagccactgaaaattca

SEQ ID NO: 614660 - DNA, 120 bp, Artificial Sequence
  ENSG00000176890_7 (sequence is synthesized)
gcttcagcgagaacccagacctttcccaaagctcaggattcttcgaaaagttgagaaaattgatgacttcaaagctgaagactttcagattgaagggtacaatccgcatccaactattaa

SEQ ID NO: 614661 - DNA, 120 bp, Artificial Sequence
  ENSG00000176890_8 (sequence is synthesized)
aatggaaatggctgtttagggtgctttcaaaggagctcgaaggatattgtcagtctttaggggttgggctggatgccgaggtaaaagttctttttgctctaaaagaaaaaggaactaggt

SEQ ID NO: 614662 - DNA, 120 bp, Artificial Sequence
  ENSG00000176890_9 (sequence is synthesized)
caaaaatctgtccgtgacctatcagttattaatttttaaggatgttgccactggcaaatgtaactgtgccagttctttccataataaaaggctttgagttaactcactgagggtatctga

SEQ ID NO: 614663 - DNA, 120 bp, Artificial Sequence
  ENSG00000176890_10 (sequence is synthesized)
caatgctgaggttatgaacaaagtgaggagaatgaaatgtatgtgctcttagcaaaaacatgtatgtgcatttcaatcccacgtacttataaagaaggttggtgaatttcacaagctatt

SEQ ID NO: 614664 - DNA, 120 bp, Artificial Sequence
  ENSG00000176890_11 (sequence is synthesized)
tttggaatatttttagaatattttaagaatttcacaagctattccctcaaatctgagggagctgagtaacaccatcgatcatgatgtagagtgtggttatgaactttaaagttatagttg

SEQ ID NO: 614665 - DNA, 120 bp, Artificial Sequence
  ENSG00000176890_12 (sequence is synthesized)
ttttatatgttgctataataaagaagtgttctgcattcgtccacgctttgttcattctgtactgccacttatctgctcagttccttcctaaaatagattaaagaactctccttaagtaaa

SEQ ID NO: 614666 - DNA, 120 bp, Artificial Sequence
  ENSG00000176890_13 (sequence is synthesized)
agtgctggagggttagggagagctgcctgggcttgaccgcgcgccggtctcaaagtcctggctttggcccctcctccgttttcccctgtggaccattccgcttcgcagcgttttcaaaaa

SEQ ID NO: 614667 - DNA, 120 bp, Artificial Sequence
  ENSG00000176890_14 (sequence is synthesized)
ctggagcgaaagtgatgtgggcggggcaaaggcggcgggaagaggagagcactgaagctggcgcgggaacttggtttcctggtggcctcccatccaatccccacgaaccagctttcctct

SEQ ID NO: 614668 - DNA, 120 bp, Artificial Sequence
  ENSG00000176890_15 (sequence is synthesized)
tcctctttcctttccgacaggagcaccccaggcaaaaaatgtctcgcgggtcattggcgccaggctttcaggggacagtggggcggggcggggtgggcacaggacgttaggcagccgttg

SEQ ID NO: 614669 - DNA, 120 bp, Artificial Sequence
  ENSG00000176890_16 (sequence is synthesized)
gccctccctaaggccacaccgtcctgccgtcctggatcctgcgccagctgcgcgggggaggggactcgaagatgaattccctctgctgacaaccaaacgtgtgttctggaagggtgtttt

SEQ ID NO: 614670 - DNA, 120 bp, Artificial Sequence
  ENSG00000176890_17 (sequence is synthesized)
agcaatctggttttgtgcagaggcacctgagggaggcaggaccctgggaacttcccccagccacatggttgattgtgtgacgttgggcaagtcacattttgctgcactttcaccttcaga

SEQ ID NO: 614671 - DNA, 60 bp, Artificial Sequence
  ENSG00000176890_18 (sequence is synthesized)
cgttgggcaagtcacattttgctgcactttcaccttcagatcatgaggttgggcccagaa

SEQ ID NO: 614672 - DNA, 120 bp, Artificial Sequence
  ENSG00000176893_0 (sequence is synthesized)
acccaccttcccccttgtctcctcacacaatgaccctgggatccctgggaaacagcagcagcagcgtttctgctaccttcctgctgagtggcatccctgggctggagcgcatgcacatct

SEQ ID NO: 614673 - DNA, 120 bp, Artificial Sequence
  ENSG00000176893_1 (sequence is synthesized)
ggatctccatcccactgtgcttcatgtatctggtttccatcccgggcaactgcacaattctttttatcattaaaacagagcgctcacttcatgaacctatgtatctcttcctgtccatgc

SEQ ID NO: 614674 - DNA, 120 bp, Artificial Sequence
  ENSG00000176893_2 (sequence is synthesized)
tggctctgattgacctgggtctctccctttgcactctccctacagtcctgggcatcttttgggttggagcacgagaaattagccatgatgcctgctttgctcagctctttttcattcact

SEQ ID NO: 614675 - DNA, 120 bp, Artificial Sequence
  ENSG00000176893_3 (sequence is synthesized)
gcttctccttcctcgagtcctctgtgctactgtctatggcctttgaccgctttgtggctatctgccaccccttgcactatgtttccattctcaccaacacagtcattggcaggattggcc

SEQ ID NO: 614676 - DNA, 120 bp, Artificial Sequence
  ENSG00000176893_4 (sequence is synthesized)
cctattgtggctccccagttctctcacattcttattgtctccaccaagaagtgatgaaattggcctgtgccgacatgaaggccaacagcatctacggcatgtttgtcatcgtctctacag

SEQ ID NO: 614677 - DNA, 120 bp, Artificial Sequence
  ENSG00000176893_5 (sequence is synthesized)
tgggtatagactcactgctcatcctcttctcttatgctctgatcctgcgcaccgtgctgtccatcgcctccagggctgagagattcaaggcccttaacacctgtgtttcccacatctgtg

SEQ ID NO: 614678 - DNA, 120 bp, Artificial Sequence
  ENSG00000176893_6 (sequence is synthesized)
ctgtgctgctcttctacactcccatgattggcctctctgtcatccatcgctttggaaagcaggcaccccacctggtccaggtggtcatgggtttcatgtatcttctctttcctcctgtga

SEQ ID NO: 614679 - DNA, 120 bp, Artificial Sequence
  ENSG00000176893_7 (sequence is synthesized)
tgaatcccattgtctacagtgtgaagaccaaacagatccgggatcgagtgacgcatgccttttgttactaactgtgtctagtgttagagccactgtctcctgaaacgtgcccttgtttgc

SEQ ID NO: 614680 - DNA, 120 bp, Artificial Sequence
  ENSG00000176893_8 (sequence is synthesized)
catggcctttatttttagccttggtatgcgaggagttcatatagtagccaggtgtttgatgctgagtgtagagccaagaaaagatcccagaaggctgagcccgagctttggagagagaaa

SEQ ID NO: 614681 - DNA, 120 bp, Artificial Sequence
  ENSG00000176893_9 (sequence is synthesized)
tacagtccttacagaaccctcactctgttgtggccagggcaggggggggtaaaatgtaatatgatgtggtaaattttattttctaaaaatagccacagcaataattctaaacccacatgc

SEQ ID NO: 614682 - DNA, 120 bp, Artificial Sequence
  ENSG00000176893_10 (sequence is synthesized)
tcttccaggaacttgctactcctcataaagagatagggtctacttcttctccccttgaaactggatagaatttgtaaatgcctcatgaattgagtattgtggaaatagcccatgtatctt

SEQ ID NO: 614683 - DNA, 120 bp, Artificial Sequence
  ENSG00000176893_11 (sequence is synthesized)
taagaggaagcccaggcgacgtggagaaggcccatgtaggtgttccatccagtaggctcagccaaggtctcactcagctaaggctgagaccttagctgagtcagtgttaaccaccaatga

SEQ ID NO: 614684 - DNA, 120 bp, Artificial Sequence
  ENSG00000176893_12 (sequence is synthesized)
gtagagaatcctcagatagttccattccccaaccttccagcctctccaattggcatctggtaaagcaatcaattgttctctgactcagccaaaatttcagttttgtaaacaaaataaata

SEQ ID NO: 614685 - DNA, 120 bp, Artificial Sequence
  ENSG00000176893_13 (sequence is synthesized)
tttttaagacactaaattttgggaagattcgttatacaatcacatgttaattgtattcttcaaagaaaaaagaaattggtttgggagttgtcttcccctagctgggggaagggagcatca

SEQ ID NO: 614686 - DNA, 120 bp, Artificial Sequence
  ENSG00000176893_14 (sequence is synthesized)
gaaaagttttccctgagttgacacagtaatagccttaagggaaatgtaggcattaggcagtcaaaaactgtaagaggaaggagacaaaaatatgttccagtccaaaggaacagcatgtgc

SEQ ID NO: 614687 - DNA, 120 bp, Artificial Sequence
  ENSG00000176893_15 (sequence is synthesized)
aaagctgaagcagaagtgagagagaggacagtgtattctgagaattatctgaagtgttgtttttgttgccatttttattctctagaatgtcaggaaggtttaagaaaaatgaggtgaagt

SEQ ID NO: 614688 - DNA, 120 bp, Artificial Sequence
  ENSG00000176893_16 (sequence is synthesized)
ggaaacagattgaggtactgactgtatcagaaagagattataagccaaggaaccaaggatagtttgttatgcccttttatatgttgtattgttattgtacccccaagacattctagataa

SEQ ID NO: 614689 - DNA, 120 bp, Artificial Sequence
  ENSG00000176893_17 (sequence is synthesized)
aagttatattttgagtaatacatgtcaatatagtatttgcagtttgggcttggaggtaactgtgaggaaagcaagcttgaatgtgatattgccaaggggagcttcgaacacctagagaga

SEQ ID NO: 614690 - DNA, 120 bp, Artificial Sequence
  ENSG00000176893_18 (sequence is synthesized)
agcatgagaatgtcatgttcctgcatggttttagtgcagattaagaaagggtgtggctgaacacaatgtcttctactatgaagtgtatgtggaccagttctcacctgaggttggtctctt

SEQ ID NO: 614691 - DNA, 120 bp, Artificial Sequence
  ENSG00000176893_19 (sequence is synthesized)
ccaaggcaatctagtacacctgacatttaacattggatatgcctgtccctgctcccaacaccagtgtcccctcctgtttggcatgagaacactgtttctgcaatgatatcatcaacccca

SEQ ID NO: 614692 - DNA, 120 bp, Artificial Sequence
  ENSG00000176893_20 (sequence is synthesized)
aaataatcaaaaggatcagaacccagtttaaaagagcttatttagccacaaagttgagaatgaccatttgagtaacacagaccccgaaggaatggggtcattgctctgaagctgaaaagt

SEQ ID NO: 614693 - DNA, 120 bp, Artificial Sequence
  ENSG00000176893_21 (sequence is synthesized)
taaggatttgcttatgcacgtggaaagcaaataaatttaagaggactacaacattttccacactaaggctgacttgtgagttatagtaatttgaatagttacagcttgttttttttttct

SEQ ID NO: 614694 - DNA, 120 bp, Artificial Sequence
  ENSG00000176893_22 (sequence is synthesized)
tttccaatttgaaagagtatgtttaacattccaggctagacaacatgatagtcctgaggtttttgtgtaagagaagtgagacgtaagttaatctaaaaatgaagatcaacagtggagtgg

SEQ ID NO: 614695 - DNA, 120 bp, Artificial Sequence
  ENSG00000176893_23 (sequence is synthesized)
gaaaaggtcttctctagcattctatagttttttacattttaaaaaacaatgtaattaaagaaaaggaaaattacaataagagaaacaaagattacagctgcctaggttatagctgcctgt

SEQ ID NO: 614696 - DNA, 120 bp, Artificial Sequence
  ENSG00000176893_24 (sequence is synthesized)
tacgtaactcagatcccataatcacattttttaaggctcaatattccaacatctttcattatgaatttcttatttttacaatgtgtatatgtgaattgtgtgtattaacatgcaaaaggc

SEQ ID NO: 614697 - DNA, 120 bp, Artificial Sequence
  ENSG00000176894_0 (sequence is synthesized)
gggctcggggcgctgccgcggcgggcgctcgcccagtacctgctcttcctgcggctctacccggtgctcaccaaggcggccaccagtggcattttgtcagcacttgggaacttcctggcc

SEQ ID NO: 614698 - DNA, 120 bp, Artificial Sequence
  ENSG00000176894_1 (sequence is synthesized)
cagatgattgagaagaagcggaaaaaagaaaactctagaagtctggatgtcggtgggcctctgagatatgccgtttacgggttcttcttcacagggccgctgagtcacttcttctacttc

SEQ ID NO: 614699 - DNA, 120 bp, Artificial Sequence
  ENSG00000176894_2 (sequence is synthesized)
ttcatggaacattggatccctcctgaggtccccctggcagggctcaggaggcttctcctggaccgcctcgtctttgcaccggccttcctcatgttgttcttcctcatcatgaactttctg

SEQ ID NO: 614700 - DNA, 120 bp, Artificial Sequence
  ENSG00000176894_3 (sequence is synthesized)
acgcctcagccttcgccgccaagatgagggggggcttctggccggcgctgaggatgaactggcgggtgtggacgccactacagttcatcaacatcaactacgtccctctgaagttccggg

SEQ ID NO: 614701 - DNA, 120 bp, Artificial Sequence
  ENSG00000176894_4 (sequence is synthesized)
tgctcttcgccaacctggcagctctgttctggtatgcctacctggcctccttggggaagtgacgaccgctgggagaacatcaggtgcactgtggacgtgggtctgggggtctcacccgcc

SEQ ID NO: 614702 - DNA, 120 bp, Artificial Sequence
  ENSG00000176894_5 (sequence is synthesized)
cagcgagagcagaaccaatccagtcaggatgtcactgactctaaatcaggtgattcaagatgcccaaaaatgatggatagagaaacagaaatctctgaatgtcagaaccctgtcttttaa

SEQ ID NO: 614703 - DNA, 120 bp, Artificial Sequence
  ENSG00000176894_6 (sequence is synthesized)
aaaggcagtcgctgccttcaggtggtgctgccccagaaacttaaaatttagtcgaggcagtttcaattgttactgtggaccgaattaggatcacaataaacgataatgcaggttcttcaa

SEQ ID NO: 614704 - DNA, 120 bp, Artificial Sequence
  ENSG00000176894_7 (sequence is synthesized)
tggcattttgtcagcacttgggaacttcctggcccagatgattgagaagaagcggaaaaaagaaaactctagaagtctggatgtcggtgggcctctgagatatgccgtttacgggggaaa

SEQ ID NO: 614705 - DNA, 120 bp, Artificial Sequence
  ENSG00000176894_8 (sequence is synthesized)
tccccccctccctcccctcttcttttctcttctcttctttctttggtagttttccgctagacttagtttcatccgtgtctagactcctcaactacccttggattttgcccatgaccctga

SEQ ID NO: 614706 - DNA, 120 bp, Artificial Sequence
  ENSG00000176894_9 (sequence is synthesized)
atcattgctagttcgggattcaggaagcaacagagaagggtgtcccgagtggtcgtctttgcctcttctgttcgttcagcaaattctcattaaaagcccccatgccagggatgcctatga

SEQ ID NO: 614707 - DNA, 120 bp, Artificial Sequence
  ENSG00000176895_0 (sequence is synthesized)
tttcagatccggctaacgagctcatatctccctcattatgtctgttctcaataactccgaagtcaagcttttccttctgattgggatcccaggactggaacatgcccacatttggttctc

SEQ ID NO: 614708 - DNA, 120 bp, Artificial Sequence
  ENSG00000176895_1 (sequence is synthesized)
catccccatttgcctcatgtacctgcttgccatcatgggcaactgcaccattctctttattataaagacagagccctcgcttcatgagcccatgtattatttccttgccatgttggctgt

SEQ ID NO: 614709 - DNA, 120 bp, Artificial Sequence
  ENSG00000176895_2 (sequence is synthesized)
ctctgacatgggcctgtccctctcctcccttcctaccatgttgagggtcttcttgttcaatgccatgggaatttcacctaatgcctgctttgctcaagaattcttcattcatggattcac

SEQ ID NO: 614710 - DNA, 120 bp, Artificial Sequence
  ENSG00000176895_3 (sequence is synthesized)
tgtcatggaatcctcagtacttctaattatgtctttggaccgctttcttgccattcacaatcccttaagatacagttctatcctcactagcaacagggttgctaaaatgggacttatttt

SEQ ID NO: 614711 - DNA, 120 bp, Artificial Sequence
  ENSG00000176895_4 (sequence is synthesized)
tactgtcttcatcaggataccatgaagctggcctgctctgacaacaagaccaatgtcatctatggcttcttcattgctctctgtactatgctggacttggcactgattgttttgtcttat

SEQ ID NO: 614712 - DNA, 120 bp, Artificial Sequence
  ENSG00000176895_5 (sequence is synthesized)
gtgctgatcttgaagactatactcagcattgcatctttggcagagaggcttaaggccctaaatacctgtgtctcccacatctgtgctgtgctcaccttctatgtgcccatcatcaccctg

SEQ ID NO: 614713 - DNA, 120 bp, Artificial Sequence
  ENSG00000176895_6 (sequence is synthesized)
gctgccatgcatcactttgccaagcacaaaagccctcttgttgtgatccttattgcagatatgttcttgttggtgccgccccttatgaaccccattgtgtactgtgtaaagactcgacaa

SEQ ID NO: 614714 - DNA, 120 bp, Artificial Sequence
  ENSG00000176895_7 (sequence is synthesized)
atctgggagaagatcttggggaagttgcttaatgtatgtgggagataagaacttgaacaattaggtaataaattatcaaccagtaggcatttactgtcatttgctatgtgcttaatgcca

SEQ ID NO: 614715 - DNA, 120 bp, Artificial Sequence
  ENSG00000176895_8 (sequence is synthesized)
gaagtcactaatgaaggactggatgatggaagtgaaaagctatgtagtgcagaatttataataaagttgagaatataactgaacaggatagaaaaaaaagtcaagagatatataagatat

SEQ ID NO: 614716 - DNA, 120 bp, Artificial Sequence
  ENSG00000176895_9 (sequence is synthesized)
agaggtttaattaacattttaagggaagttgaaggaaaatacttctgtgatggagcagctggatttgagtcaacccataaagaatgaatacaatttgggcagattgagattaccattcag

SEQ ID NO: 614717 - DNA, 120 bp, Artificial Sequence
  ENSG00000176895_10 (sequence is synthesized)
ttagtatctattaaaaatacagatgatatacaaagtctaatctcatactgtcaaggaaaggtaaaatagctatgaaggatgctgatctgattacaatagaaagtgaaatttaacagatag

SEQ ID NO: 614718 - DNA, 120 bp, Artificial Sequence
  ENSG00000176895_11 (sequence is synthesized)
caagtgatattttggataaaataagtgaaccagattttggagcacctaaaaaaagctttgaaaagtctaaattcaggaggtgttggaatgccaatttcttctctacatgataaatttcat

SEQ ID NO: 614719 - DNA, 120 bp, Artificial Sequence
  ENSG00000176895_12 (sequence is synthesized)
tttaagaagagcgtgcctgtaaacatggattgaatttgggagagatgaggaaggaagattaacaggagaaagcacaataatcctgctgtgaagtgatgactcagaataggcagggagaga

SEQ ID NO: 614720 - DNA, 120 bp, Artificial Sequence
  ENSG00000176895_13 (sequence is synthesized)
acaagatcatttagctgctgttgttatttttctgttataaaaccaacatgtaaattatggaaaattcacaaatttaactaagtgactaaaagataattttaaaccccctatggttttgct

SEQ ID NO: 614721 - DNA, 120 bp, Artificial Sequence
  ENSG00000176895_14 (sequence is synthesized)
gtttagtttttttctgtgatttagtctttccctgcgccttaaaaaaaatcagcccctctaatatgttcttaaaaattgattcctgcaggacacgacatttggtaccacaataattttcac

SEQ ID NO: 614722 - DNA, 120 bp, Artificial Sequence
  ENSG00000176895_15 (sequence is synthesized)
taaaatttatattttaaactttttttctcatgtatagaggaaatacatgatggaaaaatcaaaagagtatacagttgaaaatacaatttgaaggggggcaaacaagattgatatggcaat

SEQ ID NO: 614723 - DNA, 120 bp, Artificial Sequence
  ENSG00000176895_16 (sequence is synthesized)
ctctctgggattctaaggtaagagtgttgtaaacagaaaagaaaagcttttcaaaggaactggggacttgaatgatgggtttgaattttgtcttgaggatttggcataggtgactgaata

SEQ ID NO: 614724 - DNA, 120 bp, Artificial Sequence
  ENSG00000176896_0 (sequence is synthesized)
gggttcaagcaattctcctgcctcggccttccgagtagctgggactacagctgtaaagatgtctgacaagaaccagatagctgccagagcttctcttattgagcaactgatgtccaaaag

SEQ ID NO: 614725 - DNA, 120 bp, Artificial Sequence
  ENSG00000176896_1 (sequence is synthesized)
gcttctcttattgagcaactgatgtccaaaaggaattttgaggatcttggcaaccaccttactgagctagaaacaatttatgtgactaaggagcatctccaggagacagatgtggtcaga

SEQ ID NO: 614726 - DNA, 120 bp, Artificial Sequence
  ENSG00000176896_2 (sequence is synthesized)
gctgtgtacagagtcctcaaaaactgcccctctgtggctttgaaaaagaaagccaagtgtttgctatcaaagtggaaagctgtttataagcagactcactccaaagcgaggaacagccct

SEQ ID NO: 614727 - DNA, 120 bp, Artificial Sequence
  ENSG00000176896_3 (sequence is synthesized)
aaattatttcctgtgaggggtaataaagaagaaaattcaggaccttctcatgacccaagtcagaatgagacactgggcatctgcagctcgaattctctgtcttcccaagacgttgcaaaa

SEQ ID NO: 614728 - DNA, 120 bp, Artificial Sequence
  ENSG00000176896_4 (sequence is synthesized)
gatggtgaccctgaatccactggcaagagatcgagtgagttgctggatcccacaacacccatgagaactaaatgcatagagcttctttacgcagctttaactagttcttccacagatcaa

SEQ ID NO: 614729 - DNA, 120 bp, Artificial Sequence
  ENSG00000176896_5 (sequence is synthesized)
cccaaagctgatttgtggcaaaactttgcaagagaaattgaagagcatgtttttaccctttattcaaagaacatcaaaaaatataaaacttgcatcagaagcaaagttgccaatttgaag

SEQ ID NO: 614730 - DNA, 120 bp, Artificial Sequence
  ENSG00000176896_6 (sequence is synthesized)
aaccccagaaattctcatttacaacaaaacttgctctctgggaccacgtctccacgagaatttgctgaaatgactgtcatggagatggcaaataaggaactgaagcagttgagagcctcc

SEQ ID NO: 614731 - DNA, 120 bp, Artificial Sequence
  ENSG00000176896_7 (sequence is synthesized)
tacacggaatcttgtatccaggaacattaccttccccaagtaattgatggcacacagacaaataaaataaaatgcagacgctgtgagaaatacaattgcaaagtcactgtaattgacaga

SEQ ID NO: 614732 - DNA, 120 bp, Artificial Sequence
  ENSG00000176896_8 (sequence is synthesized)
ggaacacttttccttcccagctgggtgcggaattcaaacccagatgaacaaatgatgacttacgtaatttgtaacgaatgtggggagcagtggtaccatagcaagtgggtgtgctggtaa

SEQ ID NO: 614733 - DNA, 120 bp, Artificial Sequence
  ENSG00000176896_9 (sequence is synthesized)
ccttttgtgcttttaaaaatcttatacacactactctctaaaacagaaaaaggaggaaagaaagtcgttagctgaagctgccaccaccatccctaaaagttacagtttggggagagggag

SEQ ID NO: 614734 - DNA, 120 bp, Artificial Sequence
  ENSG00000176896_10 (sequence is synthesized)
tggatgactatttatattgtgccttgtggccatttagtaccttactgtagacagagtgtgggtgagaacagcccagcataaactgggagactgtgggaaatgcattcccaggcctcacac

SEQ ID NO: 614735 - DNA, 120 bp, Artificial Sequence
  ENSG00000176896_11 (sequence is synthesized)
gcatattaaaatcatctgggaagctttgaaaacccactggtgctgagaccccaccctagaacaattcagttggaacctatgagatgggacccaggcatcaacatttcttttttcattcct

SEQ ID NO: 614736 - DNA, 120 bp, Artificial Sequence
  ENSG00000176896_12 (sequence is synthesized)
caagttattttaagatgcagtcagagttgagaactactcagaaataggctctcatttgatcctttttacagctctaagacaagaatgttattccaggcacttcacgaatgaggaaacagg

SEQ ID NO: 614737 - DNA, 120 bp, Artificial Sequence
  ENSG00000176896_13 (sequence is synthesized)
tccacagaggtgtggtgacatgtccaagtgacacaaccataaatagtaccaattctgacagatcccagattttctccctcctgactcactgagactggctcaatatcgacttctgagaaa

SEQ ID NO: 614738 - DNA, 120 bp, Artificial Sequence
  ENSG00000176896_14 (sequence is synthesized)
tgtattcctggaggtcggggacaaaatgaagaatgtgtttaaactccaacattgggtgactagatcttcattcttttcccctctcttttctcatttataggtctcccttcaaccacaaaa

SEQ ID NO: 614739 - DNA, 120 bp, Artificial Sequence
  ENSG00000176896_15 (sequence is synthesized)
gtctcccttcaaccacaaaagtcaccctggaactcatcccgcagttagaattttgtttggagccctcttgcttagttgaaggagtttcgtagttgttttttgtttttgtttttgtttttg

SEQ ID NO: 614740 - DNA, 120 bp, Artificial Sequence
  ENSG00000176896_16 (sequence is synthesized)
gtttttcgggggtatgtaaactctaggatgtttagtttctgatgtcaggagtcttcatgttctcaaggacaagtgtccttgagatggacattaatggtcattagtctgtcagaggaagcc

SEQ ID NO: 614741 - DNA, 120 bp, Artificial Sequence
  ENSG00000176896_17 (sequence is synthesized)
catcactttagcctttgaatgtagtaacagacgtttatctaataaatgaattgaagataaaattacctctttgaggcctttgcaaacagtgtttaaccagtttatataattgtttgacta

SEQ ID NO: 614742 - DNA, 120 bp, Artificial Sequence
  ENSG00000176896_18 (sequence is synthesized)
caacacgccttctatgtgattatggctgattttttttccttaaaaaactcatggaatgttcaccgttttatagttttaaaaagtttactttggcggtctctacaaacctaccatttcact

SEQ ID NO: 614743 - DNA, 120 bp, Artificial Sequence
  ENSG00000176896_19 (sequence is synthesized)
ttctcaccagttcttttctcctaactctcttcctttgttggagctctgaaggcctaactgtgtgtacactttacctgcctgacagaattctccaaaacatgcataaaagtaaaatatgtt

SEQ ID NO: 614744 - DNA, 120 bp, Artificial Sequence
  ENSG00000176896_20 (sequence is synthesized)
cgtattttcaaataatttggaagagtcggctcaatgccatcaagtgtaaaatctattttgatatacttgctctccgtgtcttcccagggctgctttttgtgatgcaacatgtttagtcct

SEQ ID NO: 614745 - DNA, 120 bp, Artificial Sequence
  ENSG00000176896_21 (sequence is synthesized)
taacttgcaaggtcatctaaaacttgaagtttcacaaagtgtggtttcatatgacttggaataatctgaaaaactattcagtggttacgaaagagcacagcacataaaaaccaaatttga

SEQ ID NO: 614746 - DNA, 120 bp, Artificial Sequence
  ENSG00000176896_22 (sequence is synthesized)
ttagttcaagtcggtgtttatgttttgctttgggggtttgtgtgtatgtgtgtagtttttatttatattggaatttggcaaactaaatgttcagacaaataaaagtaattaaaatggaaa

SEQ ID NO: 614747 - DNA, 88 bp, Artificial Sequence
  ENSG00000176896_23 (sequence is synthesized)
tcgttaccgtgcctggccaagactctttaatttaaaatcgctttttcagaaacagcaaatggaagaccctgagacaggagactgcctg

SEQ ID NO: 614748 - DNA, 120 bp, Artificial Sequence
  ENSG00000176896_24 (sequence is synthesized)
gaaacagcaaatggaagaccctgagacaggagactgcctgatacacgcaagttccagcaagagtccacggcagctaagtcacagtgagcaaggggaacaaggatgagagatgcagtcaaa

SEQ ID NO: 614749 - DNA, 120 bp, Artificial Sequence
  ENSG00000176896_25 (sequence is synthesized)
ggagcaaagagatgattaagacaccatcccaggcctcaagccccacgaaacgcaggggaagcgccatgctatgcagccagcaatcgttttaccttttaagagctctgagagagacaccca

SEQ ID NO: 614750 - DNA, 120 bp, Artificial Sequence
  ENSG00000176896_26 (sequence is synthesized)
ctggaaaggggtgcagaggaccccagaggatcaactaacccagtgtgggagggtcagggaaagcttcatagaggccgtgacccttagggcaaatcttgagaggaagatggccaggcagag

SEQ ID NO: 614751 - DNA, 120 bp, Artificial Sequence
  ENSG00000176896_27 (sequence is synthesized)
gaaatgggaaagtctgttccagcaccatatttgctagattcttggcactttatgtatagcatctcctttaatcttcacaactaccctgctgcacagcattttagaggtgaggaaactaag

SEQ ID NO: 614752 - DNA, 120 bp, Artificial Sequence
  ENSG00000176896_28 (sequence is synthesized)
gctgagagagattaagttacttgcccaagggtacacagagacaaagccaggactaactcataacaaagtgggtaggttttgtttattttgcatgtcagattgcttctagaaataacagca

SEQ ID NO: 614753 - DNA, 120 bp, Artificial Sequence
  ENSG00000176896_29 (sequence is synthesized)
atgtggtgtatggatccccccttacaccagtactgtgcactcctcctgatgatggagagattgggagggaccacctggctaggattgctggctctcctgacaccttctcgtggcatccat

SEQ ID NO: 614754 - DNA, 120 bp, Artificial Sequence
  ENSG00000176896_30 (sequence is synthesized)
gtggtttatccagttttctgaaaatgatacctgcaatatatcagacagaagctgatccattagctcaggttcgtcaggtccagagggaagatgacatggacgggaaccacagctgaccca

SEQ ID NO: 614755 - DNA, 120 bp, Artificial Sequence
  ENSG00000176896_31 (sequence is synthesized)
taatggacattaagggtactggaagagcaagtgtctctccattgggacttttataatgaaaagactcacaagatagttggtttcttaagtgtcggaaggactttcagatgctaaccaaac

SEQ ID NO: 614756 - DNA, 120 bp, Artificial Sequence
  ENSG00000176896_32 (sequence is synthesized)
tgctaaccaaaccgcatcccctacaaaagacaaatatcccccacaaacttagaagataagcaaacttgactgggcgcagtggctcactcttataatcccagcgctttgggaggccgaggt

SEQ ID NO: 614757 - DNA, 83 bp, Artificial Sequence
  ENSG00000176896_33 (sequence is synthesized)
ggagaatcgcttgaaccctggaggctggcctgggcaacagagtcagactccatctaaaaaaaaaaaaaaaagaaagaagaaag

SEQ ID NO: 614758 - DNA, 120 bp, Artificial Sequence
  ENSG00000176896_34 (sequence is synthesized)
aaagaaaaaagaaaagaaaaagaagataagcaaactttacagctctcttctgcatttccattatgggtgttgatatggtttggctgtgtccccacgtaaatctcatcttgaattgtagct

SEQ ID NO: 614759 - DNA, 120 bp, Artificial Sequence
  ENSG00000176896_35 (sequence is synthesized)
cccataatccccacatgtcgtggggggtaattgaatcgtgggggtgggtttttcccatgacagtgagtaagtcgtaggaggtctgatggttgtataaagggcagttcccccgcacactct

SEQ ID NO: 614760 - DNA, 120 bp, Artificial Sequence
  ENSG00000176896_36 (sequence is synthesized)
gtctgatggttgtataaagggcagttcccccgcacactctctcttgcctgcccccacataagacatgccttcgctcctcctttgctttctgcgatgattgtgaggcctccccagccaagt

SEQ ID NO: 614761 - DNA, 120 bp, Artificial Sequence
  ENSG00000176896_37 (sequence is synthesized)
gtgagtcatgcttcaggtttgccagggcctgtgtcccgcaaaaaggcgagcccttattcccagcggaagcccaccccggctcgcggcagctttccggtgcgccctgggcggcgtagatcc

SEQ ID NO: 614762 - DNA, 120 bp, Artificial Sequence
  ENSG00000176896_38 (sequence is synthesized)
gaaggagtattgtgaggattgagatgactggagtgtgtgtggcctggagagttgctcaataaatatatgttgccttccactgtgaagagctgtaaagatgtctgacaagaaccagatagc

SEQ ID NO: 614763 - DNA, 120 bp, Artificial Sequence
  ENSG00000176900_0 (sequence is synthesized)
atgactaataaaatgtatgctatatatataaagaatcttaattatttttctttcctcatagttcagtgtcttcaaccaaccatggcaatattcaataacaccacttcgtcttcctcaaac

SEQ ID NO: 614764 - DNA, 120 bp, Artificial Sequence
  ENSG00000176900_1 (sequence is synthesized)
ttcctcctcactgcattccctgggctggaatgtgctcatgtctggatctccattccagtctgctgtctctacaccattgccctcttgggaaacagtatgatctttcttgtcatcattact

SEQ ID NO: 614765 - DNA, 120 bp, Artificial Sequence
  ENSG00000176900_2 (sequence is synthesized)
aagcggagactccacaaacccatgtattatttcctctccatgctggcagctgttgatctatgtctgaccattacgacccttcccactgtgcttggtgttctctggtttcatgcccgggag

SEQ ID NO: 614766 - DNA, 120 bp, Artificial Sequence
  ENSG00000176900_3 (sequence is synthesized)
atcagctttaaagcttgcttcattcaaatgttctttgtgcatgctttctccttgctggagtcctcggtgctggtagccatggcctttgaccgcttcgtggctatctgtaacccactgaac

SEQ ID NO: 614767 - DNA, 120 bp, Artificial Sequence
  ENSG00000176900_4 (sequence is synthesized)
tcttttcatgggggtcacgagctttcccatccattttgctaccacccagaagtgatcaaatacacatattccaaaccttggatcagcagtttttggggactgtttcttcagctctacctg

SEQ ID NO: 614768 - DNA, 120 bp, Artificial Sequence
  ENSG00000176900_5 (sequence is synthesized)
aatggcactgacgtattgtttattcttttctcctatgtcctgatcctccgtactgttctgggcattgtggcccgaaagaagcaacaaaaagctctcagcacttgtgtctgtcacatctgt

SEQ ID NO: 614769 - DNA, 120 bp, Artificial Sequence
  ENSG00000176900_6 (sequence is synthesized)
gcagtcactattttctatgtgccactgatcagcctctctttggcacaccgcctcttccactccaccccaagggtgctctgtagcactttggccaatatttatctgctcttaccacctgtg

SEQ ID NO: 614770 - DNA, 120 bp, Artificial Sequence
  ENSG00000176900_7 (sequence is synthesized)
ctgaaccctatcatttacagcttgaagaccaagacaatccgccaggctatgttccagctgctccaatccaagggttcatggggttttaatgtgaggggtcttaggggaagatgggattga

SEQ ID NO: 614771 - DNA, 120 bp, Artificial Sequence
  ENSG00000176903_0 (sequence is synthesized)
agcagtaacgtcgcggcgggttgcgggtaggactggacgccagagcagccgcgcagcgcctgaaccgctgcgggccgccgcggccgccccttcccaccctcgcctctgctgtctccagcc

SEQ ID NO: 614772 - DNA, 120 bp, Artificial Sequence
  ENSG00000176903_1 (sequence is synthesized)
tcgcttctccgactttcctgctcctctgctgccttcgtttctggtcctcggccgtcctcgccgcccgcccagaggagtccccgcgcccgccaagaagccgctttccgctggcccgcagcc

SEQ ID NO: 614773 - DNA, 120 bp, Artificial Sequence
  ENSG00000176903_2 (sequence is synthesized)
gccgcgacttcggcacagtttctccctctggctagtctcccaaacggccgctcctcgcccgcgggaagaccaggctgcgaccgcgaacgcccgatcctctccaggagccgcagcgagcgc

SEQ ID NO: 614774 - DNA, 120 bp, Artificial Sequence
  ENSG00000176903_3 (sequence is synthesized)
ggctctcggcccagcgcgcctgccttcgccgcccgccgtcgctcctcgcccgctgcacgacgacgcgacgcccctgctgcaggcggcggacccgaccggacccagacccagacgcaagat

SEQ ID NO: 614775 - DNA, 120 bp, Artificial Sequence
  ENSG00000176903_4 (sequence is synthesized)
gacccgaccggacccagacccagacgcaagatggcgacggccgcgtgactgcctcagcgtccccgagctcggctccgagtgcacctacggactgactgtgggggcagagaagggcgagat

SEQ ID NO: 614776 - DNA, 120 bp, Artificial Sequence
  ENSG00000176903_5 (sequence is synthesized)
caggactctgtctttgttaatcgtgactgcatgaaggtcgcctccctcgggcctacttggtgggagtgtctggtattgttctaaggccaggagcacggtgagccacagtctgttggtaga

SEQ ID NO: 614777 - DNA, 120 bp, Artificial Sequence
  ENSG00000176903_6 (sequence is synthesized)
atttggcgtcttgatagttgagaaaatggcgatgacactgttggaagactggtgccgggggatggatgtgaactcccagagagctctgttagtctggggcatcccagtgaactgtgatga

SEQ ID NO: 614778 - DNA, 120 bp, Artificial Sequence
  ENSG00000176903_7 (sequence is synthesized)
ggctgaaatcgaagagaccctccaggctgcgatgccccaggtctcctaccgaatgcttgggagaatgttctggagggaagaaaatgcgaaagcagccttattagagctcactggcgctgt

SEQ ID NO: 614779 - DNA, 120 bp, Artificial Sequence
  ENSG00000176903_8 (sequence is synthesized)
agattacgccgcgatccccagggagatgccgggcaaaggaggggtctggaaagtgttatttaagcccccaacttctgatgctgaatttttagaaagattgcacctcttcctagctagaga

SEQ ID NO: 614780 - DNA, 120 bp, Artificial Sequence
  ENSG00000176903_9 (sequence is synthesized)
ggggtggaccgtgcaagatgttgcccgtgtccttgggtttcagaaccctactccgaccccgggcccagagatgccagcagagatgctaaactatattttggataatgttattcagcctct

SEQ ID NO: 614781 - DNA, 120 bp, Artificial Sequence
  ENSG00000176903_10 (sequence is synthesized)
tggctggagcacactaatgaggtcctagaggagtggcaggtgtccgatgtagaaaagaggcggcggttgatggagagtcttagaggccccgccgctgatgttattcgcatccttaagtcc

SEQ ID NO: 614782 - DNA, 120 bp, Artificial Sequence
  ENSG00000176903_11 (sequence is synthesized)
aacaaccccgcgataaccactgccgaatgcctgaaggcgcttgagcaggtgtttgggagcgttgagagctctagggatgcccagatcaaatttctgaacacttatcagaacccgggagaa

SEQ ID NO: 614783 - DNA, 120 bp, Artificial Sequence
  ENSG00000176903_12 (sequence is synthesized)
aaattgtctgcttatgtcattcgtctggagcctctgctacagaaggtggtagagaagggggccattgataaagataatgtgaaccaggcccgcctagagcaggtcattgccggggccaac

SEQ ID NO: 614784 - DNA, 120 bp, Artificial Sequence
  ENSG00000176903_13 (sequence is synthesized)
cacagcggggccatccgaaggcagctgtggcttaccggggctggggaagggccagccccaaacctctttcagttgctggtgcagatccgtgaggaggaagccaaggaggaggaggaggag

SEQ ID NO: 614785 - DNA, 120 bp, Artificial Sequence
  ENSG00000176903_14 (sequence is synthesized)
gctgaggccacccttctgcagttaggcctggaagggcacttctgagtgccaggaaaggcagctttagtgcagacctagatcacagctacttttcttgtccctgtggggtcttacagatgt

SEQ ID NO: 614786 - DNA, 120 bp, Artificial Sequence
  ENSG00000176903_15 (sequence is synthesized)
gtctctgagtagtaaaggcttagccttgttctgttttgttgttttttggaggggaaggttagtcaggcctgagtattcatgtaacattctaaaattgtgccagcgagcaccgtgaacgac

SEQ ID NO: 614787 - DNA, 120 bp, Artificial Sequence
  ENSG00000176903_16 (sequence is synthesized)
tgcaatgcaagcgggtcttgctggctaaaatgccaggtaaagggttggttggacacagcgcttagtgcacgctgtcatcatggacatcataatcagttgtgaaaaacacgcgaacctatg

SEQ ID NO: 614788 - DNA, 120 bp, Artificial Sequence
  ENSG00000176903_17 (sequence is synthesized)
acacttcttattccacactgaatgtgaaattgcatgttcagatgtttactacgaggcctggctcacaggaagtgttcagtaaaagtatgcactgttagattactgataacgcggatagat

SEQ ID NO: 614789 - DNA, 120 bp, Artificial Sequence
  ENSG00000176903_18 (sequence is synthesized)
ttttgtttaccataaattgttccagatttatattaatggaaggaagtgtgcatttattagctattactcaactttacaatgcaaacatcttatttctcatctttaaacatgtcgaccagt

SEQ ID NO: 614790 - DNA, 120 bp, Artificial Sequence
  ENSG00000176903_19 (sequence is synthesized)
ttaattgaaaagtattctgagactgcaaaatggggtgttaaaaaatactgcagttacggagctgtgtaaaccagtttctcattgcataagatacagatgtaaattgcatggagaggttga

SEQ ID NO: 614791 - DNA, 120 bp, Artificial Sequence
  ENSG00000176903_20 (sequence is synthesized)
tatgcacctgtacagtaattcactcccccatttcacatctttgtcagagaatagttcttgttcatactgagtgttctaaatttgaagttatatatacaaattaaaatattttaaaaattc

SEQ ID NO: 614792 - DNA, 120 bp, Artificial Sequence
  ENSG00000176907_0 (sequence is synthesized)
acagactctctggaaagcctgggagctgaattccggaagatccccacatcgatgaaagcaaagcgaagccaccaagccgtcatcatgtccacgtcgctacgagtcagcccatccatccat

SEQ ID NO: 614793 - DNA, 120 bp, Artificial Sequence
  ENSG00000176907_1 (sequence is synthesized)
ggctaccacttcgacacagcctctcgtaagaaagccgtgggcaacatctttgaaaacacagaccaagaatcactagaaaggctcttcagaaactctggagacaagaaagcagaggagaga

SEQ ID NO: 614794 - DNA, 120 bp, Artificial Sequence
  ENSG00000176907_2 (sequence is synthesized)
gccaagatcatttttgccatagatcaagatgtggaggagaaaacgcgtgccctgatggccttgaagaagaggacaaaagacaagcttttccagtttctgaaactgcggaaatattccatc

SEQ ID NO: 614795 - DNA, 120 bp, Artificial Sequence
  ENSG00000176907_3 (sequence is synthesized)
aaagttcactgaagagaagaggatggataaggacgttatccaagaatggacattcaaagaccaagtgagtttgtgagattctaacagatgcagcattttgctgctaccttacaagcttct

SEQ ID NO: 614796 - DNA, 120 bp, Artificial Sequence
  ENSG00000176907_4 (sequence is synthesized)
cttctgtcaggactccagaggctggaaagggaccgggactggaaagggaccaggactgaacagactggttacaaagactccaaacaatttcatgccctgtgctgttacagaggagaacaa

SEQ ID NO: 614797 - DNA, 120 bp, Artificial Sequence
  ENSG00000176907_5 (sequence is synthesized)
aatgctttcagcaaggatttgaaaactcttccgtccctgcaggaaaggattgatgctgatagaagagcctggacagatgtaatgagaactaaagaaaacagatggctggagatgacattt

SEQ ID NO: 614798 - DNA, 120 bp, Artificial Sequence
  ENSG00000176907_6 (sequence is synthesized)
atccagggtcactttgtcaggccctaggacttaaatcgaagttgaacttttttttttttttttaaccaaatagataggggaagggaggagggagagggaggacagggagagaaaatacca

SEQ ID NO: 614799 - DNA, 120 bp, Artificial Sequence
  ENSG00000176907_7 (sequence is synthesized)
ctgagtgttcaaaatatttccaagcctgagtattgtctattggtatagatttttagaaatcaataattgattatttatttgcacttattacaatgcctgaaaaagtgcaccacatggatg

SEQ ID NO: 614800 - DNA, 120 bp, Artificial Sequence
  ENSG00000176907_8 (sequence is synthesized)
ttaagtagaaattcaagaaagtaagatgtcttcagcaactcagtaaaaccttacgccaccttttggtttgtaaaaggttttttatacatttcaaacaggttgcacaaaagttaaaataat

SEQ ID NO: 614801 - DNA, 120 bp, Artificial Sequence
  ENSG00000176907_9 (sequence is synthesized)
ggggtcttttataaatccaaagtactgtgaaaacattttacatattttttaaatcttctgactaatgctaaaacgtaatctaattaaatttcatacagttactgcagtaagcattaggaa

SEQ ID NO: 614802 - DNA, 120 bp, Artificial Sequence
  ENSG00000176907_10 (sequence is synthesized)
gtgaatatgatatacaaaatagtttataaagactctatagtttctataatttattttactggcaaatgtcatgcaacaataataaattattgtaaactttgtggcttttggtctgtgatg

SEQ ID NO: 614803 - DNA, 120 bp, Artificial Sequence
  ENSG00000176907_11 (sequence is synthesized)
cttggtctcaaaggaaaaaataagatggtaaatgttgatatttacaaacttttctaaagatgtgtctctaacaataaaagttaattttagagtagttttatattaattaccaaacttttt

SEQ ID NO: 614804 - DNA, 120 bp, Artificial Sequence
  ENSG00000176907_12 (sequence is synthesized)
caaaacaaattcttacgtcaaatatctgggaagtttctctgtcccaatcttaaaatataaaatatagatatagaagttcatagattgactccttggcatttctatttatgtatccattaa

SEQ ID NO: 614805 - DNA, 120 bp, Artificial Sequence
  ENSG00000176907_13 (sequence is synthesized)
ggatgagttttaaaaggctttctcttcatacttttgaaaaatttcttctatgattacagtagctatgtacatgtgtacatctatttttcccaagcaatatgttttgggtttagagtctga

SEQ ID NO: 614806 - DNA, 120 bp, Artificial Sequence
  ENSG00000176907_14 (sequence is synthesized)
gtgatgaccaagattctgtgtgttactactgtttgtttaataggaacaaatatagaaataatattatctctttgcttatttcccgttaaaactataataaaatgtttctaggacagcata

SEQ ID NO: 614807 - DNA, 120 bp, Artificial Sequence
  ENSG00000176909_0 (sequence is synthesized)
gaatggcgctggcccgcggcgctgcgctggcagggagcaggcgggaggcccgaggaagggagcctgctgcccgcccacccgcctgcacaggctgtgtaagggggctgggcacgcatatcc

SEQ ID NO: 614808 - DNA, 120 bp, Artificial Sequence
  ENSG00000176909_1 (sequence is synthesized)
cgccaacaactgcagctcccaccagcctgccaggccaggctcctggacactcccttcccgccttcctcctcccacctccctcctccctccacagtcctccagcttcggatccacagacgg

SEQ ID NO: 614809 - DNA, 120 bp, Artificial Sequence
  ENSG00000176909_2 (sequence is synthesized)
aatcaggagcagaatccagttcaggcgcccatctcccagcaatcaagtcttgctccctggcctgccctccggcaccctggagccccgctttccacacagccttgctcctcccggcctggc

SEQ ID NO: 614810 - DNA, 120 bp, Artificial Sequence
  ENSG00000176909_3 (sequence is synthesized)
ttgctgcctgcaggcctctcagggtccttcaccgtctctccagtctcggatccggacccgtggatctcagcctcagaccctcctctggccccggccttgccctcgggcacggcccctttc

SEQ ID NO: 614811 - DNA, 120 bp, Artificial Sequence
  ENSG00000176909_4 (sequence is synthesized)
ctcttcagccctggggtcctgctccccgagccagaatattgtcctccttggaggtccccaaagaaggagtctcccaagatctcccaacgttggagggagtccaagcccagggggaacttg

SEQ ID NO: 614812 - DNA, 120 bp, Artificial Sequence
  ENSG00000176909_5 (sequence is synthesized)
acataccaccagtacatgcccccagagccgagacagggatccagggcggacccccaagccgaggggtccgccctgggtcctcctgggccatctctgtgggaagggacagactcgcagcag

SEQ ID NO: 614813 - DNA, 120 bp, Artificial Sequence
  ENSG00000176909_6 (sequence is synthesized)
ccacatcctaggatgaagccctctcccctcactccctgcccaccaggagtccctagcccctcgccccccccacacaagttggaacttcagacccttaaactggaggagctgacggtctca

SEQ ID NO: 614814 - DNA, 120 bp, Artificial Sequence
  ENSG00000176909_7 (sequence is synthesized)
ggggcctcccagtgtcggggaccaagtctatgctcctggagcgcatgcgcggcggcgcgccgccccgcgagcggccgaagccgcggcgcgaggacagtcccgcgggtgctccctggccgc

SEQ ID NO: 614815 - DNA, 120 bp, Artificial Sequence
  ENSG00000176909_8 (sequence is synthesized)
gcctcaagcccaaggccctggcagccgcccggcgtcagggctcggtcaagcccagcgcagcatctcacaggccacctcttccacgtgccgcggataccccggggacggctccggctccaa

SEQ ID NO: 614816 - DNA, 120 bp, Artificial Sequence
  ENSG00000176909_9 (sequence is synthesized)
ctcccactccggctcctgctgcagctccagccctgaccccttcctcagggccgggctcagcggctctgactctggaggaggagctgcaggaagcgatccggagggcgcagttgcttccta

SEQ ID NO: 614817 - DNA, 120 bp, Artificial Sequence
  ENSG00000176909_10 (sequence is synthesized)
accggggcatcgatgacatcctggaggatcaggtggagcctgatgaccccctgccccctattcccctggacttccctggctccttcgacgtgctgtccccctccccggactctgaaggcc

SEQ ID NO: 614818 - DNA, 120 bp, Artificial Sequence
  ENSG00000176909_11 (sequence is synthesized)
tctcatctgttttctcctcttcactcccgtctcccacgaactcctcctccccttctcccagggaccccacggactccctggactggctggaggccctgagcgggggtcctcctctgggtt

SEQ ID NO: 614819 - DNA, 120 bp, Artificial Sequence
  ENSG00000176909_12 (sequence is synthesized)
ctggtcccccaccccccagcatcttctccgctgacttatctgactccagcagcagccggctgtgggacctgctggaggatccatggtgatggattctaggatttacagagacagagaact

SEQ ID NO: 614820 - DNA, 120 bp, Artificial Sequence
  ENSG00000176909_13 (sequence is synthesized)
gatgggggtggagagaagctccttgtgggaggagagggaactaccagcagagcccctcctaccgcagacacaggatcggagacaacctccaaccccacctgcctcctgaagtgctgctga

SEQ ID NO: 614821 - DNA, 120 bp, Artificial Sequence
  ENSG00000176909_14 (sequence is synthesized)
catgcaactgccttaactttgcctacctggcctccttatgatccccctccggcgtggtatggttggggggcttcttttgctgctggccacggcaaacaagctgcttgctgcttccttcag

SEQ ID NO: 614822 - DNA, 120 bp, Artificial Sequence
  ENSG00000176909_15 (sequence is synthesized)
ctctagactcaacccgccccagagcacagcttcgccgagcccacctggtccccatcccggccttggcaatgaccctggcggcttcctcccagcgttcccaaatcattcgctccaagttcc

SEQ ID NO: 614823 - DNA, 120 bp, Artificial Sequence
  ENSG00000176909_16 (sequence is synthesized)
ccccggtagatggctccctgttgtttggggagcctggaaggtggttatgccttttggatgcaggagaggagcaagaaagagtggagagggagaatgggggagccggaccctgacctccct

SEQ ID NO: 614824 - DNA, 120 bp, Artificial Sequence
  ENSG00000176909_17 (sequence is synthesized)
gggttctggttggagatgaaaaaattagaagcatcaggtctaagatcagcttctcttggaagcagagcctgagacaagatataaatgccagtcatttattaaagaagtgttctggctggg

SEQ ID NO: 614825 - DNA, 80 bp, Artificial Sequence
  ENSG00000176915_0 (sequence is synthesized)
tggccgcggctggcggcggccgagtgggcggcgctggcctgggagctgctgggcgcctcggtgctgctgatcgctgtgcg

SEQ ID NO: 614826 - DNA, 120 bp, Artificial Sequence
  ENSG00000176915_1 (sequence is synthesized)
gtggctggtgcggcggctgggcccgcggccgggaggtctgggccgcagcgggaccccagttcctccgccaagcgcggccgccgcccccgcctcaggtgaaatgacaatggatgctctgtt

SEQ ID NO: 614827 - DNA, 120 bp, Artificial Sequence
  ENSG00000176915_2 (sequence is synthesized)
ggctcgattgaaacttctgaatccagatgaccttagagaagaaatcgtcaaagccggattgaaatgtggacccattacatcaactacaaggttcatttttgagaaaaaattggctcaggc

SEQ ID NO: 614828 - DNA, 120 bp, Artificial Sequence
  ENSG00000176915_3 (sequence is synthesized)
tttactggagcaaggaggaaggctgtcttctttctaccaccatgaggcaggtgtcacagctctcagccaggacccacaaaggattttgaagccagctgaagggaacccaactgatcaggc

SEQ ID NO: 614829 - DNA, 120 bp, Artificial Sequence
  ENSG00000176915_4 (sequence is synthesized)
tggtttttctgaagacagagattttggttacagtgtgggcctgaatcctccagaggaggaagctgtgacatccaagacctgctcggtgccccctagtgacaccgacacctacagagctgg

SEQ ID NO: 614830 - DNA, 120 bp, Artificial Sequence
  ENSG00000176915_5 (sequence is synthesized)
agcgactgcgtctaaggagccgcccctgtactatggggtgtgtccagtgtatgaggacgtcccagcgagaaatgaaaggatctatgtttatgaaaataaaaaggaagcattgcaagctgt

SEQ ID NO: 614831 - DNA, 120 bp, Artificial Sequence
  ENSG00000176915_6 (sequence is synthesized)
caagatgatcaaagggtcccgatttaaagctttttctaccagagaagacgctgagaaatttgctagaggaatttgtgattatttcccttctccaagcaaaacgtccttaccactgtctcc

SEQ ID NO: 614832 - DNA, 120 bp, Artificial Sequence
  ENSG00000176915_7 (sequence is synthesized)
tgtgaaaacagctccactctttagcaatgacaggttgaaagatggtttgtgcttgtcggaatcagaaacagtcaacaaagagcgagcgaacagttacaaaaatccccgcacgcaggacct

SEQ ID NO: 614833 - DNA, 120 bp, Artificial Sequence
  ENSG00000176915_8 (sequence is synthesized)
caccgccaagcttcggaaagctgtggagaagggagaggaggacaccttttctgaccttatctggagcaacccccggtatctgataggctcaggagacaaccccactatcgtgcaggaagg

SEQ ID NO: 614834 - DNA, 120 bp, Artificial Sequence
  ENSG00000176915_9 (sequence is synthesized)
gtgcaggtacaacgtgatgcatgttgctgccaaagagaaccaggcttccatctgccagctgactctggacgtcctggagaaccctgacttcatgaggctgatgtaccctgatgacgacga

SEQ ID NO: 614835 - DNA, 120 bp, Artificial Sequence
  ENSG00000176915_10 (sequence is synthesized)
ggccatgctgcagaagcgtatccgttacgtggtggacctgtacctcaacacccccgacaagatgggctatgacacaccgttgcattttgcttgtaagtttggaaatgcagatgtagtcaa

SEQ ID NO: 614836 - DNA, 120 bp, Artificial Sequence
  ENSG00000176915_11 (sequence is synthesized)
cgtgctttcgtcacaccatttgattgtaaaaaactcaaggaataaatatgataaaacacctgaagatgtaatttgtgaaagaagcaaaaataaatctgtggaactgaaggagcggatcag

SEQ ID NO: 614837 - DNA, 120 bp, Artificial Sequence
  ENSG00000176915_12 (sequence is synthesized)
agagtatttaaagggccactactacgtgcccctcctgagagcggaagagacttcttctccagtcatcggggagctgtggtccccagaccagacggctgaggcctctcacgtcagccgcta

SEQ ID NO: 614838 - DNA, 120 bp, Artificial Sequence
  ENSG00000176915_13 (sequence is synthesized)
tggaggcagccccagagacccggtactgaccctgagagccttcgcagggcccctgagtccagccaaggcagaagattttcgcaagctctggaaaactccacctcgagagaaagcaggctt

SEQ ID NO: 614839 - DNA, 120 bp, Artificial Sequence
  ENSG00000176915_14 (sequence is synthesized)
ccttcaccacgtcaagaagtcggacccggaaagaggctttgagagagtgggaagggagctagctcatgagctggggtatccctgggttgaatactgggaatttctgggctgttttgttga

SEQ ID NO: 614840 - DNA, 120 bp, Artificial Sequence
  ENSG00000176915_15 (sequence is synthesized)
tctgtcttcccaggaaggcctgcaaagactagaagaatatctcacacagcaggaaataggcaaaaaggctcaacaagaaacaggagaacgggaagcctcctgccgagataaagccaccac

SEQ ID NO: 614841 - DNA, 120 bp, Artificial Sequence
  ENSG00000176915_16 (sequence is synthesized)
gtctggcagcaattccatttccgtgagggcgtttctagatgaagatgacatgagcttggaagaaataaaaaatcggcaaaatgcagctcgaaataacagcccgcccacagtcggtgcttt

SEQ ID NO: 614842 - DNA, 120 bp, Artificial Sequence
  ENSG00000176915_17 (sequence is synthesized)
tggacatacgaggtgcagcgccttccccttggagcaggaggcagacctcatagaagccgccgagccgggaggtccacacagcagcagaaatgggctctgccatcctctgaatcacagcag

SEQ ID NO: 614843 - DNA, 120 bp, Artificial Sequence
  ENSG00000176915_18 (sequence is synthesized)
gaccctggcgggcaagagaccaaaggccccccgtggggaggaagcccatctgccacctgtctcggatttgactgttgagtttgataaactgaatttgcaaaatataggacgtagcgtttc

SEQ ID NO: 614844 - DNA, 120 bp, Artificial Sequence
  ENSG00000176915_19 (sequence is synthesized)
agatcagatcctgacttcaagaatcaatgcagtagaaagagacttgttagagccttctcccgcagaccaactcgggaatggccacaggaggacagaaagtgaaatgtcagccaggatcgc

SEQ ID NO: 614845 - DNA, 120 bp, Artificial Sequence
  ENSG00000176915_20 (sequence is synthesized)
taaaatgtccttgagtcccagcagccccaggcacgaggatcagctcgaggtcaccagggaaccggccaggcggctcttcctttttggagaggagccatcaaaactcgatcaggatgtttt

SEQ ID NO: 614846 - DNA, 120 bp, Artificial Sequence
  ENSG00000176915_21 (sequence is synthesized)
ggccgctcttgaatgtgcagacgtcgacccccatcagttcccggccgtgcacagatggaagagtgctgtcctgtgctactcaccctcggacagacagagttggcccagtcccgcggtgaa

SEQ ID NO: 614847 - DNA, 120 bp, Artificial Sequence
  ENSG00000176915_22 (sequence is synthesized)
aggaaggttcaagtctcagctgccagatctcagtggccctcacagctacagtccggggagaaacagcgtggctggaagcaaccccgcaaagccaggcctgggcagtcctgggcgctacag

SEQ ID NO: 614848 - DNA, 120 bp, Artificial Sequence
  ENSG00000176915_23 (sequence is synthesized)
ccccgtgcacgggagccagctccgcaggatggcgcgcctggctgagcttgccgccctgtaggcttggcgctgggctctcggtttgttcttcatttttaaagaaggaagggtcatatgttt

SEQ ID NO: 614849 - DNA, 120 bp, Artificial Sequence
  ENSG00000176915_24 (sequence is synthesized)
attgctaaactgtcaaaaaggaatatattctgattaaattattactcctcactttgagggtgtgagaattttagaagatttaaatgttctatataacacttagatttctgatattttgga

SEQ ID NO: 614850 - DNA, 120 bp, Artificial Sequence
  ENSG00000176915_25 (sequence is synthesized)
agaagttagaagttaatgaaagcaaactcagttaccaattttctggaaaatatccatgtggtaatggtagactttttaggtggcaatttctaggtctgaaatatagcagaggaaagggcg

SEQ ID NO: 614851 - DNA, 120 bp, Artificial Sequence
  ENSG00000176915_26 (sequence is synthesized)
ctgaggcagttgcaggcaggcagccctgtacttaccctgtactcacctcatccgacagacgctgtggatgaggaggggcttggcggaggcgtgagcaccgatgtccctttgataacctgc

SEQ ID NO: 614852 - DNA, 120 bp, Artificial Sequence
  ENSG00000176915_27 (sequence is synthesized)
actcaccaagatgaactatttgccgccctgtcttttcctgggttggggggtggcatctgatggtggcagagtgcctgttggttcgcccgtgggtctcatggttcagacagagggaggtgg

SEQ ID NO: 614853 - DNA, 120 bp, Artificial Sequence
  ENSG00000176915_28 (sequence is synthesized)
acggcagggatcagggagccaggagcgcgcctcagacttgcagcaaccattgtgatttgggttgttcggaatatttaaattactgatcagaagatgaaagtagcttttctcttgggaagt

SEQ ID NO: 614854 - DNA, 120 bp, Artificial Sequence
  ENSG00000176915_29 (sequence is synthesized)
cttgcagcccgtgggagtgataccaggagcaacacagagctcagcagcggcgccaaggtgttccctgtttcctcagcacgtgagccttcaccgcctgcttcattcaggagccagtgcagc

SEQ ID NO: 614855 - DNA, 120 bp, Artificial Sequence
  ENSG00000176915_30 (sequence is synthesized)
agtaatacagtctatacattgttctgttttcaaatttatcctgaggctttgttgagcataaatgattatacgataaaggtatccgttattttggaactcatttcagttgggatctcctgt

SEQ ID NO: 614856 - DNA, 120 bp, Artificial Sequence
  ENSG00000176915_31 (sequence is synthesized)
atgcagagtgttgcatttagaggtttgagtcccatcttggtttcttgccgtgctgactgtagccttcaccttgacttgaatgaaggtctgtggttggaatgtgtgaggagccgctgaggt

SEQ ID NO: 614857 - DNA, 120 bp, Artificial Sequence
  ENSG00000176915_32 (sequence is synthesized)
gttcaggaggtgctgcctggaggtcggtttcttcctgggtgttacgggcaactgctcacacagttgtttctctgtgaacatttccagtgtttaatccaaaatgaaaacccaccaatgctt

SEQ ID NO: 614858 - DNA, 120 bp, Artificial Sequence
  ENSG00000176915_33 (sequence is synthesized)
ttgctaacttcagtgccttttataaatcatttttaaatttcctgaacttgctttttgaggatatacagggatattaagtagacgcaggattgtttttgtttgtaaaaattctgaattgaa

SEQ ID NO: 614859 - DNA, 120 bp, Artificial Sequence
  ENSG00000176915_34 (sequence is synthesized)
actttgttttaaaaaaaggcttctttctttcatatgacaagagataggtcaggaatattggaatcaagatttaaatgttaaaattcgattttgttacacagggtgtgttcatttgttttg

SEQ ID NO: 614860 - DNA, 120 bp, Artificial Sequence
  ENSG00000176915_35 (sequence is synthesized)
tagcagacaagatctagatcccagacagaaacaacacatgctattctaaaaagccgcattttaaaaggcaccttggttctcaaaagaaatcagaatatggatattcgtagtgatgatctg

SEQ ID NO: 614861 - DNA, 120 bp, Artificial Sequence
  ENSG00000176915_36 (sequence is synthesized)
ttttctctaaaatcttaccatattgtctgtatatggttgtaaattcaaatggaaagtaaaacgttttggccctgattttgtatgtggaccactgctcctgatttcccaggtcttaggcca

SEQ ID NO: 614862 - DNA, 120 bp, Artificial Sequence
  ENSG00000176915_37 (sequence is synthesized)
cctttgactgtttctccgtttgtttgtgggcagcgattccagtcccaacggaggcattctcgtgtgtcccggggggttatgtccttcacaaaacacttaatgaaatgaattacttcaaaa

SEQ ID NO: 614863 - DNA, 120 bp, Artificial Sequence
  ENSG00000176915_38 (sequence is synthesized)
caagaagtcggacccggaaagaggctttgagagagtgggaaggtactgaaaggctgagccgcagcagcgtggggcacacagttggttgcattttgattaatgacagaaggtcaaatcaca

SEQ ID NO: 614864 - DNA, 120 bp, Artificial Sequence
  ENSG00000176915_39 (sequence is synthesized)
gcttcaaagtaccaatttccagaaggcttttctgggagacttggtccttttcgtgaaggtctaattccttgtggatgttgtggaattctagcttaagccagtcccgtcccagacctgggg

SEQ ID NO: 614865 - DNA, 120 bp, Artificial Sequence
  ENSG00000176915_40 (sequence is synthesized)
gatgtctgcagtgccttcctttccttttctaattggaattccttgttggttctgggacatgtttctaaggaaccttaatattttatagaaggtaccatataatgctatggattccttggg

SEQ ID NO: 614866 - DNA, 120 bp, Artificial Sequence
  ENSG00000176915_41 (sequence is synthesized)
aaaaaataggccatagccacaaagctaaattatgctgtaatcaaataaagcttcgtggaattgtttagaatattttctcaaaatatgtgcccagtgtcaggtgtacaactggaacccaga

SEQ ID NO: 614867 - DNA, 120 bp, Artificial Sequence
  ENSG00000176915_42 (sequence is synthesized)
cgtctgtgggagttgaactgtgtgacctgggttgctggcgtgagggtctgtcgggctgaggcctccttcctgcctgcagccggttcacggctcctgagagctgtgccgggtcctgcttac

SEQ ID NO: 614868 - DNA, 120 bp, Artificial Sequence
  ENSG00000176915_43 (sequence is synthesized)
ctgtgaggaggcgtgctgtttcagaaaatgcaccgtatgatttcagctgccagttaaggataaaggaaaattataaccatgattgcagacattgctttggtacttgaagctttagtggct

SEQ ID NO: 614869 - DNA, 120 bp, Artificial Sequence
  ENSG00000176915_44 (sequence is synthesized)
atatcagacaccaggacgcaaacgcaaagcgcttcacacggtgcacatcagacaccagcatgcagagagcttcacacggtgcatatcagacaccaggacgcagagcgcttcacacggtgc

SEQ ID NO: 614870 - DNA, 120 bp, Artificial Sequence
  ENSG00000176915_45 (sequence is synthesized)
atatgagacaccaggacgcagagcgcttcacacggtgtatatcagacaccaggacgcacacgcaaagcacttcacacggtgcatatcagacaccacgatgcaaagtgcttccaaagcaca

SEQ ID NO: 614871 - DNA, 120 bp, Artificial Sequence
  ENSG00000176915_46 (sequence is synthesized)
gatgcactgaatggaaagagcatgatggaagaggttaatctacaaaatctaaaagtgattcataaaaacatcaacgatggccgggcacgggagctcaggcctgcaatcccagcggccggg

SEQ ID NO: 614872 - DNA, 120 bp, Artificial Sequence
  ENSG00000176915_47 (sequence is synthesized)
cgtggcggctcacactataatcccagcacttagggaggccaacgtgggtggattgctgaaacccaggagttcgaaggcagcttgagcaacatagtgagactctgtctctatttatttttt

SEQ ID NO: 614873 - DNA, 120 bp, Artificial Sequence
  ENSG00000176915_48 (sequence is synthesized)
taaaaaaacagaaatttgctaataactagagattcgaatctgctaaaatacaaattaaagcagatatacagtttaaactgtgtgtgtgtgtgtgtgagtgtgtgtctgtgtgagtttgtg

SEQ ID NO: 614874 - DNA, 120 bp, Artificial Sequence
  ENSG00000176915_49 (sequence is synthesized)
tgtgtaaggtcataatagaaccattagcccgcaagacacttcatttataaaacaaactccctggaatgatagaaaatgaaaatgattgacatacattaaactaagaagcagtgaatcttc

SEQ ID NO: 614875 - DNA, 120 bp, Artificial Sequence
  ENSG00000176915_50 (sequence is synthesized)
aacagtcacgacctgtgactctgaaccacagaactagagcgacgtcagtgccgtcgttatacaggaatcattgaagtctgaccttgctgtgttgtagctgatggtggcacagaactcact

SEQ ID NO: 614876 - DNA, 120 bp, Artificial Sequence
  ENSG00000176915_51 (sequence is synthesized)
tctgtaaagcggcctcatttacagtgttgtcttgtgactatgtacattttaattagtaaatattaaataaagttgaggcatttcctaagtagcaggagccacagctcaagtgttctggat

SEQ ID NO: 614877 - DNA, 120 bp, Artificial Sequence
  ENSG00000176915_52 (sequence is synthesized)
cctcctgtggccgcggccaccatcgtgaacaccaaacgggacatttctgttgcctgtcgcacagtgctgcgcccgggagctcttctgtgttatcttcacacctaaagcgcagcagggtta

SEQ ID NO: 614878 - DNA, 120 bp, Artificial Sequence
  ENSG00000176915_53 (sequence is synthesized)
cttcatggagttgttctggacgatcttcgggatcctctggggcactgtgacactcggagcccctggggtcgcagcagatcggagctggagggtggctgggggtgcagggcagtcatctcg

SEQ ID NO: 614879 - DNA, 120 bp, Artificial Sequence
  ENSG00000176915_54 (sequence is synthesized)
aagaaaagtcagcctggcagctttatttccctcctcgtctgaaatagggtctcactctgtggcacaggatggaaagcaatggtgcagtcacagcccactgcagcctccccctcctgggct

SEQ ID NO: 614880 - DNA, 120 bp, Artificial Sequence
  ENSG00000176915_55 (sequence is synthesized)
ggcctcccagagtgctgggattgcaggcgtgagcttctgtgcctggccccagcagcctgattgtgtctggagggtcctgtttgcccttttccagggagtcgtgtgggtggttttccatcc

SEQ ID NO: 614881 - DNA, 120 bp, Artificial Sequence
  ENSG00000176915_56 (sequence is synthesized)
tgaaatctgatgaggaggttttggatgcaagagttgctgttgctggggtcacggcagttggtcgcggatggagtggggaggttttgggtataagagttgctgttgctggggtcacggcag

SEQ ID NO: 614882 - DNA, 82 bp, Artificial Sequence
  ENSG00000176915_57 (sequence is synthesized)
ttttctttatccagttgaccgttgatgggcatacagcacttttacaattagaaaaaaattaaaagcataaaaactatgataa

SEQ ID NO: 614883 - DNA, 120 bp, Artificial Sequence
  ENSG00000176915_58 (sequence is synthesized)
gtttccaaaaaaaaaaaaaactatgaaactatgataagcctttaacataagaaattcccaggcattccagagtagcatgattgactgtaaaggaagcctcttgactctgggtctccagga

SEQ ID NO: 614884 - DNA, 120 bp, Artificial Sequence
  ENSG00000176915_59 (sequence is synthesized)
gctgggtttgaaagcaggacgaggtggtgtgtggcctccgtgcaacctacagaacctcacgacactatcctatatggcttgactgcgctgtcccgtgggacctgaagacactactcttcc

SEQ ID NO: 614885 - DNA, 120 bp, Artificial Sequence
  ENSG00000176915_60 (sequence is synthesized)
ttgtgctttttccatactcacatccaagtgccgtgtgattccagatctgttgagagatgcgtattcagtgatgcaaattgtaaagtacaagagaagcaggactgagaagcgaggaggccg

SEQ ID NO: 614886 - DNA, 120 bp, Artificial Sequence
  ENSG00000176915_61 (sequence is synthesized)
ggcacagcggcccacacctgtgataaactacaagagaagcaggattgagaagcaggattgagaagcgaggaggccgggcacagcagcccacacctgtgataaactacaagagaagcagga

SEQ ID NO: 614887 - DNA, 120 bp, Artificial Sequence
  ENSG00000176915_62 (sequence is synthesized)
ctgagaagcgaggaggctgggcacagcggcccacacctgtaatcccagaacttttggaggtggaggtggaatgatcacttgcatccagcagttcgagaccagcctgggcaacagagcaag

SEQ ID NO: 614888 - DNA, 120 bp, Artificial Sequence
  ENSG00000176915_63 (sequence is synthesized)
agcctgggtgacagaatgagactctgtctgaaactaagaggagaaaaaaaggagagaaggaataaaatattacttttttttgtttttttgagacagattctcactctgtcgctcaggctg

SEQ ID NO: 614889 - DNA, 120 bp, Artificial Sequence
  ENSG00000176915_64 (sequence is synthesized)
acaggcgtgagccaccgcacccggctggaatgaaatataacatttttaaaatgtattaagctcctactgtgtgctactcttattcactcaggtccgaccccttagtcctttaactacctg

SEQ ID NO: 614890 - DNA, 120 bp, Artificial Sequence
  ENSG00000176915_65 (sequence is synthesized)
tccgaccccttagtcctttaactacctggggcttccttttcttttctttcttttcttgtagcagtggaggaaaatgaggctggttaagtgaagtgagctctgagaccttgtgtgactttg

SEQ ID NO: 614891 - DNA, 120 bp, Artificial Sequence
  ENSG00000176915_66 (sequence is synthesized)
tttccattgtatccatttgcattaagtgcagtgagctctggcggaaaccaccctctgccccgtctgttggatccatttgcagaggccttggcaagggctcgcgtgatccccgtcctgctc

SEQ ID NO: 614892 - DNA, 120 bp, Artificial Sequence
  ENSG00000176915_67 (sequence is synthesized)
gcaaagtgcaccttgcagagggcagaagtatattctgtgcccacaaagtgcaagaagtatctggaccttctgagaactgaaagatgagtttgatttttctgtgtattacagctgtgagct

SEQ ID NO: 614893 - DNA, 120 bp, Artificial Sequence
  ENSG00000176915_68 (sequence is synthesized)
gtcccttgtctagcagccctttagaaataaaagctataaggatcttctggtggcagtggcctctcccacaccccttctgtaattgctgttattacataagctatacatccacttgccata

SEQ ID NO: 614894 - DNA, 120 bp, Artificial Sequence
  ENSG00000176915_69 (sequence is synthesized)
gaaaacttaaaatactgcttgatcaaaaagaataaaattcaccagaaaattctacaactgagaaattgctattattttgcatacatgtgattctttttgtgtgtgtgtgtgtgtgtgtgt

SEQ ID NO: 614895 - DNA, 120 bp, Artificial Sequence
  ENSG00000176915_70 (sequence is synthesized)
gtgtgtgtgtgtgtatctgtacttcaacataagaatggcatttggtaaccaacttaaaactcctggcattttaaaaagcatttgactttttaaagctcacaatcaggtacagactcaaaa

SEQ ID NO: 614896 - DNA, 120 bp, Artificial Sequence
  ENSG00000176915_71 (sequence is synthesized)
atgtagttgcattcatagttttaattagtttctctcataggctggttcctttctttccttttatttgaaggttgttggtttttctatagtttctagcaaaagttcgtattgctgcaattc

SEQ ID NO: 614897 - DNA, 120 bp, Artificial Sequence
  ENSG00000176915_72 (sequence is synthesized)
ttcaagggctgagaaagttgatttctttagtggcaaaaatagaactttgatgttccgtgttacttaggagctccaccttgacccagcctcacaacaaaaagtttgtgtatgaccaggctt

SEQ ID NO: 614898 - DNA, 120 bp, Artificial Sequence
  ENSG00000176915_73 (sequence is synthesized)
cctgtaagtggaactcaaccaaccaagaaggttagaaacatgttcacgtgcttctgcttttactcgatgcgctggtaccttttcctctccttgcagacagttagaaaatgtcgagtagcg

SEQ ID NO: 614899 - DNA, 120 bp, Artificial Sequence
  ENSG00000176915_74 (sequence is synthesized)
agctgtctccttagacttttagaaagaccacactcttcacacgttttctgagtgtgagctttattaaatctttagcattaagatactattctactttactgagtttaaaactatttttct

SEQ ID NO: 614900 - DNA, 120 bp, Artificial Sequence
  ENSG00000176915_75 (sequence is synthesized)
gaaatcattgtaatgataaggaaatgttgcgatcaaataagatttagacacacttttttttccaataggtaatttgtgaaagaagcaaaaataaatctgtggaactgaaggagcggatca

SEQ ID NO: 614901 - DNA, 80 bp, Artificial Sequence
  ENSG00000176915_76 (sequence is synthesized)
gagctttcagagttcactggccgggtgtggtgactcgtccctgtaattacaacacttttgggggctgaggcagaaggatc

SEQ ID NO: 614902 - DNA, 120 bp, Artificial Sequence
  ENSG00000176915_77 (sequence is synthesized)
gacgccctcctcgggcctggggtcccggccgcgcccctggagccggcagcagttgggcgaggcggccggggaaaccagggccggtcgggaaaggccattccggccgcggaaagggcagtt

SEQ ID NO: 614903 - DNA, 120 bp, Artificial Sequence
  ENSG00000176915_78 (sequence is synthesized)
attccggccgcggaaagggcagttgcggggacttggcttcccgggccgggggcggaggggccacgccgggttcgggggtgagagctttcccgggccctggagcagcctccggggaaggcg

SEQ ID NO: 614904 - DNA, 120 bp, Artificial Sequence
  ENSG00000176915_79 (sequence is synthesized)
gcgttagcggagactcttgctgcggtctctcgagacctggggagggatggcccaaaggagggcggcgcggggaggaaacccctgggtcccggatgtgtttggaacgtgaagccattgcgg

SEQ ID NO: 614905 - DNA, 120 bp, Artificial Sequence
  ENSG00000176915_80 (sequence is synthesized)
ttactggtcatggaacataaggcagagacggaaaaggcaaatgtaactcaggggtttggggccagaggaagagggagaaggtggccatttattgctttgcggtagactgtcgggtctggg

SEQ ID NO: 614906 - DNA, 120 bp, Artificial Sequence
  ENSG00000176915_81 (sequence is synthesized)
tgatgtggagatcagaggtgggttttggtcgttttaagtttgaggtaactgatacagtgaactgtgtatttcagctccatccccttttcctggcatacaactcttgaaatcccgggaacc

SEQ ID NO: 614907 - DNA, 120 bp, Artificial Sequence
  ENSG00000176915_82 (sequence is synthesized)
tccaaagtgatgtcttttgtaggctgagtggactggtggccggcagcccctagggagcttctggatggggctggtcgcaggaaagaccaaggcagggttagaggttctggggactttcag

SEQ ID NO: 614908 - DNA, 120 bp, Artificial Sequence
  ENSG00000176915_83 (sequence is synthesized)
ccccacccccaacctctggggaggagagaggggtgaaggttgcgttgatcaccagtggctgatgaatcacgcctgtgaaatgaagttcctgtaaaaacccaaaagggctgggttcaggga

SEQ ID NO: 614909 - DNA, 120 bp, Artificial Sequence
  ENSG00000176915_84 (sequence is synthesized)
gcttccagatagtacgtgggggttcctggaggcggtgcccagagaggccctgaatttccaagcgcttccccccggttttacgtcacgcatctcttcacctgtattctttgtaatccttta

SEQ ID NO: 614910 - DNA, 120 bp, Artificial Sequence
  ENSG00000176915_85 (sequence is synthesized)
tactctgctggtaagtgtaagtaaaacatgtctgtgagttcgggagccactctagcaaattaccgcaacctgaggaggtcaccgggttacgccccgtcggtcccaagcgcaggtcaaaca

SEQ ID NO: 614911 - DNA, 120 bp, Artificial Sequence
  ENSG00000176915_86 (sequence is synthesized)
acctgggcactggaagtggggggcagtcttgcggggctgagccgttaacctgtgggggtctgctggtatctccaggaagacgctgtcagaatagatgactgaattaggatgacagacgac

SEQ ID NO: 614912 - DNA, 120 bp, Artificial Sequence
  ENSG00000176915_87 (sequence is synthesized)
acccagcctgtgtccactgcagaactgacgacctgcgtgatttgtggggagaaaatccccacatacctggtgtccgaagcatgttgcaagactagtgggagaaactgagtttgtttttac

SEQ ID NO: 614913 - DNA, 120 bp, Artificial Sequence
  ENSG00000176915_88 (sequence is synthesized)
tctaaattgtcagactgttagtcactgcggagaggtgctttctgatgattgagtggggattcctgtccaattgtgtgagtttgtgtctcggccctaccactttttttttttttttttttt

SEQ ID NO: 614914 - DNA, 120 bp, Artificial Sequence
  ENSG00000176915_89 (sequence is synthesized)
ctgggattacaggtgtgagccatcgcaccgggccctaccacttattgctgtgggcttaacctgttttcagcctgctcttttaggaatggggatgatagtgatacctggttaggctttttt

SEQ ID NO: 614915 - DNA, 120 bp, Artificial Sequence
  ENSG00000176915_90 (sequence is synthesized)
gcttttttgggagttgggtaagtgcagcacttggtatgtgttaagcacctctgagtgctgttactgtcaccagcggcatcatccaggcagagctgcggacaaggtggcggcgggtgaggg

SEQ ID NO: 614916 - DNA, 120 bp, Artificial Sequence
  ENSG00000176915_91 (sequence is synthesized)
agggtggtgttttgagaatggctgaaataaaaaaatactgatttattttatataaaaatatgtttttatatatgatgtataatatacgtatatcatggcatatgatacgtgtatatcata

SEQ ID NO: 614917 - DNA, 120 bp, Artificial Sequence
  ENSG00000176915_92 (sequence is synthesized)
acatatagtatacatatatatagtcagcagagatttagagaaactgggcctcgtgcattgcaggtggggacggtaagtggtgcagctactctgggaatcagcctggcaggtttttaggaa

SEQ ID NO: 614918 - DNA, 120 bp, Artificial Sequence
  ENSG00000176915_93 (sequence is synthesized)
gttaaacctgccctgcattcctgagcttttattagacaaatgaaaactattttcacacaaaaacccatatttaatgttcatagcaactttatttgtaattaccagaaactgaaataactc

SEQ ID NO: 614919 - DNA, 120 bp, Artificial Sequence
  ENSG00000176915_94 (sequence is synthesized)
aaatggttaaacttgcacactgataccccggggtgccactccgcagcgatcctctctgccacgtgggtgccccggggtgccactctgcatgatccactctgccacgtgggtgccccgggg

SEQ ID NO: 614920 - DNA, 120 bp, Artificial Sequence
  ENSG00000176915_95 (sequence is synthesized)
tgccactccgcagcgatcctctctgccacgtgggtgccccggggtgccactctgcgtgatccactctgccacgtgggtgccccggggtgccactccgcagcgatcctctctgccacgtgg

SEQ ID NO: 614921 - DNA, 120 bp, Artificial Sequence
  ENSG00000176915_96 (sequence is synthesized)
gtgccccggggtgccactccgcagcgatccactctgccacgtgggtgccccggggtgccactccgcagcgatcctctctgccacgtgggtgccccggggtgccacactgcgtgatccact

SEQ ID NO: 614922 - DNA, 120 bp, Artificial Sequence
  ENSG00000176915_97 (sequence is synthesized)
ctgccacgtgggtgccccggggtgccactccgcagcgatccactctgccacgtgggtggatctcaagggcattatgctgaataggaaaagccagtctcaaaagttgtgtacttggccggt

SEQ ID NO: 614923 - DNA, 60 bp, Artificial Sequence
  ENSG00000176915_98 (sequence is synthesized)
ggcagtctccactaaaaatacaaaaaaatagcggggcgtggtggcaggtacctgtaatcc

SEQ ID NO: 614924 - DNA, 120 bp, Artificial Sequence
  ENSG00000176915_99 (sequence is synthesized)
agactccatctcaaaaaaaaaaaaattgttaatggaacattataacccagtgttcagacctagctgtttctcacatctttacccatcgatctgtcaaagaccttgtgatcatactgatac

SEQ ID NO: 614925 - DNA, 120 bp, Artificial Sequence
  ENSG00000176915_100 (sequence is synthesized)
ctttacccatcgatctgtcaaagaccttgtgatcatactgatacttccaatttcaatgcgacgtccgcgggtttattcttttttttttaggtggagtctcactctgttgtccaggctgga

SEQ ID NO: 614926 - DNA, 84 bp, Artificial Sequence
  ENSG00000176915_101 (sequence is synthesized)
tgttgtccaggctggagactcactgcaacctctgcctgcccagttcaagcgattctcccacctagcctgctgagtagctgggat

SEQ ID NO: 614927 - DNA, 84 bp, Artificial Sequence
  ENSG00000176915_102 (sequence is synthesized)
gtgtccggctccctggctttattctaatgcaagagtcagtaaactgtggtccaaactggcccccacctattttccttagtaaag

SEQ ID NO: 614928 - DNA, 120 bp, Artificial Sequence
  ENSG00000176915_103 (sequence is synthesized)
tgtggtccaaactggcccccacctattttccttagtaaagttttattggaatacaaccatacccttttgtttatgtatatctgtggctgttctttttttttttttttttggagacggggt

SEQ ID NO: 614929 - DNA, 120 bp, Artificial Sequence
  ENSG00000176915_104 (sequence is synthesized)
gttgcccaggttggagtgcagtggcacaaacagggctcactgcatcctcaaactcttaggcttaatttatcctccttcctcagccccccaagtagttggaaccacaggtgcacgtcacca

SEQ ID NO: 614930 - DNA, 67 bp, Artificial Sequence
  ENSG00000176915_105 (sequence is synthesized)
atcagataatttttaaagtttttgtagaaagggtgtcgctgtgttacccaggctggtcttgaactcc

SEQ ID NO: 614931 - DNA, 120 bp, Artificial Sequence
  ENSG00000176915_106 (sequence is synthesized)
tgaactcctgggctcaagtgatcttcccgcctcggcctccccaagcgctggggtgacaggtgtgagccgccacacgcggcctgtggctgttctgagcactcacgtggcctttggctcata

SEQ ID NO: 614932 - DNA, 120 bp, Artificial Sequence
  ENSG00000176915_107 (sequence is synthesized)
ctttggctcatagagtctgagatgcttactctctcgccctttacaggaatcgtttgctgaaaccctgttctcactcccactttcctttctgtcattgagagtcctggctctcatcagcca

SEQ ID NO: 614933 - DNA, 120 bp, Artificial Sequence
  ENSG00000176915_108 (sequence is synthesized)
ccgtgtattccaattatttgctttgccctagagtccacagaaaatagctttaggtgtgttaacctataccattgtgaaaacatctactgcctagagcctgttcacacggtaatggtgcac

SEQ ID NO: 614934 - DNA, 120 bp, Artificial Sequence
  ENSG00000176915_109 (sequence is synthesized)
agtcctttttgtctttctccttagagcacctagtcactcactgttttccaaagttacgtaggttagcttcccctgtgttactcacttgtaatacagttaggtgcatttcttctggctagt

SEQ ID NO: 614935 - DNA, 75 bp, Artificial Sequence
  ENSG00000176915_110 (sequence is synthesized)
ctcacttgtaatacagttaggtgcatttcttctggctagtattccatgtgggtgtctcccccatctttttgttta

SEQ ID NO: 614936 - DNA, 72 bp, Artificial Sequence
  ENSG00000176915_111 (sequence is synthesized)
gtgtagtggtgcgatctcggctcactgtgacctctgcctcctgggttccagcgagtgcgcctgtctaatttt

SEQ ID NO: 614937 - DNA, 120 bp, Artificial Sequence
  ENSG00000176915_112 (sequence is synthesized)
acccggctttacttatttgagtatgtaaatcacgaacatgtttttaaaagtcagaaccctgtagaaacttaaattcagatgtattactcccccccgccatctttttttttgttgttgttg

SEQ ID NO: 614938 - DNA, 120 bp, Artificial Sequence
  ENSG00000176915_113 (sequence is synthesized)
ccatctttttttttgttgttgttgttgagacagggtctgattctgtcacccaggctggagtgcagggttgccatctcagctcgtggtggcatccacctcccaggctcaagtgatcctcct

SEQ ID NO: 614939 - DNA, 73 bp, Artificial Sequence
  ENSG00000176915_114 (sequence is synthesized)
agcgagactccgtctcaaaaagaaaaaaggctcacgcctgtaatccgcaagaccaacctggccaacatggtga

SEQ ID NO: 614940 - DNA, 88 bp, Artificial Sequence
  ENSG00000176915_115 (sequence is synthesized)
gaggctgaggctggagaatcatgcgatagcaccactgcactccagcctgtgcgacagagggagacaccatctcgaaaaaaaaaagaaa

SEQ ID NO: 614941 - DNA, 120 bp, Artificial Sequence
  ENSG00000176915_116 (sequence is synthesized)
gtgcgacagagggagacaccatctcgaaaaaaaaaagaaaaattctttttttttttttgagctggagtttcgctcttgttgtctaagctggagtgcaggggtgtgatctcggctaattgc

SEQ ID NO: 614942 - DNA, 120 bp, Artificial Sequence
  ENSG00000176915_117 (sequence is synthesized)
tgaaagaaacagaaactgatgccattatataatgaaccctagtacccatcacccagcttcagcaggtgttagtattttgtgactctttgatttttttgtcttgggcctaggtgaaatgac

SEQ ID NO: 614943 - DNA, 66 bp, Artificial Sequence
  ENSG00000176915_118 (sequence is synthesized)
tgagcttgagcgttccctgttcaaaattgtgtttaaaattctcttatgttcttggctgacataatt

SEQ ID NO: 614944 - DNA, 120 bp, Artificial Sequence
  ENSG00000176915_119 (sequence is synthesized)
cgttccctgttcaaaattgtgtttaaaattctcttatgttcttggctgacataattatagtttttttttttaatttgccttttaataatttttatttagatctttatatgaaatttagtt

SEQ ID NO: 614945 - DNA, 120 bp, Artificial Sequence
  ENSG00000176915_120 (sequence is synthesized)
ggcatatagaattacatatatgaacataatatatatcatgttacatgcatatatgcacactgtcgagcttgttaattgttctattttggctagcttaggccctttttcttcaggattaaa

SEQ ID NO: 614946 - DNA, 120 bp, Artificial Sequence
  ENSG00000176915_121 (sequence is synthesized)
gatctgaactaagccaggcgactgggtagcagatgtggaagctgatggttaggcccagggcatggccaggtgacagctctccagtcactcttctctgattttcatttgttacttttctta

SEQ ID NO: 614947 - DNA, 120 bp, Artificial Sequence
  ENSG00000176919_0 (sequence is synthesized)
agcagagtagactctgtcctgggacttggtggtgctacccttggcctcccacagtcctgccaccctgctgccgccaccatgctgccccctgggactgcgaccctcttgactctgctcctg

SEQ ID NO: 614948 - DNA, 120 bp, Artificial Sequence
  ENSG00000176919_1 (sequence is synthesized)
gcagctggctcgctgggccagaagcctcagaggccacgccggcccgcatcccccatcagcaccatccagcccaaggccaattttgatgctcagcagtttgcagggacctggctccttgtg

SEQ ID NO: 614949 - DNA, 120 bp, Artificial Sequence
  ENSG00000176919_2 (sequence is synthesized)
gctgtgggctccgcttgccgtttcctgcaggagcagggccaccgggccgaggccaccacactgcatgtggctccccagggcacagccatggctgtcagtaccttccgaaagctggatggg

SEQ ID NO: 614950 - DNA, 120 bp, Artificial Sequence
  ENSG00000176919_3 (sequence is synthesized)
cctcggccgcttcctgcttcaagcccgagacgcccgaggggctgtgcacgtggttgtcgctgagaccgactaccagagtttcgctgtcctgtacctggagcgggcggggcagctgtcagt

SEQ ID NO: 614951 - DNA, 120 bp, Artificial Sequence
  ENSG00000176919_4 (sequence is synthesized)
gaagctctacgcccgctcgctccctgtgagcgactcggtcctgagtgggtttgagcagcgggtccaggaggcccacctgactgaggaccagatcttctacttccccaagtacggcttctg

SEQ ID NO: 614952 - DNA, 120 bp, Artificial Sequence
  ENSG00000176919_5 (sequence is synthesized)
cgaggctgcagaccagttccacgtcctggacgaagtgaggaggtgaggccggcacacagctccagtgctgagaagtcagtgccccgagagacgaccccaccagtggggtgcccgctgcct

SEQ ID NO: 614953 - DNA, 120 bp, Artificial Sequence
  ENSG00000176919_6 (sequence is synthesized)
gtcctccgtgaaaccagcctcagatcagggccctgccacccagggcaggggatcttctgccggctgccccagaggacagtgggtggagtggtacctacttattaaatgtctcagacccct

SEQ ID NO: 614954 - DNA, 120 bp, Artificial Sequence
  ENSG00000176920_0 (sequence is synthesized)
ctgcccaaccactctgtcccggtttccttcagcaggaccagccatgctggtcgttcagatgcctttctcctttcccatggcccacttcatcctctttgtctttacggtttccactatatt

SEQ ID NO: 614955 - DNA, 120 bp, Artificial Sequence
  ENSG00000176920_1 (sequence is synthesized)
tcacgttcagcagcggctagcgaagattcaagccatgtgggagttaccggtgcagataccagtgctagcctcaacatcaaaggcactgggacccagccagctcagggggatgtggacgat

SEQ ID NO: 614956 - DNA, 120 bp, Artificial Sequence
  ENSG00000176920_2 (sequence is synthesized)
caatgcaataggccgcctggggaaccagatgggcgagtacgccacactgtacgccctggccaagatgaacgggcggcccgccttcatcccggcccagatgcacagcaccctggcccccat

SEQ ID NO: 614957 - DNA, 120 bp, Artificial Sequence
  ENSG00000176920_3 (sequence is synthesized)
cttcagaatcaccctgccggtgctgcacagcgccacggccagcaggatcccctggcagaactaccacctgaacgactggatggaggaggaataccgccacatcccgggggagtacgtccg

SEQ ID NO: 614958 - DNA, 120 bp, Artificial Sequence
  ENSG00000176920_4 (sequence is synthesized)
cttcaccggctacccctgctcctggaccttctaccaccacctccgccaggagatcctccaggagttcaccctgcacgaccacgtgcgggaggaggcccagaagttcctgcggggcctgca

SEQ ID NO: 614959 - DNA, 120 bp, Artificial Sequence
  ENSG00000176920_5 (sequence is synthesized)
ggtgaacgggagccggccgggcacctttgtaggggtccatgttcgccgaggggactatgtccatgtcatgccaaaagtgtggaagggggtggtggccgaccggcgatacctacagcaggc

SEQ ID NO: 614960 - DNA, 120 bp, Artificial Sequence
  ENSG00000176920_6 (sequence is synthesized)
catcttcgtggtcaccagtaatggcatggcctggtgtcgggagaacattgacacctcccacggtgatgtggtgtttgctggcgatggcattgagggctcacctgccaaagattttgctct

SEQ ID NO: 614961 - DNA, 120 bp, Artificial Sequence
  ENSG00000176920_7 (sequence is synthesized)
actcacacagtgtaaccacaccatcatgaccattgggacgttcgggatctgggccgcatacctcacgggcggagacaccatctacctggccaattacaccctccccgactcccctttcct

SEQ ID NO: 614962 - DNA, 120 bp, Artificial Sequence
  ENSG00000176920_8 (sequence is synthesized)
caaaatctttaagccagaggcagccttcctgccggagtggacagggattgccgcagacctgtcccccttactcaagcactaatgctggcccattctttgagaccttttctccttctctgc

SEQ ID NO: 614963 - DNA, 120 bp, Artificial Sequence
  ENSG00000176920_9 (sequence is synthesized)
ctccctcaagatgagtgcccgggcatgagaagcacatggttccatgagcaggacccatctctcttctgtgaagatgcgttgggctgcaagtaacagaaatctcagtgaacagtggcctgg

SEQ ID NO: 614964 - DNA, 90 bp, Artificial Sequence
  ENSG00000176920_10 (sequence is synthesized)
agtaacagaaatctcagtgaacaggctcgcactttgtgaggccagggtgggtggatcacttgaggtcaggctggtctcaaactcctgacc

SEQ ID NO: 614965 - DNA, 120 bp, Artificial Sequence
  ENSG00000176920_11 (sequence is synthesized)
gattacaggtgttagccactgcgcccggccctagagctcactgttttctagttagtccatctggaagtggagcctttttccagtttgcacaaatgtgccatattggcttgtagctggcat

SEQ ID NO: 614966 - DNA, 120 bp, Artificial Sequence
  ENSG00000176920_12 (sequence is synthesized)
gcatgcatccaagtccataggtcctgcctcttcaatcctggctttctagggcctgggatgatcattgctagaactgagagaccagcctggctcagtgaacttcagggcgttccgttcatt

SEQ ID NO: 614967 - DNA, 120 bp, Artificial Sequence
  ENSG00000176920_13 (sequence is synthesized)
agtcaccgatgctggaagggtttctttggccctgagtgaagagagacccagagggaacactgaggtgcctgcccaaccactctgtcccggtttccttcagcaggaccaggtgagagaagc

SEQ ID NO: 614968 - DNA, 120 bp, Artificial Sequence
  ENSG00000176920_14 (sequence is synthesized)
aaaaaaaaaagaaaagaaaaagaaatgaatgggttcaaagaccataatcatgcatatcacataagaccagaagtggcccaggtccagggtcagttaatttagcggctccacaaagtcatc

SEQ ID NO: 614969 - DNA, 120 bp, Artificial Sequence
  ENSG00000176920_15 (sequence is synthesized)
ggtccagggtcagttaatttagcggctccacaaagtcatcagtcacctgagctccatccatcttcacatgctgtgctaccatttcttagctgtatcatcccatggtcccaaaagggctgc

SEQ ID NO: 614970 - DNA, 120 bp, Artificial Sequence
  ENSG00000176920_16 (sequence is synthesized)
tacacatccagccatcacatgcagataattcctttcaaaaacagcagaaagaggctcgttcttgtcttggtcccttttgaagaatgaatgaaaccttcctaagccttccagcaatttccc

SEQ ID NO: 614971 - DNA, 120 bp, Artificial Sequence
  ENSG00000176920_17 (sequence is synthesized)
cccaactccgatgggtaggaattgtcacatacccatgtgacccgataggaggcaaaagaaatgagacttctgggattagtttagcctcagattctgcagctgagaagttgatcagccacc

SEQ ID NO: 614972 - DNA, 120 bp, Artificial Sequence
  ENSG00000176920_18 (sequence is synthesized)
tctgaaggacatgcagcttgcagaaaattagggtggtgttaccaaggtgaaaaggggaaatggctttagagtagacaacagagatgccctgaggggttgtgtaggttgttcactgcagga

SEQ ID NO: 614973 - DNA, 120 bp, Artificial Sequence
  ENSG00000176920_19 (sequence is synthesized)
agtcccctggttaagaaggcaagtggggtttaaacagacccacagtctactcatcaaaccaggtgtccttggcattgtgtccacccagagagctcactgttttcttttctttttcttttc

SEQ ID NO: 614974 - DNA, 120 bp, Artificial Sequence
  ENSG00000176920_20 (sequence is synthesized)
cagtcatcaaaggaataattttttttaatcaccagtgtgcatacagtcatggagttgggtattcccagctaccagggaggctgaggtgggaggattgcttgatgccaggagttagggaat

SEQ ID NO: 614975 - DNA, 120 bp, Artificial Sequence
  ENSG00000176920_21 (sequence is synthesized)
atagtgcaccgtgattggacttgcgaatagccactgcactgcggcctggacgacgtagtgataccctgactcttataaataaataaatgaataaacacaattatgactttgcggatggga

SEQ ID NO: 614976 - DNA, 120 bp, Artificial Sequence
  ENSG00000176920_22 (sequence is synthesized)
aggtgcctgcccaaccactctgtcccggtttccttcagcaggaccaggtccttccttgtctccttcccctcagcagtttctatgaaccaccctggcagtaatggtgcagatggctcgcgc

SEQ ID NO: 614977 - DNA, 120 bp, Artificial Sequence
  ENSG00000176920_23 (sequence is synthesized)
tggtctcacctccgagccctgccgtcgcccagggagggcggctccgtccctcctgcactccctaatcccgctctgaatcaccgcttctgttctgggtcggagaataaaggtggggtttcc

SEQ ID NO: 614978 - DNA, 120 bp, Artificial Sequence
  ENSG00000176922_0 (sequence is synthesized)
gttccagagttcaacgtggaatcctgaactatgtcaacattaccaactcagatagcccccaatagcagcacttcaatggcccccaccttcttgctggtgggcatgccaggcctatcaggt

SEQ ID NO: 614979 - DNA, 120 bp, Artificial Sequence
  ENSG00000176922_1 (sequence is synthesized)
gcaccctcctggtggacattgcccctcattgctgtctaccttctctctgcactgggaaatggcaccatcctctggatcattgccctgcagcccgccctgcaccgcccaatgcacttcttc

SEQ ID NO: 614980 - DNA, 120 bp, Artificial Sequence
  ENSG00000176922_2 (sequence is synthesized)
ctcttcttgcttagtgtgtctgatattggattggtcactgccctgatgcccacactgctgggcatcgcccttgctggtgctcacactgtccctgcctcagcctgccttctacagatggtt

SEQ ID NO: 614981 - DNA, 120 bp, Artificial Sequence
  ENSG00000176922_3 (sequence is synthesized)
tttatccatgtcttttctgtcatggagtcctctgtcttgctcgccatgtccattgatcgggcactggccatctgccgacctctccactacccagcgctcctcaccaatggtgtaattagc

SEQ ID NO: 614982 - DNA, 120 bp, Artificial Sequence
  ENSG00000176922_4 (sequence is synthesized)
aaaatcagcctggccatttcttttcgatgcctgggtctccatctgcccctgccattcctgctggcctacatgccctactgcctcccacaggtcctaacccattcttattgcttgcatcca

SEQ ID NO: 614983 - DNA, 120 bp, Artificial Sequence
  ENSG00000176922_5 (sequence is synthesized)
gatgtggctcgtttggcctgcccagaagcttggggtgcagcctacagcctatttgtggttctttcagccatgggtttggaccccctgcttattttcttctcctatggcctgattggcaag

SEQ ID NO: 614984 - DNA, 120 bp, Artificial Sequence
  ENSG00000176922_6 (sequence is synthesized)
gtgttgcaaggtgtggagtccagagaggatcgctggaaggctggtcaaacctgtgctgcccacctctctgcagtgctcctcttctatatccctatgatcctcctggcactgattaaccat

SEQ ID NO: 614985 - DNA, 120 bp, Artificial Sequence
  ENSG00000176922_7 (sequence is synthesized)
taaaccctattctctatagtgtcaagatgaaggagattagaaagagaatactcaacaggttgcagcccaggaaggtgggtggtgctcagtgagtaggatgtccctccgtgtttggtggta

SEQ ID NO: 614986 - DNA, 120 bp, Artificial Sequence
  ENSG00000176922_8 (sequence is synthesized)
cagggctcctgatactaaagtttctgtgagaactcagctcaccaagcatgaaatgatcattcacgtacacataagtgcatatatgtgcatgtagcttcctgtccctggaagtatgcctgt

SEQ ID NO: 614987 - DNA, 120 bp, Artificial Sequence
  ENSG00000176922_9 (sequence is synthesized)
gtatattgatgcaaacttacaagccccaaagaatgaacatgatccacccactggtacattacatatcaatgacataggaagggccagagtccagatcttgtcacaactatccaagtgtgt

SEQ ID NO: 614988 - DNA, 120 bp, Artificial Sequence
  ENSG00000176922_10 (sequence is synthesized)
gcctgttgttatcttattgttgttagtcctgtcactatatctataccttaatactggataaagctagaagagttaatcatctacatagcaaaggaaaaataagacagaagcattcttctc

SEQ ID NO: 614989 - DNA, 120 bp, Artificial Sequence
  ENSG00000176922_11 (sequence is synthesized)
aactagatagaagatcttccatttgtattgtacctccttaagaagtaagaattctgaccaatccttaggaattagatacatgaggaaaatgcaagtaagtctctcatttagattcttcac

SEQ ID NO: 614990 - DNA, 120 bp, Artificial Sequence
  ENSG00000176922_12 (sequence is synthesized)
accaagagataggttatttaactctgatcaggccaggaaaaaaagagggaatataatttttttaattcttcatttagttttcaaaatgttagtatatttttgaatacatatgtatattga

SEQ ID NO: 614991 - DNA, 120 bp, Artificial Sequence
  ENSG00000176922_13 (sequence is synthesized)
atgtcctcaacacaaagaaatgagaaatgtttgagattataaatatgctaatcaccctgatctgatcactatacatggtatgcaccaaaacatcactatgactatgcataattattgtca

SEQ ID NO: 614992 - DNA, 120 bp, Artificial Sequence
  ENSG00000176925_0 (sequence is synthesized)
cagtgaatcttgaagtgccagagagatgttacaagtgataaactatgtattatgtgttatgttaaatgactgaaacatccctgtcttctcagtgcttccctatgtcggtcctcaataata

SEQ ID NO: 614993 - DNA, 120 bp, Artificial Sequence
  ENSG00000176925_1 (sequence is synthesized)
ccattgctgagcctctgatcttcctcctgatgggcattccaggcctgaaagccacccagtactggatctccatccctttttgtctcctatatgttgttgccgtctctggaaatagcatga

SEQ ID NO: 614994 - DNA, 120 bp, Artificial Sequence
  ENSG00000176925_2 (sequence is synthesized)
tcctgtttgtggtcctctgtgaacggagcctccataagcctatgtactatttcctctctatgctttcagccacagacctgagcttgtccctgtgtacactttctactacccttggtgtct

SEQ ID NO: 614995 - DNA, 120 bp, Artificial Sequence
  ENSG00000176925_3 (sequence is synthesized)
tctggtttgaagcccgagaaatcaacctaaatgcctgcattgcccagatgttctttctacacggatttactttcatggagtctggggttctactggccatggcctttgatcgttttgtgg

SEQ ID NO: 614996 - DNA, 120 bp, Artificial Sequence
  ENSG00000176925_4 (sequence is synthesized)
attgggatgagcatgttgataagaaatgttgccgtcatgttgccagtcatgctctttgtcaagaggttgtccttctgcagttctatggtcctttcacattcttactgctaccatgttgat

SEQ ID NO: 614997 - DNA, 120 bp, Artificial Sequence
  ENSG00000176925_5 (sequence is synthesized)
ctcatccaactctcctgcacagacaataggatcaacagcatccttggtctgtttgcgcttttgtccactacagggtttgactgcccttgcatcctgctctcctatatcctgatcattcga

SEQ ID NO: 614998 - DNA, 120 bp, Artificial Sequence
  ENSG00000176925_6 (sequence is synthesized)
tctgtcctcagcattgcttcctcagaagagaggcggaaagccttcaacacctgcacatcccacatcagtgctgtttccatcttctacctccctctcatcagtttgtctcttgtccatcgc

SEQ ID NO: 614999 - DNA, 120 bp, Artificial Sequence
  ENSG00000176925_7 (sequence is synthesized)
tatggccattcagcacctccatttgtccacatcatcatggccaatgtctttctgctaatccctcctgtgctcaaccctattatttacagtgtaaagattaagcagattcaaaaggccatt

SEQ ID NO: 615000 - DNA, 120 bp, Artificial Sequence
  ENSG00000176925_8 (sequence is synthesized)
atcaaggtcttaattcagaagcactccaaatctaatcatcagctatttctgattagagataaagccatttatgaataagtgctttgctacaatggagtaattgtcccaaagtgcccacac

SEQ ID NO: 615001 - DNA, 120 bp, Artificial Sequence
  ENSG00000176927_0 (sequence is synthesized)
agttggaaaagttcagcagttgagaatttatcattcaatagaattgtggggtgaggtgagggcaggagtgagggagcttttttaacttctggagtactttgtgatgtttattaatatttt

SEQ ID NO: 615002 - DNA, 120 bp, Artificial Sequence
  ENSG00000176927_1 (sequence is synthesized)
ctttctttttgttattaatactggtctagtaatattcttctataccatttggtgataacttttggagtccaaatgaatgagtcagcatctcaagaggaactcagacctgctcaggaaaac

SEQ ID NO: 615003 - DNA, 120 bp, Artificial Sequence
  ENSG00000176927_2 (sequence is synthesized)
agaaaagaagacaaagagaggaaatggaacttaactgaagtgaaagagcttcatgagaccttacagagtgtgccagacgttcctgtaaaagaggacaccaacagtgtggtggagaaagca

SEQ ID NO: 615004 - DNA, 120 bp, Artificial Sequence
  ENSG00000176927_3 (sequence is synthesized)
atggatgaaatcaaatcccaagaattaaacctggaggggcagcgaaaaatttcacctggttcaataaaggactctaaaactgaagcctcaggtaatattgcaattagaaaatctgcaaaa

SEQ ID NO: 615005 - DNA, 120 bp, Artificial Sequence
  ENSG00000176927_4 (sequence is synthesized)
gtgatttttgctttagatgaaactgaactgaaatcaaagccagagcacacatggaagaaaaacctttttgaaagaatggaggcaagagcccaagcaatgcagcagaaaataatagataag

SEQ ID NO: 615006 - DNA, 120 bp, Artificial Sequence
  ENSG00000176927_5 (sequence is synthesized)
gaaaatctgaagaaggaactagaaaaaaaggctgaaaaaaaactccctagggataatttggccaaagagtggtttaatactgacagcatgacactgaataatactgcatatttgcttgac

SEQ ID NO: 615007 - DNA, 120 bp, Artificial Sequence
  ENSG00000176927_6 (sequence is synthesized)
aaacttctacccaccttagttcctggagtagaaaacatgttaactcaagtagaaaagaagaaggttttgacagaagctgatactccaagcaagtttgacccaattaattatttgggggaa

SEQ ID NO: 615008 - DNA, 120 bp, Artificial Sequence
  ENSG00000176927_7 (sequence is synthesized)
tatttaataagaaacaatcctaattatatcaaagacccaggaatgtctggttaccagaggttgatgaaagaagtcacagaagacctgaagatatatgttcctgacactatctgcaacaga

SEQ ID NO: 615009 - DNA, 120 bp, Artificial Sequence
  ENSG00000176927_8 (sequence is synthesized)
gtatccaagatgaaggagaatgttaaacagaatagaaaacaaagagaaagcatagacaaaatcatagtcaaggtggccaacacacggaaacaggctctgcaggagcaattcgatgaatgg

SEQ ID NO: 615010 - DNA, 120 bp, Artificial Sequence
  ENSG00000176927_9 (sequence is synthesized)
attctagaccctaaaggaatgattcctaagtcagtgattcagaatgttcttcaagaattctttcaaaatccagatttcaagcttggatcacactgcaaacaactggatattactgactca

SEQ ID NO: 615011 - DNA, 120 bp, Artificial Sequence
  ENSG00000176927_10 (sequence is synthesized)
acagaaccaagattgaacaaaatggaatttacagaatacatctcttcacatattaaagacttgaagagtgaaatgtttgaggaacttcttaagcacctttgccactctgcagatgaattt

SEQ ID NO: 615012 - DNA, 120 bp, Artificial Sequence
  ENSG00000176927_11 (sequence is synthesized)
cgggaggtcataaaagctgacatgcggaggcagatgttcgctgaactcttcctacattgtgaccacgggaaggtagggtttttggatcggcagaggacattggccctgctggaattgttc

SEQ ID NO: 615013 - DNA, 120 bp, Artificial Sequence
  ENSG00000176927_12 (sequence is synthesized)
tatgaccatagttcacaaatgcttaggagtttacttcgaaacccacgacaatggccattcattgaatttgaagagataaacttgactgagttgtggggagacatggataatcagaaacac

SEQ ID NO: 615014 - DNA, 120 bp, Artificial Sequence
  ENSG00000176927_13 (sequence is synthesized)
atttatgaaggttttgacaaagtgctcttggagatgaatacattactttctgcaaatcatgctagcaaaacccaaagtaaattattagaaagtccagatcaacctaaacttaacgaacag

SEQ ID NO: 615015 - DNA, 120 bp, Artificial Sequence
  ENSG00000176927_14 (sequence is synthesized)
agaacatcaacaccatcaccaaacccgccagaacagcagagaggagtaactgcagaacaaggaccacaaagaatttcaattgaagaacaacaacaaggcaaaaagccaactgcagagcaa

SEQ ID NO: 615016 - DNA, 120 bp, Artificial Sequence
  ENSG00000176927_15 (sequence is synthesized)
gaactgtacatagaatcagtaatagaaccaggaacacacacagagtcaactctagaacaagggtcaagtagaaggttactgacagaacaagaaacacacagagagtcaactacagaacaa

SEQ ID NO: 615017 - DNA, 120 bp, Artificial Sequence
  ENSG00000176927_16 (sequence is synthesized)
ggacagcacaaagggtcaatagaaggacaaggaccacgcagagtgtcagtttcagaacaaggatcaagcagagagtcagttgcagaacaagggtcacgcagagagtctattgcagaacaa

SEQ ID NO: 615018 - DNA, 120 bp, Artificial Sequence
  ENSG00000176927_17 (sequence is synthesized)
gatcgacacaaagggtcagtagcagaacaaggatcacgcagaatgtcagctgcagaacagggatcactcagagagtcagtaatagaagaaccataccaaaaatcagaacaaggaccttat

SEQ ID NO: 615019 - DNA, 120 bp, Artificial Sequence
  ENSG00000176927_18 (sequence is synthesized)
ggagagataatttcagaagagcaagaagacataggctcaacttcacaatcaagaaaagatagtatcttaaaaagtacaaaatatggggaacctataacctctgagtacattgaagtccct

SEQ ID NO: 615020 - DNA, 120 bp, Artificial Sequence
  ENSG00000176927_19 (sequence is synthesized)
ctacaggaaaagaggtcttgggaacaaacatatgaagaggaaatattcctgagttctgaactgcaagaggaagttccaaccttaagcagaaaagatcactttccagaaactacaaaaaag

SEQ ID NO: 615021 - DNA, 120 bp, Artificial Sequence
  ENSG00000176927_20 (sequence is synthesized)
gaagttcagaaagacaagccctgtgaacccaagtcccaaaaaatagaaggaaagtcatggtcaggtgaattttttacttgtaactggaaaatgaagtatgtcacatttgaagatgaggaa

SEQ ID NO: 615022 - DNA, 120 bp, Artificial Sequence
  ENSG00000176927_21 (sequence is synthesized)
tgccttcaatggagtttcattcaatctgctccagtttgtgcaactcctggagacatttgttggtgaagacgctcccttgagtgtcagcgagactctcacctccttttttaaggagggcta

SEQ ID NO: 615023 - DNA, 120 bp, Artificial Sequence
  ENSG00000176927_22 (sequence is synthesized)
tgttgaaacagaacaagagaaaatgaatgccttagaacagtttagccaaaatgctttccaagtccgacagaggcttctcctagaagccatctttcagaagtgggacagtgatggctcagg

SEQ ID NO: 615024 - DNA, 120 bp, Artificial Sequence
  ENSG00000176927_23 (sequence is synthesized)
cttcctggatctgaaggaagttgatgaactcttgtacacatacaaggagggaatggaaaaagaatctatgaagaaagctaaactacacatccaatttccaaagccacaccctggtcacga

SEQ ID NO: 615025 - DNA, 120 bp, Artificial Sequence
  ENSG00000176927_24 (sequence is synthesized)
agtgagattgtcttcaaaacaatttcagaattacatagaattggttgtgtctgaactcaggggcaatgaagaccaagttctggaaagtgttgtggaatttctgatgaatgctttagagag

SEQ ID NO: 615026 - DNA, 120 bp, Artificial Sequence
  ENSG00000176927_25 (sequence is synthesized)
gagccacattgagagtctgaggaattctgccaggcggaaatggctgcaccaaatccaatgtgctgcagagacaagtggggtgtccctagagccggtgtatagtgagacctttaaggccct

SEQ ID NO: 615027 - DNA, 120 bp, Artificial Sequence
  ENSG00000176927_26 (sequence is synthesized)
catgcaggatgctgaagcccatggaaataaaaagatcagtgctcacatttccctcttagaagaaaacctactactgcctgagaaagggaatgttctattgaggaatgtggcttgtacctt

SEQ ID NO: 615028 - DNA, 120 bp, Artificial Sequence
  ENSG00000176927_27 (sequence is synthesized)
agatgatgctcaatttgtactgaacagagtgctctacagggacatgaaaggaatcagctttacagtagtggatgaagggaagccaatccatgttccccaagttcagtaccatgggaacat

SEQ ID NO: 615029 - DNA, 120 bp, Artificial Sequence
  ENSG00000176927_28 (sequence is synthesized)
cttcttctggaaccagtcccgtaataagcatgattataatggttcattcctggctctgcctcttcaagatgcatatatgaggatctttggggtcttggctgttgatacccttagagatcc

SEQ ID NO: 615030 - DNA, 120 bp, Artificial Sequence
  ENSG00000176927_29 (sequence is synthesized)
ccacgaaataaacatctttctacctcatgagatcagattctatcagggtgttgctaatgtctttagcactgcctatcactacgtccacagccgggagcacattctgcatattgtgatcac

SEQ ID NO: 615031 - DNA, 120 bp, Artificial Sequence
  ENSG00000176927_30 (sequence is synthesized)
tggcataggctggctttatgacgtcacatccagcatcacctccatcactacgtactttgtagagcctagcccagcccaggattcagactatgttttacgcaacatgatggttacagggca

SEQ ID NO: 615032 - DNA, 120 bp, Artificial Sequence
  ENSG00000176927_31 (sequence is synthesized)
gctgggtctaacagaaatccacaaaaatcctcctaccatccacaggaagtcatgcatcttcagagatttcctctttaaatgtactgacagttcagaagttgttctggcttctgcctgtgg

SEQ ID NO: 615033 - DNA, 120 bp, Artificial Sequence
  ENSG00000176927_32 (sequence is synthesized)
agaaacgcatatagtagttccacttcgtgagagaacaggagaggctctgggagtcctcgattttaacatcggccaaaataggatgttgttgtgtcaagaatataaagatctacagaaaat

SEQ ID NO: 615034 - DNA, 120 bp, Artificial Sequence
  ENSG00000176927_33 (sequence is synthesized)
gatgaaagtggtccaagtggcctgctatgaaatacttggcgagttctctggagagataaagaaaaaatatatcttagagattgaaaatgtcagggaagtccagcgggcaggaattctctt

SEQ ID NO: 615035 - DNA, 120 bp, Artificial Sequence
  ENSG00000176927_34 (sequence is synthesized)
cttccgaatcatgctgctcgagctacaggaaagcatccaactactcaattccatggaatttgtgtcactgttgctctatgaccatactcttgtaacagagccaaattctcctcaagacag

SEQ ID NO: 615036 - DNA, 120 bp, Artificial Sequence
  ENSG00000176927_35 (sequence is synthesized)
caaatctatggagttggaagccaacgtgaaactagtgcgtgacatcctgaaggcggttatcttgttctttcatccagagttggaattttcaagtgactttggaagttgggataagtgtaa

SEQ ID NO: 615037 - DNA, 120 bp, Artificial Sequence
  ENSG00000176927_36 (sequence is synthesized)
attttatgttaacaaatatttagtcaacaatatttgtgcctttgatccaactgccaagcatgtggaagttaatgtacagcttattgatgaatatatcagagatcattcccgaactgaagt

SEQ ID NO: 615038 - DNA, 120 bp, Artificial Sequence
  ENSG00000176927_37 (sequence is synthesized)
atggaaatttggtaatgttgtcattgaacatctataccactggatacacatctgttcagctctcatgaagataaccaaacaactaaatagtggtattacacctccgttgccctccaagac

SEQ ID NO: 615039 - DNA, 120 bp, Artificial Sequence
  ENSG00000176927_38 (sequence is synthesized)
tgacaattatatgtatgcaaaaatgccaggggaaggtttgcaagagaagtgataatggatgataatggaattgatactgtatttaggatcctttgtttgttatcagttttgtttgttaac

SEQ ID NO: 615040 - DNA, 120 bp, Artificial Sequence
  ENSG00000176927_39 (sequence is synthesized)
tataaaatattttccattggaaaggggtacctataaatgtcttctgctgctaatatttatctcagcactttctaaacccaaaagtgctacctaagaagaaatttagccaaaaaataccca

SEQ ID NO: 615041 - DNA, 120 bp, Artificial Sequence
  ENSG00000176927_40 (sequence is synthesized)
gctaaggtagccatagccaagtgtatttaagtatgttatagaatatatttgaaagcttcctttcagtttgagctttgtatctgctgtggaactgttatggttgattgggtagttattttt

SEQ ID NO: 615042 - DNA, 120 bp, Artificial Sequence
  ENSG00000176927_41 (sequence is synthesized)
cattcttataaggttcaaagtaacagctgaggatttagaaaacaagaataccaaatagaatacgaaataataaagataaaccaaaagaataccaaataataaagatttttaagaaatgga

SEQ ID NO: 615043 - DNA, 120 bp, Artificial Sequence
  ENSG00000176927_42 (sequence is synthesized)
acacatatacagttaaaatactggttatgctaaaaccactagataacccttcatgtctaccagtatagatatacatttatcttatttatttttaatttctaaaaatagagataggagtct

SEQ ID NO: 615044 - DNA, 120 bp, Artificial Sequence
  ENSG00000176927_43 (sequence is synthesized)
ctcagcctcccgaagcgctgggattacagataattaaacctggaggggcagcgaaaaatttcacctggttcaataaaggactctaaaactgaagcctcaggtaatattgcaattagaaaa

SEQ ID NO: 615045 - DNA, 120 bp, Artificial Sequence
  ENSG00000176927_44 (sequence is synthesized)
cgccaggctggagtgcagtggcgcaactgtagctcactgcagcctccaactcccggactcaagcgatcatcccatcacagactcctgagcaactgggactacagggaaagaaggaagttt

SEQ ID NO: 615046 - DNA, 120 bp, Artificial Sequence
  ENSG00000176927_45 (sequence is synthesized)
gactacagggaaagaaggaagttttttcctcttgagaccaaatttccataaaatgagatgcaaaaattttaagtgtatatttgctgagttttgacaaatacatgccctatgcatcccata

SEQ ID NO: 615047 - DNA, 120 bp, Artificial Sequence
  ENSG00000176927_46 (sequence is synthesized)
aatacatgccctatgcatcccatactcctatcaagatacagaacaaagagcactgtgacactcacctgtaatcccagctactcaagaggcagaggcaggaagattgcttgagcccaggag

SEQ ID NO: 615048 - DNA, 120 bp, Artificial Sequence
  ENSG00000176927_47 (sequence is synthesized)
gcaaaaaccatctcttaaaaaaaataaataaaagatatagaacaaaaaaagtccccacacctctttcccattcagtcgtccaccctccaatccccaaagcaaccacttttctattttcta

SEQ ID NO: 615049 - DNA, 120 bp, Artificial Sequence
  ENSG00000176927_48 (sequence is synthesized)
atacaaacacgaccttagaacaagaatgatcacgagcaatgagtgtaaggcataaatatctgtaagacggaaataatttgacactgatcactaagcagcaccagatgcttcgggacctca

SEQ ID NO: 615050 - DNA, 120 bp, Artificial Sequence
  ENSG00000176927_49 (sequence is synthesized)
cataaaaatgaaattatacagtatgcatctttttttacagagtttaaactctatgtactctttttgtaaggcttctttcactcagcataatttttacttttttaaaaattttttggggga

SEQ ID NO: 615051 - DNA, 89 bp, Artificial Sequence
  ENSG00000176927_50 (sequence is synthesized)
ggagtgtagtggcatgtgatcataacaatcctcccgcctcagcatcccgagtagctgggagactacaggtgcacaccaccatgcctggc

SEQ ID NO: 615052 - DNA, 120 bp, Artificial Sequence
  ENSG00000176927_51 (sequence is synthesized)
tcccaaagctctgaattatattcataagccactgggcctggttgactcagcataatttttcttgagagtcttaatatgttgctacatgtatcagcaatttgcttctttttattgctgagt

SEQ ID NO: 615053 - DNA, 120 bp, Artificial Sequence
  ENSG00000176927_52 (sequence is synthesized)
agtattccattgtatgaatacaccatggtttgtttatccgttttcctatgtatggacacctgggctgtttccagttcttagctattataaataaagctactctgcacaatcttaagtaaa

SEQ ID NO: 615054 - DNA, 90 bp, Artificial Sequence
  ENSG00000176927_53 (sequence is synthesized)
tgtaatttcagtactttgagaggctgaagcaggaagatgacctgagcccaggagtttgagaccagttcacacacatttttttttttaatt

SEQ ID NO: 615055 - DNA, 120 bp, Artificial Sequence
  ENSG00000176928_0 (sequence is synthesized)
tcaatgcactgttcaaggatgtttgagagattttctgtcttgcctgaatacaaaacactgtagggaacctctttgtgcttgactttgcacacacacgggatcttcagggtgggtacattt

SEQ ID NO: 615056 - DNA, 120 bp, Artificial Sequence
  ENSG00000176928_1 (sequence is synthesized)
aaaactgacaagtattgccaaattgccccccaacgtagtttttacaccccacctactactctcagtgaaaaatcaggccctttttattttaagggctaaattgctaatccctgtgtgaaa

SEQ ID NO: 615057 - DNA, 120 bp, Artificial Sequence
  ENSG00000176928_2 (sequence is synthesized)
atgggtgttaacaaaataaaaaataaggaaaatatgcaggcttacccaattttgttatctatacattttacagtctctaatacttagcatagctcctttgggtgtctgcccaccaccctt

SEQ ID NO: 615058 - DNA, 120 bp, Artificial Sequence
  ENSG00000176928_3 (sequence is synthesized)
ctttctgaacgtggggttccctgggctttccttgtttgacttcagacctggatctaatagggatctggaggtagaatcaagacgaatgttccctttggccttaggtgagtcctttgcatc

SEQ ID NO: 615059 - DNA, 120 bp, Artificial Sequence
  ENSG00000176928_4 (sequence is synthesized)
tctgaggccctgttgatgacatccagttctctagacctctgcccaaaccagagcaatccctcctcaaatatgctaagcagaaatgcagacaatataagacacactatatttatattttag

SEQ ID NO: 615060 - DNA, 120 bp, Artificial Sequence
  ENSG00000176928_5 (sequence is synthesized)
gagtttacattaccttcccttctgtttggaaaccaacatctctcaaaattaggtatagttaacacagaataccccaaaataccaccattcttcataattccatttccttatttctggatt

SEQ ID NO: 615061 - DNA, 120 bp, Artificial Sequence
  ENSG00000176928_6 (sequence is synthesized)
ctttcaagggtaaaaaccttgtttcattcatctttggggcagcatttgcctagtatgtggtaggcgcccagtagattttggataaactgacctgattttctgttaatattccaactggat

SEQ ID NO: 615062 - DNA, 120 bp, Artificial Sequence
  ENSG00000176928_7 (sequence is synthesized)
tatttctttctcctcttacagaatgaagatattcaaatgttattttaaacataccctacagcagaaagttttcatcctgtttttaaccctatggctgctctctttgttaaagcttctaaa

SEQ ID NO: 615063 - DNA, 120 bp, Artificial Sequence
  ENSG00000176928_8 (sequence is synthesized)
tgtgagacgactctttccgcaaaaagacatttacttggttgagtactccctaagtacctcgccttttgtaagaaacagatacactcatgttaaggatgaagtcaggtatgaagttaactg

SEQ ID NO: 615064 - DNA, 120 bp, Artificial Sequence
  ENSG00000176928_9 (sequence is synthesized)
ttcgggtatctatgaacaggagcctttggaaattggaaagagtctggaaataagaagaagggacatcattgacttggaggatgatgatgttgtggcaatgaccagtgattgtgacattta

SEQ ID NO: 615065 - DNA, 120 bp, Artificial Sequence
  ENSG00000176928_10 (sequence is synthesized)
tcagactctaagaggttatgctcaaaagcttgtctcaaaggaggagaaaagcttcccaatagcctattctttggttgtccacaaagatgcaattatggttgaaaggcttatccatgctat

SEQ ID NO: 615066 - DNA, 120 bp, Artificial Sequence
  ENSG00000176928_11 (sequence is synthesized)
atacaaccagcacaatatttactgcatccattatgatcgtaaggcacctgataccttcaaagttgccatgaacaatttagctaagtgcttctccaatattttcattgcttccaaattaga

SEQ ID NO: 615067 - DNA, 120 bp, Artificial Sequence
  ENSG00000176928_12 (sequence is synthesized)
ggctgtggaatatgcccacatttccagactccaggctgatttaaattgcttgtcggaccttctgaagtcttcaatccagtggaaatatgttatcaacttgtgtgggcaagattttcccct

SEQ ID NO: 615068 - DNA, 120 bp, Artificial Sequence
  ENSG00000176928_13 (sequence is synthesized)
gaagtcaaattttgaattggtgtcagagttgaaaaaactcaatggagcaaatatgttggagacggtgaaacccccaaacagtaaattggaaagattcacttaccatcatgaacttagacg

SEQ ID NO: 615069 - DNA, 120 bp, Artificial Sequence
  ENSG00000176928_14 (sequence is synthesized)
ggtgccttatgaatatgtgaagctaccaataaggacaaacatctccaaggaagcacccccccataacattcagatatttgttggcagtgcttattttgttttaagtcaagcatttgttaa

SEQ ID NO: 615070 - DNA, 120 bp, Artificial Sequence
  ENSG00000176928_15 (sequence is synthesized)
atatattttcaacaactccatcgttcaagacttttttgcctggtctaaagacacatactctcctgatgagcacttttgggctaccttgattcgggttccaggaatacctggggagatttc

SEQ ID NO: 615071 - DNA, 120 bp, Artificial Sequence
  ENSG00000176928_16 (sequence is synthesized)
cagatcagcccaggatgtgtctgatctgcagagtaagactcgccttgtcaagtggaattactatgaaggctttttctatcccagttgtactggatctcaccttcgaagcgtgtgtattta

SEQ ID NO: 615072 - DNA, 120 bp, Artificial Sequence
  ENSG00000176928_17 (sequence is synthesized)
tggagctgcagaattaaggtggcttatcaaagatggacattggtttgctaataaatttgattctaaggtggaccctatcttgattaaatgcttggcagaaaagcttgaagaacagcagag

SEQ ID NO: 615073 - DNA, 120 bp, Artificial Sequence
  ENSG00000176928_18 (sequence is synthesized)
agactggatcactttgccctcagaaaagttatttatggatagaaatctcactaccacatcatgatagtaaaatcaggatggaaataagagggtgcctgataaatggagtcagtgtggaat

SEQ ID NO: 615074 - DNA, 120 bp, Artificial Sequence
  ENSG00000176928_19 (sequence is synthesized)
tgaataccatactatgcccaatactgtttaaactcagtcctcccatattttaaaaggtgtccaaaattccatacacaagggaaagtgatctagcctttgatgttattagcctgcagttgg

SEQ ID NO: 615075 - DNA, 120 bp, Artificial Sequence
  ENSG00000176928_20 (sequence is synthesized)
ctaggtttttttaatatttgtttttgcttgtaatctcactgagccaaatcagagatcttaaacattcagtcagtcatcaaacattattgagcacctaactatatgacaggcactttttta

SEQ ID NO: 615076 - DNA, 120 bp, Artificial Sequence
  ENSG00000176928_21 (sequence is synthesized)
gagactgcggcttatcctcatcatagcaacctcggtatctttaagttctccacataacagtcaggattctactgaagaagcttttgaagtttgtggtaatcgtctgatcatataaaccac

SEQ ID NO: 615077 - DNA, 120 bp, Artificial Sequence
  ENSG00000176928_22 (sequence is synthesized)
ccatttcagagtagtgtttaagtactgtgaccaacactccacttgtctcttaactcagctttcaagacatttcttaaccatcagagcagaggaggaaagactcactacctcagaaaaatc

SEQ ID NO: 615078 - DNA, 120 bp, Artificial Sequence
  ENSG00000176928_23 (sequence is synthesized)
ataatctgccttttggtgcattacttggtcaattcagggttgaggagactgttggggggcatttataatgtatgaaagttaaggaagggggtgaggatgtgggttgggacaggtagtacc

SEQ ID NO: 615079 - DNA, 120 bp, Artificial Sequence
  ENSG00000176928_24 (sequence is synthesized)
taaagaggagcgaagggatttatacaacatttttatcatgttacaaaacagtatcatgaatggcctcctttttagttcaactgtttctttaaaatgcatttactgattaaaaataagaac

SEQ ID NO: 615080 - DNA, 120 bp, Artificial Sequence
  ENSG00000176928_25 (sequence is synthesized)
tgaccaatagctccaagtgtcacacaccagaacattaagcctaagtcctcaattcataagttatcattctagataagtttctttacaatggaatactttctgtggaatcattataattct

SEQ ID NO: 615081 - DNA, 120 bp, Artificial Sequence
  ENSG00000176928_26 (sequence is synthesized)
gttgtatggaactatcaagctaagagtcactaaactttcttcaaaaggttgtgtgaaatatgacagctttctaaattaatttgtatagtcatttaaaattttttcttctctggcaactgt

SEQ ID NO: 615082 - DNA, 120 bp, Artificial Sequence
  ENSG00000176928_27 (sequence is synthesized)
ccaactggaatccagatttaaagtgataaaagctctaagtttcttgcagtctttttctcagcttagttccagagagaaaaaagctaattttcctaaggacacagcaagaatattcattaa

SEQ ID NO: 615083 - DNA, 120 bp, Artificial Sequence
  ENSG00000176928_28 (sequence is synthesized)
tttcctaaggacacagcaagaatattcattaaggatattttctaaaacccacacttgagaaaaccacccaatgagtcaaaaatatatatatataatatatattttatatatatgtaatat

SEQ ID NO: 615084 - DNA, 120 bp, Artificial Sequence
  ENSG00000176928_29 (sequence is synthesized)
tatatattatatatataatggaattgttctggaagtaaaatggggtaggaatggggttctgagaataggcaataacattttcaccagtctcttgggaaattgtagaactcatgtaaaaat

SEQ ID NO: 615085 - DNA, 120 bp, Artificial Sequence
  ENSG00000176928_30 (sequence is synthesized)
ttcttggtcatgatatgtctcaatggcagcctcagtaaataaaaatgtagcctcagatattatatttaaagatgtagtaaatctagcccaaaataggacaatttggaagatttaagtatt

SEQ ID NO: 615086 - DNA, 120 bp, Artificial Sequence
  ENSG00000176928_31 (sequence is synthesized)
acatattttttaaatgtctgtgttctaaatgtgaaatgcactttgctcattttaaagttcataatactaactgccaactgacaccacttctcgctccctttcttctcttgaactcatttt

SEQ ID NO: 615087 - DNA, 120 bp, Artificial Sequence
  ENSG00000176928_32 (sequence is synthesized)
tctccctttttatttacccccttcaaattacttcattctttggaaataactattaccaagccccattcttcaaaataagtaaacattgtatagagccaagttctgcaaaagatccatacc

SEQ ID NO: 615088 - DNA, 120 bp, Artificial Sequence
  ENSG00000176928_33 (sequence is synthesized)
agttcactcgtgtgcgactgtggacaggtaagtcactttggtctctatgaacctcagttttccagatctttgaaatgagcacttggatgcctatccttgcttccacacaagtgttttttt

SEQ ID NO: 615089 - DNA, 120 bp, Artificial Sequence
  ENSG00000176928_34 (sequence is synthesized)
ttttttttttttttttttgtgagaatcgattgaaatagtatatgaagtggtttgaaaataggtacaaactattgacatttcaatgtcagagagtgatacctgtagtagtataggcaaagg

SEQ ID NO: 615090 - DNA, 120 bp, Artificial Sequence
  ENSG00000176928_35 (sequence is synthesized)
tccaaccccatcgaaaggcttaaacatttaccttttctgaaaaactattgaaatataaagagagtccccagtcacaggggcaacttctgtaaccaaatccagatctgaggaaactcctgt

SEQ ID NO: 615091 - DNA, 120 bp, Artificial Sequence
  ENSG00000176928_36 (sequence is synthesized)
aaccccatttggggtttctttctaagccaatagggttacaggttggtacagtgacacattgagaatggggctacaaatacttttcccaccatctaggatgaaatacacgaaatcctgttg

SEQ ID NO: 615092 - DNA, 120 bp, Artificial Sequence
  ENSG00000176928_37 (sequence is synthesized)
aaatcttggtttttatgcctttgctcatcagaataaacgtaaatgctgaaaaacaaataacctcctgatccactgtcttgcctcctggtgagaaatgattctatcccctgtttattggga

SEQ ID NO: 615093 - DNA, 120 bp, Artificial Sequence
  ENSG00000176928_38 (sequence is synthesized)
aatttccaaagttgttcatcacttaaatgccgtattcaaagggaacatggaaggatgaagcggagaaagtgccttcgagacattcacacatttctctggactcagtctgttaacatatca

SEQ ID NO: 615094 - DNA, 120 bp, Artificial Sequence
  ENSG00000176928_39 (sequence is synthesized)
gggagcttgtcagatcacacctttttgccttggaaatcctacagatttcctgtacgccttcatatctgattcttccctaaaacctttgggtatgatttcctccctggtcttgataatgtc

SEQ ID NO: 615095 - DNA, 120 bp, Artificial Sequence
  ENSG00000176928_40 (sequence is synthesized)
ctgcagtctgtgttttataattattctttgtatttattgaatctagactttaagttattcagagatcagaccagaaccttagagtttctaaactgtatgtggatattaaataatattaat

SEQ ID NO: 615096 - DNA, 120 bp, Artificial Sequence
  ENSG00000176928_41 (sequence is synthesized)
aatgaaagagctaccaaaatagtctatattgtgtgaacaatctcttgggatattagacgtgtttaaagaccagtgttgctgctatttttaatattttggttaatttaagtgaaatgtaca

SEQ ID NO: 615097 - DNA, 120 bp, Artificial Sequence
  ENSG00000176928_42 (sequence is synthesized)
tattttaatttgaagatttatcttgcccatcagaatgtgaagatatacttgcatatattttgacatatttcatggaaaataaaaatgataatccactttgtgagtgtaagtgaatgtatt

SEQ ID NO: 615098 - DNA, 120 bp, Artificial Sequence
  ENSG00000176928_43 (sequence is synthesized)
catatgtatgttattataaatgatttttgtttgcactgatgatgaaatgagagttttgggggctttttatacatttatatcgactggtctctaaatctcctattttgttttcttatcatt

SEQ ID NO: 615099 - DNA, 120 bp, Artificial Sequence
  ENSG00000176928_44 (sequence is synthesized)
tttgaaatacagttcccattacatgagttttaaatagattggtgtttcattttgtattatgctactactagatgttgattctctggtattgtaaaataaaatgtgctccaaaaacccaaa

SEQ ID NO: 615100 - DNA, 120 bp, Artificial Sequence
  ENSG00000176928_45 (sequence is synthesized)
gatgctgcccgagcccccgcccctgggcttcgggacagggacgcggggcgcctgaaaggactgctaccgcggcttctgcgccagggcaaccggggctggagggggcctccgagttgttct

SEQ ID NO: 615101 - DNA, 120 bp, Artificial Sequence
  ENSG00000176928_46 (sequence is synthesized)
ttgggggcggaagctgcgggccgcgcctcccaggccgcgcccttcccagagaccagtttctgggctttttaaggtcaagttttttgtgccgcagagcgggccgggatcgtctgcctgcga

SEQ ID NO: 615102 - DNA, 120 bp, Artificial Sequence
  ENSG00000176928_47 (sequence is synthesized)
ggtggcggtgcctaccacagcgggtcgggagcttctgggatccgagccgagaaacgggacgctcgagtccatttgcagtcttcacgtaggaaacggtgctagaacaacaaaccagaagat

SEQ ID NO: 615103 - DNA, 120 bp, Artificial Sequence
  ENSG00000176928_48 (sequence is synthesized)
taacagagttggggctaatataatgcgtttaattgtctcatggcccatgttctagaactacatcctcggtcactgtcccagtacagccatctgtagcacctcctcagtaactgacggtga

SEQ ID NO: 615104 - DNA, 120 bp, Artificial Sequence
  ENSG00000176945_0 (sequence is synthesized)
agttctgtggagcagcggtggccggctaggatgggctgtctctggggtctggctctgccccttttcttcttctgctgggaggttggggtctctgggagctctgcaggccccagcacccgc

SEQ ID NO: 615105 - DNA, 120 bp, Artificial Sequence
  ENSG00000176945_1 (sequence is synthesized)
agagcagacactgcgatgacaacggacgacacagaagtgcccgctatgactctagcaccgggccacgccgctctggaaactcaaacgctgagcgctgagacctcttctagggcctcaacc

SEQ ID NO: 615106 - DNA, 120 bp, Artificial Sequence
  ENSG00000176945_2 (sequence is synthesized)
ccagccggccccattccagaagcagagaccaggggagccaagagaatttcccctgcaagagagaccaggagtttcacaaaaacatctcccaacttcatggtgctgatcgccacctccgtg

SEQ ID NO: 615107 - DNA, 120 bp, Artificial Sequence
  ENSG00000176945_3 (sequence is synthesized)
gagacatcagccgccagtggcagccccgagggagctggaatgaccacagttcagaccatcacaggcagtgatcccagggaagccatctttgacaccctttgcaccgatgacagctctgaa

SEQ ID NO: 615108 - DNA, 120 bp, Artificial Sequence
  ENSG00000176945_4 (sequence is synthesized)
gaggcaaagacactcacaatggacatattgacattggctcacacctccacagaagctaagggcctgtcctcagagagcagcgcctcttccgacagcccccatccagtcatcaccccgtca

SEQ ID NO: 615109 - DNA, 120 bp, Artificial Sequence
  ENSG00000176945_5 (sequence is synthesized)
attaattgcagcatcacagaaatagaaacaacgacttccagcatccctggggcctcagacacagatctcatccccacggaaggggtgaaggcctcgtccacctccgatccaccagctctg

SEQ ID NO: 615110 - DNA, 120 bp, Artificial Sequence
  ENSG00000176945_6 (sequence is synthesized)
cctgactccactgaagcaaaaccacacatcactgaggtcacagcctctgccgagaccctgtccacagccggcaccacagagtcagctgcacctgatgccacggttgggaccccactcccc

SEQ ID NO: 615111 - DNA, 120 bp, Artificial Sequence
  ENSG00000176945_7 (sequence is synthesized)
actaacagcgccacagaaagagaagtgacagcacccggggccacgaccctcagtggagctctggtcacagttagcaggaatccccttgaagaaacctcagccctctctgttgagacacca

SEQ ID NO: 615112 - DNA, 120 bp, Artificial Sequence
  ENSG00000176945_8 (sequence is synthesized)
agttacgtcaaagtctcaggagcagctccggtctccatagaggctgggtcagcagtgggcaaaacaacttcctttgctgggagctctgcttcctcctacagcccctcggaagccgccctc

SEQ ID NO: 615113 - DNA, 120 bp, Artificial Sequence
  ENSG00000176945_9 (sequence is synthesized)
aagaacttcaccccttcagagacaccgaccatggacatcgcaaccaaggggcccttccccaccagcagggaccctcttccttctgtccctccgactacaaccaacagcagccgagggacg

SEQ ID NO: 615114 - DNA, 120 bp, Artificial Sequence
  ENSG00000176945_10 (sequence is synthesized)
aacagcaccttagccaagatcacaacctcagcgaagaccacgatgaagcccccaacagccacgcccacgactgcccggacgaggccgaccacagacgtgagtgcaggtgaaaatggaggt

SEQ ID NO: 615115 - DNA, 120 bp, Artificial Sequence
  ENSG00000176945_11 (sequence is synthesized)
ttcctcctcctgcggctgagtgtggcttccccggaagacctcactgaccccagagtggcagaaaggctgatgcagcagctccaccgggaactccacgcccacgcgcctcacttccaggtc

SEQ ID NO: 615116 - DNA, 120 bp, Artificial Sequence
  ENSG00000176945_12 (sequence is synthesized)
tccttactgcgtgtcaggagaggctaacggacatcagctgcagccaggcatgtcccgtatgccaaaagagggtgctgcccctagcctgggcccccaccgacagactgcagctgcgttact

SEQ ID NO: 615117 - DNA, 120 bp, Artificial Sequence
  ENSG00000176945_13 (sequence is synthesized)
gtgctgagaggtacccagaaggttcccatgaagggcagcatgtccaagcccctgaccccagatgtggcaacaggaccctcgctcacatccaccggagtgtatgtgtggggaggggcttca

SEQ ID NO: 615118 - DNA, 120 bp, Artificial Sequence
  ENSG00000176945_14 (sequence is synthesized)
cctgttcccagaggtgtccttggactcaccttggcacatgttctgtgtttcagtaaagagagacctgatcacccatctgtgtgcttccatcctgcattaaaattcactcagtgtggccca

SEQ ID NO: 615119 - DNA, 66 bp, Artificial Sequence
  ENSG00000176945_15 (sequence is synthesized)
tcatggtccccgggatctgacgtcactctcctcgctgaagccctggtgactgtcacaaacatcgag

SEQ ID NO: 615120 - DNA, 76 bp, Artificial Sequence
  ENSG00000176945_16 (sequence is synthesized)
ggctgagtgtggcttccccggaagacctcactgaccccagagtggcagaaaggctgatgcagcagatggaaaggag

SEQ ID NO: 615121 - DNA, 120 bp, Artificial Sequence
  ENSG00000176945_17 (sequence is synthesized)
cggcctcccaaagtgctgggattccagttaatgagcactgctcctggcctccacatttctaaaatcgaagttctgatcttttcctctggacctgccccacctgcatcttccccatctcag

SEQ ID NO: 615122 - DNA, 120 bp, Artificial Sequence
  ENSG00000176945_18 (sequence is synthesized)
atctcagttaacgtcagttgcatccttcaggtgctcaggccgaaatcctcggcaccgtctttattcccctctcacattttgcaccaggaaattctgctggctctaaggccatcaaactgt

SEQ ID NO: 615123 - DNA, 120 bp, Artificial Sequence
  ENSG00000176945_19 (sequence is synthesized)
gcccagaatgtggcccctcctcagcatctccagtgctaccaccgagatggtccacgatgccatcatctctcacctgcactactacaggtctccctgtttccagctcagcccccaccccag

SEQ ID NO: 615124 - DNA, 120 bp, Artificial Sequence
  ENSG00000176945_20 (sequence is synthesized)
tctagtcccagtgtgtcagccagggctgtctttttacaacataaggcagaccacaccacttctttgctccaatcctcccatttcactcagaagaaaagctccgacaacagctgcaaagcc

SEQ ID NO: 615125 - DNA, 120 bp, Artificial Sequence
  ENSG00000176945_21 (sequence is synthesized)
gtgcacgacctgcgcccctcccctgcctccttaatttgctgactgcaccgcagccacacggacgtctttcttgtcccttgaatgcgctgggcctgctcttgccttgggacctttctgtgc

SEQ ID NO: 615126 - DNA, 120 bp, Artificial Sequence
  ENSG00000176945_22 (sequence is synthesized)
attgcttagtctgctcagaagccttctcctctacatatccacttgtctaaaccctctacctccaccttcatgccccttctcagcgaggtctaccatgaccatgctgcctacaaattcagt

SEQ ID NO: 615127 - DNA, 120 bp, Artificial Sequence
  ENSG00000176945_23 (sequence is synthesized)
ctccccttctgtactttgacgtactttatagtgctgatcacaattgaacgtcatacatattttgttttctttattatctgagtcctccaactagaatgaaagattttgcccattatggtt

SEQ ID NO: 615128 - DNA, 120 bp, Artificial Sequence
  ENSG00000176945_24 (sequence is synthesized)
tccctagtgccaagaacagtacctggcacataccaggggctcagtaaacatttgttagatgaatgaaggaaacaaggagacaatgttgatgctgctgtgagcaaggggagtctgaacgtt

SEQ ID NO: 615129 - DNA, 120 bp, Artificial Sequence
  ENSG00000176945_25 (sequence is synthesized)
tgacagatcccttccatttctggagtggggcagaatgagtttcataaagtagctcggacaaaaataattcgctcatcttggcatatatgttgggcagctgccgcagaagagagactgagc

SEQ ID NO: 615130 - DNA, 120 bp, Artificial Sequence
  ENSG00000176945_26 (sequence is synthesized)
tatgtgccgtggaggattcaaatctgtctcttctcccagggattgaagttagacacgtacagcaataataagttgaaagaacttatttacaccgcatatagcaacaacaggatgccctta

SEQ ID NO: 615131 - DNA, 120 bp, Artificial Sequence
  ENSG00000176945_27 (sequence is synthesized)
atatatagagaactcttacagcgcaagaaaataaaaaggcaaacataccagtagaaaaatgggtaaatggcaacaggtaattcacaaaagaagaaatacaaatgtcctctcctcccgcca

SEQ ID NO: 615132 - DNA, 120 bp, Artificial Sequence
  ENSG00000176945_28 (sequence is synthesized)
ccaccccccatgaaaaagaacgtgtgacttcagtagcaaaaacaggtccattaatacagtgagatattgcttattgtatgtctgtactgatctatactgggtgctgggcaaacgggcatt

SEQ ID NO: 615133 - DNA, 120 bp, Artificial Sequence
  ENSG00000176945_29 (sequence is synthesized)
cttaaacactcctagtagggaagaaattggtacaacctttccggaggacaatttaactgatttatttaaagcccgaaaaatgtacatacctttaactcagcagtttcgttactgatttat

SEQ ID NO: 615134 - DNA, 120 bp, Artificial Sequence
  ENSG00000176945_30 (sequence is synthesized)
cttaaggaagtaatttagaatctgtgcctaactgtttacaataactcatagatgaaaaaggcaaaacaaaacacaagtaacctcaaatctccccatgtaacagtttgcttaaacactata

SEQ ID NO: 615135 - DNA, 120 bp, Artificial Sequence
  ENSG00000176945_31 (sequence is synthesized)
gcgttattttacgcaagctacagaagcattgttgaaacatatatttattaggacagaaaaaaattcatgaaatgttattttatcttcttttttcttaaaatggaacttaaaaaaaatttt

SEQ ID NO: 615136 - DNA, 120 bp, Artificial Sequence
  ENSG00000176945_32 (sequence is synthesized)
tttaactccaacctaccttttacaccatctgcagagctttcctctcccaaatcaaagctactcctgttcctacctccaggatggaatccccaccttcgtatgcaagggtcttcatgatat

SEQ ID NO: 615137 - DNA, 120 bp, Artificial Sequence
  ENSG00000176945_33 (sequence is synthesized)
ggcctcagccaactatcttagctccaggtcacggccccatcttccatatcctatgctgcttgcacaggaagcagctcgctaaccccaggcacacctgctttcatctggagcgtctgccca

SEQ ID NO: 615138 - DNA, 120 bp, Artificial Sequence
  ENSG00000176945_34 (sequence is synthesized)
tcatgattcctccccctggtcccttcacctggaaaactcctattcattcctcaaagcccagttcagatggcacctctccatgacttcatcagattccctacagaggtgctgattttctgg

SEQ ID NO: 615139 - DNA, 120 bp, Artificial Sequence
  ENSG00000176945_35 (sequence is synthesized)
tctcttgtgtttctgttgtaacacttaacatgctgtattataatgtgcttattttatttacaagtttgttacattgtacgtgctcgaggacaagcagccggtagtattcacctctgtcat

SEQ ID NO: 615140 - DNA, 120 bp, Artificial Sequence
  ENSG00000176945_36 (sequence is synthesized)
cacagaagctggcgtggagccctccacatgagggcactgatgtgtttgctgagtgactgggacaatggtgggccacgtgagccccgaaactttcagtgggctctgaaagttaagaaaagg

SEQ ID NO: 615141 - DNA, 120 bp, Artificial Sequence
  ENSG00000176945_37 (sequence is synthesized)
gcattcagtactgaaatcacacaaaacgtaaatttaatgatataattgttccgaagctgctctataatttggcatgaatggagagcagtttacaaaaatgacaacaccactgttatataa

SEQ ID NO: 615142 - DNA, 120 bp, Artificial Sequence
  ENSG00000176945_38 (sequence is synthesized)
acccaattcttaaataggttttcttctcttgctttgtatttcctcaagtgggtgatacttaatacagtggctcatgtaatcttaattactacatatgaggacacggacatgtacatatga

SEQ ID NO: 615143 - DNA, 120 bp, Artificial Sequence
  ENSG00000176945_39 (sequence is synthesized)
ggcctttctcgtcttttaagggtttttacttccatggggaactatgtgttggatgagaaaagtatccggggaaggggacagaggttcagaaagctctgcgagtcctggacgctggtctgc

SEQ ID NO: 615144 - DNA, 120 bp, Artificial Sequence
  ENSG00000176945_40 (sequence is synthesized)
cttcttggctcaccctggaaggtggacgctggccccacacatcccctcttaaagacgcaggccgatagccagcagatcctggggcttgctggccccaagtgagttgtcagggtttcagag

SEQ ID NO: 615145 - DNA, 120 bp, Artificial Sequence
  ENSG00000176945_41 (sequence is synthesized)
gacaccagtcatggcaaccccagctccatggctgccacacaggcctgggcttcccaggactgcctccttcttgttcgcttatgtagatgaaaaatgaggtaacggcactcccctgcccca

SEQ ID NO: 615146 - DNA, 120 bp, Artificial Sequence
  ENSG00000176945_42 (sequence is synthesized)
ggctgatgcagcagttgatgacacagggcacccacagcgctcacgtgccttccatggtgggggtgaatcctttgccaatagtgcctggtgggtttcagcactgaataatattccatcgtc

SEQ ID NO: 615147 - DNA, 73 bp, Artificial Sequence
  ENSG00000176945_43 (sequence is synthesized)
gtgcctggtgggtttcagcactgaataatattccatcgtctgaatgcaccataggttatttacccgttcacct

SEQ ID NO: 615148 - DNA, 120 bp, Artificial Sequence
  ENSG00000176945_44 (sequence is synthesized)
ggggagtagaggaaggggcgaggttcgcaggggctgcagggaagacccgcaggacacagaagagcagctaccgcgcttggaagggagtctcgtttcttacggagaattgggagctgaatc

SEQ ID NO: 615149 - DNA, 120 bp, Artificial Sequence
  ENSG00000176945_45 (sequence is synthesized)
tgaggatctctgcctggctttgcttctgcctgccttctccgagttcttcatttccttctctgcaatgtaaacatgtgactcctagagcccccagtttcttctggtccttggaagcttggc

SEQ ID NO: 615150 - DNA, 120 bp, Artificial Sequence
  ENSG00000176945_46 (sequence is synthesized)
cttctggcctctgaggcaaaggtcagtgatactgatgggagggtaggtcggactcttggttgcaagtggcagaaacccaagtcagggcagtttatgcaaaaaaaaaaaaaaaaaaaaaaa

SEQ ID NO: 615151 - DNA, 120 bp, Artificial Sequence
  ENSG00000176945_47 (sequence is synthesized)
gggagctctgcagatttgaagattgtaccaggagagccgcagtgttccagagctactgaggggctgggctgggatttgctgtattcgagaagacccccttggacccgagaggctgtgggc

SEQ ID NO: 615152 - DNA, 120 bp, Artificial Sequence
  ENSG00000176945_48 (sequence is synthesized)
agcagttctgtggagcagcggtggccggctaggatgggctgtctctggggtctggctctgccccttttcttcttctgctgggaggttggggtctctgggagctctgcagcttgtgtgaag

SEQ ID NO: 615153 - DNA, 80 bp, Artificial Sequence
  ENSG00000176946_0 (sequence is synthesized)
atcttgccgtacggcgcggacgccgcgggccggcccacgtcccgagccgtgtcgccgccgcgctccctccctcggggcgg

SEQ ID NO: 615154 - DNA, 120 bp, Artificial Sequence
  ENSG00000176946_1 (sequence is synthesized)
gcggctgggccaaggcccgcgatggtgatctgctgtgcggccgtgaactgctccaaccggcagggaaagggcgagaagcgcgccgtctccttccacaggttccccctaaaggactcaaaa

SEQ ID NO: 615155 - DNA, 120 bp, Artificial Sequence
  ENSG00000176946_2 (sequence is synthesized)
cgtctaatccaatggttaaaagctgttcagagggataactggactcccactaagtattcatttctctgtagtgagcatttcaccaaagacagcttctccaagaggctggaggaccagcat

SEQ ID NO: 615156 - DNA, 120 bp, Artificial Sequence
  ENSG00000176946_3 (sequence is synthesized)
cgcctgctgaagcccacggccgtgccatccatcttccacctgaccgagaagaagaggggggctggaggccatggccgcacccggagaaaagatgccagcaaggccacagggggtgtgagg

SEQ ID NO: 615157 - DNA, 120 bp, Artificial Sequence
  ENSG00000176946_4 (sequence is synthesized)
ggacactcgagtgccgccaccagcagaggagctgcaggttggtcaccgtcctcgagtggaaacccgatggccaagccagagtcccgcaggttgaagcaagctgctctgcaaggtgaagcc

SEQ ID NO: 615158 - DNA, 120 bp, Artificial Sequence
  ENSG00000176946_5 (sequence is synthesized)
acacccagggcggcccaggaggccgccagccaggagcaggcccagcaagctctggaacggactccaggagatggactggccaccatggtggcaggcagtcagggaaaagcagaagcgtct

SEQ ID NO: 615159 - DNA, 120 bp, Artificial Sequence
  ENSG00000176946_6 (sequence is synthesized)
gccacagatgctggcgatgagagcgccacttcctccatcgaagggggcgtgacagataagagtggcatttctatggatgactttacgcccccaggatctggggcgtgcaaatttatcggc

SEQ ID NO: 615160 - DNA, 120 bp, Artificial Sequence
  ENSG00000176946_7 (sequence is synthesized)
tcacttcattcgtacagtttctcctctaagcacacccgagaaaggccatctgtcccccgagagcccattgaccgcaagaggctgaagaaagatgtggaaccaagctgcagtgggagcagc

SEQ ID NO: 615161 - DNA, 120 bp, Artificial Sequence
  ENSG00000176946_8 (sequence is synthesized)
agctcatcacttaccgcgacaccgcagaagccttcccagagcccctctgcccctcctgccgacgtcaccccaaagccagccacggaagccgtgcagagcgagcacagcgacgccagcccc

SEQ ID NO: 615162 - DNA, 120 bp, Artificial Sequence
  ENSG00000176946_9 (sequence is synthesized)
atgtccatcaacgaggtcatcctgtcggcgtcaggggcctgcaagctcatcgactcactgcactcctactgcttctcctcccggcagaacaagagccaggtgtgctgcctgcgggagcag

SEQ ID NO: 615163 - DNA, 120 bp, Artificial Sequence
  ENSG00000176946_10 (sequence is synthesized)
gtggagaagaagaacggcgagctgaagagcctgcggcagagggtcagccgctccgacagccaggtgcggaagctacaggagaagctggatgagctgaggagagtgagcgtcccctatcca

SEQ ID NO: 615164 - DNA, 120 bp, Artificial Sequence
  ENSG00000176946_11 (sequence is synthesized)
agtagcctgctgtcgcccagccgcgagccccccaagatgaacccagtggtggagccactgtcctggatgctgggcacctggctgtcggacccacctggagccgggacctaccccacactg

SEQ ID NO: 615165 - DNA, 120 bp, Artificial Sequence
  ENSG00000176946_12 (sequence is synthesized)
cagcccttccagtacctggaggaggttcacatctcccacgtgggccagcccatgctgaacttctcgttcaactccttccacccggacacgcgcaagccgatgcacagagagtgtggcttc

SEQ ID NO: 615166 - DNA, 120 bp, Artificial Sequence
  ENSG00000176946_13 (sequence is synthesized)
attcgcctcaagcccgacaccaacaaggtggcctttgtcagcgcccagaacacaggcgtggtggaagtggaggagggcgaggtgaacgggcaggagctgtgcatcgcatcccactccatc

SEQ ID NO: 615167 - DNA, 120 bp, Artificial Sequence
  ENSG00000176946_14 (sequence is synthesized)
gccaggatctccttcgccaaggagccccacgtagagcagatcacccggaagttcaggctgaattctgaaggcaaacttgagcagacggtctccatggcaaccacgacacagccaatgact

SEQ ID NO: 615168 - DNA, 120 bp, Artificial Sequence
  ENSG00000176946_15 (sequence is synthesized)
cagcatcttcacgtcacctacaagaaggtgaccccgtaaacctagagcttctggagccctcgggagggcctggctactgtgcctcaacggttcggctcctcaacagacagtccctgcggc

SEQ ID NO: 615169 - DNA, 120 bp, Artificial Sequence
  ENSG00000176946_16 (sequence is synthesized)
agaagtgggtgtggccgtgagcctctgcaggctcaagagtgttgtccagatgtttctgtactggcatagaaaaaccaaataaaaggcctttatttttatggctgaggattttgaatatta

SEQ ID NO: 615170 - DNA, 120 bp, Artificial Sequence
  ENSG00000176946_17 (sequence is synthesized)
gtagagcaggctggaatacagtagcaagatcttggctcgctgcaacttctggctcccaggcttgagcgatcctcccacctcgccctcccaagtagctggggccacagggccccatgcagt

SEQ ID NO: 615171 - DNA, 120 bp, Artificial Sequence
  ENSG00000176946_18 (sequence is synthesized)
gcctggcagagcctccccgcttcctgccttatgtgggtggctctggacctagctttgcagcctgggctgccaccggtgacctgcgagcttgagcatcttttcacgtcgttgctgggtcat

SEQ ID NO: 615172 - DNA, 120 bp, Artificial Sequence
  ENSG00000176946_19 (sequence is synthesized)
cctccagcgaggtgcctgttcaggtctggtgaccatttccactgtgccttttctggctgacatgtcagagttctttatatgatttgaataaagctctgttagctaaatgtgttgcaaata

SEQ ID NO: 615173 - DNA, 120 bp, Artificial Sequence
  ENSG00000176946_20 (sequence is synthesized)
ctttccctccgtatccacagggtgaagtggggaggaggagaaatatcgttgcttccacagctgcagagttggggcctcctgtggagtcccggcttgcaggcaaggagagtcaaggctgcc

SEQ ID NO: 615174 - DNA, 120 bp, Artificial Sequence
  ENSG00000176953_0 (sequence is synthesized)
tgcaaggcgaaagtcgctgaagggggcggggcgaggcgagaggaggcgggcgtgtgttgtggaggaaagtgtgccatggcggagcctgtggggaagcggggccgctggtccggaggtagc

SEQ ID NO: 615175 - DNA, 120 bp, Artificial Sequence
  ENSG00000176953_1 (sequence is synthesized)
ggtgccggccgagggggtcggggcggctggggcggtcggggccggcgtcctcgggcccagcggtctccatcccggggcacgctggacgtagtgtctgtggacttggtcaccgacagcgat

SEQ ID NO: 615176 - DNA, 120 bp, Artificial Sequence
  ENSG00000176953_2 (sequence is synthesized)
gaggaaattctggaggtcgccaccgctcgcggtgccgcggacgaggttgaggtggagcccccggagcccccggggccggtcgcgtcccgggataacagcaacagtgacagcgaaggggag

SEQ ID NO: 615177 - DNA, 120 bp, Artificial Sequence
  ENSG00000176953_3 (sequence is synthesized)
gacaggcggcccgcaggacccccgcgggagccggtcaggcggcggcggcggctggtgctggatccgggggaggcgccgctggttccggtgtactcggggaaggttaaaagcagccttcgc

SEQ ID NO: 615178 - DNA, 120 bp, Artificial Sequence
  ENSG00000176953_4 (sequence is synthesized)
cttatcccagatgatctatccctcctgaaactctaccctccaggggatgaggaagaggcagagctggcagattcgagtggtctctaccatgagggctccccatcaccaggctctccctgg

SEQ ID NO: 615179 - DNA, 120 bp, Artificial Sequence
  ENSG00000176953_5 (sequence is synthesized)
aagacaaagctgaggactaaggataaagaagagaagaaaaagacagagtttctggatctggacaactctcctctgtccccaccttcaccaaggaccaaaagcagaacgcatactcgggca

SEQ ID NO: 615180 - DNA, 120 bp, Artificial Sequence
  ENSG00000176953_6 (sequence is synthesized)
ctcaagaagttaagtgaggtgaacaagcgcctccaggatctccgttcctgtctgagccccaagccacctcagggtcaagagcaacagggccaagaggatgaagtggtcttggtggaaggg

SEQ ID NO: 615181 - DNA, 120 bp, Artificial Sequence
  ENSG00000176953_7 (sequence is synthesized)
cccaccctcccagagaccccccgactcttcccactcaaaatccgttgccgggctgacctggtcagattgcccctcaggatgtcggagcccctgcagagtgtggtggaccacatggccacc

SEQ ID NO: 615182 - DNA, 120 bp, Artificial Sequence
  ENSG00000176953_8 (sequence is synthesized)
caccttggggtgtccccaagcaggatccttttgctttttggagagacagagctatcacctactgccactcccaggaccctaaagctcggagtggctgacatcattgactgtgtggtacta

SEQ ID NO: 615183 - DNA, 120 bp, Artificial Sequence
  ENSG00000176953_9 (sequence is synthesized)
acaagttctccagaggccacagagacgtcccaacagctccagctccgggtgcagggaaaggagaaacaccagacactggaagtctcactgtctcgagattcccctctaaagaccctcatg

SEQ ID NO: 615184 - DNA, 120 bp, Artificial Sequence
  ENSG00000176953_10 (sequence is synthesized)
tcccactatgaggaggccatgggactgtcgggacggaagctctccttcttctttgatgggacaaagctttcaggcagggagctgccagctgacctgggcatggaatctggggacctcatt

SEQ ID NO: 615185 - DNA, 120 bp, Artificial Sequence
  ENSG00000176953_11 (sequence is synthesized)
gaggtctggggctgacaccccactccctgtttgacggcccagcctggacttggggagaatgactttcccttttttgccccataagggctagcataagctgaggtagaacttatctttaag

SEQ ID NO: 615186 - DNA, 120 bp, Artificial Sequence
  ENSG00000176953_12 (sequence is synthesized)
ctgcagcaaaatcaaggagtgacttttgtcccctctcctgttgaccctggtttagagccgttaaccacttggtgagttatgtgggtgttgttgccctgggtggcctgtggctccgtccac

SEQ ID NO: 615187 - DNA, 120 bp, Artificial Sequence
  ENSG00000176953_13 (sequence is synthesized)
aagtcatgctgagttttgcagcctctgtgacttggagatgtcccttcacccctcccctttcaccaccatcctcttttcctcatggaaatgtctgctttatgaaactatgcacatattgaa

SEQ ID NO: 615188 - DNA, 120 bp, Artificial Sequence
  ENSG00000176953_14 (sequence is synthesized)
agtgagttgaaacaaatgagggttgggtaggagcttccaggcctgggatttacaccacgcctagcccagcagaggccttagtcccatttggggcttgggagtgacatttgcttgaggctt

SEQ ID NO: 615189 - DNA, 120 bp, Artificial Sequence
  ENSG00000176953_15 (sequence is synthesized)
atacactggtgtggttgcctggcttgcaggaaatgaccaagctcacacatgctggctgaagcgtaagcagacaactgaggtactcttttgaaggatgaaggtggtggattctcagccctg

SEQ ID NO: 615190 - DNA, 120 bp, Artificial Sequence
  ENSG00000176953_16 (sequence is synthesized)
ggggtcttcctcacctgaggacccttcagagccaccctttctagtttgcatttcctggtgcacacatttaaggcataacagcacattcatccctttggtttgggatctcaggaatacagt

SEQ ID NO: 615191 - DNA, 120 bp, Artificial Sequence
  ENSG00000176953_17 (sequence is synthesized)
cccatgcaaagattctctggttttatggcttttttccctttctttacaccatcctctcccataagcacccatgtctttgaatatgaatgtatttgtaaaataccacgtttcatgtgtgaa

SEQ ID NO: 615192 - DNA, 120 bp, Artificial Sequence
  ENSG00000176953_18 (sequence is synthesized)
tatgtgcttttactgtacatagtgctattgtgcaataggtcttatgctgttttcactcaatgtgtgctaagatctagccccattgactcttctagaaatgcagtattgctttgacctgcc

SEQ ID NO: 615193 - DNA, 120 bp, Artificial Sequence
  ENSG00000176953_19 (sequence is synthesized)
tccacaatgtcaattgcagtttacacacattgcctaaagtgggggacacctgggtgcccctgaccccttggcaccggatacaggccacgataaacatcctttcgtgtgttcccttctgtg

SEQ ID NO: 615194 - DNA, 120 bp, Artificial Sequence
  ENSG00000176953_20 (sequence is synthesized)
cttgtgtggcatgtgtacccaggatgggcctataggtcacagaggtcagtttctctttggttttccagattttctttagaacggtgactgaccctcctacttgaggccgcccttttctcc

SEQ ID NO: 615195 - DNA, 120 bp, Artificial Sequence
  ENSG00000176953_21 (sequence is synthesized)
ttatccttgccagcacttgtattgccagactacctaatttttgccagtctcatgggtagatagtggtgcagtgctttaacatacattcatctgatcagcattaatttggggaattttttc

SEQ ID NO: 615196 - DNA, 120 bp, Artificial Sequence
  ENSG00000176953_22 (sequence is synthesized)
acttagcctttctggtttcccttcctgtgcattgcccattttctcatggagtttcttatcttttttggtttattctcaggagttgcttgtacattcttgggcaattgcagataattccaa

SEQ ID NO: 615197 - DNA, 89 bp, Artificial Sequence
  ENSG00000176953_23 (sequence is synthesized)
agttgcttgtacattcttgggcaattgcagataattccaagaatgcatatttgggctgggtatggaggttcactgaaggatcgctgcag

SEQ ID NO: 615198 - DNA, 88 bp, Artificial Sequence
  ENSG00000176953_24 (sequence is synthesized)
ggagttcgagactagcctgggcaacatagcgagacctcgtctctacaaaaaaaaattaaaaaggggggcaggagattgagaccctcct

SEQ ID NO: 615199 - DNA, 120 bp, Artificial Sequence
  ENSG00000176953_25 (sequence is synthesized)
actccagcctggcgacagagcaaggctccactcaaaaaaaagatttaaaggggaaaaaattgaaattttctttgtatctaggggtatccgtcactgaacagaaattcttaattttggcta

SEQ ID NO: 615200 - DNA, 85 bp, Artificial Sequence
  ENSG00000176953_26 (sequence is synthesized)
ggggtatccgtcactgaacagaaattcttaattttggctaggcgtgatggctcaggtctgtaatcccagcactttcggtggccgg

SEQ ID NO: 615201 - DNA, 120 bp, Artificial Sequence
  ENSG00000176953_27 (sequence is synthesized)
gcacatcagcctgagtgacagagagactttgtctcaaaaaaaaaagaaaattttaattttaatgtagacagtatgaattatcttgttctgcagttggttgctttttgattgcttatttaa

SEQ ID NO: 615202 - DNA, 120 bp, Artificial Sequence
  ENSG00000176953_28 (sequence is synthesized)
tagagttgttaagatattttacatcttctcctgttagctgttcagcttttcctttcatattgagaacactacacagtgctgaagtccagctggtacacaccggggtgacaccttggctgc

SEQ ID NO: 615203 - DNA, 120 bp, Artificial Sequence
  ENSG00000176953_29 (sequence is synthesized)
atctgttctcaacagtcagacacttcttctaattggttgatgctgggctgtactggttgctaaatattgcacatcattttaaaactatttgagatgcacttttgtactcaggaggccaag

SEQ ID NO: 615204 - DNA, 67 bp, Artificial Sequence
  ENSG00000176953_30 (sequence is synthesized)
agaaatcggctgggcatggttaggttaggaattcaagactgaaaccttgtctctactgaaaatacaa

SEQ ID NO: 615205 - DNA, 120 bp, Artificial Sequence
  ENSG00000176953_31 (sequence is synthesized)
ctgtctcaaaaaaaaaaaaaaaaattcagtgaaatacacctttatatatgagatccaagtttcactttttgtgatataatgagccagttttctcagtaatgtctactaaaaaaaaagcca

SEQ ID NO: 615206 - DNA, 120 bp, Artificial Sequence
  ENSG00000176953_32 (sequence is synthesized)
actaaaaaaaaagccattaacctttctctaatatttgcatgattctaataaaagtatgtcaacttcttaaaatgttttattgaaatgtggcattcctttgaattttatgacattaaaata

SEQ ID NO: 615207 - DNA, 120 bp, Artificial Sequence
  ENSG00000176953_33 (sequence is synthesized)
atccacgacatggtacagctcttcactttttcagctttttaaatgtccattaataagtttgaatacgttaaaattatatgtttaacctcaacaaaataaatggcaatatgttcaacttgt

SEQ ID NO: 615208 - DNA, 120 bp, Artificial Sequence
  ENSG00000176953_34 (sequence is synthesized)
ccatgggagaaggacccaggagctgcttctggagagatggtggtgtccagcaggggtgtcctggcagaagggactgtcatccttttcccatcctgctctctagagctgcccatcattctt

SEQ ID NO: 615209 - DNA, 120 bp, Artificial Sequence
  ENSG00000176953_35 (sequence is synthesized)
ttcagtctgtcctgccttcacactttttgtttcctctgtctgcattttcccaacgctcccctctctttctggcaaactttctacccattcttcaaggctcctcataagcatcctgtgtct

SEQ ID NO: 615210 - DNA, 120 bp, Artificial Sequence
  ENSG00000176953_36 (sequence is synthesized)
catcctgtgtctttttttttccttcaaaaagtggtcttactgtgtccaggctggttccgaactcctgggctcaagtgatcgtccctcattgacctcccaaagtgctgggattccaggtgt

SEQ ID NO: 615211 - DNA, 120 bp, Artificial Sequence
  ENSG00000176953_37 (sequence is synthesized)
tggaatctttggcgccttggtttcagaggttaaaagcagccttcgccttatcccagatgatctatccctcctgaaactctaccctccaggggatgaggaagtcggagcccctgcagagtg

SEQ ID NO: 615212 - DNA, 120 bp, Artificial Sequence
  ENSG00000176953_38 (sequence is synthesized)
aggtaagggagggcctccagggagaggcacgcagccgctggcttctcttaagagaattcctggggtttatattcctgcagtcagttgtctcctgaggctcaagggaagagcgtgggagag

SEQ ID NO: 615213 - DNA, 120 bp, Artificial Sequence
  ENSG00000176953_39 (sequence is synthesized)
gggactcctgcatcccagccacaggagctggattgttaacaagcatagaatgtattaatgtatacatttctggtgccacctgaagagatgctgattctgtagtcctgggcggggcaggag

SEQ ID NO: 615214 - DNA, 120 bp, Artificial Sequence
  ENSG00000176953_40 (sequence is synthesized)
gcggtaaggtgttgagaatctgtgacatcttgttacatctgcagcaagttctttgggaacactggagccagcagggtgttctctgaatcttatcagggatgccctgtctttgtcctcccc

SEQ ID NO: 615215 - DNA, 120 bp, Artificial Sequence
  ENSG00000176953_41 (sequence is synthesized)
gtgtgttgtggaggaaagtgtgccatggcggagcctgtggggaagcggggccgctggtccggaggttaaaagcagccttcgccttatcccagatgatctatccctcctgaaactctaccc

SEQ ID NO: 615216 - DNA, 120 bp, Artificial Sequence
  ENSG00000176953_42 (sequence is synthesized)
catactggcccacgttcccacacagtgccaatcagctggagctgcgtaacagccagcctgtctaggtggcatgtgaattccagtttgctgcaatccccaccacccctttctttgttctaa

SEQ ID NO: 615217 - DNA, 120 bp, Artificial Sequence
  ENSG00000176953_43 (sequence is synthesized)
cccatggctgctatatttctttgtgttactcgcctgtaccccttgctgacacgattttattctataccttgccaggtaaatatgatgaaactcacagctgaggagcttagcaagtagcta

SEQ ID NO: 615218 - DNA, 120 bp, Artificial Sequence
  ENSG00000176953_44 (sequence is synthesized)
aggccagagcttgtgtttgggtggtgtggctgggggcatggatttcaaggcaggaagacctcttttgcttgttgtccccatccctagtcggagcccctgcagagtgtggtggaccacatg

SEQ ID NO: 615219 - DNA, 120 bp, Artificial Sequence
  ENSG00000176956_0 (sequence is synthesized)
agtggcaggtcccacccgctcccgcccctgccgctcattcctgtccggacgcacctgcagctccccggggagaagaggacgccccccatccgctcccccacacaggcttgcgccccagag

SEQ ID NO: 615220 - DNA, 120 bp, Artificial Sequence
  ENSG00000176956_1 (sequence is synthesized)
ccccgcgccgcccccaggcccacccggagcatgctgcctgcagccatgaagggcctcggcctggcgctgctggccgtcctgctgtgctcggcgcccgctcatggcctgtggtgccaggac

SEQ ID NO: 615221 - DNA, 120 bp, Artificial Sequence
  ENSG00000176956_2 (sequence is synthesized)
cctgtggtgccaggactgcaccctgaccaccaactccagccattgcaccccaaagcagtgccagccgtccgacacggtgtgtgccagtgtccgaatcaccgatcccagcagcagcaggaa

SEQ ID NO: 615222 - DNA, 120 bp, Artificial Sequence
  ENSG00000176956_3 (sequence is synthesized)
aactctgggatcttaaaggtcgacgtggactgctgcgagaaggatttgtgcaatggggcggcaggggcagggcacagcccctgggccctggccggggggctcctgctcagcctggggcct

SEQ ID NO: 615223 - DNA, 120 bp, Artificial Sequence
  ENSG00000176956_4 (sequence is synthesized)
gccctcctctgggctgggccctgatgtctcctccttcccacggggcttctgagcttgctcccctgagcctgtggctgccctctccccagcctggcgtggctggggctgggggcagccttg

SEQ ID NO: 615224 - DNA, 120 bp, Artificial Sequence
  ENSG00000176956_5 (sequence is synthesized)
gcccagctccgtggctgtggcctgtggctctcactcctcccccgacgtgaagcctccctgtctctccgccagctctgagtcccaggcagctggacatctccaggaaaccaggccatctgg

SEQ ID NO: 615225 - DNA, 120 bp, Artificial Sequence
  ENSG00000176956_6 (sequence is synthesized)
gcaggaggcctggggatgagggtggggggggacccccaggtcccggaggggaagtgaagcaacagcccagctggaagggcgtcttctgcggagaaataaagtcacttttgagtcctgaga

SEQ ID NO: 615226 - DNA, 120 bp, Artificial Sequence
  ENSG00000176956_7 (sequence is synthesized)
attttgcttcctttcgcagtaaacgttcttccgagaaattccaaggggatctcagccaagcagagggggaagggatcctgcccacgcctggggagaccgaagggcacagctccccgcgcc

SEQ ID NO: 615227 - DNA, 120 bp, Artificial Sequence
  ENSG00000176956_8 (sequence is synthesized)
ggtccgcgtctgcggctgcgttccccgaaagacgaggctgcgcccggattccggtccgcagggagaccgaagggcacagctccccgcgccgcgcacgccgcccgagcccggagtgcggac

SEQ ID NO: 615228 - DNA, 120 bp, Artificial Sequence
  ENSG00000176956_9 (sequence is synthesized)
gtgagtagggggcccgcgggctgggtcaggtgcctgggagagcccgaggcgccgcgggagagccgggtgtggggctgccaccctctgacggttcccaccgcacttcgcatagagcccacg

SEQ ID NO: 615229 - DNA, 120 bp, Artificial Sequence
  ENSG00000176956_10 (sequence is synthesized)
ccccctccgggacccctgcgaccccagcccggccctcggcccctctgccccggcactgggctctctccagcgctcttcctccagggcctggaactggtgggcggctggccccgcacggaa

SEQ ID NO: 615230 - DNA, 120 bp, Artificial Sequence
  ENSG00000176956_11 (sequence is synthesized)
gcccttggtcatccgtcacctctgagagcctcccgggcctcctttcaaatccagtttggtccttcacagcttggaacccacggacctctgggggggatatgtgaggcggggcgggagtgt

SEQ ID NO: 615231 - DNA, 120 bp, Artificial Sequence
  ENSG00000176956_12 (sequence is synthesized)
gaggggggcactgtcggtgtggggtctgtatagcccgtgtgtgtgtttgtgtgtgtgtgtgcacgcacgtgcatgggggccagggaggggccataggggctcccctcaaactgccaggat

SEQ ID NO: 615232 - DNA, 120 bp, Artificial Sequence
  ENSG00000176956_13 (sequence is synthesized)
cctccaggggtcatgggggcctgctccctcccgtggggtcgggctctcccaggagtgcctgcagcagggggatgggtggggggcgcagggggctgcctggtttggaccccagtgcctctg

SEQ ID NO: 615233 - DNA, 120 bp, Artificial Sequence
  ENSG00000176971_0 (sequence is synthesized)
attcccacccagtccagaaattgaaatactatcagggggcaagagcctttctctccagctacacactccatctcccgggagcaaggggaaactccgagaggagggcaacagagccagcat

SEQ ID NO: 615234 - DNA, 120 bp, Artificial Sequence
  ENSG00000176971_1 (sequence is synthesized)
cttgccagggccccggaggaggggttccccgctacgcctgtgccggaggagttccagtcaccgagcgaggggcgcaagggtgggtgcatcctgcgctgcggcgggcgcgctacccagacg

SEQ ID NO: 615235 - DNA, 120 bp, Artificial Sequence
  ENSG00000176971_2 (sequence is synthesized)
ctggtgtgcagagccacatgaagcctgctggggactgggggccagggagcagcaagccagctgggactgaggcggacgctgtctcagggagacgctgactcgcaaagacactcccttcct

SEQ ID NO: 615236 - DNA, 120 bp, Artificial Sequence
  ENSG00000176971_3 (sequence is synthesized)
tgtgcctgggtaaaaagtctcctcctggggtccctggccatcctgaatatccagaatggtgtttctgaagttcttctgcatgagtttcttctgccacctgtgtcaaggctacttcgatgg

SEQ ID NO: 615237 - DNA, 120 bp, Artificial Sequence
  ENSG00000176971_4 (sequence is synthesized)
ccccctctacccagagatgtccaatgggactctgcaccactacttcgtgcccgatggggactatgaggagaacgatgaccccgagaagtgccagctgctcttcagggtgagtgaccacag

SEQ ID NO: 615238 - DNA, 120 bp, Artificial Sequence
  ENSG00000176971_5 (sequence is synthesized)
gcgctgctcccagggggaggggagccaggttggcagcctgctgagcctcaccctgcgggaggagttcaccgtgctgggccgccaggtggaggatgctgggcgcgtgctggagggcatcag

SEQ ID NO: 615239 - DNA, 120 bp, Artificial Sequence
  ENSG00000176971_6 (sequence is synthesized)
caaaagcatctcctacgacctagacggggaagagagctatggcaagtacctgcggcgggagtcccaccagatcggggatgcctactccaactcggacaaatccctcactgagctggagag

SEQ ID NO: 615240 - DNA, 120 bp, Artificial Sequence
  ENSG00000176971_7 (sequence is synthesized)
caagttcaagcagggccaggaacaggacagccggcaggagagcaggctcaacgaggactttctgggaatgctggtccacaccaggtccctgctgaaggagacactggacatctctgtggg

SEQ ID NO: 615241 - DNA, 120 bp, Artificial Sequence
  ENSG00000176971_8 (sequence is synthesized)
gctcagggacaaatacgagctgctggccctcaccattaggagccatgggacccgactaggtcggctgaaaaatgattatcttaaagtataggtggaaggatacaaatgctagaaagaggg

SEQ ID NO: 615242 - DNA, 120 bp, Artificial Sequence
  ENSG00000176971_9 (sequence is synthesized)
aatcaaatcagccccgttttggagggtgggggacagaagatggggctacatttcccccatacctactatttttttatatcccgatttgcactttgagaatacatctaaggtcatctttca

SEQ ID NO: 615243 - DNA, 120 bp, Artificial Sequence
  ENSG00000176971_10 (sequence is synthesized)
aaagagaaaaattggacacttgagtgactttgtttttagttttgtttttgtacattatttatgtgattgttatggaattgtcacctggaaagaacaattttaagcaatgtcatttctaga

SEQ ID NO: 615244 - DNA, 120 bp, Artificial Sequence
  ENSG00000176971_11 (sequence is synthesized)
tgggtttctaattctgcagagacacccgtttcagccacatctaaaagagcacagtttatgtggtgcggaattaaacttccccatcctgcagattatgtggaaatacccaaagataatagt

SEQ ID NO: 615245 - DNA, 120 bp, Artificial Sequence
  ENSG00000176971_12 (sequence is synthesized)
gcctgccaacccatggaagttgtttcttacttcttttctctcttatttattaaccatggtctgagagttgtttttgttctatgtaacagtattgccacaaaactataggcaaatcgtgtt

SEQ ID NO: 615246 - DNA, 120 bp, Artificial Sequence
  ENSG00000176971_13 (sequence is synthesized)
tgcagggagatttctgatgcctctgtgggtgtgtgtaagttaaagtggccacatttaagaaggccaagctttgtagtggttgcacagtcacactgatatgctgatttgctctttctcatt

SEQ ID NO: 615247 - DNA, 120 bp, Artificial Sequence
  ENSG00000176971_14 (sequence is synthesized)
gtatgtctatgctttgtcatcagtgctatagtaaattacaaagaaataggtagattgtatgaacatacccacaaatgcctatgatttaggttaccaatgtattctttctcatttggggtt

SEQ ID NO: 615248 - DNA, 120 bp, Artificial Sequence
  ENSG00000176971_15 (sequence is synthesized)
ttgcttctgtctgtctgtttattggaaacttgtacttcaagtagggggaatcctaattctaataactccttagctaagttttattattcaggcaataaacatgttttcatgtaatactgg

SEQ ID NO: 615249 - DNA, 120 bp, Artificial Sequence
  ENSG00000176971_16 (sequence is synthesized)
cttactttgtaatttacatctgtaactttcatatttctaaaaggggccaatgcaaaaggagagagaaggactggatttaagccagtttacttagagtatatgataaagaaggcagaggaa

SEQ ID NO: 615250 - DNA, 120 bp, Artificial Sequence
  ENSG00000176971_17 (sequence is synthesized)
tagctacatatttggcaattctcctctctgtagtcaccctgacatcctcacaagaaaacaaatctagccattgcccaaactttaaatttgatctctataggtctgcttaaagactcaaat

SEQ ID NO: 615251 - DNA, 120 bp, Artificial Sequence
  ENSG00000176971_18 (sequence is synthesized)
tttctccagtttctctcataaattcaattgcaaaagtttctgacaaggctcataccctgtacccttatgcagagcaagcattccatcctaagttataaactacagtgatgtttaattttg

SEQ ID NO: 615252 - DNA, 120 bp, Artificial Sequence
  ENSG00000176971_19 (sequence is synthesized)
aagccaggtctacattatttaattaatggcttcaaaaggtggagatgcactttatttaatgtctttccctagctaattcttactctcaccttaaatatgctttcttgttgcatatatgca

SEQ ID NO: 615253 - DNA, 120 bp, Artificial Sequence
  ENSG00000176971_20 (sequence is synthesized)
cagatacacacacacacacacacgaaaataaataaatgttcatattcttctgttcaacagacatttattttctcctctcccttgaataagaaaataagttttccattcctatgaactgtc

SEQ ID NO: 615254 - DNA, 120 bp, Artificial Sequence
  ENSG00000176971_21 (sequence is synthesized)
taatatctttctattacagaaggggaaactgaggctgggaaaggctaaatgacttatcctccatcagttataacagcccctggtcttcttaaatttaaacacgggacttcccgaactaat

SEQ ID NO: 615255 - DNA, 120 bp, Artificial Sequence
  ENSG00000176971_22 (sequence is synthesized)
ttttttaaggatactgaaaaatgagagagagtggtcgaatgcctgaaattttgcttaacttactgtacttaaaatcaattataacttctttttgttactcagggccccactttttgttgc

SEQ ID NO: 615256 - DNA, 120 bp, Artificial Sequence
  ENSG00000176971_23 (sequence is synthesized)
tttctagacttgtgtgtagaaagaagattaatgatcacttaaagtagtttccttctttattctgaaaaaatgaggaaaaaataacaacagtggcaaataaaatcatatttggtactaaaa

SEQ ID NO: 615257 - DNA, 80 bp, Artificial Sequence
  ENSG00000176973_0 (sequence is synthesized)
gcctgcgggcggcggcccgggcggagcgttggagggaaggaggtggcatcgccgtccgcgccggccccggccatgaacgg

SEQ ID NO: 615258 - DNA, 120 bp, Artificial Sequence
  ENSG00000176973_1 (sequence is synthesized)
cgggcggggcgggctgcgctttggccgggctcccaccgctgccgcgcggcctcagcggcctccttaatgcgagcgggggctcgtggcgggagctggagcgcgtctacagccagcgcagcc

SEQ ID NO: 615259 - DNA, 120 bp, Artificial Sequence
  ENSG00000176973_2 (sequence is synthesized)
tccttaatgcgagcgggggctcgtggcgggagctggagcgcgtctacagccagcgcagccgcatccacgacgagctgagccgcgccgcccgcgccccggacgggccccgccacgccgccg

SEQ ID NO: 615260 - DNA, 120 bp, Artificial Sequence
  ENSG00000176973_3 (sequence is synthesized)
gcagccggcccgcgtcgtcctgtcaacctcgactcagcgctggccgcgctgcgcaaggagatggtggggctgcggcagttggacatgtccttgttgtgccagctgtggggcctgtacgag

SEQ ID NO: 615261 - DNA, 120 bp, Artificial Sequence
  ENSG00000176973_4 (sequence is synthesized)
tcaatccaggactacaaacacctgtgccaagacctgagcttctgccaggacctgtcatcctccctccattcggacagctcctacccaccggatgcgggcctgtctgacgacgaggagcct

SEQ ID NO: 615262 - DNA, 120 bp, Artificial Sequence
  ENSG00000176973_5 (sequence is synthesized)
cacaatgcccgtgaccagtggctgcaggatgccttccacatcagcctctgaagggctggggggcagggggcatgcacccatgcaaaaggctcagaaactccccctccggcaagccctcag

SEQ ID NO: 615263 - DNA, 120 bp, Artificial Sequence
  ENSG00000176973_6 (sequence is synthesized)
acttcggagcctgcgccttcccccctaccgcctcacctcacaggagggccaggcatgtattcctcagaggcgaaactgccaaactctttctcctgtcttgggttggctggcactggggcg

SEQ ID NO: 615264 - DNA, 120 bp, Artificial Sequence
  ENSG00000176973_7 (sequence is synthesized)
ggcatctagggtacagcctctgctcatggcactgggcctccagttcttccacatgtgtgcacccccagcttggccaaccctcagccttgcggtggggcccgaagcatcttcccttccgct

SEQ ID NO: 615265 - DNA, 120 bp, Artificial Sequence
  ENSG00000176973_8 (sequence is synthesized)
tggcgtctctgggattgggatgagtgcctggctcccatctcctcctcaccttttgttgctatcggcagctgctggctcaggggcatcccacctccgggctctgggttcctctgccctgga

SEQ ID NO: 615266 - DNA, 120 bp, Artificial Sequence
  ENSG00000176973_9 (sequence is synthesized)
agggctccaggacccgtcccaataaccacccacggccaggagggccaaggccccgtgctggatatttaaatttaggggccggtctccagggcgcgtagataaataaatacactcagcgtc

SEQ ID NO: 615267 - DNA, 120 bp, Artificial Sequence
  ENSG00000176973_10 (sequence is synthesized)
agaaaccacgcctgcccccttcagccttttcccccctccgccgcatttttccatctccccttgagtgagtggatgtcccgttgccttttctcagctttgcgcgacgtggtcccacaaccg

SEQ ID NO: 615268 - DNA, 120 bp, Artificial Sequence
  ENSG00000176974_0 (sequence is synthesized)
aagcccaagcctggcgcgcagagtgcaccttcctgagctcgagcggtccagcgccaagttcggggtttggggttggagcggctggtcacgtggctggcccgcggcggtgcgcggggcgtt

SEQ ID NO: 615269 - DNA, 120 bp, Artificial Sequence
  ENSG00000176974_1 (sequence is synthesized)
gggtcagcgggtctgggactggtggcaccggcggcggcgtaggacggaggcgtcgctaggcagcttcgaaccagtgcaatgacgatgccagtcaacggggcccacaaggatgctgacctg

SEQ ID NO: 615270 - DNA, 120 bp, Artificial Sequence
  ENSG00000176974_2 (sequence is synthesized)
tggtcctcacatgacaagatgctggcacaacccctcaaagacagtgatgttgaggtttacaacatcattaagaaggagagtaaccggcagagggttggattggagctgattgcctcggag

SEQ ID NO: 615271 - DNA, 120 bp, Artificial Sequence
  ENSG00000176974_3 (sequence is synthesized)
aatttcgccagccgagcagttttggaggccctaggctcttgcttaaataacaaatactctgaggggtacccgggccagagatactatggcgggactgagtttattgatgaactggagacc

SEQ ID NO: 615272 - DNA, 120 bp, Artificial Sequence
  ENSG00000176974_4 (sequence is synthesized)
ctctgtcagaagcgagccctgcaggcctataagctggacccacagtgctggggggtcaacgtccagccctactcaggctcccctgcaaactttgctgtgtacactgccctggtggaaccc

SEQ ID NO: 615273 - DNA, 120 bp, Artificial Sequence
  ENSG00000176974_5 (sequence is synthesized)
catgggcgcatcatgggcctggaccttccggatgggggccacctgacccatgggttcatgacagacaagaagaaaatctctgccacgtccatcttctttgaatctatgccctacaaggtg

SEQ ID NO: 615274 - DNA, 120 bp, Artificial Sequence
  ENSG00000176974_6 (sequence is synthesized)
aacccagatactggctacatcaactatgaccagctggaggagaacgcacgcctcttccacccgaagctgatcatcgcaggaaccagctgctactcccgaaacctggaatatgcccggcta

SEQ ID NO: 615275 - DNA, 120 bp, Artificial Sequence
  ENSG00000176974_7 (sequence is synthesized)
cggaagattgcagatgagaacggggcgtatctcatggcggacatggctcacatcagcgggctggtggcggctggcgtggtgccctccccatttgaacactgccatgtggtgaccaccacc

SEQ ID NO: 615276 - DNA, 120 bp, Artificial Sequence
  ENSG00000176974_8 (sequence is synthesized)
actcacaagaccctgcgaggctgccgagctggcatgatcttctacaggaaaggagtgaaaagtgtggatcccaagactggcaaagagattctgtacaacctggagtctcttatcaattct

SEQ ID NO: 615277 - DNA, 120 bp, Artificial Sequence
  ENSG00000176974_9 (sequence is synthesized)
gctgtgttccctggcctgcagggaggtccccacaaccacgccattgctggggttgctgtggcactgaagcaagctatgactctggaatttaaagtttatcaacaccaggtggtggccaac

SEQ ID NO: 615278 - DNA, 120 bp, Artificial Sequence
  ENSG00000176974_10 (sequence is synthesized)
ctctgtctgaggccctgacggagctgggctacaaaatagtcacaggtggttctgacaaccatttgatccttgtggatctccgttccaaaggcacagatggtggaagggctgagaaggtgc

SEQ ID NO: 615279 - DNA, 120 bp, Artificial Sequence
  ENSG00000176974_11 (sequence is synthesized)
tagaagcctgttctattgcctgcaacaagaacacctgtccaggtgacagaagcgctctgcggcccagtggactgcggctggggaccccagcactgacgtcccgtggacttttggaaaaag

SEQ ID NO: 615280 - DNA, 120 bp, Artificial Sequence
  ENSG00000176974_12 (sequence is synthesized)
acttccaaaaagtagcccactttattcacagagggatagagctgaccctgcagatccagagcgacactggtgtcagagccaccctgaaagagttcaaggagagactggcaggggataagt

SEQ ID NO: 615281 - DNA, 120 bp, Artificial Sequence
  ENSG00000176974_13 (sequence is synthesized)
accaggcggccgtgcaggctctccgggaggaggttgagagcttcgcctctctcttccctctgcctggcctgcctgacttctaaaggagcgggcccactctggacccacctggcgccacag

SEQ ID NO: 615282 - DNA, 120 bp, Artificial Sequence
  ENSG00000176974_14 (sequence is synthesized)
aggaagctgcctgccggaggacccccacctgagagatggatgagctgctccaaaggggaactgttgacactcgggccctttgagggggtttcttttggacttttttcatgttttcttcac

SEQ ID NO: 615283 - DNA, 120 bp, Artificial Sequence
  ENSG00000176974_15 (sequence is synthesized)
aaatcaaaatttgtttaagtctcattgttagtaattctgggacaggttattaaaggatttaaatttgaacctggctttctcacagctggacataattctaggaaaataaaatactatgtc

SEQ ID NO: 615284 - DNA, 120 bp, Artificial Sequence
  ENSG00000176974_16 (sequence is synthesized)
gccacttggtcataatcatttagatggtggtgtagggcaaagctgttagaaagattgtagcgttttactctccctgggctttcctccgccttgctgcaacagagaggaaatgcccatgtc

SEQ ID NO: 615285 - DNA, 120 bp, Artificial Sequence
  ENSG00000176974_17 (sequence is synthesized)
cacagcttgtacacactgccccctcactatcttgttatccagtggcatgccaaaggagaactgaattagcttctgaggcttctgctgtaaatcagaagtgtatgttagtcaagagtaaac

SEQ ID NO: 615286 - DNA, 120 bp, Artificial Sequence
  ENSG00000176974_18 (sequence is synthesized)
aagatgcacccagtatggtgggagggttttgctgtcagtagctcaaagtatggtgtagaaatggcctcctccctccatcctgggaagtcccagtcccatcctggtgtgagaatcaaccag

SEQ ID NO: 615287 - DNA, 120 bp, Artificial Sequence
  ENSG00000176974_19 (sequence is synthesized)
gctttcctgctccacctgagataaccaactccctcccgtaatcaggaagccaaatgtcaccttcccaaagaaattttattttcacgtagctgaagtgcaaaacatagatgaccattttta

SEQ ID NO: 615288 - DNA, 120 bp, Artificial Sequence
  ENSG00000176974_20 (sequence is synthesized)
tgaccatttttaataagcacaatcaaatttttaaccacagaatgtctacaagaattatagctttaaaaaatacaaccaatttttatatttcaaaaatatttgaactcaaataaattaatt

SEQ ID NO: 615289 - DNA, 120 bp, Artificial Sequence
  ENSG00000176974_21 (sequence is synthesized)
aggtgggcggcttcgggtccgagggccgcggcgtcccagagcccggggggtgcttcggcgtcctcgctgtcccccgccgtaccccaccctctgcagccgcaatgacgggaggggagcgct

SEQ ID NO: 615290 - DNA, 120 bp, Artificial Sequence
  ENSG00000176974_22 (sequence is synthesized)
tgggtcgcgcctgggctggggatcgggcggcggccagccgcagcgccccagttccaggcacattcggtatgatggggtggcggcccgtggcctttggcaagaatgcgaaggcttatcggg

SEQ ID NO: 615291 - DNA, 120 bp, Artificial Sequence
  ENSG00000176974_23 (sequence is synthesized)
gatgtgagtagtagctctccactgaacacttttctcgttgagcattttcgatttaaacaatcctagctccttcacaacaaagctgcaagtcaagtgctactgtttcccccattttacagg

SEQ ID NO: 615292 - DNA, 120 bp, Artificial Sequence
  ENSG00000176974_24 (sequence is synthesized)
cacgcctcttccacccgaagctgatcatcgcaggtgatgcgcggggcggaaagtcaccttgttcaccagtagcctggtgcctcttacagaatgaggatggaaagatgttcgcaccctgtt

SEQ ID NO: 615293 - DNA, 120 bp, Artificial Sequence
  ENSG00000176974_25 (sequence is synthesized)
gagcccactgctagtttctgccctggataactgagtttctggggtctacatatattagtttctttcaggatacagatgtgtgtttgctgctttttgtgctatgtagattaagatgtgaga

SEQ ID NO: 615294 - DNA, 120 bp, Artificial Sequence
  ENSG00000176974_26 (sequence is synthesized)
ctgttctcagagaagcatctagaaatgtcaggccctgactgcgctggcaatagtagttggggccatctcaaccaccaagacgttgaagagttagagtggttgcctttagcacagaggtgc

SEQ ID NO: 615295 - DNA, 120 bp, Artificial Sequence
  ENSG00000176974_27 (sequence is synthesized)
tatcattttggaggaaaagataatccaacgcaaaagcaaggggtgacattgaaaagcaaggaagcttgagtaaaaacaggaatgttgtttgactcatcatctgtgtatgattctatccta

SEQ ID NO: 615296 - DNA, 120 bp, Artificial Sequence
  ENSG00000176974_28 (sequence is synthesized)
gccctgacggagctgggctacaaaatagtcacaggtagagacacagatggtgttcagcaggcctgttcttgtggttgtattaaggcttgcttctcagtttgtgcaaccaggatgtggccc

SEQ ID NO: 615297 - DNA, 120 bp, Artificial Sequence
  ENSG00000176974_29 (sequence is synthesized)
aggctctgctgctgcagctgcaatgatgggcccaccttgggaggaggtcagcctcgcctccaactggaaagcctccccctgcctcagaccagccagccgcccccttgggtgagccacaga

SEQ ID NO: 615298 - DNA, 120 bp, Artificial Sequence
  ENSG00000176974_30 (sequence is synthesized)
tgatgggaatagtggttgccattggtcaccagcataaggactgcttgtcctcagaacagctttgcaggaggatgacctgaggctcaactgagaggttgggctgtagtggtcacacacctg

SEQ ID NO: 615299 - DNA, 120 bp, Artificial Sequence
  ENSG00000176974_31 (sequence is synthesized)
gtaggtggcaccaggactgtgtggtgatgccttgcactgtgccaggggagtgtcttctctcaccccgctgagctgggggtgcaggggctctcccctcccagtttcctgcatattcctggg

SEQ ID NO: 615300 - DNA, 120 bp, Artificial Sequence
  ENSG00000176974_32 (sequence is synthesized)
gagttggcttgctttaggcatgtttgcttggatctgtacattctggagctgatgggctgtgaatgagatggacttcccaggtcagggccccactctggggtgccatccacctcacagtca

SEQ ID NO: 615301 - DNA, 120 bp, Artificial Sequence
  ENSG00000176974_33 (sequence is synthesized)
ctgcagctttccacggagaacgcatttttttggcaggcagcatactcagtcctccggaggaagggcgactttatacctagtcccacaagactgccgattgtgctagcagtggtgtggtcc

SEQ ID NO: 615302 - DNA, 120 bp, Artificial Sequence
  ENSG00000176974_34 (sequence is synthesized)
aggaatatgggtcctgctgtgtgtagacctgagtgcccactctctgcaccgtgtcctttgccctttacagggattacaggccctctgatctaaggattggggagggattacaggcctcct

SEQ ID NO: 615303 - DNA, 120 bp, Artificial Sequence
  ENSG00000176974_35 (sequence is synthesized)
ggtctaaggagtggggctcccacccaatcctgcatgtgcggcagtgcctgggaaggccgggccagtgctgtctcctcagcagtaccagccgtaccctcttttatgttctacttcacttac

SEQ ID NO: 615304 - DNA, 120 bp, Artificial Sequence
  ENSG00000176974_36 (sequence is synthesized)
tttctgttctcccttcatcctccatgtcttcaaataataaagctcaagaagtcctcgtgcagactgtgaacttcagggtgctttagctcaggagtccccaacctccgggccacggactag

SEQ ID NO: 615305 - DNA, 120 bp, Artificial Sequence
  ENSG00000176974_37 (sequence is synthesized)
ggagctgaacgctggtttgaactgcacatgtgagggatctaggttgggcctagacactttcaagaaactatcttttttttccttctgattatacctgcatccttatgagaatctaatgcc

SEQ ID NO: 615306 - DNA, 120 bp, Artificial Sequence
  ENSG00000176974_38 (sequence is synthesized)
gaatctaatgcccgatgatctgaggtggaagtttcatcccaaaaccatcccccgatgccatccgtgaaaaaactgtcttccacataaccagttcctggtgccaaaaaggttggggaccac

SEQ ID NO: 615307 - DNA, 120 bp, Artificial Sequence
  ENSG00000176974_39 (sequence is synthesized)
ctgtttcttaaacttcaatgtgcacaccacccctggggctgttggtgcaatgcagattctgaccaggccttgggtgatgctggtctgggagccacccttggagttgtgagggtttaggcc

SEQ ID NO: 615308 - DNA, 120 bp, Artificial Sequence
  ENSG00000176974_40 (sequence is synthesized)
atagtccctgtcaccatgggcatctcatggcatgggcctgccctctccctggtgactgtgtcattgtcactctgccatctgaggacccgatgcacatggctgagacagataatgcttgca

SEQ ID NO: 615309 - DNA, 120 bp, Artificial Sequence
  ENSG00000176974_41 (sequence is synthesized)
aatgccctctttggtgcctggtgctatgagaagcactatgtccagtatcttacttaaacttcatgacagccctgtgaattattggtctttttgttacaaatgggcatctgaggtttcaca

SEQ ID NO: 615310 - DNA, 120 bp, Artificial Sequence
  ENSG00000176974_42 (sequence is synthesized)
atgttgagctgcctgcctaaagccacacggcaagtgggtgggcacagctggggggctgcaaagccaagctggagccctagctcacccgcatcttgaaagggatccccgcaacacagctca

SEQ ID NO: 615311 - DNA, 120 bp, Artificial Sequence
  ENSG00000176974_43 (sequence is synthesized)
gaagcagaggccccagtgctgtcagcacccaaggcactaccccagcttaatgaaggttcaaagtggaaggatcctcctgtatgacctcgggccaggtccagaaaactctgttagccttgc

SEQ ID NO: 615312 - DNA, 120 bp, Artificial Sequence
  ENSG00000176974_44 (sequence is synthesized)
tgttgtcaccttaccactttgataataccatcagcctcacaggatccgggaaaaacctaccacaggctacagtgtctggcacctaatgtgctctgtgaacatgccccttaccccccaaag

SEQ ID NO: 615313 - DNA, 120 bp, Artificial Sequence
  ENSG00000176974_45 (sequence is synthesized)
taaattgaactgctgcccaatattcatgctgccttcaggggagcctttaccatcaatgttagggaattgcccaagcaacttgtcagagaaaacaagccaggagcagcctgaggaagctgt

SEQ ID NO: 615314 - DNA, 120 bp, Artificial Sequence
  ENSG00000176974_46 (sequence is synthesized)
cccttccccatgggagtgtcaggccctctgctgtatgatcagttacccctttcaaaagtgctctgtccttcctttcacattcttaggcacgggcatctctcgtggggattagaatcccag

SEQ ID NO: 615315 - DNA, 120 bp, Artificial Sequence
  ENSG00000176974_47 (sequence is synthesized)
gccatgtggtgggggtgctcaccttcctgacctcatctgctttgactgccttcatcctcgccttcgtttctcagagattccttcacggcatagaattcgcctgcatttctacatgtccaa

SEQ ID NO: 615316 - DNA, 120 bp, Artificial Sequence
  ENSG00000176974_48 (sequence is synthesized)
atgagatatttgctccaagttgcacagctggtttggttgactgtagattccagaggcattggtggaacacttgatcatgctggcttcagcatctgcattttcactgtcccacccctaagc

SEQ ID NO: 615317 - DNA, 120 bp, Artificial Sequence
  ENSG00000176974_49 (sequence is synthesized)
gcacagactttcggtctgagtggatctaagtctcctgctcttcacagatactatggcgggactgagtttattgatgaactggagaccctctgtcagaagcgagccctgcaggcctataag

SEQ ID NO: 615318 - DNA, 120 bp, Artificial Sequence
  ENSG00000176974_50 (sequence is synthesized)
ctggacccacagtgctggggggtcaacgtccctactcaggtgcttgtctcatccatatggcctggtgcagcctcttcatgtgcatcccccagggccgacatgcaccaagaagagtcctaa

SEQ ID NO: 615319 - DNA, 120 bp, Artificial Sequence
  ENSG00000176974_51 (sequence is synthesized)
caggtgtgagccaccgcgcccagcccctacttcttgtttttcaatgttgtatccagtgaccttgctaaatttgcttattctaacagttggcccctagcatcttgattttctaggtatatt

SEQ ID NO: 615320 - DNA, 120 bp, Artificial Sequence
  ENSG00000176974_52 (sequence is synthesized)
ggcccctagcatcttgattttctaggtatattgtgttgtctgtgtgtaatgtcagtttttaaatttcttctttcctaatcgttatgccttttgtttctttttcttgcctcattatacttg

SEQ ID NO: 615321 - DNA, 120 bp, Artificial Sequence
  ENSG00000176974_53 (sequence is synthesized)
gaatagaagtagtattagcaggcattttggtcttgttcctgaaggtaaccattttggtttccattgtgtggtcccgtcacatttgtttcattctgcaggtgctttttggttccttctcag

SEQ ID NO: 615322 - DNA, 120 bp, Artificial Sequence
  ENSG00000176974_54 (sequence is synthesized)
caggtagtgccccagcagcagggctcactacaaccctgggactcctcagggactcctgggtctgtgagccatacttggttgagcaggctgaacacaccagtatccatcctgtctcaccct

SEQ ID NO: 615323 - DNA, 120 bp, Artificial Sequence
  ENSG00000176974_55 (sequence is synthesized)
caagtcctcatctaggacatcattcctcttgtcatggtgggtggagccagttcaagtgggaggacaggaggcaggtgtggttggaggaagcagcctgaacctgcctccctgacattccac

SEQ ID NO: 615324 - DNA, 120 bp, Artificial Sequence
  ENSG00000176974_56 (sequence is synthesized)
gggagtactcagtcagcctaggacctaaacaatttggaaatttcagaaaacaataagcttcccagctgtaggatttctgttccacgcctgctctctgacagaactcttttattcccagca

SEQ ID NO: 615325 - DNA, 120 bp, Artificial Sequence
  ENSG00000176974_57 (sequence is synthesized)
ctgggctcactgcagcctcaacctccgggactcaagtgatcatcctgcctcagccacccagagtagctgagaatacaggcgtgcgccaccaggctcgggcagcttcgaaccagtgcaatg

SEQ ID NO: 615326 - DNA, 120 bp, Artificial Sequence
  ENSG00000176978_0 (sequence is synthesized)
cgctccctgggccccggtcctgctgctggcgctcgggctgcgcggcctccaggcgggggcccgcagggccccggaccccggcttccaggagcgcttcttccagcagcgtctggaccactt

SEQ ID NO: 615327 - DNA, 120 bp, Artificial Sequence
  ENSG00000176978_1 (sequence is synthesized)
gcttcttccagcagcgtctggaccacttcaacttcgagcgcttcggcaacaagaccttccctcagcgcttcctggtgtcggacaggttctgggtccggggcgaggggcccatcttcttct

SEQ ID NO: 615328 - DNA, 120 bp, Artificial Sequence
  ENSG00000176978_2 (sequence is synthesized)
acactgggaacgagggcgacgtgtgggccttcgccaacaactcggccttcgtcgcggagctggcggccgagcggggggctctactggtcttcgcggagcaccgctactacgggaagtcgc

SEQ ID NO: 615329 - DNA, 120 bp, Artificial Sequence
  ENSG00000176978_3 (sequence is synthesized)
tgccgttcggtgcgcagtccacgcagcgcgggcacacggagctgctgacggtggagcaggccctggccgacttcgcagagctgctccgcgcgctacgacgcgacctcggggcccaggatg

SEQ ID NO: 615330 - DNA, 120 bp, Artificial Sequence
  ENSG00000176978_4 (sequence is synthesized)
cccccgccatcgccttcggtggaagttatggggggatgctcagtgcctacctgaggatgaagtatccccacctggtggcgggggcgctggcggccagcgcgcccgttctagctgtggcag

SEQ ID NO: 615331 - DNA, 120 bp, Artificial Sequence
  ENSG00000176978_5 (sequence is synthesized)
gcctcggcgactccaaccagttcttccgggacgtcacggcggactttgagggccagagtcccaaatgcacccagggtgtgcgggaagcgttccgacagatcaaggacttgttcctacagg

SEQ ID NO: 615332 - DNA, 120 bp, Artificial Sequence
  ENSG00000176978_6 (sequence is synthesized)
ccgctgtcagacgagaaggacctgacccagctcttcatgttcgcccggaatgccttcaccgtgctggccatgatggactacccctaccccactgacttcctgggtcccctccctgccaac

SEQ ID NO: 615333 - DNA, 120 bp, Artificial Sequence
  ENSG00000176978_7 (sequence is synthesized)
cccgtcaaggtgggctgtgatcggctgctgagtgaggcccagaggatcacggggctgcgagcactggcagggctggtctacaacgcctcgggctccgagcactgctacgacatctaccgg

SEQ ID NO: 615334 - DNA, 120 bp, Artificial Sequence
  ENSG00000176978_8 (sequence is synthesized)
ctctaccacagctgtgctgaccccactggctgcggcaccggccccgacgccagggcctgggactaccaggcctgcaccgagatcaacctgaccttcgccagcaacaatgtgaccgatatg

SEQ ID NO: 615335 - DNA, 120 bp, Artificial Sequence
  ENSG00000176978_9 (sequence is synthesized)
ttcccggacctgcccttcactgacgagctccgccagcggtactgcctggacacctggggcgtgtggccccggcccgactggctgctgaccagcttctgggggggtgatctcagagccgcc

SEQ ID NO: 615336 - DNA, 120 bp, Artificial Sequence
  ENSG00000176978_10 (sequence is synthesized)
agcaacatcatcttctccaacgggaacctggacccctgggcagggggcgggattcggaggaacctgagtgcctcagtcatcgccgtcaccatccaggggggagcgcaccacctcgacctc

SEQ ID NO: 615337 - DNA, 120 bp, Artificial Sequence
  ENSG00000176978_11 (sequence is synthesized)
agagcctcccacccagaagatcctgcttccgtggttgaggcgcggaagctggaggccaccatcatcggcgagtgggtaaaggcagccaggcgtgagcagcagccagctctgcgtgggggg

SEQ ID NO: 615338 - DNA, 120 bp, Artificial Sequence
  ENSG00000176978_12 (sequence is synthesized)
cccagactcagcctctgagcacaggactggaggggtctcaaggctcctcatggagtgggggcttcactcaagcagctggcggcagagggaaggggctgaataaacgcctggaggcctggc

SEQ ID NO: 615339 - DNA, 120 bp, Artificial Sequence
  ENSG00000176978_13 (sequence is synthesized)
gaccttcccagaaaccctgggggaggcaggggccgtccctggggaccctctcagcactggctgtagccaggcccagcttggtgggtgctgcccaaggggcccctggggtccccagcatgg

SEQ ID NO: 615340 - DNA, 120 bp, Artificial Sequence
  ENSG00000176978_14 (sequence is synthesized)
agggcaacagagggcagcaggccccaccctgccccgtggagagcgggggggccctcaacagtcaggcccggggctggcagcacagacaccgccgacctccaagcaggtagcctggagggc

SEQ ID NO: 615341 - DNA, 120 bp, Artificial Sequence
  ENSG00000176978_15 (sequence is synthesized)
cttcctcactgggacctacagatcccagagccccagatcccctgcaggaccattccgaggggggacaggttggtggccggagcccgcggtgtgtctgtgtgtggccgctgggccccagcg

SEQ ID NO: 615342 - DNA, 80 bp, Artificial Sequence
  ENSG00000176978_16 (sequence is synthesized)
cgcggaaggcgacatgggctccgctccctgggccccggtcctgctgctggcgctcgggctgcgcggcctccaggcggggg

SEQ ID NO: 615343 - DNA, 120 bp, Artificial Sequence
  ENSG00000176978_17 (sequence is synthesized)
atcgcttggacaaaccctgggttgctttcttcggggggccagcactctgtttgggaccctctccctcccgcccttagggcagcagaacggcccccactctcccggccctgccttggagtg

SEQ ID NO: 615344 - DNA, 120 bp, Artificial Sequence
  ENSG00000176978_18 (sequence is synthesized)
cagggcgcagggagaggccggctggagtgtcccgaggctggtggtcagcggcctgaccctcatcctgggagccagggaggcggagctggtggaggggaccccgctgagtcgccgctgccc

SEQ ID NO: 615345 - DNA, 120 bp, Artificial Sequence
  ENSG00000176978_19 (sequence is synthesized)
tcccccggccccagatgggcaagtgtggagaccccaggcttggcttgggtcctggggccgggtggggcgaggatccgcagcccggccaggggctttgcctcctgccccagggctgtggtg

SEQ ID NO: 615346 - DNA, 120 bp, Artificial Sequence
  ENSG00000176978_20 (sequence is synthesized)
ccatcgccttcggtggaaggaagccctcccacctgtcctcccagccacctgctcagcttggatgtgcggccacactagcggcctttcccagtgagagctgcacccgcacctggcccaggg

SEQ ID NO: 615347 - DNA, 120 bp, Artificial Sequence
  ENSG00000176978_21 (sequence is synthesized)
ttggaatttgtgggtctcagaagtgtcgtcctccttgtggcacctgtgggcccctgaggaggaaaagaggaaatggggtgttgggggcagcagccctaaccctgtgtccctcacccagtt

SEQ ID NO: 615348 - DNA, 87 bp, Artificial Sequence
  ENSG00000176979_0 (sequence is synthesized)
tcttttctcatccacagggatgaccgctgtattataacctgtggctagtttattgaagaagaaaatcattacacttagattcagacg

SEQ ID NO: 615349 - DNA, 89 bp, Artificial Sequence
  ENSG00000176979_1 (sequence is synthesized)
ctcgatggagtttgtgacagccctggtgaacctccaagaggagtctagctgtcccatctgtctggagtacttgaaagacccagtgacca

SEQ ID NO: 615350 - DNA, 120 bp, Artificial Sequence
  ENSG00000176979_2 (sequence is synthesized)
tgtcccatctgtctggagtacttgaaagacccagtgaccatcaactgtgggcacaacttctgtcgctcctgcctcagtgtatcctggaaggatctagatgatacctttccctgtcctgtc

SEQ ID NO: 615351 - DNA, 120 bp, Artificial Sequence
  ENSG00000176979_3 (sequence is synthesized)
tgccgtttttgctttccatacaagagcttcaggaggaacccccagctccgtaatttgactgaaattgctaaacaactccagattaggaggagcaagagaaagaggcagaaagagaatgcc

SEQ ID NO: 615352 - DNA, 120 bp, Artificial Sequence
  ENSG00000176979_4 (sequence is synthesized)
atgtgtgaaaaacacaaccagtttctgaccctcttctgtgttaaagatctagagatcttatgtacacagtgcagtttctccactaaacaccagaagcactacatttgccctattaagaaa

SEQ ID NO: 615353 - DNA, 120 bp, Artificial Sequence
  ENSG00000176979_5 (sequence is synthesized)
gctgcctcttatcacagagaaattctagaaggtagccttgagcccttgaggaataatatagaacgagttgaaaaagtgataattctgcaaggcagcaaatcagtggagctgaaaaagaag

SEQ ID NO: 615354 - DNA, 120 bp, Artificial Sequence
  ENSG00000176979_6 (sequence is synthesized)
gtagaatataagagggaagaaataaattctgagtttgagcaaataagattgtttttacagaatgaacaagagatgattcttaggcagatacaagatgaagagatgaacattttagcaaaa

SEQ ID NO: 615355 - DNA, 120 bp, Artificial Sequence
  ENSG00000176979_7 (sequence is synthesized)
agggcaagtctgtgcagtcaaacctggaattactgacacaagctaagagtatgcaccacaagtatcaaaacctaaaatgccctgaactcttttcatttagattaacaaaatatggtttca

SEQ ID NO: 615356 - DNA, 120 bp, Artificial Sequence
  ENSG00000176979_8 (sequence is synthesized)
gtcttcctcctcaatattctggcttggacagaattatcaagccatttcaagtagatgtgattctagatctcaacacagcacatcctcaacttcttgtctctgaggatagaaaagctgtgc

SEQ ID NO: 615357 - DNA, 120 bp, Artificial Sequence
  ENSG00000176979_9 (sequence is synthesized)
gatatgaaagaaaaaaacgaaacatttgttatgacccaaggagattttatgtctgccctgctgtcctaggctctcagagatttagttctggccgacattactgggaagtagaagtgggaa

SEQ ID NO: 615358 - DNA, 120 bp, Artificial Sequence
  ENSG00000176979_10 (sequence is synthesized)
acaaacctaaatggatattgggtgtgtgtcaagactgtcttcttaggaactggcaggatcagccatcagttctgggcggattctgggcaattgggcgatacatgaagagtggttatgttg

SEQ ID NO: 615359 - DNA, 120 bp, Artificial Sequence
  ENSG00000176979_11 (sequence is synthesized)
cgtcaggtcctaagacaacccagcttctgccagtagtaaaacccagtaaaattggtatttttctggactatgaattgggtgatctttccttttataatatgaatgataggtctattctct

SEQ ID NO: 615360 - DNA, 120 bp, Artificial Sequence
  ENSG00000176979_12 (sequence is synthesized)
atacttttaacgattgtttcacagaagccgtttggccttatttctatactggaacagattccgaacctcttaaaatctgctcagtatcagattctgaaagataaggaactggtaaatggg

SEQ ID NO: 615361 - DNA, 120 bp, Artificial Sequence
  ENSG00000176979_13 (sequence is synthesized)
tctgtttcagtttttgtaggtaacttagccagtaaatttaatctcatttctggactctttaagttttaccactgaaaaccagagtcgatttttctcctaaatttttggcaactataagat

SEQ ID NO: 615362 - DNA, 120 bp, Artificial Sequence
  ENSG00000176979_14 (sequence is synthesized)
gttcataatgccactttcatatattctatgaatatcaattgtcaggtgctttgatttctaagataaaatattttagaattatgttacttaacatgtccaataaaatgttttcaaattgcc

SEQ ID NO: 615363 - DNA, 120 bp, Artificial Sequence
  ENSG00000176979_15 (sequence is synthesized)
aaaactcgaaaaccaaggcgcccagggttgtgtgagggtttccgctctgcgccccgcggggttccatgggtcctgcacagcatcaggcctgagccgccggtccaactgctccaggtcatc

SEQ ID NO: 615364 - DNA, 120 bp, Artificial Sequence
  ENSG00000176979_16 (sequence is synthesized)
tccacagggttataagctcaggagccaggcttagaacttagaaggaagaatacacgcctgattgaacatccttttaaaatgagaatcatcttctccccataagcaatagaggactttcag

SEQ ID NO: 615365 - DNA, 120 bp, Artificial Sequence
  ENSG00000176979_17 (sequence is synthesized)
tggtgactctttcctgagcaagaggactcacagtggaccttcaattcctgaggaccagtgaacacagcggaagacagttactaactggctacagaggggctcttcttagaagttgtctct

SEQ ID NO: 615366 - DNA, 120 bp, Artificial Sequence
  ENSG00000176979_18 (sequence is synthesized)
ggaattgaaggaaaggaggcagaaggacccttcagaaggtccagctccataggtactgacttccagaaaggagaaagttgagttatcagtttctcaagttccttacatgaagaaaacaag

SEQ ID NO: 615367 - DNA, 120 bp, Artificial Sequence
  ENSG00000176979_19 (sequence is synthesized)
gctttccttaagaaagaaacctcagacacatccttcccagcacaggggtctctacagtgtcctggggccgactccaagccaaggtcagctgctacatctgcctggattacctgacagaca

SEQ ID NO: 615368 - DNA, 120 bp, Artificial Sequence
  ENSG00000176979_20 (sequence is synthesized)
cagtgaccactctgtgggcagagcttctgtcactcctgtcacttctgcatccacagtgctgggaggacttacaggacatcttcccctgtcccatctgtcctcactacttccctgaccaga

SEQ ID NO: 615369 - DNA, 120 bp, Artificial Sequence
  ENSG00000176979_21 (sequence is synthesized)
acctcaggagcaacacccaattgtgccacatgactgatattgtccagcagtttccgcccccatgaggagcaagagggaagggcaggaagagtagcccctgtgtgggaagcacagtcagag

SEQ ID NO: 615370 - DNA, 120 bp, Artificial Sequence
  ENSG00000176979_22 (sequence is synthesized)
tctggccctgttctgtgagaaggatctggagctgtgtgtcagtcagctctggctatgggggttactttctcttgcccattgagcaagcggcagccaggcacaggaggaagctcgaaagct

SEQ ID NO: 615371 - DNA, 120 bp, Artificial Sequence
  ENSG00000176979_23 (sequence is synthesized)
acattcatccctgaacaagctctgaagaagcttcaagagccactgaccccaaccaattattgatcatcctgtcaccctctcctcctgtattcagcagtccgccccagttgaaggttgact

SEQ ID NO: 615372 - DNA, 120 bp, Artificial Sequence
  ENSG00000176979_24 (sequence is synthesized)
aaactcgaaaaccaaggcgcccagggttgtgtgagggtttccgctctgcgccccgcggggttccatgggtcctgcacagcatcaggcctgagccgccggtccaactgctccagctcgatg

SEQ ID NO: 615373 - DNA, 120 bp, Artificial Sequence
  ENSG00000176986_0 (sequence is synthesized)
gggagccttgacgttaggaacgaagtctaacctggatctggagccgggagataatctgaatgctggctggggcagaaaattactaagatcctgtggaagtgtgaggattattaaactgat

SEQ ID NO: 615374 - DNA, 120 bp, Artificial Sequence
  ENSG00000176986_1 (sequence is synthesized)
cactgtctgataaggtgagatcaaattgggaatgctttcataatgaacgtcaaccagtcagttccacctgtgccaccatttgggcagccccagcccatctacccagggtatcatcagtcc

SEQ ID NO: 615375 - DNA, 120 bp, Artificial Sequence
  ENSG00000176986_2 (sequence is synthesized)
agctatggtgggcaatcagggtccacagcccccgccattccctatggagcctacaatggcccagtaccaggctatcagcaaacacctccccaaggtatgtcaagagccccaccttcctcg

SEQ ID NO: 615376 - DNA, 120 bp, Artificial Sequence
  ENSG00000176986_3 (sequence is synthesized)
ggggcacctccagcctcaacagcacaggctccttgtggccaggctgcatatggccagtttggccaaggagatgtacagaatgggccaagctccactgttcagatgcaaaggctgcctggg

SEQ ID NO: 615377 - DNA, 120 bp, Artificial Sequence
  ENSG00000176986_4 (sequence is synthesized)
tctcagccatttgggtccccattggcccctgtgggcaaccagccacctgtgcttcagccctatggccctcccccgacaagtgcacaggtggctacgcagctgtctggaatgcagatcagc

SEQ ID NO: 615378 - DNA, 120 bp, Artificial Sequence
  ENSG00000176986_5 (sequence is synthesized)
ggtgctgtggccccagcccctccttcttcagggctgggctttggcccaccaacatcgctggcttcagcctcaggaagtttccctaactctggtctgtatggctcctatcctcagggccag

SEQ ID NO: 615379 - DNA, 120 bp, Artificial Sequence
  ENSG00000176986_6 (sequence is synthesized)
gctcctccccttagccaggcccaaggtcatcctgggatccagactccccagcgatctgccccatcacaggcctccagcttcacacccccagcttcagggggtcctcggctgccttcgatg

SEQ ID NO: 615380 - DNA, 120 bp, Artificial Sequence
  ENSG00000176986_7 (sequence is synthesized)
actggtccactcctgcctggacagagttttggagggccctcagtgagccagcccaaccatgtgtcttcacctcctcaagctctgccccctggcacccagatgactgggcccctgggacca

SEQ ID NO: 615381 - DNA, 120 bp, Artificial Sequence
  ENSG00000176986_8 (sequence is synthesized)
ctgccacctatgcactccccgcagcagccaggctatcagccccaacaaaatggttccttcggaccagcccggggccctcagtctaattatggaggcccctacccagcagcacccaccttt

SEQ ID NO: 615382 - DNA, 120 bp, Artificial Sequence
  ENSG00000176986_9 (sequence is synthesized)
ggcagtcagcctgggcctcctcagccactgcctcctaagcgcctggaccctgatgccatcccaagccctattcaggtcattgaagatgacaggaacaaccggggtacagagccatttgtt

SEQ ID NO: 615383 - DNA, 120 bp, Artificial Sequence
  ENSG00000176986_10 (sequence is synthesized)
actggagtacggggccaggtgccacccttagtcactaccaacttcctggtgaaagaccaagggaatgcaagtccccgatacatccgatgtacatcctataatatcccttgcacatctgac

SEQ ID NO: 615384 - DNA, 120 bp, Artificial Sequence
  ENSG00000176986_11 (sequence is synthesized)
atggctaagcaggctcaggtgcccctggcagcagtcatcaaaccgctggcaaggctgcccccagaggaggcttcaccgtatgttgtggaccatggggaatctggccctttgcgctgcaac

SEQ ID NO: 615385 - DNA, 120 bp, Artificial Sequence
  ENSG00000176986_12 (sequence is synthesized)
cgctgcaaagcatacatgtgtcccttcatgcagttcattgaaggagggaggcgtttccagtgctgtttttgcagctgtatcaatgatgttcccccccagtattttcagcacctggatcat

SEQ ID NO: 615386 - DNA, 120 bp, Artificial Sequence
  ENSG00000176986_13 (sequence is synthesized)
accggcaaacgtgtggatgcttatgaccgccctgagctatccctgggctcttatgaattcttggccactgtagattactgcaagaacaataagttccccagccctcctgcctttatcttc

SEQ ID NO: 615387 - DNA, 120 bp, Artificial Sequence
  ENSG00000176986_14 (sequence is synthesized)
atgattgacgtctcctacaatgccatcaggactggtcttgttaggctcctctgtgaggagctcaagtcactgttagactttctacctagggagggtggggcagaagagtcagcaatccgc

SEQ ID NO: 615388 - DNA, 120 bp, Artificial Sequence
  ENSG00000176986_15 (sequence is synthesized)
gttggctttgtcacctacaataaggtgctccacttctataatgtgaagagctcattggcccagccacagatgatggttgtgtctgatgtggctgacatgtttgtgccactgctggatggc

SEQ ID NO: 615389 - DNA, 120 bp, Artificial Sequence
  ENSG00000176986_16 (sequence is synthesized)
ttcctggtcaacgtcaatgagtctcgggcagttatcaccagcttattggatcagattccagaaatgtttgcagacacaagggaaacagagacagtatttgtaccagttatccaggctgga

SEQ ID NO: 615390 - DNA, 120 bp, Artificial Sequence
  ENSG00000176986_17 (sequence is synthesized)
atggaggctctgaaggctgctgagtgtgcagggaagctctttctattccatacatccctgcccattgcagaggccccagggaaactgaagaacagagatgacaggaagctgatcaataca

SEQ ID NO: 615391 - DNA, 120 bp, Artificial Sequence
  ENSG00000176986_18 (sequence is synthesized)
gctgctgtgtagatctctttctcttccctaaccagtatgtggatgtggccacactctctgttgtgccccagctcactggtggctctgtctacaaatatgcttcctttcaggtggagaacg

SEQ ID NO: 615392 - DNA, 120 bp, Artificial Sequence
  ENSG00000176986_19 (sequence is synthesized)
accaggagcggttcctgagtgacctgcgtcgtgatgtccagaaggttgttggctttgatgctgtgatgcgggtccggacaagcactggtatccgtgctgtagatttctttggagctttct

SEQ ID NO: 615393 - DNA, 120 bp, Artificial Sequence
  ENSG00000176986_20 (sequence is synthesized)
acatgagcaacacgacagatgtggagctggctgggctagatggggacaaaacagtgactgtggagttcaagcatgacgatcggctcaatgaagagagcggagctctcctgcagtgtgccc

SEQ ID NO: 615394 - DNA, 120 bp, Artificial Sequence
  ENSG00000176986_21 (sequence is synthesized)
tgctttacaccagctgtgcagggcagcgtcggctccgcatccataatctggccctgaactgctgcacccagctggctgatctatatcgaaactgtgagactgacacgctcatcaactaca

SEQ ID NO: 615395 - DNA, 120 bp, Artificial Sequence
  ENSG00000176986_22 (sequence is synthesized)
tggccaagtttgcatatcggggagtcctgaatagccctgtgaaggctgttcgtgacacgctcatcacccagtgtgcccagatcctggcctgttacagaaagaactgtgctagcccctcct

SEQ ID NO: 615396 - DNA, 120 bp, Artificial Sequence
  ENSG00000176986_23 (sequence is synthesized)
ctgcaggacagttgatccttcctgagtgcatgaagctactcccagtttacctgaactgtgtgttgaagagtgatgtcctgcagcctggagctgaagtcactactgatgaccgtgcctatg

SEQ ID NO: 615397 - DNA, 120 bp, Artificial Sequence
  ENSG00000176986_24 (sequence is synthesized)
tccgacagctagttacctccatggatgtgactgagaccaatgtcttcttctaccctcggctcttacctttgacaaagtctcccgttgagagtactaccgaaccaccagcagttcgagcct

SEQ ID NO: 615398 - DNA, 120 bp, Artificial Sequence
  ENSG00000176986_25 (sequence is synthesized)
ctgaagagcgtctaagcaatggggatatatatttactggagaatgggctcaacctcttcctctgggtgggagcaagcgtccaacagggtgttgtccagagccttttcagcgtctcctcct

SEQ ID NO: 615399 - DNA, 120 bp, Artificial Sequence
  ENSG00000176986_26 (sequence is synthesized)
tcagtcagatcaccagtggtttgagtgttctgccagttctggataatccactgtccaagaaggttcgaggcctcattgatagcttacgggcacagagatcccggtacatgaagcttaccg

SEQ ID NO: 615400 - DNA, 120 bp, Artificial Sequence
  ENSG00000176986_27 (sequence is synthesized)
tggtgaaacaggaagacaagatggagatgctgttcaagcacttcctggtggaagacaagagtctgagtgggggagcatcttatgtggactttctctgtcatatgcacaaggagattcggc

SEQ ID NO: 615401 - DNA, 120 bp, Artificial Sequence
  ENSG00000176986_28 (sequence is synthesized)
agctactgagctaaagcaagtgggtaaatggcatagggcccaggctagcttccagaaagcaccccaggatgtcagagaaattgggacagtaacatatcttatgtaagctgacctcagtct

SEQ ID NO: 615402 - DNA, 120 bp, Artificial Sequence
  ENSG00000176986_29 (sequence is synthesized)
ctctggggggagggggagatataaggagacaccttctttctgggctcaagtatcctgccactctgtcatgtcctgctgatggaaggtgcccctgttccctcattctaccctctttttcct

SEQ ID NO: 615403 - DNA, 120 bp, Artificial Sequence
  ENSG00000176986_30 (sequence is synthesized)
gctaatcctgtcataatgaatgtagcttctcagttcactgtatatgattcggtattgggggtttggaggcacccagaccctggcaatattatgtgtccctttggaccagtctcccaagag

SEQ ID NO: 615404 - DNA, 120 bp, Artificial Sequence
  ENSG00000176986_31 (sequence is synthesized)
gagaggggcaggcaggaaagagtggggatcctaaggttactacagggggctcagtgtcatccacaacttcctatattagggataaaacatataggtgcacaagagctggggtatagccca

SEQ ID NO: 615405 - DNA, 120 bp, Artificial Sequence
  ENSG00000176986_32 (sequence is synthesized)
taggtggtggagagaaaagtggtcagtccttcttgggcctggaggttagcagtcaagtttctctgctttcactgctcgctcgctctctcctgcaatgattgatgatcactccgtggatag

SEQ ID NO: 615406 - DNA, 120 bp, Artificial Sequence
  ENSG00000176986_33 (sequence is synthesized)
agaggcacactgtcagaggtgaccggagaactgagttgcaaaatatattaagatctggtagaggtaccagcttcctttccagctggagaggccccaacactggatggttctgtagggagc

SEQ ID NO: 615407 - DNA, 120 bp, Artificial Sequence
  ENSG00000176986_34 (sequence is synthesized)
ctagggagcctggtcatcaacttgcaatacctcacagagccagttcacatcccactctgagctcccacgagaaacactgcttctccaggcccggggttgttggggagagaggcagaggca

SEQ ID NO: 615408 - DNA, 120 bp, Artificial Sequence
  ENSG00000176986_35 (sequence is synthesized)
gctggagcgccgttctctcctgctgggacaccgcttgggctttggtattgactgagtggctgacagttatcttccaaccccaactggcttgggggcaggacaagggctaggcttgatggt

SEQ ID NO: 615409 - DNA, 120 bp, Artificial Sequence
  ENSG00000176986_36 (sequence is synthesized)
ggccaggcttgcctgctccccacctgggatgcccctgctctggacctctcatttctcttcattggtttatttttcaatgcatctttaatttgtaaagaaataaaataaattaagatgtaa

SEQ ID NO: 615410 - DNA, 120 bp, Artificial Sequence
  ENSG00000176986_37 (sequence is synthesized)
atatcagggaacacttggggacaagggcagttgctgtcattcttcccaggtttgcctgtttcagatgatgcatacatgtatgctgccccaccttgactgaactcagagtgccttaccata

SEQ ID NO: 615411 - DNA, 120 bp, Artificial Sequence
  ENSG00000176986_38 (sequence is synthesized)
ctgtggattattgacccatcttagtacctgggttcctttgcatattcttcattttctgtgaacttgagtttcttgctttactagacatacatcttcaataatggttgcagtcctgttgag

SEQ ID NO: 615412 - DNA, 120 bp, Artificial Sequence
  ENSG00000176986_39 (sequence is synthesized)
actaccctaagggagaaatgggaagaggaaacttcaggattatttgcatctcttttgacttgcccctttcctctagaacaggcacttagtaggactgattggttaagtttgggcatggcc

SEQ ID NO: 615413 - DNA, 120 bp, Artificial Sequence
  ENSG00000176986_40 (sequence is synthesized)
agttatgaactgaaagatactaaaagggaaaccacataaatggtgaaaacttcagtggtacagtgacccaataaacccatcttagcatgaaagtccattaaaggagggcagtcatctcta

SEQ ID NO: 615414 - DNA, 120 bp, Artificial Sequence
  ENSG00000176988_0 (sequence is synthesized)
ctgggccacggactgccggaccgttgggctgtgaggcagcgtctcagcgaggcggcacccggagccatgtcttcacataggaggaaagcgaaggggaggaataggagaagtcaccgtgcc

SEQ ID NO: 615415 - DNA, 120 bp, Artificial Sequence
  ENSG00000176988_1 (sequence is synthesized)
atgcgtgtggctcacttagagctggcaacttatgagttggcggcaactgagtcgaatcccgagagcagccatcctggatacgaggccgccatggctgacaggcctcagccaggatggcgg

SEQ ID NO: 615416 - DNA, 120 bp, Artificial Sequence
  ENSG00000176988_2 (sequence is synthesized)
gaatctctaaagatgcgggtcagcaaaccctttgggatgctcatgctctccatttggatcctgctgttcgtgtgctactacctgtcctactacctgtgctccgggtcctcatattttgtg

SEQ ID NO: 615417 - DNA, 120 bp, Artificial Sequence
  ENSG00000176988_3 (sequence is synthesized)
cttgcaaatggacatatcctgcccaacagtgaaaatgctcatggccaatctctggaagaagattccgcattggaagctttgctgaattttttctttccaacaacttgcaatctgagggaa

SEQ ID NO: 615418 - DNA, 120 bp, Artificial Sequence
  ENSG00000176988_4 (sequence is synthesized)
tgtttgagacacaaatgctgtttttcatcatcggggaccacgagcttcaaatgttttgctccatttagagatgtgcctaaacagatgatgcaaatgtttgggcttggtgcgatcagcctt

SEQ ID NO: 615419 - DNA, 120 bp, Artificial Sequence
  ENSG00000176988_5 (sequence is synthesized)
atcctggtatgtctgcccatttattgccgctctcttttctggaggagcgaaccggccgatgatttacaaaggcaggacaacagagttgtaacgggtttgaagaaacaaagaaggaagcga

SEQ ID NO: 615420 - DNA, 120 bp, Artificial Sequence
  ENSG00000176988_6 (sequence is synthesized)
aagaggaagtctgaaatgttacagaaagcagcaagaggacgtgaggaacatggtgacgagtagcaagagaccaaagcattattttcccctcaagacaacagaaaccattcagagcagagg

SEQ ID NO: 615421 - DNA, 120 bp, Artificial Sequence
  ENSG00000176988_7 (sequence is synthesized)
ggactgtctcagccatgcaaacctcatggagcattttggaaagttaaaaattgattcttatttttgtcatgtttactttcaaacatgaaataaaattgagttctgttttcatgcatcaaa

SEQ ID NO: 615422 - DNA, 120 bp, Artificial Sequence
  ENSG00000176988_8 (sequence is synthesized)
cagaatgagaaggttgatttgatgaataggaaaagtgatttatctcagaagaaaaaaaagaaaatctttatataagcattattttcccctcaagacaacagaaaccattcagagcagagg

SEQ ID NO: 615423 - DNA, 120 bp, Artificial Sequence
  ENSG00000176994_0 (sequence is synthesized)
atgtgatgtcaagatggcggcgccgcggtagcaggatccgggttgtggcgtcctaggagccgcgacggtttctgccctcgggcagtgaggggcagcagcgcttggctgacccctgcggcg

SEQ ID NO: 615424 - DNA, 120 bp, Artificial Sequence
  ENSG00000176994_1 (sequence is synthesized)
tcccgtagcctcgcgttaagccttgttcagagcgggggcttttgctgtcgcagtgggttccggagagtgcaggtgatttcgcagcaggtttcttgtgctggccgcgctcgccggacgaag

SEQ ID NO: 615425 - DNA, 120 bp, Artificial Sequence
  ENSG00000176994_2 (sequence is synthesized)
aagagaagggcagttgggcctgcggccttggcgttcatgaggcctcagagagctccggaggagctacaactgtgagggggctgctagagttcttctcctcgggtgtgtgagaagcagcct

SEQ ID NO: 615426 - DNA, 120 bp, Artificial Sequence
  ENSG00000176994_3 (sequence is synthesized)
aggaccccgggttcggggagtcgcaaagaaggccgtaagggcttcacttccttctccggaggcctgccttctgcgcgtcgattaacaccgcattctttcccacttcctctcaatgttttc

SEQ ID NO: 615427 - DNA, 120 bp, Artificial Sequence
  ENSG00000176994_4 (sequence is synthesized)
ttcatatatctggaaatatgatcagcgcccctgacgtagtggccttcaccaaagaggaagagtatgaagaagagccttacaatgagccggccctgcctgaggagtactcggtgccgctct

SEQ ID NO: 615428 - DNA, 120 bp, Artificial Sequence
  ENSG00000176994_5 (sequence is synthesized)
tccccttcgccagtcagggtgctaacccctggtcaaaactgtccggggccaagttttcgagggacttcattcttatttccgagttctctgagcaggtgggaccccaacccttactgacca

SEQ ID NO: 615429 - DNA, 120 bp, Artificial Sequence
  ENSG00000176994_6 (sequence is synthesized)
tccccaatgacaccaaagtttttggcacttttgatctcaattacttctccctgcgtatcatgtctgtggattaccaggcttccttcgtgggccatcctcctggatctgcctaccccaagc

SEQ ID NO: 615430 - DNA, 120 bp, Artificial Sequence
  ENSG00000176994_7 (sequence is synthesized)
tgaacttcgtggaggactccaaggtggtgctgggagattctaaggagggcgcctttgcatacgtgcaccaccttaccctatacgacctggaggcccgtggcttcgtgaggccgttttgca

SEQ ID NO: 615431 - DNA, 120 bp, Artificial Sequence
  ENSG00000176994_8 (sequence is synthesized)
tggcttatatctctgcagaccagcataaaatcatgcagcagttccaggagctttcagccgaattttccagagcttctgagtgcttgaagactggcaacaggaaggcatttgctggggaac

SEQ ID NO: 615432 - DNA, 120 bp, Artificial Sequence
  ENSG00000176994_9 (sequence is synthesized)
ttgaaaaaaagctgaaagacttggattacaccaggacagtgctacacacagaaacggagatccagaagaaagccaacgacaaaggcttttactcatctcaggcaattgagaaagccaatg

SEQ ID NO: 615433 - DNA, 120 bp, Artificial Sequence
  ENSG00000176994_10 (sequence is synthesized)
aactggccagtgtggagaagtccatcattgaacatcaagacctgctgaagcagatccgctcataccctcatcggaagttgaaggggcatgatttgtgtcctggtgagatggagcacatcc

SEQ ID NO: 615434 - DNA, 120 bp, Artificial Sequence
  ENSG00000176994_11 (sequence is synthesized)
aggatcaggccagccaggcatccactacctctaaccctgatgagtctgccgacacagacctttacacctgcagaccagcctacaccccaaaacttatcaaagcaaagtccaccaagtgtt

SEQ ID NO: 615435 - DNA, 120 bp, Artificial Sequence
  ENSG00000176994_12 (sequence is synthesized)
ttgacaagaagttgaagaccttggaggagctctgtgacactgaatatttcacccagaccctggctcagctcagccacattgaacacatgttcagaggagacctgtgttacctcctgacca

SEQ ID NO: 615436 - DNA, 120 bp, Artificial Sequence
  ENSG00000176994_13 (sequence is synthesized)
gtcagattgatagagcacttctaaaacaacagcatataacaaactttctctttgaagactttgtggaggtcgatgacaggatggtggagaaacaagaaagcataccctctaagcccagtc

SEQ ID NO: 615437 - DNA, 120 bp, Artificial Sequence
  ENSG00000176994_14 (sequence is synthesized)
aagacaggccgccttccagttctctagaagaatgcccaattcctaaagtgttaattagtgttggttcttacaagtccagtgtggagtctgtgttgatcaagatggagcaggaactgggag

SEQ ID NO: 615438 - DNA, 120 bp, Artificial Sequence
  ENSG00000176994_15 (sequence is synthesized)
atgaggagtacaaggaagtggaagtgactgagttgagcagtttcgacccccaggaaaacttggactacctggatatggatatgaaagggagtatcagcagtggtgaaagtattgaagttt

SEQ ID NO: 615439 - DNA, 120 bp, Artificial Sequence
  ENSG00000176994_16 (sequence is synthesized)
tgggcacggagaaatccacctccgtgctttctaaatctgacagccaggcaagcctcacagtaccattgagcccccaggtggtccggagcaaagcagtcagccacaggaccatcagcgagg

SEQ ID NO: 615440 - DNA, 120 bp, Artificial Sequence
  ENSG00000176994_17 (sequence is synthesized)
acagtattgaagtcctcagtacctgcccctctgaggccctcatccctgatgactttaaggccagctacccaagtgccattaatgaagaagaatcatatccagatggcaatgaaggagcca

SEQ ID NO: 615441 - DNA, 120 bp, Artificial Sequence
  ENSG00000176994_18 (sequence is synthesized)
tccgcttccaggcaagcatcagtcctccagaactgggtgagacagaggaaggcagcatagaaaacaccccatcacaaatagactcctcctgctgtattgggaaggagagcgatggtcagt

SEQ ID NO: 615442 - DNA, 120 bp, Artificial Sequence
  ENSG00000176994_19 (sequence is synthesized)
tggtgctgccctccactccagcccacacacactctgacgaggatggggtggtgagcagccccccacagcgccacaggcagaaggaccaggggttccgtgtagacttttcagtggaaaatg

SEQ ID NO: 615443 - DNA, 120 bp, Artificial Sequence
  ENSG00000176994_20 (sequence is synthesized)
ccaacccttcttcccgagacaacagttgtgaagggtttcccgcttatgagctggacccgagccacctgctggctagccgggacatcagtaagaccagcctggacaactactcagacacca

SEQ ID NO: 615444 - DNA, 120 bp, Artificial Sequence
  ENSG00000176994_21 (sequence is synthesized)
ccagctacgtgagcagtgtagcgtccaccagctcagacaggatcccctctgcttatcctgctggcctgtcttccgataggcataaaaagagggctggccagaacgccttaaaattcatcc

SEQ ID NO: 615445 - DNA, 120 bp, Artificial Sequence
  ENSG00000176994_22 (sequence is synthesized)
gccagtacccctttgcccacccagccatctactccctgctcagtgggaggacacttgtggtcctgggggaagatgaggccatagtcaggaaactcgtgactgcactggctatctttgtcc

SEQ ID NO: 615446 - DNA, 120 bp, Artificial Sequence
  ENSG00000176994_23 (sequence is synthesized)
ccagctatggctgctacgctaagcccgtgaaacattgggcctcctcccctttgcacattatggattttcagaagtggaagcttattggcttgcagagagtggcctcccctgccggtgccg

SEQ ID NO: 615447 - DNA, 120 bp, Artificial Sequence
  ENSG00000176994_24 (sequence is synthesized)
gtaccctccatgccctgagccgctacagccgctacacgagcatcctggaccttgacaacaaaaccctgcgctgccccctttacagaggcaccctggtgccccgcctggcagaccaccgca

SEQ ID NO: 615448 - DNA, 120 bp, Artificial Sequence
  ENSG00000176994_25 (sequence is synthesized)
cacagatcaagcggggcagcacctactacctgcatgtccagagcatgctcacccagctctgctccaaggccttcctctacaccttctgccaccacctgcacctgcctacccacgacaagg

SEQ ID NO: 615449 - DNA, 120 bp, Artificial Sequence
  ENSG00000176994_26 (sequence is synthesized)
agacagaggagctggtagccagccgccagatgagcttcctaaagctgaccctgggtctggtgaatgaggatgttagggtggtccagtacctggctgagctgctgaagctgcactacatgc

SEQ ID NO: 615450 - DNA, 120 bp, Artificial Sequence
  ENSG00000176994_27 (sequence is synthesized)
aggaatctccagggaccagccaccccatgctcaggtttgactatgtccccagctttttgtataaaatctgaggtcggtcccagacactgtgaccaagacctgtgactcagggtatgggga

SEQ ID NO: 615451 - DNA, 120 bp, Artificial Sequence
  ENSG00000176994_28 (sequence is synthesized)
ggggaggggttggcatgaccaaacagttgcctgagctggactgtttaagtttctggtgtctggcagcatggttcccacgtggctcctagtagtttttaagttggacatgggcagaagtgg

SEQ ID NO: 615452 - DNA, 120 bp, Artificial Sequence
  ENSG00000176994_29 (sequence is synthesized)
agcctggctccctctaaaggcgtctggagggatggtgacagctacatttggctccctggtgaagagtggcccctggatatggagggggccttggttttctgaggactggcagccagggca

SEQ ID NO: 615453 - DNA, 120 bp, Artificial Sequence
  ENSG00000176994_30 (sequence is synthesized)
gaagggaagccaccagtcccttggtggggcagggtgagggcaggaaggccaaagcctgatgggaggagcacactggctgtattcagcattgccggacacttgagtggcaaaatgaacgag

SEQ ID NO: 615454 - DNA, 120 bp, Artificial Sequence
  ENSG00000176994_31 (sequence is synthesized)
ggtgacagccaggtaactgttgtggtttggtggaaaacaggagggcagaacacccatcgcctccttcagacccagatgcagccctttatttgcttcctggagcccactgtcctaggggag

SEQ ID NO: 615455 - DNA, 120 bp, Artificial Sequence
  ENSG00000176994_32 (sequence is synthesized)
gccctggaccagccagtgggggtgagaaaggctgccaccctctgggtcgtgggaaacatgcgaccttggcctcagggccacagagcgtgagcagcaccctgtccgctgtcctcgccacct

SEQ ID NO: 615456 - DNA, 120 bp, Artificial Sequence
  ENSG00000176994_33 (sequence is synthesized)
ttacctgggagagaagtgcctgtgagcgggccttgggactcactccccatactctttcaccaggaacgagcagagtgttcactagtcctagtgtgaagcgggcacaagtgaccaaagcca

SEQ ID NO: 615457 - DNA, 120 bp, Artificial Sequence
  ENSG00000176994_34 (sequence is synthesized)
gggggctggagagcacagcaggcagagcagggctgaggcgccatgaggccatcaccaccatgcaagggaggagcagccagcagctctcctgggtggcccactggctcctgccggccagag

SEQ ID NO: 615458 - DNA, 120 bp, Artificial Sequence
  ENSG00000176994_35 (sequence is synthesized)
cgcatgagcactgaccttcctcgtggggaaggtctgcagacccgtgtgaacatggcagaggccacactccagctcccacccacataaacctttgcaaccacttcactacctctcactggg

SEQ ID NO: 615459 - DNA, 120 bp, Artificial Sequence
  ENSG00000176994_36 (sequence is synthesized)
tctcgtgggcttgggacagcaacggttctgtttagtcagctggtgcaggtggttggcccagccgatgagaactcaaatagcacggatttcctggatgagctaccacgtggcgctcttcag

SEQ ID NO: 615460 - DNA, 120 bp, Artificial Sequence
  ENSG00000176994_37 (sequence is synthesized)
gttctgcctctgggaggctgtgtgcacctcagtcaccacagctcacggccgtccccagttgagtcccccttctgaggacaagtttgaaactgggaaggagacaccccctggttccgccag

SEQ ID NO: 615461 - DNA, 120 bp, Artificial Sequence
  ENSG00000176994_38 (sequence is synthesized)
cacctatcccactgatagtgatcccctggcctccccgagcctccttaggcaatggccactggtttgtagacagagagtttcttgcagccttgaaaattttattccctaagtggggacagc

SEQ ID NO: 615462 - DNA, 120 bp, Artificial Sequence
  ENSG00000176994_39 (sequence is synthesized)
tctggtattactgcttctttaatttgttccacaaaaattatgctgaaatggacctgaatcagccctgggtgtgcttctgttggcgcctgctgctgaggcccggcctgcccatcggcctgt

SEQ ID NO: 615463 - DNA, 120 bp, Artificial Sequence
  ENSG00000176994_40 (sequence is synthesized)
agtacgccatcgaggtcatcatggagccagccagcttctcttctcatcaaggaggcagagacccctggtggaagccaagagtgaccgaagagggcttgcatcacgtcactccagtggttc

SEQ ID NO: 615464 - DNA, 120 bp, Artificial Sequence
  ENSG00000176994_41 (sequence is synthesized)
cctccttgtccaagtcctcgttttaagggcatggcccgttggctccagccgttggcttctgttcagggtccttgctcccatcagaggtgtttgattttgctcctggggctgcgatggaga

SEQ ID NO: 615465 - DNA, 120 bp, Artificial Sequence
  ENSG00000176994_42 (sequence is synthesized)
accttttgtggcagatggtgctgcctacatctcattggttctctgtacctgtgcccgttgcgcatgttcacagacaggagagtcgccagcaataccttggcagcctttaaatgtgaaacg

SEQ ID NO: 615466 - DNA, 120 bp, Artificial Sequence
  ENSG00000176994_43 (sequence is synthesized)
tctgttacttgcgctggaggcagaggctgtgcagggagcctgcttctaatcgtgggctcccttatctgttacggttccctcccctcctgttctagatgctgattcgttttctcactggct

SEQ ID NO: 615467 - DNA, 120 bp, Artificial Sequence
  ENSG00000176994_44 (sequence is synthesized)
ggttaattgctgtctacttaggcctccaaggccataactgtgcaacattttatctgagaaggaaggaaggtcagaaagtgatcactggcaccaccactgtggcattcctgtcacaccaac

SEQ ID NO: 615468 - DNA, 120 bp, Artificial Sequence
  ENSG00000176994_45 (sequence is synthesized)
acagaaattcacagctcatactgttctcacctgggaaacttgggaagggctgatgagtttggggcagatcctgaattgcagccacacttggccttctagaagctgaagttgtgccctcaa

SEQ ID NO: 615469 - DNA, 120 bp, Artificial Sequence
  ENSG00000176994_46 (sequence is synthesized)
gtggtcctaagtagaagtccacttgaggtatttgctggcacacaccctcaagggtggttcagaaggtcctgaaacctaaggcaaaaggctgctggggcatgaacagaacagaccgtctca

SEQ ID NO: 615470 - DNA, 120 bp, Artificial Sequence
  ENSG00000176994_47 (sequence is synthesized)
ggggcagccatgtaagtggcaagcagggctggtctccctcaaggtggttcttcattaagtaaagatggcttcgtgactagtgtttagctcccagatttatatttgggttaaaaactaact

SEQ ID NO: 615471 - DNA, 120 bp, Artificial Sequence
  ENSG00000176994_48 (sequence is synthesized)
tttcaatgtggcagtttcaaaggattacttgatgcaaagtatgtttcctttcaaagggatcttgacgtggtaccaggactgagtcatgatttgggcagaggcagttaacactgggaagcc

SEQ ID NO: 615472 - DNA, 120 bp, Artificial Sequence
  ENSG00000176994_49 (sequence is synthesized)
ctgcccctccctatgcccccttcactccggggaactgaaacctactctgagtctcacatctctaaacctcagtgctgagacctatgcagtgggactaatctcatcaagaattttcagttg

SEQ ID NO: 615473 - DNA, 120 bp, Artificial Sequence
  ENSG00000176994_50 (sequence is synthesized)
ctccaccctgggcaacaagagcgaaaactgtctcaaaaaaaaaaaatttttcatttgaggtattcttccagtagaaggttagtaagtttttaatgaaaccattaaaaattacacttccca

SEQ ID NO: 615474 - DNA, 120 bp, Artificial Sequence
  ENSG00000176994_51 (sequence is synthesized)
ttacacttcccagaaaatagatgacatcagtgccccttgctactttctcagtcctcactattgctttgagggcccaggtactgaaactggttgtcttgagttttgtgtcagctttttctc

SEQ ID NO: 615475 - DNA, 120 bp, Artificial Sequence
  ENSG00000176994_52 (sequence is synthesized)
cagtccattatccccctcccttgcttctgaagcagtctaggttaaactagccaggcaggtagttgtggactggtgattttcaaaagccccactttagagatcaggccacagctttttata

SEQ ID NO: 615476 - DNA, 120 bp, Artificial Sequence
  ENSG00000176994_53 (sequence is synthesized)
tcgcacaggacacatcagcctgagctgctgcctcatgcctgtttccccaggaacctcactcctttggtagaaccttgggattttagaaattgtggcttttccataactcatttactccaa

SEQ ID NO: 615477 - DNA, 120 bp, Artificial Sequence
  ENSG00000176994_54 (sequence is synthesized)
cagttgaagttacacacattgctcccaaatttggaaatagaccacagtaccttacctttcattccccatctggcctttaccttctttgcttcagtggttgaaaacagttgccatattcaa

SEQ ID NO: 615478 - DNA, 120 bp, Artificial Sequence
  ENSG00000176994_55 (sequence is synthesized)
agtatagtagatttcaacctcacacaaatgacaagtcccattttacaatcctaggaaggcccaccaatttcatttcacgcgccagggcggctgcagttggaggccgagggcagccctctg

SEQ ID NO: 615479 - DNA, 120 bp, Artificial Sequence
  ENSG00000176994_56 (sequence is synthesized)
ctcactgaatgtcttgcatgtgctgactgctgcccgcagtgctgaacatgccccaccgcccaggcccagcactgcttgttgggtcagcatctagtgctgctgtcacatctttgtctgcac

SEQ ID NO: 615480 - DNA, 120 bp, Artificial Sequence
  ENSG00000176994_57 (sequence is synthesized)
agccagtaggattgcctcagccagggggtttatcagaaggtgtgcaaggcctttgggggaactgagcccctatagtgggcagtctcctttaccttcccacctccctgaaaagcacagaag

SEQ ID NO: 615481 - DNA, 120 bp, Artificial Sequence
  ENSG00000176994_58 (sequence is synthesized)
acagtgccttggtttgtgttttgaagcaaacaagtcagctttctggctttgccccaaaactgtgatggaacataataaaactggagatatggtttttaacactgcaaaaaggaaaaagca

SEQ ID NO: 615482 - DNA, 120 bp, Artificial Sequence
  ENSG00000176994_59 (sequence is synthesized)
tcaagtttctacttctggctggaaagcaaaaccaatctcagctgacaaggctgggcaaactaagttttcctgagcccattttcctttgagccctgacctagcctggccttacctcattaa

SEQ ID NO: 615483 - DNA, 120 bp, Artificial Sequence
  ENSG00000176994_60 (sequence is synthesized)
ggtttggttaaagcagtggaaaggaggaggaggcaggggtggatgggggtgtggggaggggatgagcactctgcagccgattaatctgttggtaggggcccagcttcttgggagtgctta

SEQ ID NO: 615484 - DNA, 120 bp, Artificial Sequence
  ENSG00000176994_61 (sequence is synthesized)
ttcagcccaagagtggaggctgtttacagcgagccctggagatggcagcttgtctccagctggggaggggtcaggcccctaaattgaagaccactttggtagcagaactgtagggactgg

SEQ ID NO: 615485 - DNA, 120 bp, Artificial Sequence
  ENSG00000176994_62 (sequence is synthesized)
tgagtcaactcacagattctgcagcagctgctccacccacaataaagcaaacgccgacaggctagaccccagattgcaggggctgccacctacaaggtgggaccacaggctgcctcaccg

SEQ ID NO: 615486 - DNA, 120 bp, Artificial Sequence
  ENSG00000176994_63 (sequence is synthesized)
ggattgtctgccactaaatagctggagtcacagattgagataaatgccaccttcaaggttgcagtgaaaagcataatcctatgtgatgaatttatatgtgttattttttaaaaagctatt

SEQ ID NO: 615487 - DNA, 120 bp, Artificial Sequence
  ENSG00000176994_64 (sequence is synthesized)
ttattactgcatgttcccgtcccgtcttgtgaatgtgagtccccgccaccacgtgaggtgcagtcgttgcagcggctggtgcaggagtgcagctggcgcgtgtgtgatagcatctcgtag

SEQ ID NO: 615488 - DNA, 120 bp, Artificial Sequence
  ENSG00000176994_65 (sequence is synthesized)
gtgttgctgcacaagagttaaccagagtcaatgccaaacacatagtatgagaagtgtactttttaagaaattaatttatttgagttcaaatatttttgaaatataaaaattggttgtatt

SEQ ID NO: 615489 - DNA, 120 bp, Artificial Sequence
  ENSG00000176994_66 (sequence is synthesized)
ttttaaagctataattcttgtagacattctgtggttaaaaatttgattgtgcttattaaaaatggtcatctatgttttgcacttcagctacgtgaaaataaaatttctttgggaaggtga

SEQ ID NO: 615490 - DNA, 120 bp, Artificial Sequence
  ENSG00000177000_0 (sequence is synthesized)
ctccaaataaccaccctcctcttcaggacacctcaaagatgtccaacgccagctgaaaaggggggtaaaaatgcaggttccatttgacagtgtgacgtatctgaaatcagaaaggacttg

SEQ ID NO: 615491 - DNA, 120 bp, Artificial Sequence
  ENSG00000177000_1 (sequence is synthesized)
tcaactctgggaacacaactcaagttttcccaggatgctttgcagggggaagctggactgtcagtgacccagaaagggtgagggatagagtgagaaaggactggagaagctaaaacagca

SEQ ID NO: 615492 - DNA, 120 bp, Artificial Sequence
  ENSG00000177000_2 (sequence is synthesized)
gcatgataagcacaaagtcctgtgaggaagctcattctgaaaacgcttgtttcattccaaactcttttcagatggaaataaaaggaaacatgggtgggatttactggagctggcctggat

SEQ ID NO: 615493 - DNA, 120 bp, Artificial Sequence
  ENSG00000177000_3 (sequence is synthesized)
tctccctcagattccaggaggggttatgagaaaagaccccagacttaggcacgtgaagcagggtagacgcttcgagagccctggctgcggtccccaggccccacccgctgccacctgcgg

SEQ ID NO: 615494 - DNA, 120 bp, Artificial Sequence
  ENSG00000177000_4 (sequence is synthesized)
gcccagattggcccggccccacccccggcaacgcctctctcagtcccttagcaaccgccccctccccaggccgactccgccggcttcttaccagctcctcgggggtgcgggtctcacgct

SEQ ID NO: 615495 - DNA, 120 bp, Artificial Sequence
  ENSG00000177000_5 (sequence is synthesized)
caccgcagcagcagcaccacctgcagcagcagcacagagaccccctgcaccccgccatcttcctcctttactgccactctggacccctctaccaaccccctcccagccaggatctgcgcc

SEQ ID NO: 615496 - DNA, 120 bp, Artificial Sequence
  ENSG00000177000_6 (sequence is synthesized)
tcacgtgactggccccgggacggtcacgtggccctctcgagctctgggactgagaccaggagtggctgcagacgggtggggcgaggactcgcgtcacatgacgataaaggcacggcctcc

SEQ ID NO: 615497 - DNA, 120 bp, Artificial Sequence
  ENSG00000177000_7 (sequence is synthesized)
aacgagacctgtgggcacggccatgttgggggcggggcttccggtcacccgcgccggtggtttccgccctgtaggcccgcctctccagcaacctgacacctgcgccgcgccccttcactg

SEQ ID NO: 615498 - DNA, 120 bp, Artificial Sequence
  ENSG00000177000_8 (sequence is synthesized)
cgttccccgcccctgcagcggccacagtggtgcggccggcggccgagcgttctgagtcacccgggactggaggtaggaacccagccatggtgaacgaagccagaggaaacagcagcctca

SEQ ID NO: 615499 - DNA, 120 bp, Artificial Sequence
  ENSG00000177000_9 (sequence is synthesized)
acccctgcttggagggcagtgccagcagtggcagtgagagctccaaagatagttcgagatgttccaccccgggcctggaccccgagcggcatgagagactccgggagaagatgaggcggc

SEQ ID NO: 615500 - DNA, 120 bp, Artificial Sequence
  ENSG00000177000_10 (sequence is synthesized)
gattggaatctggtgacaagtggttctccctggaattcttccctcctcgaactgctgagggagctgtcaatctcatctcaaggtttgaccggatggcagcaggtggccccctctacatag

SEQ ID NO: 615501 - DNA, 120 bp, Artificial Sequence
  ENSG00000177000_11 (sequence is synthesized)
acgtgacctggcacccagcaggtgaccctggctcagacaaggagacctcctccatgatgatcgccagcaccgccgtgaactactgtggcctggagaccatcctgcacatgacctgctgcc

SEQ ID NO: 615502 - DNA, 120 bp, Artificial Sequence
  ENSG00000177000_12 (sequence is synthesized)
gtcagcgcctggaggagatcacgggccatctgcacaaagctaagcagctgggcctgaagaacatcatggcgctgcggggagacccaataggtgaccagtgggaagaggaggagggaggct

SEQ ID NO: 615503 - DNA, 120 bp, Artificial Sequence
  ENSG00000177000_13 (sequence is synthesized)
tcaactacgcagtggacctggtgaagcacatccgaagtgagtttggtgactactttgacatctgtgtggcaggttaccccaaaggccaccccgaagcagggagctttgaggctgacctga

SEQ ID NO: 615504 - DNA, 120 bp, Artificial Sequence
  ENSG00000177000_14 (sequence is synthesized)
agcacttgaaggagaaggtgtctgcgggagccgatttcatcatcacgcagcttttctttgaggctgacacattcttccgctttgtgaaggcatgcaccgacatgggcatcacttgcccca

SEQ ID NO: 615505 - DNA, 120 bp, Artificial Sequence
  ENSG00000177000_15 (sequence is synthesized)
tcgtccccgggatctttcccatccagggctaccactcccttcggcagcttgtgaagctgtccaagctggaggtgccacaggagatcaaggacgtgattgagccaatcaaagacaacgatg

SEQ ID NO: 615506 - DNA, 120 bp, Artificial Sequence
  ENSG00000177000_16 (sequence is synthesized)
ctgccatccgcaactatggcatcgagctggccgtgagcctgtgccaggagcttctggccagtggcttggtgccaggcctccacttctacaccctcaaccgcgagatggctaccacagagg

SEQ ID NO: 615507 - DNA, 120 bp, Artificial Sequence
  ENSG00000177000_17 (sequence is synthesized)
tgctgaagcgcctggggatgtggactgaggaccccaggcgtcccctaccctgggctctcagcgcccaccccaagcgccgagaggaagatgtacgtcccatcttctgggcctccagaccaa

SEQ ID NO: 615508 - DNA, 120 bp, Artificial Sequence
  ENSG00000177000_18 (sequence is synthesized)
agagttacatctaccgtacccaggagtgggacgagttccctaacggccgctggggcaattcctcttcccctgcctttggggagctgaaggactactacctcttctacctgaagagcaagt

SEQ ID NO: 615509 - DNA, 120 bp, Artificial Sequence
  ENSG00000177000_19 (sequence is synthesized)
cccccaaggaggagctgctgaagatgtggggggaggagctgaccagtgaagaaagtgtctttgaagtcttcgttctttacctctcgggagaaccaaaccggaatggtcacaaagtgactt

SEQ ID NO: 615510 - DNA, 120 bp, Artificial Sequence
  ENSG00000177000_20 (sequence is synthesized)
gcctgccctggaacgatgagcccctggcggctgagaccagcctgctgaaggaggagctgctgcgggtgaaccgccagggcatcctcaccatcaactcacagcccaacatcaacgggaagc

SEQ ID NO: 615511 - DNA, 120 bp, Artificial Sequence
  ENSG00000177000_21 (sequence is synthesized)
cgtcctccgaccccatcgtgggctggggccccagcgggggctatgtcttccagaaggcctacttagagtttttcacttcccgcgagacagcggaagcacttctgcaagtgctgaagaagt

SEQ ID NO: 615512 - DNA, 120 bp, Artificial Sequence
  ENSG00000177000_22 (sequence is synthesized)
acgagctccgggttaattaccaccttgtcaatgtgaagggtgaaaacatcaccaatgcccctgaactgcagccgaatgctgtcacttggggcatcttccctgggcgagagatcatccagc

SEQ ID NO: 615513 - DNA, 120 bp, Artificial Sequence
  ENSG00000177000_23 (sequence is synthesized)
ccaccgtagtggatcccgtcagcttcatgttctggaaggacgaggcctttgccctgtggattgagcggtggggaaagctgtatgaggaggagtccccgtcccgcaccatcatccagtaca

SEQ ID NO: 615514 - DNA, 120 bp, Artificial Sequence
  ENSG00000177000_24 (sequence is synthesized)
tccacgacaactacttcctggtcaacctggtggacaatgacttcccactggacaactgcctctggcaggtggtggaagacacattggagcttctcaacaggcccacccagaatgcgagag

SEQ ID NO: 615515 - DNA, 120 bp, Artificial Sequence
  ENSG00000177000_25 (sequence is synthesized)
aaacggaggctccatgaccctgcgtcctgacgccctgcgttggagccactcctgtcccgccttcctcctccacagtgctgcttctcttgggaactccactctccttcgtgtctctcccac

SEQ ID NO: 615516 - DNA, 120 bp, Artificial Sequence
  ENSG00000177000_26 (sequence is synthesized)
cccggcctccactcccccacctgacaatggcagctagactggagtgaggcttccaggctcttcctggacctgagtcggccccacatgggaacctagtactctctgctctagccaggagtc

SEQ ID NO: 615517 - DNA, 120 bp, Artificial Sequence
  ENSG00000177000_27 (sequence is synthesized)
tgtgctcttttggtggggagcacttgcgtcctgcagaggaccacagtgggtggcacctcctgagaaggcgaggagagtggttgttgccaactaagccctcgaaccaaggcagcctccaga

SEQ ID NO: 615518 - DNA, 120 bp, Artificial Sequence
  ENSG00000177000_28 (sequence is synthesized)
gccagcctgggactcccagtgaacttacacttggagcccgtgcagtacaggcaaaacacgcaagggcatcaggcactggtggcatcgtagaagagatgtggcaaagtgctgtacccttcc

SEQ ID NO: 615519 - DNA, 120 bp, Artificial Sequence
  ENSG00000177000_29 (sequence is synthesized)
ggcagctgggccccacctacttgtgactgaaggggcacaccactgccctgcctgcccacttagccgtccatggcaccagccccctggatgggcattgggctgacacctaccatgctgctt

SEQ ID NO: 615520 - DNA, 120 bp, Artificial Sequence
  ENSG00000177000_30 (sequence is synthesized)
tttggcacagttgtctattctgagccttgagagaaaaagtgccccttaagggttgaaggcagtctgaacccttgtgcttggtggggctcgtggccttccccttttgcctggctgtggagg

SEQ ID NO: 615521 - DNA, 120 bp, Artificial Sequence
  ENSG00000177000_31 (sequence is synthesized)
cctgatgctgccccgttccctgtcagaggctaagatgagatttgccagcacaggggccccagatctgcctgggcctgtgcagcagcccagcttcctggtgtatttttcaggtaggccctt

SEQ ID NO: 615522 - DNA, 120 bp, Artificial Sequence
  ENSG00000177000_32 (sequence is synthesized)
gtcctgccagctgccttcctcatcccctcgtcctgtcccagaggttatctgcctggcctggctccccacgagtcacctgcaagccccagggcctgggggcagtgactggcaggtgcagat

SEQ ID NO: 615523 - DNA, 120 bp, Artificial Sequence
  ENSG00000177000_33 (sequence is synthesized)
gggctgtttcgtgtagtggaagagcagcctgatggccaagggggtggacgcaattgtgggatgtcctctttactcccttcctggcctcactggctggggcagaggggcagccgctaggag

SEQ ID NO: 615524 - DNA, 120 bp, Artificial Sequence
  ENSG00000177000_34 (sequence is synthesized)
agactgaaagcagcagctaggactgaggagtgggttttattgtccttcagagctcttcaagctgtcccctctgtcatcactccctggatgtgtggggcatggttccttccctgggaaggc

SEQ ID NO: 615525 - DNA, 120 bp, Artificial Sequence
  ENSG00000177000_35 (sequence is synthesized)
taagttcagttctgttttttattctatgagaacaagtcacagctgcagctgggccccatgctctgccccaagcccccaaccccgcggtgctctggcggcttcctgtccactctcggggcc

SEQ ID NO: 615526 - DNA, 120 bp, Artificial Sequence
  ENSG00000177000_36 (sequence is synthesized)
cttggggcctggcttgctccagggtcttgggctactggcagctcctctccttgggctcctggctgccaggcgttggtgccacttcttaaaggcctggaaccagggaggagaggaaatgct

SEQ ID NO: 615527 - DNA, 120 bp, Artificial Sequence
  ENSG00000177000_37 (sequence is synthesized)
attgttgtgggctttctccggggtctgtgctgtgcctgctagagcaacccctgtacccagctccttttgtccccagggcccctccctctgccccaagcagccagccagtcttgcctaggc

SEQ ID NO: 615528 - DNA, 120 bp, Artificial Sequence
  ENSG00000177000_38 (sequence is synthesized)
caaatgcacaagctcagaatagatctgatggtgagctgggaagctgtactcagagcagagcaaatgagggagggggcgctcaggacccaggccctccatgggctagtgtgagtggcagcc

SEQ ID NO: 615529 - DNA, 120 bp, Artificial Sequence
  ENSG00000177000_39 (sequence is synthesized)
atgcctcatgccacaccttcttcgcaaactgatggaccgggtgggcctggcctgagctggggccacaaatcaaagcaagggctccagcatccagcctgtgtgttctgtaatggaactgac

SEQ ID NO: 615530 - DNA, 120 bp, Artificial Sequence
  ENSG00000177000_40 (sequence is synthesized)
cccctcccctgaaaacgaaggggccccggggctggcaagcagggaaagctccacggtgcgtggctgtggcacagacttctggaaggctggctgagtggaatgcagggaagagggcagtac

SEQ ID NO: 615531 - DNA, 120 bp, Artificial Sequence
  ENSG00000177000_41 (sequence is synthesized)
ctgggaaaggacccacccatcttcctgctgctgtaactgctgagccactcgcagtcgcaggatccgctgccaccacgtctgccaggcccatctcaggtgccactccctgagctttgggga

SEQ ID NO: 615532 - DNA, 120 bp, Artificial Sequence
  ENSG00000177000_42 (sequence is synthesized)
cagttggcagagaaggcctcttgtgctcacgctcccccgcagtccccagcccttctgcctttctcccccgacactgctgcaccagagtgaaagggctatggcaagggggtgtcatctgag

SEQ ID NO: 615533 - DNA, 120 bp, Artificial Sequence
  ENSG00000177000_43 (sequence is synthesized)
gagtattaagaatgcagattcctgggcctgtcccccaaggttttggagtcagtaggtccaagggccatacttttgagaggggtttgggttaagtatgaggtgaaatgggagatggtcagt

SEQ ID NO: 615534 - DNA, 120 bp, Artificial Sequence
  ENSG00000177000_44 (sequence is synthesized)
gtggagaggggtgcacccactcaccagggtccgcaccagctgctctgccccttgggcatccacccagtgctgccatgccactgccaggcacctggcctgctgggaaccccgcagcccgtg

SEQ ID NO: 615535 - DNA, 120 bp, Artificial Sequence
  ENSG00000177000_45 (sequence is synthesized)
aagcagtgcctcgaggcaccggcgctgcaggtacttcctcctgatggccaagagcatcgtgacccttcagggccagaaggagggcagagccatgggcctgggcctgcttttccaggatcc

SEQ ID NO: 615536 - DNA, 120 bp, Artificial Sequence
  ENSG00000177000_46 (sequence is synthesized)
tgcaggaacgagcactggccagagagggcccagctgtagccatggctcaggcaagcccctcagcccttgcccccatccctcggacccaccaaactgcacacacagctcctcttaccgtag

SEQ ID NO: 615537 - DNA, 120 bp, Artificial Sequence
  ENSG00000177000_47 (sequence is synthesized)
cctccgtttatgggccttgctttgggctttgcaggctctgggctcagggctggagtgcgctcttggtccctggtccctcgtccacaggggcaggcctgggacccagctactctgtccagg

SEQ ID NO: 615538 - DNA, 120 bp, Artificial Sequence
  ENSG00000177000_48 (sequence is synthesized)
ccactgtggccagagctggaaggcagggcagagggaatgttccctgcaccctggaaaggggagttgagtcacaagaggttaaggtgggtccaggaaggcagctgctcttagtgcccgcct

SEQ ID NO: 615539 - DNA, 120 bp, Artificial Sequence
  ENSG00000177000_49 (sequence is synthesized)
aggagttgagtacagtgaggagggtggaggaaggtgctgagcttagccttgtgccctgcccccatctccccaggcctccagcctctcccggctgcctgccgcccaaagagaaatcacagg

SEQ ID NO: 615540 - DNA, 120 bp, Artificial Sequence
  ENSG00000177000_50 (sequence is synthesized)
ggcggggcaggaatgcaaagtgttttctcagaacagctgaaacattccgaagagggaatggatggggagaatggtcaatacacataagaccgtgtcccaaggagctgatttccaggcccc

SEQ ID NO: 615541 - DNA, 120 bp, Artificial Sequence
  ENSG00000177000_51 (sequence is synthesized)
tgaggactggagaccgcttcacccctgcacttcagacaccgtttgtcccccggggcaaggtctccttactctgagcccaggccgttccccttggcttcctccgtccacccaggctgcact

SEQ ID NO: 615542 - DNA, 120 bp, Artificial Sequence
  ENSG00000177000_52 (sequence is synthesized)
gcagtgatggcgcgggaggcaccagctctgtggcctgtgtccagcagctgcgggtctgaaggaatagccagagaggagcacctgaaccccatgggcttggacttcctggggccccgctgg

SEQ ID NO: 615543 - DNA, 120 bp, Artificial Sequence
  ENSG00000177000_53 (sequence is synthesized)
gatttcttcgctgctctagctggcaggacacatcccggcctcttccacccattcccccatgtggctgaagacattccaacaatggggtgggcccataatagttagccctcagtcagttcc

SEQ ID NO: 615544 - DNA, 120 bp, Artificial Sequence
  ENSG00000177000_54 (sequence is synthesized)
cggagcacagccctgggagggggctatttctctccccactgaaaacatttcaaagctgagttacttgtctgaggcctcatccctcggaagccgtctgactccagagtctgagcccccggc

SEQ ID NO: 615545 - DNA, 120 bp, Artificial Sequence
  ENSG00000177000_55 (sequence is synthesized)
tagtaccctatagagagggggctctccaaaggggctgctggggcatgtgtgcctgtggcagaaaagaggagaccctggaattcagcaccctgggtgccattcccagcgtttagtttctag

SEQ ID NO: 615546 - DNA, 120 bp, Artificial Sequence
  ENSG00000177000_56 (sequence is synthesized)
aggcctcagtttctccatcagcttatgggatccttgtctttactgacaagaatggaatagaaatgtaaaagtactctgaaaagcaattgccctgtaacttatctagaaagaaaagaccct

SEQ ID NO: 615547 - DNA, 120 bp, Artificial Sequence
  ENSG00000177000_57 (sequence is synthesized)
gagactccagaatctgctgttgccatagccccatatgtgtgaattctgcaactagccaaggctagttcctttcaattccatttaaaaaacaaaaaccagcaggtgtggtggctcatggcg

SEQ ID NO: 615548 - DNA, 120 bp, Artificial Sequence
  ENSG00000177000_58 (sequence is synthesized)
taatgggcctgcccaatgctttgggaggccaaggcaggtagatcgcttgagcccaggagtttgagacaagccctggcaacatagtgagatcccatttctacaaaaaaaaaaaaaaaaaaa

SEQ ID NO: 615549 - DNA, 86 bp, Artificial Sequence
  ENSG00000177000_59 (sequence is synthesized)
gtccgccgggacctttctgggagtcgtaggcttaatgaccctatgccctctgttggcctgtctgtgccctggtggctctgattaca

SEQ ID NO: 615550 - DNA, 69 bp, Artificial Sequence
  ENSG00000177000_60 (sequence is synthesized)
ggcaatccttctgcctcagccttcccagtagctgggtcactgtgatgatttgaattgaattctgtgatg

SEQ ID NO: 615551 - DNA, 120 bp, Artificial Sequence
  ENSG00000177000_61 (sequence is synthesized)
agctgggtcactgtgatgatttgaattgaattctgtgatgtgtaagaagagcagcctgcaaggcaagcacagatggggcagcttttgttctgagaaattcgtgcccttactgaacttggg

SEQ ID NO: 615552 - DNA, 120 bp, Artificial Sequence
  ENSG00000177000_62 (sequence is synthesized)
tctggctatttttggaacatggccagcatcaagttctaacccacaacacggtctttttggagtagcatgaattcaggagaaatctggctgcatagtcaagccctcaccccttccatcctg

SEQ ID NO: 615553 - DNA, 120 bp, Artificial Sequence
  ENSG00000177000_63 (sequence is synthesized)
tgcacgaactgtttcaagtaacagatgttccaggcagagccagccagagtgagctgttccttctctggagggtgatctggtatccctgaacgcctgttggcctcatctccaccaacccct

SEQ ID NO: 615554 - DNA, 120 bp, Artificial Sequence
  ENSG00000177000_64 (sequence is synthesized)
gcagtctctgcccctgagtccccctccttccatccgcctccccttactagagcctcagccctccctcctcgcctggaagccttgcccccgcccccttgtgctggctggagctcaagcctc

SEQ ID NO: 615555 - DNA, 120 bp, Artificial Sequence
  ENSG00000177000_65 (sequence is synthesized)
ttcctttgtcgcagctccgcccagttgaacacacccgctggggaaggtgcctctgttccctccccacgcactctgggcctgagctgacagagatggaccatcgaaaagccagggtcctcc

SEQ ID NO: 615556 - DNA, 120 bp, Artificial Sequence
  ENSG00000177000_66 (sequence is synthesized)
cagctgggcactactgcccctcgctaggaatatgggcctcgcaggtcggcagcgtgaggtcctctgtgccaccttccatcaggtagctgtcaccgaggagcatgttgcagtgccgggtgg

SEQ ID NO: 615557 - DNA, 120 bp, Artificial Sequence
  ENSG00000177000_67 (sequence is synthesized)
gggctgccttgcatgcaaggagcctggcagcagcggagggcaaggctttgagtgaggcggcccggacagccatagctgaggagcatggagccactgggagggggcagtgtcacctttttt

SEQ ID NO: 615558 - DNA, 120 bp, Artificial Sequence
  ENSG00000177000_68 (sequence is synthesized)
ggccttcttcctgtgtggaaatacagcgcctccggcttgaacctgccactcaggtgtcttgatgtgtcgggggtgtggctgcctgccccctgatgctccctgccccaccctgtgcagtag

SEQ ID NO: 615559 - DNA, 82 bp, Artificial Sequence
  ENSG00000177000_69 (sequence is synthesized)
tggcctgggcgacagagtgagacactgtctgagaacaaaaaacgactgaaaaaaaaaatcaccttagctttttctcttagaa

SEQ ID NO: 615560 - DNA, 120 bp, Artificial Sequence
  ENSG00000177000_70 (sequence is synthesized)
cgactgaaaaaaaaaatcaccttagctttttctcttagaatcttctctaaaacgtattctttgtggcattctgaaataggattcatgatgatgcctgttgatcttagggacactacctca

SEQ ID NO: 615561 - DNA, 120 bp, Artificial Sequence
  ENSG00000177000_71 (sequence is synthesized)
cctgccagtatctttggggctgtgtccttcaaggacatgtccccagactgctgtgcagtgtcattttttgtgtttggtttggtggtggcttcttcccccttgctaggctatcaacctctt

SEQ ID NO: 615562 - DNA, 120 bp, Artificial Sequence
  ENSG00000177000_72 (sequence is synthesized)
atcaccacttgttggtgtcagaactaactgcttctggtctggagagggactgaccgatgcctttgggtagagagaattatgaaagaaattttggtatttttctactttatattttctgag

SEQ ID NO: 615563 - DNA, 62 bp, Artificial Sequence
  ENSG00000177000_73 (sequence is synthesized)
tttctgaggtttctgtaataagcatatttcacttttccaataagaaaaaaaaaaacaggatc

SEQ ID NO: 615564 - DNA, 69 bp, Artificial Sequence
  ENSG00000177000_74 (sequence is synthesized)
ctctgcttcagcctgggcaattgagccagactctgtctcaaaaataaacaaaaaaacttgacaaaaaaa

SEQ ID NO: 615565 - DNA, 120 bp, Artificial Sequence
  ENSG00000177000_75 (sequence is synthesized)
agttcaggctgtgctgtgctgttggaaggtgcaagatcagagcccccaaagcagaggactctctctgcccagtccctgtggtctcttcatccctcgccttgaacaggtggaggccagcct

SEQ ID NO: 615566 - DNA, 120 bp, Artificial Sequence
  ENSG00000177000_76 (sequence is synthesized)
agctgtcaatctcatctcaagaaacaaaccccctacaggtttgaccggatggcagcaggtggccccctctacatagacgtgacctggcacccagcaggtgaccctggctcagacaaggag

SEQ ID NO: 615567 - DNA, 120 bp, Artificial Sequence
  ENSG00000177000_77 (sequence is synthesized)
accaccttgtcaatgtgaaggcaaatcacagtggatagtcatacggatgagagagattggggacggctagagccggggaggccagtgaagagacccctggagtgacccaagccaaacaca

SEQ ID NO: 615568 - DNA, 120 bp, Artificial Sequence
  ENSG00000177000_78 (sequence is synthesized)
cggggaggtgtggagccagcactcccctacactctgggttctggctttcccggaggccacttggtagcctgaacttggttcctgaaatggtcctttacttcttcctgggccccacgctga

SEQ ID NO: 615569 - DNA, 120 bp, Artificial Sequence
  ENSG00000177000_79 (sequence is synthesized)
ggatccgcaggatcccatccccgccagtagtgtcagtaggcattgtgggtagtgagtcatcctgggcaccacacacaggcagccacctcttccacctcttgacctcgacataggagttcc

SEQ ID NO: 615570 - DNA, 120 bp, Artificial Sequence
  ENSG00000177000_80 (sequence is synthesized)
gtgagaatagccggtcaggcctctggtgcccgctgttgtcaggccacctaagagtgggaagagggagcctgatgggtgggatcctatggcctcgtgctccctaccacaagaccccttcac

SEQ ID NO: 615571 - DNA, 120 bp, Artificial Sequence
  ENSG00000177000_81 (sequence is synthesized)
ttgagatgagtagaaaattctcccaggaggcaggagccccaaggccgtgggatgggagagggtggcaggcatgcccaggtagaagtagggaagggctctccaatcctccaggcacggtga

SEQ ID NO: 615572 - DNA, 120 bp, Artificial Sequence
  ENSG00000177000_82 (sequence is synthesized)
gaagcagcggtggtctcctattctccaccgccagcacagggtcagcatgcagtgaatattgaactggtgggctgcttttttccctcctgctgtcttaccaagtgctagaaagagacgaac

SEQ ID NO: 615573 - DNA, 120 bp, Artificial Sequence
  ENSG00000177000_83 (sequence is synthesized)
caaacctaaataatatgaagtttctgccttccagggactcgcagtcctgggtgtcggggctaggtagagggaacagaaagggtctctggaggttgggtgagacccagtgactatgacctc

SEQ ID NO: 615574 - DNA, 120 bp, Artificial Sequence
  ENSG00000177000_84 (sequence is synthesized)
caccaaccctgcagacccaataggtgaccagtgggaagaggaggagggaggcttcaactacgcagtggacctggtgaagcacatccgaagtgagtttggtgactactttgacatctgtgt

SEQ ID NO: 615575 - DNA, 120 bp, Artificial Sequence
  ENSG00000177000_85 (sequence is synthesized)
ggcaggtgagtggctggatcatcctggtggcggggatggagctagggaggctgagatgcccagagagcctgtcggtgttcggttcaggacacagtgatcaggggcactcatgggtccatg

SEQ ID NO: 615576 - DNA, 120 bp, Artificial Sequence
  ENSG00000177000_86 (sequence is synthesized)
ctggatgaaggacatgcagaggtgaactgcaccatgtccttgctccttttgtatcacccactcccctcctgggcctgccaccatcgacccctagctttttgttcctctgcctggctgtgc

SEQ ID NO: 615577 - DNA, 120 bp, Artificial Sequence
  ENSG00000177000_87 (sequence is synthesized)
cgacccctagctttttgttcctctgcctggctgtgcccttagcctgcttggccttattcttttctttaaaacgaaagaggggtctgggcgcggtggctcacacctgtaaccccaacactt

SEQ ID NO: 615578 - DNA, 120 bp, Artificial Sequence
  ENSG00000177000_88 (sequence is synthesized)
gcagtggcccagagatccccagaggagggtccaagagcagccccggctgcagtgctggctccccacggtggtacagatggatgtctgtgccatggctagctgggcacatcgaaggctcca

SEQ ID NO: 615579 - DNA, 120 bp, Artificial Sequence
  ENSG00000177000_89 (sequence is synthesized)
cagtggtgcggccggcggccgagcgttctgagtcacccgggactggagggtgagtgacggcgaggccggggtcgccgggagggagatcctggagccggcaaacaacctcccgggggcaag

SEQ ID NO: 615580 - DNA, 120 bp, Artificial Sequence
  ENSG00000177000_90 (sequence is synthesized)
gacgtgcttgtgggcggggagcgctggaggccggcctgcctctcttcttggggggggctgccgcctcccttgcgcacccttcgcgggattagtgtaactcccaatggctaccacttccag

SEQ ID NO: 615581 - DNA, 120 bp, Artificial Sequence
  ENSG00000177000_91 (sequence is synthesized)
cgaccgccaaccctcaagcgaagactgactttggctccctgcctggacggaggggcccctgagccaggggtgacgatcccgcccctctgaccggcccaggcccgtgtcctcgcccccatc

SEQ ID NO: 615582 - DNA, 120 bp, Artificial Sequence
  ENSG00000177000_92 (sequence is synthesized)
ggtgactcagtgacctggtgactggattctcggccacctgggcgccgagacggcttccggctcctgccttttaaacctgcctccccggcgatcacctggagaagagcgctgggcccgggg

SEQ ID NO: 615583 - DNA, 120 bp, Artificial Sequence
  ENSG00000177000_93 (sequence is synthesized)
ctcagtgaatgttggctatcaccgtgtgccaaactctggggataccccaggcaggacaccggtcctgtctcagggaactggggaaagagaaaggagacaggccttttcacccacagttac

SEQ ID NO: 615584 - DNA, 120 bp, Artificial Sequence
  ENSG00000177000_94 (sequence is synthesized)
aatcgtgggagttggcttacaaatatggcacatgcgtggcatatactaggaatgcaataagtctttgaaaatcagagggtttacaggtggttcagcttcctcctactctaggttctgttc

SEQ ID NO: 615585 - DNA, 120 bp, Artificial Sequence
  ENSG00000177000_95 (sequence is synthesized)
cagcaagcaattaacgagtaggaacccagccatggtgaacgaagccagaggaaacagcagcctcaacccctgcttggagggcagtgccagcagtggcagtgagagctccaaagatagttc

SEQ ID NO: 615586 - DNA, 120 bp, Artificial Sequence
  ENSG00000177023_0 (sequence is synthesized)
gcagccccagcattatgcagagacttgtgctgctattagccatttctcttctactctatcaagatcttccagtgagaagcgaatttgaattggacagaatatgtggttatgggactgccc

SEQ ID NO: 615587 - DNA, 120 bp, Artificial Sequence; identical to SEQ ID NO: 614130
  ENSG00000177023_1 (sequence is synthesized)

SEQ ID NO: 615588 - DNA, 120 bp, Artificial Sequence
  ENSG00000177025_0 (sequence is synthesized)
agtagaacttcttgattcctcagataaatagaggacagatgctggactgtagctaagtatttcctttcatctacgggataaaatactgataatttgagagtgatggacaaggttcagagt

SEQ ID NO: 615589 - DNA, 120 bp, Artificial Sequence
  ENSG00000177025_1 (sequence is synthesized)
ggtttcctcattttgtttttgtttttaatggaatgccaacttcatttatgcttgccgtatgcagatggactccatcccactggaaacataacaggcttaccaggcagtaaacggtcacaa

SEQ ID NO: 615590 - DNA, 120 bp, Artificial Sequence
  ENSG00000177025_2 (sequence is synthesized)
ccacccagaaacatcaccaaagagcccaaagtgttctttcataaaacccagttgcctgggattcaaggggctgcctcgagatccacggctgcatcccctacgaaccccatgaaattcctg

SEQ ID NO: 615591 - DNA, 120 bp, Artificial Sequence
  ENSG00000177025_3 (sequence is synthesized)
gccctgatatgtgggatggcaatctcctatatgatatatcgactggcacaggctgaggaaagacaacagctcgagtcactttataagaacctcaggataccgttattaggagatgaagaa

SEQ ID NO: 615592 - DNA, 120 bp, Artificial Sequence
  ENSG00000177025_4 (sequence is synthesized)
gagggctcagaggacgagggtgagtccacgcacctacttccagagaacgaaaatgagctggaaaagttcatccactcagttattatatcaaaaagaagcaaaaatattaagaagaaactg

SEQ ID NO: 615593 - DNA, 120 bp, Artificial Sequence
  ENSG00000177025_5 (sequence is synthesized)
aaggaagagcaaaactcagtaacagaaaacaaaacaaagaatgcgtcacataatggaaaaatggaagacttgtgaacgcagacgacagaggtgccggctgaggcagaggagaaactatgg

SEQ ID NO: 615594 - DNA, 120 bp, Artificial Sequence
  ENSG00000177025_6 (sequence is synthesized)
gggtgctgggagactgagcctgtgggcgtggcttgctcccagagaaccttatggaagaggacatcaaagaaagaaatgccagacctgtatcccagaaaataaagccacatgatatagcaa

SEQ ID NO: 615595 - DNA, 120 bp, Artificial Sequence
  ENSG00000177030_0 (sequence is synthesized)
aaacccgcggcactaagctctctctgagaggcagaattgcgccggccgccggcgagaatctgcctagagccgtccagccctgtcggccggggacgacagccgcctcagcctgtcaggaca

SEQ ID NO: 615596 - DNA, 120 bp, Artificial Sequence
  ENSG00000177030_1 (sequence is synthesized)
gtgaggagagcaggggccgagtctctcggaagccctcgtgaggactcggacctattcggactgattcggcttcccacttcggggaacttcgaccctcctcggttcaggactcggtctcgg

SEQ ID NO: 615597 - DNA, 120 bp, Artificial Sequence
  ENSG00000177030_2 (sequence is synthesized)
ctcggcggcttcgtgcaggttcggctcctactcgggcagcctctgttcgcctcggctccgctccgcgggcggactcggctcggctctgctcggcggctggctgccttttcggtccctatt

SEQ ID NO: 615598 - DNA, 120 bp, Artificial Sequence
  ENSG00000177030_3 (sequence is synthesized)
ggcttcgggcggcctcggcccagctcgggcgtcctcttcgggccccgcttcgggctccgcgaccggcgcttcgggcggtcccggacggcgccttcgggaaggctcggcggagtccggatg

SEQ ID NO: 615599 - DNA, 120 bp, Artificial Sequence
  ENSG00000177030_4 (sequence is synthesized)
ggtcccggacggcgccttcgggaaggctcggcggagtccggatggaggactcggactcggcggcaaagcagctgggcctggctgaggcggcggcggtggcggccgcggccgctgtggcgg

SEQ ID NO: 615600 - DNA, 120 bp, Artificial Sequence
  ENSG00000177030_5 (sequence is synthesized)
agccggtgctgagcagggacgaggactcggaggaggacgcagactcggaggcggagcgggagacgccgcgggtcacggcagtggcggtgatggcggcggagcccgggcacatggacatgg

SEQ ID NO: 615601 - DNA, 120 bp, Artificial Sequence
  ENSG00000177030_6 (sequence is synthesized)
gcgccgaggccctgcccggccccgacgaggccgccgctgccgcagccttcgcagaggtgaccacagtgacagtggccaacgtgggggctgctgcagacaatgtcttcaccacgtctgtgg

SEQ ID NO: 615602 - DNA, 120 bp, Artificial Sequence
  ENSG00000177030_7 (sequence is synthesized)
cgaacgcggcatccatctcaggacatgttctgtctggtaggacggcccttcagatcggggacagcctgaacaccgaaaaagcgacactgattgtcgtccacacagatgggagcatcgtgg

SEQ ID NO: 615603 - DNA, 120 bp, Artificial Sequence
  ENSG00000177030_8 (sequence is synthesized)
agaccaccgggctgaaaggcccggcagctcccctcaccccaggtcctcagtctcctccaacccctctggctcccggccaagaaaaaggtggaactaaatacaactgggacccttctgtgt

SEQ ID NO: 615604 - DNA, 120 bp, Artificial Sequence
  ENSG00000177030_9 (sequence is synthesized)
acgacagtgagctgcccgtacggtgccggaacatcagcggcactctgtacaagaacaggctcggctcaggcggccggggacggtgcatcaagcagggggagaactggtacagtcccaccg

SEQ ID NO: 615605 - DNA, 120 bp, Artificial Sequence
  ENSG00000177030_10 (sequence is synthesized)
aaaccctcacgctgcctcttgcacctgtgctgcctgctgcgacgacatgaccttaagtggcccagtcaggctttttgtgccttacaaaaggcgcaagaaggagaatgaactgcccacaac

SEQ ID NO: 615606 - DNA, 120 bp, Artificial Sequence
  ENSG00000177030_11 (sequence is synthesized)
tcccgtgaagaaggactcccccaagaacatcacattgcttccagccaccgcggctaccaccttcaccgtgaccccctcgggacagatcacgacctcgggggcactgacctttgaccgagc

SEQ ID NO: 615607 - DNA, 120 bp, Artificial Sequence
  ENSG00000177030_12 (sequence is synthesized)
gtccacggtagaggccactgctgtcatatcagagagtccggcccagggcgacgtcttcgcaggggccacagtccaagaggccagcgtgcagcccccatgcagggccagccaccctgagcc

SEQ ID NO: 615608 - DNA, 120 bp, Artificial Sequence
  ENSG00000177030_13 (sequence is synthesized)
tcactaccccggctatcaggacagctgccagatcgcaccgtttccagaagctgcgttgccaacgtcacatcccaaaatagtgttgacatccctgcctgcgctggcggtcccacccccgac

SEQ ID NO: 615609 - DNA, 120 bp, Artificial Sequence
  ENSG00000177030_14 (sequence is synthesized)
tcccaccaaagcggcacctcccgcgttggtcaatgggctggagctgtcagagccgcggagctggctgtacctagaagagatggtcaactccttgctcaacacagcgcagcagctgaagac

SEQ ID NO: 615610 - DNA, 120 bp, Artificial Sequence
  ENSG00000177030_15 (sequence is synthesized)
gctgtttgagcaagccaagcatgccagcacctaccgagaagctgccacaaaccaggccaagatccacgctgacgcagagcggaaggagcagtcctgcgttaactgcggccgggaggctat

SEQ ID NO: 615611 - DNA, 120 bp, Artificial Sequence
  ENSG00000177030_16 (sequence is synthesized)
gagcgagtgcaccggctgccacaaggtcaactactgctccaccttctgccaacgcaaggactggaaggatcaccagcacatatgcggccagtcagcagctgtcaccgtccaggcagacga

SEQ ID NO: 615612 - DNA, 120 bp, Artificial Sequence
  ENSG00000177030_17 (sequence is synthesized)
agtccacgtggctgaaagcgtgatggagaaggtgaccgtgtgaggctccatcggccgccctgggagctggggcccctcgcactcctgtgaggcttttgcaggtcgaaggcccccctgagg

SEQ ID NO: 615613 - DNA, 120 bp, Artificial Sequence
  ENSG00000177030_18 (sequence is synthesized)
actctggggggacgttgagaagaggggtgtgggaaggtaaagaaacttgctggacaagtcattaacacactttaagcgaatggtgccctgggaagcgcactccccctgcccgggccccct

SEQ ID NO: 615614 - DNA, 120 bp, Artificial Sequence
  ENSG00000177030_19 (sequence is synthesized)
gcccgctcgcggacagattttttatccctgggatcatgagcgtccggtcttgcccacagggcctgtgctgcgacgcacatacatacgtgttgtgtctgtcaataaagtgtaaataaggtc

SEQ ID NO: 615615 - DNA, 120 bp, Artificial Sequence
  ENSG00000177030_20 (sequence is synthesized)
agaaagtgtttctctagaaacactccagcatgtagaggctggagctgcaggacctatctgggatgacaggggcaggaggtggggtgcagctgacctctgtgaggtgaccacagtgacagt

SEQ ID NO: 615616 - DNA, 120 bp, Artificial Sequence
  ENSG00000177030_21 (sequence is synthesized)
ccgacgaggccgccgctgccgcagccttcgcaggcaagtgcgcccgccggcctctcgcctcgtccggttcccgcgcgcctaccccgcgcgcctgccccgcacaactgtcccagaggtgac

SEQ ID NO: 615617 - DNA, 120 bp, Artificial Sequence
  ENSG00000177030_22 (sequence is synthesized)
gcagggattgcccccaccaagccccagagctgggagtgggcaggacggggcagcgccagggagggcaggacagaaacctggcgttggtgagattttgtggctgatcccacagcttcttgg

SEQ ID NO: 615618 - DNA, 120 bp, Artificial Sequence
  ENSG00000177030_23 (sequence is synthesized)
gcagatctggggccttctgtgccagagtttgtggaatctcacacaggcaagagttttaagccagtaaatacaggacatcggcatcagagactcagaactgggctcctggaagaggcacca

SEQ ID NO: 615619 - DNA, 120 bp, Artificial Sequence
  ENSG00000177030_24 (sequence is synthesized)
tccaggccttagctaaaccaggccacctaaatacctgtcattatctgtgatgatttcgcattaattggggtttttgtcccttctgttccttttcttaaaggctggcttcttaaacacttc

SEQ ID NO: 615620 - DNA, 120 bp, Artificial Sequence
  ENSG00000177030_25 (sequence is synthesized)
caatgtgtctgctagttgctcactgttatagattgaagttatggggcttgggggaaaaactgtataaaagccttaagtgatgtaacattttaataattaatatgaagggcggctataacc

SEQ ID NO: 615621 - DNA, 120 bp, Artificial Sequence
  ENSG00000177030_26 (sequence is synthesized)
cccaggccaccctggtgcctgtgcccagctgcgcaagccccaccttggctcacaaggcccctgccccacctttctggaaaagggagctgtggagagtcatttacaaatgaagcttttcct

SEQ ID NO: 615622 - DNA, 120 bp, Artificial Sequence
  ENSG00000177030_27 (sequence is synthesized)
actgtattcttccccattggagttcccgagtgtcccccagggactcacagctcagtgttgagacccttgggaggagcttcttgttgcgttgtgaggcacttttcccctacggagctttgc

SEQ ID NO: 615623 - DNA, 120 bp, Artificial Sequence
  ENSG00000177030_28 (sequence is synthesized)
ggagaatgaactgcccacaactcccgtgaagaaggactcccccaagaacatcacattgcttccagccaccgcggctaccacctcacatttccatggttcacagtttaaacagcgaacaat

SEQ ID NO: 615624 - DNA, 120 bp, Artificial Sequence
  ENSG00000177030_29 (sequence is synthesized)
gtcaacactgatgtgcgccctctctccctccatctgcacaggccccagggagtggctcaaacctgtagaccagagaaggaagcatctagaactcctgggggccttgtccgccgcccacat

SEQ ID NO: 615625 - DNA, 120 bp, Artificial Sequence
  ENSG00000177030_30 (sequence is synthesized)
cctctcacggggggcagctcccatgaggggtgcaggcccctcaccccacacagagtctcggcaggaaccggaacccttcctggttgccccagagtggaggcccgggaggggcgggcggtg

SEQ ID NO: 615626 - DNA, 120 bp, Artificial Sequence
  ENSG00000177030_31 (sequence is synthesized)
ggtgaccacagtgacagtggccaacgtgggggctgctgcagacaatgtcttcaccacgtctgtggcgaacgcggcatccatctcaggacatgttctggccaggaagaccagagactggtg

SEQ ID NO: 615627 - DNA, 120 bp, Artificial Sequence
  ENSG00000177030_32 (sequence is synthesized)
tttggaaactgacaacaaagcggggcacggtctgaaataactgtgtgttcccttcctaagaaaaatactctgtgactcttaaacaaacacaagacattccttttctccagtgaagagctg

SEQ ID NO: 615628 - DNA, 120 bp, Artificial Sequence
  ENSG00000177030_33 (sequence is synthesized)
gtgcagtgctacctccacggtcaggccctcgggagggtcctgctgctcacagaaccgggagaagcctccctaccaccagcgctctccggacgcagggattgcccccaccaagccccagag

SEQ ID NO: 615629 - DNA, 120 bp, Artificial Sequence
  ENSG00000177030_34 (sequence is synthesized)
gtgcaccggctgccacaaggtcaactactgctccaccttctgccaacgcaagagatggagtcttactatgttgaccagcctggtctccatctcctggcttcgggcgatcctcccatgtca

SEQ ID NO: 615630 - DNA, 85 bp, Artificial Sequence
  ENSG00000177030_35 (sequence is synthesized)
cctcccatggcactacaccagccaacagaagtttttatattaaaatttactttttctagctgggcacagtggctcacgcctgtca

SEQ ID NO: 615631 - DNA, 120 bp, Artificial Sequence
  ENSG00000177034_0 (sequence is synthesized)
gtaaaggtcggcccgcgcaagatggcggcccccttggaactcagttgctggggaggcggctggggactcccatcggttcacagcgagtccctggtggtgatggcttatgccaaattttct

SEQ ID NO: 615632 - DNA, 120 bp, Artificial Sequence
  ENSG00000177034_1 (sequence is synthesized)
ggtgcacccttgaaagtcaatgtgatagataacacctggagaggttcaagaggcgatgtaccaattttgacaactgaagacgacatggtttctcagccagcaaaaatactaaacttttta

SEQ ID NO: 615633 - DNA, 120 bp, Artificial Sequence
  ENSG00000177034_2 (sequence is synthesized)
agaaaacagaaatataatgctgattatgaactctcagcaaaacaaggggcagatacattggcttatattgctctcctcgaagagaagcttctccctgcagtgcttcacacattctgggtt

SEQ ID NO: 615634 - DNA, 120 bp, Artificial Sequence
  ENSG00000177034_3 (sequence is synthesized)
gagagtgacaattactttactgtgacaaagccatggtttgcttcacaaattccttttcctttgagtttgatcctgcctggaagaatgtctaagggagcactgaataggattctcctgacc

SEQ ID NO: 615635 - DNA, 120 bp, Artificial Sequence
  ENSG00000177034_4 (sequence is synthesized)
agaggacagcctcccctctaccacctccgagaagtggaagcacagatatacagagatgccaaggagtgcctaaatcttctatcaaacagattgggaacatctcagtttttctttggagat

SEQ ID NO: 615636 - DNA, 120 bp, Artificial Sequence
  ENSG00000177034_5 (sequence is synthesized)
acgccttctaccttggatgcctatgtttttggttttcttgcacctctttacaaagtacggtttcctaaagttcagctacaagaacatctgaaacagctctccaacctctgtcgcttttgt

SEQ ID NO: 615637 - DNA, 120 bp, Artificial Sequence
  ENSG00000177034_6 (sequence is synthesized)
gatgacatcctgagcagttattttaggcttagtcttggagatggatgacaatcttcgccaaagccctcagcttcctcctcggaaactgccaacacttaaattgactccagcagaagaaga

SEQ ID NO: 615638 - DNA, 120 bp, Artificial Sequence
  ENSG00000177034_7 (sequence is synthesized)
aaataattccttccaacggctttcgccctgagagtagtcatggtttgtggccaaagtcaaacgattgttgcagtaatctcttacaccaagtgtgtgaaggcaaaaagaagataccataat

SEQ ID NO: 615639 - DNA, 120 bp, Artificial Sequence
  ENSG00000177034_8 (sequence is synthesized)
aggtattaaggaagactctaaaccaaaaggaactttctatgccatctatttttactattattattaggaagcttgtattctagcttggcactgcatttttaataacaaagagaatgctaa

SEQ ID NO: 615640 - DNA, 120 bp, Artificial Sequence
  ENSG00000177034_9 (sequence is synthesized)
atgaacttggttgggggggcggggaagaaaaacacatcgtactgtatacaaagaactgccttaatcatggcagatttttgcctttggttcacatgttgctgaccaaaggctacaattctg

SEQ ID NO: 615641 - DNA, 120 bp, Artificial Sequence
  ENSG00000177034_10 (sequence is synthesized)
ttctgaatgtgcactcctaatttatttgatttaatttattcaatttattaacttagttttcttagaccaggctgaatacctaatatgtggctttttggctgaggctttttacttctgttt

SEQ ID NO: 615642 - DNA, 120 bp, Artificial Sequence
  ENSG00000177034_11 (sequence is synthesized)
agaaatttgatgcctattttaggaaccagaaaaagataaattgcttcagtagaagagaccatatttaactttaaaaagtgaggaggaatgtgctttttaattatgctctcataagtctaa

SEQ ID NO: 615643 - DNA, 120 bp, Artificial Sequence
  ENSG00000177034_12 (sequence is synthesized)
tcttttgggggtttagtagcacatagataaatattaaaggtggttacatataataacatctgataatactcatttcagtataacattggtctttgctgatgtgttcgatataggttagga

SEQ ID NO: 615644 - DNA, 120 bp, Artificial Sequence
  ENSG00000177034_13 (sequence is synthesized)
agagttcttttagtttacttgggcaaatgtggcagttttagacctatgtctttgtagtacatcttcagttgtctttcttgtattaattccagaagaagtgaatgtactggttatcgttac

SEQ ID NO: 615645 - DNA, 120 bp, Artificial Sequence
  ENSG00000177034_14 (sequence is synthesized)
tatgctaggctgtaaaattcttactgaaattgcccacttgttagacactactcaggaggagcccatggccagggtagtagaaatactgtgcatctggtccaagttttctatgcttggctc

SEQ ID NO: 615646 - DNA, 120 bp, Artificial Sequence
  ENSG00000177034_15 (sequence is synthesized)
atattctttcataagatgcatattctttcataagatgcatatcatgtagtcaaaagctttctgacaaccaattatttttcatatgtttcacttatagtcgaagaatacaaaggaacaatc

SEQ ID NO: 615647 - DNA, 120 bp, Artificial Sequence
  ENSG00000177034_16 (sequence is synthesized)
agaaatagcagcttttaatgaatattttctatttattggttgctgaactgttaagggatttgctgtgtggtaattttacttataatagaaacttgcttattttagtggttgaggtgcttc

SEQ ID NO: 615648 - DNA, 120 bp, Artificial Sequence
  ENSG00000177034_17 (sequence is synthesized)
tgttgtcctaaaactacttctgaggtttttaaaatgtagaaccatgtttttgattagtgtcttaaaagattactgtggtgctcagcaaatcttatcaagtcgtgcaggaacccatatgtt

SEQ ID NO: 615649 - DNA, 120 bp, Artificial Sequence
  ENSG00000177034_18 (sequence is synthesized)
aagaaaatgagctttgtagtcaaaagactcatctaatttgagctgagtggagctcagctgtgtttgacccacatcctcccaatttgttctgtatttaggtagttatttatacaagagtct

SEQ ID NO: 615650 - DNA, 120 bp, Artificial Sequence
  ENSG00000177034_19 (sequence is synthesized)
ctcatgagttgcacattacttctacaacagggtgtgtgtgtgtgtgtttgtgtgtgtcagtcatcttcaaaggcagattattagattccagcaatctgaaatctattattccagcagtct

SEQ ID NO: 615651 - DNA, 120 bp, Artificial Sequence
  ENSG00000177034_20 (sequence is synthesized)
gaaacctaaatatgttatattggaaatcatgactgtgagactttattgtcctctaggatggatgtatattggagaagggtggttagcacattcatcagacatctgcttatgctgtggtca

SEQ ID NO: 615652 - DNA, 120 bp, Artificial Sequence
  ENSG00000177034_21 (sequence is synthesized)
aggccagtcatttttaatttatatcagatttatatcagaccctccaaaaagtatttgaaatatattacagttataacgtacaagtacattacatgtatattacaagtatattacatgtaa

SEQ ID NO: 615653 - DNA, 120 bp, Artificial Sequence
  ENSG00000177034_22 (sequence is synthesized)
taaagaattaaaaattttaaaaatttaaattaaaaaaattaaaaatttatagaaccatatcaacactgacagattctaaaattaagtagtaaatttaactccaagtttctccatgggcaa

SEQ ID NO: 615654 - DNA, 120 bp, Artificial Sequence
  ENSG00000177034_23 (sequence is synthesized)
atttaactccaagtttctccatgggcaaagtcaaaagataatgctaggttatgtcaatttttcttttcaacaaaactgctaatgtctattaggaagaaaaatgtgtttaaagttttacag

SEQ ID NO: 615655 - DNA, 120 bp, Artificial Sequence
  ENSG00000177034_24 (sequence is synthesized)
gaacgtggagctcatgttcttctgatatgtagactttgataaagaagcatactgtaatgttttatgaactgaaattttaatcaaaagaggtcattttagaataacaagtattattctttt

SEQ ID NO: 615656 - DNA, 120 bp, Artificial Sequence
  ENSG00000177034_25 (sequence is synthesized)
ttagtagagggaatgactgtcaatatgatttatttgtttttgtgtcatccctactttgaactgctgttagccttacattctcactatagtccataatgcttccagatcaccttttctaag

SEQ ID NO: 615657 - DNA, 120 bp, Artificial Sequence
  ENSG00000177034_26 (sequence is synthesized)
atgcaacatgtgagtttagtgagagtttatatgttgggttacttagttgagctatttatgtataagtaaatgagatgacaggaagctgtaactgagcacaaagtactttagggagcagcc

SEQ ID NO: 615658 - DNA, 67 bp, Artificial Sequence
  ENSG00000177034_27 (sequence is synthesized)
ggaagctgtaactgagcacaaagtactttagggagcagccacacatacaggaagctcttagaaaaga

SEQ ID NO: 615659 - DNA, 67 bp, Artificial Sequence
  ENSG00000177034_28 (sequence is synthesized)
gaacattttgtcaatctgaacagagcacagaacattttttcagactgaacagactgttggaccagcc

SEQ ID NO: 615660 - DNA, 120 bp, Artificial Sequence
  ENSG00000177034_29 (sequence is synthesized)
cagaacattttttcagactgaacagactgttggaccagcctgtcatgatatgttttagataaagtttgagtgagttcattgggataaatggtccacaatcttaaacagaatactgtgagc

SEQ ID NO: 615661 - DNA, 120 bp, Artificial Sequence
  ENSG00000177034_30 (sequence is synthesized)
caatgccttttggaagtaatggtggaggataatatgattaaagggaacatgcttgtgtttatttttgttggtagtatatgattagaaaaactagataattcccataagatgaagatcttc

SEQ ID NO: 615662 - DNA, 120 bp, Artificial Sequence
  ENSG00000177034_31 (sequence is synthesized)
catgaacaaactaccatcaatcatccatcagattgattttttttttttttttaagtaacactaaagaagctgtaaagaacattgaaggtggtcattccttcaaaactgtgttttgaccac

SEQ ID NO: 615663 - DNA, 120 bp, Artificial Sequence
  ENSG00000177034_32 (sequence is synthesized)
acaaggtgggcattaacaaaccaaatttcaacttaagtttgtttgtattatattgggggtgctgcgagactggagattttataaaagcaagcatttttatttccatttataatttctatt

SEQ ID NO: 615664 - DNA, 120 bp, Artificial Sequence
  ENSG00000177034_33 (sequence is synthesized)
caatattgctagatatattaacatgaaggaatggggaagcttatttcaatcaaagctaaaattttcagaagtctgtaaaaatggaaaaacaccattgaaagaggcagaaacaggtaaggg

SEQ ID NO: 615665 - DNA, 120 bp, Artificial Sequence
  ENSG00000177034_34 (sequence is synthesized)
ggatagtatcttagaaaacctgttggttaaggcagctgcatgtgataaaagtggtacttgaacttggtagtgtttccttagaacctcctccaaaaatatgcatttaccaggcttgttaca

SEQ ID NO: 615666 - DNA, 120 bp, Artificial Sequence
  ENSG00000177034_35 (sequence is synthesized)
attttttgacagtttttcatcaactgtcaaaaacttcaacccttttaaaacctagatataaatgcttacatgtaaagaaaggaagctaagcagtgggtacctgggatctctctgaactat

SEQ ID NO: 615667 - DNA, 120 bp, Artificial Sequence
  ENSG00000177034_36 (sequence is synthesized)
ctgggatctctctgaactatttttataacttcttgtgagtcttaagtatttcaaaataaaagtggttttaaagtaaattcatagattaaatgtatcattatctatatataaaccatgatt

SEQ ID NO: 615668 - DNA, 120 bp, Artificial Sequence
  ENSG00000177034_37 (sequence is synthesized)
agttaaatagaatttttatttcattcttaagaaaaactcatgtttgtaacaaatgatatctaaagatctattttgccttaccagaaaagaaaaaaaaaaccctaaaaccaaaaactcctt

SEQ ID NO: 615669 - DNA, 120 bp, Artificial Sequence
  ENSG00000177034_38 (sequence is synthesized)
ttccctaggaagtcaaaaatgctgtgatttaaaatatctaattatatttttttctttctatggtagtggggtttacttctgaggataaaatattttgaaaaagctctgtcccttgacatg

SEQ ID NO: 615670 - DNA, 120 bp, Artificial Sequence
  ENSG00000177034_39 (sequence is synthesized)
gtagttctcccgtgccttgtacttgttctctctccatatgcacagtgtgacaagatgctcacctttaatgaagaaggtgtagcttttcgttttaagctgtaattgtctttgtcttgattt

SEQ ID NO: 615671 - DNA, 120 bp, Artificial Sequence
  ENSG00000177034_40 (sequence is synthesized)
ggctatttttataactgaaatcctgagcaacagagataatttgggtggtaatgatcatcttttgtatatgttcttgatgttaagaaatattttttgctgccattcagctttgtggaattt

SEQ ID NO: 615672 - DNA, 120 bp, Artificial Sequence
  ENSG00000177034_41 (sequence is synthesized)
atgtttacttttcaatattttcatatttcttaaccagattttaaagaaatttgttgttagttacgtgaaatcaaaggtcaggtcagtaagcccattatcctcaaacttgaagtttcgttg

SEQ ID NO: 615673 - DNA, 120 bp, Artificial Sequence
  ENSG00000177034_42 (sequence is synthesized)
gatgttcaaaatgctaatttttgcagagatataaggataaattagttttagtttgtgttcttaagggtttgcaaaataatttggctcccaaactcttgttggggtgtagtgtttgctagg

SEQ ID NO: 615674 - DNA, 120 bp, Artificial Sequence
  ENSG00000177034_43 (sequence is synthesized)
agcccaggatacctgccctggacttaaattgtgattgaagtggagaggtactctaggaatttaaaaagacacaaaattatttttttccagactagtgtgccatggatttctgataagaat

SEQ ID NO: 615675 - DNA, 120 bp, Artificial Sequence
  ENSG00000177034_44 (sequence is synthesized)
taacattcttgaacaaaggtatcagaaagggtaactcgagttgaaggtttgtgaatagaaggggaaatgtgatagaagattattcagaacaaaataagtagacaaaataacaaaagacag

SEQ ID NO: 615676 - DNA, 120 bp, Artificial Sequence
  ENSG00000177034_45 (sequence is synthesized)
gaaaataagtctctttgtatccttattaatcatttgaaattatgctataatattttttaaaactcacctgtttggttctgggtgaagcagttcctgaaggagtgttttgtcagaatatat

SEQ ID NO: 615677 - DNA, 120 bp, Artificial Sequence
  ENSG00000177034_46 (sequence is synthesized)
tgttaggagaatagagggttctgtggccaagtaagtttgggaaatagtgggttagacaaagttgagttactgttggcctttcagacctttgatacgctaatgtgcattttaaatctccaa

SEQ ID NO: 615678 - DNA, 120 bp, Artificial Sequence
  ENSG00000177034_47 (sequence is synthesized)
atctccaagaagcacctctattttatacatcatttccctaatttattttaatatggatttcttgtttttgttttcttgagacggagtcttggtcttgtcacccaggctggagtgcagtgg

SEQ ID NO: 615679 - DNA, 120 bp, Artificial Sequence
  ENSG00000177034_48 (sequence is synthesized)
tggggtttcaccatgttgaccaggctgattttgaactcctgacctcaggtgattctgcccgcctcaccctcccacagtgctggaattataggtatgagccactgtccccggccagatttt

SEQ ID NO: 615680 - DNA, 120 bp, Artificial Sequence
  ENSG00000177034_49 (sequence is synthesized)
tttaaaagtaggtatcttgtgggatttatgttctgagagatacacctaaggaaatgctgccctacagtgtttttgctagttcatactcattacaaaggtttcttgttgttgggtgcccct

SEQ ID NO: 615681 - DNA, 120 bp, Artificial Sequence
  ENSG00000177034_50 (sequence is synthesized)
ctagccagtggtagtaaaatgggaagagacaggtcaagactcccttggaccatggcattgagagagggatggctgtcggcatagatatgttggttatttaggcatttgtgagggaggccc

SEQ ID NO: 615682 - DNA, 120 bp, Artificial Sequence
  ENSG00000177034_51 (sequence is synthesized)
ctggctcttccagcctgtttccttaggatcccagttggccgggaacagctgtacaagggtctgctgaactggtggtttcagcagactacccagttcctaagcatccatgagacagaggga

SEQ ID NO: 615683 - DNA, 120 bp, Artificial Sequence
  ENSG00000177034_52 (sequence is synthesized)
accaacttgtatttccagaacaattttccaaaccttttctggctgtactttaaaagtgccaaaaaggcaatgggtgtttatgacactaaagtcacatacaagctagtatgatacatacat

SEQ ID NO: 615684 - DNA, 120 bp, Artificial Sequence
  ENSG00000177034_53 (sequence is synthesized)
catagaaagcttatagttgctcagtgacaaagcaaaggaagtttaatattttccagttttgttcattaccgaagacagtctacggttcatagttttcactaaattctaagcagattctat

SEQ ID NO: 615685 - DNA, 120 bp, Artificial Sequence
  ENSG00000177034_54 (sequence is synthesized)
atcctaaaacatttaaacctcactaggcctgcaattttgagagggttagctaaatatgtttggtatcacttcagagtctaaaaccagattactaatcgtgtgtaaggaggcattttgtgt

SEQ ID NO: 615686 - DNA, 120 bp, Artificial Sequence
  ENSG00000177034_55 (sequence is synthesized)
gtctttgcaatgtatacaattggattatttggaacaccattttgaatgtgtatttgagagaaagctcgcctgtgggttttgagttgtggtgtaatggtgaacatgtagccacgtgaaagg

SEQ ID NO: 615687 - DNA, 120 bp, Artificial Sequence
  ENSG00000177034_56 (sequence is synthesized)
ccgttggatctttgttctgattcttcagtcgtcttcttgcaaattcagagaaatgtcttttaatcatttcgtttacatatcccagatccttggaaatcatgaaaaataacttgccagagt

SEQ ID NO: 615688 - DNA, 120 bp, Artificial Sequence
  ENSG00000177034_57 (sequence is synthesized)
ttgcatcagccctcagtaagtcatgaaccatagagaaggtcatggggccatttattctttggaccactggctacttctgaagttctggcttccttctctctaggaggagtcgtgtattca

SEQ ID NO: 615689 - DNA, 120 bp, Artificial Sequence
  ENSG00000177034_58 (sequence is synthesized)
agcttttaagttaaatgcataaaaatgagttttacttctcttctgacttgatttttaattttatgaaatgggaaataatgtttttccatttttctgttcattttgaagtgggaatttgag

SEQ ID NO: 615690 - DNA, 120 bp, Artificial Sequence
  ENSG00000177034_59 (sequence is synthesized)
gtgtttgtaatgtcatgttactgttctgaaagattgacagtaaagaagacaagaaatatatgtatgtagtatgcatattagttttgtcccaccaagcctatctttgaatggcaaacattt

SEQ ID NO: 615691 - DNA, 120 bp, Artificial Sequence
  ENSG00000177034_60 (sequence is synthesized)
taaaaacatctgttctagttgcacaactactctagcttctttataaagtaaacaatcttaaagtaagcaatgttggccataatttcaatattctagccttgccgagtgtgaatatatttt

SEQ ID NO: 615692 - DNA, 120 bp, Artificial Sequence
  ENSG00000177034_61 (sequence is synthesized)
actcagagactatgtacaaatacactaaagtggtgatggtgatcaatattgtaaagaatttattctgataaatgagaaactggatataatgtcaaaatagctattttctcaataaaaatc

SEQ ID NO: 615693 - DNA, 120 bp, Artificial Sequence
  ENSG00000177034_62 (sequence is synthesized)
gcgcaagatggcggcccccttggaactcagttgctggggaggcggctggggactcccatcggttcacagcgagtccctggtggtgatggcgatgtaccaattttgacaactgaagacgac

SEQ ID NO: 615694 - DNA, 120 bp, Artificial Sequence
  ENSG00000177042_0 (sequence is synthesized)
aggcggctgtcgtccccggccgacagggctggacggctctaggcagattctcgccggcggccggcgcaattctgcctctcagagagagcttagtgccgcgggtttcgcccgttcccgccg

SEQ ID NO: 615695 - DNA, 120 bp, Artificial Sequence
  ENSG00000177042_1 (sequence is synthesized)
ccggcggaagccgagtcagcccgaggccgagccgagacgagccgaatgtccccgaggccgaatgctcccgaacgtcggttctccacctcttcccttccgaaagtgcccgagcggtgccgg

SEQ ID NO: 615696 - DNA, 120 bp, Artificial Sequence
  ENSG00000177042_2 (sequence is synthesized)
acggactaatcgggcctcggccgtggctcggacgtccgctcccgaaacgcggcgcggtcgggccccttcgtcaggagacgcgaaaatggccgaaggagcgcgagcgcgcgggccgagagg

SEQ ID NO: 615697 - DNA, 120 bp, Artificial Sequence
  ENSG00000177042_3 (sequence is synthesized)
ctgccgggatcgcgacggaccggcgggcggggcgggtaagatggcggccccgcggcgagggagaggatcctccacagtgctctcttcagttccccttcaaatgctgttttatctcagcgg

SEQ ID NO: 615698 - DNA, 120 bp, Artificial Sequence
  ENSG00000177042_4 (sequence is synthesized)
tgtatttcctcgccacgctcctgatgatcacgtataaaagtcaggtgttcagctatcctcaccgctacctggtcctcgatcttgctctgctgtttctgatggggattctagaagcagttc

SEQ ID NO: 615699 - DNA, 120 bp, Artificial Sequence
  ENSG00000177042_5 (sequence is synthesized)
ggttatacctgggcaccaggggcaacctgacagaggctgagaggccgctggccgccagcctggccctcacggctggcaccgccctcctctctgcccacttcctgctttggcaggccctag

SEQ ID NO: 615700 - DNA, 120 bp, Artificial Sequence
  ENSG00000177042_6 (sequence is synthesized)
tgttgtgggcggactgggccctcagcgccacgctcctggcccttcacggcctggaggccgtcctgcaggtggttgccatcgcggccttcaccaggtagctacggacacccgggatacccc

SEQ ID NO: 615701 - DNA, 120 bp, Artificial Sequence
  ENSG00000177042_7 (sequence is synthesized)
acactggggccctcctcctgggcctgaccagtcccccagctgtcacctccccattcctggacaggaagggcacttttcctagtgactggccatagatggttttggatggttccatctgtt

SEQ ID NO: 615702 - DNA, 120 bp, Artificial Sequence
  ENSG00000177042_8 (sequence is synthesized)
ctggcaggagtgggagcaggagccagggcagaacaaactgctggaggccctggtgttgggaacagctgcggggagggtagggaccagacagaactgccttcaagatgagtcccaggagcg

SEQ ID NO: 615703 - DNA, 120 bp, Artificial Sequence
  ENSG00000177042_9 (sequence is synthesized)
gcatcccccatcaccccctagttccccaatggtcctaatttgtgttctgagatcccagtttactccgtggccaggccccacctgtgtttccaagtcgggctggagacgcaggatggggta

SEQ ID NO: 615704 - DNA, 120 bp, Artificial Sequence
  ENSG00000177042_10 (sequence is synthesized)
ggccttgtgctctgagcaaccccagctctgcctcacaggcaggcaggcccggtgcaagagtggactctgggttcctaaagcaataaatgcaaacaagccaacagctctgctgcctagcaa

SEQ ID NO: 615705 - DNA, 120 bp, Artificial Sequence
  ENSG00000177042_11 (sequence is synthesized)
tttccatcttagccacacttctcccttcaggggcttcggaggagaggtcagggctaaggccggggatgagactgcaggagagagagcagcggagggccacattcggagcctccgtccact

SEQ ID NO: 615706 - DNA, 120 bp, Artificial Sequence
  ENSG00000177042_12 (sequence is synthesized)
ccagttttatcagcttttgccttttgcacggagtgctaaacaaattctagctctgtgtttttttcccattcccagatttactatcagttctccttaaaaagtatctaagctgttacagta

SEQ ID NO: 615707 - DNA, 120 bp, Artificial Sequence
  ENSG00000177042_13 (sequence is synthesized)
gctttcccttcacttgattctattgtgtgttttctatgtttggaataattacacccaaatatctagatattttctcttcaccgcattttgtaaataaagagatgtgtatgcctccctgaa

SEQ ID NO: 615708 - DNA, 120 bp, Artificial Sequence
  ENSG00000177042_14 (sequence is synthesized)
acggaccggcgggcggggcgggtaagatggcggccccgcggcgagggagaggatcctccacagtggtatcctgctgcgtgcccctccaggacagcacccagaggcccgaattgctgctgc

SEQ ID NO: 615709 - DNA, 120 bp, Artificial Sequence
  ENSG00000177042_15 (sequence is synthesized)
acagagagcactcggcctcaccccacgttttccctaagttctgtctagtaattccactttggagaggggggtgttccttgacagatttagagagttgatgtaacttcctcggatcagttc

SEQ ID NO: 615710 - DNA, 120 bp, Artificial Sequence
  ENSG00000177042_16 (sequence is synthesized)
tgctggctccatcccctacctgctcagccctgcacaaagtggctaagcacgccacactgccggctcccaaggcgatggccacctgcctctgtctcggccgctagtggcaggaagatggaa

SEQ ID NO: 615711 - DNA, 120 bp, Artificial Sequence
  ENSG00000177042_17 (sequence is synthesized)
atccctcactttgtccctagattcattttattttatttttgtttgtttatgtttttttaaggacagagccttcctctcacccaggctggagtgtggcaatcacagctcactgcagcctca

SEQ ID NO: 615712 - DNA, 120 bp, Artificial Sequence
  ENSG00000177042_18 (sequence is synthesized)
gcctcctgaagctctggcatcaggcgggagccactgtgcctggccccatagactcatgttagcataaacaaataggaaatgtacacagctcaggaaatggctactagatacttaagtccc

SEQ ID NO: 615713 - DNA, 79 bp, Artificial Sequence
  ENSG00000177042_19 (sequence is synthesized)
gtacacagctcaggaaatggctactagatacttaagtcccccaaacagaaatatatttcctctgaagaaactgaaaaaa

SEQ ID NO: 615714 - DNA, 82 bp, Artificial Sequence
  ENSG00000177042_20 (sequence is synthesized)
tgccactgcacagtgtccagtgaaaatgacaaagttattttttctctcttaactcataactggggccaaaggcagggtgaca

SEQ ID NO: 615715 - DNA, 120 bp, Artificial Sequence
  ENSG00000177042_21 (sequence is synthesized)
taactcataactggggccaaaggcagggtgacatcactggggatgccagtgtgtggaggctgtcccctgaccagtcctgtccacagtcaggagggcaggggctgcagtgcacagaccgca

SEQ ID NO: 615716 - DNA, 120 bp, Artificial Sequence
  ENSG00000177042_22 (sequence is synthesized)
ttgttgtggcatggaggggggtcccacaaaggccttgtcagctcatgggaccacattggcagccagcatagtgacagaagcctcagataggcagtgagccattgccaagactccatggtc

SEQ ID NO: 615717 - DNA, 120 bp, Artificial Sequence
  ENSG00000177042_23 (sequence is synthesized)
ccttggtgtctgtggccaccaaacagatgacagaaccagcccctcttgttcagccacctgggaggctgctcccaagcctgttgagcttgaggatccttaaccactcaccagctctcttca

SEQ ID NO: 615718 - DNA, 120 bp, Artificial Sequence
  ENSG00000177042_24 (sequence is synthesized)
tgggcacacctgccatctggaggacccagcccacaaaccatgcagaccagggaaggaccccctccctgaagctggagacctgttgccttcatggttaatggatcctgatacctccagtct

SEQ ID NO: 615719 - DNA, 120 bp, Artificial Sequence
  ENSG00000177042_25 (sequence is synthesized)
cagcgagcacacaaaggcagtggtcacctgttccacagggaacgccatggctccaggtgacccggagtggatggggcccgagaggccagcctggactgtctcctgagggcaggctccgca

SEQ ID NO: 615720 - DNA, 120 bp, Artificial Sequence
  ENSG00000177042_26 (sequence is synthesized)
ctcaaaatcgtgttgacaggcacccgtttaggagtggagagggaccccaccccccagctgtcctctccagcgcctgtttcccacttggccactcccagctctgcctccaggaagggtgag

SEQ ID NO: 615721 - DNA, 120 bp, Artificial Sequence
  ENSG00000177042_27 (sequence is synthesized)
ggcacgggtgcaccgaggggttggcgtgtgtgaccctgagctctgggtcagggcaagctcatgcatggagcaggatcacggcaggttcctggagatcaaacggcaaaggctgtaaaccag

SEQ ID NO: 615722 - DNA, 120 bp, Artificial Sequence
  ENSG00000177042_28 (sequence is synthesized)
cctttcaagagtaattattttatagtgtggttctcagagacattttttatccaaactgcttacccagttgctttgcaggctcaccttacagtgtcattaagtattaatcaagaagttttg

SEQ ID NO: 615723 - DNA, 120 bp, Artificial Sequence
  ENSG00000177042_29 (sequence is synthesized)
tcccagagacaaataacactgggggcatcgttgggagagactctgtgtttggaagcatgtcttgtagaagccactgggtaatggcactgagatcagaaaagcccagcccaccaccacatc

SEQ ID NO: 615724 - DNA, 120 bp, Artificial Sequence
  ENSG00000177042_30 (sequence is synthesized)
tggagctccggaatattcaccagcacccctttccttccccttgcccttagctgtctgaggagagagccctggagagttctgccaggtcccaaaaggcagcagagtctggaggggtgggag

SEQ ID NO: 615725 - DNA, 120 bp, Artificial Sequence
  ENSG00000177045_0 (sequence is synthesized)
gcagaggaccctggagacggaggcgtgcagaagctcagtctcggggcggaggcttcgcgcccttagtcctcctggacggcccgttaccttctgcgttgtcccgatggggaaactgaggcc

SEQ ID NO: 615726 - DNA, 120 bp, Artificial Sequence
  ENSG00000177045_1 (sequence is synthesized)
ctgagccagaagcacacgctggggggaggcagaaagcgcggccagaggcggagggaaaacaaagggagaatcacagacagacgggagggggacggacacacacaaggggacagagacccg

SEQ ID NO: 615727 - DNA, 120 bp, Artificial Sequence
  ENSG00000177045_2 (sequence is synthesized)
agtggagagctggatctcgccttcccggcgtggggcgcagggtcggccagaaagaagatcgagaagagcggggagtgggggcgaaaaggggggacaggtgggggaggaggctggggaaag

SEQ ID NO: 615728 - DNA, 120 bp, Artificial Sequence
  ENSG00000177045_3 (sequence is synthesized)
cccgagggaggaagagagggagggaggaacttcccaaagttgcaaaacatggctaccttgcctgcggagccgagcgcggggccggcggctgggggggaggcggtggcggcggcggcggcg

SEQ ID NO: 615729 - DNA, 120 bp, Artificial Sequence
  ENSG00000177045_4 (sequence is synthesized)
ggcgaccgaagaggaggaggaggaagcgcgccagctcttgcagactttgcaggcggccgagggtgaggcggcggcggcggccggggccggggcgggcgcagcggctgcgggagctgaggg

SEQ ID NO: 615730 - DNA, 120 bp, Artificial Sequence
  ENSG00000177045_5 (sequence is synthesized)
gctgagggcccgggatccccgggcgtccccgggtcgccccccgaggccgcttccgaaccgcccacgggcctccgcttctcgcccgagcaggtggcgtgcgtctgcgaggcgctgctccag

SEQ ID NO: 615731 - DNA, 120 bp, Artificial Sequence
  ENSG00000177045_6 (sequence is synthesized)
ggccgcttgagccgcttcctgggcgcactgcccccggccgagcgcctacgtggcagcgacccggtgttgcgcgcgcgggccctggtggccttccagcggggcgagtacgccgagctctac

SEQ ID NO: 615732 - DNA, 120 bp, Artificial Sequence
  ENSG00000177045_7 (sequence is synthesized)
cggctactcgagagccgccccttccccgccgcccaccacgccttcctgcaggacctctacctgcgcgcgcgctaccatgaggccgagcgggcccgcggccgcgcgcttggcgcagtggac

SEQ ID NO: 615733 - DNA, 120 bp, Artificial Sequence
  ENSG00000177045_8 (sequence is synthesized)
aagtatcgactgcgcaagaagttcccgctgcccaagaccatctgggacggcgaggagacagtctactgcttcaaggagcgctcccgcgcagcgctcaaggcctgctaccgcggcaaccgc

SEQ ID NO: 615734 - DNA, 120 bp, Artificial Sequence
  ENSG00000177045_9 (sequence is synthesized)
taccccacgccggacgagaagcgccgcctggccacactcaccggcctgtcgctcacgcaggtcagcaactggttcaagaaccggcgacagcgcgaccggaccggggccggaggcggcgcg

SEQ ID NO: 615735 - DNA, 120 bp, Artificial Sequence
  ENSG00000177045_10 (sequence is synthesized)
ccctgcaagagcgagtctgatgggaatcccacgactgaggacgagtccagccgaagtcctgaggacctggagagaggggcggccccagtgtccgccgaggccgctgcccagggctccata

SEQ ID NO: 615736 - DNA, 120 bp, Artificial Sequence
  ENSG00000177045_11 (sequence is synthesized)
ttcctggcagggaccggccctcccgcgccttgcccggcttcctcctccatcctggtgaacgggagcttcctggcagccagcggctccccagcagtgctcctcaacgggggccccgtcatc

SEQ ID NO: 615737 - DNA, 120 bp, Artificial Sequence
  ENSG00000177045_12 (sequence is synthesized)
atcaacggcctggccctgggcgaggcctccagcctgggcccgctgctgctcactgggggcgggggtgcccctccaccgcagcccagccctcagggggccagcgagaccaagacctctctg

SEQ ID NO: 615738 - DNA, 120 bp, Artificial Sequence
  ENSG00000177045_13 (sequence is synthesized)
ggaggtcctggggcccctggcccaagtggtgcctggccccccgacggctgccacctttcctctgcccccggggccagtgcctgctgtggctgccccacaagtggtaccgctctccccacc

SEQ ID NO: 615739 - DNA, 120 bp, Artificial Sequence
  ENSG00000177045_14 (sequence is synthesized)
cccggggtatcccacgggcctgagccccacctccccactattgaacctgccccaggtagtacccacctcacaggtggtgaccctgccccaggctgtggggcccctgcagctgttggcagc

SEQ ID NO: 615740 - DNA, 120 bp, Artificial Sequence
  ENSG00000177045_15 (sequence is synthesized)
cgggccaggcagccctgtgaaggtggcagctgcagcaggccctgccaatgtgcacctcatcaactccggggtgggcgtgactgccctgcagctgccttcggccactgccccaggaaactt

SEQ ID NO: 615741 - DNA, 120 bp, Artificial Sequence
  ENSG00000177045_16 (sequence is synthesized)
cctcctggccaaccctgtgtctggcagccccatcgtgacgggtgtggccctgcagcagggcaagatcatcctcaccgccaccttccccaccagcatgctcgtctcccaggtcctgccgcc

SEQ ID NO: 615742 - DNA, 120 bp, Artificial Sequence
  ENSG00000177045_17 (sequence is synthesized)
agcccccggcctggccctgccactgaagccagagacggccatctccgtgcctgagggaggcctcccggtggcccccagccctgctctcccagaggctcacgccctaggcaccctttctgc

SEQ ID NO: 615743 - DNA, 120 bp, Artificial Sequence
  ENSG00000177045_18 (sequence is synthesized)
acagcagccaccccccgccgctgccaccacctccagcaccagcctgcccttctcccctgactcccctggcctcctgcccaacttcccggcgcccccaccagaggggctgatgttgtcacc

SEQ ID NO: 615744 - DNA, 120 bp, Artificial Sequence
  ENSG00000177045_19 (sequence is synthesized)
cgcggccgtgcctgtctggtcagcagggctggaactaagcgcaggaacagaggggctgctggaagcggaaaaggggctggggacacaggccccccacaccgtgctgaggctgccagaccc

SEQ ID NO: 615745 - DNA, 120 bp, Artificial Sequence
  ENSG00000177045_20 (sequence is synthesized)
cgaccctgaggggctgctcctgggggccaccgcagggggtgaggttgacgaggggttggaagctgaggccaaggttctgacccagctccagtcggtgcctgtggaggagcccttggaact

SEQ ID NO: 615746 - DNA, 120 bp, Artificial Sequence
  ENSG00000177045_21 (sequence is synthesized)
gtgacccagtgtggccccgtggcctctcccgacattggtgctgaagacgcagggacaggaatgggaggggggagccccagaaatgcggttgctgaagaccccagtcaccacatccttctg

SEQ ID NO: 615747 - DNA, 120 bp, Artificial Sequence
  ENSG00000177045_22 (sequence is synthesized)
cctgggtggcctctccaagccctggtggtgctgggggttgtatccccggccacctcctgtccaggtctccatccccctttggatgggaggcctctctgttacagccctccccatgctgtg

SEQ ID NO: 615748 - DNA, 120 bp, Artificial Sequence
  ENSG00000177045_23 (sequence is synthesized)
ccctgccatatacgtgggggactcagggtcctgactcaggggccctgccccctccacttggtactagctgtaagcggaacaccctgccccagggccggacttccagcccccagagccctc

SEQ ID NO: 615749 - DNA, 120 bp, Artificial Sequence
  ENSG00000177045_24 (sequence is synthesized)
tccctgtcactccctgaaacactattaatagctctgccgatagctggtgttgtcacaactgcctggaatccgaaggtggaggacaggcagccccgcgcccctgagactggagaccctccc

SEQ ID NO: 615750 - DNA, 120 bp, Artificial Sequence
  ENSG00000177045_25 (sequence is synthesized)
cagtgtggcatttcctgccaggggcggggggtggggcagctgtggggagacgggggtcttccttcaccagctcccctcgactcaagcccttgtcctcattatccggcccagaccaaagat

SEQ ID NO: 615751 - DNA, 120 bp, Artificial Sequence
  ENSG00000177045_26 (sequence is synthesized)
tccctcatccctgggggcagccctgccgctgtgtctcctttgtatcctaaatctttatttttctaggacatgttatgcctccattttcaattaaaataaagttatcggattacaccacca

SEQ ID NO: 615752 - DNA, 120 bp, Artificial Sequence
  ENSG00000177045_27 (sequence is synthesized)
caggtacccccatctccctccctcaggcctaggtgagagccggggaggggtgcagtcatctcggagagggaggggctgtccctgggctcctggagggcatctcatccctggcaagtccca

SEQ ID NO: 615753 - DNA, 120 bp, Artificial Sequence
  ENSG00000177045_28 (sequence is synthesized)
gtgccccaaggcccaccacaaggctccctccgcccgccctccagctgcacagtctccacttctctctggcttggcctgctctcctggctctcacctgcgctcggtccctctctccccaca

SEQ ID NO: 615754 - DNA, 120 bp, Artificial Sequence
  ENSG00000177047_0 (sequence is synthesized)
gatctggtaaacctgaagcaaatatagaaacctatagggcctgacttcctacataaagtaaggagggtaaaaatggaggctagaataagggttaaaattttgcttctagaacagagaaaa

SEQ ID NO: 615755 - DNA, 120 bp, Artificial Sequence
  ENSG00000177047_1 (sequence is synthesized)
tttacatgcatatagtatatacacttatgactttagtacccagacgtttttcatttgattaagcattcatttgtattgacacagctgaagtttactggagtttagctgaagtctaatgca

SEQ ID NO: 615756 - DNA, 120 bp, Artificial Sequence
  ENSG00000177047_2 (sequence is synthesized)
aaattaatagattgttgtcatcctcttaaggtcatagggagaacacacaaatgaaaacagtaaaagaaactgaaagtacagagaaatgttcagaaaatgaaaaccatgtgtttcctatta

SEQ ID NO: 615757 - DNA, 120 bp, Artificial Sequence
  ENSG00000177047_3 (sequence is synthesized)
aaagccatgcatacaagcaatgtcttcagaaaacctagggtccaaggttaagccatatcccagctcagtaaagccaggagcatcctcatttcccaatggccctcctgttccctctactgg

SEQ ID NO: 615758 - DNA, 120 bp, Artificial Sequence
  ENSG00000177047_4 (sequence is synthesized)
cagccctagtgatgaccagctatagccctgttggatctctgggctgtgatctgcctcagaaccatggcctacttagcaggaacaccttggtgcttctgcaccaaatgaggagaatctccc

SEQ ID NO: 615759 - DNA, 120 bp, Artificial Sequence
  ENSG00000177047_5 (sequence is synthesized)
ctttcttgtgtctcaaggacagaagagacttcaggttcccccaggagatggtaaaagggagccagttgcagaaggcccatgtcatgtctgtcctccatgagatgctgcagcagatcttca

SEQ ID NO: 615760 - DNA, 120 bp, Artificial Sequence
  ENSG00000177047_6 (sequence is synthesized)
gcctcttccacacagagcgctcctctgctgcctggaacatgaccctcctagaccaactccacactggacttcatcagcaactgcaacacctggagacctgcttgctgcaggtagtgggag

SEQ ID NO: 615761 - DNA, 120 bp, Artificial Sequence
  ENSG00000177047_7 (sequence is synthesized)
ctggggcaattagcagccctgcactgaccttgaggaggtacttccagggaatccgtgtctacctgaaagagaagaaatacagcgactgtgcctgggaagttgtcagaatggaaatcatga

SEQ ID NO: 615762 - DNA, 120 bp, Artificial Sequence
  ENSG00000177047_8 (sequence is synthesized)
aatccttgttcttatcaacaaacatgcaagaaagactgagaagtaaagatagagacctgggctcatcttgaaatgattctcattgattaatttgccatataacacttgcacatgtgactc

SEQ ID NO: 615763 - DNA, 120 bp, Artificial Sequence
  ENSG00000177047_9 (sequence is synthesized)
tggtcaattcaaaagactcttatttcggctttaatcacagaattgactgaattagttctgcaaatactttgtcggtatattaagccagtatatgttaaaaagacttaggttcaggggcat

SEQ ID NO: 615764 - DNA, 120 bp, Artificial Sequence
  ENSG00000177047_10 (sequence is synthesized)
aggggcatcagtccctaagatgttatttatttttactcatttatttattcttacattttatcatatttatactatttatattcttatataacaaatgtttgcctttacattgtattaaga

SEQ ID NO: 615765 - DNA, 120 bp, Artificial Sequence
  ENSG00000177047_11 (sequence is synthesized)
catgttcagctttccatttggttaaatattgtattttgttatttattaaattattttcaaacaaaacttcttgaagttatttattcgaaaaccaaaatccaaacactagttttctgaacc

SEQ ID NO: 615766 - DNA, 120 bp, Artificial Sequence
  ENSG00000177047_12 (sequence is synthesized)
aaatcaaggaatggacggtaatatacacttacctattcattcattccatttacataatatgtataaagtgagtatcaaagtggcatattttggaattgatgtcaagcaatgcaggtgtac

SEQ ID NO: 615767 - DNA, 120 bp, Artificial Sequence
  ENSG00000177047_13 (sequence is synthesized)
tcattgcatgactgtatcaaaatatctcatgtaaccaataaatatatacacttactatgtacccacaaaaattaaaaagttattttaaaaaagaaatacaggtgaataaacacagtttct

SEQ ID NO: 615768 - DNA, 120 bp, Artificial Sequence
  ENSG00000177047_14 (sequence is synthesized)
ttccgtgttgaagagctttcattcttacaggaaaagaaacagtaaagatgtaccaatttcgcttatatgaaacactacaaagataagtaaaagaaaatgatgttctcatactagaagctt

SEQ ID NO: 615769 - DNA, 120 bp, Artificial Sequence
  ENSG00000177051_0 (sequence is synthesized)
gagtgggggaaacccgcgtagccgagggagatgcagcgcgcggcgatggtggcatgtggagcctcccaccaccacctaggtcctgagatgcgctgaagcccagcctgtctgccatcatcc

SEQ ID NO: 615770 - DNA, 120 bp, Artificial Sequence
  ENSG00000177051_1 (sequence is synthesized)
cccagcatggaccgtgggagcctcctgcccttccagctatggtgcccccggccctttggcacctactcacagaaccagccacgcccgccttctgcggccctcaagccatcagcctgccct

SEQ ID NO: 615771 - DNA, 120 bp, Artificial Sequence
  ENSG00000177051_2 (sequence is synthesized)
gagcctggtggcggggccgagccagaccatgggcctgcccactcagagaacacaccacccgccttggccactgaggtccctgcctcccagccggctccgctcctctcagcagcagctgct

SEQ ID NO: 615772 - DNA, 120 bp, Artificial Sequence
  ENSG00000177051_3 (sequence is synthesized)
ggtgatgagggtcgagtcctcctggacacgtggtatgtcatcaagcccgggaatacaaaggagaaggtggccttctttgtggcccaccagtgtggtgggggcagccgggccagctccatg

SEQ ID NO: 615773 - DNA, 120 bp, Artificial Sequence
  ENSG00000177051_4 (sequence is synthesized)
aaggtcaaggggcactggggcagcgatagctccaaggccaagcggcggaggcgctgtcttgaccccaccaaggctcctcctgacccagggggccgggagggcccccctgctgctgaggag

SEQ ID NO: 615774 - DNA, 120 bp, Artificial Sequence
  ENSG00000177051_5 (sequence is synthesized)
ggccccgcctcagccggtgaggacgtggacctgctctctgtggccgagatggtggccctggtggaacagcgggcagccctggccctgcagagctacccacgaccgaccaccccagcgcct

SEQ ID NO: 615775 - DNA, 120 bp, Artificial Sequence
  ENSG00000177051_6 (sequence is synthesized)
gtagtctttgtgtccgccgagcaaggtggaccggccaagggggtgggatctgaacggcggtccggtggtggggactgcagccgtgtagccgaggccgtggcccactttgaagcgcagagg

SEQ ID NO: 615776 - DNA, 120 bp, Artificial Sequence
  ENSG00000177051_7 (sequence is synthesized)
gacagccctcccaccaagggcctccgcaaggaagagcggcccgggccaggccctggggaggtgcgcatcgccttccgcatctccaacggccgggagccccgtgcaccagacagcggcctg

SEQ ID NO: 615777 - DNA, 120 bp, Artificial Sequence
  ENSG00000177051_8 (sequence is synthesized)
cccagtgggggcgggggcaggcctggttgtgcctaccctggcagcccaggtcctggggcccgagccaaggacaagatcacatgtgacttataccagctcatcagcccctcgcgggatgcc

SEQ ID NO: 615778 - DNA, 120 bp, Artificial Sequence
  ENSG00000177051_9 (sequence is synthesized)
ctccccagcaacgtggagttcctgctggccagggcggatgaggccagtgagggtgacagcccggcacccgccaggcctgaggacactcccccggcgccccctccgccccctgcccgggac

SEQ ID NO: 615779 - DNA, 120 bp, Artificial Sequence
  ENSG00000177051_10 (sequence is synthesized)
tgcggagcgtcaggcttccacgtggacgtggtggtgacgggcgtggtagatgagtgcatcttctttggcaaggacggcaccaagaacgtgaaggaggagactgtgtgcctgacggtcagc

SEQ ID NO: 615780 - DNA, 120 bp, Artificial Sequence
  ENSG00000177051_11 (sequence is synthesized)
ccggaggaaccgccgcctccgggccagctcttctttctccagaaccgcgggccggacgggcccccggagccacccccggccgactccccggccactgcgcccggcccagacgatgccgag

SEQ ID NO: 615781 - DNA, 120 bp, Artificial Sequence
  ENSG00000177051_12 (sequence is synthesized)
gcccgagcacgtgctggtcaagatcttcagcttcctgcccacgcgcgcgctggccgccctcaagtgcacctgccaccacttcaagggcatcatcgaggcgtttggcgtgcgggccacaga

SEQ ID NO: 615782 - DNA, 120 bp, Artificial Sequence
  ENSG00000177051_13 (sequence is synthesized)
ctcgcgctggagccgagacccgctctaccgcgatgatccgtgcaaacagtgccgcaagagatacgagaagggcgacgtgtcgctctgccgctggcaccccaagccctaccaccatgacct

SEQ ID NO: 615783 - DNA, 120 bp, Artificial Sequence
  ENSG00000177051_14 (sequence is synthesized)
gccttacggacgttcctactggatgtgctgccgtcgagccgaccgcgagactcccggctgccgcctgggcctccacgataacaactgggtgctgccctgcaatgggccaggcgggggccg

SEQ ID NO: 615784 - DNA, 120 bp, Artificial Sequence
  ENSG00000177051_15 (sequence is synthesized)
ggccgggaggaggggaggtgaagccgggggaggggaggggagagcccaccacgcccacccctcccctctccccccgggagccgagggtccggactgggccgcctgcccattcccctactc

SEQ ID NO: 615785 - DNA, 120 bp, Artificial Sequence
  ENSG00000177051_16 (sequence is synthesized)
actccaggcagcattgatccctcaccggaactgagctggggttcagcaggggtgacccaggaaagccctctgcttgatcctgttgattttctactcttcagaaccagggccgtggaccct

SEQ ID NO: 615786 - DNA, 120 bp, Artificial Sequence
  ENSG00000177051_17 (sequence is synthesized)
ctgagaagggtgttttttttttttttatcagcatctcactttcttctccattcagccccaaccccctccctgccatgctttccaccccaaggacccaccagcagggagcagacggcagct

SEQ ID NO: 615787 - DNA, 120 bp, Artificial Sequence
  ENSG00000177051_18 (sequence is synthesized)
aattttggtaccacttaagggtccccccattctggcccccatcctctccctcaccccaattctttctcgctggagctgttatttcccaagaagccgcatcgcccaaggttggcacctctc

SEQ ID NO: 615788 - DNA, 120 bp, Artificial Sequence
  ENSG00000177051_19 (sequence is synthesized)
ctaacctgccacacgacagctctcacctctctaggaattgggggctgtcaggtcacaggtgggatctggcatttttttatgacagtccatttctagatggtttgcctattaaagaagtgg

SEQ ID NO: 615789 - DNA, 120 bp, Artificial Sequence
  ENSG00000177051_20 (sequence is synthesized)
gggggaaatactgttttctccttaacctcaagctaccagtctctcctcttccgcgtagaggaagaggggggcagacaaaaaaaaagctgaagtataaaaaccctcctcctcccgttatta

SEQ ID NO: 615790 - DNA, 120 bp, Artificial Sequence
  ENSG00000177051_21 (sequence is synthesized)
tttaagctactgccatcaaccccacccccataaagctgtgaagccctttgcctcgcttttgacagcgtgggggggccccgtgggcagggacttcggatttgcatttctgggttgtttttc

SEQ ID NO: 615791 - DNA, 120 bp, Artificial Sequence
  ENSG00000177051_22 (sequence is synthesized)
cttccactctggggtctcgttcaggcattggggtctcctcaccccagccacatgtttctttaagaatcctttggtcaaccaggaccttgatttttcaggcattttggtctggggtatttt

SEQ ID NO: 615792 - DNA, 120 bp, Artificial Sequence
  ENSG00000177051_23 (sequence is synthesized)
tgtttgttctctctgttttttgttttcttttttttctttccatcgtggttctggaagcttctagcgtgtggcatctgaccaattttgaattggtcctttctataaaatcaatatttataa

SEQ ID NO: 615793 - DNA, 120 bp, Artificial Sequence
  ENSG00000177051_24 (sequence is synthesized)
ggcatgtggaagtttcaaggtttaaagggtcattttggttttgagctgtctggagggagatgagccagagaaagattgaggcatatgttacttagtaggttcaaactgcagtgaaagtga

SEQ ID NO: 615794 - DNA, 120 bp, Artificial Sequence
  ENSG00000177051_25 (sequence is synthesized)
tcatgtcggactcatgcgcaagattgcctccagattaggtcattcacatcaagtcattccaaaataaaatagtcattaacagagccctaaattgaagagtccagaaatcaagttgagagc

SEQ ID NO: 615795 - DNA, 120 bp, Artificial Sequence
  ENSG00000177051_26 (sequence is synthesized)
ttagctatgtcacccttccccactctgagcctctgtttatctgtgtgcagcttgaggagaaagctaggctagaacaggcaccctcgtgttttctttctttttttttcccaagatgggttc

SEQ ID NO: 615796 - DNA, 120 bp, Artificial Sequence
  ENSG00000177051_27 (sequence is synthesized)
aggtggcatgtggagcctcccaccaccacctaggtcctgagatgcgctgaagcccagcctgtctgccatcatcccccagcatggaccgtgggagcctcctgcccttccagctatggtgcc

SEQ ID NO: 615797 - DNA, 120 bp, Artificial Sequence
  ENSG00000177054_0 (sequence is synthesized)
agaggcgacccaaggcgggctggcgggctggcggcagtcgctacttgcctagtagcctcagccgctgtgggctcctggggagatggaggggccggggctgggctcgcagtgcaggaatca

SEQ ID NO: 615798 - DNA, 120 bp, Artificial Sequence
  ENSG00000177054_1 (sequence is synthesized)
cagccatggcccccaccctccaggatttggtcgatatggcatctgtgcacatgaaaacaaagaacttgccaatgcaagagaagctcttcctcttatagaggactctagtaactgtgacat

SEQ ID NO: 615799 - DNA, 120 bp, Artificial Sequence
  ENSG00000177054_2 (sequence is synthesized)
tgtcaaagctactcaatacggaatttttgaacgatgtaaagagttggtagaagcaggatatgatgtcaggcaaccagataaagaaaatgtgtcgcttcttcattgggctgctattaacaa

SEQ ID NO: 615800 - DNA, 120 bp, Artificial Sequence
  ENSG00000177054_3 (sequence is synthesized)
cagactggatcttgtaaagttttatatttcaaaaggtgctgttgtagatcagttgggtggagatttaaattcaactcctcttcactgggccatccgacaaggacatttacctatggtcat

SEQ ID NO: 615801 - DNA, 120 bp, Artificial Sequence
  ENSG00000177054_4 (sequence is synthesized)
attattactccagcatggtgcagaccccactcttattgatggagagggattcagcagcatccacctggcagtattgtttcaacacatgcctattatagcatatctcatctcaaagggaca

SEQ ID NO: 615802 - DNA, 120 bp, Artificial Sequence
  ENSG00000177054_5 (sequence is synthesized)
gagtgtgaatatgacagatgtaaatgggcagacacctctcatgttatcagctcacaaagtaattgggccagaaccaactggatttcttttaaagtttaatccttctctcaatgtggttga

SEQ ID NO: 615803 - DNA, 120 bp, Artificial Sequence
  ENSG00000177054_6 (sequence is synthesized)
taaaatacaccaaaacactccacttcactgggcagttgcagcaggaaatgttaatgcagttgataagcttttggaagctggttctagcctggatatccagaatgttaagggagaaacacc

SEQ ID NO: 615804 - DNA, 120 bp, Artificial Sequence
  ENSG00000177054_7 (sequence is synthesized)
tcttgatatggctctacaaaacaaaaatcagctcattattcatatgctaaaaacagaagccaaaatgagagccaaccaaaagttcagactttggaggtggctgcagaaatgcgagctctt

SEQ ID NO: 615805 - DNA, 120 bp, Artificial Sequence
  ENSG00000177054_8 (sequence is synthesized)
cctgctgctgatgctttctgtgattaccatgtgggctattggatacatattggacttcaattcagattcttggcttttaaaaggatgtcttctagtaacactgttttttctgacatcttt

SEQ ID NO: 615806 - DNA, 120 bp, Artificial Sequence
  ENSG00000177054_9 (sequence is synthesized)
gtttccaaggttcttggttgggtataagaaccttgtatacttaccaacagcctttctgctaagttctgttttttggatatttatgacttggttcatcttattttttcctgatttagcagg

SEQ ID NO: 615807 - DNA, 120 bp, Artificial Sequence
  ENSG00000177054_10 (sequence is synthesized)
tttctatttcagtttcattttcagcatagtagcctttctatactttttctataagacttgggcaactgatccaggcttcactaaggcttctgaagaagaaaagaaagtgaatatcatcac

SEQ ID NO: 615808 - DNA, 120 bp, Artificial Sequence
  ENSG00000177054_11 (sequence is synthesized)
ccttgcagaaactggctctctggacttcagaacattttgtacatcatgtcttataaggaagccattaaggtcactccactgccatgtatgcaactgctgtgtggctcgatatgatcaaca

SEQ ID NO: 615809 - DNA, 120 bp, Artificial Sequence
  ENSG00000177054_12 (sequence is synthesized)
ctgcctgtggactggacggtgcataggttttggcaaccatcactattacatattcttcttgtttttcctttccatggtatgtggctggattatatatggatctttcatctatttgtccag

SEQ ID NO: 615810 - DNA, 120 bp, Artificial Sequence
  ENSG00000177054_13 (sequence is synthesized)
tcattgtgccacaacattcaaagaagatggattatggacttacctcaatcagattgtggcctgttccccttgggttttatatatcttgatgctagcaactttccatttctcatggtcaac

SEQ ID NO: 615811 - DNA, 120 bp, Artificial Sequence
  ENSG00000177054_14 (sequence is synthesized)
atttttattattaaatcaactctttcagattgcctttctgggcctgacctcccatgagagaatcagcctgcagaagcagagcaagcatatgaaacagacgttgtccctcaggaagacacc

SEQ ID NO: 615812 - DNA, 120 bp, Artificial Sequence
  ENSG00000177054_15 (sequence is synthesized)
atacaatcttggattcatgcagaacctggcagatttctttcagtgtggctgctttggcttggtgaagccctgtgtggtagattggacatcacagtacaccatggtctttcacccagccag

SEQ ID NO: 615813 - DNA, 120 bp, Artificial Sequence
  ENSG00000177054_16 (sequence is synthesized)
ggagaaggttcttcgctcagtatgaagaaaagcaacccaaaactctcaatctgatttgtttttgtttatgtcgatgccctgtagtttgaaagtgaagtaaagatttagaattcacctaag

SEQ ID NO: 615814 - DNA, 120 bp, Artificial Sequence
  ENSG00000177054_17 (sequence is synthesized)
tccaaaggaaaacacgtggtttttaaagccattaggtaaaaaaagttctcaataaaggcattacaattttttaggtttagaaagatggacttttctgataaatcttggcagacatctaaa

SEQ ID NO: 615815 - DNA, 120 bp, Artificial Sequence
  ENSG00000177054_18 (sequence is synthesized)
aaaaaaaccatatttttcacaagaaaatgcaagttactttttttggaaataatactcactgattatggataaaatggaatattttcagatactatattggctgtttcaaaatagtactat

SEQ ID NO: 615816 - DNA, 120 bp, Artificial Sequence
  ENSG00000177054_19 (sequence is synthesized)
ctgtttcaaaatagtactattctttaaacttgtaatttttgctaagttatttgtctttgttgtatctataaatatgtaaaaaatatttaaatagatgtacctgttttgctttcacactta

SEQ ID NO: 615817 - DNA, 120 bp, Artificial Sequence
  ENSG00000177054_20 (sequence is synthesized)
gggctggcgggctggcggcagtcgctacttgcctagtagcctcagccgctgtgggctcctggggagatggaggggccggggctgggctcgcagccctggcgtcttagcacccgccttcac

SEQ ID NO: 615818 - DNA, 120 bp, Artificial Sequence
  ENSG00000177054_21 (sequence is synthesized)
aggatggaggaaaggggcgtggagaggggaggtacaccacagcgatctgcagaatctcaaaggacaatattccgtggaggaggtgttatataaaagccagacggaggtccaaagaagcca

SEQ ID NO: 615819 - DNA, 120 bp, Artificial Sequence
  ENSG00000177054_22 (sequence is synthesized)
ggcgggccagtcggagaagttacaggagtaatgtgaagacctcacctatatatactgctttgcagtttgcaaaatacttccccatttttgatcctcactataatcctctgaggtggggag

SEQ ID NO: 615820 - DNA, 120 bp, Artificial Sequence
  ENSG00000177054_23 (sequence is synthesized)
gggcgccagcaggaagtgggagaagaggcgacccaaggcgggctggcgggctggcggcagtcgctacttgcctagtagcctcagccgctgtgggctcctggggagatggaggggccgggg

SEQ ID NO: 615821 - DNA, 120 bp, Artificial Sequence
  ENSG00000177054_24 (sequence is synthesized)
caaacttcatgtctttcagaatatcatcacccttgcagaaactggctctctggacttcagaacattttgtacatcatgtcttgtgagttttttcatataatttttttccgtagtgaaagc

SEQ ID NO: 615822 - DNA, 120 bp, Artificial Sequence
  ENSG00000177054_25 (sequence is synthesized)
aaagtcttggtaacgttgctgatgtaagcatttgtcagatcttcatggtatatttatacacctttgtttttacccatttctaattttacattcctgtctgaacagctttctgtcttgaac

SEQ ID NO: 615823 - DNA, 120 bp, Artificial Sequence
  ENSG00000177054_26 (sequence is synthesized)
atatggcagaatgatgtttataatctcttgaagttgtctctggttacatctctccgtgaattatccattgtgtgttttatttgcttttctctgtcatgaagcatatattagaactaacgt

SEQ ID NO: 615824 - DNA, 120 bp, Artificial Sequence
  ENSG00000177054_27 (sequence is synthesized)
caaatcagaggctcataatgaccttagaaaccacttagtgaaacctctcattttgcaattgaggaatcaagggaggaagtaaattctcccaaattattggtggtgctaaaaatggaactt

SEQ ID NO: 615825 - DNA, 120 bp, Artificial Sequence
  ENSG00000177054_28 (sequence is synthesized)
gggtttccttcccttggttgagtgcttattttgctctgtggtactgcctcatttctgcttagccagtgtgaacaggctctggaattcagatcccacttagtgatgtcctaatcaaagtag

SEQ ID NO: 615826 - DNA, 120 bp, Artificial Sequence
  ENSG00000177054_29 (sequence is synthesized)
ctctgtgacctaaagttaaaattttgcttgtgatttgttaccactttgagacactggtttttgcttaggcctctcttaattgcccacttagataaggaagccattaaggtcactccactg

SEQ ID NO: 615827 - DNA, 120 bp, Artificial Sequence
  ENSG00000177054_30 (sequence is synthesized)
tgactataaaccatactcctaataaaaacaaagcaaatgcctctaagactccctcagcattgggaagctgcaagaaatacaagatgaggttagttctcagtactttaggaaaaaaatgtg

SEQ ID NO: 615828 - DNA, 120 bp, Artificial Sequence
  ENSG00000177054_31 (sequence is synthesized)
ataaatttgaaaagtagtcaaaaatagaaattcatttaaggcaagtgcagatttgctccccagtgaagaaggaaagtcagctgctgaagtacaaagctggaggtggtaactgaataaaac

SEQ ID NO: 615829 - DNA, 67 bp, Artificial Sequence
  ENSG00000177054_32 (sequence is synthesized)
tgtgaaggtcaggtttagggtagattgggaagttatcaagtttatcacttgcactcaagaatgatta

SEQ ID NO: 615830 - DNA, 120 bp, Artificial Sequence
  ENSG00000177054_33 (sequence is synthesized)
ttgtccagtcattaaggaacaaacctctgaaagcccatgccatttggtaagtatcaagttgaaactgagaactgatgggaatactaacagttaaaaggttggaaatagtaacttggaaga

SEQ ID NO: 615831 - DNA, 120 bp, Artificial Sequence
  ENSG00000177054_34 (sequence is synthesized)
aaacattagatcacttattctgcggccctgaggaaggaaaaaagctttcagtagcggtttaaaaaagtatataggggtctcacatagggaatgacagccagctgttctgaggtggttgac

SEQ ID NO: 615832 - DNA, 120 bp, Artificial Sequence
  ENSG00000177054_35 (sequence is synthesized)
taagaaggacagggtttaaattgaaccaagaaagattttggctatgtcttaagaattgcattattatgtttttcagaccttggaaataggttacctaactggaaaaacctatagtgcttg

SEQ ID NO: 615833 - DNA, 120 bp, Artificial Sequence
  ENSG00000177054_36 (sequence is synthesized)
tagtttatttatttggactttaactgtttattatttatttattttaaggcttttggagaattgggctctaaacacagaggcttcacttccatccaccctcttgttacattcttggtcaaa

SEQ ID NO: 615834 - DNA, 120 bp, Artificial Sequence
  ENSG00000177054_37 (sequence is synthesized)
tcttagactttaccagtagggtactagtttgttgcttgagctgaagtctggagtaattccgaaagacattaagaatgttattttccccttagcatcataagcccaatacacatacacatt

SEQ ID NO: 615835 - DNA, 120 bp, Artificial Sequence
  ENSG00000177054_38 (sequence is synthesized)
tttcctctctttctctcttctgtgtctctctgtctctttagtttaaaatttttgttagttttcgaaaggcaattctttgtacacttgccccccaggctcccagtttccctccctagaaat

SEQ ID NO: 615836 - DNA, 120 bp, Artificial Sequence
  ENSG00000177054_39 (sequence is synthesized)
atcaagtattacaaattttgttttgtttggggtttcatttttagagattattaactagtatctatgtgtaatgagttattttttgccctgccataggcatggagggcttcagttaccttg

SEQ ID NO: 615837 - DNA, 120 bp, Artificial Sequence
  ENSG00000177054_40 (sequence is synthesized)
tcagaccctttcctacctgacgccttgggtgtctttgatcactaggcaatgcttttgtagctaaatgtgactgtcaccattttaaataggtctaatagtcagaaggttgtaatctctgag

SEQ ID NO: 615838 - DNA, 120 bp, Artificial Sequence
  ENSG00000177054_41 (sequence is synthesized)
ctcagttcttgtcaaaaaggccaccagtaaccctgagcattctatttttattttaattaattttaattttatttgtttgttttttgcttatttattaatgtattttttgagacagggtct

SEQ ID NO: 615839 - DNA, 86 bp, Artificial Sequence
  ENSG00000177054_42 (sequence is synthesized)
cagggtctcactctgtcgcccagactggaatgcagcggcaccatcatggctcactgcagccgtagctttttgtagctgagactaca

SEQ ID NO: 615840 - DNA, 120 bp, Artificial Sequence
  ENSG00000177054_43 (sequence is synthesized)
ggtgcctgtcaccgtgcccagttaatttttaaattttttgtagagatggcatcttcaccatgttgcccaggctggtttcaagctccaggcctcaagtgattctcctgcctcagcttccca

SEQ ID NO: 615841 - DNA, 120 bp, Artificial Sequence
  ENSG00000177054_44 (sequence is synthesized)
aaaagagtttttgacagcgcttggttctattgagaaagctgcctttcaaggcctgacagtaaagcatattcctggaaaacctttgtaagttggcacatagaccaacttgtctcttggact

SEQ ID NO: 615842 - DNA, 120 bp, Artificial Sequence
  ENSG00000177054_45 (sequence is synthesized)
ggatcctatgggagaggagccagagtttacaccactcctgcctctcttctcttctctctcttcactaaaaatagtcacctttgtttggcatctatgaccagcataagactgtattgataa

SEQ ID NO: 615843 - DNA, 120 bp, Artificial Sequence
  ENSG00000177054_46 (sequence is synthesized)
ggacagaagtgattttccatcacattcagtctttccaagttagtttttttattacacatgttgattcttcccttctctttgtcttttttctctggctctgaaccaattttcatattacat

SEQ ID NO: 615844 - DNA, 120 bp, Artificial Sequence
  ENSG00000177054_47 (sequence is synthesized)
tttgtttcataagaacagtcccaccttatattcacttacaactgtataaactagctgagtgtattttgttacctttattccatttatattccagcaatatttctttacactgaatgaggg

SEQ ID NO: 615845 - DNA, 120 bp, Artificial Sequence
  ENSG00000177054_48 (sequence is synthesized)
ccttgtgtcatttattattatttcacagacaaaacatgaacttgtgctccatttctctaatgaggcctcactgtcatcccacctcccttgtttaccattaatgctgtattactagagccc

SEQ ID NO: 615846 - DNA, 120 bp, Artificial Sequence
  ENSG00000177054_49 (sequence is synthesized)
tgctctatactctccttctcatgtgatccaatagctgctacttctgtacagcctccatccatttcatcttttgtaaggtctgtttacaaggtggatagtaagtgactccaaaagtgtcag

SEQ ID NO: 615847 - DNA, 120 bp, Artificial Sequence
  ENSG00000177054_50 (sequence is synthesized)
catcctacaagttacagaaagaaagattgtagattaccatcaggaagaactctgtaactgtcagagccatctaaagatgaaaacgtttgacctggaatgatgtgagttccctaccattag

SEQ ID NO: 615848 - DNA, 120 bp, Artificial Sequence
  ENSG00000177054_51 (sequence is synthesized)
ccactggccagctgataagaatgtattagcacaaattaaagtgttacattgcataagataatgtacgtgacaacttgctgttgtatctttgatattaaatctgaaaaccagtattctgaa

SEQ ID NO: 615849 - DNA, 120 bp, Artificial Sequence
  ENSG00000177054_52 (sequence is synthesized)
aacttcagtgtgagatcatgctgtattatcaaaagaattcccagaagggagcagtagaaatccataaactgaaagaaaatagatattctttcccaatcaacagctgttttctccacctac

SEQ ID NO: 615850 - DNA, 120 bp, Artificial Sequence
  ENSG00000177054_53 (sequence is synthesized)
tgttggaaattatattcttttttgtgatatcaggtgcatgggatgcatctttctttgccatcctaatgagatgctctagagagagtgtaatttgccttaacttgaaccttgattgctact

SEQ ID NO: 615851 - DNA, 120 bp, Artificial Sequence
  ENSG00000177054_54 (sequence is synthesized)
ctgtgatgattgctcttagaatgcttctggcatatattcatgaaagatggttgggaatcagagacttaaagagaaaagaaaagtagatttttaggatttaaatggacagttgacaggaaa

SEQ ID NO: 615852 - DNA, 120 bp, Artificial Sequence
  ENSG00000177054_55 (sequence is synthesized)
gtcatagactcattttcttcctgtccctggagttcttcagagcagcattgggaaaatgtccaaaactgtttatcaaattgtcagaggcatttatgaaacctcaaggtgcaaatcgacaga

SEQ ID NO: 615853 - DNA, 120 bp, Artificial Sequence
  ENSG00000177054_56 (sequence is synthesized)
attatcttttaaaaataattcaccctttatgcatgggcagggtgcctgtaaaagtcattggatttacataaccttgaagatccgttcccttgtttctgctgcttcctgtgtgtatttctc

SEQ ID NO: 615854 - DNA, 120 bp, Artificial Sequence
  ENSG00000177054_57 (sequence is synthesized)
cttactgctgctcctagctacatgggttaggaggttgatatgaaaggccatagtaaagttctttaattggcacacctggggagaaactgagctgtgaccatctgaatcttgctctatatt

SEQ ID NO: 615855 - DNA, 120 bp, Artificial Sequence
  ENSG00000177054_58 (sequence is synthesized)
cttttcccaggtgtatctgtcttgtgagtcccttcatctggcctttcttcctctgcagatttagttatggtgtcagtgcagaagtatacccatgcccagctccctgcatgctattagatt

SEQ ID NO: 615856 - DNA, 120 bp, Artificial Sequence
  ENSG00000177054_59 (sequence is synthesized)
gtattctgatgatatctaggtgcttgtgggatatcttgtgcccacagcaatggcctgttcatctgaatgcttaataagagtttatattcagtcctgtaatagacccatagttgctataaa

SEQ ID NO: 615857 - DNA, 120 bp, Artificial Sequence
  ENSG00000177054_60 (sequence is synthesized)
catgaataaggtagggagtgttctaaacaaataattaacttcaggctagtatatcttatgctgaatgctgattttagtaaagattttacggaccctttttctttattccttcactgttaa

SEQ ID NO: 615858 - DNA, 120 bp, Artificial Sequence
  ENSG00000177054_61 (sequence is synthesized)
ctacttatacagtgttatcatagcctcaattaacattgagccaccattttgtcatctttagtttttgaactgtcatgtggaaaatgaaatcctaaaattgaatcatgatctgtgccatac

SEQ ID NO: 615859 - DNA, 120 bp, Artificial Sequence
  ENSG00000177058_0 (sequence is synthesized)
aggactaacttcttcagtgcttagagtgtgagaaaaatggcaaatatgaatagtgattctaggcatcttggcacctctgaggtagatcatgaaagagatcctggacctatgaatatccag

SEQ ID NO: 615860 - DNA, 120 bp, Artificial Sequence
  ENSG00000177058_1 (sequence is synthesized)
tttgagccatcggatctaagatccaaaaggcctttctgtatagagcccacaaacatcgtgaatgtgaatcatgtcattcagagggttagtgaccatgcctctgccatgaacaagagaatt

SEQ ID NO: 615861 - DNA, 120 bp, Artificial Sequence
  ENSG00000177058_2 (sequence is synthesized)
cattactacagccggctcaccactcctgcagacaaggcactgattgccccagaccatgtagttccagctccagaagagtgctatgtgtatagtccattgggctctgcttataaacttcaa

SEQ ID NO: 615862 - DNA, 120 bp, Artificial Sequence
  ENSG00000177058_3 (sequence is synthesized)
agttacactgaaggatacggtaaaaacaccagtttagtaaccatttttatgatttggaataccatgatgggaacatctatactaagcattccttggggcataaaacaggctggatttact

SEQ ID NO: 615863 - DNA, 120 bp, Artificial Sequence
  ENSG00000177058_4 (sequence is synthesized)
actggaatgtgtgtcatcatactgatgggccttttaacactttattgctgctacagagtagtgaaatcacggactatgatgttttcgttggataccactagctgggaatatccagatgtc

SEQ ID NO: 615864 - DNA, 120 bp, Artificial Sequence
  ENSG00000177058_5 (sequence is synthesized)
tgcagacattatttcggctcctttgggcagtggtcgagtctccttttctccttggtgtctctcattggagcaatgatagtttattgggtgcttatgtcaaattttctttttaatactgga

SEQ ID NO: 615865 - DNA, 120 bp, Artificial Sequence
  ENSG00000177058_6 (sequence is synthesized)
aagtttatttttaattttattcatcacattaatgacacagacactatactgagtaccaataatagcaaccctgtgatttgtccaagtgccgggagtggaggccatcctgacaacagctct

SEQ ID NO: 615866 - DNA, 120 bp, Artificial Sequence
  ENSG00000177058_7 (sequence is synthesized)
atgattttctatgccaatgacacaggagcccaacagtttgaaaagtggtgggataagtccaggacagtccccttttatcttgtagggctcctcctcccactgctcaatttcaagtctcct

SEQ ID NO: 615867 - DNA, 120 bp, Artificial Sequence
  ENSG00000177058_8 (sequence is synthesized)
tcatttttttcaaaatttaatatcctaggcacagtgtctgtcctttatttgattttccttgtcacctttaaggctgttcgcttgggatttcatttggaatttcattggtttataccaaca

SEQ ID NO: 615868 - DNA, 120 bp, Artificial Sequence
  ENSG00000177058_9 (sequence is synthesized)
actcttgaagaacaacaagaaacaagaaaacaatgtgagggacttgtgcattgcttatatgctggtgacattaacttatctctatattggagtcctggtttttgcttcatttccttcacc

SEQ ID NO: 615869 - DNA, 120 bp, Artificial Sequence
  ENSG00000177058_10 (sequence is synthesized)
accattatccaaagattgtattgagcagaattttttagacaacttccctagcagtgacaccctgtccttcattgcaaggatattcctgctgttccagatgatgactgtatacccactctt

SEQ ID NO: 615870 - DNA, 120 bp, Artificial Sequence
  ENSG00000177058_11 (sequence is synthesized)
aggctacctggctcgtgtccagcttttgggccatatcttcggtgacatttatcctagcattttccatgtgctgattcttaatctaattattgtgggagctggagtgatcatggcctgttt

SEQ ID NO: 615871 - DNA, 120 bp, Artificial Sequence
  ENSG00000177058_12 (sequence is synthesized)
ctacccaaacataggagggatcataagatattcaggagcagcatgtggactggcctttgtattcatatacccatctctcatctatataatttccctccaccaagaagagcgtctgacatg

SEQ ID NO: 615872 - DNA, 120 bp, Artificial Sequence
  ENSG00000177058_13 (sequence is synthesized)
gcctaaattaatcttccacgttttcatcatcattttgggcgtggctaacctgattgttcagttttttatgtgaaatacctcaactgtttttttcaagagctctcatgatattttgagcct

SEQ ID NO: 615873 - DNA, 120 bp, Artificial Sequence
  ENSG00000177058_14 (sequence is synthesized)
tgacaacagttctatataaattcacttgtaaatgctgctgttgtgtaattctaaatattttctaagataatttgaaagcaagggaaatagtggccccttaatgagtatttttttattggg

SEQ ID NO: 615874 - DNA, 120 bp, Artificial Sequence
  ENSG00000177058_15 (sequence is synthesized)
gtggggaaaggggcaaaaagaatgatcttagtgtctttacctttctcatattaactcacctctttattctgtggtcttttctgaatagaaatgtatgccctaggaagaaatcatgctggg

SEQ ID NO: 615875 - DNA, 120 bp, Artificial Sequence
  ENSG00000177058_16 (sequence is synthesized)
ttttgcttttagagataaaaggtggtggatttattttgcctgcagtaaagattctcagggtgtcagagcagcatattgtcaaatcctgcttctgttttatgtttcagtgtattcactttc

SEQ ID NO: 615876 - DNA, 120 bp, Artificial Sequence
  ENSG00000177058_17 (sequence is synthesized)
attttcttacttactagaccatttctgcagtttgcccaaacctctactgtttgggacagtaagccaaatacctcatttttaaaaagaagttttcatggcatcagtgttaataaagtacat

SEQ ID NO: 615877 - DNA, 120 bp, Artificial Sequence
  ENSG00000177058_18 (sequence is synthesized)
ttttaactgagtcttaatctctatttgaagaaaaagtagagacaaaagtaatgtcaatgtaatccccaggatcatgaaatgtatacaaaataaataaagtaggagagtttgttgctgtct

SEQ ID NO: 615878 - DNA, 120 bp, Artificial Sequence
  ENSG00000177058_19 (sequence is synthesized)
gcttcctgtttggactaggagccccgcggtcgcaaattgcgagaatttgggaagggaatctttatcttctcgtctagttctccgaggttgaaggctcggcctgctcagagaaggaaactg

SEQ ID NO: 615879 - DNA, 120 bp, Artificial Sequence
  ENSG00000177058_20 (sequence is synthesized)
aagagatgaaagatggttggtttaagctaatcttgataatcctattttcattcgcacatacttaagtttttagtctttcttaaaactagaggtggaaatgtgaaatttatcacatgagaa

SEQ ID NO: 615880 - DNA, 120 bp, Artificial Sequence
  ENSG00000177058_21 (sequence is synthesized)
atttatcattgtcatttatagtggccatcagaaaagataatgaaataagacttttgattcttacttatataatccaatgtcagtaaatataagcactaatgaatgctgacttgaatgctc

SEQ ID NO: 615881 - DNA, 120 bp, Artificial Sequence
  ENSG00000177058_22 (sequence is synthesized)
agggttttcttgaaaattctaaattctgtgataaataattgaccactgtgacaacagaatgtaagtcattaaagtgcattccattacagtaagttggcaggagttcaaacagttctctgt

SEQ ID NO: 615882 - DNA, 120 bp, Artificial Sequence
  ENSG00000177058_23 (sequence is synthesized)
aaatttgtttaactgcgtagattaaatggcaatatattttctataatgaaacttgttgaaatgagagggaatcagctatttacaatcatggcataactacctaggcctttctgtatagag

SEQ ID NO: 615883 - DNA, 120 bp, Artificial Sequence
  ENSG00000177058_24 (sequence is synthesized)
atccaccatgtgaggacacagagagaagacaccatctatgaaccaggaaatgggccctcaccagacactgaatctgctggtgccttgatctcagacttctgactctccagaactggtcca

SEQ ID NO: 615884 - DNA, 120 bp, Artificial Sequence
  ENSG00000177058_25 (sequence is synthesized)
aggacgtaaccagatcatacaacacgcgccaggaaagcccaaaagaggggtgatccctcgatggaggtgccgcatcagcgttttctcacgtggcctccggggctctatgaatggcaagag

SEQ ID NO: 615885 - DNA, 120 bp, Artificial Sequence
  ENSG00000177058_26 (sequence is synthesized)
attgcattccttctactacccctcccagcctccagccgggacaaggaactggagcaaactcggggctgcagttccgactggactcgcccacctgggcgcgccggctgcccagcctcctga

SEQ ID NO: 615886 - DNA, 120 bp, Artificial Sequence
  ENSG00000177058_27 (sequence is synthesized)
agcctcggggctgggccctgcggtgatgggcgtgctggccgtcgcagagccctctgggagttgtagtccgtagcggcgagaggtttgacagcgaccgcgggcttggcgcattcagaactc

SEQ ID NO: 615887 - DNA, 120 bp, Artificial Sequence
  ENSG00000177058_28 (sequence is synthesized)
aggtaagggctcttctcttgaccagcaggatgtgccaagcaacaaatgactgtgcaagcaggtcagtttaaagtgtgactgatccttttgctataaaaatgcctaatgcaagtggtgact

SEQ ID NO: 615888 - DNA, 120 bp, Artificial Sequence
  ENSG00000177058_29 (sequence is synthesized)
aaagatagatcattggtgtcctcttccctgaagagctttaaaaatagaagccactcccttgtctagaatgatttaaagttcattccttccagtatagttaattagctccgataccattta

SEQ ID NO: 615889 - DNA, 120 bp, Artificial Sequence
  ENSG00000177058_30 (sequence is synthesized)
tatttatcttattatttaattgctattgatttacatattgtcaagaagtttatagtgtatagtacctatgttggcaatgtgtagctaatgagaagcaacacttttaattattggtcattg

SEQ ID NO: 615890 - DNA, 120 bp, Artificial Sequence
  ENSG00000177058_31 (sequence is synthesized)
cggactatgatgtgtaagaatttgacacagtgacaatagattatgggtattaataagcatttccctttgaggcagatcactagtgtgtatatgctacatgtgtgtcagctgtctactttg

SEQ ID NO: 615891 - DNA, 120 bp, Artificial Sequence
  ENSG00000177058_32 (sequence is synthesized)
tcatatgcttttaacacagtactttcaaatactattaccactgtaatgttagttctagccttaaattctaggacttgggataaataaaataagaagtaacatatataattttggaaaata

SEQ ID NO: 615892 - DNA, 120 bp, Artificial Sequence
  ENSG00000177058_33 (sequence is synthesized)
accagagtttcctgaataagtttttcccaagttctgtgttattctttttgatgaaaggatactggcttccctacaatcatcttttcaacttctaaaatgtttaattttttaaattgagta

SEQ ID NO: 615893 - DNA, 120 bp, Artificial Sequence
  ENSG00000177058_34 (sequence is synthesized)
cttaaacgttgggcaggaaagcagaagagaaaagggaagtggaaatcaaaacaacagagaaaagaaaatgcacatatttgggaaatagaacatgttactaacatctgtgtcacataataa

SEQ ID NO: 615894 - DNA, 120 bp, Artificial Sequence
  ENSG00000177058_35 (sequence is synthesized)
aaatttgtttaactgcgtagattaaatggcaatatattttctataatgaaacttgttgaaatgagagggaatcagctatttacaatcatggcataactacctagggctctgttgtcagct

SEQ ID NO: 615895 - DNA, 120 bp, Artificial Sequence
  ENSG00000177058_36 (sequence is synthesized)
catcagataggcctgggttttaataccatctctgctatctactccaagtatgggaatttaggcaccttcccttttctttctgagctttatttttcttttccattaaatagtataataagt

SEQ ID NO: 615896 - DNA, 120 bp, Artificial Sequence
  ENSG00000177058_37 (sequence is synthesized)
acccccatttgatttttagatggactctgagataatgtactacatgccaggcaccttgtggtactcaaataaatgtctactattatgtacatatatttctctttttgtggggaactggta

SEQ ID NO: 615897 - DNA, 120 bp, Artificial Sequence
  ENSG00000177058_38 (sequence is synthesized)
caagtagttctcatgtagttataaaaccacagagaatacattgaaggaactccctatttttaaaagcctgtatcaggaatgccctggataaactagagtctttgtttatcagactctaat

SEQ ID NO: 615898 - DNA, 120 bp, Artificial Sequence
  ENSG00000177058_39 (sequence is synthesized)
gattaatcagactctcattcttatattgagtgacaggcagcaaaacaaaaaaagagtatttggctgttaaaaaaagagagagagatgtcctatgagtcaccagagggttaaaaaaaaaaa

SEQ ID NO: 615899 - DNA, 120 bp, Artificial Sequence
  ENSG00000177058_40 (sequence is synthesized)
aaaagagagacagagtaaaagaaaaaaatattttaataaaagattgccataactaatattttctttgatttaacccatcaaaaacttagcaatagtatagtctttagttataagtgactg

SEQ ID NO: 615900 - DNA, 120 bp, Artificial Sequence
  ENSG00000177058_41 (sequence is synthesized)
aagagtttctcacaaaaaacaacatttcacaagtgactttctggtcagaagaaattcctcttatagagtacaatggaatatactaatgtgatttattacagctgaattataatggttatt

SEQ ID NO: 615901 - DNA, 120 bp, Artificial Sequence
  ENSG00000177058_42 (sequence is synthesized)
tcagcaaaataatgttaatagtgttctcatctttataagagaaataagtttgaattactgctattatggcagcttggaaatgttcttattttcttgatttccttgactccagaagttctt

SEQ ID NO: 615902 - DNA, 120 bp, Artificial Sequence
  ENSG00000177058_43 (sequence is synthesized)
ctgatatgaacaaactcatacaaagcctactcccttgggaataggaatatttgtggtatttgtatttgaaagaaaagataaaaattctaagtaattaacttttttttaagataccaaacc

SEQ ID NO: 615903 - DNA, 120 bp, Artificial Sequence
  ENSG00000177058_44 (sequence is synthesized)
aaaatggagaaaagggtcatgaaaggaagtagagataaatccttttaaatttagtgatagactaaacaatgatgtagtaggtgatagacatactctcaccttattctgtcatctttactt

SEQ ID NO: 615904 - DNA, 120 bp, Artificial Sequence
  ENSG00000177058_45 (sequence is synthesized)
caaaagtgcttacagtgcttcagaggaggaaagcagcagagccagagagggtaaaataacactgaattaaattagctctttacatctttaaagtggactggtattttccttgaaccacat

SEQ ID NO: 615905 - DNA, 120 bp, Artificial Sequence
  ENSG00000177058_46 (sequence is synthesized)
aaagcaatgctttctcgatctatctgtggtgaaggacaaaattgtctttgctgttgctttaatgttaaataaattgcaggctgatacttttgtaaaatagaataaaattgtggcaatgtc

SEQ ID NO: 615906 - DNA, 120 bp, Artificial Sequence
  ENSG00000177058_47 (sequence is synthesized)
agattcctgtaaaagtttctgaacactttcggtttctatacttacctcattgaaaaaatacttaacaagtagttgtggatgggcactagtccacaaaccacaatcggagtagcacctgtg

SEQ ID NO: 615907 - DNA, 120 bp, Artificial Sequence
  ENSG00000177058_48 (sequence is synthesized)
agctatttacaatcatggcataactacctaggcactcagcatctcgatgaaaactgttggaaaagaaaaactttcagagtcattctgccctcagagtagtcaagccaactaaactgtgag

SEQ ID NO: 615908 - DNA, 120 bp, Artificial Sequence
  ENSG00000177058_49 (sequence is synthesized)
aagtcaatgccttgcctttgtgcatcccattactaatggaggataagaagttattttcttcaaaggctgacttccagaatttttggctgaacactttttgtcaagtgtatattccctttg

SEQ ID NO: 615909 - DNA, 120 bp, Artificial Sequence
  ENSG00000177058_50 (sequence is synthesized)
tttgagccatcggatctaagatccaaaagacagggtctcactctgtagcccacactggagtgtgatggtgcaatcatggcttgctgcagccttgatctcctgggctgaagcagtcctccc

SEQ ID NO: 615910 - DNA, 120 bp, Artificial Sequence
  ENSG00000177058_51 (sequence is synthesized)
caaaatggaacaagtcttcaacttattttgttaagtgaaaaattgaagtacagagcagtgtgtatagtatgccaccatttgggtaaaaataaataaatataatatgtataaatgaagttt

SEQ ID NO: 615911 - DNA, 120 bp, Artificial Sequence
  ENSG00000177058_52 (sequence is synthesized)
tgggtagtaaataggaaactgtaagatggttgccccctcagagggaaactgagtgctttaggcgggatggtgtggcagatactgttaggtagacacccaacaattaatcagcaaccctac

SEQ ID NO: 615912 - DNA, 120 bp, Artificial Sequence
  ENSG00000177076_0 (sequence is synthesized)
gccgcgttttgcctccgcagcagctctgggctcttctcagctgcgcgagcagctgctccaatgccccggagtggccatgggcgccccgcactggtgggaccagctgcaggctggtagctc

SEQ ID NO: 615913 - DNA, 120 bp, Artificial Sequence
  ENSG00000177076_1 (sequence is synthesized)
ggaggtggactggtgcgaggacaactacaccatcgtgcctgctatcgccgagttctacaacacgatcagcaatgtcttatttttcattttaccgcccatctgcatgtgcttgtttcgtca

SEQ ID NO: 615914 - DNA, 120 bp, Artificial Sequence
  ENSG00000177076_2 (sequence is synthesized)
gtatgcaacatgcttcaacagtggcatctacttaatctggactcttttggttgtagtgggaattggatccgtctacttccatgcaacccttagtttcttgggtcagatgcttgatgaact

SEQ ID NO: 615915 - DNA, 120 bp, Artificial Sequence
  ENSG00000177076_3 (sequence is synthesized)
tgcagtcctttgggttctgatgtgtgctttggccatgtggttccccagaaggtatctaccaaagatctttcggaatgaccggggtaggttcaaggtggtggtcagtgtcctgtctgcggt

SEQ ID NO: 615916 - DNA, 120 bp, Artificial Sequence
  ENSG00000177076_4 (sequence is synthesized)
tacgacgtgcctggcatttgtcaagcctgccatcaacaacatctctctgatgaccctgggagttccttgcactgcactgctcatcgcagagctaaagaggtgtgacaacatgcgtgtgtt

SEQ ID NO: 615917 - DNA, 120 bp, Artificial Sequence
  ENSG00000177076_5 (sequence is synthesized)
taagctgggcctcttctcgggcctctggtggaccctggccctgttctgctggatcagtgaccgagctttctgcgagctgctgtcatccttcaacttcccctacctgcactgcatgtggca

SEQ ID NO: 615918 - DNA, 120 bp, Artificial Sequence
  ENSG00000177076_6 (sequence is synthesized)
catcctcatctgccttgctgcctacctgggctgtgtatgctttgcctactttgatgctgcctcagagattcctgagcaaggccctgtcatcaagttctggcccaatgagaaatgggcctt

SEQ ID NO: 615919 - DNA, 120 bp, Artificial Sequence
  ENSG00000177076_7 (sequence is synthesized)
cattggtgtcccctatgtgtccctcctgtgtgccaacaagaaatcatcagtcaagatcacgtgatggcaagatggtggctggcttctctgcttatcgcccctcatgcagtgggcttcctt

SEQ ID NO: 615920 - DNA, 120 bp, Artificial Sequence
  ENSG00000177076_8 (sequence is synthesized)
tgctaggaagacagccaagggagttcgaatagttggggtgtgggctatcttttcaaaaatctatttgctggggctcttaatttctttagtgttctttgtatgtagggatttaaactttgt

SEQ ID NO: 615921 - DNA, 120 bp, Artificial Sequence
  ENSG00000177076_9 (sequence is synthesized)
catatggtacaaatattccctgcccccctgcagtttcccatttgtctttcagtatgttaatatttttgtgccatactggttttaaactttcatgttgtcacatctgttaatcttttcttt

SEQ ID NO: 615922 - DNA, 120 bp, Artificial Sequence
  ENSG00000177076_10 (sequence is synthesized)
aggatttctggattttgtgtaatttttaaaaaggtcccctcctcctccctaatgtgtctgtggaccacctggattccactgtacaaggggaaaagtgtctattcctttcccaaagatgga

SEQ ID NO: 615923 - DNA, 120 bp, Artificial Sequence
  ENSG00000177076_11 (sequence is synthesized)
agggacactagatgcatctttctcagcatcacttccagatgcagtgacttgttgggctgcgtccttaatggccatggcagagcagtcccttgggggatccagccctgtacaatgcatctc

SEQ ID NO: 615924 - DNA, 120 bp, Artificial Sequence
  ENSG00000177076_12 (sequence is synthesized)
ttcctggagaaagctggcctgctccagaccccaccattcccaggcgcccttggagtggactctactgatgacagacagaccctctgagagacaagaccctctgactctgtgatggaagat

SEQ ID NO: 615925 - DNA, 120 bp, Artificial Sequence
  ENSG00000177076_13 (sequence is synthesized)
gccagagattttcctttggggtaattgtccttaaacaaaaccaaacagatgaaacacacacaggacttgtggctaaaaaggctagtttttcacttgcatttctcaactaacccaggtttt

SEQ ID NO: 615926 - DNA, 120 bp, Artificial Sequence
  ENSG00000177076_14 (sequence is synthesized)
acatgcatctgtgaatccttttactactacctctgtggagagatggagagacttcagataaacgtgaagctaatgagtaaaaccctctctgccaaaacctacactccactttaggccctt

SEQ ID NO: 615927 - DNA, 120 bp, Artificial Sequence
  ENSG00000177076_15 (sequence is synthesized)
cttgaagatgagcacaatttttaaatactgagcacaatttttaaatactgacatcacttcctcttccccctcccaccccagctcagcagcctcaaatctacagagaagaagaattatggc

SEQ ID NO: 615928 - DNA, 120 bp, Artificial Sequence
  ENSG00000177076_16 (sequence is synthesized)
atgaacattcccacagacccaccatctttaagacttgacctctgtaagtttaccaaagggctcctcacaattgtggtgggggttctggttcaaaatttggagcaaacatgaagtttttgg

SEQ ID NO: 615929 - DNA, 120 bp, Artificial Sequence
  ENSG00000177076_17 (sequence is synthesized)
aaacgttttctcatttgaagcctccagtatgctgtactattctggaaattaccttcaagagtctcacttcttgtttctgttgtgttttctgtgggcatcatgttcttcacgcttgcagta

SEQ ID NO: 615930 - DNA, 120 bp, Artificial Sequence
  ENSG00000177076_18 (sequence is synthesized)
gaaggtgctttctcggtttcccagagtatccaacggctcacctttctcaagtgctggcagtagctatgcactcacgggctggtttgggtcgctggtgcagcagcgcaaatctgttgcctt

SEQ ID NO: 615931 - DNA, 120 bp, Artificial Sequence
  ENSG00000177076_19 (sequence is synthesized)
ctgaatttttctcacctaatgtgacactggctacaatgaatcttctcttcatcgggctgaatgaaagattcaagaaccatcttcaaggtgcatggtgggaattatcaacctcagggatac

SEQ ID NO: 615932 - DNA, 120 bp, Artificial Sequence
  ENSG00000177076_20 (sequence is synthesized)
tcattttaactcaggcgtgtcctgctttgtaacattccattgttgggagagggcaggacaggtgtgttcttctgtgggcaggagtcatgtcactgtcctacatatgtaagagttgggaag

SEQ ID NO: 615933 - DNA, 120 bp, Artificial Sequence
  ENSG00000177076_21 (sequence is synthesized)
gtgacgatttttgacacatccaggaactcttactctagttagaatttgtaccagatccaaggtgaaaaccccaataagcaactgaatttagagtttaaaaatgaatgactttatgctaca

SEQ ID NO: 615934 - DNA, 120 bp, Artificial Sequence
  ENSG00000177076_22 (sequence is synthesized)
tctgtggttatcaaattatataggttgttgagaagcagaacgctgtttgtagtaagaaatctttgtggaaccccagtgtgtgaagtaaattgtatgttattaaatttatttaaggttaaa

SEQ ID NO: 615935 - DNA, 120 bp, Artificial Sequence
  ENSG00000177082_0 (sequence is synthesized)
agagccgcgcggcccccgaaggctcgcaggcggaagtgagacgccggaagcggtcgttgccatggatcctggggacgactggctggtggaatccttgcgcttgtaccaggatttctatgc

SEQ ID NO: 615936 - DNA, 120 bp, Artificial Sequence
  ENSG00000177082_1 (sequence is synthesized)
attcgacctgtcaggagccactcgagtccttgaatggattgatgacaaaggagtctttgttgctggctatgaaagcctgaaaaagaatgaaattcttcatctgaaattacctctcagact

SEQ ID NO: 615937 - DNA, 120 bp, Artificial Sequence
  ENSG00000177082_2 (sequence is synthesized)
ttctgtaaaggaaaacaagggcttattcccagaaagagatttcaaagtgcgccatggaggattttcagacaggtctatctttgatctaaagcatgtgccacataccagattgctggttac

SEQ ID NO: 615938 - DNA, 120 bp, Artificial Sequence
  ENSG00000177082_3 (sequence is synthesized)
cagtggccttccaggttgttatctgcaggtgtggcaggttgcagaggacagtgatgtcattaaagctgtcagcaccattgctgtgcatgagaaagaggagagtctctggcctagggtggc

SEQ ID NO: 615939 - DNA, 120 bp, Artificial Sequence
  ENSG00000177082_4 (sequence is synthesized)
cgtcttctccacattggcacccggagtcctccatggggcgaggctccgaagtctgcaggtcgttgatctggagtcccggaagaccacgtacacctcagatgtcagtgacagtgaggagct

SEQ ID NO: 615940 - DNA, 120 bp, Artificial Sequence
  ENSG00000177082_5 (sequence is synthesized)
gagtagcctgcaggtcctagatgcagacacctttgccttctgctgtgcttcaggccggctggggcttgttgacacccggcagaagtgggcaccgttggagaatcgcagccctggccctgg

SEQ ID NO: 615941 - DNA, 120 bp, Artificial Sequence
  ENSG00000177082_6 (sequence is synthesized)
gtctggtggagagagatggtgtgctgaagttgggagctggggccagggccctgggcccagcattgccagccttggctcagatgggcgtctttgtcttcttgacccccgggatctctgcca

SEQ ID NO: 615942 - DNA, 120 bp, Artificial Sequence
  ENSG00000177082_7 (sequence is synthesized)
tcctgtgagctcagtccagtgcccagtatccgtacctagccctgacccagagctgctgcgagtgacttgggccccaggcctgaagaattgcttggccatctcaggttttgatggtacagt

SEQ ID NO: 615943 - DNA, 120 bp, Artificial Sequence
  ENSG00000177082_8 (sequence is synthesized)
ccaggtctatgatgccacatcttgggatggaacacggagccaagatggaacacggagccaagtagaacctctcttcactcacagaggtcacatcttcctagatggaaatgggatggaccc

SEQ ID NO: 615944 - DNA, 120 bp, Artificial Sequence
  ENSG00000177082_9 (sequence is synthesized)
tgctcctttggtcaccacccacacctggcatccctgcagaccaaggactttgttatcagcaacaaatgatgcctctctgcatgtgtgggactgggtggacctttgtgccccccgctgaca

SEQ ID NO: 615945 - DNA, 120 bp, Artificial Sequence
  ENSG00000177082_10 (sequence is synthesized)
ccagcatctttccatctaggcctctagaaaggggaggagctgctgtagtagcaagggtgctcatgtaggactcaagtgactaccagtccctgttaccagctgtgtggccttgggcaagtc

SEQ ID NO: 615946 - DNA, 120 bp, Artificial Sequence
  ENSG00000177082_11 (sequence is synthesized)
tgccagcgtcacttagcctcagtttccttatctgtaaaatgaggatagtaagaactacctcgtagtgatattgcgaaggttagaagaaacgcatggcataattacttggtagctattgtt

SEQ ID NO: 615947 - DNA, 120 bp, Artificial Sequence
  ENSG00000177082_12 (sequence is synthesized)
agatctgggagtgtgaaatggtagcgttttgtccctgtcttcacactatcatagggagaatcaaaagagctaacaaatataaacatgctttgtgaatttttttaaagaaaaaaatgtaga

SEQ ID NO: 615948 - DNA, 120 bp, Artificial Sequence
  ENSG00000177082_13 (sequence is synthesized)
ggggccaataaacatgaaaaaatcccagccctagtagcaattaaggaaatagcaaaacaggatttctgctcctcttgagtgggtctcatgggaacacaggtgcactttcccacacttgtc

SEQ ID NO: 615949 - DNA, 120 bp, Artificial Sequence
  ENSG00000177082_14 (sequence is synthesized)
tgtccccccaggtgactaggttcaagagacatttgcttttggtggccccacaaacatttccttttgagggcccatagtgaatattaaagtgtgctggacatggtggctcatgcctgtaat

SEQ ID NO: 615950 - DNA, 80 bp, Artificial Sequence
  ENSG00000177082_15 (sequence is synthesized)
tttcagaggctgaggtgggcagattgcttgagctttcccttaaaaaaaaaaaaaaatttggctgggcatggtggctcatg

SEQ ID NO: 615951 - DNA, 84 bp, Artificial Sequence
  ENSG00000177082_16 (sequence is synthesized)
ggatcacttgagtccaggagttcgagactagcctgaggttagctggttgtggtggtatgagcctgcagtcccagctattcaaga

SEQ ID NO: 615952 - DNA, 120 bp, Artificial Sequence
  ENSG00000177082_17 (sequence is synthesized)
ggttgtggtggtatgagcctgcagtcccagctattcaagaggctgaggtgggagggttgcctgagcctggcagttgaagtttgcagtgagctgtgatcatgccactgtattccagcctgg

SEQ ID NO: 615953 - DNA, 120 bp, Artificial Sequence
  ENSG00000177082_18 (sequence is synthesized)
gcaacagaatgagaccctgttacacacacacacacaaaatagataagttgttcactctgtcagcatctattagcccttcccatgtgcaacactaattacatgctagaaatacataaatga

SEQ ID NO: 615954 - DNA, 86 bp, Artificial Sequence
  ENSG00000177082_19 (sequence is synthesized)
catgtgcaacactaattacatgctagaaatacataaatgagaggcttcctaaggtggttgaattttttttttttttttttttgtag

SEQ ID NO: 615955 - DNA, 80 bp, Artificial Sequence
  ENSG00000177082_20 (sequence is synthesized)
ggcctcccgaaggatttctcctgtgtgaattcgctggttaagtgataattaactgcagttaaaattcaggtcaagcatgt

SEQ ID NO: 615956 - DNA, 120 bp, Artificial Sequence
  ENSG00000177082_21 (sequence is synthesized)
ttcgagatcagcctgggcaccatggtgaacccctgtctctaaaaaaaaagaaagatttttatttaaaaaacctaaacaaattcagataggaatttaaagatagaccaggcacagtggctc

SEQ ID NO: 615957 - DNA, 74 bp, Artificial Sequence
  ENSG00000177082_22 (sequence is synthesized)
cccgtctctactaaaaatataaaaattagagacgggcatggtggtggcacacctgtaatccccagaggctgcag

SEQ ID NO: 615958 - DNA, 120 bp, Artificial Sequence
  ENSG00000177082_23 (sequence is synthesized)
gacagggtgagactccatctcaaaaaaaataaaataaagataaaatcataaacactcataattcagttataccttttttcaagtaactaaagttcaaacttacttaggggaacaggcttt

SEQ ID NO: 615959 - DNA, 120 bp, Artificial Sequence
  ENSG00000177082_24 (sequence is synthesized)
caggctttcctgggtgccacctgcttctcaagtcctgtgctttccacaccacagaatagtaaactgggtgcactgagtgcctggttcccctcagcccttaaccagtgctggcttgtccga

SEQ ID NO: 615960 - DNA, 120 bp, Artificial Sequence
  ENSG00000177082_25 (sequence is synthesized)
gtttagaatcccagggctgactttgttggtggaatgctagctcccattcatttcccacctgcactggacgttttctgaatctccttgaagtccgggagatcttcattccaaagctcttca

SEQ ID NO: 615961 - DNA, 120 bp, Artificial Sequence
  ENSG00000177082_26 (sequence is synthesized)
cttttctgcagcattgtgaccccatctggctggggaactggaagtcctgctcagagaaaagcaggaggggacatggagttctgaaattcactttctgctcccatgtctggaagtgacagg

SEQ ID NO: 615962 - DNA, 120 bp, Artificial Sequence
  ENSG00000177082_27 (sequence is synthesized)
tgaaatgagaatgatagtgcctctcaagaaggtctagttcccagaagagaaagtttaatgactcattttcccccttttactcctttgagggtacaggataatgcccttatctattttcat

SEQ ID NO: 615963 - DNA, 120 bp, Artificial Sequence
  ENSG00000177082_28 (sequence is synthesized)
aataattataatgatgatgataatgaaaactaacgtttgccaagtgctaatactgtgtcaggatcctcataacagcccagggaggtagaaaccatcacaatgtccactgtccagatgaga

SEQ ID NO: 615964 - DNA, 120 bp, Artificial Sequence
  ENSG00000177082_29 (sequence is synthesized)
aaatggaggctaagggtatttaaagaggttgcccaagaacaacaaaccttttaaatggcagactggtgtgtataatctacgcagggttcacatctatggaacactttattttaaattctt

SEQ ID NO: 615965 - DNA, 72 bp, Artificial Sequence
  ENSG00000177082_30 (sequence is synthesized)
gcagggttcacatctatggaacactttattttaaattcttttaataatattattatttttcagctgagtctg

SEQ ID NO: 615966 - DNA, 120 bp, Artificial Sequence
  ENSG00000177082_31 (sequence is synthesized)
tcccgagtagctgggactacaggcttgcgccaccatgcccggcttatagggcactttagatggaaacaaatgactggatctttaactcctacctttctctcctctcttcctgtaatgttg

SEQ ID NO: 615967 - DNA, 120 bp, Artificial Sequence
  ENSG00000177082_32 (sequence is synthesized)
taatgttgttactgaaggcaggaagggagactccttggctaaagagcagagcaagagcctcaaagtggtctttgtgagccaccctggactactggttcagtagagggttgagtcaagcaa

SEQ ID NO: 615968 - DNA, 120 bp, Artificial Sequence
  ENSG00000177082_33 (sequence is synthesized)
tatttgaggacgggatataaacagtatttcttaaagttgtcaccaatttttcccccgatgaggccattccagacccaaattagtcataacagagccaggacaataatcacatctcctgat

SEQ ID NO: 615969 - DNA, 120 bp, Artificial Sequence
  ENSG00000177082_34 (sequence is synthesized)
tctgagcctgaatgcttcccacaggactgcgtcgctcccactgctctgaggtccattgtgggggagagttgccactgggattccacctcaaggcctggggaccaagcctccaggattcct

SEQ ID NO: 615970 - DNA, 120 bp, Artificial Sequence
  ENSG00000177082_35 (sequence is synthesized)
cttgagactcctccactatttcattaccatcccgccacatcttctagtgctatgccctggttccctttggaatcctctcaatcccaaagaaggcctcctaccacctctaaggcatcaaag

SEQ ID NO: 615971 - DNA, 120 bp, Artificial Sequence
  ENSG00000177082_36 (sequence is synthesized)
gtgttagaaagtgccccaagactcaacagggcatccatctcatcatagaagacactggtgcctggtgtgtaggtgctcctggctttgcagtagtcggtcaggaggtttttgaaccgatag

SEQ ID NO: 615972 - DNA, 120 bp, Artificial Sequence
  ENSG00000177082_37 (sequence is synthesized)
caacattgctccagggtccacaggaagccatgttctcacagctgctcagccataatccggtacacctggtggtttcgatggcaggtgcggagtttttcgtggatccaggcctctgagaat

SEQ ID NO: 615973 - DNA, 120 bp, Artificial Sequence
  ENSG00000177082_38 (sequence is synthesized)
tcccagaaaaatcttggtttctttgtatccccagtgcactcctgccaccttctcatcctccagggcctgccactccagctcgctccaggtcttggcttttctccagattagcacctggcc

SEQ ID NO: 615974 - DNA, 120 bp, Artificial Sequence
  ENSG00000177082_39 (sequence is synthesized)
agacttgactctcaccccagccactgagcagtctttcacactctctttttctccagaatttgaagatctagatgctgtgggttttcatcctactccacgtgggagttcactttgggccta

SEQ ID NO: 615975 - DNA, 120 bp, Artificial Sequence
  ENSG00000177082_40 (sequence is synthesized)
tggattggaaaatctgtttgcaggcagacaaaagggagatgtaatggtttggtaaatctaatcccaaccattttatatgccagggagaggagatagtaattttttttttttaattctggg

SEQ ID NO: 615976 - DNA, 120 bp, Artificial Sequence
  ENSG00000177082_41 (sequence is synthesized)
gggattcttgggaaagctcagtgaaaagaacaactagaaaaaaaaattcaggcccaaatgcataactatatatccacgttcatctatcttaaataaaattcagacacatacctaaactga

SEQ ID NO: 615977 - DNA, 120 bp, Artificial Sequence
  ENSG00000177082_42 (sequence is synthesized)
ttgatgacaaaggtggtatacctttctagccctgaaggagagggaatctcactcctgagctgggtttcaggagctaagcctagagggacccaacccactcttctgggcacctgagagtca

SEQ ID NO: 615978 - DNA, 120 bp, Artificial Sequence
  ENSG00000177082_43 (sequence is synthesized)
agtgcccagttagtttgcgccagcctctgagttcagctcagaacacagatgatctcattgattcctcacgtcaaccttgggaaatctgggtaccctgggacgtccacacatgaggaccga

SEQ ID NO: 615979 - DNA, 120 bp, Artificial Sequence
  ENSG00000177082_44 (sequence is synthesized)
ggctcagggacatcaagggactggcctggtcccagaaacagggagtaaaatgggaagtaaactcagtcccacgtctgcctgactccagagtttgggccactgaaccatgcggctgccatc

SEQ ID NO: 615980 - DNA, 120 bp, Artificial Sequence
  ENSG00000177082_45 (sequence is synthesized)
atctcgcgagagccgcgcggcccccgaaggctcgcaggcggaagtgagacgccggaagcggtcgttgccatggatcctggggacgactggctggtggaatccttgcgcttgtaaatcgta

SEQ ID NO: 615981 - DNA, 120 bp, Artificial Sequence
  ENSG00000177082_46 (sequence is synthesized)
gttgcagaggacagtggtgagtgaatttgacttgatggggtttggggttctaggaaagtgtgactcatacacccctgtcccctaatctgagccagttaagaaggagactcaggctgggga

SEQ ID NO: 615982 - DNA, 120 bp, Artificial Sequence
  ENSG00000177082_47 (sequence is synthesized)
agcaaaactccgtctccaaaaaaaaaagtagtagtagactcagagccaggtgggaattaatctactttaatgcagacaaggtgaattagcaaccatagcatggcatccaagccccaaatg

SEQ ID NO: 615983 - DNA, 120 bp, Artificial Sequence
  ENSG00000177082_48 (sequence is synthesized)
attagcaaccatagcatggcatccaagccccaaatggagcttcctgtaacctgctcctggaattgagttcatccagagaactactctccctaggcaggggcagtggcaacagcagagctt

SEQ ID NO: 615984 - DNA, 120 bp, Artificial Sequence
  ENSG00000177082_49 (sequence is synthesized)
aggctgctcaggtgagctcacctctttggcagcattaagcatatattaagagaagcctcagatgtagaatacagagaggagaacctccctgctaaccaagcaggtggagacaaccaaata

SEQ ID NO: 615985 - DNA, 120 bp, Artificial Sequence
  ENSG00000177082_50 (sequence is synthesized)
aaatcgtacggggctgggacatgggagctgggcctggagcttgcctggcgggcggatgggtgtgggtggaggcacgttggggatcctggtgcagagtgggccagctgtggcctcggggct

SEQ ID NO: 615986 - DNA, 89 bp, Artificial Sequence
  ENSG00000177082_51 (sequence is synthesized)
acccactcttctgggcacctgagagtcacttgtagcaatttgatgccccatcagcactaatattcctcttattaagatctctgaccggg

SEQ ID NO: 615987 - DNA, 120 bp, Artificial Sequence
  ENSG00000177082_52 (sequence is synthesized)
tgcagtgagctgagatcacgacactgtattccagcgtggctaacaaaaaaagtcttcaggctgggcacttcaggaggctgaggcagcgggcagattgcttgatcccaggaatttgagact

SEQ ID NO: 615988 - DNA, 82 bp, Artificial Sequence
  ENSG00000177082_53 (sequence is synthesized)
caggctgggcacttcaggaggctgaggcagcgggcagattgcttgatcccaggaatttgagactaacctaagcaaagcatgg

SEQ ID NO: 615989 - DNA, 120 bp, Artificial Sequence
  ENSG00000177082_54 (sequence is synthesized)
tgggaggatcacttgagcctggcaggttgaggctgcagtgagctgtgatcggaccactgcactccagcctggctgacacagcgagaccttgtctgaaaaagacacaaccaggagtctttg

SEQ ID NO: 615990 - DNA, 120 bp, Artificial Sequence
  ENSG00000177082_55 (sequence is synthesized)
ctgcctcctcatctccattcccaccccctcagcacacaggcacatgtgagtgcacaagtgtgtgcacacagatacacacagatttagaatacaaagaaaccactgctgtggcttcatagc

SEQ ID NO: 615991 - DNA, 120 bp, Artificial Sequence
  ENSG00000177082_56 (sequence is synthesized)
cccccagagcccttggactaatgtaagtaacagttctaccggagttgctccagggaatagatacgggacagaaagatgctcttctattgctcttgggtgataattgctcagttgggagag

SEQ ID NO: 615992 - DNA, 120 bp, Artificial Sequence
  ENSG00000177082_57 (sequence is synthesized)
gccaagagtctctgggtcaggttgtgtttggccccatacttgtgtcctctgtaggtgaccatcatgacacatggaagcttgggctcagtctccctaaagttgattgagcctgctccttat

SEQ ID NO: 615993 - DNA, 120 bp, Artificial Sequence
  ENSG00000177082_58 (sequence is synthesized)
ctgtgaaatgagggtggttggccttgatgatcttgcagtaagatgtcctgatatgggaagtggagtcccaagctaagtgtgctggaaaggggaagggacctgtgtggataagctccccat

SEQ ID NO: 615994 - DNA, 88 bp, Artificial Sequence
  ENSG00000177082_59 (sequence is synthesized)
ctcatgcctgtaattgtttgaattcaggagttgaagaccaccttgtacaacatggtgaaacctgtctctattaaaaatacaaaaaatt

SEQ ID NO: 615995 - DNA, 64 bp, Artificial Sequence
  ENSG00000177082_60 (sequence is synthesized)
ttgggaggccaaggtaggtgggtcacctgaccaggagtttgagcccagcccgagggtgcacatc

SEQ ID NO: 615996 - DNA, 65 bp, Artificial Sequence
  ENSG00000177082_61 (sequence is synthesized)
tgaaccaaaacaaaacttgactcaaagccaaggatgttccattcagtgtaaaaaagatgtggact

SEQ ID NO: 615997 - DNA, 120 bp, Artificial Sequence
  ENSG00000177082_62 (sequence is synthesized)
agccaaggatgttccattcagtgtaaaaaagatgtggactttcttgtccaccttacaagacaatgacatctgtaatgtgacctgtacttgctaggctttagcaagtcactcgaggtcatg

SEQ ID NO: 615998 - DNA, 120 bp, Artificial Sequence
  ENSG00000177082_63 (sequence is synthesized)
gaacatgtttttgaagaaataatatcagttcatgaattctgtacctgtttcttgtcgctgaaggggtaagtgacatcagcagcatgttcattccttttcttgtcttctacctgttctcca

SEQ ID NO: 615999 - DNA, 120 bp, Artificial Sequence
  ENSG00000177082_64 (sequence is synthesized)
caaaagtataaaaagccagaattgctttttgggttttgagatggcattgtcttccatttgcaaaaaacagtttataagacaaataataaagaaattgaaatgtttctgatggtttcaaaa

SEQ ID NO: 616000 - DNA, 120 bp, Artificial Sequence
  ENSG00000177082_65 (sequence is synthesized)
atgtaaacataagccagagtagttatgtctcaacatcatctcttgccagccggcagctccttttcttccttgatcttctaaatgtacaggggaagacagctggcagcctgtcatgtttca

SEQ ID NO: 616001 - DNA, 120 bp, Artificial Sequence
  ENSG00000177082_66 (sequence is synthesized)
gctccagccggcatcaccccccagcccaactcagccactataaaaactgagttcaactctctgtgccaggtgttggggatacacagtgaataagaggtaagccctggcctctaagggctc

SEQ ID NO: 616002 - DNA, 120 bp, Artificial Sequence
  ENSG00000177082_67 (sequence is synthesized)
ctatgctggggcaggattaggcagtcccagggaccagcacccaaccagctgagcagacaatggtgagatgagtgggaagggagatgtgatttattctgcctgggactggtgggaagggac

SEQ ID NO: 616003 - DNA, 120 bp, Artificial Sequence
  ENSG00000177082_68 (sequence is synthesized)
tctttcttccaggagactgttgggtgctcaggaaggagcctccagcaccatgataaacctggctccaggagttaaagttgctcacagagaaattcgaactctccaggttcttcagtggca

SEQ ID NO: 616004 - DNA, 120 bp, Artificial Sequence
  ENSG00000177082_69 (sequence is synthesized)
ggccttttcctaccctggctactaaacttccacacattggcagcaggcctttcctagcctagcaggaattcaggtctcaggttggtggaggggcctgcagacagtaagacactgggacag

SEQ ID NO: 616005 - DNA, 72 bp, Artificial Sequence
  ENSG00000177082_70 (sequence is synthesized)
gttggtggaggggcctgcagacagtaagacactgggacagacatcgggctgggtcagaaagaaaaggggaca

SEQ ID NO: 616006 - DNA, 120 bp, Artificial Sequence
  ENSG00000177084_0 (sequence is synthesized)
cgccaaatttctcccctgaagcagaggtggtagccaacggctccatgtctctgaggagcggcgggcggcggcgcgcggacccaggcgcggatggcgaggccagcagggatgatggcgcca

SEQ ID NO: 616007 - DNA, 120 bp, Artificial Sequence
  ENSG00000177084_1 (sequence is synthesized)
cttcctcagtttcggcactcaagcgcctggaacggagtcagtggacggataagatggatttgcggtttggttttgagcggctgaaggagcctggtgagaagacaggctggctcattaaca

SEQ ID NO: 616008 - DNA, 120 bp, Artificial Sequence
  ENSG00000177084_2 (sequence is synthesized)
tgcatcctaccgagattttagatgaagataagcgcttaggcagtgcagtggattactactttattcaagatgacggaagcagatttaaggtggctttgccctataaaccgtatttctaca

SEQ ID NO: 616009 - DNA, 120 bp, Artificial Sequence
  ENSG00000177084_3 (sequence is synthesized)
ttgcgaccagaaagggttgtgagcgagaagtttcatcttttctctccaagaagtttcagggcaaaattgcaaaagtggagactgtccccaaagaggatctggacttgccaaatcacttgg

SEQ ID NO: 616010 - DNA, 120 bp, Artificial Sequence
  ENSG00000177084_4 (sequence is synthesized)
tgggtttgaagcgaaattacatcaggctgtccttccacactgtggaggatcttgtcaaagtgaggaaggagatctcccctgccgtgaagaagaacagggagcaggatcacgccagcgacg

SEQ ID NO: 616011 - DNA, 120 bp, Artificial Sequence
  ENSG00000177084_5 (sequence is synthesized)
cgtacacagctctgctttccagtgttctgcagaggggcggtgtcattactgatgaagaggaaacctctaagaagatagctgaccagttggacaacattgtggacatgcgcgagtacgatg

SEQ ID NO: 616012 - DNA, 120 bp, Artificial Sequence
  ENSG00000177084_6 (sequence is synthesized)
ttccctaccacatccgcctctccattgacctgaagatccacgtggctcattggtacaatgtcagataccgaggaaatgcttttccggtagaaatcacccgccgagatgaccttgttgaac

SEQ ID NO: 616013 - DNA, 120 bp, Artificial Sequence
  ENSG00000177084_7 (sequence is synthesized)
gacctgaccctgtggttttggcatttgacattgagacgaccaaactgcccctcaagtttcctgatgctgagacagaccagattatgatgatttcctacatgatcgatggccagggctacc

SEQ ID NO: 616014 - DNA, 120 bp, Artificial Sequence
  ENSG00000177084_8 (sequence is synthesized)
tcatcaccaacagggagattgtttcagaagatattgaagattttgagttcacccccaagccagaatatgaaggccccttttgtgtcttcaatgaacccgatgaggctcatctgatccaaa

SEQ ID NO: 616015 - DNA, 120 bp, Artificial Sequence
  ENSG00000177084_9 (sequence is synthesized)
ggtggtttgaacacgtccaggagaccaaacccaccatcatggtcacctacaacggggacttttttgactggccatttgtggaggcccgggcagcagtccacggtctgagcatgcagcagg

SEQ ID NO: 616016 - DNA, 120 bp, Artificial Sequence
  ENSG00000177084_10 (sequence is synthesized)
agataggcttccagaaggacagccagggggagtacaaggcgccccagtgcatccacatggactgcctcaggtgggtgaagagggacagttaccttcctgtgggcagtcataatctcaagg

SEQ ID NO: 616017 - DNA, 120 bp, Artificial Sequence
  ENSG00000177084_11 (sequence is synthesized)
cggccgccaaggccaagctaggctatgatcccgtggagctagacccggaggacatgtgccggatggccacggagcagccccagactctggccacgtattctgtgtcagatgctgtcgcca

SEQ ID NO: 616018 - DNA, 120 bp, Artificial Sequence
  ENSG00000177084_12 (sequence is synthesized)
cttactacctgtacatgaagtacgtccacccattcatctttgctctgtgcaccattattcccatggagcccgacgaggtgctgcggaagggctctggcactctgtgtgaggccttgctga

SEQ ID NO: 616019 - DNA, 120 bp, Artificial Sequence
  ENSG00000177084_13 (sequence is synthesized)
tggtgcaggccttccacgccaacatcatcttccccaacaagcaagagcaggagttcaataagctgacggacgacggacacgtgctggactctgagacctacgtcgggggccacgtggagg

SEQ ID NO: 616020 - DNA, 120 bp, Artificial Sequence
  ENSG00000177084_14 (sequence is synthesized)
ccctcgagtctggggttttccgcagcgatatcccttgccggtttaggatgaatcctgccgcctttgacttcctgctgcagcgggttgagaagaccttgcgccacgcccttgaggaagagg

SEQ ID NO: 616021 - DNA, 120 bp, Artificial Sequence
  ENSG00000177084_15 (sequence is synthesized)
agaaagtgcctgtggagcaagtcaccaactttgaagaggtgtgtgatgagattaagagcaagcttgcctccctgaaggacgttcccagccgcatcgagtgtccactcatctaccacctgg

SEQ ID NO: 616022 - DNA, 120 bp, Artificial Sequence
  ENSG00000177084_16 (sequence is synthesized)
acgtgggggccatgtaccccaacatcatcctgaccaaccgcctgcagccctctgccatggtggacgaagccacctgtgctgcctgtgacttcaataagcctggagcaaactgccagcgga

SEQ ID NO: 616023 - DNA, 120 bp, Artificial Sequence
  ENSG00000177084_17 (sequence is synthesized)
agatggcctggcagtggaggggcgagttcatgccagccagtcgcagcgaataccatcggatccagcaccagctggagtcagagaagttcccccccttgttcccagaggggccagctcggg

SEQ ID NO: 616024 - DNA, 120 bp, Artificial Sequence
  ENSG00000177084_18 (sequence is synthesized)
cctttcatgaactgtcccgcgaggaacaggcgaaatacgagaagagaaggctggcggattactgccggaaagcctacaagaagatccacatcaccaaggtggaagagcgtctcaccacca

SEQ ID NO: 616025 - DNA, 120 bp, Artificial Sequence
  ENSG00000177084_19 (sequence is synthesized)
tctgccagcgggaaaactccttctacgtggacaccgtgcgtgccttccgggacaggcgttacgagttcaaagggctccacaaggtgtggaaaaagaagctctcggcggccgtggaggtgg

SEQ ID NO: 616026 - DNA, 120 bp, Artificial Sequence
  ENSG00000177084_20 (sequence is synthesized)
gcgacgcggctgaggtgaagcgctgcaagaacatggaggtgctgtatgactcgctgcagctggcccacaagtgcatcctgaactccttctatggctatgtcatgcgcaagggggctcgct

SEQ ID NO: 616027 - DNA, 120 bp, Artificial Sequence
  ENSG00000177084_21 (sequence is synthesized)
ggtactccatggagatggctggcatcgtctgcttcacaggggccaacatcatcacccaggcacgggagctgatcgagcagattgggaggcccttagagctggacacagatggtatatggt

SEQ ID NO: 616028 - DNA, 120 bp, Artificial Sequence
  ENSG00000177084_22 (sequence is synthesized)
gcgtcctgcccaacagcttcccagaaaattttgtcttcaagacgaccaatgtgaagaagcccaaagtgaccatctcctacccaggcgccatgttgaacatcatggtcaaggaaggcttca

SEQ ID NO: 616029 - DNA, 120 bp, Artificial Sequence
  ENSG00000177084_23 (sequence is synthesized)
ccaatgaccagtaccaggagctggctgagccgtcctcactcacctacgtcacccgctcagagaacagcatcttttttgaggttgatgggccctaccttgccatgattcttccagcctcca

SEQ ID NO: 616030 - DNA, 120 bp, Artificial Sequence
  ENSG00000177084_24 (sequence is synthesized)
aggaagaaggcaagaaattgaagaagaggtatgctgtgttcaatgaagacggttctctggctgagctcaagggctttgaggtcaaacgccgcggggaactgcagctgattaagatcttcc

SEQ ID NO: 616031 - DNA, 120 bp, Artificial Sequence
  ENSG00000177084_25 (sequence is synthesized)
aatcctcggtgtttgaggccttcctcaagggcagcacgctggaagaggtgtatggctctgtagccaaggtggctgactactggctggacgtgctgtacagcaaggcagccaacatgcctg

SEQ ID NO: 616032 - DNA, 120 bp, Artificial Sequence
  ENSG00000177084_26 (sequence is synthesized)
actctgagctattcgagctcatctctgagaaccgttccatgtctcggaagctggaagattacggggagcagaagtctacgtccatcagcacagcaaagcgcctggccgagttcctgggag

SEQ ID NO: 616033 - DNA, 120 bp, Artificial Sequence
  ENSG00000177084_27 (sequence is synthesized)
accagatggtcaaggatgcagggctgagttgccgctacatcatctcccgcaagcccgagggctcccctgtcacggagagggccatcccacttgccattttccaagcagagcccacggtga

SEQ ID NO: 616034 - DNA, 120 bp, Artificial Sequence
  ENSG00000177084_28 (sequence is synthesized)
ggaagcactttctccggaaatggctcaagagctcttcccttcaagactttgatattcgagcaattctggattgggactactacattgagcggctgggaagcgccatccagaagatcatca

SEQ ID NO: 616035 - DNA, 120 bp, Artificial Sequence
  ENSG00000177084_29 (sequence is synthesized)
ccatccctgcggccctgcagcaggtaaagaacccagtgccacgtgtcaaacaccccgactggctgcacaaaaaactgctggagaagaatgatgtctacaagcagaagaagatcagtgagc

SEQ ID NO: 616036 - DNA, 120 bp, Artificial Sequence
  ENSG00000177084_30 (sequence is synthesized)
tcttcaccctggagggcaggagacaggtcacgatggccgaggcctcagaagacagtccgaggccaagtgctcctgacatggaggacttcggcctcgtaaagctgcctcacccagcagccc

SEQ ID NO: 616037 - DNA, 120 bp, Artificial Sequence
  ENSG00000177084_31 (sequence is synthesized)
ctgtcactgtgaagaggaagcgagttctttgggagagccaggaggagtcccaggacctcacgccgactgtgccctggcaggaaatcttggggcagcctcccgccctgggaaccagccagg

SEQ ID NO: 616038 - DNA, 120 bp, Artificial Sequence
  ENSG00000177084_32 (sequence is synthesized)
gcagctgcaggcccggcagcgcctcgcccgcaggaagaggcagcgtctggagtcggcagagggtgtgctcaggcccggggccatccgggatggtcctgccacggggctggggagcttctt

SEQ ID NO: 616039 - DNA, 120 bp, Artificial Sequence
  ENSG00000177084_33 (sequence is synthesized)
gcgaagaactgcccgcagcatcctggaccttccgtggcagattgtgcagatcagcgagaccagccaggccggcctgttcaggctgtgggcgctcgttggcagtgacttgcactgcatcag

SEQ ID NO: 616040 - DNA, 120 bp, Artificial Sequence
  ENSG00000177084_34 (sequence is synthesized)
gctgagcatcccccgtgtgttctacgtgaaccagcgagtcgctaaagcggaggagggtgcttcgtatcgcaaggtaaatcgggtccttcctcgctccaacatggtctacaatctctatga

SEQ ID NO: 616041 - DNA, 120 bp, Artificial Sequence
  ENSG00000177084_35 (sequence is synthesized)
gtattcagtgccagaggacatgtaccaggaacacatcaacgagatcaacgctgagctgtcagcgccagacatcgagggcgtatatgagactcaggttccgttactgttccgggccctggt

SEQ ID NO: 616042 - DNA, 120 bp, Artificial Sequence
  ENSG00000177084_36 (sequence is synthesized)
gcacctgggctgtgtgtgtgtggtcaataaacagctggtgaggcacctttcaggctgggaagcagagacctttgctcttgagcacctggagatgcgctctctggcccagttcagctacct

SEQ ID NO: 616043 - DNA, 120 bp, Artificial Sequence
  ENSG00000177084_37 (sequence is synthesized)
ggaaccagggagtatccgccatatctacctgtaccaccacgcacaggcccacaaagcgctcttcgggatcttcatcccctcacagcgcagggcatccgtctttgtgctggacactgtgcg

SEQ ID NO: 616044 - DNA, 120 bp, Artificial Sequence
  ENSG00000177084_38 (sequence is synthesized)
cagcaaccagatgcccagccttggcgccctgtactcagcagagcacggcctcctcctggagaaggtgggccctgagctcctgccaccccccaaacacaccttcgaagttcgggcagaaac

SEQ ID NO: 616045 - DNA, 120 bp, Artificial Sequence
  ENSG00000177084_39 (sequence is synthesized)
tgacctgaagaccatctgcagagccatccagcgattcctgctcgcctacaaggaggagcgccgggggcccacactcatcgctgttcagtccagctgggagctgaagaggctggccagtga

SEQ ID NO: 616046 - DNA, 120 bp, Artificial Sequence
  ENSG00000177084_40 (sequence is synthesized)
aattcctgtcttggaggaattcccactggtgcctatctgtgtggctgacaagatcaactatggggtcctggactggcagcgccatggagcccggcgcatgatccgtcactacctcaacct

SEQ ID NO: 616047 - DNA, 120 bp, Artificial Sequence
  ENSG00000177084_41 (sequence is synthesized)
ggacacctgcctgtcgcaggccttcgagatgagcaggtactttcacattcccattgggaacctaccagaggacatctccacattcggctccgacctcttctttgcccgccacctccagcg

SEQ ID NO: 616048 - DNA, 120 bp, Artificial Sequence
  ENSG00000177084_42 (sequence is synthesized)
ccacaaccacctgctctggctgtcccctacagcccgccctgacctgggtggaaaggaggctgatgacaactgtcttgtcatggagttcgatgaccaagccactgttgagatcaacagttc

SEQ ID NO: 616049 - DNA, 120 bp, Artificial Sequence
  ENSG00000177084_43 (sequence is synthesized)
aggctgttactccacagtgtgtgtggagctggaccttcagaacctggccgtcaacaccattctccagtctcaccatgtcaacgacatggagggggccgacagcatggggatcagcttcga

SEQ ID NO: 616050 - DNA, 120 bp, Artificial Sequence
  ENSG00000177084_44 (sequence is synthesized)
cgtgatccagcaggcctccctggaggacatgatcacgggtggtcaggctgccagtgccccggccagctacgatgagacagccctgtgctctaacaccttcaggatcctgaagagcatggt

SEQ ID NO: 616051 - DNA, 120 bp, Artificial Sequence
  ENSG00000177084_45 (sequence is synthesized)
cgtgggctgggtgaaggagatcacccagtaccacaacatctatgcagacaaccaggtgatgcacttctaccgctggcttcggtcgccatcctctctgcttcatgaccctgccctgcaccg

SEQ ID NO: 616052 - DNA, 120 bp, Artificial Sequence
  ENSG00000177084_46 (sequence is synthesized)
cacactccacaacatgatgaagaagctcttcctgcagctcatcgctgagttcaagcgcctggggtcatcagtcatctacgccaacttcaaccgcatcatcctctgtacaaagaagcgccg

SEQ ID NO: 616053 - DNA, 120 bp, Artificial Sequence
  ENSG00000177084_47 (sequence is synthesized)
tgtggaagatgccatcgcttacgtggagtacatcaccagcagcatccattcaaaggagaccttccattctctgacaatttctttctctcgatgctgggaatttcttctctggatggatcc

SEQ ID NO: 616054 - DNA, 120 bp, Artificial Sequence
  ENSG00000177084_48 (sequence is synthesized)
atctaactatggcggaatcaaaggaaaagtttcatctcgtattcactgtggactgcaagactcccagaaagcagggggagcagaggatgagcaggaaaatgaggacgatgaggaggaaag

SEQ ID NO: 616055 - DNA, 120 bp, Artificial Sequence
  ENSG00000177084_49 (sequence is synthesized)
agatggggaggaggaggaagaggcggaggaatccaacgtggaggatttactggaaaacaactggaacattttgcagtttttgccacaggcagcctcctgccagaactacttcctcatgat

SEQ ID NO: 616056 - DNA, 120 bp, Artificial Sequence
  ENSG00000177084_50 (sequence is synthesized)
tgtttcagcgtacatcgtggccgtgtaccactgcatgaaggacgggctgaggcgcagtgctccagggagcacccccgtgaggaggaggggggccagccagctctcccaggaggccgaggg

SEQ ID NO: 616057 - DNA, 120 bp, Artificial Sequence
  ENSG00000177084_51 (sequence is synthesized)
ggcggtcggagcccttcccggaatgatcaccttctctcaggattatgtcgcaaatgagctcactcagagcttcttcaccatcactcagaagattcagaagaaagtcacaggctctcggaa

SEQ ID NO: 616058 - DNA, 120 bp, Artificial Sequence
  ENSG00000177084_52 (sequence is synthesized)
ctccactgagctctcagagatgtttcctgtcctccccggttcccacttgctgctcaataaccctgccctggagttcatcaaatacgtgtgcaaggtgctgtccctggacaccaacatcac

SEQ ID NO: 616059 - DNA, 120 bp, Artificial Sequence
  ENSG00000177084_53 (sequence is synthesized)
aaaccaggtgaataagctgaaccgagacctgcttcgcctggtggatgtcggcgagttctccgaggaggcccagttccgagacccctgccgctcctacgtgcttcctgaggtcatctgccg

SEQ ID NO: 616060 - DNA, 120 bp, Artificial Sequence
  ENSG00000177084_54 (sequence is synthesized)
cagctgtaacttctgccgcgacctggacctgtgtaaagactcttccttctcagaggatggggcggtcctgcctcagtggctctgctccaactgtcaggcgccctacgactcctctgccat

SEQ ID NO: 616061 - DNA, 120 bp, Artificial Sequence
  ENSG00000177084_55 (sequence is synthesized)
cgagatgacgctggtggaagttctacagaagaagctgatggccttcaccctgcaggacctggtctgcctgaagtgccgcggggtgaaggagaccagcatgcctgtgtactgcagctgcgc

SEQ ID NO: 616062 - DNA, 120 bp, Artificial Sequence
  ENSG00000177084_56 (sequence is synthesized)
gggagacttcgccctcaccatccacacccaggtcttcatggaacagatcggaatattccggaacattgcccagcactacggcatgtcgtacctcctggagaccctggagtggctgctgca

SEQ ID NO: 616063 - DNA, 120 bp, Artificial Sequence
  ENSG00000177084_57 (sequence is synthesized)
gaagaacccacagctgggccattagccagccccgggccccgggtgcctctgcgtccgtgccaggcctcctgatgccaaggccacatccccgtgcttccagtgaccagaccactgaccacc

SEQ ID NO: 616064 - DNA, 120 bp, Artificial Sequence
  ENSG00000177084_58 (sequence is synthesized)
ctgactgtccaaacctgtgaccccaggccagggaacggggaggaaaccaaagaaaaccattttcagggagctcagacgtcacaggagggagcgggagcaggatgtggccctggcctcgcc

SEQ ID NO: 616065 - DNA, 120 bp, Artificial Sequence
  ENSG00000177084_59 (sequence is synthesized)
agagcacctgaagaagcaggccgtgagcgaggctgcgagtgccctgggcgccgtttctcacgcagtgaatgcttttccaggcctctgttgcttcctgcaccacacctggtggggtgggag

SEQ ID NO: 616066 - DNA, 120 bp, Artificial Sequence
  ENSG00000177084_60 (sequence is synthesized)
cgtcctctaggtgcccctagttctttgtcctgcctcccagagggaggaaaagcccctgggggcttctggctccctgagattgggctctgagacgagacgggttcccaaggccctggtggg

SEQ ID NO: 616067 - DNA, 120 bp, Artificial Sequence
  ENSG00000177084_61 (sequence is synthesized)
gctggagtctcacctgtttgcatggagaaatgggctggccccacagcctcacaggagcagtttgtgggctggtttccccaggaatccagaccctaacccgtgagaatctggattttggct

SEQ ID NO: 616068 - DNA, 120 bp, Artificial Sequence
  ENSG00000177084_62 (sequence is synthesized)
tgtgagccctgcttatttggagccgggtctagagggaaccctctatcagcctcaggaaaacaagacctctgtgcacctcacttttggctcactgcagcccttgtccttcacctccacaca

SEQ ID NO: 616069 - DNA, 120 bp, Artificial Sequence
  ENSG00000177084_63 (sequence is synthesized)
ggaccagctggaagcagaaagaagaaaggccaatttcacagggcaccaaacaagtatgaaatgtaaatcagaaatgcagacaccccagacgagagcctcacaggagggagggggccccac

SEQ ID NO: 616070 - DNA, 120 bp, Artificial Sequence
  ENSG00000177084_64 (sequence is synthesized)
aggctccccaggaggctcgtgtctttggcccagagccagccttagtttgtccctgccatctactgtctgaggccatcgctgctacactttgtttttatttgtatttcatactgaagtttc

SEQ ID NO: 616071 - DNA, 120 bp, Artificial Sequence
  ENSG00000177084_65 (sequence is synthesized)
tattcaccacagatgtttcctccagtgaaagggaagcactgacggttgccagttgctttgctagtgacatgaaaacaggctcgttttttctagaaagcagcctgagtcttctgtgtgtta

SEQ ID NO: 616072 - DNA, 120 bp, Artificial Sequence
  ENSG00000177084_66 (sequence is synthesized)
ctcagcaaggaacatgtagacatggttatgaacgtgcacgtttgcctgtatgcatgcacgtggttactcagaaacgcagacatgtttacgcacacacgcatgtctttgcctatacgcatg

SEQ ID NO: 616073 - DNA, 120 bp, Artificial Sequence
  ENSG00000177084_67 (sequence is synthesized)
cgcgtggttactcagaaacgtagacatgtttacgcacgcatgcgtttatgtatgtgcatgcacatggttatgccgtgagaaacatgtagacatagttacgaacatgcacgtgtttgcctg

SEQ ID NO: 616074 - DNA, 120 bp, Artificial Sequence
  ENSG00000177084_68 (sequence is synthesized)
tacgcatgcacgtggttactcaatgagaaacgcagacatgtctacgcacacgcatgtgtttatgtatatgcatgcccatggttacgctgtgaggaacatgtagacatgtttacgtgcaca

SEQ ID NO: 616075 - DNA, 120 bp, Artificial Sequence
  ENSG00000177084_69 (sequence is synthesized)
cacgcacgtgtttacacatacgcacgtgttactccccgaggaacctgtaggcatgtttgtgcatacatatgcacgcagatgtatacattgatgtttgtgaacagctgttacacgtcctta

SEQ ID NO: 616076 - DNA, 120 bp, Artificial Sequence
  ENSG00000177084_70 (sequence is synthesized)
tttccatgttcatttgataagagttaggatcagattttgggtgattttcactgttactgagctgtgtgcctgtcttccttacccagggccatcccacttgccattttccaagcagagccc

SEQ ID NO: 616077 - DNA, 120 bp, Artificial Sequence
  ENSG00000177084_71 (sequence is synthesized)
tctggtccccatactacagcagcatctgccccactgttagtatttgttgagtgaataatgagttagtccaggaatgggagcaaccaagccgttccgacctccagctgtaccctccccttt

SEQ ID NO: 616078 - DNA, 120 bp, Artificial Sequence
  ENSG00000177084_72 (sequence is synthesized)
cgagtgggaatccacacacagagcgtctcttctcaggaagcttaaagcactttcacattgctgtggacttctttgtagtgagaatctctaggcagagtgtgtgggcagggtgggaacgcc

SEQ ID NO: 616079 - DNA, 120 bp, Artificial Sequence
  ENSG00000177084_73 (sequence is synthesized)
cattccgtcagatcagaattgcagctccatgagctttgttctcagggtatgaccgtcttttctgccagagacgggcggaggggcggggcaggaataagggccaacatgaggctgctgctt

SEQ ID NO: 616080 - DNA, 120 bp, Artificial Sequence
  ENSG00000177084_74 (sequence is synthesized)
ctgaactttgggagaggaatttggaatagcttgaagaagagaaagagcagacctctgactgctgtgacttgggttcaggctcatctgatccaaaggtggtttgaacacgtccaggagacc

SEQ ID NO: 616081 - DNA, 120 bp, Artificial Sequence
  ENSG00000177084_75 (sequence is synthesized)
aacccaccatcatggtcacctacaacggggacttttttgactggtgagtctgtgtcttctctatgagtaactgggcagcatttgagagggagggcgttgcgtggtgcaggggcgcttccc

SEQ ID NO: 616082 - DNA, 120 bp, Artificial Sequence
  ENSG00000177084_76 (sequence is synthesized)
atgtcgacttaggaggtggctcctgggttcactctgcacctcccgtgtctgggttcctccctgggtctgagggaggaatggagaaaggggcattagagcctgacctgcccacttgcttgt

SEQ ID NO: 616083 - DNA, 120 bp, Artificial Sequence
  ENSG00000177084_77 (sequence is synthesized)
ggttttccgcagcgatatcccttgccggtttaggatggtgtgcttcttccctgggattcagattcttcccactcttgtgctgtggtaggacccagaagctgcaggggctgaaataaagcc

SEQ ID NO: 616084 - DNA, 120 bp, Artificial Sequence
  ENSG00000177084_78 (sequence is synthesized)
ctgagcaccgagcctggggcagagcgagtgccgggaatggagctgctggtgtccttgtcacgatgagcttgtctgcccgcgaggtccatgttgcggggacaaaccaagtggcattggtta

SEQ ID NO: 616085 - DNA, 120 bp, Artificial Sequence
  ENSG00000177084_79 (sequence is synthesized)
gagattgtgaactctgtctccgtaggctctttggttgttaacagctttattgggatgtaaagttacgccatccaactcacccatttaaagtgcagaattcaatgacttttagtggcatga

SEQ ID NO: 616086 - DNA, 120 bp, Artificial Sequence
  ENSG00000177084_80 (sequence is synthesized)
cctggagtccacaggggggtttctgtgcactcccgggagccggggtgtgtgcaggtcctgaggcacgccctggtgtcttccaaggggcctgccctgcagaccagtccatgccctgagcct

SEQ ID NO: 616087 - DNA, 120 bp, Artificial Sequence
  ENSG00000177084_81 (sequence is synthesized)
gtgaagagaaggaaaggaggaagagggagttgcacagctcggccacaggaaggtcttgccgaggggcatctgagcagaggctgggggacgcgccaagctgccgtgtggtggtgcacggcg

SEQ ID NO: 616088 - DNA, 120 bp, Artificial Sequence
  ENSG00000177084_82 (sequence is synthesized)
ttcaggcctgcaggatggagggagtgagcagggcctggaggaggcctcaggactgggcatctggggtggaacatccacagcgagggtgggtgtagggaaggcgctggcaccgtgggatga

SEQ ID NO: 616089 - DNA, 120 bp, Artificial Sequence
  ENSG00000177084_83 (sequence is synthesized)
ggtcgtgcattttactcataaccgagggctggctgcacacagcaggggctcgaggcttactgatgggcccacgaatgtgtctcgcgagcctgtgaagaagcagcaggcaggtctggccag

SEQ ID NO: 616090 - DNA, 120 bp, Artificial Sequence
  ENSG00000177084_84 (sequence is synthesized)
ccacacccaggtgggctctccctcatctgcctcggctcagcctggcctccttggcctcctctctgagtggactggggtctcactgtgcctgtttattcctgcaggtcttcatggaacaga

SEQ ID NO: 616091 - DNA, 120 bp, Artificial Sequence
  ENSG00000177084_85 (sequence is synthesized)
cctgcaccgcacactccacaacatgatgaagaagctcttcctgcagtgagtgctcctcctccctgggctgtccaccgcgtcctcagctgggctggtcccttactccccagaaccagagac

SEQ ID NO: 616092 - DNA, 120 bp, Artificial Sequence
  ENSG00000177084_86 (sequence is synthesized)
atggccagccagtgcctctgggataagtagtgtatttctgagtttgtggagcataacaatccaaaggatcccagagaaacacgcagctgctgctgcagcgtcgcctgcacatcctgcaga

SEQ ID NO: 616093 - DNA, 120 bp, Artificial Sequence
  ENSG00000177084_87 (sequence is synthesized)
gaacactaggtggcacctcctctcctgcccctttcctgcacaaagtcatgctacacattgtattgctgtgtgccttgttgttttagtgaaaatatgcctgtgtcaggagatctgtgtgag

SEQ ID NO: 616094 - DNA, 120 bp, Artificial Sequence
  ENSG00000177084_88 (sequence is synthesized)
gacatgccatatgaaagaacatttagcctctctccagccttgtgccgttgttacaaatagcaaatcagtgagaggcttcatgcatgagctcatgcagatagatccgtggggtaattgctg

SEQ ID NO: 616095 - DNA, 120 bp, Artificial Sequence
  ENSG00000177084_89 (sequence is synthesized)
gggcgtagccctcttgcaggcctcagaggtgttgtaactcgggatgaatcctgatttgatggacttcaccagagcggccccacagaggccccttgtggacacttcttccctggccgcgcc

SEQ ID NO: 616096 - DNA, 120 bp, Artificial Sequence
  ENSG00000177084_90 (sequence is synthesized)
tcaccaacatggccggggattattacccaactgctgggataaaagtgcttcttggtgcagtcttaacttaggattcttacaatgaatgaagtcgaattttctcttctagtcctttgtcta

SEQ ID NO: 616097 - DNA, 120 bp, Artificial Sequence
  ENSG00000177084_91 (sequence is synthesized)
atcttttgcctttgtttgtggtggatttttgccatgcagaaatctttgctcttcattagcttctgggttctagtgtatctcggaggcttttctgcttcaggaccctcagctcttttccct

SEQ ID NO: 616098 - DNA, 120 bp, Artificial Sequence
  ENSG00000177084_92 (sequence is synthesized)
cggaatgttgtcctaggaagggctcaagtgcaggtgggaggccagagtgcgtgcagctgcactcaggagactcgcccgtcaccaggcgcttctcacagccccttcctctcctgagatcct

SEQ ID NO: 616099 - DNA, 120 bp, Artificial Sequence
  ENSG00000177084_93 (sequence is synthesized)
ggctgcgcagcccccactgaagggactcatggttagtagatgtggctcctgtgccatggtatcgcaagaagggagacagggaaaatcagatcgggcggagcctgcccagcagttgggact

SEQ ID NO: 616100 - DNA, 120 bp, Artificial Sequence
  ENSG00000177084_94 (sequence is synthesized)
ttgtgagccgaggggcctcctctccaggctccaggcatgttccactggagggcccggagaggggtgactgtcttccctccagcctttgctctcaggaaactccatggggagcggctgccc

SEQ ID NO: 616101 - DNA, 120 bp, Artificial Sequence
  ENSG00000177084_95 (sequence is synthesized)
ctggccgtgtcattgaggagtttcctagctctgctcccgccatctgattcggtaactcagtcacatacattcccagggaacatttgtgtgtgtgcacgttcagtagctgaagataaagcc

SEQ ID NO: 616102 - DNA, 120 bp, Artificial Sequence
  ENSG00000177084_96 (sequence is synthesized)
ctgggtcaggtcagctgccccctggctggtctgtgaggcctaactttctggtgggggagttcctatgccttggtttgggtctgcaggcttagagtttgcaaatcaagctatgcaggttag

SEQ ID NO: 616103 - DNA, 120 bp, Artificial Sequence
  ENSG00000177084_97 (sequence is synthesized)
tgtgcagatgaagtgtatcgaggaagcactgtttgtagttgacagccctaagttaaagaatgccctaagtaaaaacagcaggttgtgatgtgcacacacaggtggatgcggtcacagagg

SEQ ID NO: 616104 - DNA, 120 bp, Artificial Sequence
  ENSG00000177084_98 (sequence is synthesized)
ccttcgttgatgatcattttatatttttgtctacttgtccttgagtctttaactttctcagttctctcttgcaactttctatgtctcttttgaaaagttccgggttggccgggcgcagtg

SEQ ID NO: 616105 - DNA, 72 bp, Artificial Sequence
  ENSG00000177084_99 (sequence is synthesized)
atgtctcttttgaaaagttccgggctgaggcgggtggatcacgtgaggtcaagagtttgagaccagcctggc

SEQ ID NO: 616106 - DNA, 120 bp, Artificial Sequence
  ENSG00000177084_100 (sequence is synthesized)
tgtgtctcaaaaaaaaaaaaaaaaaagggtaagtgccaggtgacaggcccggagtagtttttggagaagcttgctgatgccaggggccctgcctttgcttgtgttgggagctgtctttca

SEQ ID NO: 616107 - DNA, 120 bp, Artificial Sequence
  ENSG00000177084_101 (sequence is synthesized)
atacagttttctctctgacaatgaactcaggtgtcagcgagtgttccttctcatttccacttctcacttctctaatttacttttagctcatctaaaggctgcagataaaattattaacaa

SEQ ID NO: 616108 - DNA, 120 bp, Artificial Sequence
  ENSG00000177084_102 (sequence is synthesized)
gtctaagacagggtccattgggcttcccttagtcttaatggcagagccagagaccactgtgtggcgagttttccatagtctattgtctttaccactgtgggggtccggcctggtccctgg

SEQ ID NO: 616109 - DNA, 120 bp, Artificial Sequence
  ENSG00000177084_103 (sequence is synthesized)
cgactgttcagtgtgctgcctctgacctccctgtggccagaggtacttcacacagagtctttctaaccagggccacttttcgatgtgaccaaaggtacatcacagggatctccagccagc

SEQ ID NO: 616110 - DNA, 120 bp, Artificial Sequence
  ENSG00000177084_104 (sequence is synthesized)
tctactgagtatgatgtgtgaggcatcagcacttaggtgtcaggagccgtcggtctgctgcagagggcgtggttgagggtcaggagccatcagtctgcggagagcatggttgagggcagc

SEQ ID NO: 616111 - DNA, 120 bp, Artificial Sequence
  ENSG00000177084_105 (sequence is synthesized)
tactcgcattacccaccagcggtggttcatgctgggcaatgcttgctgtgtaccaggaggtgggccgagcacttcgcattctgcctctgtccccacatcagcccagggacggggagcggt

SEQ ID NO: 616112 - DNA, 120 bp, Artificial Sequence
  ENSG00000177084_106 (sequence is synthesized)
aggggaccccgtgcttcctgggctcctggagaccaaggtgaccgaagaacacagggccagtcctaatgaaatcccaagacctcctgagcacaattacccccttggagttcccctcaactt

SEQ ID NO: 616113 - DNA, 120 bp, Artificial Sequence
  ENSG00000177084_107 (sequence is synthesized)
cccccttggagttcccctcaacttctgcatccagggacacaactctgagggaaacgtttttctaaatagcgtgataagcctggcatggtgatgcgtgcctgtggtcccagctacttggga

SEQ ID NO: 616114 - DNA, 120 bp, Artificial Sequence
  ENSG00000177084_108 (sequence is synthesized)
aggccacagtgagccgtgactgcaccactgcactccagcctgggatatttgtttatttctatgttactttgtattttttatatttttcaggctacataacattttgacagtttacatacc

SEQ ID NO: 616115 - DNA, 120 bp, Artificial Sequence
  ENSG00000177084_109 (sequence is synthesized)
ttaatttacgtaactagcccacgattatttactaccagataggtttcacatttccattgttatcaatggtgttgcattgaacgagatatctcggtgcatatgtttcccaggcacaggcgt

SEQ ID NO: 616116 - DNA, 120 bp, Artificial Sequence
  ENSG00000177084_110 (sequence is synthesized)
cttgggtagaaggaatactggaacactctgcagtgctttcctggcttgctttgctgtgtgggcttctgtttcttggcatattgtcttgtatagagtgaaacacacgagcaagggagcacc

SEQ ID NO: 616117 - DNA, 120 bp, Artificial Sequence
  ENSG00000177084_111 (sequence is synthesized)
agggtatcacacagaatattcatgagcccagcactccttacaggatgtggggggcctgtggtcaggaacatgtgtgcaaagcacagctccagctggatgtgggtgccacactggaactgc

SEQ ID NO: 616118 - DNA, 120 bp, Artificial Sequence
  ENSG00000177084_112 (sequence is synthesized)
tcaggcctccactgctcaggccactctccagccggccggagtttctctttcctctcttctggctcttcctgccccttctttctcttcctttcaaggagaaaaacttcctgtcttaggccg

SEQ ID NO: 616119 - DNA, 120 bp, Artificial Sequence
  ENSG00000177084_113 (sequence is synthesized)
tgtcttaggccgagcaacatccttttctgcagccttggtgctcttcagtaaattcttcttgatattttgtgcacagtttaataaaataaaagccaagccaggcgtggtggctcacgcctg

SEQ ID NO: 616120 - DNA, 83 bp, Artificial Sequence
  ENSG00000177084_114 (sequence is synthesized)
tataaaagctaaagttttgtgtgtgtgtgtatgttttaaagtattgccacacaggcatattagagagctcttgaaattgcagc

SEQ ID NO: 616121 - DNA, 120 bp, Artificial Sequence
  ENSG00000177084_115 (sequence is synthesized)
ttgccacacaggcatattagagagctcttgaaattgcagccttctgcgtctcaggctagagaagggcatggcctagaggagcacagtccagggtgagctcagactctgccccttgatttc

SEQ ID NO: 616122 - DNA, 120 bp, Artificial Sequence
  ENSG00000177084_116 (sequence is synthesized)
gtggttgttctccgggaccaggcaacacatacagagatggtcattgagtcacagtttgtagttttgaaaaagtaggcgcttgtcattcttcatttgcaaagtcatgggtaggtaggctga

SEQ ID NO: 616123 - DNA, 120 bp, Artificial Sequence
  ENSG00000177084_117 (sequence is synthesized)
tgtgtttatatgataaatcatttcacatcagttacaatgaacgaaccatatgtgcatgtttcacccggtgtcagtctcaaaaatacatggctgaataaagaaacaagttgcagggacagg

SEQ ID NO: 616124 - DNA, 79 bp, Artificial Sequence
  ENSG00000177084_118 (sequence is synthesized)
cctagctaggttgcagtgagatgagatcgtgccattgcgctccagcctggacaacagagtgagattctgtctcaaaaaa

SEQ ID NO: 616125 - DNA, 120 bp, Artificial Sequence
  ENSG00000177084_119 (sequence is synthesized)
aaaaaaaaaaaaaaaaaaaggaaacaagttgcagtcagatgtgtcccacatgttactatttaggttaaaacttacagctgtggcatgtgtctgtggacatgtggtaaaaatttaaaggtg

SEQ ID NO: 616126 - DNA, 120 bp, Artificial Sequence
  ENSG00000177084_120 (sequence is synthesized)
atgtgtctgtggacatgtggtaaaaatttaaaggtgtgtgggggcagacagaagagggctgtacccattatttgcaatattttctttcttacaaaaagcattctggagcaaacatggcaa

SEQ ID NO: 616127 - DNA, 89 bp, Artificial Sequence
  ENSG00000177084_121 (sequence is synthesized)
gtggtattgagtgacgttttatttttcggtttgatcttttcactttttttttgaaagagggtctcaccctctcgcccaggctggaacct

SEQ ID NO: 616128 - DNA, 120 bp, Artificial Sequence
  ENSG00000177084_122 (sequence is synthesized)
acaggcgtgagccaccacacccggccttcactattaaaggttcaataaacttgtgtaaacgaacatcccatttcaggtcacgatggccgaggcctcagaagacagtccgaggccaagtgc

SEQ ID NO: 616129 - DNA, 120 bp, Artificial Sequence
  ENSG00000177084_123 (sequence is synthesized)
tgccagtgacctaactcctctgtgtgccatgggtggtccccggtgccagtcccccaggtgggaggtccccagtgccagacaggtcccagacccctccctcagcatccttatacttccagg

SEQ ID NO: 616130 - DNA, 120 bp, Artificial Sequence
  ENSG00000177096_0 (sequence is synthesized)
cccggctcccgcggccacgttgcagcccaggcggaggcgcgggatctcgagctgggatcgccctcttgggcttcggtgcgatcggcggcgggaggttccctgggaaccaggtggtcgaag

SEQ ID NO: 616131 - DNA, 120 bp, Artificial Sequence
  ENSG00000177096_1 (sequence is synthesized)
ggctgagctgtgtggccagacaagaggtccctgccctcccccagtgagccctgctgttcccgtgggagccatgaagctgaacgagaggagtgtagcccactatgcactcagcgactcccc

SEQ ID NO: 616132 - DNA, 120 bp, Artificial Sequence
  ENSG00000177096_2 (sequence is synthesized)
agcggaccacatgggcttcctgcgcacctgggggggcccagggaccccaccgacccccagtggcactggccgaagatgctggtttgtcctcaagggcaacctgctattctcctttgagag

SEQ ID NO: 616133 - DNA, 120 bp, Artificial Sequence
  ENSG00000177096_3 (sequence is synthesized)
tcgcgagggccgggccccactgagcctggtggtgctggaaggctgcacagtggaactggccgaggctcccgtgcccgaggagtttgcctttgccatctgctttgatgcccctggagtgcg

SEQ ID NO: 616134 - DNA, 120 bp, Artificial Sequence
  ENSG00000177096_4 (sequence is synthesized)
cccacacctgctggccgcagaagggccggcggcccaggaggcctgggtgaaggtgctgtcccgggcaagctttggctacatgcgcctggtggtacgcgagttggagagccagttgcagga

SEQ ID NO: 616135 - DNA, 120 bp, Artificial Sequence
  ENSG00000177096_5 (sequence is synthesized)
cgcacgccagagcctggctttgcaacgccgctcatcctggaagtctgttgccagccgctgtaagccccaggctcctaaccaccgagctgcgggcctggagaatggccactgcctctccaa

SEQ ID NO: 616136 - DNA, 120 bp, Artificial Sequence
  ENSG00000177096_6 (sequence is synthesized)
ggacagcagccctgtgggcttggttgaagaagcgggcagcaggtctgcagggtgggggttggctgagtgggagctgcagggccctgccagcctcctcctaggcaaggggcagagccctgt

SEQ ID NO: 616137 - DNA, 120 bp, Artificial Sequence
  ENSG00000177096_7 (sequence is synthesized)
gtcccctgagacctcctgcttctctaccctgcatgactggtatggccaggagatcgtggagctgcggcagtgttggcagaagagggcccaggggagccactcaaaatgtgaggaacagga

SEQ ID NO: 616138 - DNA, 120 bp, Artificial Sequence
  ENSG00000177096_8 (sequence is synthesized)
taggccctaagtctgggccctttgagtcaggaaaccagggccagttctttttcaggagttaaatgtttacccatttccaaggttgcgttttgggaggggacatgggttctctccttcctg

SEQ ID NO: 616139 - DNA, 120 bp, Artificial Sequence
  ENSG00000177096_9 (sequence is synthesized)
ggaccattccttccatcctctttatttcctgaggtccagagaaggaaggagacttagcagccacagagcaagaccccaatctcctgactgcactggcctgactgccccctcccaggggat

SEQ ID NO: 616140 - DNA, 120 bp, Artificial Sequence
  ENSG00000177096_10 (sequence is synthesized)
gttaatgaaatgaaggaagtggggaatgtcacccgagactgtcacaggcttgccatacctttggcctacacaccgggctctagagccataatttccaacctggggagtctcctgtgcact

SEQ ID NO: 616141 - DNA, 120 bp, Artificial Sequence
  ENSG00000177096_11 (sequence is synthesized)
taaatccgaggtaggctgcagtatcggcttgaagctctgacactgtcagagaaagtggatttattgtgtcataggagtttctgggacccagctcttcctgagaggggtgggaagattggg

SEQ ID NO: 616142 - DNA, 120 bp, Artificial Sequence
  ENSG00000177096_12 (sequence is synthesized)
gatgggatcctcactcagcagtctgggtagggccctttgaggcagagggtcttcggccagtgaagagagatttattctgctcagagtgctggggtcccatcctttctccctggctgccct

SEQ ID NO: 616143 - DNA, 120 bp, Artificial Sequence
  ENSG00000177096_13 (sequence is synthesized)
gttaacagatggtgctggaccttgccccggaaggggcttgtagcttttttacgtcaacgaaatgccctcctgtactctgtcttcagcagccaactcctggagctgccaagtgaggggtta

SEQ ID NO: 616144 - DNA, 120 bp, Artificial Sequence
  ENSG00000177096_14 (sequence is synthesized)
aagaagaggtggggaggcagtgtggctccctgggaaaagtctgttgctttggttctcagtcctgggtattctaggagcttggacacgggattgcgtttcctgtgctaaaattctctctcc

SEQ ID NO: 616145 - DNA, 120 bp, Artificial Sequence
  ENSG00000177096_15 (sequence is synthesized)
tggctgggctccggtaaactgaagctgctcgagaaatcacctgggaactctcatagccgtttgtcacccagggtgtacttgccaggacctctccttgctactcttcccaaagtcgggagg

SEQ ID NO: 616146 - DNA, 120 bp, Artificial Sequence
  ENSG00000177096_16 (sequence is synthesized)
caaagcggctgggtcaccagagcctgaccatactgacgctccagggggaagacgcagaggccgggaagagacaccccctcccaaacacataaaacttgccccttcctagcctcggctccc

SEQ ID NO: 616147 - DNA, 120 bp, Artificial Sequence
  ENSG00000177096_17 (sequence is synthesized)
ctcactggggccttgggcaggaccgacccgcatccaactaggcctaaggggtaggctctgagcctcttacccctaagaggcggagatgcgcccaaggcgggcgcccggcctgttccccag

SEQ ID NO: 616148 - DNA, 120 bp, Artificial Sequence
  ENSG00000177096_18 (sequence is synthesized)
ccctgcctggaagccccgcagccactgcattttgtttaaacacagatagcacgggcctttctcttattgctacagtgttttgtacacggttaaaacactagtaaagctttttcgttatta

SEQ ID NO: 616149 - DNA, 120 bp, Artificial Sequence
  ENSG00000177096_19 (sequence is synthesized)
gcgggctccgggaggaggtggccccagggaaggtgtggccgcggggaagtggcggcgaacagccccgacgcgaggacggggaaaccaaggcggcagccagggagaccctgaccgaggttc

SEQ ID NO: 616150 - DNA, 120 bp, Artificial Sequence
  ENSG00000177098_0 (sequence is synthesized)
ctctgcccgctaactttcccgagccccgaccggcggcgcagagctccggggtagctttgtggccgaacgccgacctcgggcggagagcgcggctgtgcccagtatcccatccccgcgacc

SEQ ID NO: 616151 - DNA, 120 bp, Artificial Sequence
  ENSG00000177098_1 (sequence is synthesized)
cccgcgcgctccggagagaacaggactatgcccggggctggggacggaggcaaagccccggcgagatggctgggcactgggcttttgggcctcttcctgctccccgtaaccctgtcgctg

SEQ ID NO: 616152 - DNA, 120 bp, Artificial Sequence
  ENSG00000177098_2 (sequence is synthesized)
gaggtgtctgtgggaaaggccaccgacatctacgctgtcaatggcacggagatcctgctgccctgcaccttctccagctgctttggcttcgaggacctccacttccggtggacctacaac

SEQ ID NO: 616153 - DNA, 120 bp, Artificial Sequence
  ENSG00000177098_3 (sequence is synthesized)
agcagtgacgcattcaagattctcatagaggggactgtgaagaatgagaagtctgaccccaaggtgacgttgaaagacgatgaccgcatcactctggtaggctctactaaggagaagatg

SEQ ID NO: 616154 - DNA, 120 bp, Artificial Sequence
  ENSG00000177098_4 (sequence is synthesized)
aacaacatttccattgtgctgagggacctggagttcagcgacacgggcaaatacacctgccatgtgaagaaccccaaggagaataatctccagcaccacgccaccatcttcctccaagtc

SEQ ID NO: 616155 - DNA, 120 bp, Artificial Sequence
  ENSG00000177098_5 (sequence is synthesized)
gttgatagactggaagaagtggacaacacagtgacactcatcatcctggctgtcgtgggcggggtcatcgggctcctcatcctcatcctgctgatcaagaaactcatcatcttcatcctg

SEQ ID NO: 616156 - DNA, 120 bp, Artificial Sequence
  ENSG00000177098_6 (sequence is synthesized)
aagaagactcgggagaagaagaaggagtgtctcgtgagctcctcggggaatgacaacacggagaacggcttgcctggctccaaggcagaggagaaaccaccttcaaaagtgtgagccctg

SEQ ID NO: 616157 - DNA, 120 bp, Artificial Sequence
  ENSG00000177098_7 (sequence is synthesized)
cttcgggctgagcagctgcagggagccccctttctgatgatgaaactgatgcttgagccccgaccgtagaacccacgtgcctgagacatctgctgcttggctcaaactgtagtctttccg

SEQ ID NO: 616158 - DNA, 120 bp, Artificial Sequence
  ENSG00000177098_8 (sequence is synthesized)
ggcacaagaaaccagagtcctgcccagcctgcccatccccttcccagtcagggctccccagggacaagggatggccaggggagggggtctgtggaagattcaggagaaagaaaggagagg

SEQ ID NO: 616159 - DNA, 120 bp, Artificial Sequence
  ENSG00000177098_9 (sequence is synthesized)
ctagggtggtgtggaggggctggtcccctgacacctgggcagatggggtctccttcagtctccctaccctgcacaagcagggccttgattttcctccaggcttctcttcacaagagactg

SEQ ID NO: 616160 - DNA, 120 bp, Artificial Sequence
  ENSG00000177098_10 (sequence is synthesized)
ggaggatccgtaagggatgtcctaagagctgcaccctggagatggggtgtaggaagaagtggcttcctttggaggtgggagtgggctggaggcctctggagaagacctggggtgggggct

SEQ ID NO: 616161 - DNA, 120 bp, Artificial Sequence
  ENSG00000177098_11 (sequence is synthesized)
gatgggggcaggcccacagtgagagactgcctctgcttcataggataccagatcccccacagtcttccaagtaggaaacttcctttcccctgccccgggaccctatctgcctatcccctc

SEQ ID NO: 616162 - DNA, 120 bp, Artificial Sequence
  ENSG00000177098_12 (sequence is synthesized)
ccctgctcagagtttttaagccctctcaaccagggctggccaccctggtcttgagggttcctggccacctagcctgctcctctgctctctgggttactgaggggctcaggaaggggcccc

SEQ ID NO: 616163 - DNA, 120 bp, Artificial Sequence
  ENSG00000177098_13 (sequence is synthesized)
tcgagccttcctggagtacccgagtgctccctatgcctttccaagcatttctacttggggaattgggccacagaggtagtgagccagtgtcctgggcctctgggatgcccgccccattgc

SEQ ID NO: 616164 - DNA, 120 bp, Artificial Sequence
  ENSG00000177098_14 (sequence is synthesized)
tgccaatgctggcagcccctcccctggcatggcaggaccatcgccactctgggcactcctgagcccagctctcccctgcttctccccctcctacctgagaggctgcaccctccaacctcc

SEQ ID NO: 616165 - DNA, 120 bp, Artificial Sequence
  ENSG00000177098_15 (sequence is synthesized)
cattggctcgctcccccccccccaccgtgccctccatcacgccctgcccccagggtggttcatttcccagccctgggtcaagggcctgccttcgcctcagggactctcttcctttggatg

SEQ ID NO: 616166 - DNA, 120 bp, Artificial Sequence
  ENSG00000177098_16 (sequence is synthesized)
agggggtccttgggtttcccagctgcttcctgctcagctgggccaccccctcccaccctggggttggggaggagcagggagtgggtgcccacagttttcctttgcttctcccagagctgg

SEQ ID NO: 616167 - DNA, 120 bp, Artificial Sequence
  ENSG00000177098_17 (sequence is synthesized)
tttgcacagcccttgtgtgtggggctagaatgtgccttagtcctgaatcctagcccttacccccatcctctctagacggtatgtcctgacataacagcagagtctggtgtggtgctggtg

SEQ ID NO: 616168 - DNA, 120 bp, Artificial Sequence
  ENSG00000177098_18 (sequence is synthesized)
tgaggctggaattggccagtgactgaatcttggagatgtcggccaggtgctcccattggggtttctagcctgccctagggggaggtggtgatgttgggagtgggatctcctgagtccttg

SEQ ID NO: 616169 - DNA, 120 bp, Artificial Sequence
  ENSG00000177098_19 (sequence is synthesized)
ttgggcagaattggtgaggccagggatggcagggaaaagtggtaacaagcctctctgcccatctacttccaatccctctctcccttactgattttttgatgccctgtcttctgggcccct

SEQ ID NO: 616170 - DNA, 120 bp, Artificial Sequence
  ENSG00000177098_20 (sequence is synthesized)
aggagggatgagagaggagtagccccctttttcagagagtttggggtctacctcagagctctccctgtcaaaaagcagctgcaagcctcgcaagggtggagtggggggagactgaggacc

SEQ ID NO: 616171 - DNA, 120 bp, Artificial Sequence
  ENSG00000177098_21 (sequence is synthesized)
agtagtacctgcagggtgcccgtggctgtggccagtgtcccttagccaacctgctgggctcaccagttccccgtctgatctgcctgtgcgcctcccattcttctctacccagaacctgtc

SEQ ID NO: 616172 - DNA, 120 bp, Artificial Sequence
  ENSG00000177098_22 (sequence is synthesized)
atgggctggggctcagattttcctggctttgggagcagacagaccagagccaccagccattcagaaaacttcttatagctaccttcatgcaaaactgttttcttcttccttctcaatggt

SEQ ID NO: 616173 - DNA, 120 bp, Artificial Sequence
  ENSG00000177098_23 (sequence is synthesized)
gacatttgaagaggcagagcaccttggggctcctccttctgtcttaagagaaagccaaggcacgtagagtagggagaagaagggcaccatcctctctttcctccccagggtctactgctg

SEQ ID NO: 616174 - DNA, 120 bp, Artificial Sequence
  ENSG00000177098_24 (sequence is synthesized)
atttctagatggatcatgcagcttctctcagctcagctctttccatctaccaaatgggtgtaataatacttacctacctcacaggactgttgtgaggcttggcaagttttgtctaaaaac

SEQ ID NO: 616175 - DNA, 120 bp, Artificial Sequence
  ENSG00000177098_25 (sequence is synthesized)
atctttttggcttggaaagggatctgggaagccaggtattaattgcagggatagttccaagtctgtcctgtcttcatctctgtgtcccatctctacaacccacatacagacacacacact

SEQ ID NO: 616176 - DNA, 120 bp, Artificial Sequence
  ENSG00000177098_26 (sequence is synthesized)
ctctctctctttctttccatcccaccccccttggaattatttagtctttgcaatattagaaaccttgactctgatgcttaaagcttcttgtccatggcttttgtttgatggttttcaata

SEQ ID NO: 616177 - DNA, 120 bp, Artificial Sequence
  ENSG00000177098_27 (sequence is synthesized)
gaggtgactgagattgtagggggggcatttttggttgcccccatgcgtgggggcactactaagaatgctaaacttagtccccacaacaaagaatcatcctgtcccatgtcaacattatac

SEQ ID NO: 616178 - DNA, 120 bp, Artificial Sequence
  ENSG00000177098_28 (sequence is synthesized)
ccatggagaaacactggcatggatttgcactaggatgtatatgggcaaagctatcttccccaagtggaacctcagtgcatgcaaatctctgatggtggcttccagggcttgtgggctaga

SEQ ID NO: 616179 - DNA, 120 bp, Artificial Sequence
  ENSG00000177098_29 (sequence is synthesized)
gagagccacttacaaagtcgatcttgagagacctggccacatgcagctgggctgagtgatgtcagcgagactaaagacaaagttctgagctcctcatcaactacaaaatatgaaatcagc

SEQ ID NO: 616180 - DNA, 120 bp, Artificial Sequence
  ENSG00000177098_30 (sequence is synthesized)
attccaggttctgggcttctccccatgtcgtaattgaacagaaggcagcccgaataaacccctgatgttagagaggcctggggagagcagccgatggggctcagactacatatggcaggc

SEQ ID NO: 616181 - DNA, 120 bp, Artificial Sequence
  ENSG00000177098_31 (sequence is synthesized)
cgatcagagctcttgtggagcgagggcttgagagcatgcttgtgagatggcaggaggtggggtgtgcttgtgtggagtgtgcgtgtgcaggcagtgtgggtgcatggcagcgtaactgtg

SEQ ID NO: 616182 - DNA, 120 bp, Artificial Sequence
  ENSG00000177098_32 (sequence is synthesized)
gagtggatgggctctgcatgtaaggggtgatgcatgatgggcagatgctggacatttgaggagccgtctttcttggcctgagctatgcctgttgaggcatctggagactgagaaagaatc

SEQ ID NO: 616183 - DNA, 120 bp, Artificial Sequence
  ENSG00000177098_33 (sequence is synthesized)
aaaggcagagaagaccagccgtgctcctgcattccgtcactccatgacttcatctcagtgtcacagacagctgccatcagagggctggcagtagggagttccaggagcggggacttctcg

SEQ ID NO: 616184 - DNA, 120 bp, Artificial Sequence
  ENSG00000177098_34 (sequence is synthesized)
ggaaaatcctataacttgctttactttactttgtcccaggttggagtccctaccctcccacctcccacctgatatgcagtgcttttgactatcttatgcatggtttattcctctggcttg

SEQ ID NO: 616185 - DNA, 120 bp, Artificial Sequence
  ENSG00000177098_35 (sequence is synthesized)
gatgacaacaatacccatagtcaattttcctatgtaactatagatcaaatgatgcaacaacaggccttgggaggcctcaggtgtgcgagtgcctctgggaggcgcagatgcccacacagc

SEQ ID NO: 616186 - DNA, 120 bp, Artificial Sequence
  ENSG00000177098_36 (sequence is synthesized)
cagcactgacttgtgttcgagcacagaacggatataatcagtctggcctctacaacaagttttgcattgtagaattgtatttagctttgccttggatgaaataaaaattatgtttaataa

SEQ ID NO: 616187 - DNA, 120 bp, Artificial Sequence
  ENSG00000177098_37 (sequence is synthesized)
agtcctttccaggggagaaatggagaatgatggagggtggcccaggcggtgctgattggagtagacagccatcctcccgaggttggcactgagggtgatagagacctacctgcctggcca

SEQ ID NO: 616188 - DNA, 120 bp, Artificial Sequence
  ENSG00000177098_38 (sequence is synthesized)
cctcctcgaccgccccgcccgtcagtcctgaaaacctggcgagaggcgcgtactgtcctaggggaattcccctgcaaacagaagggagcccgccctgcgcgtcctggagtgggtgcggca

SEQ ID NO: 616189 - DNA, 120 bp, Artificial Sequence
  ENSG00000177098_39 (sequence is synthesized)
ggagcgcttccaggcactgcgtccccaggtgaggggcggagccggggcgcggttcgcggcagtggccaggcctttgtttccttgggttggggtgacccctggtggtcatccagagcgcaa

SEQ ID NO: 616190 - DNA, 120 bp, Artificial Sequence
  ENSG00000177098_40 (sequence is synthesized)
gatgaagaaactgaggctaggagggttcaatgacctgcccaacattgccagctagttagtgacagttaaatcccatgcttaaaattcagactatctgactccaaaatcttctcaccatct

SEQ ID NO: 616191 - DNA, 120 bp, Artificial Sequence
  ENSG00000177098_41 (sequence is synthesized)
aagaggtatcatagggaggttcttaattttttctgtgtgagcaaaggggtctagaaagaggcaatgaaattttcgcctggcaatttggggatcaagtcaccactcaaacttgagtgttat

SEQ ID NO: 616192 - DNA, 120 bp, Artificial Sequence
  ENSG00000177098_42 (sequence is synthesized)
aggctccaattctgatttattccagaactcgtgtgagtgcatctgtgggagggcatgtgcagggtgggggagagggccccttatgtgtgccctagcctgatagatgccatgctctgcctc

SEQ ID NO: 616193 - DNA, 120 bp, Artificial Sequence
  ENSG00000177098_43 (sequence is synthesized)
tccagcttcctgctgcaggcctggggagggctgggggtctgggagtggatgtgccccggatgccagggggtggaggctacatggcccttgcactgccacagttctcggctccaggttgac

SEQ ID NO: 616194 - DNA, 120 bp, Artificial Sequence
  ENSG00000177103_0 (sequence is synthesized)
ggatgacaggagccggggagccgaggagggaggagccgccgccgcagccgagcgctgggctgaggagcagagagagcggggcgccgagtgcgggcggctgggagcgcgctgagcggggga

SEQ ID NO: 616195 - DNA, 120 bp, Artificial Sequence
  ENSG00000177103_1 (sequence is synthesized)
gaggcgctgccgcacggccggccacaggaccacctccccggagaatagggcctctttatggcatgtggctggtaactttcctcctgctcctggactctttacacaaagcccgccctgaag

SEQ ID NO: 616196 - DNA, 120 bp, Artificial Sequence
  ENSG00000177103_2 (sequence is synthesized)
atgttggcaccagcctctactttgtaaatgactccttgcagcaggtgaccttttccagctccgtgggggtggtggtgccctgcccggccgcgggctcccccagcgcggcccttcgatggt

SEQ ID NO: 616197 - DNA, 120 bp, Artificial Sequence
  ENSG00000177103_3 (sequence is synthesized)
acctggccacaggggacgacatctacgacgtgccgcacatccggcacgtccacgccaacgggacgctgcagctctaccccttctccccctccgccttcaatagctttatccacgacaatg

SEQ ID NO: 616198 - DNA, 120 bp, Artificial Sequence
  ENSG00000177103_4 (sequence is synthesized)
actacttctgcaccgcggagaacgctgccggcaagatccggagccccaacatccgcgtcaaagcagttttcagggaaccctacaccgtccgggtggaggatcaaaggtcaatgcgtggca

SEQ ID NO: 616199 - DNA, 120 bp, Artificial Sequence
  ENSG00000177103_5 (sequence is synthesized)
acgtggccgtcttcaagtgcctcatcccctcttcagtgcaggaatatgttagcgttgtatcttgggagaaagacacagtctccatcatcccagaacacaggttttttattacctaccacg

SEQ ID NO: 616200 - DNA, 120 bp, Artificial Sequence
  ENSG00000177103_6 (sequence is synthesized)
gcgggctgtacatctctgacgtacagaaggaggacgccctctccacctatcgctgcatcaccaagcacaagtatagcggggagacccggcagagcaatggggcacgcctctctgtgacag

SEQ ID NO: 616201 - DNA, 120 bp, Artificial Sequence
  ENSG00000177103_7 (sequence is synthesized)
accctgctgagtcgatccccaccatcctggatggcttccactcccaggaagtgtgggccggccacaccgtggagctgccctgcaccgcctcgggctaccctatccccgccatccgctggc

SEQ ID NO: 616202 - DNA, 120 bp, Artificial Sequence
  ENSG00000177103_8 (sequence is synthesized)
tcaaggatggccggcccctcccggctgacagccgctggaccaagcgcatcacagggctgaccatcagcgacttgcggaccgaggacagcggcacctacatttgtgaggtcaccaacacct

SEQ ID NO: 616203 - DNA, 120 bp, Artificial Sequence
  ENSG00000177103_9 (sequence is synthesized)
tcggttcggcagaggccacaggcatcctcatggtcattgatccccttcatgtgaccctgacaccaaagaagctgaagaccggcattggcagcacggtcatcctctcctgtgccctgacgg

SEQ ID NO: 616204 - DNA, 120 bp, Artificial Sequence
  ENSG00000177103_10 (sequence is synthesized)
gctccccagagttcaccatccgctggtatcgcaacacggagctggtgctgcctgacgaggccatctccatccgcgggctcagcaacgagacgctgctcatcacctcggcccagaagagcc

SEQ ID NO: 616205 - DNA, 120 bp, Artificial Sequence
  ENSG00000177103_11 (sequence is synthesized)
attccggggcctaccagtgcttcgctacccgcaaggcccagaccgcccaggactttgccatcattgcacttgaggatggcacgccccgcatcgtctcgtccttcagcgagaaggtggtca

SEQ ID NO: 616206 - DNA, 120 bp, Artificial Sequence
  ENSG00000177103_12 (sequence is synthesized)
accccggggagcagttctcactgatgtgtgcggccaagggcgccccgccccccacggtcacctgggccctcgacgatgagcccatcgtgcgggatggcagccaccgcaccaaccagtaca

SEQ ID NO: 616207 - DNA, 120 bp, Artificial Sequence
  ENSG00000177103_13 (sequence is synthesized)
ccatgtcggacggcaccaccatcagccacatgaacgtcacaggcccccagatccgcgacgggggcgtgtaccggtgcacagcgcggaacttggtgggcagtgctgaatatcaggcgcgaa

SEQ ID NO: 616208 - DNA, 120 bp, Artificial Sequence
  ENSG00000177103_14 (sequence is synthesized)
taaacgtaagaggcccacccagcatccgggctatgcggaacatcacagcagtcgccgggcgggacacccttatcaactgcagggtcatcggctatccctactactccatcaagtggtaca

SEQ ID NO: 616209 - DNA, 120 bp, Artificial Sequence
  ENSG00000177103_15 (sequence is synthesized)
aggatgccctgctgctgccagacaaccaccgccaggtggtgtttgagaatgggaccctcaagctgactgacgtgcagaagggcatggatgagggggagtacctgtgcagtgtcctcatcc

SEQ ID NO: 616210 - DNA, 120 bp, Artificial Sequence
  ENSG00000177103_16 (sequence is synthesized)
agccccagctctccatcagccagagcgttcacgtagccgtcaaagtgccccctctgatccagcccttcgaattcccacccgcctccatcggccagctgctctacattccctgtgtggtgt

SEQ ID NO: 616211 - DNA, 120 bp, Artificial Sequence
  ENSG00000177103_17 (sequence is synthesized)
cctcgggggacatgcccatccgtatcacctggaggaaggacggacaggtgatcatctcaggctcgggcgtgaccatcgagagcaaggaattcatgagctccctgcagatctctagcgtct

SEQ ID NO: 616212 - DNA, 120 bp, Artificial Sequence
  ENSG00000177103_18 (sequence is synthesized)
ccctcaagcacaacggcaactatacatgcatcgccagcaacgcagccgccaccgtgagccgggagcgccagctcatcgtgcgtgtgccccctcgatttgtggtgcaacccaacaaccagg

SEQ ID NO: 616213 - DNA, 120 bp, Artificial Sequence
  ENSG00000177103_19 (sequence is synthesized)
atggcatctacggcaaagctggtgtgctcaactgctcggtggacggctaccccccacccaaggtcatgtggaagcatgccaaggggagcgggaacccccagcagtaccaccctgtgcccc

SEQ ID NO: 616214 - DNA, 120 bp, Artificial Sequence
  ENSG00000177103_20 (sequence is synthesized)
tcactggccgcatccagatcctgcccaacagctcgctgctgatccgccacgtcctagaagaggacatcggctactacctctgccaggccagcaacggcgtaggcaccgacatcagcaagt

SEQ ID NO: 616215 - DNA, 120 bp, Artificial Sequence
  ENSG00000177103_21 (sequence is synthesized)
ccatgttcctcacagtcaagatcccggccatgatcacttcccaccccaacaccaccatcgccatcaagggccatgcgaaggagctaaactgcacggcacggggtgagcggcccatcatca

SEQ ID NO: 616216 - DNA, 120 bp, Artificial Sequence
  ENSG00000177103_22 (sequence is synthesized)
tccgctgggagaagggggacacagtcatcgaccctgaccgcgtcatgcggtatgccatcgccaccaaggacaacggcgacgaggtcgtctccacactgaagctcaagcccgctgaccgtg

SEQ ID NO: 616217 - DNA, 120 bp, Artificial Sequence
  ENSG00000177103_23 (sequence is synthesized)
gggactctgtgttcttcagctgccatgccatcaactcgtatggggaggaccggggcttgatccaactcactgtgcaagagccccccgaccccccagagctggagatccgggaggtgaagg

SEQ ID NO: 616218 - DNA, 120 bp, Artificial Sequence
  ENSG00000177103_24 (sequence is synthesized)
cccggagcatgaacctgcgctggacccagcgattcgacgggaacagcatcatcacgggcttcgacattgaatacaagaacaaatcagattcctgggacttcaagcagtccacacgcaaca

SEQ ID NO: 616219 - DNA, 120 bp, Artificial Sequence
  ENSG00000177103_25 (sequence is synthesized)
tctcccccaccatcaaccaggccaacattgtggacttgcacccggcatctgtgtacagcatccgcatgtactctttcaacaagattggccgcagtgaaccaagcaaggagctcaccatca

SEQ ID NO: 616220 - DNA, 120 bp, Artificial Sequence
  ENSG00000177103_26 (sequence is synthesized)
gcactgaggaggccgctcccgatgggccccccatggatgttaccttgcagccagtgacctcacagagcatccaggtgacctggaaggcacccaagaaggagctgcagaacggtgtcatcc

SEQ ID NO: 616221 - DNA, 120 bp, Artificial Sequence
  ENSG00000177103_27 (sequence is synthesized)
ggggctaccagattggctacagagagaacagccccggcagcaacgggcagtacagcatcgtggagatgaaggccacgggggacagcgaggtctacaccctggacaacctcaagaagttcg

SEQ ID NO: 616222 - DNA, 120 bp, Artificial Sequence
  ENSG00000177103_28 (sequence is synthesized)
gagatcaatgccaccactctggaggatgtgcccagccagccccctgagaacgtccgggccctgtccatcacttctgacgtggccgtcatctcctggtcagagcccccgcgcagcaccctc

SEQ ID NO: 616223 - DNA, 120 bp, Artificial Sequence
  ENSG00000177103_29 (sequence is synthesized)
aatggcgtcctcaaaggctatcgggtcatcttctggtccctctatgttgatggggagtggggcgagatgcagaacatcaccaccacgcgggagcgggtggagctgcggggcatggagaag

SEQ ID NO: 616224 - DNA, 120 bp, Artificial Sequence
  ENSG00000177103_30 (sequence is synthesized)
ttcaccaactacagcgtccaggtgctggcctacacccaggctggggacggcgtacgcagcagtgtgctctacatccagaccaaggaggacgttccaggtccccctgctggcatcaaagct

SEQ ID NO: 616225 - DNA, 120 bp, Artificial Sequence
  ENSG00000177103_31 (sequence is synthesized)
gtcccttcatcagctagcagtgtggttgtgtcttggctcccccctaccaagcccaacggggtgatccgcaagtacaccatcttctgttccagccccgggtctggccagccggctcccagc

SEQ ID NO: 616226 - DNA, 120 bp, Artificial Sequence
  ENSG00000177103_32 (sequence is synthesized)
gagtacgagacgagtccagagcagctcttctaccggatcgcccacctaaaccgcggtcagcagtatctgctgtgggtggccgccgtcacctctgccggccggggcaacagcagcgagaag

SEQ ID NO: 616227 - DNA, 120 bp, Artificial Sequence
  ENSG00000177103_33 (sequence is synthesized)
gtgaccatcgagcctgctggcaaggccccagcaaagatcatctcctttgggggcaccgtgacaacaccttggatgaaagatgttcggctgccttgcaattcagtgggagatccagcccct

SEQ ID NO: 616228 - DNA, 120 bp, Artificial Sequence
  ENSG00000177103_34 (sequence is synthesized)
gctgtgaagtggaccaaggacagtgaagactcggccattccagtgtccatggatgggcaccggctcatccacaccaatggcacactgctgctgcgtgcagtgaaggctgaggactctggc

SEQ ID NO: 616229 - DNA, 120 bp, Artificial Sequence
  ENSG00000177103_35 (sequence is synthesized)
tactacacgtgcacggccaccaacactggtggctttgacaccatcatcgtcaaccttctggtgcaagttcccccggaccagccccgcctcactgtctccaaaacctcagcttcgtccatc

SEQ ID NO: 616230 - DNA, 120 bp, Artificial Sequence
  ENSG00000177103_36 (sequence is synthesized)
accctgacctggattccaggtgacaatgggggcagctccatccgaggcttcgtgctacagtactcggtggacaacagcgaggagtggaaggatgtgttcatcagctccagcgagcgctcc

SEQ ID NO: 616231 - DNA, 120 bp, Artificial Sequence
  ENSG00000177103_37 (sequence is synthesized)
ttcaagctggacagcctcaagtgtggcacgtggtacaaggtgaagctggcagccaagaacagcgtgggctctgggcgcatcagcgagatcatcgaggccaagacccacgggcgggagccc

SEQ ID NO: 616232 - DNA, 120 bp, Artificial Sequence
  ENSG00000177103_38 (sequence is synthesized)
tccttcagcaaagaccaacacctcttcacccacatcaactccacgcatgctcggcttaacctgcagggctggaacaatgggggctgccctatcacagccatcgttctggagtaccggccc

SEQ ID NO: 616233 - DNA, 120 bp, Artificial Sequence
  ENSG00000177103_39 (sequence is synthesized)
aaggggacctgggcctggcagggcctccgggccaacagctccggggaggtgtttctgacggaactgcgagaggccacgtggtacgagctgcgcatgagggcttgcaacagtgcgggctgc

SEQ ID NO: 616234 - DNA, 120 bp, Artificial Sequence
  ENSG00000177103_40 (sequence is synthesized)
ggcaatgaaacagcccagttcgccaccctggactacgatggcagcaccattccacccatcaagtctgctcaaggtgaaggggatgatgtgaagaagctgttcaccatcggctgccctgtc

SEQ ID NO: 616235 - DNA, 120 bp, Artificial Sequence
  ENSG00000177103_41 (sequence is synthesized)
atcctggccacactgggggtggcactgctcttcatcgtacgcaagaagaggaaggagaaacggctgaagcgactccgagatgcaaagagtttggcagaaatgttgataagcaagaacaat

SEQ ID NO: 616236 - DNA, 120 bp, Artificial Sequence
  ENSG00000177103_42 (sequence is synthesized)
agaagctttgacacccctgtgaaagggccaccccagggcccacggctacacattgacatccccagggtccagctgctcatcgaggacaaagaaggcatcaagcaactgggagatgacaag

SEQ ID NO: 616237 - DNA, 120 bp, Artificial Sequence
  ENSG00000177103_43 (sequence is synthesized)
gccaccatccctgtgacagatgctgagttcagccaagctgtcaacccacagagcttctgtactggcgtctccttgcaccacccaaccctcatccagagcacaggacccctcatcgacatg

SEQ ID NO: 616238 - DNA, 120 bp, Artificial Sequence
  ENSG00000177103_44 (sequence is synthesized)
tctgacatccggccaggaaccaatccagtgtccaggaagaatgtgaagtcagcccacagcacccggaaccggtactcaagccagtggaccctgaccaagtgccaggcctccacacctgcc

SEQ ID NO: 616239 - DNA, 120 bp, Artificial Sequence
  ENSG00000177103_45 (sequence is synthesized)
cgcaccctcacctccgactggcgcaccgtgggctcccagcatggtgtcacggtcactgagagtgacagctacagtgccagcctgtcccaggacacagacaaaggaaggaacagcatggtg

SEQ ID NO: 616240 - DNA, 120 bp, Artificial Sequence
  ENSG00000177103_46 (sequence is synthesized)
tccactgagagtgcctcttccacctacgaggagctggcccgggcctatgagcatgccaagctggaggagcagctgcagcacgccaagtttgagatcaccgagtgcttcatctctgacagt

SEQ ID NO: 616241 - DNA, 120 bp, Artificial Sequence
  ENSG00000177103_47 (sequence is synthesized)
tcctctgaccagatgaccacaggcaccaacgagaacgccgacagcatgacatccatgagcacaccctcagagcctggcatctgccgctttaccgcctcaccacccaagccccaggatgcg

SEQ ID NO: 616242 - DNA, 120 bp, Artificial Sequence
  ENSG00000177103_48 (sequence is synthesized)
gaccggggcaaaaacgtggctgtgcccatccctcaccgggccaacaagagtgactactgcaacctgcccctgtatgccaagtcagaggccttctttcgaaaggcagatggacgtgagccc

SEQ ID NO: 616243 - DNA, 120 bp, Artificial Sequence
  ENSG00000177103_49 (sequence is synthesized)
tgccccgtggtcccaccccgtgaggcctccatccggaacctggctcgaacctaccacacccaggctcgccacctgaccctggaccctgccagcaagtccttgggccttccccacccaggg

SEQ ID NO: 616244 - DNA, 120 bp, Artificial Sequence
  ENSG00000177103_50 (sequence is synthesized)
ccgctgccgcctccacagccaccttacctcagaggactctggccatgccagcccccccagccggcacagcccccccagcccccggccccacccctgctgagccacccaccgcccccagcg

SEQ ID NO: 616245 - DNA, 120 bp, Artificial Sequence
  ENSG00000177103_51 (sequence is synthesized)
agcgctgcccctccggcccccagcaccgagcctccacgagccgggggcccacacaccaaaatggggggctccagggactcgcttctcgagatgagcacatcgggggtagggaggtctcag

SEQ ID NO: 616246 - DNA, 120 bp, Artificial Sequence
  ENSG00000177103_52 (sequence is synthesized)
aagcagggggccggggcctactccaaatcctacaccctggtgtagggcccgcaggaagagcagccacgcctggaccgcgccgcgccgcagccccacacgccagctcggctgtttttctgc

SEQ ID NO: 616247 - DNA, 120 bp, Artificial Sequence
  ENSG00000177103_53 (sequence is synthesized)
attatttatattcaactgacagacaaaaaccaaccaacgacaaaacaaaaacccccaatcatgaacgcctgtacatagaactcttttgtacaaatgaaactattttcttcttctccatga

SEQ ID NO: 616248 - DNA, 120 bp, Artificial Sequence
  ENSG00000177103_54 (sequence is synthesized)
agccagggcacaaagaatttgacagtacaagtcaaatcccccaccccacaaaatatgtgtggagatatatatacatatatagacagacaggaacgcgtccacgagctatatatctatata

SEQ ID NO: 616249 - DNA, 120 bp, Artificial Sequence
  ENSG00000177103_55 (sequence is synthesized)
tttctctcaccctattttgagacagaggcacaaagactcagcaatttttttccctcctcctcaccttccccccagtctaggtggttttgacaaagaccaaaatcccaactcagagacact

SEQ ID NO: 616250 - DNA, 120 bp, Artificial Sequence
  ENSG00000177103_56 (sequence is synthesized)
gcatgcgattttactgttccaagaaaaccaggagttgcttcaatttgcagatgcttatgtgttaatacctttttctatgaaaaaagacccagcgccgtgtgcaataaaggttatgtttct

SEQ ID NO: 616251 - DNA, 120 bp, Artificial Sequence
  ENSG00000177103_57 (sequence is synthesized)
cctctttatggcatgtggctggtaactttcctcctgctcctggactctttacacaaagcccgccctgaagatgttggcaccagcctctactttgtaaatgactccttgcagcagctgccc

SEQ ID NO: 616252 - DNA, 120 bp, Artificial Sequence
  ENSG00000177103_58 (sequence is synthesized)
aaagaggctttgcctcagtagctcttctcaaccccagctgccgtgagtctgattcaactgatggggcatcggtggttgttcagcctccccaggtgaactcgaagtggagcaaaaggtgac

SEQ ID NO: 616253 - DNA, 120 bp, Artificial Sequence
  ENSG00000177105_0 (sequence is synthesized)
acttccttctcgagcccggagccgctgccgccgcccccagctcccccgcctcggggagggcaccaggtcactgcagccagaggggtccagaagagagaggaggcactgcctccactacag

SEQ ID NO: 616254 - DNA, 120 bp, Artificial Sequence
  ENSG00000177105_1 (sequence is synthesized)
caactgcacccacgatgcagagcatcaagtgcgtggtggtgggtgatggggctgtgggcaagacgtgcctgctcatctgctacacaactaacgctttccccaaagagtacatccccaccg

SEQ ID NO: 616255 - DNA, 120 bp, Artificial Sequence
  ENSG00000177105_2 (sequence is synthesized)
tgttcgacaattacagcgcgcagagcgcagttgacgggcgcacagtgaacctgaacctgtgggacactgcgggccaggaggagtatgaccgcctccgtacactctcctaccctcagacca

SEQ ID NO: 616256 - DNA, 120 bp, Artificial Sequence
  ENSG00000177105_3 (sequence is synthesized)
acgttttcgtcatctgtttctccattgccagtccgccgtcctatgagaacgtgcggcacaagtggcatccagaggtgtgccaccactgccctgatgtgcccatcctgctggtgggcacca

SEQ ID NO: 616257 - DNA, 120 bp, Artificial Sequence
  ENSG00000177105_4 (sequence is synthesized)
agaaggacctgagagcccagcctgacaccctacggcgcctcaaggagcagggccaggcgcccatcacaccgcagcagggccaggcactggccaagcagatccacgctgtgcgctacctcg

SEQ ID NO: 616258 - DNA, 120 bp, Artificial Sequence
  ENSG00000177105_5 (sequence is synthesized)
tgcatcctcttgtgaccctggcacttggcttggaggctgcccctgccctccccccaccagttgtgccttggtgccttgtccgcctcagctgtgccttaaggactaattctggcacccctt

SEQ ID NO: 616259 - DNA, 120 bp, Artificial Sequence
  ENSG00000177105_6 (sequence is synthesized)
tccagggggttccctgaatgcctttttctctgagtgcctttttctccttaaggaggcctgcagagaaaggggctttgggctctgcccccctctgcttgggaacactgggtattctcatga

SEQ ID NO: 616260 - DNA, 120 bp, Artificial Sequence
  ENSG00000177105_7 (sequence is synthesized)
gctcatccaagccaaggttggacccctccccaagaggccaacccagtgccccctcccattttccgctactgaccagttcatccagctttccacacagttgttgctgcctattgtggtgcc

SEQ ID NO: 616261 - DNA, 120 bp, Artificial Sequence
  ENSG00000177105_8 (sequence is synthesized)
gcctcaggttaggggctctcagccatctctaacctctgccctcgctgctcttggaattgcgcccccaagatgctctctcccttctccaatgagggagccacagaatcctgagaaggtgaa

SEQ ID NO: 616262 - DNA, 120 bp, Artificial Sequence
  ENSG00000177105_9 (sequence is synthesized)
tgtgccctaacctgctcctctgtgcctaggccttacgcatttgctgactgactcagcccccatgcttctggggacctttcctacccccatcagcatcaataaaacctcctgtctccagtg

SEQ ID NO: 616263 - DNA, 120 bp, Artificial Sequence
  ENSG00000177105_10 (sequence is synthesized)
ggactcggcgcgggcgccggctcatgagtttgctggcggaggccgcgggcgggagcttctcggttcagtccaagtagggcgggcgcggccggccgggcggggcgggaacggggccactgc

SEQ ID NO: 616264 - DNA, 120 bp, Artificial Sequence
  ENSG00000177105_11 (sequence is synthesized)
gccactgcgagccggcggaggctcggcgagggtggcttcccggcggctgtaccgcctctagggagccgagagggacccctgaggtcggagggtcccgggctccaagataagtgtctctga

SEQ ID NO: 616265 - DNA, 79 bp, Artificial Sequence
  ENSG00000177105_12 (sequence is synthesized)
ctggagtgcagtggtgtgatcatagcccactgcagccttgaccaccctgggatcaagtgatgactgcagccagaggggt

SEQ ID NO: 616266 - DNA, 120 bp, Artificial Sequence
  ENSG00000177106_0 (sequence is synthesized)
agacggacgcaccggcgagcgccgaggggacaggccgagcgcggggcgccggaggcaggtgtgggacaggcactggcctcagaccggggccacactgaggtctgcccttctcccgctggc

SEQ ID NO: 616267 - DNA, 120 bp, Artificial Sequence
  ENSG00000177106_1 (sequence is synthesized)
cgccacccaagacaccatgagccagtccggggccgtgagctgctgcccgggtgccaccaatggcagcctgggccggtccgacggtgtggccaagatgagccccaaggacctgtttgagca

SEQ ID NO: 616268 - DNA, 120 bp, Artificial Sequence
  ENSG00000177106_2 (sequence is synthesized)
gaggaagaagtattccaactccaacgtcatcatgcacgagacctcgcagtaccacgtccagcacctggccacattcatcatggacaagagcgaagccatcacgtctgtggacgacgccat

SEQ ID NO: 616269 - DNA, 120 bp, Artificial Sequence
  ENSG00000177106_3 (sequence is synthesized)
ccggaagctggtgcagctgagctccaaggagaagatctggacccaggagatgctgctgcaggtgaacgaccagtcgctgcggctgctggacatcgagtcacaggaggagctggaagactt

SEQ ID NO: 616270 - DNA, 120 bp, Artificial Sequence
  ENSG00000177106_4 (sequence is synthesized)
cccgctgcccacggtgcagcgcagccagacggtcctcaaccagctgcgctacccgtctgtgctgctgctcgtgtgccaggactcggagcagagcaagccggatgtccacttcttccactg

SEQ ID NO: 616271 - DNA, 120 bp, Artificial Sequence
  ENSG00000177106_5 (sequence is synthesized)
cgatgaggtggaggcagagctggtgcacgaggacatcgagagcgcgttggccgactgccggctgggcaagaagatgcggccgcagaccctgaagggacaccaggagaagattcggcagcg

SEQ ID NO: 616272 - DNA, 120 bp, Artificial Sequence
  ENSG00000177106_6 (sequence is synthesized)
gcagtccatcctgcctcctccccagggcccggcgcccatccccttccagcaccgcggcggggattccccggaggccaagaatcgcgtgggcccgcaggtgccactcagcgagccaggttt

SEQ ID NO: 616273 - DNA, 120 bp, Artificial Sequence
  ENSG00000177106_7 (sequence is synthesized)
ccgccgtcgggagtcgcaggaggagccgcgggccgtgctggctcagaagatagagaaggagacgcaaatcctcaactgcgccctggacgacatcgagtggtttgtggcccggctgcagaa

SEQ ID NO: 616274 - DNA, 120 bp, Artificial Sequence
  ENSG00000177106_8 (sequence is synthesized)
ggcagccgaggctttcaagcagctgaaccagcggaaaaaggggaagaagaagggcaagaaggcgccagcagagggcgtcctcacactgcgggcacggcccccctctgagggcgagttcat

SEQ ID NO: 616275 - DNA, 120 bp, Artificial Sequence
  ENSG00000177106_9 (sequence is synthesized)
cgactgcttccagaaaatcaagctggcgattaacttgctggcaaagctgcagaagcacatccagaaccccagcgccgcggagctcgtgcacttcctcttcgggcctctggacctgatcgt

SEQ ID NO: 616276 - DNA, 120 bp, Artificial Sequence
  ENSG00000177106_10 (sequence is synthesized)
caacacctgcagtggcccagacatcgcacgctccgtctcctgcccactgctctcccgagatgccgtggacttcctgcgcggccacctggtccctaaggagatgtcgctgtgggagtcact

SEQ ID NO: 616277 - DNA, 120 bp, Artificial Sequence
  ENSG00000177106_11 (sequence is synthesized)
gggagagagctggatgcggccccgttccgagtggccgcgggagccacaggtgcccctctacgtgcccaagttccacagcggctgggagcctcctgtggatgtgctgcaggaggccccctg

SEQ ID NO: 616278 - DNA, 120 bp, Artificial Sequence
  ENSG00000177106_12 (sequence is synthesized)
cgaggaggtgagtccagtgagccgacagtccataagaaactcccagaagcacagccccacttcagagcccacccccccgggggatgccctaccaccagtcagctccccacatactcacag

SEQ ID NO: 616279 - DNA, 120 bp, Artificial Sequence
  ENSG00000177106_13 (sequence is synthesized)
gggctaccagccaacaccagccatggccaagtacgtcaagatcctgtatgacttcacagcccgaaatgccaacgagctatcggtgctcaaggatgaggtcctagaggtgctggaggacgg

SEQ ID NO: 616280 - DNA, 120 bp, Artificial Sequence
  ENSG00000177106_14 (sequence is synthesized)
ccggcagtggtggaagctgcgcagccgcagcggccaggcggggtacgtgccctgcaacatcctaggcgaggcgcgaccggaggacgccggcgccccgttcgagcaggccggtcagaagta

SEQ ID NO: 616281 - DNA, 120 bp, Artificial Sequence
  ENSG00000177106_15 (sequence is synthesized)
ctggggccccgccagcccgacccacaagctacccccaagcttcccggggaacaaagacgagctcatgcagcacatggacgaggtcaacgacgagctcatccggaaaatcagcaacatcag

SEQ ID NO: 616282 - DNA, 120 bp, Artificial Sequence
  ENSG00000177106_16 (sequence is synthesized)
ggcgcagccacagaggcacttccgcgtggagcgcagccagcccgtgagccagccgctcacctacgagtcgggtccggacgaggtccgcgcctggctggaagccaaggccttcagcccgcg

SEQ ID NO: 616283 - DNA, 120 bp, Artificial Sequence
  ENSG00000177106_17 (sequence is synthesized)
gatcgtggagaacctgggcatcctgaccgggccgcagctcttctccctcaacaaggaggagctgaagaaagtgtgcggcgaggagggcgtccgcgtgtacagccagctcaccatgcagaa

SEQ ID NO: 616284 - DNA, 120 bp, Artificial Sequence
  ENSG00000177106_18 (sequence is synthesized)
ggccttcctggagaagcagcaaagtgggtcggagctggaagaactcatgaacaagtttcattccatgaatcagaggaggggggaggacagctaggcccagctgccttgggctggggcctg

SEQ ID NO: 616285 - DNA, 120 bp, Artificial Sequence
  ENSG00000177106_19 (sequence is synthesized)
cggaggggaagcccacccacaatgcatggagtattatttttatatgtgtatgtattttgtatcaaggacacggagggggtgtggtgctggctagaggtccctgcccctgtctggaggcac

SEQ ID NO: 616286 - DNA, 120 bp, Artificial Sequence
  ENSG00000177106_20 (sequence is synthesized)
aacgcccatccttaggccaaacagtacccaaggcctcagcccacaccaagactaatctcagccaaacctgctgcttggtggtgccagccccttgtccaccttctcttgaggccacagaac

SEQ ID NO: 616287 - DNA, 120 bp, Artificial Sequence
  ENSG00000177106_21 (sequence is synthesized)
tccctggggctggggcctctttctctggcctcccctgtgcacctggggggtcctggcccctgtgatgctcccccatccccacccacttctacatccatccacaccccagggtgagctgga

SEQ ID NO: 616288 - DNA, 120 bp, Artificial Sequence
  ENSG00000177106_22 (sequence is synthesized)
gctccaggctggccaggctgaacctcgcacacacgcagagttctgctccctgaggggggcccgggaggggctccagcaggaggccgtgggtgccattcgggggaaagtgggggaacgaca

SEQ ID NO: 616289 - DNA, 120 bp, Artificial Sequence
  ENSG00000177106_23 (sequence is synthesized)
cacacttcacctgcaagggccgacaacgcaggggacaccgtgccggcttcagacactcccagcgcccactcttacaggcccaggactggagctttctctggccaagtttcaggccaatga

SEQ ID NO: 616290 - DNA, 120 bp, Artificial Sequence
  ENSG00000177106_24 (sequence is synthesized)
tccccgcatggtgttgggggtgctggtgtgtcttggtgcctggacttgagtctcaccctacagatgagaggtggctgaggcaccagggctaagcaattaaaccagttaagtctcccagga

SEQ ID NO: 616291 - DNA, 120 bp, Artificial Sequence
  ENSG00000177106_25 (sequence is synthesized)
ggagagcgctggtggtagggaggcttctcccggttctgtgagcagcaggaccctcccgagggcctgaccgtggaggtagcactgcacacccactccctgtgggccggagccaggaggcac

SEQ ID NO: 616292 - DNA, 120 bp, Artificial Sequence
  ENSG00000177106_26 (sequence is synthesized)
ttggtgagtgaggtttgagaacgggctggacgtcacaggggagaaatgggcactgcatccaggtgggggacagctgctcctgccccacagctgtgcctggtctggcccaggggatctccg

SEQ ID NO: 616293 - DNA, 120 bp, Artificial Sequence
  ENSG00000177106_27 (sequence is synthesized)
ggtgcccagggaggcctctggaccctaatcaaccttccgaaagctcctggccactggatcccctcccccacacccgtaaggggagaggcctttactaataattcagggagcatcaatatt

SEQ ID NO: 616294 - DNA, 120 bp, Artificial Sequence
  ENSG00000177106_28 (sequence is synthesized)
gattccgctgcactcattgctgtaacctgatcacagcgaggttcaggcaggataagccgccaggtgtctgctccaggaggggggcctggccagcccccacctccccccactctgcccttc

SEQ ID NO: 616295 - DNA, 120 bp, Artificial Sequence
  ENSG00000177106_29 (sequence is synthesized)
cccagagacgaccctgccctctcgctagctagatgcacccttcacttatgtctttggacaaggtgcctagtctggaaagcgagaagacctgggagggcagggagagtgaagctggcagct

SEQ ID NO: 616296 - DNA, 120 bp, Artificial Sequence
  ENSG00000177106_30 (sequence is synthesized)
ctcagagtgggaagaagccgggctgggacccccttcctgtcccctcaccctccgggacagaaaccccccgggcacaggctgctggtccccactccactcagagcaagcccatcgccttct

SEQ ID NO: 616297 - DNA, 120 bp, Artificial Sequence
  ENSG00000177106_31 (sequence is synthesized)
ccgagctgcgtccttctccaagggggcttccctggagggagggagggggcttcctgcaggtcctgatttcacacccacatccttcctggtggccaagaggtccacggagcagcctccctc

SEQ ID NO: 616298 - DNA, 120 bp, Artificial Sequence
  ENSG00000177106_32 (sequence is synthesized)
attcccacccctacccaggaccggcagccggagccttgggtccctgcatgggcctggggcgccctgtgccccttcacctcgtcctcgtccagttgactgctgtggcagccggtgctaccc

SEQ ID NO: 616299 - DNA, 120 bp, Artificial Sequence
  ENSG00000177106_33 (sequence is synthesized)
gctgtgtccactgcaccctggccctgttctgagcggtcacagcagctggggagaagggccatcctggaagccgggcagatgaggacggaaccagacagtcccactgtggtgggcagaggt

SEQ ID NO: 616300 - DNA, 120 bp, Artificial Sequence
  ENSG00000177106_34 (sequence is synthesized)
agctggcgattaacttgctgatcgtcaacacctgcagtggcccagacatcgcacgctccgtctcctgcccactgctctcccgagatgccgtggacttcctgcgcggccacctggtcccta

SEQ ID NO: 616301 - DNA, 120 bp, Artificial Sequence
  ENSG00000177106_35 (sequence is synthesized)
attccgggctgacgctgcctgcagcctctctccacggtgacctccagaacagaaaagaggcagccagtcgtgcacctgggaagctgctgccccccagccactgcccaggtctcagaggag

SEQ ID NO: 616302 - DNA, 120 bp, Artificial Sequence
  ENSG00000177106_36 (sequence is synthesized)
cggcccccctctgagggcgagttcatcgactgcttccagaaaatcaagctggcgattaacttgctggtgggtccggtggccccagccctgccccactgtctgtgctgaggggagggtgga

SEQ ID NO: 616303 - DNA, 120 bp, Artificial Sequence
  ENSG00000177106_37 (sequence is synthesized)
gggcggcaggggcgcgcagggtgggggcccagaggcctctgcagcatctccccggggtcggggttggggcagcaggtgcccgccttgggcagcccggttcacgctgtgtggccactctcc

SEQ ID NO: 616304 - DNA, 120 bp, Artificial Sequence
  ENSG00000177106_38 (sequence is synthesized)
tggccactctccctggggtccaaagtcccttcccgagggccagcctgtggagctacgggggtgctgggccagggtctgtgggcctcagtcccctctgaacctcactgtgccccagatcgt

SEQ ID NO: 616305 - DNA, 120 bp, Artificial Sequence
  ENSG00000177106_39 (sequence is synthesized)
ggcgccagcaggtgcaggggacagggacggggccggcaggtgcaggggacggggccagcaggtgcaggggacagggacggggacggggccagggacatccatgggggctactcatggagg

SEQ ID NO: 616306 - DNA, 80 bp, Artificial Sequence
  ENSG00000177106_40 (sequence is synthesized)
atttgtggcaggtggggcaggctggtcacctggagcaggttcctcctctcccggccccgccccggcccggccccgccgag

SEQ ID NO: 616307 - DNA, 120 bp, Artificial Sequence
  ENSG00000177106_41 (sequence is synthesized)
gccccccgcccccgcaggccggtcagaagtactggggccccgccagcccgacccacaagctacccccaagcttcccggggaacaaagacggtgagagctgctgcttcgaggcgggggtcc

SEQ ID NO: 616308 - DNA, 120 bp, Artificial Sequence
  ENSG00000177106_42 (sequence is synthesized)
cccagggccacctgggggaggaagtgtggggggggtccctgggccgggggcgggggcaggggcaaggcagcggcgggcctgagtcgcgcgccccctcagagctcatgcagcacatggacg

SEQ ID NO: 616309 - DNA, 120 bp, Artificial Sequence
  ENSG00000177106_43 (sequence is synthesized)
gagacctggcgccccggccgaggcgcgaacagacggacgcaccggcgagcgccgaggggacaggccgagcgcggggcgccggaggcagtccctcccctaggcttggctgctgccaggggt

SEQ ID NO: 616310 - DNA, 120 bp, Artificial Sequence
  ENSG00000177108_0 (sequence is synthesized)
ccttactcgctggcgcccaagtgggaagccagcagctgcccgctccctcctccccacatccccgctacttgcccagttcccgaagcgaagcgcaggctgcgagccagccgggccgagtcc

SEQ ID NO: 616311 - DNA, 120 bp, Artificial Sequence
  ENSG00000177108_1 (sequence is synthesized)
acaactttgcagcctcgggcagggcgagagccggcgtccggggctcctcttgtcggcgaccagagctcggaatgtaatcgaggatgctggccctgcggctgctcaacgtggtggcccccg

SEQ ID NO: 616312 - DNA, 120 bp, Artificial Sequence
  ENSG00000177108_2 (sequence is synthesized)
cctacttcttgtgcatctccctggtgaccttcgtgctgcagctcttcctcttcctgcccagcatgcgcgaggaccccgcggccgcccggctcttctcgcccgccctgctccacggggcgc

SEQ ID NO: 616313 - DNA, 120 bp, Artificial Sequence
  ENSG00000177108_3 (sequence is synthesized)
tcttcctattcctctcggccaacgccctgggcaattacgtccttgtcatccagaactccccagacgacctgggggcctgccagggggcctcggccaggaagactccatgcccctcaccta

SEQ ID NO: 616314 - DNA, 120 bp, Artificial Sequence
  ENSG00000177108_4 (sequence is synthesized)
gcacccacttctgccgagtgtgcgccagagtcaccctgaggcacgaccatcactgtttcttcaccggcaactgcatcggcagcaggaacatgcgcaacttcgtcctgttctgcctctaca

SEQ ID NO: 616315 - DNA, 120 bp, Artificial Sequence
  ENSG00000177108_5 (sequence is synthesized)
cctccctggcctgcctctactccatggtggccggcgtggcctacatctccgctgtcctttccatctccttcgcccaccccttggccttcctcacgctcctgcccacctccatcagccagt

SEQ ID NO: 616316 - DNA, 120 bp, Artificial Sequence
  ENSG00000177108_6 (sequence is synthesized)
tcttctccggagctgtcctgggttctgaaatgttcgtcatcctcatgctctacctctggttcgccatcggcctggcctgcgccggcttctgctgccaccagctgctgttgatcctccgcg

SEQ ID NO: 616317 - DNA, 120 bp, Artificial Sequence
  ENSG00000177108_7 (sequence is synthesized)
ggcagacccgccaccaggtgcggaagggggtggcagtgagggcccggccctggcgcaagaacttacaagaggtcttcggaaagaggtggctgctgggcctgctggtccccatgttcaatg

SEQ ID NO: 616318 - DNA, 120 bp, Artificial Sequence
  ENSG00000177108_8 (sequence is synthesized)
tcggaagtgagagctccaagcagcaggataagtagtagacactcccgtcatttatctctctgtctctgtcttgactcctcctgagcataaaaccatggcagccttgtctccacccatgac

SEQ ID NO: 616319 - DNA, 120 bp, Artificial Sequence
  ENSG00000177108_9 (sequence is synthesized)
tcactacaaccttgtgctggtaaggtcctagcatcttcccctcaccttccacccatgagaacagcgtgagctggtggatcatgacaaggaggaaaaatgtccccccaggcatttctaggc

SEQ ID NO: 616320 - DNA, 120 bp, Artificial Sequence
  ENSG00000177108_10 (sequence is synthesized)
tcctcacgagccagccaggtggctgctagctgttaggctgcctctgctttctttccgtccccttgggatccctgctttccccctcttcctggctcatccattctccaccgtgtctcattc

SEQ ID NO: 616321 - DNA, 120 bp, Artificial Sequence
  ENSG00000177108_11 (sequence is synthesized)
atcactgctgtctgctagagcccttcctctcagcccccatgttgggagaggggagtggattcttgctgctggtatgagactccctgggacctagaggctggcaaatgtttaaaatcacca

SEQ ID NO: 616322 - DNA, 120 bp, Artificial Sequence
  ENSG00000177108_12 (sequence is synthesized)
cgtgtaagaggcagccaagtcagctctgccaactgctaggggagttgggaaagagtgggtgtgtgtccgcatcccctctgtaggaaaaagaacttagtagcttgctgctccctcaccacc

SEQ ID NO: 616323 - DNA, 120 bp, Artificial Sequence
  ENSG00000177108_13 (sequence is synthesized)
ccccaccaggttcaagaccctttttctgggagacagcaatcaatggcctgctttttccaaatgttattccctgtccaccctgccccatctggccggcccagcccagtccaggacctggct

SEQ ID NO: 616324 - DNA, 120 bp, Artificial Sequence
  ENSG00000177108_14 (sequence is synthesized)
agcccccaggtctttgccagatgatgggaaggcaaggaagaagggacagggaaagataattactgataaatgaaggggatattcgactgtataaccatatggaagtgtgtgtgtgtgtgt

SEQ ID NO: 616325 - DNA, 120 bp, Artificial Sequence
  ENSG00000177108_15 (sequence is synthesized)
gtgtgtgtgagagagagagagagagagatgggtggtggtgagaagtgttgttagaaacatataggaataatgcctaggggaaagggagaagtgagagggacaattgggttcatttatgcc

SEQ ID NO: 616326 - DNA, 120 bp, Artificial Sequence
  ENSG00000177108_16 (sequence is synthesized)
tgccctatacaaagggcattccagcagctgaaactcttcaatgtttgaatggctgcctgtgaaggtagtgagtgccccatcactggaggtattccagcagagtctaggcagtcgtctgcc

SEQ ID NO: 616327 - DNA, 120 bp, Artificial Sequence
  ENSG00000177108_17 (sequence is synthesized)
aggcatgctgtggaagggatttctgtacagggtcattctaggtgagcttacacattccttccaaccccaaggttctgatgtcctggttgtgattgctggacccagaggcaagatctgcag

SEQ ID NO: 616328 - DNA, 120 bp, Artificial Sequence
  ENSG00000177108_18 (sequence is synthesized)
agatgcctgtgagatatttgctttcctagaggggagtgtgggcatgggaggggtctgaaaatcaggacccaacccagccactgaagagagagtctctgcagagacagggctacctgggtg

SEQ ID NO: 616329 - DNA, 120 bp, Artificial Sequence
  ENSG00000177108_19 (sequence is synthesized)
gttgaggggactgacatttgaggacagggagatggagcagtgtcattgtcagtggcagggcatggggggcagtggtgagctaaggctgaggagtggagatgaccagaatataagggtgca

SEQ ID NO: 616330 - DNA, 120 bp, Artificial Sequence
  ENSG00000177108_20 (sequence is synthesized)
attcccagaccatccctgcgcatctgactgactccggtggaggcactgctgtgtgttttctgaaacctagaggaccagacctctggggcatataagggagtagggacaacacaagtgccc

SEQ ID NO: 616331 - DNA, 120 bp, Artificial Sequence
  ENSG00000177108_21 (sequence is synthesized)
cctcctgactgggtcccaaagccaatatgacatccatgcaggcagcagtgctgaatccatgccctgcaatgtccaaccgccaactgcagtgacccgctgatagctgcgcaacagcctggg

SEQ ID NO: 616332 - DNA, 120 bp, Artificial Sequence
  ENSG00000177108_22 (sequence is synthesized)
ttcttgagcagagattgggaggactttactgtggttctgccttcacaccccctagagagctaatgtagtattggctccacctgctcacatttctccctcccatactcattccttcactca

SEQ ID NO: 616333 - DNA, 120 bp, Artificial Sequence
  ENSG00000177108_23 (sequence is synthesized)
tccatcctacgtatatttattgagtgccaactacgttcccagcctcttccaggcactggcaatgcagtgatgaacaggatgacaagattcatgccatcaggggcaccttgtcactgccgt

SEQ ID NO: 616334 - DNA, 120 bp, Artificial Sequence
  ENSG00000177108_24 (sequence is synthesized)
ctgtgcactgattcacactccctgcaaaatggtcactctgccatcttggtggttggtggggcaggtcatttggaaataaagaatgtgatagagatggctgaagaggggaagcctaggctg

SEQ ID NO: 616335 - DNA, 120 bp, Artificial Sequence
  ENSG00000177108_25 (sequence is synthesized)
cctcaatggaggagtcgctgggggcattttcacccacaattctggccatacttaagcaatgggagggagagggaggaggggaagatctgggcaattttggccttgactctttcctggctc

SEQ ID NO: 616336 - DNA, 120 bp, Artificial Sequence
  ENSG00000177108_26 (sequence is synthesized)
cagagctcaagcttagaagccagccctgctatttccagcctcctgaaggctcagcacggtgaggcctgacatcctggggaagggcaacagggagacctacaggatgttggctgcttgcag

SEQ ID NO: 616337 - DNA, 120 bp, Artificial Sequence
  ENSG00000177108_27 (sequence is synthesized)
actggtcaatgggggatgacggtggggaggttgccagatgtgagacttgagtagcatttgtacacatggccctgtattgtccttgaagaacatcaataaaatatatggttttaaattgga

SEQ ID NO: 616338 - DNA, 120 bp, Artificial Sequence
  ENSG00000177108_28 (sequence is synthesized)
ggggtgaggctcaaagaagaagctccaagttcaagctctgtgtctggataaactcccattgtctttccttctctcaaatcagagctgcccgtgggtcccagggtgatgctgggctgtgta

SEQ ID NO: 616339 - DNA, 120 bp, Artificial Sequence
  ENSG00000177108_29 (sequence is synthesized)
gaaccagatgaggaaactggaatctaagatcacactggaatttacagacgaagaaactggaatctgagatctcacagtagtgaatggtgaatattcaaacccaggaatgtaatcgaggat

SEQ ID NO: 616340 - DNA, 120 bp, Artificial Sequence
  ENSG00000177108_30 (sequence is synthesized)
actcgtgcgcccagggcgggcttgtcggcatggaaaggatttcggcgccatgagggttgtttgggtttctctcagcaggagggcgggaggcgggcgcgaaggggggattttaatttcgcc

SEQ ID NO: 616341 - DNA, 120 bp, Artificial Sequence
  ENSG00000177108_31 (sequence is synthesized)
tcaaatgaaaacgctcttcgcaaagaaatagcccgggcagccagcgttggagagatgtgctggccaggacccgctgacacaggaatgtaatcgaggatgctggccctgcggctgctcaac

SEQ ID NO: 616342 - DNA, 120 bp, Artificial Sequence
  ENSG00000177119_0 (sequence is synthesized)
agtctccgggctccgctcggcaggcgagaggcgtcctccggctctgggctccggtcggtgggtgcctcggctcggctttccccggcgctggctgggctcagcggcccctgagcccaagcg

SEQ ID NO: 616343 - DNA, 120 bp, Artificial Sequence
  ENSG00000177119_1 (sequence is synthesized)
acacacgccccgcggtccccgatccggcccctgggagagccgcgccgttctggaacccgggagcccccaacttcgcgccaagttcggagccgccttctgagggagacatgaaaaagatga

SEQ ID NO: 616344 - DNA, 120 bp, Artificial Sequence
  ENSG00000177119_2 (sequence is synthesized)
gcaggaatgttttgctacaaatggaggaggaggaggacgacgacgatggggatatcgtgttggaaaaccttggacagacaattgtccccgatttgggatcactggaaagtcagcatgatt

SEQ ID NO: 616345 - DNA, 120 bp, Artificial Sequence
  ENSG00000177119_3 (sequence is synthesized)
ttcgaaccccggagtttgaagaatttaatggaaaacctgactccctcttttttaatgatggccagcgaagaattgactttgttctagtatatgaggatgaaagcagaaaagagaccaata

SEQ ID NO: 616346 - DNA, 120 bp, Artificial Sequence
  ENSG00000177119_4 (sequence is synthesized)
aaaagggtacaaatgaaaaacaaaggaggaaaagacaagcatacgaatctaaccttatctgtcatggcctgcagttagaagcaacaagatcagtattggatgacaagcttgtatttgtaa

SEQ ID NO: 616347 - DNA, 120 bp, Artificial Sequence
  ENSG00000177119_5 (sequence is synthesized)
aagtacacgcaccatgggaggtgttatgtacgtatgctgagataatgcacatcaaattgcctctgaaacccaatgatctgaaaaaccggtcctcagcctttggtacactcaactggttta

SEQ ID NO: 616348 - DNA, 120 bp, Artificial Sequence
  ENSG00000177119_6 (sequence is synthesized)
ccaaagtcctcagtgtagacgaaagcatcatcaagccagagcaagagtttttcactgccccatttgagaagaaccggatgaatgatttttacatagttgatagagatgctttcttcaatc

SEQ ID NO: 616349 - DNA, 120 bp, Artificial Sequence
  ENSG00000177119_7 (sequence is synthesized)
cagccaccagaagccgcattgtttacttcatcctctctcgggtcaagtatcaagtgataaacaatgttagcaagtttgggatcaacagacttgtaaactctgggatctacaaggcagctt

SEQ ID NO: 616350 - DNA, 120 bp, Artificial Sequence
  ENSG00000177119_8 (sequence is synthesized)
tcccactccatgattgcaaattccgccgtcagtcagaggatcccagctgccctaatgaacggtaccttctgtacagagaatgggctcatcctcgaagcatatacaaaaagcagcccttgg

SEQ ID NO: 616351 - DNA, 120 bp, Artificial Sequence
  ENSG00000177119_9 (sequence is synthesized)
atcttatcaggaaatactatggagagaagattggaatctactttgcttggctgggctattacactcagatgcttctcctggccgcagttgtaggagtggcttgctttctctatggatatc

SEQ ID NO: 616352 - DNA, 120 bp, Artificial Sequence
  ENSG00000177119_10 (sequence is synthesized)
ttaatcaagataactgtacatggagcaaagaagtttgtcatcctgatattggtggcaagatcataatgtgtcctcagtgtgataggctttgtccattctggaaactcaatattacttgcg

SEQ ID NO: 616353 - DNA, 120 bp, Artificial Sequence
  ENSG00000177119_11 (sequence is synthesized)
agtcctcaaagaaattgtgcatcttcgacagttttggaaccctggtctttgcagtatttatgggagtatgggttaccttgtttttggagttttggaagcgacgccaggcagaacttgagt

SEQ ID NO: 616354 - DNA, 120 bp, Artificial Sequence
  ENSG00000177119_12 (sequence is synthesized)
atgaatgggatactgttgagttacagcaggaagaacaagcccgaccagaatacgaagcacgatgtactcacgtagtgataaatgagattactcaggaagaagaacgcattccctttactg

SEQ ID NO: 616355 - DNA, 120 bp, Artificial Sequence
  ENSG00000177119_13 (sequence is synthesized)
cctggggaaaatgtatacggataaccctctgtgccagtgctgtctttttctggatcctattgatcatcgcttcagttattgggatcattgtctataggctctcggtgttcattgtatttt

SEQ ID NO: 616356 - DNA, 120 bp, Artificial Sequence
  ENSG00000177119_14 (sequence is synthesized)
ctgcaaaacttcccaagaacattaatggaacagacccaatccagaaatacctgactccacagacagccacgtccatcacggcctccatcatcagctttataattatcatgattctgaaca

SEQ ID NO: 616357 - DNA, 120 bp, Artificial Sequence
  ENSG00000177119_15 (sequence is synthesized)
ccatatatgaaaaagtggcaattatgattactaacttcgaactcccaaggacccagactgattatgagaacagcctcaccatgaagatgttcttattccagtttgtcaactactactctt

SEQ ID NO: 616358 - DNA, 120 bp, Artificial Sequence
  ENSG00000177119_16 (sequence is synthesized)
catgcttctacatagcattctttaagggcaaatttgtaggctatccaggagacccagtttattggttgggaaaatacagaaatgaagagtgtgacccaggtggctgtcttcttgaactga

SEQ ID NO: 616359 - DNA, 120 bp, Artificial Sequence
  ENSG00000177119_17 (sequence is synthesized)
caactcagctgacaataatcatgggaggaaaagcaatctggaataacatacaagaagtattattgccctggatcatgaatctaattgggcgatttcacagagtttctggatcagaaaaga

SEQ ID NO: 616360 - DNA, 120 bp, Artificial Sequence
  ENSG00000177119_18 (sequence is synthesized)
taaccccacgatgggaacaggactaccatctgcagcctatgggcaaactgggattattttatgaatatcttgaaatgattattcagtttgggttcgtcaccttatttgtggcctcttttc

SEQ ID NO: 616361 - DNA, 120 bp, Artificial Sequence
  ENSG00000177119_19 (sequence is synthesized)
cactggcccctctgttggctctcgtgaacaatatattggaaataagagtggacgcatggaaactgaccacccagtttagacgcctggtaccagagaaagcccaagacattggagcatggc

SEQ ID NO: 616362 - DNA, 120 bp, Artificial Sequence
  ENSG00000177119_20 (sequence is synthesized)
agcccatcatgcaaggaatagcaattctggctgtggtgaccaatgccatgatcatagctttcacgtcggacatgatcccccgcctagtgtactactggtccttctccgtccctccctacg

SEQ ID NO: 616363 - DNA, 120 bp, Artificial Sequence
  ENSG00000177119_21 (sequence is synthesized)
gggaccacacttcctacaccatggaagggtacatcaacaacactctctccatcttcaaagtcgcagacttcaaaaacaaaagcaagggaaacccgtactctgacctgggtaaccatacca

SEQ ID NO: 616364 - DNA, 120 bp, Artificial Sequence
  ENSG00000177119_22 (sequence is synthesized)
catgcaggtatcgtgatttccgatacccacctggacacccccaggagtataaacacaacatctactattggcatgtgattgcagccaagctggcttttatcattgtcatggagcacgtca

SEQ ID NO: 616365 - DNA, 120 bp, Artificial Sequence
  ENSG00000177119_23 (sequence is synthesized)
tctactctgtgaaatttttcatttcatatgcaattcccgatgtatcaaaacgcacaaagagcaagatccagagagaaaaatacctaacccaaaagcttcttcatgagaatcacctcaaag

SEQ ID NO: 616366 - DNA, 120 bp, Artificial Sequence
  ENSG00000177119_24 (sequence is synthesized)
tttgtcaaaatatattaggaatcactaatgagaatgtgtaagttaaatcactttggcaaatatgagtctcaactattgccatttcctcatgtattatttttcagtttcagctagcgatgc

SEQ ID NO: 616367 - DNA, 120 bp, Artificial Sequence
  ENSG00000177119_25 (sequence is synthesized)
agaaactggaaaatgtaaaacttagatcatgaagggcataaaacttatcacccggaaaacctcaatgttacctttttctgataaattggaattttacagaaaaagtccctcagtgtgctt

SEQ ID NO: 616368 - DNA, 120 bp, Artificial Sequence
  ENSG00000177119_26 (sequence is synthesized)
aaaaaccaccccttctaaagtagaatggattcttttttttctgtttgattattttcatttctgtctattctcaggcgcatgatctcctttatttttaagccatgtttcatttcttcactt

SEQ ID NO: 616369 - DNA, 120 bp, Artificial Sequence
  ENSG00000177119_27 (sequence is synthesized)
ggctagatctgttccagggtcatcttttccttacagtaccatcattatagatttaatttaatagctttcatgtgattaaaaatagctaactagactcaaggattcacaatatttaggtgt

SEQ ID NO: 616370 - DNA, 120 bp, Artificial Sequence
  ENSG00000177119_28 (sequence is synthesized)
attttcaatacctccagaaaggaaacctcagttaatcagaggaaatagtttcagtcttcatttgagcatgtctttccatctcaaaaaaatactcttagtaggttggagtgaagatagcaa

SEQ ID NO: 616371 - DNA, 120 bp, Artificial Sequence
  ENSG00000177119_29 (sequence is synthesized)
ggttttgaagcatatttgtcctaatccacagtgacactttttatcttccaggagcactcctaggaggttccgtgcctaatcaatgttgactgctttgcagatctcaagggaataaaatga

SEQ ID NO: 616372 - DNA, 120 bp, Artificial Sequence
  ENSG00000177119_30 (sequence is synthesized)
caaaagcagggaaagttacagattcaaacagcattttaactcatgttgatctggataattaatcttttctaaagatgtgtagtttcttggaaaacagtgatatcacatgattaaaattac

SEQ ID NO: 616373 - DNA, 120 bp, Artificial Sequence
  ENSG00000177119_31 (sequence is synthesized)
atttttatcaacataattgtctggaaaagataagcccctcaattttctaccagttgacttttattcattagatacagaaggtgcagtattacacatcaccagctgcctttgtgaatggct

SEQ ID NO: 616374 - DNA, 120 bp, Artificial Sequence
  ENSG00000177119_32 (sequence is synthesized)
cactacacagccattggggtacaactgtgtgcatgggcagaaacagcaagtgccctcattgtggtcattgggtggggagtgccttttgtcaaggagtctgcaggaattggcttatttctg

SEQ ID NO: 616375 - DNA, 120 bp, Artificial Sequence
  ENSG00000177119_33 (sequence is synthesized)
tatgccaaagtgatcaacacaccaaagtctctgccataaagaatgtggcttccttgcatcctccatcctgttactctgggcccagtaatttgatgtaactgtctgattgtactagagaca

SEQ ID NO: 616376 - DNA, 120 bp, Artificial Sequence
  ENSG00000177119_34 (sequence is synthesized)
ggagtatacccagcttattcataatcaagtaaagagactcagattagatttgattttttagcctcctctagagccaatcaggcagttaagagtaataaaggaaaagggtttggtcacaaa

SEQ ID NO: 616377 - DNA, 120 bp, Artificial Sequence
  ENSG00000177119_35 (sequence is synthesized)
ccctaccattatctggagattacttcctgctgcactcctgtcttgccatgcacgtcttgccccctcacttttgctcagcctagcagtctacttcactttattgccttgtaagtgtcaggc

SEQ ID NO: 616378 - DNA, 120 bp, Artificial Sequence
  ENSG00000177119_36 (sequence is synthesized)
ctcctgggcgctctggaaaagacagggagccaggccctctcacccctactggtaacaggtcattgctgggtgcacaagagggaggtgatttgcatcatggtcatgctgcatgggcttcac

SEQ ID NO: 616379 - DNA, 120 bp, Artificial Sequence
  ENSG00000177119_37 (sequence is synthesized)
tgggatgctgttaaacaccagaggagccaacctatcagaatcccagcagcaaaggaaaactcagattttagaggctttttacaataaagtagcgtaactctaggtcatgattgatttcaa

SEQ ID NO: 616380 - DNA, 120 bp, Artificial Sequence
  ENSG00000177119_38 (sequence is synthesized)
atgcctgccatgaatgatttgtaagtaattatgtaggatccatcaaagcagtattgtaggcttttgaattgtcccagtggatccgggaccccatttcactgtctctcttgatcgtgttaa

SEQ ID NO: 616381 - DNA, 120 bp, Artificial Sequence
  ENSG00000177119_39 (sequence is synthesized)
tgatgcaatcagagttcaagacaggccccatgaagtctgactgcactgggatggagaaatgaatttcttcccactgaaggaaactctttctcattcgcagccaagacgggagtgccactg

SEQ ID NO: 616382 - DNA, 120 bp, Artificial Sequence
  ENSG00000177119_40 (sequence is synthesized)
ttcctctcttcactcctgagatactgcttctggaagcgggtgtcacttcctctctagtacctcttctcttctctgaagtgtgtgactatctcctagtgtttaaatttggcagttactcgc

SEQ ID NO: 616383 - DNA, 120 bp, Artificial Sequence
  ENSG00000177119_41 (sequence is synthesized)
catgtatgtcagcatagaaaaggaaatgtttttaccttatctcctgtatgtatgatagaacttaaaagaaatgtgcatttgttttcatagccccagcagagaaaatcctcttcatagatt

SEQ ID NO: 616384 - DNA, 120 bp, Artificial Sequence
  ENSG00000177119_42 (sequence is synthesized)
aaatgtgctgctgtggacaggaggggaaaaaaaaccctctacatattgaaaggcaccaaatgtaatatctgacactgttaagatgcccaaaagagcaaagttgtagtggagatgcagggt

SEQ ID NO: 616385 - DNA, 120 bp, Artificial Sequence
  ENSG00000177119_43 (sequence is synthesized)
catttccccatgccatccacagtgtttgttagtgagtccacggctgacttgcagtgataaagaaaagcatggagctgtgtctgcagacaatggtggctgcatctgtaagtggcttcagag

SEQ ID NO: 616386 - DNA, 120 bp, Artificial Sequence
  ENSG00000177119_44 (sequence is synthesized)
gcagcagccctggggaaattgatgggtgtggcagtggacctgtgaagagggagaatctagccttcagcctgtccagtgttaaccactagagaaactgagctttatatccttttttaatgc

SEQ ID NO: 616387 - DNA, 120 bp, Artificial Sequence
  ENSG00000177119_45 (sequence is synthesized)
ctgtgaattttagcatattgaaacattagagcaaatactcaggggatttttcattaaacatccctcagataatttagctatatatcattagaaagggaaagctatcatttttattttaaa

SEQ ID NO: 616388 - DNA, 120 bp, Artificial Sequence
  ENSG00000177119_46 (sequence is synthesized)
actaaacaaggccatcttataaactgtcaccaaagtcttcccttttttattgcatgtgtgccttgaatttcataaaacattaattcacaatgggggtcagaatgtactcttgttgaaaca

SEQ ID NO: 616389 - DNA, 120 bp, Artificial Sequence
  ENSG00000177119_47 (sequence is synthesized)
cttcttgtaccattttatgttcatattatgtttgagagggtaaaaatgtatgagcagcttaactgaagtagaactattcatgatgcttttcacacattgtggcataagatgtaaagtttg

SEQ ID NO: 616390 - DNA, 120 bp, Artificial Sequence
  ENSG00000177119_48 (sequence is synthesized)
gcttttcacacattgtggcataagatgtaaagtttgtaattaatgttaatttctgtgcattttaatattcttttataattattaatgttaatttctgtgcattttaatattcttttataa

SEQ ID NO: 616391 - DNA, 120 bp, Artificial Sequence
  ENSG00000177119_49 (sequence is synthesized)
ttggggcagaggaggcttgtaggaataggggaagagttcataagcagagctgaaacaacaccaaacatggaaatgttacaaggtggagaaattgtgcttactgaaactcttctcagaaat

SEQ ID NO: 616392 - DNA, 120 bp, Artificial Sequence
  ENSG00000177119_50 (sequence is synthesized)
attgctgtttgtggatgatagaaatcttcagagttgtcacttaaggtagaggtaggagggtaagaagcgtcaaggactcaccgaattgtccattcccccttttgttctgctgtggaatgt

SEQ ID NO: 616393 - DNA, 120 bp, Artificial Sequence
  ENSG00000177119_51 (sequence is synthesized)
tgagactacagcagttcagtcacatcttcagactccatttctagttcttcttgctctttctaccacatctgcagtgacttcctccactgaagtcttgaacttctcaaagtcatccatgag

SEQ ID NO: 616394 - DNA, 120 bp, Artificial Sequence
  ENSG00000177119_52 (sequence is synthesized)
ggaggaggaggacgacgacgatggggatatcgggctgaagtgcagtagtggagtagcgcaatcatggctcactgtagcattgactcccagactcaattgatcctcttacctcaacctcct

SEQ ID NO: 616395 - DNA, 120 bp, Artificial Sequence
  ENSG00000177119_53 (sequence is synthesized)
tttgggatcactggaaagtcagcatgattttcgaaccccggagtttgtgaaagctattctgaaggttgccctaggaagttgaacataagatggactccagggaattagaaaccctgtttt

SEQ ID NO: 616396 - DNA, 120 bp, Artificial Sequence
  ENSG00000177119_54 (sequence is synthesized)
tccatgcaaccctgctctcagacctctgtggacaagtcgcttttccttttagaacctcagtttcctcatatgtaaaaagcagaaagatcagcagtagatatcctcactggagtgttgttc

SEQ ID NO: 616397 - DNA, 120 bp, Artificial Sequence
  ENSG00000177119_55 (sequence is synthesized)
agtgactgcacggtgactgagaaacattttagctatcttaaaatgatgttcataataatatagtgaatagtcttatctaacatttatggatgcttgtggttggctaagcacattacaggg

SEQ ID NO: 616398 - DNA, 120 bp, Artificial Sequence
  ENSG00000177119_56 (sequence is synthesized)
attttttgagtgctgacttgacgttcaaaagaaatgcttagtggatcattttggattttcagatgtgggatgctcagctgaggaaaagacaagcatacgaatctaaccttatctgtcatg

SEQ ID NO: 616399 - DNA, 120 bp, Artificial Sequence
  ENSG00000177119_57 (sequence is synthesized)
gcctgcagttagaagcaacaagatcagtaagtactggtcccttttcagccctcggctgaccactgttctcgggcagcttcgtgccacttggaatacttgggtgacattggaaacatgcag

SEQ ID NO: 616400 - DNA, 120 bp, Artificial Sequence
  ENSG00000177119_58 (sequence is synthesized)
tagcagatcttttttaatagccaacgaattttacaatgaatgcatgtatgaatgattattttctttctttaagaaacttctaaaagcttttttgttatacaaaaaatagtttatggtaaa

SEQ ID NO: 616401 - DNA, 120 bp, Artificial Sequence
  ENSG00000177119_59 (sequence is synthesized)
aaattagaaaacataagaataaggaaaataatctgtatcttaattatccataaataattttgcagtccttctgagctgttttactcaaaaatatatatgtacacattttttatctttcaa

SEQ ID NO: 616402 - DNA, 120 bp, Artificial Sequence
  ENSG00000177119_60 (sequence is synthesized)
ctcactgcaacctccgcctcccagttgactgctgtatgtgttataggtttgtcgatgaaattagacttttggaacaactaacttctgactttattgactccctctattatatattttcta

SEQ ID NO: 616403 - DNA, 120 bp, Artificial Sequence
  ENSG00000177119_61 (sequence is synthesized)
ctgactttattgactccctctattatatattttctatttcaataatatctattttcttttctgttactttctttttccttctactttctttggggccaactccgtgtttttctgtatcga

SEQ ID NO: 616404 - DNA, 120 bp, Artificial Sequence
  ENSG00000177119_62 (sequence is synthesized)
atttcttaagttagatttattcaataattcattcaacaaatatttgtgtgtctattatgtggccagcattgtttcatgtgctcaagatagagtagcattgtttggctcattaatattcca

SEQ ID NO: 616405 - DNA, 120 bp, Artificial Sequence
  ENSG00000177119_63 (sequence is synthesized)
atactggcatttaagaccattaattttcctctaaatcgtatttgagctgcaacccacaagcttttatatgtatagttttttgttgttgctattattaaaagtattttagatcctcccttg

SEQ ID NO: 616406 - DNA, 120 bp, Artificial Sequence
  ENSG00000177119_64 (sequence is synthesized)
ctcccttgttttgcttttcaatctgaaatgccttcatgccattttaatttttaaaaggtaatttaattgagcctaatttctttttcttttttcttttttttgagacagagtcttactctg

SEQ ID NO: 616407 - DNA, 120 bp, Artificial Sequence
  ENSG00000177125_0 (sequence is synthesized)
cggggactggcctggcgccggcggcggcggagggggcgccgcgggcgggcgatgtgagcgcggcgctctggacagagtacgcttcatgtcagtagaaatggacagcagcagttttattca

SEQ ID NO: 616408 - DNA, 120 bp, Artificial Sequence
  ENSG00000177125_1 (sequence is synthesized)
gtttgatgtgcccgagtacagcagcaccgttctgagccagctaaacgaactccgcctgcaggggaaactatgtgacatcattgtacacattcagggtcagccattccgagcccacaaagc

SEQ ID NO: 616409 - DNA, 120 bp, Artificial Sequence
  ENSG00000177125_2 (sequence is synthesized)
agtccttgctgccagctccccatatttccgggaccattcagcgttaagtaccatgagtggcttgtcaatatcagtgattaaaaatcccaatgtgtttgagcagttgctttctttttgtta

SEQ ID NO: 616410 - DNA, 120 bp, Artificial Sequence
  ENSG00000177125_3 (sequence is synthesized)
cactggaagaatgtccttgcagctgaaggatgttgtcagttttctgactgcagccagctttcttcagatgcagtgtgtcattgacaagtgcacgcagatcctagagagcatccattccaa

SEQ ID NO: 616411 - DNA, 120 bp, Artificial Sequence
  ENSG00000177125_4 (sequence is synthesized)
aatcagcgttggagatgttgactctgttaccgtcggtgctgaagagaatcccgagagtcgaaacggagtgaaagacagcagcttctttgccaacccagtggagatctctcctccatattg

SEQ ID NO: 616412 - DNA, 120 bp, Artificial Sequence
  ENSG00000177125_5 (sequence is synthesized)
ctctcagggacggcagcccaccgcaagcagtgacctccggatggagacgacccccagcaaagctttgcgcagccgcttacaggaggaggggcactcagaccgcgggagcagtgggagcgt

SEQ ID NO: 616413 - DNA, 120 bp, Artificial Sequence
  ENSG00000177125_6 (sequence is synthesized)
ttctgaatatgagattcagatagagggagaccatgagcaaggagacctattggtgagggagagccagatcaccgaggtgaaagtgaagatggagaagtccgaccggcccagctgttccga

SEQ ID NO: 616414 - DNA, 120 bp, Artificial Sequence
  ENSG00000177125_7 (sequence is synthesized)
cagctcctccctgggtgacgatgggtaccacaccgagatggttgatggggaacaagttgtggcagtgaatgtgggctcctatggttctgtgctccagcacgcatactcctattcccaagc

SEQ ID NO: 616415 - DNA, 120 bp, Artificial Sequence
  ENSG00000177125_8 (sequence is synthesized)
agcctcacagccaaccaatgtatcagaagcttttggaagtttgagtaattccagcccatccaggtccatgctgagctgtttccgaggagggcgtgcccgccagaagcgggctttgtctgt

SEQ ID NO: 616416 - DNA, 120 bp, Artificial Sequence
  ENSG00000177125_9 (sequence is synthesized)
ccacctgcacagtgacctgcagggcctggtgcagggctctgacagtgaagccatgatgaacaaccccgggtatgagagcagtccccgggagaggagtgcgagagggcattggtacccgta

SEQ ID NO: 616417 - DNA, 120 bp, Artificial Sequence
  ENSG00000177125_10 (sequence is synthesized)
caatgagaggttgatctgtatttactgtggaaagtccttcaaccagaaaggaagccttgataggcacatgcgactccatatgggaatcaccccctttgtgtgcaagttctgtgggaagaa

SEQ ID NO: 616418 - DNA, 120 bp, Artificial Sequence
  ENSG00000177125_11 (sequence is synthesized)
gtacacacggaaggaccaactggagtaccacatccggggccatacagatgataaaccattccgctgtgagatctgcgggaagtgctttccattccaaggtaccctcaaccagcacttgcg

SEQ ID NO: 616419 - DNA, 120 bp, Artificial Sequence
  ENSG00000177125_12 (sequence is synthesized)
gaaaaaccacccaggcgttgctgaagtcaggagtcgcattgagtcccccgagagaacagatgtgtacgtggaacagaaactagaaaatgacgcatcggcctcagagatgggcctagattc

SEQ ID NO: 616420 - DNA, 120 bp, Artificial Sequence
  ENSG00000177125_13 (sequence is synthesized)
ccggatggaaattcacacagtgtctgatgctcccgattaagatggtaaagaagtgcacccaaacaaagcacattaatcaatgcatatttgtgatttgctttgttgtaatctttggttttc

SEQ ID NO: 616421 - DNA, 120 bp, Artificial Sequence
  ENSG00000177125_14 (sequence is synthesized)
ccaaccatctggaaatctcttggtctcttggcagtttttctaaagtttctggatggaacacttcgttgtgtttatcctttcccctgccctccctccccgaaggagctcaaagcatgaagg

SEQ ID NO: 616422 - DNA, 120 bp, Artificial Sequence
  ENSG00000177125_15 (sequence is synthesized)
gcaacgcatccagggaaaacacaggctgacagtattcctctttggctgaactcttaatccaaaatctgccagtgatttagctatgccaactggttgaccctccattctctgccaagaggc

SEQ ID NO: 616423 - DNA, 120 bp, Artificial Sequence
  ENSG00000177125_16 (sequence is synthesized)
atactctttctcattgtgtgcgctggcagcagtgcacttccacggagggagattaggatgccgtcagctgatacaaatgggtaaccttttctaatttaaaattccttttagggggtagtt

SEQ ID NO: 616424 - DNA, 120 bp, Artificial Sequence
  ENSG00000177125_17 (sequence is synthesized)
taataaaactattattatatatatagtatatatacattttcaaatttgattttattctggttgaggtgaatgtaagaggaatatataatttaatacaatgtgaacagggcttctgagtct

SEQ ID NO: 616425 - DNA, 120 bp, Artificial Sequence
  ENSG00000177125_18 (sequence is synthesized)
tgaacagggcttctgagtctatctcatccctacctaatatgttagggttttgccccttcatttcccttacaaaagaatgttagtaggtttatattaatcattgtgtccaaaagcaagcaa

SEQ ID NO: 616426 - DNA, 120 bp, Artificial Sequence
  ENSG00000177125_19 (sequence is synthesized)
agcaaatcacagtgttcacagctctgcttcataacaaatacataaaccaaatgccataaaatttcttcaactctagttggaaaccgtttggaatttttgttagttgtccagcaggtaagc

SEQ ID NO: 616427 - DNA, 120 bp, Artificial Sequence
  ENSG00000177125_20 (sequence is synthesized)
tggatgacctgtggtgctgacctttttacatagtgtagtgttatattagccaaccccaaaggagcagtggttttcaaggtttttactggcctacaaatctaccttcattccgtactgtag

SEQ ID NO: 616428 - DNA, 120 bp, Artificial Sequence
  ENSG00000177125_21 (sequence is synthesized)
aaacatacataccaggtaactaaatcgaatcactctctatcatgagttagtactcactcgcacttaaggaaagggatttgtagttctgtctacaaaattctccaagcagtgttgtggttt

SEQ ID NO: 616429 - DNA, 120 bp, Artificial Sequence
  ENSG00000177125_22 (sequence is synthesized)
tgtttttgttttttttctttctcttttcaaacagccagttcaggtgcacagcaactttttctacatgcagttcccagggaaactgcagaacttagaatttgtactttttgtaaagctata

SEQ ID NO: 616430 - DNA, 120 bp, Artificial Sequence
  ENSG00000177125_23 (sequence is synthesized)
tatactctatgggaattgcaagcaatatatctatcttagtattgtgtgtgctaatgagagcctcagtggctcccccactctctcagtgtttcctgcttaaagaaccaacagtttaaaagc

SEQ ID NO: 616431 - DNA, 120 bp, Artificial Sequence
  ENSG00000177125_24 (sequence is synthesized)
cctctaagatactctgtgtgtcaccaaatctgtgtgtcaccattttttggtcatgtggtgctatttttgttaagtgtctttttaggtcagtatagttgtagaaaatgtgaaatctgatgg

SEQ ID NO: 616432 - DNA, 120 bp, Artificial Sequence
  ENSG00000177125_25 (sequence is synthesized)
taataatgaattataattgttttcctctcttgagttcatagcttgaaaagagacctcaaaagcatgtgctggcaaacacgttactgtatgaaaacatacctgagtccatttgaataatgt

SEQ ID NO: 616433 - DNA, 120 bp, Artificial Sequence
  ENSG00000177125_26 (sequence is synthesized)
tttattagtactttcggaaatgtcttcagttctgtattgtgttcacatacacaaacaggctttacaagattgcttcggtactgtaaactctggcagagagtaattttgtaggcagtttgg

SEQ ID NO: 616434 - DNA, 120 bp, Artificial Sequence
  ENSG00000177125_27 (sequence is synthesized)
gtgcacctccataggagaacagtgcagccacctaaaagaaaaacgaacgaaggaccagcctcagaggctagaagttaaaggaatacagaattagatgtttgctggttttctgtgcttttt

SEQ ID NO: 616435 - DNA, 120 bp, Artificial Sequence
  ENSG00000177125_28 (sequence is synthesized)
tggctcctaaaataccaatggtggatttgtttttgtttttgttttttgttttgagaaataaaaagtcattcaagccctttgtgtgtaatagcccccaggggtggcagctgtgcagtcgca

SEQ ID NO: 616436 - DNA, 120 bp, Artificial Sequence
  ENSG00000177125_29 (sequence is synthesized)
tctctttggcacacaggatctgttcacgtgtgaactgctgcgctacacatcagtgttaactccctacagattacactctaatcccgctgctcccgaggagcggctttgctaaatcgggta

SEQ ID NO: 616437 - DNA, 120 bp, Artificial Sequence
  ENSG00000177125_30 (sequence is synthesized)
tatagtatatgcctttttcctcgtcaaactgcctaagtaggggttcgttctctccctgaagcacttgttcaactcctgttaaagccgcgtgcctcaaggggaggctggaccccaagtgtt

SEQ ID NO: 616438 - DNA, 120 bp, Artificial Sequence
  ENSG00000177125_31 (sequence is synthesized)
tacccacttaaatatgttctggggtttcaggtaaatgtttgtgggtttttttttccttacatgaataagtttggttttgatttttttttaattgaatgcaaaaaatttgtgttgtgatac

SEQ ID NO: 616439 - DNA, 120 bp, Artificial Sequence
  ENSG00000177125_32 (sequence is synthesized)
aaattaagtttgtgacaagaaatgcccaaatccaaggacataagaggtcaagctcagggaaggaacctccttttcactcaggcttggggcctccagcgaggtttccagagcattccatgg

SEQ ID NO: 616440 - DNA, 120 bp, Artificial Sequence
  ENSG00000177125_33 (sequence is synthesized)
tatgagagacagtgaggagggagggcacctggcgcgggcacttccagcgtcctggctcttggcattgtccgtcttaaccttatttacatggagttctttgtatttgtgaatctgtttaac

SEQ ID NO: 616441 - DNA, 120 bp, Artificial Sequence
  ENSG00000177125_34 (sequence is synthesized)
tggtttgagtttaccaaagagtgacttatccaaaattgtctttgacaaaaatatccattgctttgattgtacagttcaggttcaaacattgtaatgggactgttaaggggcagaaaattg

SEQ ID NO: 616442 - DNA, 120 bp, Artificial Sequence
  ENSG00000177125_35 (sequence is synthesized)
attgagtttctctctaagaatcatgattccacattttgcaagttccacttgctcccattcgtgttgctaacactttaccctttccactgctcgcagtgttaagaatgaattctcaagcca

SEQ ID NO: 616443 - DNA, 120 bp, Artificial Sequence
  ENSG00000177125_36 (sequence is synthesized)
taacacagtactgtaaagttccgcagggcttcgagggaggcagcgcctaggccagcacggagctgtgtagcctctctgagcgttcgcactgtcatgcttcccaggggtgtgactggtgag

SEQ ID NO: 616444 - DNA, 120 bp, Artificial Sequence
  ENSG00000177125_37 (sequence is synthesized)
agattaactccattcagatcgggcagcagcaattaattgtgccttgccgcatgaggatgtgtcaggaggattaacatgaccacagaaccgaaacattctctccctgaagttcacttcacg

SEQ ID NO: 616445 - DNA, 120 bp, Artificial Sequence
  ENSG00000177125_38 (sequence is synthesized)
tctccgcagacgaagtacgctgtgtaactccttagagcaactctttttggaaagcaaagtccctatttctgtacagttttaggttaggtgtttcatttataacagatgcagaaatcaatt

SEQ ID NO: 616446 - DNA, 120 bp, Artificial Sequence
  ENSG00000177125_39 (sequence is synthesized)
aagataaagtgatatgtgaagaaatcttttacagtaaaatatatcctgaattcatataggcttgttcataattgagtctcttcttgagctaccttttcaatattagacaatgtgaagaca

SEQ ID NO: 616447 - DNA, 120 bp, Artificial Sequence
  ENSG00000177125_40 (sequence is synthesized)
gtgacagcgtccttttctagagatatttagcctgttattacaaactgtgaagacaaagaattttatacttttactaatgtttgtggttttaaacagttattttcattctaatcagttctc

SEQ ID NO: 616448 - DNA, 120 bp, Artificial Sequence
  ENSG00000177125_41 (sequence is synthesized)
taccctctaatttctactaaagctgtaaatacatttagaaattatatttgtaaatacagtatatggagacaagttaattttttggtcagtggaaaaagcctcccaaccaattggccctgc

SEQ ID NO: 616449 - DNA, 120 bp, Artificial Sequence
  ENSG00000177125_42 (sequence is synthesized)
cttggcagttgtgttttttgttgttgttgttgttgttttagtttagtttttttttttaaacagcagaaaggatactgtcggttcactgttgagcagaatatactgtagaacgaaaatgat

SEQ ID NO: 616450 - DNA, 120 bp, Artificial Sequence
  ENSG00000177125_43 (sequence is synthesized)
aatttttaaatcttccagagcatgagtaaatgtcttttctaatgatagcaaatataaccaactctttgtttttcccttagcccagaccatatagacctgcgtattttgtgtgtggttttg

SEQ ID NO: 616451 - DNA, 120 bp, Artificial Sequence
  ENSG00000177125_44 (sequence is synthesized)
tttttatttttgttcttacagcctagaccctaggaaaaatttgcaggaacacgaaacaagggctggggggaaaatcatctatgtgaatgagctttactttaaagagatcaatgtatttta

SEQ ID NO: 616452 - DNA, 120 bp, Artificial Sequence
  ENSG00000177125_45 (sequence is synthesized)
ttttatcaactttttctcttagttactgtgatttttgttgttgttgtcctcgttattgttaaattctgtaatggtttcctgtgaagcctccactgaaagggactcaaatatgcaacacct

SEQ ID NO: 616453 - DNA, 120 bp, Artificial Sequence
  ENSG00000177125_46 (sequence is synthesized)
aaactattttccaagggcacatgccccttgaatggtgcttctagactggtcagggttatttattaaattttatatatgaaagtattggggaattatgtaaattctttatatgaaactatc

SEQ ID NO: 616454 - DNA, 120 bp, Artificial Sequence
  ENSG00000177125_47 (sequence is synthesized)
tagttcataaatcatagatttcatattactcagtgcaactgaactaaaagttcagaaaagtcattcacattgttccaaatttgtaatggttgtcacatgtcacatgcgtctttttcagta

SEQ ID NO: 616455 - DNA, 120 bp, Artificial Sequence
  ENSG00000177125_48 (sequence is synthesized)
agtgccagagtgttcccactgtttctgcccagtgcttgacttctcggcccggaagagaacctgctttctctggtttccttcctgagtctggcacagacggggctattgtagttcttgatc

SEQ ID NO: 616456 - DNA, 120 bp, Artificial Sequence
  ENSG00000177125_49 (sequence is synthesized)
aagtcctggagtcagccttgcctggctctccttgtagcagattcagtccacagacctcttgctgcccctcagtgacaagtatgctgtgaattcaacctttggacttgctgcccaagcctt

SEQ ID NO: 616457 - DNA, 120 bp, Artificial Sequence
  ENSG00000177125_50 (sequence is synthesized)
tggttgctgccctgactattgtaagaggtaaacttacctggtttgtttgagaatgaccattttcctaatgtgaaaaccatctctctcaccacttttattagtagggctaacatttttttc

SEQ ID NO: 616458 - DNA, 120 bp, Artificial Sequence
  ENSG00000177125_51 (sequence is synthesized)
cgttataaatggttgagcaatttgaatgacttaacacagtgtcattatcttgcaatataaactggtaacctcacaactccacacttcatcaccatatgaagtaaatgaagctagctaagc

SEQ ID NO: 616459 - DNA, 120 bp, Artificial Sequence
  ENSG00000177125_52 (sequence is synthesized)
ggatgctgtatcaactagtaacttgccattaaggattattttatagcatgaatttaagactatttattcaaatgatattttactcttgtattcactttgttttagatttgtgacatgaat

SEQ ID NO: 616460 - DNA, 120 bp, Artificial Sequence
  ENSG00000177125_53 (sequence is synthesized)
atttcagtgctgcttaattttgttctgaattcttgtttcttgcttgtaaatggcttttttatggtataaataaagtcaatggacattgctgtttgtaaataaaaatgctgctagagcaaa

SEQ ID NO: 616461 - DNA, 72 bp, Artificial Sequence
  ENSG00000177138_0 (sequence is synthesized)
aactgaggacccggacggagtctggctcttgctgcctaggctgcagtgcagtggtgtgatctgggctcactg

SEQ ID NO: 616462 - DNA, 82 bp, Artificial Sequence
  ENSG00000177138_1 (sequence is synthesized)
aggacccgttttctaagaggtcctagtggtgccgctgcctgcaggttctttgagggcgccacatcaggggtccctcaggttc

SEQ ID NO: 616463 - DNA, 120 bp, Artificial Sequence
  ENSG00000177138_2 (sequence is synthesized)
aggttctttgagggcgccacatcaggggtccctcaggttcggggatcgcctctagcttcccaggacaaccagccacggatcctgtgggcaggagggctgccaaggcccagttggaggctc

SEQ ID NO: 616464 - DNA, 120 bp, Artificial Sequence
  ENSG00000177138_3 (sequence is synthesized)
aatttatggcggcctgggggaagaagcatgcaggaaaggatccagtccgtgatgaatgtgaggaaagaaaccgttttacagaaacaagggaggaagatgtaactgatgagcatggggaaa

SEQ ID NO: 616465 - DNA, 120 bp, Artificial Sequence
  ENSG00000177138_4 (sequence is synthesized)
gagaaccttttgctgaaacagatgaacacacgggggctaataccaagaagccagaagatactgcagaggatcttactgcaaaaagaaaaaggatgaaaatggataaaacttgcagcaaaa

SEQ ID NO: 616466 - DNA, 120 bp, Artificial Sequence
  ENSG00000177138_5 (sequence is synthesized)
caaagaacaaaagtaaacatgctttgagaaaaaagcaacttaaaaggcagaaacgtgattatatacattctctgaagttgctaaatgtccttgaagaatacatcacagacgagcagaaag

SEQ ID NO: 616467 - DNA, 120 bp, Artificial Sequence
  ENSG00000177138_6 (sequence is synthesized)
aggaagaagaagaagagggagaagaggaagaactaattagaatatttcaagaacaacagaagaagtggcaacaatatagaagtgttaggagagagaggctgaaagagatgaagctgctac

SEQ ID NO: 616468 - DNA, 120 bp, Artificial Sequence
  ENSG00000177138_7 (sequence is synthesized)
gtgaccaattcgtaaaggctcttgaggactttgaagacctttgtgacagagttttttccgatgaagacagtgaacttgataactagacatgtttttaaataaaatcatgtcagaactctt

SEQ ID NO: 616469 - DNA, 120 bp, Artificial Sequence
  ENSG00000177138_8 (sequence is synthesized)
gaacttgaacctatgttatatgatacaagcacaacttgagctacagtaaactacatgacagtgttttgataattgttgtataaatcggtatagctcctctgtcactcgtctgttaaatgc

SEQ ID NO: 616470 - DNA, 120 bp, Artificial Sequence
  ENSG00000177138_9 (sequence is synthesized)
cagacctcgtttctatgatctgttgaatgaatcctagacacttctgtgagaaagcagggattgcatagttatgtacacggtcaattaaattttaacattaaagataatttagatttcgat

SEQ ID NO: 616471 - DNA, 120 bp, Artificial Sequence
  ENSG00000177138_10 (sequence is synthesized)
cgatttggcctctgtggatttgtatcagttccaaaaatgtagaaagcacaggcatagaaaagtacatttttctctaataaaagaagacaatatctgctgggtgtggtggctcacgcctgt

SEQ ID NO: 616472 - DNA, 81 bp, Artificial Sequence
  ENSG00000177138_11 (sequence is synthesized)
catctctgctaaaaataccaaaattacccgggcgtggtggcacgcacgtcttgaacccgggagttggaggttgcagtaagc

SEQ ID NO: 616473 - DNA, 120 bp, Artificial Sequence
  ENSG00000177138_12 (sequence is synthesized)
agactctttctcagaaaacaagaagaagaagacaaaagctatcttatctgtgcgttcttttgtatttactcattaggataaagaggcaattccaatgaaagtaggacttcaaaaaataga

SEQ ID NO: 616474 - DNA, 120 bp, Artificial Sequence
  ENSG00000177138_13 (sequence is synthesized)
tatactctatggccatatcaaaattattaaaagcaccttactgtctgtgttcttaaaaaaaattatactgctgtaaatgattaaggcaactgagcaagatatattaatatcagtgctgag

SEQ ID NO: 616475 - DNA, 120 bp, Artificial Sequence
  ENSG00000177138_14 (sequence is synthesized)
ccactggtttgtgggtatgtcatttccacagacatcaaaatgctatttagtttgttttggtccatcattcaatgatacctccccttagaattgaatgaaagcattttgttaacatttatg

SEQ ID NO: 616476 - DNA, 120 bp, Artificial Sequence
  ENSG00000177138_15 (sequence is synthesized)
tatgcttacaattatttcacatctgtggcaaggtaaattttgtagagtgctttgtttatccagtttaatattcgtggattatgtggaagtttatatggacatctaaaaacttgaatgatg

SEQ ID NO: 616477 - DNA, 86 bp, Artificial Sequence
  ENSG00000177138_16 (sequence is synthesized)
ctggagctgctgaacctcttttcttataaattaccagttgcaggtgttttttcgtaacaatgcaagaacactctaatacaatgggt

SEQ ID NO: 616478 - DNA, 120 bp, Artificial Sequence
  ENSG00000177138_17 (sequence is synthesized)
ttttttcgtaacaatgcaagaacactctaatacaatgggtcatggggtaggtttttagcttttgaagaaactcggacttttttccaaactgattgtaccattttacactcctaccaacat

SEQ ID NO: 616479 - DNA, 120 bp, Artificial Sequence
  ENSG00000177138_18 (sequence is synthesized)
gcatgcctgagattcgagttgccccaattcctcaacgtcatttggtattgtcggtcttcaatttttgtcatctggcagatggagttattgccatggtgttaggacaagctgattgtgtta

SEQ ID NO: 616480 - DNA, 120 bp, Artificial Sequence
  ENSG00000177138_19 (sequence is synthesized)
aagcatgtgacacacctaatttcagaaaccagaggggaaatcgccgctcattaaagttcaaggaacatatcctggaggcttagtgaaaccagctctctcttcccatcaaatgagaagtct

SEQ ID NO: 616481 - DNA, 120 bp, Artificial Sequence
  ENSG00000177138_20 (sequence is synthesized)
ctgtgtcttcaaatgaaagccaagaaagcacaccccagagtcgaatacaacaaaacatcaggcaatgcctttgaagagcagttttctttgccaaccaaggttcggggatcgcctctagct

SEQ ID NO: 616482 - DNA, 120 bp, Artificial Sequence
  ENSG00000177138_21 (sequence is synthesized)
atgtgttgtgtatcctcctgctttaccttctaccgtgagtcaaagccccctgaggcttccccagaagcagatgctggagctatgtttcctgtacagcctgcagaactgcagatggagtta

SEQ ID NO: 616483 - DNA, 120 bp, Artificial Sequence
  ENSG00000177138_22 (sequence is synthesized)
agcatgcaggtaaatacagcccaaggggacccagaagaaggtgcacgcccaagaggacggtctgtctgctttctgcgctgggggcacaggggcagcccgaggccccaggccccttcgtgg

SEQ ID NO: 616484 - DNA, 120 bp, Artificial Sequence
  ENSG00000177138_23 (sequence is synthesized)
ctctggagtccattgtgcacgtgctaagatgcgccaggttttcaaagcaggctcaagggccttaggcttccccgtggaaggctccccctcatagcagggttacagatgctctcagagcag

SEQ ID NO: 616485 - DNA, 120 bp, Artificial Sequence
  ENSG00000177138_24 (sequence is synthesized)
ctcttctccatgggtgcagtcctgacatccaaggggtctgaactgtagtacgttgtttactggaacctgaacccgaagggcttccaaaagtccctcgataaaatggtcaggaaccggtga

SEQ ID NO: 616486 - DNA, 120 bp, Artificial Sequence
  ENSG00000177138_25 (sequence is synthesized)
ttccatgtatagctctgctttaaagctttaattggcagagagccccccccccccaaaaaagtctacaactagtacatttctccacaaaaaatgtccacagcagcatcttcctctaaaaaa

SEQ ID NO: 616487 - DNA, 120 bp, Artificial Sequence
  ENSG00000177138_26 (sequence is synthesized)
taggttatatgaattagtggacgacaagactgtcttaaatggcttctcatatgtagcatttaacgtacgtatttaatgtaatctatttgataaatttttcttacctttttgattgttgat

SEQ ID NO: 616488 - DNA, 120 bp, Artificial Sequence
  ENSG00000177138_27 (sequence is synthesized)
gtggaatgtgagaatgcttctaataatggtgaagcgagatggatggcttttctttcatacatgtggaaatttaattgtttggaggatattagaggacagtggaggagaaacagctctatt

SEQ ID NO: 616489 - DNA, 120 bp, Artificial Sequence
  ENSG00000177138_28 (sequence is synthesized)
cgttccttttagtatacacagattaagtcatatatcaatggttttttttagcttttactttaagtttgggggtacatgtggaggtttgttatgtagataaattgcatgtcacagggtttt

SEQ ID NO: 616490 - DNA, 120 bp, Artificial Sequence
  ENSG00000177138_29 (sequence is synthesized)
ggtatacagattattttgtcacccagtttataagcatagtacctgatgggtggtctttgatcctcaccctcctcctaccctccaccctcaagtaggcccagttgtctgttgttcctctct

SEQ ID NO: 616491 - DNA, 120 bp, Artificial Sequence
  ENSG00000177138_30 (sequence is synthesized)
gaattttctaaaatcattttctattattattccagtaataaactgtgtagtagaaaagtaaggacaacttttctacctagtgagaaacatgtaattggctccaaaaactcataaacttta

SEQ ID NO: 616492 - DNA, 120 bp, Artificial Sequence
  ENSG00000177138_31 (sequence is synthesized)
tattgctgtgtgaaatattagttacactcttataggaccatattttcaaaaaagtttgagaaaatttctgtagagatgatggagacaatactcttatttttaaaaagctcaattcagttt

SEQ ID NO: 616493 - DNA, 120 bp, Artificial Sequence
  ENSG00000177138_32 (sequence is synthesized)
tcagctcttctctagcgatgattcatacaagcagtatatttggaaagcttggtgacaaagtgctggttttgtgagctgcctaatacattgggcattatagatggagactgtatgtaaaaa

SEQ ID NO: 616494 - DNA, 120 bp, Artificial Sequence
  ENSG00000177138_33 (sequence is synthesized)
atatttgcattgtggtacaaatcttttatgattgctgaaaattattcttagcaattgatggtagagctctgatgtgaaatcatgtttaggaaagcattccttgcagtattacagttttct

SEQ ID NO: 616495 - DNA, 120 bp, Artificial Sequence
  ENSG00000177138_34 (sequence is synthesized)
gaaacacagcactatgggtacaaatgtcataaaaagctccaagaaaacatttcaaaagtgtttttgaatgtatttctttacctaaacctaaatttttatactcatggccattgcttcttt

SEQ ID NO: 616496 - DNA, 120 bp, Artificial Sequence
  ENSG00000177138_35 (sequence is synthesized)
tattaaaatacagttaatagcatcaatcactagattgcttaaaaatgcttttcttattgtgcattaagttatttctacccttttgagggttctattatataagatacttttttgtgtgct

SEQ ID NO: 616497 - DNA, 120 bp, Artificial Sequence
  ENSG00000177138_36 (sequence is synthesized)
ttacgtaatgaattgtgcagtatttcatggaagcatctcctttgaattgtaggacattttataaatgtagaaattaaagtctgtgcttataactctttctgcacatttaaaaaatagaga

SEQ ID NO: 616498 - DNA, 120 bp, Artificial Sequence
  ENSG00000177138_37 (sequence is synthesized)
cttttaattatttgctttttttcatcatctgtcaattaagtgattttcagttataccaactggaattgaaatgcgaatgttaatacctgaaaggttttacagaaaataagtgagtaaatc

SEQ ID NO: 616499 - DNA, 120 bp, Artificial Sequence
  ENSG00000177138_38 (sequence is synthesized)
ttgctttttgaaatgatctttgcattttatattttaaatatccttctgaaattgctgaaccataaagtcccatattgatgtcagtatatgcaaagaaactacttttcaacattaactttt

SEQ ID NO: 616500 - DNA, 120 bp, Artificial Sequence
  ENSG00000177138_39 (sequence is synthesized)
gtgaaataaatgggctttaagtttgtcctcaatgtttttgaaaattagagaatagttttttaacaaaatatttaaacaacattatcagttatcattttggtacttaataactcttagaca

SEQ ID NO: 616501 - DNA, 120 bp, Artificial Sequence
  ENSG00000177138_40 (sequence is synthesized)
tcaaggcagatggagttattgccatggtgttaggacaagctgattgtgttaaagcatgtgacacacctaatttcagaaaccagaggggaaatcgccgctcattaaagttcaaggatttga

SEQ ID NO: 616502 - DNA, 120 bp, Artificial Sequence
  ENSG00000177138_41 (sequence is synthesized)
agattatcatgaagaaatattcccccaactccaccatctgaatcactgaatcatagttactattctagacttttgaaggactgtgtcttcaagaggcccttgttaaaataattcctattt

SEQ ID NO: 616503 - DNA, 120 bp, Artificial Sequence
  ENSG00000177138_42 (sequence is synthesized)
gtagctttgaccaccctcgctgggtgagaatctgcacagtttagagggaaaaagtgtggcacattgggatgaaagcaatcctagaagatagaactctgggagttcttggtccggctccaa

SEQ ID NO: 616504 - DNA, 120 bp, Artificial Sequence
  ENSG00000177138_43 (sequence is synthesized)
catgcaatggccaagcaaccttgacctcttggtaccgtggagatgaatgtacctcccaacctagcccacagactgttgttaatgtcctataaaataataggcaacgtggtatatctatta

SEQ ID NO: 616505 - DNA, 120 bp, Artificial Sequence
  ENSG00000177138_44 (sequence is synthesized)
gtttgacctttacatttatagctctattcttggaacccgagtcccagccttgatagccaacaatcaatcatcccaatgtcaatgcccccatggcattcattgttgtatctatgtaccttc

SEQ ID NO: 616506 - DNA, 120 bp, Artificial Sequence
  ENSG00000177138_45 (sequence is synthesized)
ccaccctggtggttcatcattatacatttaagctaattacatgttgtttggccatttcttctctttctgatccacctcatgtacatgtctaaaatgttctccttatacttctctctcttt

SEQ ID NO: 616507 - DNA, 120 bp, Artificial Sequence
  ENSG00000177138_46 (sequence is synthesized)
ccataccattctctgtctccctgttgcctatgggataaagttctaagttctcattctggttgttaaggcccatcacaaagaagtttgtccagttgctacaccctcctcaacataaatgca

SEQ ID NO: 616508 - DNA, 120 bp, Artificial Sequence
  ENSG00000177138_47 (sequence is synthesized)
aagccttggcaagtcagctcgtacgactgtctcagtcacaagcatcatacttatttcagctctgagaattagcttactctgcttcccacttccgtcttatgcataacatggttttttatt

SEQ ID NO: 616509 - DNA, 120 bp, Artificial Sequence
  ENSG00000177138_48 (sequence is synthesized)
ggtctaagttctacctttatttccatgcccaagtatggcacctcactgattctggttttgactctgaactctcatttggaatttggaatatccctgttcattctcatgtttcaatatgta

SEQ ID NO: 616510 - DNA, 120 bp, Artificial Sequence
  ENSG00000177138_49 (sequence is synthesized)
atgttttcaactgtctgtcctgccttttaaggtggatctttaagaaaggacctgtggctttttctctaccatccagccctgcccctgttgtgctgtgtttagaagggttgctagtctgat

SEQ ID NO: 616511 - DNA, 120 bp, Artificial Sequence
  ENSG00000177138_50 (sequence is synthesized)
gactaatcattttaacagatctgcctaatttttgtgctcttctcaggtttattctttttaatgagcaagatactgtgcttgactctccttggaaatataatatttgcttgctgttgaaag

SEQ ID NO: 616512 - DNA, 120 bp, Artificial Sequence
  ENSG00000177138_51 (sequence is synthesized)
ccctgtttctttgccttccagcttttgaatttgtcgacttggacagtttgctaaggggtcaattccttaccatttgggcataaaggaaaatgcatctccatgcttcatttgcttcatctc

SEQ ID NO: 616513 - DNA, 120 bp, Artificial Sequence
  ENSG00000177138_52 (sequence is synthesized)
gcagaggccgtggagttcaggtgtgaggggcagctgtgagctttgcagccagccccggggacgggctggacgggccaggacaggaggggacactggcatcttttccgtcccttcctgctc

SEQ ID NO: 616514 - DNA, 120 bp, Artificial Sequence
  ENSG00000177138_53 (sequence is synthesized)
ccacatgagacccagggcgggccagccccacccttcttgaacctgtgatcccaatggctttcctttccgatgccaggtttccttagcttccttagtgtgtctttgcgctcaccaggttcg

SEQ ID NO: 616515 - DNA, 120 bp, Artificial Sequence
  ENSG00000177138_54 (sequence is synthesized)
accaagaagccagaagatactgcagttggtgcaaataatttcaaaaactatcctgtacatattggcgtctctagtgaacaacatattttacttgattgttctctaagtaggcagaaacgt

SEQ ID NO: 616516 - DNA, 120 bp, Artificial Sequence
  ENSG00000177143_0 (sequence is synthesized)
gttgggaccacggcggccagagcggcaggatggcttccggcttcaagaagcccagcgctgcctccaccggccaaaagagaaaggtggcacctaagcccgagctcactgaggatcagaagc

SEQ ID NO: 616517 - DNA, 120 bp, Artificial Sequence
  ENSG00000177143_1 (sequence is synthesized)
aagaagttcgggaagcatttgacctcttcgacgtggacggaagtgggaccatcgacgcgaaggagctgaaggtggccatgagagcgctgggcttcgaacccaggaaggaagagatgaaga

SEQ ID NO: 616518 - DNA, 120 bp, Artificial Sequence
  ENSG00000177143_2 (sequence is synthesized)
aaatgatctccgaggtggacagggaaggcacggggaagatcagcttcaatgacttcctggccgtgatgacgcagaagatgtccgagaaggacaccaaagaagaaatcctgaaggccttca

SEQ ID NO: 616519 - DNA, 120 bp, Artificial Sequence
  ENSG00000177143_3 (sequence is synthesized)
ggctctttgatgacgatgagaccgggaagatctcgttcaaaaacctgaagcgtgtggccaacgagctgggggagaacctcacggatgaggagctgcaggagatgatcgacgaagctgatc

SEQ ID NO: 616520 - DNA, 120 bp, Artificial Sequence
  ENSG00000177143_4 (sequence is synthesized)
gggatggggacggcgaagtgaacgaggaggagttccttcggatcatgaagaagaccagcctttactgaagtcggttcagaagctaaagtgactctctgggttgcctgcttccattttgtg

SEQ ID NO: 616521 - DNA, 120 bp, Artificial Sequence
  ENSG00000177143_5 (sequence is synthesized)
aaaccttagaggacagcggctgcctgtcccttcttcaccccctcacccccataatttgtctagatctatttccatatctctagttcaataatagaatttgaaagatgcttgtaatgtgag

SEQ ID NO: 616522 - DNA, 120 bp, Artificial Sequence
  ENSG00000177143_6 (sequence is synthesized)
ttttgggttttaattctcaagagtcaacctggagcacatgaggttaaacaaagggccctgaagtttgagtgcgccctccatttgccctgtgctgaacttgctgttcatctgttgatctgg

SEQ ID NO: 616523 - DNA, 120 bp, Artificial Sequence
  ENSG00000177143_7 (sequence is synthesized)
gtggtcttaaattatcttgcttcatatatcattccttaaattccagtcattgttccagcataatgagatggaatctgccagtagatttgcctagcctgtccacttagctgaataccagtt

SEQ ID NO: 616524 - DNA, 120 bp, Artificial Sequence
  ENSG00000177143_8 (sequence is synthesized)
tgaaggaaaacagggtggccacttacaaacttacggagctcaggacagataatcttataaagaatagacttgcttgggtggtagtacgttgtgcaattttgactattcactggctttata

SEQ ID NO: 616525 - DNA, 120 bp, Artificial Sequence
  ENSG00000177143_9 (sequence is synthesized)
cctgcaaatgattcttcgttcatgtgtaaattgtccaccatgggtttatctagggctagtatgtatacctgggctacagaataaaaataaaatctaatactggcccaagcaaagtataat

SEQ ID NO: 616526 - DNA, 120 bp, Artificial Sequence
  ENSG00000177143_10 (sequence is synthesized)
ttgcttaagaggttacgctaacaaacgattttgagtaaatatttacaaatgtaggatcttagtttaggaaattataacaaataccttaatataacattttaagctacttatagtccttgg

SEQ ID NO: 616527 - DNA, 120 bp, Artificial Sequence
  ENSG00000177143_11 (sequence is synthesized)
aaatagcaacaaatatcttagttattggactattataaccttagtcatcttattactgcttgattatgagacactctccctgctaatccttagaacatcttggttcttggtacttgactt

SEQ ID NO: 616528 - DNA, 120 bp, Artificial Sequence
  ENSG00000177143_12 (sequence is synthesized)
ttagcccctctgacatatagttgatgtcagagtgtctggcatttcagtagtgctctattttacaaatcccagtaaactgctccactgtggcttgtttatgtgttaatactgcttgttttc

SEQ ID NO: 616529 - DNA, 120 bp, Artificial Sequence
  ENSG00000177143_13 (sequence is synthesized)
tgttataaattattttttgctttggagtaagatatcatcattttgcatagctacaaatctgaagttaaagaaaattttaaaaatgtaattgtgggaaaataacaaatagatctgctgaga

SEQ ID NO: 616530 - DNA, 120 bp, Artificial Sequence
  ENSG00000177144_0 (sequence is synthesized)
cggccgggcccccacggcggcggccggagcagcagcagcagcagcaggagcccgcctctatgatgaagttcaagcccaaccagacgcggacctacgaccgcgagggcttcaagaagcggg

SEQ ID NO: 616531 - DNA, 120 bp, Artificial Sequence
  ENSG00000177144_1 (sequence is synthesized)
cggcgtgcctgtgcttccggagcgagcaggaggacgaggtgctgctggtgagtagcagccggtacccagaccagtggattgtcccaggaggaggaatggaacccgaggaggaacctggcg

SEQ ID NO: 616532 - DNA, 120 bp, Artificial Sequence
  ENSG00000177144_2 (sequence is synthesized)
gtgctgccgtgagggaagtttatgaggaggctggagtcaaaggaaaactaggcagacttctgggcatatttgagcagaaccaagaccgaaagcacagaacatatgtttatgttctaacag

SEQ ID NO: 616533 - DNA, 120 bp, Artificial Sequence
  ENSG00000177144_3 (sequence is synthesized)
tcactgaaatattagaagattgggaagattctgttaatattggaaggaagagagagtggttcaaagtagaagatgctatcaaagttctccagtgtcataaacctgtacatgcagagtatc

SEQ ID NO: 616534 - DNA, 120 bp, Artificial Sequence
  ENSG00000177144_4 (sequence is synthesized)
tggaaaagctaaagctgggttgttccccagccaatggaaattctacagtcccttcccttccggataataatgccttgtttgtaaccgctgcacagacctctgggttgccatctagtgtaa

SEQ ID NO: 616535 - DNA, 120 bp, Artificial Sequence
  ENSG00000177144_5 (sequence is synthesized)
gagaactgggtaggcctctcccaccatgtgcagtctcatggggagaggcttctttcgtttcctcgtcaaacatctgattgacgcttgcaaactgtctgaatttgccatgcaaggttttca

SEQ ID NO: 616536 - DNA, 120 bp, Artificial Sequence
  ENSG00000177144_6 (sequence is synthesized)
aacaatttgcatgtttttcagatgctttcaaatctttttttaaaaaaatagtgtaaaatattttaataagccaaagccatgtggaatttttgtttagatgccttaactgtgccacacccc

SEQ ID NO: 616537 - DNA, 120 bp, Artificial Sequence
  ENSG00000177144_7 (sequence is synthesized)
acaaccccctatattattttggttgtctatttctcacagcatattttcagttttttgtccatttgacatcagtctgtggtttattttgtcatcagattacttgtgggtatacctacccca

SEQ ID NO: 616538 - DNA, 120 bp, Artificial Sequence
  ENSG00000177144_8 (sequence is synthesized)
aaattgttttctcattcacagcattagcatattcagcaaatccatctgtggtgggaattaaaaatattattggttttaaagaaatccattcaccccaaaacttgttttacaggattacaa

SEQ ID NO: 616539 - DNA, 120 bp, Artificial Sequence
  ENSG00000177144_9 (sequence is synthesized)
ttttaattcaaaatttccagatttgggctatttctgtatgatccaataacttattttgtcacagggcttaatttgccatttttggggatttgtcgactcattttgtctgaattttcacaa

SEQ ID NO: 616540 - DNA, 120 bp, Artificial Sequence
  ENSG00000177150_0 (sequence is synthesized)
gcagaagcttcactgagcgggcactggaggtcgcgagcacgttgctagtgggcgcggctggcggggccgggggcggcagggggctagcgtccggctgagcccggcgggttcctgcacgcg

SEQ ID NO: 616541 - DNA, 120 bp, Artificial Sequence
  ENSG00000177150_1 (sequence is synthesized)
gacccacgctttgtcgggctgctctgctgagtgacaccgccgtggcatccgaggagctgtggtccagcctgcgcggcgggaagcggcggcggcggctccagcgtcctaagagagtctcac

SEQ ID NO: 616542 - DNA, 87 bp, Artificial Sequence
  ENSG00000177150_2 (sequence is synthesized)
tgattcttgtgtgtgccagcatgcctggccaattgttggattgtatgaagctgaaacctatcaacactcttcaaaatgcaatggaat

SEQ ID NO: 616543 - DNA, 120 bp, Artificial Sequence
  ENSG00000177150_3 (sequence is synthesized)
aagctgaaacctatcaacactcttcaaaatgcaatggaatgtaccacggactgtatctcgactggcacgcaggacatgcttggaaccacataatgctggtctctttggacactgtcaaaa

SEQ ID NO: 616544 - DNA, 120 bp, Artificial Sequence
  ENSG00000177150_4 (sequence is synthesized)
tgtaaagggacctttacttttatacaatgctgaatccaaagtggttttggtacaaggccctcaaaaacaatggttgcatttatctgctgcccagtgtgttgcaaaggaaaggaggccatt

SEQ ID NO: 616545 - DNA, 120 bp, Artificial Sequence
  ENSG00000177150_5 (sequence is synthesized)
ggatgctcatccaccccaaccaggagtccttcgccataagcaagggaagcaacatgtttcattcaggagggttttttcatccagtgccacagctcagggaactccggaaaaaaaggaaga

SEQ ID NO: 616546 - DNA, 120 bp, Artificial Sequence
  ENSG00000177150_6 (sequence is synthesized)
gcctgatcctttgcaagacaaatctattagtctttatcaacgattcaagaagacatttagacagtatggaaaagttctgattccagtgcatctaataacttctggtgtttggtttggaac

SEQ ID NO: 616547 - DNA, 120 bp, Artificial Sequence
  ENSG00000177150_7 (sequence is synthesized)
attttattatgcagccttgaaaggagtgaatgtcgttccttttctagaactcattgggttacctgacagtgtggtaagcatcctgaaaaactcccagagtggaaatgccctcacagcata

SEQ ID NO: 616548 - DNA, 120 bp, Artificial Sequence
  ENSG00000177150_8 (sequence is synthesized)
tgccttgtttaagattgcaacacctgctcggtataccgtgactttgggaggaacatctgtcactgtgaagtatctgcgcagtcatggctacatgtccacgccgccacccgtcaaggagta

SEQ ID NO: 616549 - DNA, 120 bp, Artificial Sequence
  ENSG00000177150_9 (sequence is synthesized)
tctgcaggacaggatggaagagacaaaggagcttatcacagagaaaatggaagaaacaaaagatagactcactgaaaagttacaagaaaccaaagaaaaagtttcctttaagaaaaaagt

SEQ ID NO: 616550 - DNA, 120 bp, Artificial Sequence
  ENSG00000177150_10 (sequence is synthesized)
ggaataaggtgccttatatagcagtatagaaaattcctgcactttaaccctttggaaactatgggcaaagatacatgtgtctgattatttttttggttagttgccgaaatatactagttc

SEQ ID NO: 616551 - DNA, 120 bp, Artificial Sequence
  ENSG00000177150_11 (sequence is synthesized)
tctgagggttaaagaagtaaaatacctttttaaagttaaatatcactagaaaaatcagtgttattacaagggaagaaatgaacccagtttaagaatttgccatcagtagcagtattaagc

SEQ ID NO: 616552 - DNA, 120 bp, Artificial Sequence
  ENSG00000177150_12 (sequence is synthesized)
agtggttaatgtcttagaagtcagacttctttttcaaggtcttcagaaccacacttgatttctgttttgttgcagctgtaattgacacatactaggcagctgactccttgaatatccagt

SEQ ID NO: 616553 - DNA, 120 bp, Artificial Sequence
  ENSG00000177150_13 (sequence is synthesized)
gtgacccataaaatagtctgttaataccggatcttaatttttatgttattcattaagattttaactatattcagtacgtaatttggagacaaactagcatcatcaaaactgcctgtaaat

SEQ ID NO: 616554 - DNA, 120 bp, Artificial Sequence
  ENSG00000177150_14 (sequence is synthesized)
aaggtgtttagtctttctataaaaacagaatagagcagttacctaccagttaaaatatcttatatgaagaaaatagaataaagatccagtcatatatgtaaataagatgtactgattgta

SEQ ID NO: 616555 - DNA, 120 bp, Artificial Sequence
  ENSG00000177150_15 (sequence is synthesized)
cgtaaatgaaaaatggaccctttaaaaattatttttacctgaagcttgtcataatttttttaaagcaaatatatatatggtgatggtacttttcaaagtgtgtattagtggtgatcacct

SEQ ID NO: 616556 - DNA, 120 bp, Artificial Sequence
  ENSG00000177150_16 (sequence is synthesized)
caaacataaacctctgttgtgaatcatttgtgtccttttcaactgtctttcagaggaaaggtaaaaaatcattaaaccttaaattcattgttaaaatcaaatatttgtcagcagtaactc

SEQ ID NO: 616557 - DNA, 120 bp, Artificial Sequence
  ENSG00000177150_17 (sequence is synthesized)
aagctcatggttctcaagcagaaaaaggtttgggagactaaaaatggagtcaggttttcatggagactgctaactccttggggtagacatgggccttgcctcagcaaaccagtgcaattt

SEQ ID NO: 616558 - DNA, 120 bp, Artificial Sequence
  ENSG00000177150_18 (sequence is synthesized)
cagaattcatgctgatttcattatggagtaaagttttaaattgtggctgctgctttttgtcttacattgaagggaaatatccttgtttgagcattctacttgattttttttttttttttt

SEQ ID NO: 616559 - DNA, 73 bp, Artificial Sequence
  ENSG00000177150_19 (sequence is synthesized)
gtgcaatggtacacgcctcagctttccaagtagctgggagtataagcgtgtgccaccacactcagctaatttt

SEQ ID NO: 616560 - DNA, 71 bp, Artificial Sequence
  ENSG00000177150_20 (sequence is synthesized)
ccaggttcaagtgatcctcccgcctcagctttccaagtagctgggagtataagtttcaccatgttagccag

SEQ ID NO: 616561 - DNA, 86 bp, Artificial Sequence
  ENSG00000177150_21 (sequence is synthesized)
acaaagctatcattaaatcatttgcttgtaatgaaattcagccgttgtcagctgtgagcgttgcggggctggtggggtgtgtttga

SEQ ID NO: 616562 - DNA, 120 bp, Artificial Sequence
  ENSG00000177150_22 (sequence is synthesized)
gtcagctgtgagcgttgcggggctggtggggtgtgtttgagtatgtaagtgtctatttcctgtgctctaacagtgactatttcagttctaacccttcaattgctaattggatgagggaat

SEQ ID NO: 616563 - DNA, 120 bp, Artificial Sequence
  ENSG00000177150_23 (sequence is synthesized)
ggcctcttagattgtccttgttttgacttatctgctaaggcgagagaatgtctgggtttgccacacagtcccgcagggacccctgctctttgccaggatttttatatcaagtacttagtt

SEQ ID NO: 616564 - DNA, 120 bp, Artificial Sequence
  ENSG00000177150_24 (sequence is synthesized)
tggccaaatttagagtatagtttaaaggggaaaaaaagtttgtatttgatgagtctaattactatattagaatgctttttaaatgaatatgctgtgattggaatctcttcttgggggccg

SEQ ID NO: 616565 - DNA, 120 bp, Artificial Sequence
  ENSG00000177150_25 (sequence is synthesized)
gggagagtgctgagagatgcagctgtgtctctgctctctgcagtcttgggcaggcagcaccgctgtctcctgatacagagggttgaatgcactgcttcacattgatgccacattttcaaa

SEQ ID NO: 616566 - DNA, 120 bp, Artificial Sequence
  ENSG00000177150_26 (sequence is synthesized)
tctaaacatgattaacatgttttttaagtatttatcaaataattcacatttttgcaggtttaagtgctgttttttaagatattaaacatgttccttgtttcttttttctttttaaccact

SEQ ID NO: 616567 - DNA, 120 bp, Artificial Sequence
  ENSG00000177150_27 (sequence is synthesized)
ggagactatgtgaaaatcttgtgttatatggaatttttctaaaacaatttccttttacttttcatgttgcatattttccagtggggataaattggaggttcttattactaataatcctga

SEQ ID NO: 616568 - DNA, 120 bp, Artificial Sequence
  ENSG00000177150_28 (sequence is synthesized)
aactaaaatttgcttttcctgcatagacatcttttgttagtccatttgagttttgttgccatccagtttcatgatcatgttgtgttagtctaatagacaatgagttactgcttgaatgat

SEQ ID NO: 616569 - DNA, 120 bp, Artificial Sequence
  ENSG00000177150_29 (sequence is synthesized)
atgaaattctctagtaaaaaatgctctgaagatgtgagaagctctgttgtattacttggcaccaggaatgttacaaaaatgttgttgctagcatattgctaacctagtccttaagtttca

SEQ ID NO: 616570 - DNA, 120 bp, Artificial Sequence
  ENSG00000177150_30 (sequence is synthesized)
gggattcctgtaatatgttgagtttggagtattaatagcaggctaacagaatacagtaccaatatgccaagttaaataattgagaatatatacagtatagtttgctatgtataatagacc

SEQ ID NO: 616571 - DNA, 120 bp, Artificial Sequence
  ENSG00000177150_31 (sequence is synthesized)
tcatttcatttacagtacacctcacacttgggattaattcacctataacctctgtgaactgcgagtgctcggcagaagcagccctgtgtcttacatgtctacatttatatttatatttat

SEQ ID NO: 616572 - DNA, 120 bp, Artificial Sequence
  ENSG00000177150_32 (sequence is synthesized)
acaggtgcacaccaccatgcctggctaaaggcatgtctgcatttatgcgaggtgtgttgaccgggtggggagggagctaggactgagattcgcctgtgtaaaatgcacaaaaagggtttg

SEQ ID NO: 616573 - DNA, 120 bp, Artificial Sequence
  ENSG00000177150_33 (sequence is synthesized)
aaaaagggtttgctaagcaaattgatatttgaaatgaaagatggattaggtgagagacttagtttattcaggaataagagcaaaaccaaccacatcaaaaaatgtatttcactgagacag

SEQ ID NO: 616574 - DNA, 120 bp, Artificial Sequence
  ENSG00000177150_34 (sequence is synthesized)
ccttttgtacatacagcagggtgctgtttacagatttcaagaaaggagaaaaagaatgcttatactgagattacctacctcccagtagtgaaaataataaatttatcccttgaaatataa

SEQ ID NO: 616575 - DNA, 76 bp, Artificial Sequence
  ENSG00000177150_35 (sequence is synthesized)
gggttacctgacagtgtggtaagcatcctgaaaaactcccagagtggaaatgccctcacagcatatgccttgttta

SEQ ID NO: 616576 - DNA, 120 bp, Artificial Sequence
  ENSG00000177151_0 (sequence is synthesized)
atgggcatggagggtcttctccagaactccactaacttcgtcctcacaggcctcatcacccatcctgccttccccgggcttctctttgcagtagtcttctccatctttgtggtggctata

SEQ ID NO: 616577 - DNA, 120 bp, Artificial Sequence
  ENSG00000177151_1 (sequence is synthesized)
acagccaacttggtcatgattctgctcatccacatggactcccgcctccacacacccatgtacttcttgctcagccagctctccatcatggataccatctacatctgtatcactgtcccc

SEQ ID NO: 616578 - DNA, 120 bp, Artificial Sequence
  ENSG00000177151_2 (sequence is synthesized)
aagatgctccaggacctcctgtccaaggacaagaccatttccttcctgggctgtgcagttcaaatcttctacctgaccctgattggaggggaattcttcctgctgggtctcatggcctat

SEQ ID NO: 616579 - DNA, 120 bp, Artificial Sequence
  ENSG00000177151_3 (sequence is synthesized)
gaccgctatgtggctgtgtgcaaccctctacggtaccctctcctcatgaaccgcagggtttgcttattcatggtggtcggctcctgggttggtggttccttggatgggttcatgctgact

SEQ ID NO: 616580 - DNA, 120 bp, Artificial Sequence
  ENSG00000177151_4 (sequence is synthesized)
agtttccccttctgtagatcccgagagatcaatcactttttctgtgagatcccagccgtgctgaagttgtcttgcacagacacgtcactctatgagaccctgatgtatgcctgctgcgtg

SEQ ID NO: 616581 - DNA, 120 bp, Artificial Sequence
  ENSG00000177151_5 (sequence is synthesized)
ctgatgctgcttatccctctatctgtcatctctgtgtcctacacgcacatcctcctgactgtccacaggatgaactctgctgagggccggcgcaaagcctttgctacgtgttcctcccac

SEQ ID NO: 616582 - DNA, 120 bp, Artificial Sequence
  ENSG00000177151_6 (sequence is synthesized)
attatggtggtgagcgttttctacggggcagccttctacaccaacgtgctgccccactcctaccacactccagagaaagataaagtggtgtctgccttctacaccatcctcacccccatg

SEQ ID NO: 616583 - DNA, 120 bp, Artificial Sequence
  ENSG00000177151_7 (sequence is synthesized)
ctcaacccactcatctacagcttgaggaataaagatgtggctgcagctctgaggaaagtactagggagatgtggttcctcccagagcatcagggtggcgactgtgatcaggaagggctag

SEQ ID NO: 616584 - DNA, 120 bp, Artificial Sequence
  ENSG00000177151_8 (sequence is synthesized)
actcccagagcatcaggggtggtgactgatcaggaaggactagcagggactagtgcaaacatctgcggtgctgcggccaataacgcagctattacagaaaatatggtattggttctgaag

SEQ ID NO: 616585 - DNA, 120 bp, Artificial Sequence
  ENSG00000177151_9 (sequence is synthesized)
aatgttcagtgtcactttcagcaattcaaaattaacaggcaaaatcatcctgttgcaaggattacttaggaacagtagcgaagttggtgagcatctccgcattagtcaactttgttcaac

SEQ ID NO: 616586 - DNA, 120 bp, Artificial Sequence
  ENSG00000177151_10 (sequence is synthesized)
tggattcacaaacatttccagagggcattctcagtcaagtagccctacaaaccattcatggcacgccaagcagctcttggaagtgcccatgttaacatgtgaccatgagtccttcctgtc

SEQ ID NO: 616587 - DNA, 120 bp, Artificial Sequence
  ENSG00000177151_11 (sequence is synthesized)
tgctaacgtgtgatgagtccttctgtgtctgtattgctaacgtgtgatcgtgagtccttcctgtctatattgctaatgtgtgaccatgagtcctgcctgtctgtattgctaacgtgtgac

SEQ ID NO: 616588 - DNA, 120 bp, Artificial Sequence
  ENSG00000177151_12 (sequence is synthesized)
catgagtcctgcctgtctgtattgctaacgtgtgatcatgggtcctgcctgtctgtattgctaacgtgtgatcatgggtcctgcctgtctgtattgctaacacgtgattgagtcctgcct

SEQ ID NO: 616589 - DNA, 120 bp, Artificial Sequence
  ENSG00000177151_13 (sequence is synthesized)
gtctctattgttaacctgtgatcatgagtcctgcctgtctgtctgtattgctgaccaacttttgaatggaaattggaaggagcatttgccacctccttgatgacttaatttcaaacattc

SEQ ID NO: 616590 - DNA, 120 bp, Artificial Sequence
  ENSG00000177151_14 (sequence is synthesized)
aatacaagtaaaatattttctagtgctaaatgtgtagcaattttattagaaaacatttaggaaggtgatactatttttggttccatgttcttagttacattttatgaatgttatcactta

SEQ ID NO: 616591 - DNA, 120 bp, Artificial Sequence
  ENSG00000177151_15 (sequence is synthesized)
cctctgaaattaaatacttgccctgcctttattcacatggagtccaatatattcctggaaatattgattcattgattgaaaattgactctgccattaagattgttacatggccaaaaacc

SEQ ID NO: 616592 - DNA, 120 bp, Artificial Sequence
  ENSG00000177151_16 (sequence is synthesized)
tacaaaactgccatttatgctcaaattgttaatagataaatgtagaatgaataaaccaagacattttattagctaacttagttcccgtggaataagttgctcaattttcttattctcaac

SEQ ID NO: 616593 - DNA, 120 bp, Artificial Sequence
  ENSG00000177151_17 (sequence is synthesized)
atcttcattgatatgctgaagacaagtatttttgtaattagttggagttaggtgtggtgctttgatagatgtgtaactttggtggaatattaactaagcaaagactacactgaccccacg

SEQ ID NO: 616594 - DNA, 120 bp, Artificial Sequence
  ENSG00000177151_18 (sequence is synthesized)
attcatgtaactttagtttctcctgtgtgtaaggtcctgaaatatgagacataaaaaatattgacggacctggtgtttattttctttgttgatacgaggcttagaaaacattggacagag

SEQ ID NO: 616595 - DNA, 120 bp, Artificial Sequence
  ENSG00000177151_19 (sequence is synthesized)
cggttacatagttgacaaagactaagcaaaggttactcagccttatgttgttctagtgtcaacacagatagaaggaaaaatgtttcctccattgttgctgacgtagataaagaatattcc

SEQ ID NO: 616596 - DNA, 120 bp, Artificial Sequence
  ENSG00000177151_20 (sequence is synthesized)
cttcaatatgctaacccctaggtggcttttcattcagaaggttcctaataatttgatctttaccctgaaatcaaacacatggaaaagagatggaagaatgtcctggagggattaagtgaa

SEQ ID NO: 616597 - DNA, 120 bp, Artificial Sequence
  ENSG00000177151_21 (sequence is synthesized)
gaaacagaccaggattcatttatgaaatatcctcggtgttatttcaattcagctccattcacattttattcttttgtgtctctgcactaatgccctccatattctccattctcctgcctt

SEQ ID NO: 616598 - DNA, 120 bp, Artificial Sequence
  ENSG00000177151_22 (sequence is synthesized)
agctagcaccttctcgatcttccctctacaaaactccttcagttcacattgcatttgtgctctatcctgggatatgtgttttctttcccatttcctcagttgctatgtattaaaaattag

SEQ ID NO: 616599 - DNA, 120 bp, Artificial Sequence
  ENSG00000177156_0 (sequence is synthesized)
agacccctcggtcttgctatgtcgagctcacccgtgaagcgtcagaggatggagtccgcgctggaccagctcaagcagttcaccaccgtggtggccgacacgggcgacttccacgccatc

SEQ ID NO: 616600 - DNA, 120 bp, Artificial Sequence
  ENSG00000177156_1 (sequence is synthesized)
gacgagtacaagccccaggatgctaccaccaacccgtccctgatcctggccgcagcacagatgcccgcttaccaggagctggtggaggaggcgattgcctatggccggaagctgggcggg

SEQ ID NO: 616601 - DNA, 120 bp, Artificial Sequence
  ENSG00000177156_2 (sequence is synthesized)
tcacaagaggaccagattaaaaatgctattgataaactttttgtgttgtttggagcagaaatactaaagaagattccgggccgagtatccacagaagtagacgcaaggctctcctttgat

SEQ ID NO: 616602 - DNA, 120 bp, Artificial Sequence
  ENSG00000177156_3 (sequence is synthesized)
aaagatgcgatggtggccagagccaggcggctcatcgagctctacaaggaagctgggatcagcaaggaccgaattcttataaagctgtcatcaacctgggaaggaattcaggctggaaag

SEQ ID NO: 616603 - DNA, 120 bp, Artificial Sequence
  ENSG00000177156_4 (sequence is synthesized)
tgattggcatgtggcaaacaccgacaagaaatcctatgagcccctggaagaccctggggtaaagagtgtcactaaaatctacaactactacaagaagtttagctacaaaaccattgtcat

SEQ ID NO: 616604 - DNA, 120 bp, Artificial Sequence
  ENSG00000177156_5 (sequence is synthesized)
gggcgcctccttccgcaacacgggcgagatcaaagcactggccggctgtgacttcctcaccatctcacccaagctcctgggagagctgctgcaggacaacgccaagctggtgcctgtgct

SEQ ID NO: 616605 - DNA, 120 bp, Artificial Sequence
  ENSG00000177156_6 (sequence is synthesized)
ctcagccaaggcggcccaagccagtgacctggaaaaaatccacctggatgagaagtctttccgttggttgcacaacgaggaccagatggctgtggagaagctctctgacgggatccgcaa

SEQ ID NO: 616606 - DNA, 120 bp, Artificial Sequence
  ENSG00000177156_7 (sequence is synthesized)
gtttgccgctgatgcagtgaagctggagcggatgctgacagaacgaatgttcaatgcagagaatggaaagtagcgcatccctgaggctggactccagatctgcaccgccggccagctggg

SEQ ID NO: 616607 - DNA, 120 bp, Artificial Sequence
  ENSG00000177156_8 (sequence is synthesized)
atctgactgcacgtggcttctgatgaatcttgcgttttttacaaattggagcagggacagatcatagatttctgattttatgtaaaattttgcctaatacattaaagcagtcacttttcc

SEQ ID NO: 616608 - DNA, 120 bp, Artificial Sequence
  ENSG00000177156_9 (sequence is synthesized)
aagtgtggctggaccccgctttcggaaatgctctggactcccctaacgtcctggggaattacagggttccttcacatgtttccagttggaagcaagtactccacttactttggcttttga

SEQ ID NO: 616609 - DNA, 120 bp, Artificial Sequence
  ENSG00000177156_10 (sequence is synthesized)
ctagtctagttggccttgcttccctccctaactgaattttagttctcaaacaccatgaactcaaggggggaaaaaaaccctatctttttgcctatttttgtttattgaagtgtaatctgc

SEQ ID NO: 616610 - DNA, 120 bp, Artificial Sequence
  ENSG00000177156_11 (sequence is synthesized)
atgaagtaacctgcacctgtggtaaatgagcagttcagagagttttgccaatgtgtgtaccctgtaaataccaccccagtcaagatgcagagcacttgcagacccccacaggcccctcct

SEQ ID NO: 616611 - DNA, 120 bp, Artificial Sequence
  ENSG00000177156_12 (sequence is synthesized)
caaggccagcactgccgtgccacgctgccctgtgggtgatccctcccacctgtggggcgagctcatcttgggagacatgagggtgaagtagacctcaacggagggcttggctttcctaac

SEQ ID NO: 616612 - DNA, 120 bp, Artificial Sequence
  ENSG00000177156_13 (sequence is synthesized)
acatctcactcaagtcatcagccaaggctctgtgggctgaaccccacttccagcgtgagccttgctggggccaaggcctggccctggtgggagatgcttgggtgcagcagttcaggccct

SEQ ID NO: 616613 - DNA, 120 bp, Artificial Sequence
  ENSG00000177156_14 (sequence is synthesized)
gggagcacagcccacagcttggacttgaccagctcatgtcagcctagatctgccctctgctccagagccagctccctcacttgctggtgatcagaaatgagggatttcccaggaagtacc

SEQ ID NO: 616614 - DNA, 120 bp, Artificial Sequence
  ENSG00000177156_15 (sequence is synthesized)
atccacccactcagcagagaagaaaagccactagttagcacctgcagattcagattctgtccttcctctgtcctgatcaacacaagcctatgtttacatgatttttaaaaagtaaactat

SEQ ID NO: 616615 - DNA, 80 bp, Artificial Sequence
  ENSG00000177156_16 (sequence is synthesized)
cacaagcctatgtttacatgatttttaaaaagtaaactattgttatataaaatatatgctggctgggcaagatgggagga

SEQ ID NO: 616616 - DNA, 120 bp, Artificial Sequence
  ENSG00000177156_17 (sequence is synthesized)
cctgggcaacaaagtgaaaccttgtctctacaaaaatataaagaaattttaggctgggcacggtggctcccagcactttgggaggccgaggcgtggggatcacgaggtcaggagatcgag

SEQ ID NO: 616617 - DNA, 120 bp, Artificial Sequence
  ENSG00000177156_18 (sequence is synthesized)
aaagtgctgggattacaggcaccagccaccgcgcccggccgtctacttgcttttctaattgtgggtcctaagaccctcatttcaaaaggggtcccatcacataccctggaggaaggaatg

SEQ ID NO: 616618 - DNA, 120 bp, Artificial Sequence
  ENSG00000177169_0 (sequence is synthesized)
agtgcggctgcgcgggcgtctcaggctctgaggcccgggcgccgcggctcttttgtttctccgttggggccgagcccgggccctagttggagccggagtcggagtcggagtcggatccgg

SEQ ID NO: 616619 - DNA, 120 bp, Artificial Sequence
  ENSG00000177169_1 (sequence is synthesized)
ggatccggattcggattagcagcccgggaagagtgccgtggcacaggcgccggagggagcgcgaccctcggaccccgcctggcccgcggggctgggacccggccccggcctgcccgatgg

SEQ ID NO: 616620 - DNA, 120 bp, Artificial Sequence
  ENSG00000177169_2 (sequence is synthesized)
gcccccggcccgcctgcgccatggagcccggccgcggcggcacagagaccgtgggcaagttcgagttctcccgcaaggacctgatcggccacggcgccttcgcggtggtcttcaagggcc

SEQ ID NO: 616621 - DNA, 120 bp, Artificial Sequence
  ENSG00000177169_3 (sequence is synthesized)
gccaccgcgagaagcacgatttggaggtcgccgtcaagtgcattaacaagaagaacctcgccaagtctcagacgctgctggggaaggaaatcaaaatcctgaaggaactgaaacatgaaa

SEQ ID NO: 616622 - DNA, 120 bp, Artificial Sequence
  ENSG00000177169_4 (sequence is synthesized)
acatcgtggccctgtacgacttccaggaaatggctaattctgtctacctggttatggagtactgcaacggtggggacctggccgactacctgcacgccatgcgcacgctgagcgaggaca

SEQ ID NO: 616623 - DNA, 120 bp, Artificial Sequence
  ENSG00000177169_5 (sequence is synthesized)
ccatcaggctcttcctgcagcagatcgcgggcgccatgcggcttctgcacagcaaaggcatcatccaccgcgacctgaaaccgcagaacatcctgctgtccaaccccgccggccgccgcg

SEQ ID NO: 616624 - DNA, 120 bp, Artificial Sequence
  ENSG00000177169_6 (sequence is synthesized)
ccaaccccaacagcatccgcgtcaagatcgctgacttcggcttcgcgcggtacctccagagcaacatgatggcggccacactctgcggctcccccatgtacatggcccccgaggtcatca

SEQ ID NO: 616625 - DNA, 120 bp, Artificial Sequence
  ENSG00000177169_7 (sequence is synthesized)
tgtcccagcactacgacgggaaggcggacctgtggagcatcggcaccatcgtctaccagtgcctgacggggaaggcgcccttccaggccagcagcccccaggacctgcgcctgttctacg

SEQ ID NO: 616626 - DNA, 120 bp, Artificial Sequence
  ENSG00000177169_8 (sequence is synthesized)
agaagaacaagacgttggtccccaccatcccccgggagacctcggccccgctgcggcagctgctcctggccctactgcaacgcaaccacaaggaccgcatggacttcgatgagttttttc

SEQ ID NO: 616627 - DNA, 120 bp, Artificial Sequence
  ENSG00000177169_9 (sequence is synthesized)
atcaccctttcctcgatgccagcccctcggtcaggaaatccccacccgtgcctgtgccctcgtacccaagctcggggtccggcagcagctccagcagcagctccacctcccacctggcct

SEQ ID NO: 616628 - DNA, 120 bp, Artificial Sequence
  ENSG00000177169_10 (sequence is synthesized)
ccccgccgtccctgggcgagatgcagcagctgcagaagaccctggcctccccggctgacaccgctggcttcctgcacagctcccgggactctggtggcagcaaggactcttcctgtgaca

SEQ ID NO: 616629 - DNA, 120 bp, Artificial Sequence
  ENSG00000177169_11 (sequence is synthesized)
cagacgacttcgtcatggtccccgcgcagtttccaggtgacctggtggctgaggcgcccagtgccaaacccccgccagacagcctgatgtgcagtgggagctcactggtggcctctgcgg

SEQ ID NO: 616630 - DNA, 120 bp, Artificial Sequence
  ENSG00000177169_12 (sequence is synthesized)
gcttggagagccacggccggaccccatctccatccccaccctgcagcagctcccccagtccctcaggccgggctggcccgttctccagcagcaggtgcggcgcctctgtccccatcccag

SEQ ID NO: 616631 - DNA, 120 bp, Artificial Sequence
  ENSG00000177169_13 (sequence is synthesized)
tccccacgcaggtgcagaactaccagcgcattgagcgaaacctgcagtcacccacccagttccaaacacctcggtcctctgccatccgcaggtcaggcagcaccagccccctgggctttg

SEQ ID NO: 616632 - DNA, 120 bp, Artificial Sequence
  ENSG00000177169_14 (sequence is synthesized)
caagggccagcccctcgccccctgcccacgctgagcatggaggcgtcctggccaggaagatgtctctgggtggaggccggccctacacgccatctcctcaagttggaaccatccctgagc

SEQ ID NO: 616633 - DNA, 120 bp, Artificial Sequence
  ENSG00000177169_15 (sequence is synthesized)
ggccaggctggagcgggacgccctccccacagggagctgagatgcggggtggcaggtcccctcgtccaggctcctctgcacccgagcactctccccgcacttccgggctgggctgccgcc

SEQ ID NO: 616634 - DNA, 120 bp, Artificial Sequence
  ENSG00000177169_16 (sequence is synthesized)
tgcacagcgcccccaacctgtctgacttgcacgtcgtccgccccaagctgcccaaaccccccacggaccccctgggagctgtgttcagcccaccacaggccagccctccccagccgtccc

SEQ ID NO: 616635 - DNA, 120 bp, Artificial Sequence
  ENSG00000177169_17 (sequence is synthesized)
acggcctgcagtcctgccggaacctgcggggctcacccaagctgcccgacttcctgcagcgaaaccccctgccccccatcctgggctcccccaccaaggctgtgccctcctttgacttcc

SEQ ID NO: 616636 - DNA, 120 bp, Artificial Sequence
  ENSG00000177169_18 (sequence is synthesized)
cgaagacccccagctcccagaacctgctggccctcctagcccggcagggcgtggtgatgacgccccctcgaaaccggacgctgcccgacctctcggaggtgggacccttccatggtcagc

SEQ ID NO: 616637 - DNA, 120 bp, Artificial Sequence
  ENSG00000177169_19 (sequence is synthesized)
cgttgggccctggcctgcggccaggcgaggaccccaagggcccctttggccggtctttcagcaccagccgcctcactgacctgctccttaaggcggcgtttgggacacaagccccggacc

SEQ ID NO: 616638 - DNA, 120 bp, Artificial Sequence
  ENSG00000177169_20 (sequence is synthesized)
cgggcagcacggagagcctgcaggagaagcccatggagatcgcaccctcagctggctttggagggagcctgcacccaggagcccgtgctgggggcaccagcagcccttccccggtggtct

SEQ ID NO: 616639 - DNA, 120 bp, Artificial Sequence
  ENSG00000177169_21 (sequence is synthesized)
gcccccgcaccaggatgttctcagcgggccccactggctctgccagctcttctgcccgccacctggtgcctgggccctgcagcgaggccccagcccctgagctccctgctccaggacacg

SEQ ID NO: 616640 - DNA, 120 bp, Artificial Sequence
  ENSG00000177169_22 (sequence is synthesized)
gctgcagctttgccgaccccattactgcgaacctggagggggctgtgaccttcgaggcccccgacctccctgaggagaccctcatggagcaagagcacacggagatcctgcgtggcctgc

SEQ ID NO: 616641 - DNA, 120 bp, Artificial Sequence
  ENSG00000177169_23 (sequence is synthesized)
gcttcacgctgctgttcgtgcagcacgtcctggagatcgcagccctgaagggcagcgccagtgaggcggcggggggccctgagtaccagctgcaggagagtgtggtggccgaccagatca

SEQ ID NO: 616642 - DNA, 120 bp, Artificial Sequence
  ENSG00000177169_24 (sequence is synthesized)
gcctgctgagccgagaatggggcttcgcggaacagctggtgctgtacctgaaggtggccgagctactgtcctccggcctgcaaagtgccatcgaccagatccgggccggcaagctctgcc

SEQ ID NO: 616643 - DNA, 120 bp, Artificial Sequence
  ENSG00000177169_25 (sequence is synthesized)
tgtcgtccactgtgaagcaggtggtgcgcaggctgaatgagctgtacaaggccagcgtggtgtcctgccagggcctgagcctgcggctgcagcgcttcttcctggacaagcagcggctcc

SEQ ID NO: 616644 - DNA, 120 bp, Artificial Sequence
  ENSG00000177169_26 (sequence is synthesized)
tggaccgcattcacagcatcactgccgagaggctcatcttcagccacgctgtgcagatggtgcagtcggctgccctggacgagatgttccagcaccgtgagggctgcgtcccacgctacc

SEQ ID NO: 616645 - DNA, 120 bp, Artificial Sequence
  ENSG00000177169_27 (sequence is synthesized)
acaaggccctgctgctcctggaggggctgcagcacatgctctcggaccaggccgacatcgagaacgtcaccaagtgcaagctgtgcattgagcggagactctcggcgctgctgactggca

SEQ ID NO: 616646 - DNA, 120 bp, Artificial Sequence
  ENSG00000177169_28 (sequence is synthesized)
tctgtgcctgacctttctggcctggctgggccccccgtcctgccgagccctgcagagtgggctctgtgtgctggctggactcctcgggacaagcccatggcgctgatcgctggtgctgag

SEQ ID NO: 616647 - DNA, 120 bp, Artificial Sequence
  ENSG00000177169_29 (sequence is synthesized)
ccctgccctgggccccacggacagtcagcctgccggcctccctgcagctcacggggcagaaccagcacatctggagccacacagcttggggggtgtctcccatcttttacaggtggggat

SEQ ID NO: 616648 - DNA, 120 bp, Artificial Sequence
  ENSG00000177169_30 (sequence is synthesized)
cacagaatttctgcccctccagctgcctggctcagcaggcgtgggtgccaccaccctctagccccagggcagccccggaggacaggcaagggcctgagaccactgccgactcaaagccaa

SEQ ID NO: 616649 - DNA, 120 bp, Artificial Sequence
  ENSG00000177169_31 (sequence is synthesized)
agcgagctcctgcttagggaaggtcagcaggcactgtgcccaggaagagcctgcggcctcggcgtcccccagtctccaggagcctctccctccgagatacccacccagctttgtcaatca

SEQ ID NO: 616650 - DNA, 120 bp, Artificial Sequence
  ENSG00000177169_32 (sequence is synthesized)
cccaagcactttatgcatatagagacagaacctggacctcaccagggactgctgggcagcgattcctggcagtggcctggtgtttgtacatacacatatgcagacacatgccagggcccc

SEQ ID NO: 616651 - DNA, 120 bp, Artificial Sequence
  ENSG00000177169_33 (sequence is synthesized)
ccaagcccgagcaccggaccacgttgctgcccaggtctggacctcagcgggagaactggctccggggggagtggggccctgcgctagaggcagaggcagttctttgttcaagcgttcctc

SEQ ID NO: 616652 - DNA, 120 bp, Artificial Sequence
  ENSG00000177169_34 (sequence is synthesized)
tggggaccggcagcagaggcaccgtgttctctcagccctggatacgtcttgtaatctttcacactttattcctaaaacgtgtcttatttttatgcagctcattttttctttaaaggagaa

SEQ ID NO: 616653 - DNA, 120 bp, Artificial Sequence
  ENSG00000177169_35 (sequence is synthesized)
aacttgtaggtgtttaagaattggttttgggagggcgaggactgggccaggttagaggcagatggcacaggggcgtgtggcgggcgggtgaggctgctttgcacacctgtgttggtggct

SEQ ID NO: 616654 - DNA, 120 bp, Artificial Sequence
  ENSG00000177169_36 (sequence is synthesized)
gtcccctgccgcccctccctgtggcagcagcaggacaggtgtgtgcccagcaccctccctacctgggcctggaagcagatgaggggaatacttcatgcaaagaaaaaagtaacatgtgca

SEQ ID NO: 616655 - DNA, 120 bp, Artificial Sequence
  ENSG00000177169_37 (sequence is synthesized)
aaagctccccgtccagctttgacagtcagttttgatgtcagctcctcggcagggtaggcctgatgacagccctgtccctccctgcctctgccttgcccaaggccacggagggcatctgca

SEQ ID NO: 616656 - DNA, 120 bp, Artificial Sequence
  ENSG00000177169_38 (sequence is synthesized)
gagaggcctgccttccggattccaggcgggcatgccctgcaaaccccgcctgggcctcccttggtctgcccagccctcgattagccctgcctgaatcagtagatacttgaacgagtcccc

SEQ ID NO: 616657 - DNA, 120 bp, Artificial Sequence
  ENSG00000177169_39 (sequence is synthesized)
agtctgcgggaggcagtggtggggccatggacccatgcggggggttccagggtcacacgccacataacagacaaaaatacacacacgtgtgtttttctttgcaatacttgaaatattgcc

SEQ ID NO: 616658 - DNA, 120 bp, Artificial Sequence
  ENSG00000177169_40 (sequence is synthesized)
actgtgcttggacttagaagaagaaaatccccgtgacttcttcctcatcaccttgatggctttattctcaccttgtggggcatgtttgtatttattgcttcatggccgactggaatcctg

SEQ ID NO: 616659 - DNA, 120 bp, Artificial Sequence
  ENSG00000177169_41 (sequence is synthesized)
agtcctgggaagctggcactgcggggatcttgcccggtgtcctggtcctcttgcttccgtcgcggccgcatgtgcgtgtgtccaagcaggtcctgggcgcctcaactgctgcccctggtt

SEQ ID NO: 616660 - DNA, 120 bp, Artificial Sequence
  ENSG00000177169_42 (sequence is synthesized)
gaatgttctcttgatagtgctggaccctttgtctattttaaagcgaattttgtgtgatttcctgccctttgcgttatattgtataataccaacgtaaggaaataaacctttggaattgtt

SEQ ID NO: 616661 - DNA, 120 bp, Artificial Sequence
  ENSG00000177169_43 (sequence is synthesized)
cgaccgctcagcccacatgccgggttggggaggaagcccaccttgcaactgcctgggtgacagggtaacagggaggctgcttgagtaggcccctgtgcagaggtgcagaggccccggggc

SEQ ID NO: 616662 - DNA, 120 bp, Artificial Sequence
  ENSG00000177169_44 (sequence is synthesized)
ctggcccagtgtgcagagcacagaggccattgggtcggacagcaccctggagcccagtatgcagagcacagaggccgtggggtcggatggcacccgggacaaggtgcggagcctggccac

SEQ ID NO: 616663 - DNA, 120 bp, Artificial Sequence
  ENSG00000177169_45 (sequence is synthesized)
accctcaaggccacggggagccagggctgtggcagggagggagggacgtgctcgctcagtgcaccgggcagatcatggccactccagccctgccccgtgtctgctgcaccctgagctgac

SEQ ID NO: 616664 - DNA, 120 bp, Artificial Sequence
  ENSG00000177169_46 (sequence is synthesized)
gggattacaggtgtgagccactgcgaccagccctgttggcgtctttgatcctgggctgaggagctgagaagcttctatggcctgagggtcacacacacctgcccacacacctggccttca

SEQ ID NO: 616665 - DNA, 120 bp, Artificial Sequence
  ENSG00000177169_47 (sequence is synthesized)
cccttcctgctagggggtatgtcctctgccaggagctgttgctcttatggggggaccaggggcctttgccttgatcagatggagacctggctggccacaaaacagaacacacccacctac

SEQ ID NO: 616666 - DNA, 120 bp, Artificial Sequence
  ENSG00000177169_48 (sequence is synthesized)
aaagcacgtggcccagagatgtcctcgtctcccggccgctggctgaccagctaagtcctggcactgcagggcctgcccaggccgaattggggctgagccagactccctgcagtggggccc

SEQ ID NO: 616667 - DNA, 120 bp, Artificial Sequence
  ENSG00000177169_49 (sequence is synthesized)
gcagcggctcctggaccgcattcacagcatcactgccgagaggctcatcttcagccacgctgtgcagatggtacgggacagacagacaccagtggggcaggggccaggaacttccaggcc

SEQ ID NO: 616668 - DNA, 120 bp, Artificial Sequence
  ENSG00000177169_50 (sequence is synthesized)
cgccgtctccactgggacgggaccttgatgcccacagcgtggtgagactttggggggtgtcacttctggaggtcttgaaatgacagcattatgcacccccagcctcctgcaggcgctcgc

SEQ ID NO: 616669 - DNA, 120 bp, Artificial Sequence
  ENSG00000177169_51 (sequence is synthesized)
agctcggctgggtgcatccttgattgtacgggtgccgtggcccatgtgcatcctgcctcgccccgactcagtttccccaattgtaaaatgagagacttggtcttcaggcctcgtagtcag

SEQ ID NO: 616670 - DNA, 120 bp, Artificial Sequence
  ENSG00000177169_52 (sequence is synthesized)
gtgtcagcctccagaagcagcacctggtcccggacaacctgcctggaagtgtggtgcactcaggtggtaccacgggcaaagactccctgcttgggctctgaagagctccctctgcctctg

SEQ ID NO: 616671 - DNA, 120 bp, Artificial Sequence
  ENSG00000177169_53 (sequence is synthesized)
aggtggtgcccccttttcgtttattttttgttgtttttttttaagagagggtcttgcactgttgcccaggctgaagtgtagtgtagccgctaactcctgggctgaaatgatcctcttgcc

SEQ ID NO: 616672 - DNA, 120 bp, Artificial Sequence
  ENSG00000177169_54 (sequence is synthesized)
tcagcttcccaagatgctgggtattacaggcaaaaactcatgagtgcctgagtctccttttttaagaaaatttaagcatgtagtaaaaatccagtctgaacaaacatgggaaaagtcagc

SEQ ID NO: 616673 - DNA, 120 bp, Artificial Sequence
  ENSG00000177169_55 (sequence is synthesized)
ctccctcctgccccccttcccgcccaggcaggccaggcagcagcagtaatgacactgactgagcggcgggcactctgttgtcctggggccgggctgagagcgctggccagggtcatctgg

SEQ ID NO: 616674 - DNA, 120 bp, Artificial Sequence
  ENSG00000177169_56 (sequence is synthesized)
ttccaggcagtgtctccccttggccctgtgaccatcccctctgcacagcaggctgcaccagcacttatgtctccacgtcactgccctgagcgcctatctgccacccctgggccgctgccg

SEQ ID NO: 616675 - DNA, 120 bp, Artificial Sequence
  ENSG00000177169_57 (sequence is synthesized)
tgtggtgagtggcaagaggttgaggagtggctctaggggcctgctgtgcttctcctgttggagcattgggatataacaggtgtaaaccgaggcagaggcacattgggccctggaggtgtg

SEQ ID NO: 616676 - DNA, 120 bp, Artificial Sequence
  ENSG00000177169_58 (sequence is synthesized)
aggggcacagagccctggggaagatgtgtgggaatggccagtcctgaacaaagaccgaggaaggcagctctgtaccttttgacccccgcctgggctcatgctcaggctgctcccacatgc

SEQ ID NO: 616677 - DNA, 120 bp, Artificial Sequence
  ENSG00000177174_0 (sequence is synthesized)
atgcccaattcaaccaccgtgatggaatttctcctcatgaggttttctgatgtgtggacactacagattttacattctgcatccttctttatgttgtatttggtaactctaatgggaaac

SEQ ID NO: 616678 - DNA, 120 bp, Artificial Sequence
  ENSG00000177174_1 (sequence is synthesized)
atcctcattgtgaccgtcaccacctgtgacagcagccttcacatgcccatgtacttcttcctcaggaatctgtctatcttggatgcctgctacatttctgttacagtccctacctcatgt

SEQ ID NO: 616679 - DNA, 120 bp, Artificial Sequence
  ENSG00000177174_2 (sequence is synthesized)
gtcaattccctactggacagcaccaccatttctaaggcgggatgtgtagctcaggtcttcctcgtggttttttttgtatatgtggagcttctgtttctcaccattatggctcatgaccgc

SEQ ID NO: 616680 - DNA, 120 bp, Artificial Sequence
  ENSG00000177174_3 (sequence is synthesized)
gcaggcatgcacactggcagcacattccagctgcccttctgtcggtccaacgttattcatcaattcttctgtgacatcccctctctgctgaagctctcttgctctgacaccttcagcaat

SEQ ID NO: 616681 - DNA, 120 bp, Artificial Sequence
  ENSG00000177174_4 (sequence is synthesized)
gaggtcatgattgttgtctctgctctgggggtaggtggcggctgtttcatctttatcatcaggtcttacattcacatcttttcgaccgtgctcgggtttccaagaggagcagacagaaca

SEQ ID NO: 616682 - DNA, 120 bp, Artificial Sequence
  ENSG00000177174_5 (sequence is synthesized)
aaggccttttccacctgcatccctcacatcctggtggtgtcagtcttcctcagttcatgctcttctgtgtacctcaggccacctgcgatacctgcagccacccaggatctgatcctttct

SEQ ID NO: 616683 - DNA, 120 bp, Artificial Sequence
  ENSG00000177174_6 (sequence is synthesized)
ggtttttattccataatgcctcccctctttaaccctattatttacagtcttagaaataagcaaataaaggtggccatcaagaaaatcatgaagagaattttttattcagaaaatgtgtaa

SEQ ID NO: 616684 - DNA, 120 bp, Artificial Sequence
  ENSG00000177181_0 (sequence is synthesized)
cggggcgcaccgccctggccgccatgtgctcccagctctggttcctgacggaccggcgcatccgcgaggactacccgcaggtgcagatcctgcgcgccctccggcagcgctgctccgagc

SEQ ID NO: 616685 - DNA, 120 bp, Artificial Sequence
  ENSG00000177181_1 (sequence is synthesized)
aggacgtgcgcttccgggcggtgcttatggaccagatcgccgtcaccatcgtcggcggccacctcggcctccagctaaaccagaaggccctcaccactttcccggatgtggtgcttgtac

SEQ ID NO: 616686 - DNA, 120 bp, Artificial Sequence
  ENSG00000177181_2 (sequence is synthesized)
gggtacccacaccctcagtgcagtcagacagtgacatcactgtcctgcgacacctggagaagctgggctgccggttggtcaatcgcccacagagcatcttaaattgcatcaacaaattct

SEQ ID NO: 616687 - DNA, 120 bp, Artificial Sequence
  ENSG00000177181_3 (sequence is synthesized)
ggacgttccaagaactggctggacatggggtccccatgccagacaccttctcctatggtgggcatgaagacttttcaaaaatgattgatgaagctgagcccctgggctacccagtcgtgg

SEQ ID NO: 616688 - DNA, 120 bp, Artificial Sequence
  ENSG00000177181_4 (sequence is synthesized)
tgaagagcacacgaggccaccggggaaaagctgtttttctggcaagagataaacatcacctctctgacatctgccatctgatccgccacgatgtgccctacctgttccagaagtacgtga

SEQ ID NO: 616689 - DNA, 120 bp, Artificial Sequence
  ENSG00000177181_5 (sequence is synthesized)
aggagtcccatggaaaggacatccgggtggtggtggtagggggccaggtcataggctctatgcttcgctgctccactgatggacggatgcagagcaactgctctctcggtggcgtgggcg

SEQ ID NO: 616690 - DNA, 120 bp, Artificial Sequence
  ENSG00000177181_6 (sequence is synthesized)
tcaagtgtccgctgacagaacaaggcaagcagttggctattcaggtgtccaacatcctaggcatggacttctgtggcattgatctccttatcatggacgatggctcctttgtggtgtgtg

SEQ ID NO: 616691 - DNA, 120 bp, Artificial Sequence
  ENSG00000177181_7 (sequence is synthesized)
aggcaaatgctaatgttggcttcctagcctttgaccaggcatgcaacttagatgtgggtgggatcattgcagactataccatgtccttgctgccaaataggcagactggaaagatggctg

SEQ ID NO: 616692 - DNA, 120 bp, Artificial Sequence
  ENSG00000177181_8 (sequence is synthesized)
tcctcccaggactgtcgagtccaagggagaagaacgagccggatggctgtgcttcagctcagggagttgcagagagcgtctataccatcaacagtgggtctacctctagtgaaagtgagc

SEQ ID NO: 616693 - DNA, 120 bp, Artificial Sequence
  ENSG00000177181_9 (sequence is synthesized)
ctgaactgggagagatccgggattcctcagcaagcacaatgggggccccaccctccatgctgcccgaacctggctacaacattaacaacaggattgcttctgagttaaaacttaagtgaa

SEQ ID NO: 616694 - DNA, 120 bp, Artificial Sequence
  ENSG00000177181_10 (sequence is synthesized)
ttcctgctttttggcagcatttaaaccaaatcctactgcttccctagtagttttgagtgaataaaatctggactaatgtgatttcatttgcacagaaactagaaatcccatctgggcact

SEQ ID NO: 616695 - DNA, 120 bp, Artificial Sequence
  ENSG00000177181_11 (sequence is synthesized)
cagcattttttctaacgatgatttaagcaaatggcctagctttgtggtttttacaaagacaaatataaaaacactcaagaacaacgtcccgactgatcagtatgagactgatgtctgctg

SEQ ID NO: 616696 - DNA, 120 bp, Artificial Sequence
  ENSG00000177181_12 (sequence is synthesized)
tgagcacgtggatattacggctgacgctaaggcactgactctgctgttgcttctgacttttagcagtagaacccattagctcaaaatggctcttggaattatgtactcaaaagcaaccac

SEQ ID NO: 616697 - DNA, 120 bp, Artificial Sequence
  ENSG00000177181_13 (sequence is synthesized)
gggatggaagcatgtgcagacgaggtggaatgtgactgcagtaataggttcttcactaagtgtgtgtgtgatgcttggaaaagacacagttcaaacactattagaggatcgatctctgct

SEQ ID NO: 616698 - DNA, 120 bp, Artificial Sequence
  ENSG00000177181_14 (sequence is synthesized)
ccccatcaatcaccatcttgaccatatttctccgacactcaggatatggtgttttagggagcttcctcattagcattttcagtgaagcactttgtagaaagtgagattgaacgttctttg

SEQ ID NO: 616699 - DNA, 120 bp, Artificial Sequence
  ENSG00000177181_15 (sequence is synthesized)
acttcacaggttggcaaatgtcctgctttgtaactgggcctttctacaaattgctttgccactctgaatttatagaccctgcttcaactaacgtcagctctagcagcttcttgcaccttt

SEQ ID NO: 616700 - DNA, 120 bp, Artificial Sequence
  ENSG00000177181_16 (sequence is synthesized)
gctgcctttggcctcagctggaaatgcacttcaatgagctagtggccactcagtttatttcttaagcgtgcactagaatctaacaccatggactttgtttttcaatggactctgttcact

SEQ ID NO: 616701 - DNA, 120 bp, Artificial Sequence
  ENSG00000177181_17 (sequence is synthesized)
tgtcatccagaagccagtgggtttttaccatagaaagctacttggagatcatcattcttcccctcctctactgaaactttgtgtactgcttagctgtagggggttttcttgtatgagtgg

SEQ ID NO: 616702 - DNA, 120 bp, Artificial Sequence
  ENSG00000177181_18 (sequence is synthesized)
gtgttggaggtctattgagtagatgggagccattggaaacactccaatccccttgaaactctacttttatctaagatccagacacctgtccttacccacttttccaaacggggaagactc

SEQ ID NO: 616703 - DNA, 120 bp, Artificial Sequence
  ENSG00000177181_19 (sequence is synthesized)
aggtatcaggaattacccattgcacattttgcgggggggggggctaatgtagacatgacaccaagtgcttttcattttaattctctaagcagtagatgagatctttcccttgggagaaat

SEQ ID NO: 616704 - DNA, 120 bp, Artificial Sequence
  ENSG00000177181_20 (sequence is synthesized)
cacagagatggagttttccatttctgcttatacgaaatatgactgaaaatgaacaaagccacctttttaaccaaatacactagaacatatgcactcaagagttagcataattggagttat

SEQ ID NO: 616705 - DNA, 120 bp, Artificial Sequence
  ENSG00000177181_21 (sequence is synthesized)
tttcttgatgttgcatgtgccaagaacacttagggttcccctttgggattacctttgaagccatgcaaggcaagaggcctcacaactttatagtcagaccttgtgttttatccaacccct

SEQ ID NO: 616706 - DNA, 120 bp, Artificial Sequence
  ENSG00000177181_22 (sequence is synthesized)
cctcctgcccaccaagatcatcctgagctgcttcacccattttatttagcagacttattttctaatgctctttagctgttaaaaaaaaaaaatcattcctcaaaaaatagatctaccctt

SEQ ID NO: 616707 - DNA, 120 bp, Artificial Sequence
  ENSG00000177181_23 (sequence is synthesized)
aaaggacaaagatttaccaacactgaagacccttacaagttgacagtttctaaagagggttctaggaatgttctgtgtaaggtcagcttcactggaataaacatacatcttcccaaggtg

SEQ ID NO: 616708 - DNA, 120 bp, Artificial Sequence
  ENSG00000177181_24 (sequence is synthesized)
actacttcaaaggcaacactacccattcgggtgcagaaattaccgtacttactctgccataaatgtaaaatgtgtataaagttaagctattgcattttttcataacacatttaaatagaa

SEQ ID NO: 616709 - DNA, 120 bp, Artificial Sequence
  ENSG00000177181_25 (sequence is synthesized)
attggcttttaaagtattgtagttaaaaccagatctcaccaagtaatagttgtgcaattgacaaatgtttggtgccatgtaatggagatgtcacactacacagttgtagtttaaatgcag

SEQ ID NO: 616710 - DNA, 120 bp, Artificial Sequence
  ENSG00000177181_26 (sequence is synthesized)
tccaacataaggtgcatgccactgaactgtaaccctagtaatgtgtcttgtacagttgaaaaataatacttcacctttatataggttaagatatgtaccttatctttaccactcagggtg

SEQ ID NO: 616711 - DNA, 120 bp, Artificial Sequence
  ENSG00000177181_27 (sequence is synthesized)
gctttaaaagacggacagctttaggtttgttctcactggaactggttacactttctgtgcaaacttaaccaagtgatgatcgtctggaagctgcattccctcatttccactgtttggtgt

SEQ ID NO: 616712 - DNA, 120 bp, Artificial Sequence
  ENSG00000177181_28 (sequence is synthesized)
gaatctagtctccccactttatctaaaaggaggctagcagggccccagcctgagcagagcagctagagagtgcttccagattcctttgccaaaggaggcccattttccagctgtgagtga

SEQ ID NO: 616713 - DNA, 120 bp, Artificial Sequence
  ENSG00000177181_29 (sequence is synthesized)
catctgtagtcattggcttcattgcctggcactagccctgtctagaagtggagaaagctggatcacagctggaccacaaccagccccaatccaggatttcccataccatgctggctgtgg

SEQ ID NO: 616714 - DNA, 120 bp, Artificial Sequence
  ENSG00000177181_30 (sequence is synthesized)
gctctgtgagcctcagccaggtggccaggctatacttgtcacagctggccacaggcctgctgaaggaacatggggtgtagagccagagcctggttctggttctccgcttgaacagctgac

SEQ ID NO: 616715 - DNA, 120 bp, Artificial Sequence
  ENSG00000177181_31 (sequence is synthesized)
ctcgtgcaatcacaggaactctgcgtctccatgtttcactcagatagagaaaatgcctcctttgtttacctctttgaagctgaagtaagtgagactggtgcatgtaaattaatggtagta

SEQ ID NO: 616716 - DNA, 120 bp, Artificial Sequence
  ENSG00000177181_32 (sequence is synthesized)
gtgagactggtgcatgtaaattaatggtagtagagcacctcccacatctgattttataacagtttcccatcactccttaaagaaaaaggccaggccgggcgtggtggttcacgcctgtaa

SEQ ID NO: 616717 - DNA, 60 bp, Artificial Sequence
  ENSG00000177181_33 (sequence is synthesized)
acacattcttggcattagcacaccaaacagtggtagggtaccctgagaaaggaatgcagc

SEQ ID NO: 616718 - DNA, 120 bp, Artificial Sequence
  ENSG00000177181_34 (sequence is synthesized)
caccaaacagtggtagggtaccctgagaaaggaatgcagcttctcagaggcctcacttccagccagggaaacttaagacctgaaaggaataaggctctttgtgtattcagacagccttct

SEQ ID NO: 616719 - DNA, 120 bp, Artificial Sequence
  ENSG00000177181_35 (sequence is synthesized)
ggatgtatcgtatataacctgaaactctccactcttgtataccaactaacaaagtcttccttatgtaacatagattgcagtgtctgtatatggtcttcccattatctggtagtagcatct

SEQ ID NO: 616720 - DNA, 120 bp, Artificial Sequence
  ENSG00000177181_36 (sequence is synthesized)
tgaaactggtcaaaacttgaatgccaatagctcagtcactcagaatatacgattctgcacttgggaaaaatgtcttcatgctgtttttctgatcgggtatggggttgccagaatgaggat

SEQ ID NO: 616721 - DNA, 120 bp, Artificial Sequence
  ENSG00000177181_37 (sequence is synthesized)
ttggggctttaggtctttcggatctcagaaacaatataagtagatcataagccactagtgtcacaatttcaggcccattgcttccagctaaaaggagattccatgaccatggggaccagg

SEQ ID NO: 616722 - DNA, 120 bp, Artificial Sequence
  ENSG00000177181_38 (sequence is synthesized)
agaggaggaaagggaaaagggaaaggtctggaatagttttgtgaaagaaataaaaaattgggatgatttggaattctagtaggaaggaggaaaaaatggctcttctgtgggctgttttaa

SEQ ID NO: 616723 - DNA, 120 bp, Artificial Sequence
  ENSG00000177181_39 (sequence is synthesized)
tgaaagaatcatgaatatgtattgatcagaggtagatgtctttgaagctgttctgcataaagataatgagatgcatggatttccatccaccctggagaagtgggggagatgtgcttcctc

SEQ ID NO: 616724 - DNA, 120 bp, Artificial Sequence
  ENSG00000177181_40 (sequence is synthesized)
ccttctttaaatcctgaggaatgctggtcttgagaacactgaatgcaaatctgaggaagatgtaagcggctggctggggagttttaggaccacccaaataaaagctgaccctcccagagg

SEQ ID NO: 616725 - DNA, 120 bp, Artificial Sequence
  ENSG00000177181_41 (sequence is synthesized)
ctaatgaaccacagtgctgtgtgcaggcatagccttagcaggtcagtttaaggagtcaggtcagagaataaatccaaccttagtcaagtcactacagtttaatattttcctttgcaactg

SEQ ID NO: 616726 - DNA, 120 bp, Artificial Sequence
  ENSG00000177181_42 (sequence is synthesized)
cattagtctgagtggatgtcttgggaaggcccctgaaaatagccatatttgtcactgtccctaaagtgaatgttcatagatctgggactgtttttgactgtacctctgagactcaagatc

SEQ ID NO: 616727 - DNA, 120 bp, Artificial Sequence
  ENSG00000177181_43 (sequence is synthesized)
aggacagattgttactttaaaatgttacctggaagacgattcttctaagggctataatgttataatcttttcctaaaactaaatcatgcctccattccaggtctatggctagactctgca

SEQ ID NO: 616728 - DNA, 120 bp, Artificial Sequence
  ENSG00000177181_44 (sequence is synthesized)
gccctccctcctaaaaccacagggctgaatgtggaaactttcttcttttaagcctttccatttccttctctaggtacagctcctgtgccaatatgcactgtctcaagccctgtgctggca

SEQ ID NO: 616729 - DNA, 120 bp, Artificial Sequence
  ENSG00000177181_45 (sequence is synthesized)
ttccaacctggtttggtaattttgctgtgaggttcatgttctctggggctccagggcaacactaagaaagtcgcttatgatccccatttgagaccatggaattagcattttggagaccag

SEQ ID NO: 616730 - DNA, 120 bp, Artificial Sequence
  ENSG00000177181_46 (sequence is synthesized)
tctagtcccccatttcataagtagggaatcttacttagttccagaggccatgttcacttgctagtcaatagcaaggctggactcaggcagtctgattcctcatccactttggcatactgc

SEQ ID NO: 616731 - DNA, 120 bp, Artificial Sequence
  ENSG00000177181_47 (sequence is synthesized)
cagaggtagctccatccctccctggaatctagcacatgctcccatcctgggcctaccctccgcctcctccccttctgatgagcctctgttctggatcaacacggtgttgatgtgccagct

SEQ ID NO: 616732 - DNA, 120 bp, Artificial Sequence
  ENSG00000177181_48 (sequence is synthesized)
gtcaagggttcagcacttggatggcttctaggtgagagccccaaaggcatgtatatttccatgatgcaagctggctcatggcccgcaccgtctttagaccagccaagaccatttaactct

SEQ ID NO: 616733 - DNA, 120 bp, Artificial Sequence
  ENSG00000177181_49 (sequence is synthesized)
accccacactttcagtggtgggatgtgaggaagaaagcccatgccaagctaactgaaagcttatttggctccaattcggctgatgttccctcactgcagaatgtcctggaaaccaagggt

SEQ ID NO: 616734 - DNA, 120 bp, Artificial Sequence
  ENSG00000177181_50 (sequence is synthesized)
ttgcagctcctaaacctattgcattaggcacacccaagaagaaatcctgttcgatgcacatgctccagtttcaatcagcaacaaggtcaaaagtttccccccactttctgttccacagtg

SEQ ID NO: 616735 - DNA, 120 bp, Artificial Sequence
  ENSG00000177181_51 (sequence is synthesized)
cgttccccttgcagccagacattaggcacagattcatccctattgtaacccaaatgtcagctgagggctccttgcctcttgacatccagagaggtctgataactgggctctgtttctgaa

SEQ ID NO: 616736 - DNA, 120 bp, Artificial Sequence
  ENSG00000177181_52 (sequence is synthesized)
cctctagatttctgtgatttctcaaagacttatatttttgcagccactgctgactccacacttctgctacctcattttaaatagcgtcttatccctgcaatgcatcagctgagacatgaa

SEQ ID NO: 616737 - DNA, 120 bp, Artificial Sequence
  ENSG00000177181_53 (sequence is synthesized)
gctcagtttcctcgcccatttccacatagcaaaattcaagcgagtgagtgtgtgtgcctgcgtgtgtctcagtgacgtgggaaggaatggcagatgctacaacagtgcagactcggcacc

SEQ ID NO: 616738 - DNA, 120 bp, Artificial Sequence
  ENSG00000177181_54 (sequence is synthesized)
ccatttatagaatgttctttttatatactatggaggaatctccactcaccttccactccacgtggtccctgtctcctgtccttgggacagagcagttccatttatattctcacatacaac

SEQ ID NO: 616739 - DNA, 120 bp, Artificial Sequence
  ENSG00000177181_55 (sequence is synthesized)
cagatggatagccattccttttcttaatttgattcctgccaacaccctaaccgtcatgacttcaccttttaccatgggtggcttattaaaaacattttcctggacgaagacagttccctc

SEQ ID NO: 616740 - DNA, 120 bp, Artificial Sequence
  ENSG00000177181_56 (sequence is synthesized)
cccaagcggaattcgagtgccatctcttaaggtgatgcatttttaattcccactgcacaagccaggcatcacaatgaccatattcaccactcgttgtcaggggtacaccttttggaaggc

SEQ ID NO: 616741 - DNA, 120 bp, Artificial Sequence
  ENSG00000177181_57 (sequence is synthesized)
agcgtgggctaatgtgaatggtactagtctgagtcagatccagttcaaatccaggtaacttaaagcttgtgtgacccagggacactttacttcaacttgttaaaccttaattttgtcacc

SEQ ID NO: 616742 - DNA, 120 bp, Artificial Sequence
  ENSG00000177181_58 (sequence is synthesized)
tataaatgtgatacataaacaaacttgaatgtgtcgcacttaaccacatgcctggctttccataggttcctttcctcttgcttcccccactgtgagcaacacaagcatcgccttcttgtg

SEQ ID NO: 616743 - DNA, 120 bp, Artificial Sequence
  ENSG00000177181_59 (sequence is synthesized)
atcatggctcagtgccaagggataaaagctggcagacagcagctttacagctgggaaaaagagctgctgggggcagggctggcggtagctcaagcatgctgtggttcaggctaatgactg

SEQ ID NO: 616744 - DNA, 120 bp, Artificial Sequence
  ENSG00000177181_60 (sequence is synthesized)
gaaggtcccatccatccttgagattttatgacgctatgtgcaagatctagcgaacgtatttggctaagaaaaatcctggaggagagactgcctcagacaactggggggctggaaagccga

SEQ ID NO: 616745 - DNA, 120 bp, Artificial Sequence
  ENSG00000177181_61 (sequence is synthesized)
cctggaaagcagcctgaccttggatgatttagcacctgggttttttggctcttcctgtattaggtttgctggcttcgcatcaaatggaaggaggtggtgccagggacgtgaattaaacct

SEQ ID NO: 616746 - DNA, 120 bp, Artificial Sequence
  ENSG00000177181_62 (sequence is synthesized)
gtcaaatagagggtgaggggagtgcagaaggctgggggaaggaggggctgtgtggggaactctgatagtctgacagcaccatctggacttggcagggatgacagccctgagatcagatgg

SEQ ID NO: 616747 - DNA, 120 bp, Artificial Sequence
  ENSG00000177181_63 (sequence is synthesized)
aactaaccaataaagctgctaaaattctgctgtcctgggcctatccggagtgggactcccgtaatctcctatttagaaggaacactgatctgcaaggggagagctggggcccttaatcat

SEQ ID NO: 616748 - DNA, 120 bp, Artificial Sequence
  ENSG00000177181_64 (sequence is synthesized)
tctgcagagctgataacggtcactgtggaggcaggactaggcgggtgcctggtttgcttagtcccaccttgaggtcccgagttccagtggtgtgccgaagtggtttgcactggcccatga

SEQ ID NO: 616749 - DNA, 120 bp, Artificial Sequence
  ENSG00000177181_65 (sequence is synthesized)
gagtggattgttgaatttccaggaattttgtaagctggttggtaaacacagccacagtgaccattagagattatattaacctgcaattaaataaagtatgttaaaaacagtaataaatac

SEQ ID NO: 616750 - DNA, 120 bp, Artificial Sequence
  ENSG00000177181_66 (sequence is synthesized)
tcaaaactcatcacttcctaattattttactattatctatgttcttgaggatactgacatctattgtattggtatggtgtgctacaatataatggcgtgctattgcacatctcttcccaa

SEQ ID NO: 616751 - DNA, 120 bp, Artificial Sequence
  ENSG00000177181_67 (sequence is synthesized)
cctgaacattcagtgacatcacatcagtagctggggaatcggccctattgagagtatttacaccacagagattggcaaacactctatatcaagacccccctccccgagagctggttgtta

SEQ ID NO: 616752 - DNA, 120 bp, Artificial Sequence
  ENSG00000177181_68 (sequence is synthesized)
aacatttgtcagcacaccactgctgctgggagacagagagaagaaactgatacacgtgagcactgaaacatcttagttccagggaggtagcatttgtgttgtatttctcagaagcaagtg

SEQ ID NO: 616753 - DNA, 120 bp, Artificial Sequence
  ENSG00000177181_69 (sequence is synthesized)
tcctagtgtaatgtgcacaagtggcatgaagtttaacacctaaaagactgcttctctgcttgttctgtctaacttctgtgatttcaacacttgagaaagatgtttactttgctactaaac

SEQ ID NO: 616754 - DNA, 120 bp, Artificial Sequence
  ENSG00000177181_70 (sequence is synthesized)
ttattggagtgatttgtaaagttcactgtcacctgtgggcagtagttcagctaaattccctccaggaaagtggactgtagcttttcctgcctaactggcaaaatgaaaatatgctgaaaa

SEQ ID NO: 616755 - DNA, 120 bp, Artificial Sequence
  ENSG00000177181_71 (sequence is synthesized)
gaatacatcttaactaggcaccagaatagctcatttccaagtggtttatacagcaataacagtgttaacttctccaacagagacgaaatcatttataaatgattgttttgctgtttttgc

SEQ ID NO: 616756 - DNA, 120 bp, Artificial Sequence
  ENSG00000177181_72 (sequence is synthesized)
tttttattaaaattattactatggaacagaatgctttgtttgcctttgtctccaaaattctgtgccttttggtggttcttgtaaagtaagaatcacatgctgaatctacattttattatt

SEQ ID NO: 616757 - DNA, 120 bp, Artificial Sequence
  ENSG00000177181_73 (sequence is synthesized)
ttcatatcataaaatgaggaagagccttcacagaagaaacttcaccctattcacttgcacaccagctgcgttctgaaaaactataattttcctttcaaacgcagagtgccgtctgaattg

SEQ ID NO: 616758 - DNA, 120 bp, Artificial Sequence
  ENSG00000177181_74 (sequence is synthesized)
taatactgccaactctcaactgtcaagatgatggaggaaaatactaatgcagatggcgtgagcttgtcacgggcctgctcagcgtgctctcccgggctgacattcgaattaagattcaaa

SEQ ID NO: 616759 - DNA, 120 bp, Artificial Sequence
  ENSG00000177181_75 (sequence is synthesized)
tagcaagtgagagctgaaagctgtttaaaatggctgtgtggtgcagtaaggggtctcaggggattgaaagaatctgtgtactcaccagaagaactctgacaggtcaggcagggccctcag

SEQ ID NO: 616760 - DNA, 120 bp, Artificial Sequence
  ENSG00000177181_76 (sequence is synthesized)
gacttgtgtttgcctgacatttcaagaggcttcctgggagaagcggtgataagaccctgggggactaacagtcaaaacaaggctcaagacccttgaactaaggctattccccagcttctg

SEQ ID NO: 616761 - DNA, 120 bp, Artificial Sequence
  ENSG00000177181_77 (sequence is synthesized)
agggtcagggagtccaaattgaggtcagagcatcaaagggatagtgcttgattgctgcagccgaggatgatttggggtatgacattatgtaccattcatattgtccttgaacccaaacac

SEQ ID NO: 616762 - DNA, 120 bp, Artificial Sequence
  ENSG00000177181_78 (sequence is synthesized)
tggggaatgtggcctatgtttctttcttcttctcttacatgaaaatcgtcaaactacacaaaagtggagagaatagtaaactccccagaaaaggacgtttccatttgcctttaccacata

SEQ ID NO: 616763 - DNA, 120 bp, Artificial Sequence
  ENSG00000177181_79 (sequence is synthesized)
taaaaagattagcagtaatcccttgataccatctaattcccagtccgtattcaaattcccccattgtctcaaagagaactgcatttagctccatggtagaccagcgtatttggtgagaaa

SEQ ID NO: 616764 - DNA, 120 bp, Artificial Sequence
  ENSG00000177181_80 (sequence is synthesized)
ggaagtactttggaaaggttgctgatggcttccctaccctcttgacggtggctctggcagaaaccatgctgcaggggcacaggtggagagatgttcaggctggctgcagatgcctttcca

SEQ ID NO: 616765 - DNA, 120 bp, Artificial Sequence
  ENSG00000177181_81 (sequence is synthesized)
agttgtgggatcttgggatttcctctcctcaaagaataagcctgtgacacttccccttctacttcccagagttacatggtgtccctctaggactctcccagcttcatgctgctggcaccc

SEQ ID NO: 616766 - DNA, 120 bp, Artificial Sequence
  ENSG00000177181_82 (sequence is synthesized)
acttgtctatcacgctggtatccgctgcttttcctgcagctgctgctttcactaatggcacttcttaaatctggtgagaggcttctctcaaaaatgatcgctcttccactaaccttaggt

SEQ ID NO: 616767 - DNA, 120 bp, Artificial Sequence
  ENSG00000177181_83 (sequence is synthesized)
ctactgtactcttggtgaatcacagctctttagagctcctcaagggcctaagcatcttttgttagaaaattctggctgaaattctcatgagatgggtcagggaaccttggagtggcagca

SEQ ID NO: 616768 - DNA, 120 bp, Artificial Sequence
  ENSG00000177181_84 (sequence is synthesized)
cttgtgtcacatctaaaggcactcctctgactaaagagaagtggcagctgagcacactgcctgcccagggattttcttctgctctaaaggacattattaagacaactggtctgtactgta

SEQ ID NO: 616769 - DNA, 120 bp, Artificial Sequence
  ENSG00000177181_85 (sequence is synthesized)
ttgcctgatagtatcatatcaatgtcaatttcctcattttggtgattgttctaataagaatacgtaagaatgtgtccttgtttttagaaaatacacattaaatatcgagggatagaggta

SEQ ID NO: 616770 - DNA, 120 bp, Artificial Sequence
  ENSG00000177182_0 (sequence is synthesized)
gcctcctaccaaaatcacagccccttgtggagcccgagctctcattcacagctttctagagaaatctgagcccgaacctgccagaataggggatctcacccacccagttcagcagcgagg

SEQ ID NO: 616771 - DNA, 120 bp, Artificial Sequence
  ENSG00000177182_1 (sequence is synthesized)
acacctgcagaaatacattcccaaagcaaggctgggcggccgtgtgaagtaagcaatggcctcagttttgcttctgttttggatgaacaccaccacatagggcctgaatgtgaaagaaga

SEQ ID NO: 616772 - DNA, 120 bp, Artificial Sequence
  ENSG00000177182_2 (sequence is synthesized)
ccctctatttgtctgttccggggcagcctggtagtaaaacactgttgaatgggccacagtttcagcagaccatcaggtgaatgggaccagtctctcttcttccaaaatatcagaagttaa

SEQ ID NO: 616773 - DNA, 120 bp, Artificial Sequence
  ENSG00000177182_3 (sequence is synthesized)
acacttggaacggagatttggccaagatgacccatttacaggctggactcagtccagagactatagagaaagctcgcctggaactgaatgaaaaccccgatgttttacatcaggatattc

SEQ ID NO: 616774 - DNA, 120 bp, Artificial Sequence
  ENSG00000177182_4 (sequence is synthesized)
agcaagtcagggacatgatcatcaccaggcctgacattggatttttacgtacagatgatgccttcatcctgagatttctccgagccaggaagtttcaccaagcggatgcctttagactcc

SEQ ID NO: 616775 - DNA, 120 bp, Artificial Sequence
  ENSG00000177182_5 (sequence is synthesized)
tggctcagtatttccagtaccgccagctaaacctggacatgttcaaaaacttcaaggcagatgatcccggcattaagagggctctgatcgatgggttccccggggtgctggaaaaccgag

SEQ ID NO: 616776 - DNA, 120 bp, Artificial Sequence
  ENSG00000177182_6 (sequence is synthesized)
accattacggcaggaagattcttttgctgtttgcagccaattgggatcagagtaggaactccttcacagacatccttcgtgccatcctgctgtcattggaagtcctaatcgaagatccgg

SEQ ID NO: 616777 - DNA, 120 bp, Artificial Sequence
  ENSG00000177182_7 (sequence is synthesized)
agcttcagataaatggcttcattttaattatagactggagtaatttttccttcaaacaagcctccaaactgacaccttcaatccttaaactggccattgaagggttgcaggacagctttc

SEQ ID NO: 616778 - DNA, 120 bp, Artificial Sequence
  ENSG00000177182_8 (sequence is synthesized)
ctgcccgctttggaggagtccactttgtcaaccagccctggtacattcatgccctctacacactcatcaagccatttcttaaagacaagaccaggaaacggattttcctgcatggaaaca

SEQ ID NO: 616779 - DNA, 120 bp, Artificial Sequence
  ENSG00000177182_9 (sequence is synthesized)
atttaaacagccttcaccagctaatacaccctgaatttttgccctctgaatttggaggaactcttcctccttatgacatgggaacttgggcccggacgttactcggtcccgactacagcg

SEQ ID NO: 616780 - DNA, 120 bp, Artificial Sequence
  ENSG00000177182_10 (sequence is synthesized)
atgaaaatgactatactcacacatcctataatgcaatgcacgtgaagcatacgtcctcgaatctggagagagaatgctcacccaagctgatgaaaagatctcagtctgtggtagaagctg

SEQ ID NO: 616781 - DNA, 120 bp, Artificial Sequence
  ENSG00000177182_11 (sequence is synthesized)
ggaccctgaaacatgaggagaagggagagaatgagaacacccagccactcctggctctggactgaaccctgagtcaccccaatgctcctgcacactggccttcagtggtatcagccaccc

SEQ ID NO: 616782 - DNA, 120 bp, Artificial Sequence
  ENSG00000177182_12 (sequence is synthesized)
aggaagcacatgcacaactgacccatgcagacacgtgtgttctgcttgacacaaggtcctccactcctgaacccctgcagtgactgtcaccagccatcggtctgagcagccaaagttgga

SEQ ID NO: 616783 - DNA, 120 bp, Artificial Sequence
  ENSG00000177182_13 (sequence is synthesized)
caaagacttgagagatgctttttttttcccccagtgaggggactggaggatgatgcaaggcatttatgtaaaaaagattctccctcctttcatatttattgtagtaaattgaaaaaataa

SEQ ID NO: 616784 - DNA, 120 bp, Artificial Sequence
  ENSG00000177182_14 (sequence is synthesized)
gttaaactgtacagacaccactgtcaagtttcatgtagtacaaagccctgagacaatagtatctccagtaatttccattcttactgaattatttcctttgacctcatcaccagcatcgaa

SEQ ID NO: 616785 - DNA, 120 bp, Artificial Sequence
  ENSG00000177182_15 (sequence is synthesized)
ttgttcagcctaagagcatgttctcataggtctgggtatttgcaaagtttgcttattttgatgatatcctgcaaaaaattattttgatgtcacatctcttgtcaggtcactagctgactg

SEQ ID NO: 616786 - DNA, 120 bp, Artificial Sequence
  ENSG00000177182_16 (sequence is synthesized)
tcatgagctgacgttaaaggaagacacatggacgtgaaatacgattatttcatctgagcaatgtgagttaccacaggcagctcaaaagcccattagtgcagcatgtgtctgcagaggaga

SEQ ID NO: 616787 - DNA, 120 bp, Artificial Sequence
  ENSG00000177182_17 (sequence is synthesized)
tgtctcatgaaaatcacatgtcagtgattaatgaatccattccagttgcctcaactgggtcactacagcaaagaaaagtgctatcaaaccatttacccttgcccccacaaccctcctgca

SEQ ID NO: 616788 - DNA, 120 bp, Artificial Sequence
  ENSG00000177182_18 (sequence is synthesized)
accattaaagatgtggagaaagaccatggttgttgctgagagggtaaatattcaatcatggagcatgacccatatggatggctaaatatgcaagtactgaagtaagagaagactagaaat

SEQ ID NO: 616789 - DNA, 120 bp, Artificial Sequence
  ENSG00000177182_19 (sequence is synthesized)
gcaggatgaaatgtcaaaggtcattttatttacctagtctccttagaaatggagtccccaactactcattcaaaagaaatcagacataaaataaacagacatcatatatgatatccttac

SEQ ID NO: 616790 - DNA, 120 bp, Artificial Sequence
  ENSG00000177182_20 (sequence is synthesized)
ttgtgccatgttttccaagaccagtgcatatttttagacatctcttattcgcccagccatctgcatgacatgggtatttattagtattaccagttggtgctcaaagtcaaacaaaaatat

SEQ ID NO: 616791 - DNA, 120 bp, Artificial Sequence
  ENSG00000177182_21 (sequence is synthesized)
tttagttaataatgggcagtaaaatatgattttacattattttaaatatttgggagagttaatttgttagctaaataattcaagggaaagagattattcaactggtcataatcacccctg

SEQ ID NO: 616792 - DNA, 120 bp, Artificial Sequence
  ENSG00000177182_22 (sequence is synthesized)
tattattactaatcttaattatttattacatcatctctttctcaatggatctaatgttttaattttttcccctattggtagagaacaataacagaagtaatttttatattatacacttgg

SEQ ID NO: 616793 - DNA, 120 bp, Artificial Sequence
  ENSG00000177182_23 (sequence is synthesized)
ttggagaaataaagttgaaacagaattaaaaatatttctcaaacaactgtatcacaatataaattaaactaattcatttttgtgtagacatacgaaatcacaaaaataataacactgaaa

SEQ ID NO: 616794 - DNA, 120 bp, Artificial Sequence
  ENSG00000177182_24 (sequence is synthesized)
taattctaccaatgcagtgatggaaacacttttcttatgtaccaagacatagataggtaagagaaataaagaattgaagtgaattagaaaatccattttattgcttgggtttaaaatagt

SEQ ID NO: 616795 - DNA, 120 bp, Artificial Sequence
  ENSG00000177182_25 (sequence is synthesized)
tgtgggatacaagtatttacaatgctattggagtcaattattgacaacactttgcaacagtaataccatttctagcttttcaattggcaatacttagaaccttactgtagtgacctgatt

SEQ ID NO: 616796 - DNA, 120 bp, Artificial Sequence
  ENSG00000177182_26 (sequence is synthesized)
ttaaataccatattatatttactaagttaagagctagtttttactctcttccataatttcattacatgaatgtaagatgatggctcaaaaatgacgacttatagtttgaatttatgtgta

SEQ ID NO: 616797 - DNA, 120 bp, Artificial Sequence
  ENSG00000177182_27 (sequence is synthesized)
tgcaatatacatatgagaaccaaattcaacaagtgacatgaatgttactacatgaacattgaattgtattgcccttgtcagttatttcctctgttcaataaatactgaaggtcacaaaca

SEQ ID NO: 616798 - DNA, 120 bp, Artificial Sequence
  ENSG00000177182_28 (sequence is synthesized)
aagaagggtcacggttacatggatctgctgggaaaacaattagtggaaaagggggcaaatagagttaatggccgtttttggtaagcaatggcctcagttttgcttctgttttggatgaac

SEQ ID NO: 616799 - DNA, 120 bp, Artificial Sequence
  ENSG00000177182_29 (sequence is synthesized)
aagaccatgtgtggcaacatactttttaaaaaattatcgcaaccaaagtaatatttatcctttggagtggaaaaaggaaacttggattaaattcatctgagtactccatgtttttgcctc

SEQ ID NO: 616800 - DNA, 120 bp, Artificial Sequence
  ENSG00000177182_30 (sequence is synthesized)
agccagagttttagatgctttttaaaattaactttcattttcattaataactccaaattactgttaccccaggcacaaattatcctctgtagcaataatgaataaagctccaagatgttc

SEQ ID NO: 616801 - DNA, 120 bp, Artificial Sequence
  ENSG00000177182_31 (sequence is synthesized)
cagagagttcacaaaaattaaaactaggaaacatctgctttatgatcatgtcatatacaggggtggcatggggctttcagaagcatttttgtgccccagaaatgcaccctgcagatcact

SEQ ID NO: 616802 - DNA, 120 bp, Artificial Sequence
  ENSG00000177182_32 (sequence is synthesized)
acttccaagagtgtcacgtgctaccgagcttgcgcttaagtggatcacttcagtgcaaacaaaggaagcagatgaaattacctcctgtttgtatgaccacttatgaggattttggagaag

SEQ ID NO: 616803 - DNA, 120 bp, Artificial Sequence
  ENSG00000177182_33 (sequence is synthesized)
aggtttttgggctacatggagggtagaatggttagtctttagggttctttctactttctaaggatctgggattctatgagaagtaactcagaaaggcaatgctgcttagctttctggtga

SEQ ID NO: 616804 - DNA, 120 bp, Artificial Sequence
  ENSG00000177182_34 (sequence is synthesized)
cacattattacaaattactattactataacaaattaagggcatagtttggagacattttgaatcagtatagataaaacttctgtcccttcttaatttcataggcagattaactctatgga

SEQ ID NO: 616805 - DNA, 120 bp, Artificial Sequence
  ENSG00000177182_35 (sequence is synthesized)
gtgaccctctccccatagacggcagttataggcagctatgtatatagcaaaatatgacattctcagatcaagtagtcattactcatgctcttcaaagtgcaagactaggacccatttcaa

SEQ ID NO: 616806 - DNA, 120 bp, Artificial Sequence
  ENSG00000177182_36 (sequence is synthesized)
tcatccattacactccactgcaataattggtgggtctgtttcttacattatgacttcttcctatttggcccccagcaaatatctggcacctagtgggcctctgataagcatgtatttatt

SEQ ID NO: 616807 - DNA, 120 bp, Artificial Sequence
  ENSG00000177182_37 (sequence is synthesized)
gaatggatcttattttattgaaatgtatcctatttcccagaggaggagaagtagggcaggcatttcagaaaagaaacagcaagtccacattgttccagggatgccacattgtcctgggta

SEQ ID NO: 616808 - DNA, 120 bp, Artificial Sequence
  ENSG00000177182_38 (sequence is synthesized)
gtgtatttgggggacatttgtaaaattgcttttgaatgtacagactacatggagcatcctgccttgcctaatcatagacttctgtgttcttttccatcagtcacttcctcttagctctaa

SEQ ID NO: 616809 - DNA, 120 bp, Artificial Sequence
  ENSG00000177182_39 (sequence is synthesized)
ctccttttctccaacctcctctcacctaagcctctgaacatctgatctctctctctttaaagcttttatcaaaggaagttttaaagtaagcttcagggcttatatcatgcgcttaaatta

SEQ ID NO: 616810 - DNA, 120 bp, Artificial Sequence
  ENSG00000177182_40 (sequence is synthesized)
tgctgaccatatctctaggaatttctgtacaagctgcatgtaatcttaccttttttaaaaaagataatttattacatgtgcaagtaactgtgattcaagttctagccctttatacatttt

SEQ ID NO: 616811 - DNA, 120 bp, Artificial Sequence
  ENSG00000177182_41 (sequence is synthesized)
ttttcttaaatcagtaagaaaaatgtcctttatccaaccctatgatccaatttttctccctgaaaatgtatggattacttaatacgtcccttgaaaagttcaatacattgatgtgaacct

SEQ ID NO: 616812 - DNA, 120 bp, Artificial Sequence
  ENSG00000177182_42 (sequence is synthesized)
agtctatctggaatttatatttgaagagatgtgaggaagaaatctaagttaactatttctctatgtattttgatttgtcctaatactggttattggataacacatcctgaaatgcatttt

SEQ ID NO: 616813 - DNA, 120 bp, Artificial Sequence
  ENSG00000177182_43 (sequence is synthesized)
aggtaaggcctgggttatcagagccccccccccagtcagaggtcaatggaattttttatttggacctattgtgaattattaattaaagacctttatgggcagagaacttgaataaaataa

SEQ ID NO: 616814 - DNA, 120 bp, Artificial Sequence
  ENSG00000177182_44 (sequence is synthesized)
acctgcagaaatacattcccaaagcaaggctgggcggccgtgtgaaggtatttgttaccttttttctcccctctgtatttgccgagcctccccgcctttcccccgctctttcgatgccat

SEQ ID NO: 616815 - DNA, 70 bp, Artificial Sequence
  ENSG00000177182_45 (sequence is synthesized)
attcccctcctatccttccccccaagtctccaaagtccactgtatcattcttttttttttttgagacaga

SEQ ID NO: 616816 - DNA, 120 bp, Artificial Sequence
  ENSG00000177182_46 (sequence is synthesized)
gctagttctgctccaagaacccaagaggtaaggccttcagtcaagaggacagcccacgtctcattgttccagtggcctaatcaagggaatggaagatgaggagaatgaaggctctgggaa

SEQ ID NO: 616817 - DNA, 120 bp, Artificial Sequence
  ENSG00000177182_47 (sequence is synthesized)
actaattttgtccaggaagactctcagagaagcctccatgtggaaggtttggctgacccagggtttggaggagtattgcatttcattacatacgggagccaaaattcaagactagctagc

SEQ ID NO: 616818 - DNA, 120 bp, Artificial Sequence
  ENSG00000177182_48 (sequence is synthesized)
aggagaagctagcaagtgtgcacacacttcattttccccaccatggccacaaggatgtcctgcccactgctgctgccctttgtgatgacttccttgaacgcttgtccggagatttcaggc

SEQ ID NO: 616819 - DNA, 120 bp, Artificial Sequence
  ENSG00000177182_49 (sequence is synthesized)
agtggcaggatgggcagagactggagaggagggatcagccctgctgttggcgtatatctcctgtaaggcacctcactgatgaggaacagagcagccactattcactgtctttttgaccac

SEQ ID NO: 616820 - DNA, 120 bp, Artificial Sequence
  ENSG00000177182_50 (sequence is synthesized)
tcagaacccacatggatgtgcaaaaattgggaacagaattggaagagaccttacaggtcatctcttccagtctctcacctgacagagaggtctgttctccagcacagaacatcaaccagc

SEQ ID NO: 616821 - DNA, 120 bp, Artificial Sequence
  ENSG00000177182_51 (sequence is synthesized)
ctccgcttgcaccgtctagagacaggcaggcacctttctgggcagcgtgttccctgtggtgtggccttgttaaaaagcacttgcttattctgagtaagatgacataggtctgccctctga

SEQ ID NO: 616822 - DNA, 120 bp, Artificial Sequence
  ENSG00000177182_52 (sequence is synthesized)
acagcactgtaatctccagtaggttcacatcatctattttcataaccccgttacccgacccccatagttccctacatgcttcaggtccatttggattcaagtgggctttgtgcaccgacc

SEQ ID NO: 616823 - DNA, 120 bp, Artificial Sequence
  ENSG00000177182_53 (sequence is synthesized)
ttgggacccaatcacttttcgtaatctggcttttgggcacagatggccactgtgttccaaagcactctcgacccatgctttctggtatccacgtagagtaaaagccaagactcccggaac

SEQ ID NO: 616824 - DNA, 120 bp, Artificial Sequence
  ENSG00000177182_54 (sequence is synthesized)
tctcagtgaatgactggttctaatgagctcttgttttttttctttggataattgtagctcaacccttatgtagaaaaaacaaaataatgattggtttagctggaaattcctctaaatgaa

SEQ ID NO: 616825 - DNA, 120 bp, Artificial Sequence
  ENSG00000177182_55 (sequence is synthesized)
ttatttcaatattgttctgctctttaatacaataatgccatggtgggcttttgaggtgtgtggcattctctgctctggtactaaatgaccctgagttttatatttttaactttttattcc

SEQ ID NO: 616826 - DNA, 120 bp, Artificial Sequence
  ENSG00000177182_56 (sequence is synthesized)
tatttttaactttttattcctgttttttcttgttgttgttattgttgtttgggacagagtctcgttctgttgccaggctggagagcagtggtatgatctcggctcactgcaatctccgcc

SEQ ID NO: 616827 - DNA, 120 bp, Artificial Sequence
  ENSG00000177186_0 (sequence is synthesized)
atggcatgggagaatcagaccttcaactctgacttcctcctcctgggaatcttcaatcatagccccacccacaccttcctcttctttctggtcctggccatcttttcagtggccttcatg

SEQ ID NO: 616828 - DNA, 120 bp, Artificial Sequence
  ENSG00000177186_1 (sequence is synthesized)
ggaaactccatcatggttctcctcatctacctggatacccagctccacacccccatgtacttcctcctcagccaactgtccctcatggacctcatgctcatctgcaccactgtacccaag

SEQ ID NO: 616829 - DNA, 120 bp, Artificial Sequence
  ENSG00000177186_2 (sequence is synthesized)
atggccttcaactacttgtctggcagcaagtccatttctatggctggctgtgccacacaaattttcttctatatatcattgcttggctccgaatgctttctgttggctgttatgtcttat

SEQ ID NO: 616830 - DNA, 120 bp, Artificial Sequence
  ENSG00000177186_3 (sequence is synthesized)
acagatggaatcattgatgctgtagcgacattttccttctcctactgtgggtctcgggaaatagcccacttctgctgtgacttcccttccctactaatcctctcatgcaatgacacatca

SEQ ID NO: 616831 - DNA, 120 bp, Artificial Sequence
  ENSG00000177186_4 (sequence is synthesized)
atatttgaagaggttattttcatctgctgtatagtaatgcttgttttccctgttgcaatcatcatcacttcctatgctcgagttattctggctgtcattcacatgggatctggagaggga

SEQ ID NO: 616832 - DNA, 120 bp, Artificial Sequence
  ENSG00000177186_5 (sequence is synthesized)
cgtcgcaaagcttttactacttgttcctctcacctcatggtggtgggaatgtactatggagcaggtttgttcatgtgcattcagcccacatctcatcattctcctatgcaggacaagatg

SEQ ID NO: 616833 - DNA, 120 bp, Artificial Sequence
  ENSG00000177186_6 (sequence is synthesized)
gtgtctgtattctacaccatcgtcactcccatgctgaatcctctcatttatagcctccgcaacaaggaagtgaccagagcattaatgaaaatcttaggaaagggcaagtctggagattga

SEQ ID NO: 616834 - DNA, 120 bp, Artificial Sequence
  ENSG00000177189_0 (sequence is synthesized)
agaaaggggcgagacccggtgcccagcggaggcgcgaggctctcgctcagcgcgcgggcgtctctggccaggcgcgcggctttcgggcggtcggcgtcggcgtcgagccctctctggggc

SEQ ID NO: 616835 - DNA, 80 bp, Artificial Sequence
  ENSG00000177189_1 (sequence is synthesized)
ggtcggcgtcggcgtcgagccctctctggggccgccgccgctgctgctgctgctgccgctgccgctgccgctgccgccgc

SEQ ID NO: 616836 - DNA, 120 bp, Artificial Sequence
  ENSG00000177189_2 (sequence is synthesized)
gggaggaggcggtgaaggcggcgggccgggggggaagatgccgctggcgcagctggcggacccgtggcagaagatggctgtggagagcccgtccgacagcgctgagaatggacagcaaat

SEQ ID NO: 616837 - DNA, 120 bp, Artificial Sequence
  ENSG00000177189_3 (sequence is synthesized)
tatggatgaacctatgggagaggaggagattaacccacaaactgaagaagtcagtatcaaagaaattgcaatcacacatcatgtaaaggaaggacatgaaaaggcagatccttcccagtt

SEQ ID NO: 616838 - DNA, 120 bp, Artificial Sequence
  ENSG00000177189_4 (sequence is synthesized)
tgaacttttaaaagtattagggcagggatcatttggaaaggttttcttagttaaaaaaatctcaggctctgatgctaggcagctttatgccatgaaggtattgaagaaggccacactgaa

SEQ ID NO: 616839 - DNA, 120 bp, Artificial Sequence
  ENSG00000177189_5 (sequence is synthesized)
agttcgagaccgagttcggacaaaaatggaacgtgatatcttggtagaggttaatcatccttttattgtcaagttgcattatgcttttcaaactgaagggaagttgtatcttattttgga

SEQ ID NO: 616840 - DNA, 120 bp, Artificial Sequence
  ENSG00000177189_6 (sequence is synthesized)
ttttctcaggggaggagatttgtttacacgcttatccaaagaggtgatgttcacagaagaagatgtcaaattctacttggctgaacttgcacttgctttagaccatctacatagcctggg

SEQ ID NO: 616841 - DNA, 120 bp, Artificial Sequence
  ENSG00000177189_7 (sequence is synthesized)
aataatttatagagacttaaaaccagaaaatatacttcttgatgaagaaggtcacatcaagttaacagatttcggcctaagtaaagagtctattgaccatgaaaagaaggcatattcttt

SEQ ID NO: 616842 - DNA, 120 bp, Artificial Sequence
  ENSG00000177189_8 (sequence is synthesized)
ttgtggaactgtggagtatatggctccagaagtagttaatcgtcgaggtcatactcagagtgctgactggtggtcttttggtgtgttaatgtttgaaatgcttactggtacactcccttt

SEQ ID NO: 616843 - DNA, 120 bp, Artificial Sequence
  ENSG00000177189_9 (sequence is synthesized)
ccaaggaaaagatcgaaaagaaacaatgactatgattcttaaagccaaacttggaatgccacagtttttgagtcctgaagcgcagagtcttttacgaatgcttttcaagcgaaatcctgc

SEQ ID NO: 616844 - DNA, 120 bp, Artificial Sequence
  ENSG00000177189_10 (sequence is synthesized)
aaacagattaggtgcaggaccagatggagttgaagaaattaaaagacattcatttttctcaacgatagactggaataaactgtatagaagagaaattcatccgccatttaaacctgcaac

SEQ ID NO: 616845 - DNA, 120 bp, Artificial Sequence
  ENSG00000177189_11 (sequence is synthesized)
gggcaggcctgaagatacattctattttgatcctgagtttactgcaaaaactcccaaagattcacctggcattccacctagtgctaatgcacatcagctttttcgggggtttagttttgt

SEQ ID NO: 616846 - DNA, 120 bp, Artificial Sequence
  ENSG00000177189_12 (sequence is synthesized)
tgctattacctcagatgatgaaagccaagctatgcagacagttggtgtacattcaattgttcagcagttacacaggaacagtattcagtttactgatggatatgaagtaaaagaagatat

SEQ ID NO: 616847 - DNA, 120 bp, Artificial Sequence
  ENSG00000177189_13 (sequence is synthesized)
tggagttggctcctactctgtttgcaagagatgtatacataaagctacaaacatggagtttgcagtgaagattattgataaaagcaagagagacccaacagaagaaattgaaattcttct

SEQ ID NO: 616848 - DNA, 120 bp, Artificial Sequence
  ENSG00000177189_14 (sequence is synthesized)
tcgttatggacagcatccaaacattatcactctaaaggatgtatatgatgatggaaagtatgtgtatgtagtaacagaacttatgaaaggaggtgaattgctggataaaattcttagaca

SEQ ID NO: 616849 - DNA, 120 bp, Artificial Sequence
  ENSG00000177189_15 (sequence is synthesized)
aaaatttttctctgaacgagaggccagtgctgtcctgttcactataactaaaaccgttgaatatcttcacgcacaaggggtggttcatagagacttgaaacctagcaacattctttatgt

SEQ ID NO: 616850 - DNA, 120 bp, Artificial Sequence
  ENSG00000177189_16 (sequence is synthesized)
ggatgaatctggtaatccggaatctattcgaatttgtgattttggctttgcaaaacagctgagagcggaaaatggtcttctcatgactccttgttacactgcaaattttgttgcaccaga

SEQ ID NO: 616851 - DNA, 120 bp, Artificial Sequence
  ENSG00000177189_17 (sequence is synthesized)
ggttttaaaaagacaaggctatgatgctgcttgtgatatatggagtcttggtgtcctactctatacaatgcttaccggttacactccatttgcaaatggtcctgatgatacaccagagga

SEQ ID NO: 616852 - DNA, 120 bp, Artificial Sequence
  ENSG00000177189_18 (sequence is synthesized)
aatattggcacgaataggtagcggaaaattctcactcagtggtggttactggaattctgtttcagacacagcaaaggacctggtgtcaaagatgcttcatgtagaccctcatcagagact

SEQ ID NO: 616853 - DNA, 120 bp, Artificial Sequence
  ENSG00000177189_19 (sequence is synthesized)
gactgctgctcttgtgctcagacatccttggatcgtccactgggaccaactgccacaataccaactaaacagacaggatgcaccacatctagtaaagggtgccatggcagctacatattc

SEQ ID NO: 616854 - DNA, 120 bp, Artificial Sequence
  ENSG00000177189_20 (sequence is synthesized)
tgctttgaaccgtaatcagtcaccagttttggaaccagtaggccgctctactcttgctcagcggagaggtattaaaaaaatcacctcaacagccctgtgaagtgacctcagtgagatatt

SEQ ID NO: 616855 - DNA, 120 bp, Artificial Sequence
  ENSG00000177189_21 (sequence is synthesized)
tggtaccatggtgtaagctgatagcacaagttctggcgacaggtagcacgtatctgagagacacctgcaagcacacactgtcccagctggtacccataatgctgctgttcctgctgctgc

SEQ ID NO: 616856 - DNA, 120 bp, Artificial Sequence
  ENSG00000177189_22 (sequence is synthesized)
tcctgctttcctctcttctcgctttaaatgattgttagcaagttagattttcctggagcttcggaagaaatgaaaatggaaacatgatgaagatatagtcactgaatcaatgagaaaaat

SEQ ID NO: 616857 - DNA, 120 bp, Artificial Sequence
  ENSG00000177189_23 (sequence is synthesized)
aatgaacatatgaataccacctaaaaatacactgaataaagtacaccatatagcattatttttataggaaatatttcatgtcccttaaatattctttgttagttatagggatggacagtt

SEQ ID NO: 616858 - DNA, 120 bp, Artificial Sequence
  ENSG00000177189_24 (sequence is synthesized)
tatgttaagcacttagcttaaacaatccgtttatattagcactgtatcccttgtgccatccaacattttgtatgtttttgtaaacagttcatatacagtacatttctgtactgctttctt

SEQ ID NO: 616859 - DNA, 120 bp, Artificial Sequence
  ENSG00000177189_25 (sequence is synthesized)
taatgtatacatgccttgtttaacttggaatctattattattaatcaattgactattaaatctggttaaatagttcacctggattaacagtattgttggacagtcctaaaaatggccaga

SEQ ID NO: 616860 - DNA, 120 bp, Artificial Sequence
  ENSG00000177189_26 (sequence is synthesized)
ttgtggaacagctgttgaatgtaatacttccaaaatgtacatatctttccccacgtctgtttcactggttcgttcatttgtttgtttcttaaagtcaggtgctctgtcagactaacctag

SEQ ID NO: 616861 - DNA, 120 bp, Artificial Sequence
  ENSG00000177189_27 (sequence is synthesized)
agagctgttatggtagagaaagttatcatatgtgtgtggcatgaaatcaagaatacacctatgaagttagtccatatactttgcaactccttagagtacttttttccttaattaaggaag

SEQ ID NO: 616862 - DNA, 120 bp, Artificial Sequence
  ENSG00000177189_28 (sequence is synthesized)
tagtccttgcacttctaatcttacatagcatccatacttagaatttggcatatcatctgggattttgccaatatacgtcaaagccctttaagagtcatggtaaggagatgggtgaaggaa

SEQ ID NO: 616863 - DNA, 120 bp, Artificial Sequence
  ENSG00000177189_29 (sequence is synthesized)
aatttagcaacaggtaattgaagtcctattggatatttcatgtttaaatagatattctatattaaacactaatttaaatgtaataaaggccaaaggcctctgtatgaaattggatttaaa

SEQ ID NO: 616864 - DNA, 120 bp, Artificial Sequence
  ENSG00000177189_30 (sequence is synthesized)
ctttcttattttagggaataaaacattattgatcaaacagtatctgttctaacctaaaattataggtagggcaggctaagtgaacagcattgagtattttctgaatccctcatgataatt

SEQ ID NO: 616865 - DNA, 120 bp, Artificial Sequence
  ENSG00000177189_31 (sequence is synthesized)
tatagccacatactgcttcctttgacttcaggaatgatcagttttcataatggccactgggcctgcttagattgcagtattcattatctgcatctaatttggtagtttccacaatcgtat

SEQ ID NO: 616866 - DNA, 120 bp, Artificial Sequence
  ENSG00000177189_32 (sequence is synthesized)
ttgatgaaagaaacttcagtccccattattacctgtgtctttgccaagctgcctagcatacatcagtatgtaatgtaaaagacatatgagcaagaaaaaagtgatttaacttacctcatc

SEQ ID NO: 616867 - DNA, 120 bp, Artificial Sequence
  ENSG00000177189_33 (sequence is synthesized)
aaaaaaaaaaaaaagaatgtactcatacagatttttgttagtcatcatgtaataagccatttatatcagaaaccttttttcctgccacagaagctttaaattttcccctaagagtacaaa

SEQ ID NO: 616868 - DNA, 120 bp, Artificial Sequence
  ENSG00000177189_34 (sequence is synthesized)
gccaagagagtgtggtttatctaaatgtcctgaaatccacttgtcattccttaatttctcctctatgcaattaaagagaaaggggaaatctataacatttcttttgcccaagtgacacaa

SEQ ID NO: 616869 - DNA, 120 bp, Artificial Sequence
  ENSG00000177189_35 (sequence is synthesized)
aaatgattactgcatagaaatcaaatgtaagtttagcttctaaatgaaataatatataggagggatatcagaatgtctagatagagaaagtattttcaaattcttgaatatatggatgct

SEQ ID NO: 616870 - DNA, 120 bp, Artificial Sequence
  ENSG00000177189_36 (sequence is synthesized)
attaaaagctgctttccattgcctggaaagagagcttttttccctcctctattcagtgtttcaaactttggtcatctcaaattattgtcacttttaaaatgttaatgtcattctgagcag

SEQ ID NO: 616871 - DNA, 120 bp, Artificial Sequence
  ENSG00000177189_37 (sequence is synthesized)
aaatagatatattttcagatttttttacactgatgctactccgtaattgcttaggagtattgtccatcatagtattttagaactagaagtaaacacataaatccttataaattacccaat

SEQ ID NO: 616872 - DNA, 120 bp, Artificial Sequence
  ENSG00000177189_38 (sequence is synthesized)
ccaactttctcatattgcatgtagagaacctgagacacatatcaaagtctagaatccttaacttctccccattttgtttttttccgcctcatcacaccatgctgcctttccctcatatga

SEQ ID NO: 616873 - DNA, 120 bp, Artificial Sequence
  ENSG00000177189_39 (sequence is synthesized)
tcaccaaccagtagctgagttcaaaaactacatatttcttgggcagtcctctactggtatgtgatgccaacttttatttctttcgaagataattgccttctttgcctagccaagcagcca

SEQ ID NO: 616874 - DNA, 120 bp, Artificial Sequence
  ENSG00000177189_40 (sequence is synthesized)
attttattggagaaaagcaagttatatgttcacaaaatggaaggctttctacctaaatttatttcatctgtggtcctcttattctcttccattgcttttgacatacagtggaaaaacttg

SEQ ID NO: 616875 - DNA, 120 bp, Artificial Sequence
  ENSG00000177189_41 (sequence is synthesized)
gccaacgatgtgctctaaatatagtgcttgtgttgggttaacttttccattaatttctcaacatcaattattcaggcccctacagttgtggtattgaggcccctaaaggcttctgccttt

SEQ ID NO: 616876 - DNA, 120 bp, Artificial Sequence
  ENSG00000177189_42 (sequence is synthesized)
caccaattagtgctgccagttactgaggcttctcccaaaaggtatcagtccagtcttaaagatatttcattgtgaaagaagaaactaaactatcaggcctcttttacaaaatgagagatt

SEQ ID NO: 616877 - DNA, 120 bp, Artificial Sequence
  ENSG00000177189_43 (sequence is synthesized)
gaatttaagcttgtcaagcacgtactggaaggtatgaattacactaccatgtgttttgtatcttccctttcaagtgatgatgttaaatgaaggtaagtttttcatccttttttaattttt

SEQ ID NO: 616878 - DNA, 120 bp, Artificial Sequence
  ENSG00000177189_44 (sequence is synthesized)
gttttttataaatcatttcagctttttctggtttatagaggtgtcttatttctaatgcaacagacccccaactttaacagatttgatatggatgcatttattcacaagcaaccccaaaag

SEQ ID NO: 616879 - DNA, 120 bp, Artificial Sequence
  ENSG00000177189_45 (sequence is synthesized)
tccaaaaatgtaataattttgacaaggcccaaagttgagatgctatgaagcttgtgtgtgtgaaaagtcagttatgattgtctggagagaagctgtggtgtgtatgctgtagagtttcca

SEQ ID NO: 616880 - DNA, 120 bp, Artificial Sequence
  ENSG00000177189_46 (sequence is synthesized)
catttcacatgcagtgtactccaaaaagcgggtttgggtcaaccatttcccatctctttttaagaagtgactgctgttggggccaggggacatcatgggaggtggggctgtccagttagc

SEQ ID NO: 616881 - DNA, 120 bp, Artificial Sequence
  ENSG00000177189_47 (sequence is synthesized)
tgtgccctgcaccttcagcccaggaaagatttgaacagagcaaaggcttcaagagagggcagaatgtattcggcagaaaagggactcaggtaagcccagcctgggatgagagcagaaaag

SEQ ID NO: 616882 - DNA, 120 bp, Artificial Sequence
  ENSG00000177189_48 (sequence is synthesized)
cattcaagatttgcaggccttgctatggatgcgcttaatcaccatggaggccagcaatacccatctcagcatggctttgatattctctacttcctggcctttaaaaatgacctataattt

SEQ ID NO: 616883 - DNA, 120 bp, Artificial Sequence
  ENSG00000177189_49 (sequence is synthesized)
ttcagtttgctttactatattttataaagaaaattctatcttatggttgattgagcattgagacttatgaaggcattaggatagatagctcaggaatgtaaaggttcagaaaaggtctgt

SEQ ID NO: 616884 - DNA, 120 bp, Artificial Sequence
  ENSG00000177189_50 (sequence is synthesized)
tttctcagattaacaaatatgatggattccatggctgaccttggtgcttaaaccaggaggtttcaatctagtcctagagttgtgtccctctgaaaggcccaatgccatgtaactaacttt

SEQ ID NO: 616885 - DNA, 120 bp, Artificial Sequence
  ENSG00000177189_51 (sequence is synthesized)
aaactggatatatactttgagccttacttaattcacagataagttgacttaactcagtatttttatttcaattaatgaaaacagtcctcttttcaaccccaggttgcttacattttgctg

SEQ ID NO: 616886 - DNA, 120 bp, Artificial Sequence
  ENSG00000177189_52 (sequence is synthesized)
gtctccccaagtgaccattggtggagaccaattaatgaaggaatgaaattcactttattgggactgtggtattcaacagagccacacttaaccactttttccaatgaagaatctccagaa

SEQ ID NO: 616887 - DNA, 120 bp, Artificial Sequence
  ENSG00000177189_53 (sequence is synthesized)
tgataatgcccaaatatggatggccaagaagaatttgtatctacggtgtgctttatgtgtttttgacactgctgtattctgtgtgatcaagtgatttgcagctggttccaatgtgactga

SEQ ID NO: 616888 - DNA, 120 bp, Artificial Sequence
  ENSG00000177189_54 (sequence is synthesized)
gtgttctcaaagatttctagtaactaagtcaacttaattttcttaagcctggtattactatcagcctcacatttaccactttgattctagttttttaactgttcataacagggcataccg

SEQ ID NO: 616889 - DNA, 120 bp, Artificial Sequence
  ENSG00000177189_55 (sequence is synthesized)
agggttgggatgagagcctacttcctacctcttaaggcactttcctcattattttgccatataatcttgaactgcatgataagctgtttaaatgtccatgacttctcccagagcaactag

SEQ ID NO: 616890 - DNA, 120 bp, Artificial Sequence
  ENSG00000177189_56 (sequence is synthesized)
caaagtatatgacattttgaatagagattagtggaaaggaaaatgtagagatttaagttcagaggtacaaacctcaataaaacctccttagagcacataccatgagtagagtatatgtaa

SEQ ID NO: 616891 - DNA, 120 bp, Artificial Sequence
  ENSG00000177189_57 (sequence is synthesized)
acgtatatgagaagagagtcgctataatagtcctctctaagtagattagttcattgtctaatggaagtgaacatctttactcctgttatcaccatagtactgaatgaactgtataatgag

SEQ ID NO: 616892 - DNA, 120 bp, Artificial Sequence
  ENSG00000177189_58 (sequence is synthesized)
tttttcaaacaagtatttaaaatagaactttcacgtacaaagcaagggcataaagattttggtttgtgtttctgtaagtgtagtttaccatctaaagctttggtttttaattttaaaaaa

SEQ ID NO: 616893 - DNA, 120 bp, Artificial Sequence
  ENSG00000177189_59 (sequence is synthesized)
agcttcaaggtattgccattccttagcatccttattgattatgggtgatgagtttttaactcttaaaatcatatacgtgtattagtttatcttaactgttgccctaagcaaaagggaagg

SEQ ID NO: 616894 - DNA, 120 bp, Artificial Sequence
  ENSG00000177189_60 (sequence is synthesized)
tatacacctaagggatgtacttattttgcatttttggtcatgggtgggaatggggtgggtgcctacttaaatagtttttaaaaaagaaaaaaatcacaaatatttttctactgttatata

SEQ ID NO: 616895 - DNA, 120 bp, Artificial Sequence
  ENSG00000177189_61 (sequence is synthesized)
tgatcttcctttatactagtttctctctagtaaggcatgccagaagcccaagataccatatcatgaattcttacatattgtaccttttgttggtggttaaatcgcatcagatgcttggca

SEQ ID NO: 616896 - DNA, 120 bp, Artificial Sequence
  ENSG00000177189_62 (sequence is synthesized)
ttgctgccataattataaaatgcttgtaaaggatcaaatatcactaaatactttaaattgttttacttaagagtctaatctgggaagttttcaaatcatactattaatgtgtaatctaag

SEQ ID NO: 616897 - DNA, 120 bp, Artificial Sequence
  ENSG00000177189_63 (sequence is synthesized)
ctcttcagatgtatccatgaataatcctggaacaatattgcttgtattcctgtcatagaacaggttttgtaatctttaaaagaaatgaaaatttatataataaagtttcaaatcaatgca

SEQ ID NO: 616898 - DNA, 120 bp, Artificial Sequence
  ENSG00000177189_64 (sequence is synthesized)
aggaaattttctaattgccggaacagctggtaggagaaaactttgcaggggcttggccttccctttctaacttaagttttaccgtcagaaattcttttatcaccatcatggtttcgtagc

SEQ ID NO: 616899 - DNA, 120 bp, Artificial Sequence
  ENSG00000177189_65 (sequence is synthesized)
gtggcagaagatggctgtggagagcccgtccgacagcgctgaggattatatctttatccttgaaatttaaaaacatttgccaggacatgtcttggtgttgatgatctctgttgaaccttc

SEQ ID NO: 616900 - DNA, 120 bp, Artificial Sequence
  ENSG00000177189_66 (sequence is synthesized)
gcccctgggtgcgcgcggcggtggtggcggcggccgagcctcgctttgagagacagaatggacagcaaattatggatgaacctatgggagaggaggagattaacccacaaactgttttct

SEQ ID NO: 616901 - DNA, 120 bp, Artificial Sequence
  ENSG00000177189_67 (sequence is synthesized)
agaaccagagttgccacgttataaaagacgtattataaattcatattgagttttatacaagtaaacatttagaagattaaaactgggtttgattcatcttcaaatttatatatttatttt

SEQ ID NO: 616902 - DNA, 120 bp, Artificial Sequence
  ENSG00000177189_68 (sequence is synthesized)
aatgtttttaaaaacgtactgatttactggctgcaaaatagcttttattctaaaggactttatgacttctggtctccaagtaagtttttattctgagcctatgatttgaaaaccctaatg

SEQ ID NO: 616903 - DNA, 74 bp, Artificial Sequence
  ENSG00000177189_69 (sequence is synthesized)
taagtttttattctgagcctatgatttgaaaaccctaatgcaggatttggctctcataggtaaaaagtagttaa

SEQ ID NO: 616904 - DNA, 120 bp, Artificial Sequence
  ENSG00000177189_70 (sequence is synthesized)
gaaccttctcagtctccagtctcagtataatgagtatgatgaatatcactgtacataagtctttatgcacatctctgatatttccttaggataaatgaggagctgattcttaatcctgtc

SEQ ID NO: 616905 - DNA, 120 bp, Artificial Sequence
  ENSG00000177189_71 (sequence is synthesized)
gagaccggcgcgcggggcacgggcggcggcgacctgtgggggtttcgggtagggggtgcagggttttgcctccccctcgtctgccgcagcggtttctgctgctgcaaagaagaaagcgga

SEQ ID NO: 616906 - DNA, 120 bp, Artificial Sequence
  ENSG00000177189_72 (sequence is synthesized)
agcctaaggtcccctaccccctccgtttctgaggtcgcagagctagacccccgtccctgattatatctttatccttgaaatttaaaaacatttgccaggacatgtcttggtgttgatgat

SEQ ID NO: 616907 - DNA, 120 bp, Artificial Sequence
  ENSG00000177189_73 (sequence is synthesized)
cttggctcgggactgcgcccccggtactttgcccacctccctccccagctgggcggggaccactgttctccctcattcccaaggagcctccgacctccttggacccttggcggtgaaagg

SEQ ID NO: 616908 - DNA, 120 bp, Artificial Sequence
  ENSG00000177189_74 (sequence is synthesized)
ctcccagccttcgcccctcctgcctttcccatttctttcccccgcctcccgccgacgcccccagatctgttgggctcgcccttcctgaaagtaggcgaggcccagaagctgaggttgggg

SEQ ID NO: 616909 - DNA, 120 bp, Artificial Sequence
  ENSG00000177189_75 (sequence is synthesized)
cgcagaaggaggggggtgggaagagggaggagcggagcgcagcggccgggggcgtgtcttccactagcccagcccctgggtgcgcgcggcggtggtggcggcggccgagcctcgctttga

SEQ ID NO: 616910 - DNA, 120 bp, Artificial Sequence
  ENSG00000177189_76 (sequence is synthesized)
aattcctgatggtggcgcgtctgtgattcttccttcttgactttttgctgccttctctccccgcagcggactttaggggattacaggatgataggctgcgtgtgtgtaatagttactgag

SEQ ID NO: 616911 - DNA, 120 bp, Artificial Sequence
  ENSG00000177189_77 (sequence is synthesized)
gaagagggagggtcttgggccattacgggatgcgcccagagactaggcgcgtccgcacgcacgcacccccggaggagacaagccgaaaagacactccgcacccctccccgggtccttggc

SEQ ID NO: 616912 - DNA, 120 bp, Artificial Sequence
  ENSG00000177191_0 (sequence is synthesized)
tcttcctccagctgttcccacaggctccattattcaaactttgggggaggaaatcagggctggacagatcatcaactgctgctgctgacagactgtgttcctgccatgatggggacaggc

SEQ ID NO: 616913 - DNA, 120 bp, Artificial Sequence
  ENSG00000177191_1 (sequence is synthesized)
ctgccccaaaccaggctgtctcaccagaaaccagccctaacacgccagagccccatctctcaggtcggcctcctgccctcctccctccctccctccctccctctctcctgcctcagcccc

SEQ ID NO: 616914 - DNA, 120 bp, Artificial Sequence
  ENSG00000177191_2 (sequence is synthesized)
cggcccctggggccctccctgctcccgctccactcccctccccgcccctctggactggctgggcagggctgggccccgccggtcgacaacacaggggctggggcaggcagatcagaggga

SEQ ID NO: 616915 - DNA, 120 bp, Artificial Sequence
  ENSG00000177191_3 (sequence is synthesized)
gggagctgagggaggcctgacctgaggccggcacccggagctggcgggagccagacccagagctcccgcggccgccccttccctgggccgggtcatgcgctgccccaagtgccttctctg

SEQ ID NO: 616916 - DNA, 120 bp, Artificial Sequence
  ENSG00000177191_4 (sequence is synthesized)
cctgtcagcactgctcacactcctgggcctcaaagtgtacatcgagtggacatccgagtcccggctcagcaaggcctaccccagccctcggggcaccccgccaagccccacgccagccaa

SEQ ID NO: 616917 - DNA, 120 bp, Artificial Sequence
  ENSG00000177191_5 (sequence is synthesized)
ccctgagcccaccctacctgccaacctctccacccgcctgggccagactatcccgctgccctttgcttactggaaccagcagcagtggcggctggggtccctgcccagtggggacagcac

SEQ ID NO: 616918 - DNA, 120 bp, Artificial Sequence
  ENSG00000177191_6 (sequence is synthesized)
tgaaacggggggctgccaggcttggggggccgccgccgccaccgagatccctgacttcgcctcctaccccaaggacctccgccgcttcttgctgtcagcagcctgccggagcttcccaca

SEQ ID NO: 616919 - DNA, 120 bp, Artificial Sequence
  ENSG00000177191_7 (sequence is synthesized)
tcaagtcagaaccagggcgctttgcagaacgacaggccgtgagagagacgtggggcagtccagctccagggatccggctgctcttcctgctagggtctccggtgggtgaggcggggcctg

SEQ ID NO: 616920 - DNA, 120 bp, Artificial Sequence
  ENSG00000177191_8 (sequence is synthesized)
acctagactcactagtggcctgggagagccgtcgctacagtgacctgctgctctgggacttcctcgacgtcccattcaaccagacgctcaaagacctgctgctgctggcctggctgggcc

SEQ ID NO: 616921 - DNA, 120 bp, Artificial Sequence
  ENSG00000177191_9 (sequence is synthesized)
gccactgccccaccgtgagttttgtcttgcgagctcaggacgatgcctttgtacacacccctgccctgctggctcacctgcgggccctgccacctgcctcggcccgaagcctctacctgg

SEQ ID NO: 616922 - DNA, 120 bp, Artificial Sequence
  ENSG00000177191_10 (sequence is synthesized)
gtgaggtctttacccaggccatgcctctccggaagccaggaggacccttctatgtgcccgagtccttcttcgaaggtggctacccagcctatgcaagcgggggtggctacgtcattgccg

SEQ ID NO: 616923 - DNA, 120 bp, Artificial Sequence
  ENSG00000177191_11 (sequence is synthesized)
ggcgcctggcaccctggctgctgcgggcggcagcccgtgtggcacccttcccctttgaggacgtctacactggcctttgcatccgagccctgggcctggtgccccaggcccacccaggct

SEQ ID NO: 616924 - DNA, 120 bp, Artificial Sequence
  ENSG00000177191_12 (sequence is synthesized)
tcctcacagcctggccagcagaccgcactgcggaccactgtgctttccgcaacctgctgctggtacggcccctgggcccccaggccagcattcggctctggaaacaactgcaagacccaa

SEQ ID NO: 616925 - DNA, 120 bp, Artificial Sequence
  ENSG00000177191_13 (sequence is synthesized)
ggctccagtgctgactctcattggggagggcggaggtgctgacctggcctgggcctctggggccggcccctggctcagcccctccttccaggtcttgatgggagggaggagggcccagaa

SEQ ID NO: 616926 - DNA, 120 bp, Artificial Sequence
  ENSG00000177191_14 (sequence is synthesized)
gctggacaacttaagccactccttggcctcccccagccaggggcctgggcaggaaagatggggtggtggactgtttttgcctactttttgtttttgaaaaacatgcactccccactctga

SEQ ID NO: 616927 - DNA, 120 bp, Artificial Sequence
  ENSG00000177191_15 (sequence is synthesized)
ggggcaggcagatcagagggagctgagggaggcctgacctgaggccggcacccggagctggcgggagccagacccagaggacctccgccgcttcttgctgtcagcagcctgccggagctt

SEQ ID NO: 616928 - DNA, 120 bp, Artificial Sequence
  ENSG00000177192_0 (sequence is synthesized)
agtcagccgcgtcgcgaatggggcaggagcgagcctctctggtcccgacgcgggtggcccgggtctcctcgactcctgaggaaagcccaccgggcggggcgggaggtgaagaggctgggg

SEQ ID NO: 616929 - DNA, 120 bp, Artificial Sequence
  ENSG00000177192_1 (sequence is synthesized)
aagtcagaggttaacctgggcgtcaggggacgttggagttgatccgtcagggtcccggggcggtctgggggcagtagagacggggcttgggcgcggggcctgagaggtcaggggtcagca

SEQ ID NO: 616930 - DNA, 120 bp, Artificial Sequence
  ENSG00000177192_2 (sequence is synthesized)
ggagtgaggctggggcgtccaggtccgagaggtcaggggtcagctggagaggggctggggcgccggtttcccggaggtcaggggtcagaaggaacagggctgcagcgtcagggtccgaga

SEQ ID NO: 616931 - DNA, 120 bp, Artificial Sequence
  ENSG00000177192_3 (sequence is synthesized)
ggttaggggtcggcagaggcggagctggggcactgggggtcaggggtcggggatcagggcggggtcgggtgcactggtagcctgcgcatgggcctccagcttcgcgcgctgttgggagcc

SEQ ID NO: 616932 - DNA, 120 bp, Artificial Sequence
  ENSG00000177192_4 (sequence is synthesized)
agccttcggacggtggaccctgcgcctgggaccgcgtccgtcctgctcgccgcgcatggccgggaacgcggagccgccgcccgccggagccgcatgcccccaggaccggaggtcctgcag

SEQ ID NO: 616933 - DNA, 120 bp, Artificial Sequence
  ENSG00000177192_5 (sequence is synthesized)
cgggccgggggcgaccgcgtctgggaggacggagaacatccggcgaagaagctcaagagcggtggcgacgaggagcggcgcgagaagccgcccaagcggaagatcgtgctgctcatggcc

SEQ ID NO: 616934 - DNA, 120 bp, Artificial Sequence
  ENSG00000177192_6 (sequence is synthesized)
tattcgggcaagggctaccacggcatgcagaggaatgtcgggtcctcacaattcaaaacaattgaagatgacttggtgtccgccctcgtccggtcaggctgtattcctgaaaatcatggt

SEQ ID NO: 616935 - DNA, 120 bp, Artificial Sequence
  ENSG00000177192_7 (sequence is synthesized)
gaggacatgaggaaaatgtccttccagcgctgcgcccggacagacaagggtgtgtccgcagccggccaggtggtatccctgaaggtgtggctgattgacgacattctagaaaagatcaac

SEQ ID NO: 616936 - DNA, 120 bp, Artificial Sequence
  ENSG00000177192_8 (sequence is synthesized)
agccaccttccctctcacattcggattctgggactgaagcgggtcacgggcgggtttaactccaagaacagatgtgatgccaggacctattgctacctgctgcccacgtttgcctttgcg

SEQ ID NO: 616937 - DNA, 120 bp, Artificial Sequence
  ENSG00000177192_9 (sequence is synthesized)
cacaaggaccgggacgttcaggatgagacctaccgcctgagcgccgagacgctgcagcaggtcaacaggctcctggcctgctacaagggcacgcacaacttccacaatttcacctcgcag

SEQ ID NO: 616938 - DNA, 120 bp, Artificial Sequence
  ENSG00000177192_10 (sequence is synthesized)
aaggggccgcaggatcccagtgcctgccgctacatcctggagatgtactgcgaggaaccctttgtgcgggagggcctggagtttgcggtgatcagggtgaagggccagagcttcatgatg

SEQ ID NO: 616939 - DNA, 120 bp, Artificial Sequence
  ENSG00000177192_11 (sequence is synthesized)
catcagatccggaagatggtcggcctggtggtggccattgtgaagggttatgcccctgagagcgtgctggagcgcagctggggcacagagaaggtggacgtgcccaaggcgcccggactc

SEQ ID NO: 616940 - DNA, 120 bp, Artificial Sequence
  ENSG00000177192_12 (sequence is synthesized)
ggcctggtcctggagagggtgcacttcgagaagtacaaccagcgctttggcaacgatgggctgcatgagccgctggactgggcgcaggaggaaggaaaggtcgcagccttcaaggaggag

SEQ ID NO: 616941 - DNA, 120 bp, Artificial Sequence
  ENSG00000177192_13 (sequence is synthesized)
cacatctaccccaccatcatcggcaccgagcgggacgaacgctccatggcccagtggctgagcaccttgcccatccacaacttcagtgccaccgctctcacggcaggtggcacgggcgcc

SEQ ID NO: 616942 - DNA, 120 bp, Artificial Sequence
  ENSG00000177192_14 (sequence is synthesized)
aaggtgcccagtcccctggaaggcagtgaaggggacggagacactgactgaggcgatgggagctgcccaccagagtgcctctgagcagctcacagtgtgtgcccagatgtgccacccctg

SEQ ID NO: 616943 - DNA, 120 bp, Artificial Sequence
  ENSG00000177192_15 (sequence is synthesized)
tgggcagcaagaagctgggatcgctgcagccatgttttcccggccatgccggcgttgtaacctcaggaccttcccttgtaggaacagcctttctcgaatctgttttcagctcttgcattg

SEQ ID NO: 616944 - DNA, 120 bp, Artificial Sequence
  ENSG00000177192_16 (sequence is synthesized)
caatccttggtttgcctttttcttagtcttttttaacatttttttcgtccacagagatgagcacagcatggtgtcccgttgagaacagatacggctgaacaaaagagaaaggcccaggag

SEQ ID NO: 616945 - DNA, 120 bp, Artificial Sequence
  ENSG00000177192_17 (sequence is synthesized)
gggaggctgaggtgggcagatcgcttgagtacaggagttccagaccagcctgggtaaaatggtgaaaccgcgtctctgcaaaagattagctgggcatggcggcatgccctgtagttcagc

SEQ ID NO: 616946 - DNA, 88 bp, Artificial Sequence
  ENSG00000177192_18 (sequence is synthesized)
aggctgaggtgggaggattgcctgagtctggagaagtcgaggctgccctgattgccactgcactcctggccaggcgtggtggctcatg

SEQ ID NO: 616947 - DNA, 120 bp, Artificial Sequence
  ENSG00000177192_19 (sequence is synthesized)
cactgcactccagcctgggtgagagagccaaactccgtcaaaaaaaaaacaacaaaaaaacccagcatcctgcactctgcagggtggtcccgaggcagggctgtggagggcactgaagca

SEQ ID NO: 616948 - DNA, 120 bp, Artificial Sequence
  ENSG00000177192_20 (sequence is synthesized)
ggagggcactgaagcaggggccccgctgacctgccgcatccccgagaggggtggcagccacgggctcctcttcctagacagccccatgcgtgcagcctttgccctggttgcaggtcggta

SEQ ID NO: 616949 - DNA, 120 bp, Artificial Sequence
  ENSG00000177192_21 (sequence is synthesized)
ctcgcctcagcactgtcccggtgccaggcaggtgggggttggggcagagggcagaaggaaagggtgcatcgcggaacaggcccttagtggagcttactggaagaccccaccagccgctgc

SEQ ID NO: 616950 - DNA, 120 bp, Artificial Sequence
  ENSG00000177192_22 (sequence is synthesized)
tgcacgtcattggtcacaggtgcatccagcggcccttcgtagctgcaagggaggctggggaagactgcttttgaagtggcgcttagcgtggaacaaaacacactgcgttagccaggagca

SEQ ID NO: 616951 - DNA, 120 bp, Artificial Sequence
  ENSG00000177192_23 (sequence is synthesized)
ggggatccttggctggcgggctgccaggagcccagggaggggctcagcggaggaagtgccgtgcatacacgtggcctcccagcctgcagcccgtgggcgcacgtgaccaatgcacgagtg

SEQ ID NO: 616952 - DNA, 120 bp, Artificial Sequence
  ENSG00000177192_24 (sequence is synthesized)
cctgatgccccagcggtgcacacaactaatgcgcatgcgcctgacgtgccaacaatgcatgtgactaatgcgcagtcgcctgtcgccccagcagtgcgtgagtgacatgtgcacgtgccc

SEQ ID NO: 616953 - DNA, 120 bp, Artificial Sequence
  ENSG00000177192_25 (sequence is synthesized)
atgatgcggtggacaccgtgtgtgagaagtggggcaggacaggtgggattgggagatgcttcaggcagtgagctcctagggcgtggggtgcccaagagagtggagctggttttagggatt

SEQ ID NO: 616954 - DNA, 120 bp, Artificial Sequence
  ENSG00000177192_26 (sequence is synthesized)
ttggccagaggagcagtggggctcactgcttcgggagccagggagtgcaggtgtgaggcccactgggctttgggtttgagggatggatgagctgggccgttaactggaacgggagacagg

SEQ ID NO: 616955 - DNA, 120 bp, Artificial Sequence
  ENSG00000177192_27 (sequence is synthesized)
gaaaggaatgggtttggagaacaagcaggagcttggttctaagcatgttaattttacctgggatagacaggactttattttttatttttattttgtttgagacggagtctcgctgtgttg

SEQ ID NO: 616956 - DNA, 120 bp, Artificial Sequence
  ENSG00000177192_28 (sequence is synthesized)
gtggcgcgatctcggctcactgcaacctgcgcctcccgggctcaagcgattctccttcctcagcctccagagtagctgagagtacaggtgcccgctgccacgcccggctgatttttgtat

SEQ ID NO: 616957 - DNA, 120 bp, Artificial Sequence
  ENSG00000177192_29 (sequence is synthesized)
gtgagccaccgtgcccggcctgggtgacccatttaaatcacttttgatgatcctggggtatgtgacattttaaaataatatgtatatatggaaggaaataaaaaactataaaaaagggaa

SEQ ID NO: 616958 - DNA, 120 bp, Artificial Sequence
  ENSG00000177192_30 (sequence is synthesized)
agttttgtccgcgctcggccgccgtgcagtcggtcgttccacttccgccttcgcccacgtggtccggctccggctcagtcagccgcgtcgcgaatggggcaggagcgagcctctctggtc

SEQ ID NO: 616959 - DNA, 83 bp, Artificial Sequence
  ENSG00000177192_31 (sequence is synthesized)
cggggcttgggcgcggggcctgagaggtcaggggtcacctcctgagtcactgggattaaaagcatacctatcctctgtcacct

SEQ ID NO: 616960 - DNA, 84 bp, Artificial Sequence
  ENSG00000177192_32 (sequence is synthesized)
gattactttatagtcaatgttttttttttaaagtataggtagcacccacggcactgattttgtaactgacagattgtggaagta

SEQ ID NO: 616961 - DNA, 120 bp, Artificial Sequence
  ENSG00000177192_33 (sequence is synthesized)
cccacggcactgattttgtaactgacagattgtggaagtaggtgtatgcacaggttcaatcaaacctgtgttttgattccattccacactacccaccccctagcatggagcagcccggcc

SEQ ID NO: 616962 - DNA, 120 bp, Artificial Sequence
  ENSG00000177192_34 (sequence is synthesized)
ccagggtgagtgagcagaaaacagtgttttcacatgagcgtggcagctcacacttgtaatctcagcacttcaggaggccagaggagtaagcggccaggagttcgagaccagcctgggcaa

SEQ ID NO: 616963 - DNA, 120 bp, Artificial Sequence
  ENSG00000177192_35 (sequence is synthesized)
gtgatatttccagtcatgtataaagatcaaatagggcaattagcataatatatccatcactccaagcatgtatcatttctttgtgttggagacattccgtatcttctcactattggaaaa

SEQ ID NO: 616964 - DNA, 120 bp, Artificial Sequence
  ENSG00000177192_36 (sequence is synthesized)
ttacaataaatggttgtaaattcagtcaccttatagagcactgcacctgtccctcctgtccatcgtcctcctgtgcctgttccccagcctgtggctgccccctccccagagaagccgatg

SEQ ID NO: 616965 - DNA, 120 bp, Artificial Sequence
  ENSG00000177192_37 (sequence is synthesized)
cttgctggagcttggtcggtgctctgggtaaggagacgctggggctcacgccgtgctcaggctgctccctggtcatccaggcacttctcacctgcctttctcctccctgaccacctcccc

SEQ ID NO: 616966 - DNA, 120 bp, Artificial Sequence
  ENSG00000177192_38 (sequence is synthesized)
agcctctctggtcccgacgcgggtggcccgggtctcctcgactcctgaggaaagcccaccgggcggggcgggaggtgaagaggctggggaagtcagagctcgccgcgcatggccgggaac

SEQ ID NO: 616967 - DNA, 79 bp, Artificial Sequence
  ENSG00000177192_39 (sequence is synthesized)
tgatcatggctcactgcagtctcaaactgactgaagcgggtcacgggcgggtttaactccaagaacagatgtgatgcca

SEQ ID NO: 616968 - DNA, 120 bp, Artificial Sequence
  ENSG00000177192_40 (sequence is synthesized)
tggccttctctgcccctcccccgctgctatgagcagcacgtggcccactttccagctcagtgttctggcttgttatgctgtttctgagcacataatgatgtacaaatcaaactagcctac

SEQ ID NO: 616969 - DNA, 120 bp, Artificial Sequence
  ENSG00000177192_41 (sequence is synthesized)
gccttatgtaggtgagacgtccaggagcctggtcggctcaggtatagctggatctagatgctccctgccagtgggactctgtgttctctctggtctttgctttctcttgtgttgattctg

SEQ ID NO: 616970 - DNA, 120 bp, Artificial Sequence
  ENSG00000177192_42 (sequence is synthesized)
ttctcagggacacacattcttgcaggtggcacagtggcggccgcaatgtctgctttcgaccctccaatcaggctcactctgaggcagatgtaattgtgtggctgcaaaggcagagagcca

SEQ ID NO: 616971 - DNA, 120 bp, Artificial Sequence
  ENSG00000177192_43 (sequence is synthesized)
ccgcgtcgcgaatggggcaggagcgagcctctctggtcccgacgcgggtggcccgggtctcctcgactcctgaggaaagcccaccgggcggggcgggagcttcgcgcgctgttgggagcc

SEQ ID NO: 616972 - DNA, 120 bp, Artificial Sequence
  ENSG00000177192_44 (sequence is synthesized)
cttcggacggtggaccctgcgcctgggaccgcgtccgtcctggtaatgaccgcgacgccgggcgaccccgctatgcccgcccagcccagcccaccccagtccaccccgcgcggtgccgag

SEQ ID NO: 616973 - DNA, 120 bp, Artificial Sequence
  ENSG00000177200_0 (sequence is synthesized)
gctggtggggtcgcgctgggggagtgaactgggccaatcaggcgggtgcgtggcggcgcgggggaggcggtgccccttcactcctccctccactccctccctgccccgcgctgacagggg

SEQ ID NO: 616974 - DNA, 120 bp, Artificial Sequence
  ENSG00000177200_1 (sequence is synthesized)
ggcctggccgcgcagccggattttgacacttcatgacatgtcattatttagagcaataatgaatattgacctgttttggattagttgatgaccttcggaaatgatccaataatatctact

SEQ ID NO: 616975 - DNA, 120 bp, Artificial Sequence
  ENSG00000177200_2 (sequence is synthesized)
atagagaagctgaatatactccatttggagtgaacagcccggattgttacagaattttcaagatgacagatccaatgatggacttttttgatgatgccaatctttttggtgagaccttag

SEQ ID NO: 616976 - DNA, 120 bp, Artificial Sequence
  ENSG00000177200_3 (sequence is synthesized)
aaggtttgtcagatgatgcatttgtacaaccaggacctgtttcactagttgatgaattgaatttgggtgcagaatttgaaccgttgcacatagattcactgaaccatgttcaaggtactc

SEQ ID NO: 616977 - DNA, 120 bp, Artificial Sequence
  ENSG00000177200_4 (sequence is synthesized)
caacacatcagaagatgactgattttgaacagttaaatcaatttgattcaataaaatttcaccatgttaatcaatcttttggtagcccagctgaacatgtgttatctccacactctcagt

SEQ ID NO: 616978 - DNA, 120 bp, Artificial Sequence
  ENSG00000177200_5 (sequence is synthesized)
ttaattgttctccaatccatccccaaaaccaacccaatggtttgtttccagatgtatcagatggcagtccaatgtggggccatcagacagctactaccatttcaaatcaaaatggatctc

SEQ ID NO: 616979 - DNA, 120 bp, Artificial Sequence
  ENSG00000177200_6 (sequence is synthesized)
cttttcaccaacaaggacattcacactctatgcatcaaaataaaagctttgtggcacaccatgactttgccttatttcaggccaatgaacaacaaacacagtgtacttcactacgctcac

SEQ ID NO: 616980 - DNA, 120 bp, Artificial Sequence
  ENSG00000177200_7 (sequence is synthesized)
aacaaaacagaaataatctcaacccagggcagaattctcttagccagtctaaaaattttatgaatgtttctggtccacatagagtcaatgttaaccacccaccacagatgactaatgcat

SEQ ID NO: 616981 - DNA, 120 bp, Artificial Sequence
  ENSG00000177200_8 (sequence is synthesized)
ctaattcacaacagtctatttcaatgcagcaattttctcaaacgtcaaatccttcagcacacttccacaagtgtagcagtcatcaagaaggaaattttaatggaccttccccaaatatga

SEQ ID NO: 616982 - DNA, 120 bp, Artificial Sequence
  ENSG00000177200_9 (sequence is synthesized)
cttcttgttctgtcagtaattcacagcaattttcttcacattattccttttccagtaatcatatatcaccaaacagtctacttcagtcctctgcagttcttgcatctaatcatacaaatc

SEQ ID NO: 616983 - DNA, 120 bp, Artificial Sequence
  ENSG00000177200_10 (sequence is synthesized)
agactttatctgattttactggaagtaattccttttcacctcatagaggaatcaagcaagaatctactcagcatatcctaaaccccaatacatcattgaattcaaataatttccaaatat

SEQ ID NO: 616984 - DNA, 120 bp, Artificial Sequence
  ENSG00000177200_11 (sequence is synthesized)
tgcattcatcacatcctcagggtaattatagcaattcaaaattatctcctgtgcacatgaacttcccagatcctgttgactcaggaactcaaatgggccatttcaatgatcatgtagaaa

SEQ ID NO: 616985 - DNA, 120 bp, Artificial Sequence
  ENSG00000177200_12 (sequence is synthesized)
ctaatggcttttcatctttagaagagaatttacttcatcaagtggaatctcaaactgagccattcacaggacttgaccccgaggacctccttcaggagggtcttcttcctcactttgatg

SEQ ID NO: 616986 - DNA, 120 bp, Artificial Sequence
  ENSG00000177200_13 (sequence is synthesized)
agtcaacattcggacaagataattcaagtcacattttagatcatgaccttgatcggcagtttacttcgcatctggtaacacggccttctgatatggctcagactcagttgcaaagtcagg

SEQ ID NO: 616987 - DNA, 120 bp, Artificial Sequence
  ENSG00000177200_14 (sequence is synthesized)
ctcggagttggcattcatcattttctaatcatcagcatttacatgacagaaatcacctatgtttacagcgacagcctccatcttccaagaagagcgatggttctgggacatatactaagt

SEQ ID NO: 616988 - DNA, 120 bp, Artificial Sequence
  ENSG00000177200_15 (sequence is synthesized)
tgcagaatacccaggtgagggtcatgtctgagaagaagcagagaaaaaaggtggaatcagaaagcaagcaagaaaaggctaatcgtataatatcagaggccatagcaaaagcaaaggagc

SEQ ID NO: 616989 - DNA, 120 bp, Artificial Sequence
  ENSG00000177200_16 (sequence is synthesized)
gtggggaacgcaatattccacgagtaatgagccctgaaaactttcctactgcttcagttgaaggaaaagaggaaaagaaaggtagaaggatgaaatccaagccaaaggacaaagacagca

SEQ ID NO: 616990 - DNA, 120 bp, Artificial Sequence
  ENSG00000177200_17 (sequence is synthesized)
aaaaaacaaaaacatgttctaagttaaaagagaagacaaaaattggcaaactcattattacattgggtaagaaacaaaaaagaaagaatgagtcttcagatgaaatatctgatgcagaac

SEQ ID NO: 616991 - DNA, 120 bp, Artificial Sequence
  ENSG00000177200_18 (sequence is synthesized)
agatgccacagcatacattaaaagatcaagactctcaaaaaagaagatcaaatcgacaaattaaaagaaaaaaatacgcagaagatatagaagggaagcaatctgaagaagaggttaaag

SEQ ID NO: 616992 - DNA, 120 bp, Artificial Sequence
  ENSG00000177200_19 (sequence is synthesized)
gttctatgaaaataaaaaagaattcagctcctttacctggtgaacagcctttacaattgtttgtggagaatccgagtgaagaagatgctgcaattgtagacaaaattctatcttctagaa

SEQ ID NO: 616993 - DNA, 120 bp, Artificial Sequence
  ENSG00000177200_20 (sequence is synthesized)
ccgtaaaaaaggaaatatcacctggagtgatgattgatacagaagaattttttgtaaaatacaagaattactcctatcttcactgtgagtgggccacagaagagcagcttttgaaagata

SEQ ID NO: 616994 - DNA, 120 bp, Artificial Sequence
  ENSG00000177200_21 (sequence is synthesized)
aaaggatccagcagaaaatcaaacgattcaaattgagacaagcacaaagagcacatttttttgcagacatggaagaagaaccatttaacccagactacgttgaagtagacagagtattag

SEQ ID NO: 616995 - DNA, 120 bp, Artificial Sequence
  ENSG00000177200_22 (sequence is synthesized)
aagtctctttttgtgaagataaggatactggtgagcctgttatttactacttagtaaaatggtgctcattgccatatgaagatagtacttgggaactaaaagaagatgtagatcttgcaa

SEQ ID NO: 616996 - DNA, 120 bp, Artificial Sequence
  ENSG00000177200_23 (sequence is synthesized)
aaatagaagagtttgaacaactgcaagcttcaaggcctgacacaagacgtttggaccgtcctccttctaatatttggaagaaaatagatcaatccagggactataaaaatggcaatcaac

SEQ ID NO: 616997 - DNA, 120 bp, Artificial Sequence
  ENSG00000177200_24 (sequence is synthesized)
tcagggaatatcaactggaaggactcaactggctcttgttcaattggtacaatagacgaaactgcatcttagcagatgaaatgggtcttggcaaaactattcaatcaattacattcctct

SEQ ID NO: 616998 - DNA, 120 bp, Artificial Sequence
  ENSG00000177200_25 (sequence is synthesized)
atgaaatccttctgactggtataagaggacctttcctgattattgctccactttctactattgcaaactgggagagagaatttcgtacgtggactgatattaacgttgtggtttatcatg

SEQ ID NO: 616999 - DNA, 120 bp, Artificial Sequence
  ENSG00000177200_26 (sequence is synthesized)
ggagcctgattagcagacaaatgatacagcaatacgagatgtacttcagggattcacaggggcgtatcattcgaggagcttacagattccaagccatcatcaccacttttgaaatgattc

SEQ ID NO: 617000 - DNA, 120 bp, Artificial Sequence
  ENSG00000177200_27 (sequence is synthesized)
ttggaggctgtggagagcttaatgcaattgaatggcgatgtgtgattattgatgaagcacataggttaaaaaataaaaattgtaaactcttagagggcctgaaactcatgaatctggaac

SEQ ID NO: 617001 - DNA, 120 bp, Artificial Sequence
  ENSG00000177200_28 (sequence is synthesized)
acaaggtgcttttgactggcacccctctccaaaatacagttgaagaactatttagtcttcttcactttcttgaacccttaaggtttccttctgaatcaacatttatgcaagaatttgggg

SEQ ID NO: 617002 - DNA, 120 bp, Artificial Sequence
  ENSG00000177200_29 (sequence is synthesized)
atctgaaaacagaggaacaggtacagaaacttcaggctatcctgaaaccaatgatgttgagacgattaaaagaagatgtggaaaagaagttggcacctaaagaagaaaccatcattgaag

SEQ ID NO: 617003 - DNA, 120 bp, Artificial Sequence
  ENSG00000177200_30 (sequence is synthesized)
tagaacttactaatattcaaaagaaatactaccgggctatcttggaaaagaacttttcttttttatccaaaggagcaggacaaactaatgtacctaacttggtcaataccatgatggagc

SEQ ID NO: 617004 - DNA, 120 bp, Artificial Sequence
  ENSG00000177200_31 (sequence is synthesized)
tcaggaaatgttgtaatcatccatatcttataaaaggtgctgaggagaaaatacttggagaatttagagatacttacaatccagctgcttctgattttcatcttcaagcaatgatccagt

SEQ ID NO: 617005 - DNA, 120 bp, Artificial Sequence
  ENSG00000177200_32 (sequence is synthesized)
ctgctggtaaattggtccttattgataaattgcttcccaaaatgaaagccggaggtcataaagtgctcatcttctctcaaatggttcgttgccttgacattctggaggactatctcatac

SEQ ID NO: 617006 - DNA, 120 bp, Artificial Sequence
  ENSG00000177200_33 (sequence is synthesized)
ataaaagatacttatatgagcgaattgatggcagagtcagaggaaatcttcggcaagctgctatagatagatttagtaaacctgattcagatagatttgtttttctcctgtgtacccgag

SEQ ID NO: 617007 - DNA, 120 bp, Artificial Sequence
  ENSG00000177200_34 (sequence is synthesized)
ctggtgggttgggcatcaacttaactgcagctgatacatgtataatttttgattctgattggaatcctcagaatgatcttcaggcccaagctcgttgccacagaattggtcagaacaaag

SEQ ID NO: 617008 - DNA, 120 bp, Artificial Sequence
  ENSG00000177200_35 (sequence is synthesized)
cagttaaagtctacagactggtaactcgtaactcatatgagagagagatgtttgaccgagccagtttgaaactgggcctagataaagctgtgttacagagcatgagtggaagagaaagta

SEQ ID NO: 617009 - DNA, 120 bp, Artificial Sequence
  ENSG00000177200_36 (sequence is synthesized)
atgttggtggtattcagcagctttccaaaaaggaaatagaagatctgcttcgaagaggtgcttatggtgctattatggaggaagaagatgaaggctctaaattctgcgaagaggatatcg

SEQ ID NO: 617010 - DNA, 120 bp, Artificial Sequence
  ENSG00000177200_37 (sequence is synthesized)
atcagattttactacgtcgtacaaaaactattacaattgaatcagaaggacgtgggtcaacatttgccaaggcgagttttgtggcatctggaaaccggacagatatttctttagatgatc

SEQ ID NO: 617011 - DNA, 120 bp, Artificial Sequence
  ENSG00000177200_38 (sequence is synthesized)
ccaacttctggcaaaaatgggctaaaaaggcagaaatagatatagaggccatcagtggcagaaacagcttggttattgacactccaagaattaggaagcaaacaagaccttttagtgcca

SEQ ID NO: 617012 - DNA, 120 bp, Artificial Sequence
  ENSG00000177200_39 (sequence is synthesized)
caaaagatgaattggctgaattatctgaagctgaaagtgaaggagatgaaaagcccaaactccggagaccctgtgaccgttccaatggctatggaagaactgaatgctttagagttgaga

SEQ ID NO: 617013 - DNA, 120 bp, Artificial Sequence
  ENSG00000177200_40 (sequence is synthesized)
aaaacctgctagtttatgggtggggccgatggagagagattctatctcatggccgtttcaaaaggcagctaaatgaacacgatgtagagataatttgccgagctctcttagcatattgcc

SEQ ID NO: 617014 - DNA, 120 bp, Artificial Sequence
  ENSG00000177200_41 (sequence is synthesized)
ttgttcactaccgaggagatgagaagattaaaggtttcatatgggatctcattactccaactgaagatggacagacacgagagctacagaatcatctaggcctatcagctcctgtaccca

SEQ ID NO: 617015 - DNA, 120 bp, Artificial Sequence
  ENSG00000177200_42 (sequence is synthesized)
ggggtcgaaaagggaagaaagtaaaaactcaaacaagctcatttgatatacaaaaagcagaatggcttcgaaaatataatcccgagcagctccttcaagatgaaggctacaaaaaacata

SEQ ID NO: 617016 - DNA, 120 bp, Artificial Sequence
  ENSG00000177200_43 (sequence is synthesized)
taaaacaccactgtaataaggttttgcttcgtgtgagaatgctgtattatctaaagcaagaagttattggaaatgagtgtcagaaagtatttgatggagttgatgcaagtgacattgatg

SEQ ID NO: 617017 - DNA, 120 bp, Artificial Sequence
  ENSG00000177200_44 (sequence is synthesized)
tttgggtaccagaaccagaccactcagaagttcctgctgagtggtgggattttgatgctgataagtcactccttattggagtttttaaacatggatatgaaaaatataacactattcgag

SEQ ID NO: 617018 - DNA, 120 bp, Artificial Sequence
  ENSG00000177200_45 (sequence is synthesized)
cagacccagcattatgcttcttggaaagagtgggaaaacctgatgagaaagcagttgctgctgaacagagagcgaatgattatatggatggggatgtggaagatccagaatacaaacctg

SEQ ID NO: 617019 - DNA, 120 bp, Artificial Sequence
  ENSG00000177200_46 (sequence is synthesized)
ccccagccatctttaaagatgatatagaggatgatgtttcctcaccaggagatcttgttatagcagatggagatggtcaactgatggagggtgataaagtatattggcctactcaatcag

SEQ ID NO: 617020 - DNA, 120 bp, Artificial Sequence
  ENSG00000177200_47 (sequence is synthesized)
atgcagcctatttatgaggaagccactcttaatcctaaaatggcagccaagatagaaagacagcaaagatggacaagaagagaagaagctgacttttatagggttgtatctacatttgga

SEQ ID NO: 617021 - DNA, 120 bp, Artificial Sequence
  ENSG00000177200_48 (sequence is synthesized)
gtggtttttgaccctgacagaggccaatttgattggacaaaatttagagctatggctaggctacataagaaaactgatgatagtttggaaaaatatttgtacgcattcatgtccatgtgt

SEQ ID NO: 617022 - DNA, 120 bp, Artificial Sequence
  ENSG00000177200_49 (sequence is synthesized)
cggagggtttgtcgtcttccttccaaagaagaattggtggatccaaatatttttatccagcccatcacagaagaacgtgcttctaggactttgtatcgcattgaacttctaaggaaagta

SEQ ID NO: 617023 - DNA, 120 bp, Artificial Sequence
  ENSG00000177200_50 (sequence is synthesized)
cgggaacaggcccttcgacatccacagttgtttgaacgcttgaagctttgccatccaaatccagatttaccagtctggtgggaatgtggccctcatgatagggatttgcttattggtgct

SEQ ID NO: 617024 - DNA, 120 bp, Artificial Sequence
  ENSG00000177200_51 (sequence is synthesized)
gccaaacacggggtgagccgaacagactatcacattcttcgtgatcctgaactctcatttatggcagctcagaggaactacagtcaaagtaagatggctcattcaaggacttctacccca

SEQ ID NO: 617025 - DNA, 120 bp, Artificial Sequence
  ENSG00000177200_52 (sequence is synthesized)
cttctacagcaatatcaagtagcactttctgcttctcctcttacctctctacctaggctcctagatgctaaaggtattattctagaggagatgaaagttaaaagtgaaaaccttaaagag

SEQ ID NO: 617026 - DNA, 120 bp, Artificial Sequence
  ENSG00000177200_53 (sequence is synthesized)
gagcctcagtcttctgaagaagaatctatgtcttctgtggaaaccaggacactaataaaatctgagcctgtaagtccaaagaatggtgttttaccacaggctactggagaccagaaatct

SEQ ID NO: 617027 - DNA, 120 bp, Artificial Sequence
  ENSG00000177200_54 (sequence is synthesized)
ggtggaaaatgtgaaacagacagacgcatggttgcagccagaacagaacccctaactccaaacccagcttctaagaaaccaagagtccacaaaaggggatcagaatctagttctgattct

SEQ ID NO: 617028 - DNA, 120 bp, Artificial Sequence
  ENSG00000177200_55 (sequence is synthesized)
gactcagattctgagagatcatcttgttcttccagatcatcttcttcctcatcatcctcttcttgctcccactctcgatcaggctctagttcttcttcatcttcatcttgttcttcagca

SEQ ID NO: 617029 - DNA, 120 bp, Artificial Sequence
  ENSG00000177200_56 (sequence is synthesized)
tcttcttcatcctcttcctccacctcttcctcctcctcctcctcttcatcttcatcagaagaaagtgacagtgatgaagaagaagcccaaaaacgagaaagtactactcacatgaaagcc

SEQ ID NO: 617030 - DNA, 120 bp, Artificial Sequence
  ENSG00000177200_57 (sequence is synthesized)
tatgatgaagaaagcgtcgcgtcactgagcactacccaggatgagactcaggatagttttcagatgaacaatgggacaccagagtctgcttatatcttacaaggtggatatatgctggca

SEQ ID NO: 617031 - DNA, 120 bp, Artificial Sequence
  ENSG00000177200_58 (sequence is synthesized)
gcctcgtattggccaaaggatcgtgtgatgatcaataggttggacagtatttgtcaaacagttctgaaaggaaagtggccttcagctagaagaagttatgatgctaacacagtggcttct

SEQ ID NO: 617032 - DNA, 120 bp, Artificial Sequence
  ENSG00000177200_59 (sequence is synthesized)
ttctataccacaaaactgctggacagccctggagcagctacagaatacagcgatcccagtgtacccactcccccaggtgccggtgttaaagaagaacatgatcagtcaacacagatgtca

SEQ ID NO: 617033 - DNA, 120 bp, Artificial Sequence
  ENSG00000177200_60 (sequence is synthesized)
aaggaaggtggtttgaagttgacatttcagaagcaagggcttgctcagaaaagaccatttgatggtgaagacggtgctctggggcagcagcagtacctcactcggcttcgagagcttcaa

SEQ ID NO: 617034 - DNA, 120 bp, Artificial Sequence
  ENSG00000177200_61 (sequence is synthesized)
agtgcatcagagaccagcctcgtcaatttcccaaaatccataccagtatcaggtacttccattcaaccaacccttggtgccaatggtgtgatattagacaaccagcctatagtcaaaaaa

SEQ ID NO: 617035 - DNA, 120 bp, Artificial Sequence
  ENSG00000177200_62 (sequence is synthesized)
aggcgaggaaggaggaagaatgtagaaggtgttgacatcttcttttttaacagaaataaaccacctaatcatgtttctttaggcttaacctcctcacagatttccacagggataaatcca

SEQ ID NO: 617036 - DNA, 120 bp, Artificial Sequence
  ENSG00000177200_63 (sequence is synthesized)
gcactatcctatactcaacctcaaggaattcctgatacagaaagtccagttccagttattaatcttaaagatggaacgagacttgcaggagatgatgcaccaaagagaaaggatttggaa

SEQ ID NO: 617037 - DNA, 120 bp, Artificial Sequence
  ENSG00000177200_64 (sequence is synthesized)
aaatggcttaaggagcacccgggttatgtggaagatttgggagcttttattcctagaatgcagcttcatgagggaagacccaaacaaaaaagacaccgttgcagaaaccccaataaacta

SEQ ID NO: 617038 - DNA, 120 bp, Artificial Sequence
  ENSG00000177200_65 (sequence is synthesized)
gatgtgaatagtctcactggagaagaacgtgttcaactgattaacagaagaaatgctagaaaggttggaggtgcatttgctccccctttgaaagatttatgtagattcctaaaagaaaat

SEQ ID NO: 617039 - DNA, 120 bp, Artificial Sequence
  ENSG00000177200_66 (sequence is synthesized)
tcagaatatggagtagctcctgaatggggagatgttgttaagcaatctggatttcttccagaaagcatgtatgaacgtattctcactggtcccgttgtgagagaggaagtaagcaggcgg

SEQ ID NO: 617040 - DNA, 120 bp, Artificial Sequence
  ENSG00000177200_67 (sequence is synthesized)
gggagacggcctaaaagtggaattgcaaaggccacagcagcagcagctgctgcatctgccaccagtgtttcaggcaatcctttgttagccaatggactacttccaggtgtggatctcaca

SEQ ID NO: 617041 - DNA, 120 bp, Artificial Sequence
  ENSG00000177200_68 (sequence is synthesized)
actcttcaggccttacaacaaaacctacaaaacttgcagtcactgcaagtaactgctgggttgatgggaatgcctaccggccttccttctggaggagaagctaaaaacatggctgctatg

SEQ ID NO: 617042 - DNA, 120 bp, Artificial Sequence
  ENSG00000177200_69 (sequence is synthesized)
ttccccatgctgctgtcaggaatggctggattaccaaatctgttgggcatgggaggactcctgacaaagcctacggaatctgggacagaagacaaaaagggaagtgactctaaggagtca

SEQ ID NO: 617043 - DNA, 120 bp, Artificial Sequence
  ENSG00000177200_70 (sequence is synthesized)
gaaggaaaaacagaaaggacagagagccaaagttcagagaatggtggagaaaactctgtgtcaagttctccttccacatcctctactgctgcattaaatacagctgcagctgccaaccca

SEQ ID NO: 617044 - DNA, 120 bp, Artificial Sequence
  ENSG00000177200_71 (sequence is synthesized)
ttagctcttaacccactattactatctaatatactttatccagggatgcttctcactccaggccttaatcttcatattccaactttgtcccagtccaatacttttgatgtacaaaacaaa

SEQ ID NO: 617045 - DNA, 120 bp, Artificial Sequence
  ENSG00000177200_72 (sequence is synthesized)
aacagtgacttaggctcgtctaagtctgtagaagtaaaagaagaagattccagaattaaagatcaggaagacaaaggaggaactgaaccaagtcctctcaatgaaaacagcacagatgag

SEQ ID NO: 617046 - DNA, 120 bp, Artificial Sequence
  ENSG00000177200_73 (sequence is synthesized)
ggttcagagaaagctgatgcttcatctggatctgatagtacatcgtcgtcatctgaggattcagattctagtaatgaagactgattcccagactctgcacttaaaatatgaactgatttt

SEQ ID NO: 617047 - DNA, 120 bp, Artificial Sequence
  ENSG00000177200_74 (sequence is synthesized)
ggattttttctttaataattaattgtaaataccccagtgttgagtgcatcaataacttactgaccgaacatttcagttatttgtttagaagtgcaaactgctttcagagactttttgcat

SEQ ID NO: 617048 - DNA, 120 bp, Artificial Sequence
  ENSG00000177200_75 (sequence is synthesized)
gtaatatttcttaagattcataagtttctgaactcgtatgtactatcaaatacataaaggtgtaaaattacaacaaaaggcattataattttgttgggggttaattttatgaaaattatg

SEQ ID NO: 617049 - DNA, 120 bp, Artificial Sequence
  ENSG00000177200_76 (sequence is synthesized)
ctcaataagagttgtatatttaatatatttgcagtgaacacagaatactttatgcatattactgatttaatttgaatatagttttacagcctccttgacacctataatttacagatcaaa

SEQ ID NO: 617050 - DNA, 120 bp, Artificial Sequence
  ENSG00000177200_77 (sequence is synthesized)
actcagcaataatttgggcagctaatgaatgtcatgaaagctgtagaatctacatcaccatccattgctttaattacatgaaaatgctctagtgttgtgatgcactgctgatgtttccaa

SEQ ID NO: 617051 - DNA, 120 bp, Artificial Sequence
  ENSG00000177200_78 (sequence is synthesized)
ttcaggtacaagtatgttttaaagaagaaataagtttcccaatcagccaatttaactggctacctgttacctcagctgagttagtttaggaagtttacattcgtttctaattctatactt

SEQ ID NO: 617052 - DNA, 120 bp, Artificial Sequence
  ENSG00000177200_79 (sequence is synthesized)
gttttcaggggttttttaaacacatcctatatatcatgtcaatctggcaagaaatatgacttgctttttgctgagcttaattcagatatcagtaaaattaagtcataaaataatcatgtg

SEQ ID NO: 617053 - DNA, 120 bp, Artificial Sequence
  ENSG00000177200_80 (sequence is synthesized)
tcatgtgactttggcaccctatagacatacttagttttaacttttcaaagtttggcctcctattagaaataatcatgtctcagatgagtaatgtctgtttccagggttcagaaaaggcaa

SEQ ID NO: 617054 - DNA, 120 bp, Artificial Sequence
  ENSG00000177200_81 (sequence is synthesized)
actcatgaaatgccactgaaaagaactttcaacacagcatacttcatgtaaaagaaattgtttgtttgctttctttgtgtagatttctatttgtgttttatgtcatggaaatattccaga

SEQ ID NO: 617055 - DNA, 120 bp, Artificial Sequence
  ENSG00000177200_82 (sequence is synthesized)
attaacagataatagtggtaaagtaatatgcagatagtctaaattcattttgagtttctaggtgtaagcagactaaatgttgcccagaatcagtgttgggttatcagtttatattaaata

SEQ ID NO: 617056 - DNA, 120 bp, Artificial Sequence
  ENSG00000177200_83 (sequence is synthesized)
tactgagttgcccgttttgaaaatgcactttgaataatctcaaaaagatgtacaagttatacctgtaaaccacaaaagtgaagcctgaggcttctgttcaatttcatagactcctttacc

SEQ ID NO: 617057 - DNA, 120 bp, Artificial Sequence
  ENSG00000177200_84 (sequence is synthesized)
atgtaaaatttgtctgatatttgatttgtgatacaatttctcctgctaaagctgctattattctgacaaggtagaggtccaggttcacctttatatatatttaaaacaattagtactgaa

SEQ ID NO: 617058 - DNA, 120 bp, Artificial Sequence
  ENSG00000177200_85 (sequence is synthesized)
ttggacataaaaatattgacattctaaggagagatatatgttagcatttttctggtactcaaataagttagtagtaaagtctgcaagggcataaatttagggggaaaaagtgtcccagtt

SEQ ID NO: 617059 - DNA, 120 bp, Artificial Sequence
  ENSG00000177200_86 (sequence is synthesized)
ctctcctacagaaaaaatactttcagtatgttttgataaaactgttgctttgtcatgagttagtcaattgtatcaggttttccaagacctttaccagtaaattatgtttctgtatgtaaa

SEQ ID NO: 617060 - DNA, 120 bp, Artificial Sequence
  ENSG00000177200_87 (sequence is synthesized)
ataaccccttattagagagacagtgttatatgtatttacaaaattatataagttccattgggattgtattgattttgtattttcccaaaatagtactttgaattgatagtcctttatgca

SEQ ID NO: 617061 - DNA, 120 bp, Artificial Sequence
  ENSG00000177200_88 (sequence is synthesized)
atgtcttagcaatagtctctataatgcccatccaggagaagtgggtagtaattcttcatcatgaaaatgatatattacatatttagtatcttccctttgcagtattgcacttttgtttaa

SEQ ID NO: 617062 - DNA, 120 bp, Artificial Sequence
  ENSG00000177200_89 (sequence is synthesized)
ctagaatacacctatgagatagccaaagtttcaaacacagttatcttagtttaccggtggagtatttcaacaccaaccacatttcccttcctccctctaattctacccacatgatcttta

SEQ ID NO: 617063 - DNA, 120 bp, Artificial Sequence
  ENSG00000177200_90 (sequence is synthesized)
ttccttcctttcgccaattaaaaaaaaaaaaaaggaaaaaaaatctgtagatcttgtcactaaaatctaatttatatcaaatttatgagagaaagtattttcctaattatggtcaaataa

SEQ ID NO: 617064 - DNA, 120 bp, Artificial Sequence
  ENSG00000177200_91 (sequence is synthesized)
atttggttaacatcctagtgattctctttctatataataaggcaattacagttttcaaagcattaagtctaacataactttaaacattctcttaggtttcaagacacttctatttaatat

SEQ ID NO: 617065 - DNA, 120 bp, Artificial Sequence
  ENSG00000177200_92 (sequence is synthesized)
tcattggggaaaagttgtccagctatcagctaagaaaacacatgcaaatatggttgtgtaaagttaagggttataaggaaaaaaaaatcagtagaattacataatactaaagttgcagtt

SEQ ID NO: 617066 - DNA, 120 bp, Artificial Sequence
  ENSG00000177200_93 (sequence is synthesized)
gaaagaatatccaagtatgtgttggtagttactaaaagaattatagctgttattgccttgtatttatagcccttgtttcaggttttatgattcaagtcttagtccaatctttcttttgga

SEQ ID NO: 617067 - DNA, 120 bp, Artificial Sequence
  ENSG00000177200_94 (sequence is synthesized)
catttgcaatatttaccagttgtgttttgtgtagtctgaatttgctttctgtagttgagcaaacgtcttaaaaagtcatttgtaatttattaaattactttctatgatgttctatagagc

SEQ ID NO: 617068 - DNA, 120 bp, Artificial Sequence
  ENSG00000177200_95 (sequence is synthesized)
ttttattaaacatattctttgactacccatgatgtcagcctctgtacatgagaatactttttaaaattgaattttatatagaatttatcttattccagttatgagagacaccatagttgt

SEQ ID NO: 617069 - DNA, 120 bp, Artificial Sequence
  ENSG00000177200_96 (sequence is synthesized)
aaatctttaaaaggaaaatataccgtggaagaatttttaaaacaaaaattggctataattttatccacagtatcttaaatgctgtcaatttttcattttgatttaattttattaatattg

SEQ ID NO: 617070 - DNA, 120 bp, Artificial Sequence
  ENSG00000177200_97 (sequence is synthesized)
ttcattgtggatattggtgactgcaaaaaaagcaaaagctgcttcttgggcattcaaattgttaaaccccaattttgcagcccaatctcaacttcatgctgaacattaagtattattttc

SEQ ID NO: 617071 - DNA, 120 bp, Artificial Sequence
  ENSG00000177200_98 (sequence is synthesized)
ttaagtttttggacttttaaaaaactcagaaatactcagagatattcctcacctctttaagaagtccattttggaaatcaataattatttttttcccttagtcttaagagtgtttcctaa

SEQ ID NO: 617072 - DNA, 120 bp, Artificial Sequence
  ENSG00000177200_99 (sequence is synthesized)
ctcattgccatgggtagtgttcttcgtaaacattgaagaaaatagtttttcctctaattacacaactaaaacagtggagtctcatactcatttaacttgaacacattcaactacactttc

SEQ ID NO: 617073 - DNA, 120 bp, Artificial Sequence
  ENSG00000177200_100 (sequence is synthesized)
atgtttagaaaacctttttttcatttttgtacaacataacatataaacacaaaccaactgcttcatctagtactcacccagaggaacagtagtctgttccagtgttggaggaagaattgc

SEQ ID NO: 617074 - DNA, 120 bp, Artificial Sequence
  ENSG00000177200_101 (sequence is synthesized)
ctatgttggacatttttgagaagagatatgaggtataaaatgatgtattctgtaatttgtgagctctgtgagagaaaagagtgattttttttttttttataaagacaaggtcttgctctg

SEQ ID NO: 617075 - DNA, 120 bp, Artificial Sequence
  ENSG00000177200_102 (sequence is synthesized)
ttttttttttttttataaagacaaggtcttgctctgcctcccctagggtggagtgcagtggtgcgatcacagcccactgcatccttgacctgttgggctcaagcaatcctccctcctcag

SEQ ID NO: 617076 - DNA, 120 bp, Artificial Sequence
  ENSG00000177200_103 (sequence is synthesized)
aggtgtgagccaccacacccagccagaaatgatttttgactacacctaatattcactttatacaataaacttagaacttaatctctatataagctatttattttaaaattcagaaaagca

SEQ ID NO: 617077 - DNA, 120 bp, Artificial Sequence
  ENSG00000177200_104 (sequence is synthesized)
aaaaaatatttaaatcattcataaactaaaactacccagagataaacactgtcagtaatatattcaatcttttgtatatctatgttatttacatgtagtgggttgagtagtgtcattcag

SEQ ID NO: 617078 - DNA, 120 bp, Artificial Sequence
  ENSG00000177200_105 (sequence is synthesized)
aaactgatgtcaacctaaaacctcagaatgtggccttattttggaaatcgggtcttggcaaatgtaattagttgtagtcatgccggattagggtgggccctaaatccaatgactagtgtc

SEQ ID NO: 617079 - DNA, 120 bp, Artificial Sequence
  ENSG00000177200_106 (sequence is synthesized)
cttagaagaagagcagaagatactcagaaacactgggaaggctgttttgtgataaaggagaccggagggatgttcctacaactagggaacaccaaggattgccagcaaccaccagaagct

SEQ ID NO: 617080 - DNA, 120 bp, Artificial Sequence
  ENSG00000177200_107 (sequence is synthesized)
aggagagaagtaacaagcattctccttcatagcttccggaaagaaccaaccttgccaacaccttgatttggggtttctaacctgaactgtaagagaataaatttccattgttttaagtca

SEQ ID NO: 617081 - DNA, 120 bp, Artificial Sequence
  ENSG00000177200_108 (sequence is synthesized)
attcatgctgatgcattttgatgctttgtgcattcatttctttctgtgctttgttggaatctggctatctgcttacagctattgaggaaactcagctttttaggagtgtttacagccttt

SEQ ID NO: 617082 - DNA, 120 bp, Artificial Sequence
  ENSG00000177200_109 (sequence is synthesized)
ttcatacctaaataggatgaacagtagatataaacttgccaaggcagaaatgtgttgataaatcaaaatgtgtatttgtggagggttgtgcatctcttggttgcagcttgctaaataggc

SEQ ID NO: 617083 - DNA, 120 bp, Artificial Sequence
  ENSG00000177200_110 (sequence is synthesized)
catttaggaatcttctttcaatgcttttttcttgagcactgcctggggtggtgaaaaagcagagggcaagcctttgtctgacgccaaaaatgtcttcagtgaagaggccaagaggaaggc

SEQ ID NO: 617084 - DNA, 120 bp, Artificial Sequence
  ENSG00000177200_111 (sequence is synthesized)
ccccaagagggcctccattttcaatagaagcttaatgaaggagataataaaaaagagaagacaacagaattacagagactaagttggaggtgcatttgctccccctttgaaagatttatg

SEQ ID NO: 617085 - DNA, 120 bp, Artificial Sequence
  ENSG00000177200_112 (sequence is synthesized)
cccatcttggcctccaaaagtgctgggtttacaggcacgcatcatcacgcctggcctgatatttttatagtttaaagaatattatgtaaacttgagagagacctaagctttaagaataat

SEQ ID NO: 617086 - DNA, 120 bp, Artificial Sequence
  ENSG00000177200_113 (sequence is synthesized)
tgtaaacttgagagagacctaagctttaagaataatttatttgtaataaaattaaaatttcagaattttaatccttaaaaataagtactcgcttattctgattttatcttgtaatcataa

SEQ ID NO: 617087 - DNA, 120 bp, Artificial Sequence
  ENSG00000177200_114 (sequence is synthesized)
gtactgcatcgccatcttgagcttgttgctgtttcctcgagtcttggttatttgttatagcctgtaggccttaaggtggcattttagtgagcaattctaaaccctccttcctttcccagt

SEQ ID NO: 617088 - DNA, 120 bp, Artificial Sequence
  ENSG00000177200_115 (sequence is synthesized)
gctgcagtgctgctatgaaacctttgatgaggcaggtatagaaaaaatatccagtgaagcacactggaatcagcatgaaaatgtgtttggaaattcctgatggttttttcctttggtata

SEQ ID NO: 617089 - DNA, 120 bp, Artificial Sequence
  ENSG00000177200_116 (sequence is synthesized)
acattaaaagatcaagactctcaacttcttatccaatgggagagtagtggctcaaggctcctgggctgctgcaagagttgagaaaagaagatcaaatcgacaaattaaaagaaaaaaata

SEQ ID NO: 617090 - DNA, 120 bp, Artificial Sequence
  ENSG00000177200_117 (sequence is synthesized)
atgatcttcaggtaaataatttccttggctaacaaaaaatgcattttttaaaaaagtaaaattgtgtaactttttggtaatccacatcttttatttttatctggacaaactaatgtatgt

SEQ ID NO: 617091 - DNA, 120 bp, Artificial Sequence
  ENSG00000177200_118 (sequence is synthesized)
cactgtaatgtaaatgaactttactcatatctttctctttgctagattagaataatgcattcaaatttataagtaaagattgtttaggattatgtgttatattttcctaacctgcatatg

SEQ ID NO: 617092 - DNA, 120 bp, Artificial Sequence
  ENSG00000177200_119 (sequence is synthesized)
ttgcaatattagatgtgcctgaggagtccaattaagaaaagcttgcaaataaatatttgtttacccaggaatgggtttaaaaatgtacattttacttgattaataaaccttgtggatgaa

SEQ ID NO: 617093 - DNA, 120 bp, Artificial Sequence
  ENSG00000177200_120 (sequence is synthesized)
actttaaatagatatatatttacaacagtcatcttcaaaattgaaaaaagtgattcaagaactttggatctatttcattgttataattagagccttaagttgtgggacttttattcttat

SEQ ID NO: 617094 - DNA, 120 bp, Artificial Sequence
  ENSG00000177200_121 (sequence is synthesized)
tatatactatataaaatttgttcatgctttaattttttctgatttgtttcaatgtgggttttttgttttgttttgtttattggtacatcacaataagatagtgttaaatattgtctaatc

SEQ ID NO: 617095 - DNA, 120 bp, Artificial Sequence
  ENSG00000177200_122 (sequence is synthesized)
agacagagcagctgctgttccagcaacagcagcaactgccgcacccttgaaaggaggcccctgccgtgtggacccgtaaaataaaatggatgcaacttctccaggagtgcttatgttacc

SEQ ID NO: 617096 - DNA, 120 bp, Artificial Sequence
  ENSG00000177200_123 (sequence is synthesized)
caaagagaaacagatgcacaaagagaaggaatgagatgctcggggatattttatcaaggaaaccagcaaaccgtctttttcctgaagaccttttaagattaggacaagcagctgtttata

SEQ ID NO: 617097 - DNA, 120 bp, Artificial Sequence
  ENSG00000177200_124 (sequence is synthesized)
aaagcagaacagtgttaagatttgaactgtaaagtaggatcatgctttgaagtatattctagctaaaagcaggggataaactagataaaacttggagactctaagacctgaccctgatta

SEQ ID NO: 617098 - DNA, 120 bp, Artificial Sequence
  ENSG00000177200_125 (sequence is synthesized)
agtgggcctacaagtgagaatctgaagaacagctctctggctgaacatatcccttggatgttgttattaccagctgcctctagatttgagaacagtgctgagcatgcttttaaatgatct

SEQ ID NO: 617099 - DNA, 120 bp, Artificial Sequence
  ENSG00000177200_126 (sequence is synthesized)
ctttaagctagctacacctgaaagcatacctagccctcatttctgtttgcttgaacaagagcctgaaaaagaagtctaaagaactttctagtgatatccttcagtcctgttctaaaaaga

SEQ ID NO: 617100 - DNA, 120 bp, Artificial Sequence
  ENSG00000177200_127 (sequence is synthesized)
acctgtgttcttcaccgagttaaggaaatttcacaactcccaggggctaatgtggagttcattttcacttactgctgaatcaactgaagttcctttcagagtcttttcctagagtggaaa

SEQ ID NO: 617101 - DNA, 120 bp, Artificial Sequence
  ENSG00000177200_128 (sequence is synthesized)
agtatctgagctcttcaacctactattcattagtgctgagagacaaaaatcatgttagagtctataatgtaatggagcataaaacatttaagttatgaatctgcataaaatgtgtaaaag

SEQ ID NO: 617102 - DNA, 120 bp, Artificial Sequence
  ENSG00000177200_129 (sequence is synthesized)
atgaaaaaacatactttaatgtttgtcagtacttattgatcagtgaaagaacattttcattaatgcctcagcctgtgaatggatgtcaataaagatgagtgagaaggtatttcatataca

SEQ ID NO: 617103 - DNA, 120 bp, Artificial Sequence
  ENSG00000177200_130 (sequence is synthesized)
agaatacccagttgaaggaaaagaggaaaagaaaggtagaaggatgaaatccaagccaaaggacaaagacagcaaaaaaacaaaaacatgttctaagttaaaagagaagacaaaaattgg

SEQ ID NO: 617104 - DNA, 120 bp, Artificial Sequence
  ENSG00000177200_131 (sequence is synthesized)
gcggccgctgctcaactggtggggagatgcgggggcgggtcgtgtcagacgggtggtcgcctgaggccgcccccgcccggccagccgcgagtgtcagtctcagtcgaggcggggggcggc

SEQ ID NO: 617105 - DNA, 120 bp, Artificial Sequence
  ENSG00000177200_132 (sequence is synthesized)
agccagaggaagtgaggctcagacagagcagctgctgttccagcaacagcagcaactgccgcacccttgaaaggaggcccctgccgtgtggacccgtaaaataaaatgggattttgacac

SEQ ID NO: 617106 - DNA, 120 bp, Artificial Sequence
  ENSG00000177201_0 (sequence is synthesized)
caccatcacaccaggggaaattatggagatgagaaatactaccccagattttattctcctaggactctttaaccacaccagagcccaccaagtcctcttcatgatgcttctggccaccgt

SEQ ID NO: 617107 - DNA, 120 bp, Artificial Sequence
  ENSG00000177201_1 (sequence is synthesized)
tttgacctccctgtttagcaatgccctcatgattctcctgattcactgggaccaccggctccacaggcccatgtacttcctcctgagccaactttccctcatggacatgatgctggtttc

SEQ ID NO: 617108 - DNA, 120 bp, Artificial Sequence
  ENSG00000177201_2 (sequence is synthesized)
caccactgtgcccaaaatggcggctgactacttgaccggaaataaggccatctcccgcgctggctgtggtgtgcagatcttcttcctccccacactgggtggtggagagtgcttcctctt

SEQ ID NO: 617109 - DNA, 120 bp, Artificial Sequence
  ENSG00000177201_3 (sequence is synthesized)
agcagccatggcctatgaccgctatgcggctgtctgccacccactccgatatcccactctcatgagctggcagctgtgcctgaggatgaccatgtcgtcctggctcctgggtgcagctga

SEQ ID NO: 617110 - DNA, 120 bp, Artificial Sequence
  ENSG00000177201_4 (sequence is synthesized)
gacacttcagtcttcgaaaacgccatgtacatctgctgtgtgttaatgctcctggtccccttttccctcatcctgtcctcctatggtctcatcctcgctgctgttctgctcatgcgctct

SEQ ID NO: 617111 - DNA, 120 bp, Artificial Sequence
  ENSG00000177201_5 (sequence is synthesized)
acagaagcccgcaagaaggcctttgccacctgctcttcacatgtggctgtggtgggactcttttatggagctggcatttttacctatatgagacccaaatcccacaggtccactaaccac

SEQ ID NO: 617112 - DNA, 120 bp, Artificial Sequence
  ENSG00000177201_6 (sequence is synthesized)
gataaggttgtgtcagccttctatactatgttcacccctttactaaatcccctcatctacagtgtgaggaacagtgaggtcaaggaagccctgaaacggtggctggggacgtgtgtaaac

SEQ ID NO: 617113 - DNA, 120 bp, Artificial Sequence
  ENSG00000177201_7 (sequence is synthesized)
ctaaaacaccagcaaaatgaggcccacaggtcaagatgatctagtgtcagatgagtctaagttcctgaatttattaacattttaacactatgtaattctctccctttagtaattcatgaa

SEQ ID NO: 617114 - DNA, 120 bp, Artificial Sequence
  ENSG00000177201_8 (sequence is synthesized)
aagatatttatatgtttttgcctttttaggaaactacaatctcattgaaaatatacactattcagatcagtactaagagtgaagagtcctggataacttggagttgcaatgatatttcac

SEQ ID NO: 617115 - DNA, 120 bp, Artificial Sequence
  ENSG00000177201_9 (sequence is synthesized)
cacagatccatttttataggaatatatacaaatacctcttggaatcccaatgttatcttcactgcattttcagattgtttatatcctggataacttacactgagcttcaggattgggtct

SEQ ID NO: 617116 - DNA, 120 bp, Artificial Sequence
  ENSG00000177201_10 (sequence is synthesized)
taagtttgtgtattgatataataagatatttttaagaatgaagtgagccaattgtattgacagataccatttttgagcatttatgtacttttcttcaagtgaagtaatacctatagatta

SEQ ID NO: 617117 - DNA, 120 bp, Artificial Sequence
  ENSG00000177201_11 (sequence is synthesized)
ctttgtatcctacaacaaccccatgatataagttttctttttttcttttgcaaactccaaatctttaaaaggtgtcccaaatttttcatcaaaaatatctctacttacctatgccttggg

SEQ ID NO: 617118 - DNA, 120 bp, Artificial Sequence
  ENSG00000177201_12 (sequence is synthesized)
agaagtaaggtaacccaataatgtataaggttgttgagtgttactcaatttcctactatctgaaaaaagaaattaacacatggaaagttaaatatggttcctaatttcacatagaacaga

SEQ ID NO: 617119 - DNA, 120 bp, Artificial Sequence
  ENSG00000177201_13 (sequence is synthesized)
aatattaaaaagtgactccaaagcttgtaccctaacctggaagagtttatttctgttcaataatgtattttgagtgttatttcccatgtgtatgctctacaattaaaaactaaatatgag

SEQ ID NO: 617120 - DNA, 120 bp, Artificial Sequence
  ENSG00000177201_14 (sequence is synthesized)
gactccaccaaagacaaataacattatttttaagttatattttaaaatatagatgcatgacaaaaggggaagtacacaactcaaatgtaactgctatattgtcacaatctttttttattt

SEQ ID NO: 617121 - DNA, 120 bp, Artificial Sequence
  ENSG00000177201_15 (sequence is synthesized)
tttccagtctctttttatttggtgttttaaggcaaacttttttaaattcatgtaattttttatataagtaatatttatcttttccaagagcgtcattgtaattgcattggaaaattgttt

SEQ ID NO: 617122 - DNA, 120 bp, Artificial Sequence
  ENSG00000177201_16 (sequence is synthesized)
taaactacaaataagttctcttttctacacgtgctttaaggttaccttgacttattgacatacctccatcgatatgaactctgaattgcatgatcatgctgaatcttgacagttactaac

SEQ ID NO: 617123 - DNA, 120 bp, Artificial Sequence
  ENSG00000177201_17 (sequence is synthesized)
aatgagttatcaaagctgagtaagactcaacaaccttatacattattgggttaccttacttctcccaaggcataggtaagtagagatatttctgatgaaaaatttgggacacattttaaa

SEQ ID NO: 617124 - DNA, 120 bp, Artificial Sequence
  ENSG00000177201_18 (sequence is synthesized)
gatttggagtttgcagaagaataaaagaagactatactattattaaagacacaagatagatagtgatggaggaaagcagtggttatcaaagccaaattgtaatcagagactggatatcaa

SEQ ID NO: 617125 - DNA, 120 bp, Artificial Sequence
  ENSG00000177201_19 (sequence is synthesized)
attgtcttagagagttttatgataaaggctatatttcccatatgtaaaacacacttaagaaataatataagtttttaacacgaaggaggaaataactaagagcttccagggacaatgtat

SEQ ID NO: 617126 - DNA, 120 bp, Artificial Sequence
  ENSG00000177201_20 (sequence is synthesized)
cttcaatataagtgtctgaaagttaacccgccatttcagaccaacctgaatttcaaaaggtaactgttctagaacaagtgaaaggagtttcctgcttcatctagatcttcaggttccaaa

SEQ ID NO: 617127 - DNA, 120 bp, Artificial Sequence
  ENSG00000177201_21 (sequence is synthesized)
gcagtaatatagttaagatagtaccttaaccactgcatgcagatcctgagcccatgtcttaagagaaggctattcagtaaactcttgtctccttggaagacttgaggatgacaggagaga

SEQ ID NO: 617128 - DNA, 120 bp, Artificial Sequence
  ENSG00000177201_22 (sequence is synthesized)
agaaaggaacagaactgcacaaattctgtcattataccatctaaaaaatcttctcttagaatgggtgaaaattacacaagtacatgtagtcgtggaaatttcattactcataccaggttc

SEQ ID NO: 617129 - DNA, 120 bp, Artificial Sequence
  ENSG00000177201_23 (sequence is synthesized)
atgcaccatcagagaaattattttagaacacgttgagttacaaatggtaaactaagcctttaaaattttgtaaggataaaatattctaaccagaaaattaagcctaatgttcaggagaaa

SEQ ID NO: 617130 - DNA, 120 bp, Artificial Sequence
  ENSG00000177201_24 (sequence is synthesized)
actaaaacaacaacaacaacaaaaccacggaatgaacattatctccaagcaaacgtaagacattaataaaaacacaaaatatgtataaaaatagacatgtttcaaagaagtggtatttca

SEQ ID NO: 617131 - DNA, 120 bp, Artificial Sequence
  ENSG00000177201_25 (sequence is synthesized)
gactagttatctgatcacaatgaaaataaatatgaaataaaaattttaaatacttttagaaattatatgttcatttcttattgcttttgtaacttgcagatgtttctactcttattttct

SEQ ID NO: 617132 - DNA, 120 bp, Artificial Sequence
  ENSG00000177201_26 (sequence is synthesized)
taataaaggtttgcatagaaaatcttcaaaatcttcaaaatgacaggttaactttcagacacttatattgaagatacattgtctctggaagcttttagttatttcccattgtgtgtttga

SEQ ID NO: 617133 - DNA, 120 bp, Artificial Sequence
  ENSG00000177201_27 (sequence is synthesized)
aaatgagaagatatggttcttatgaatctctaaagttaaagaaggagtacctgatagagacagagtatacaagagcatgaatggtagaaacaaaattttgaatgaggagttacttcgaac

SEQ ID NO: 617134 - DNA, 120 bp, Artificial Sequence
  ENSG00000177201_28 (sequence is synthesized)
atatgaagctctagcacccagtaacacagaatcaagatgaggctttgaactaatcttggatattacctgctatcttcaatcattctggctctttcctttacactgcctatatattctctt

SEQ ID NO: 617135 - DNA, 120 bp, Artificial Sequence
  ENSG00000177201_29 (sequence is synthesized)
atatattctctttaatgtgtaatttttaagtcattaagaaacataatgttgtggctccgactagaatttattcatcttctgctgtgcagaagctatttagtttaattatatcccatttgt

SEQ ID NO: 617136 - DNA, 60 bp, Artificial Sequence
  ENSG00000177201_30 (sequence is synthesized)
tgttttatgtttaagtcttcatcttgagtgattttttgtataaagttgaaggaaggggtc

SEQ ID NO: 617137 - DNA, 77 bp, Artificial Sequence
  ENSG00000177201_31 (sequence is synthesized)
ctagggtttttatggttttatgttttatgtttaagtcttcatcttgagtgattttttgtataaagttgaaggaaggg

SEQ ID NO: 617138 - DNA, 70 bp, Artificial Sequence
  ENSG00000177201_32 (sequence is synthesized)
gagatggttgtatggcatgaattctgaggcctctgttctgtttattggtctatatatctgttttggtacc

SEQ ID NO: 617139 - DNA, 83 bp, Artificial Sequence
  ENSG00000177201_33 (sequence is synthesized)
cttgtagtaaagtttgaagtaaggtagcatgatgccaaatgggctctttattgattccatatgaaatttaaagtatttttttc

SEQ ID NO: 617140 - DNA, 88 bp, Artificial Sequence
  ENSG00000177201_34 (sequence is synthesized)
agtatttttttctaattctgtgaagaaagtctatggtagcttgatggggatagcactgaatgtattaattactttgggcactatggtt

SEQ ID NO: 617141 - DNA, 72 bp, Artificial Sequence
  ENSG00000177201_35 (sequence is synthesized)
tttataagttgtattcctaggtgttttattccctttgtagcaattctgaatgggaattcactcatgatttgg

SEQ ID NO: 617142 - DNA, 71 bp, Artificial Sequence
  ENSG00000177201_36 (sequence is synthesized)
tttattccctttgtagcaattcgggaaagcttgtgatttttacacattgatattgtatcctgagactttgc

SEQ ID NO: 617143 - DNA, 120 bp, Artificial Sequence
  ENSG00000177201_37 (sequence is synthesized)
aggagattttgagctgagatgatggggtgttctaaatatgcaatcatgtaatctgcaaacagaggcagtttgacttcctctcttcctttggattcatcagagtaaacaggcaacttagag

SEQ ID NO: 617144 - DNA, 68 bp, Artificial Sequence
  ENSG00000177201_38 (sequence is synthesized)
atctatccatctgacaaatggctaatatcaagaatctacaaggaacttaaacatatttattttctcaa

SEQ ID NO: 617145 - DNA, 87 bp, Artificial Sequence
  ENSG00000177201_39 (sequence is synthesized)
aagcttatagaaatgcaaatcgaaaccacagtgagataccatgtcacatcagttagaatggcaattattaaaaagtcaccaacatgg

SEQ ID NO: 617146 - DNA, 67 bp, Artificial Sequence
  ENSG00000177201_40 (sequence is synthesized)
tagaaatgcaaatcgaaaccacagtgagataccatgtcacatcagttagaatggcaattattaaaaa

SEQ ID NO: 617147 - DNA, 120 bp, Artificial Sequence
  ENSG00000177201_41 (sequence is synthesized)
cttaaagtataataaaataaagtaaaaaaagtcaggaaacaacagacgctggcacgtatgcggagaaatagcaacgcttttaccatgttgttttgggagtgtaaattagttcaaccattg

SEQ ID NO: 617148 - DNA, 89 bp, Artificial Sequence
  ENSG00000177201_42 (sequence is synthesized)
agaactagaaatgccatttgacccagaaatcccatttctgggtatatacccaaaggattttaaatcattccactaattattcccaatag

SEQ ID NO: 617149 - DNA, 120 bp, Artificial Sequence
  ENSG00000177201_43 (sequence is synthesized)
atagtaaatatgtgaatccaacccaaaagcccatcaatgatagactggctaaagtagctgtggcacatatacaccacaaatactatacagccattggaaaggatgagtttatgtcctttg

SEQ ID NO: 617150 - DNA, 63 bp, Artificial Sequence
  ENSG00000177201_44 (sequence is synthesized)
ttatgtcctttgcagggacatggatgaaactggagaccatcattccaattaaatagggaatcc

SEQ ID NO: 617151 - DNA, 89 bp, Artificial Sequence
  ENSG00000177201_45 (sequence is synthesized)
ttgcttgtttttgtcagggttgtcaaagaacagatggttgtatggcattaattctgaggcctcttttctgtttatgaggcctctgttca

SEQ ID NO: 617152 - DNA, 120 bp, Artificial Sequence
  ENSG00000177202_0 (sequence is synthesized)
attccattcacagactcttgttgggcagcagccacccgctcacctccatccccaggacttagagggacgcagggcgttgggaacagaggacactccaggcgctgaccctgggaggccagg

SEQ ID NO: 617153 - DNA, 120 bp, Artificial Sequence
  ENSG00000177202_1 (sequence is synthesized)
accagggccaaagtcccgtgggcaagaggagtcctcagaggtccttcattcagcggttccgggaggtctgggaagcccacggcctggctggggcagggtcaacgccgccaggccgccatg

SEQ ID NO: 617154 - DNA, 120 bp, Artificial Sequence
  ENSG00000177202_2 (sequence is synthesized)
gtcctgtgctggctgctgcttctggtgatggctctgcccccaggcacgacgggcgtcaaggactgcgtcttctgtgagctcaccgactccatgcagtgtcctggtacctacatgcactgt

SEQ ID NO: 617155 - DNA, 120 bp, Artificial Sequence
  ENSG00000177202_3 (sequence is synthesized)
ggcgatgacgaggactgcttcacaggccacggggtcgccccgggcactggtccggtcatcaacaaaggctgcctgcgagccaccagctgcggccttgaggaacccgtcagctacaggggc

SEQ ID NO: 617156 - DNA, 120 bp, Artificial Sequence
  ENSG00000177202_4 (sequence is synthesized)
tcaccaccaactgctgcaccggccgcctgtgtaacagagccccgagcagccagacagtgggggccaccaccagcctggcactggggctgggtatgctgcttcctccacgtttgctgtgac

SEQ ID NO: 617157 - DNA, 120 bp, Artificial Sequence
  ENSG00000177202_5 (sequence is synthesized)
caacagggaggacagggcctgggactgttctcccagatccgccactccccatgtccccatgtccttcccccactaaatggccagagaggccctggacaacctcttgcggccctggcttca

SEQ ID NO: 617158 - DNA, 120 bp, Artificial Sequence
  ENSG00000177202_6 (sequence is synthesized)
tcccttctaaggctgtccaccaggagcccggtgctaggggaagcatccccaggcctgactgagcggcaggggagcacggcccgtgggtttgattgtattactctgttccactggttctaa

SEQ ID NO: 617159 - DNA, 120 bp, Artificial Sequence
  ENSG00000177202_7 (sequence is synthesized)
gacgcagagcttctcacatctcaatcaggatgcttctctccattggtagcactttagagtccatgaaatatggtaaaaaatatatatatatcataataaatgacagctgatgttcatgga

SEQ ID NO: 617160 - DNA, 120 bp, Artificial Sequence
  ENSG00000177212_0 (sequence is synthesized)
caccatcacaccaggggaaattatggagatgagaaatactaccccagattttattctcctaggactctttaaccacaccagagcccaccaagtcctcttcatgatggttctgagtatcgt

SEQ ID NO: 617161 - DNA, 120 bp, Artificial Sequence
  ENSG00000177212_1 (sequence is synthesized)
tttgacctccctgtttggcaattccctcatgattctcctgattcactgggaccaccggctccacacgcccatgtacttcctcctgagccaactttccctcatggacatgatgctggtttc

SEQ ID NO: 617162 - DNA, 120 bp, Artificial Sequence
  ENSG00000177212_2 (sequence is synthesized)
caccactgtgcccaaaatggcggctgactacttgaccggaagtaaggccatctcccgcgctggctgtggtgtgcagatcttcttcctccccacactgggtggtggagagtgcttcctctt

SEQ ID NO: 617163 - DNA, 120 bp, Artificial Sequence
  ENSG00000177212_3 (sequence is synthesized)
agcagccatggcctatgaccgctatgcggctgtctgccacccactccgatatcccactctcatgagctggcagctgtgcctgaggatgaccatgtcgtgttggctcctgggtgcagctga

SEQ ID NO: 617164 - DNA, 120 bp, Artificial Sequence
  ENSG00000177212_4 (sequence is synthesized)
gacacttcagtcttcgaaaacgccatgtacatctgctgtgtgttaatgctcctggtccccttttccctcatcctgtcctcctatggtctcatcctcgctgctgttctgcacatgcgctct

SEQ ID NO: 617165 - DNA, 120 bp, Artificial Sequence
  ENSG00000177212_5 (sequence is synthesized)
acagaagcccgcaagaaggcctttgccacctgctcttcacatgtggctgtggtgggactcttttatggagctgccatttttacctatatgagacccaaatcccataggtccactaaccat

SEQ ID NO: 617166 - DNA, 120 bp, Artificial Sequence
  ENSG00000177212_6 (sequence is synthesized)
gacaaggttgtgtcagccttctatactatgttcacccctttactaaaccccctcatctacagtgtgaagaacagtgaggtgaagggagccctgaaacggtggctggggacgtgtgtaaac

SEQ ID NO: 617167 - DNA, 120 bp, Artificial Sequence
  ENSG00000177212_7 (sequence is synthesized)
ataaaacaccagcaaaatgaggcccacaggtcaagatgatctaatgtcaaatgagtctaagttcctgaatttattaatattttaacacattgttattctctccctttagcaattcatgca

SEQ ID NO: 617168 - DNA, 120 bp, Artificial Sequence
  ENSG00000177212_8 (sequence is synthesized)
tttacctttccaagtggcatagctccagggaagatatttggttgttggaaactttcagtgaccacataggatttttaactaaatagagcatgagaccagaggcacaaagcagtatccaca

SEQ ID NO: 617169 - DNA, 120 bp, Artificial Sequence
  ENSG00000177212_9 (sequence is synthesized)
taattgtattgagagataccatttttagcatttatgtacttttcttcaagtgaagtagtatctatggattactttgtatcctacaacaaccccatgatataagtactgttgacaatatct

SEQ ID NO: 617170 - DNA, 120 bp, Artificial Sequence
  ENSG00000177212_10 (sequence is synthesized)
cctactttctaaaaaaagaaattaatgcatggaaaggtaaatattgttcccaatttcacacagcacggaaataataagaagtgactccagagcttgttccttaacctggaatagtttatt

SEQ ID NO: 617171 - DNA, 120 bp, Artificial Sequence
  ENSG00000177212_11 (sequence is synthesized)
tctgttcaataatgtattttgagtgttatttcataggtgtatgctctacaattaaaaactaaatatgaggactccaccaaagaaaaatattatttttatgttatattttaaaatatagat

SEQ ID NO: 617172 - DNA, 120 bp, Artificial Sequence
  ENSG00000177212_12 (sequence is synthesized)
gcatgacaaaagggaaagtccacaactcaaatgtaactgctatattgccacaatttttttgtattttttcaacagtctatttggtgtttaaacgtaagccttttttaatttatgtaacct

SEQ ID NO: 617173 - DNA, 120 bp, Artificial Sequence
  ENSG00000177212_13 (sequence is synthesized)
ttcatttaagtatttttttttccagggcctcattgtaattgaattggaaaattgttttaaactacaactaagttctgttttctacacctgctttaaggttaccttgacttattgacatac

SEQ ID NO: 617174 - DNA, 120 bp, Artificial Sequence
  ENSG00000177212_14 (sequence is synthesized)
ctccatcgatatgaactctgaattgcataatcatgctgaatcttgacagttactaacaatgaattatcaaaactgagtaacactcaacaaccttatacattattgtgtcaccaccttact

SEQ ID NO: 617175 - DNA, 120 bp, Artificial Sequence
  ENSG00000177212_15 (sequence is synthesized)
aaaatttgggacaccttctaaagatctggggtttgcaaaacaaaaaaaaagaagactattctattaataaagacacaagctagatagtgatggcagaaagctgtggttatcaaagccaaa

SEQ ID NO: 617176 - DNA, 120 bp, Artificial Sequence
  ENSG00000177212_16 (sequence is synthesized)
ttgtaaccagagactggatatcaaatcgtcttagagagttttatgataaaggctatatttcctgtatgtaaaacacacttaagaaataatataagttttaaacacacagtgggacataac

SEQ ID NO: 617177 - DNA, 120 bp, Artificial Sequence
  ENSG00000177212_17 (sequence is synthesized)
taagagcttccagggacagtgtatcttcaatataagtgtctgaaagttaacctgccatttctggccatcctgaatttcaaaagggacttgttttagaacaaatgaaaggagttttctgct

SEQ ID NO: 617178 - DNA, 120 bp, Artificial Sequence
  ENSG00000177212_18 (sequence is synthesized)
tcatctagagcttcaggttccaaagcagtaatatatttaagatagtaccttaaccagtgcatgcagatcctgagcctatgtctcaagagaaggttattcagtaactcttttctccttgga

SEQ ID NO: 617179 - DNA, 120 bp, Artificial Sequence
  ENSG00000177212_19 (sequence is synthesized)
agacttgaggatgaaaggagagagtgtcatctgtttgatacttttgtttgctactcttgttaattttatctccttacccagtgttagggtgagaaaggagcagaactgcacaaattctgt

SEQ ID NO: 617180 - DNA, 120 bp, Artificial Sequence
  ENSG00000177212_20 (sequence is synthesized)
catttataccatctaaaaaaatcttctcttagaatgggtgaaatttacacaagtaaatgtagtcatggaaatttcattactcataccaggttcattcaccatcagagaaattattttaga

SEQ ID NO: 617181 - DNA, 120 bp, Artificial Sequence
  ENSG00000177212_21 (sequence is synthesized)
acatgttgagctaaaaatggtaaactaagcctataaaattttgtaaggataaaatattctaaccagaaaattaagcctaatatacaggagaaaactaaaacaactagcatttggcatttg

SEQ ID NO: 617182 - DNA, 120 bp, Artificial Sequence
  ENSG00000177212_22 (sequence is synthesized)
aatatttttaattttaacccttctagtggtggtatctttatgtcattttaaaatatgccattacctagagaataatgaagttcagtgccttcttagatgctgaccagtcattgatatatg

SEQ ID NO: 617183 - DNA, 120 bp, Artificial Sequence
  ENSG00000177212_23 (sequence is synthesized)
taattttaagaagagtatctttatatctttggccaaaatgtttttgtttttatttattttactcagttttaaattttttatttattctggacaaaagtattttgtcaaacatctgtacta

SEQ ID NO: 617184 - DNA, 120 bp, Artificial Sequence
  ENSG00000177212_24 (sequence is synthesized)
taaatattttttcctgctttttggctagcctgtttgttattttaatggtatatttttcagagcagagattttgatttttgtaaagtccaatatataattttgttttctacgattagtggg

SEQ ID NO: 617185 - DNA, 120 bp, Artificial Sequence
  ENSG00000177212_25 (sequence is synthesized)
tgtttcttatgtattatctctataaaaattatatacttcaagaatgaaaggatggcatctatttttttaacatgaaattagcattttaatgtgaacaactcagtggcatttactacattc

SEQ ID NO: 617186 - DNA, 120 bp, Artificial Sequence
  ENSG00000177212_26 (sequence is synthesized)
gcaatgttgtacgaccatcatcactaactccaaaacacttccatcactccaaagtaaaacccctcatccattaagcagtttttctccccatttcagcccctagcaactgccaatctgcat

SEQ ID NO: 617187 - DNA, 120 bp, Artificial Sequence
  ENSG00000177212_27 (sequence is synthesized)
ttggtctctctggatttatctactgtagatattttatgtaaacggaatcataaaagatatgagcttttatgtctggcttctttcactttttctttaaaattattctttaagttctagggt

SEQ ID NO: 617188 - DNA, 89 bp, Artificial Sequence
  ENSG00000177212_28 (sequence is synthesized)
ttccatggtatatatgtgccacattatcttaatccagtccatcattgctggaaatttgtgttggttccaagtctttgctgttgtgaata

SEQ ID NO: 617189 - DNA, 120 bp, Artificial Sequence
  ENSG00000177225_0 (sequence is synthesized)
gcagacccagcgccgagcccgagccatggcgtccgagcggctccctaacaggcccgcctgtctgctcgtggccagcggcgccgccgaaggtgtgtcggcccagtccttcctccactgttt

SEQ ID NO: 617190 - DNA, 120 bp, Artificial Sequence
  ENSG00000177225_1 (sequence is synthesized)
cacgatggccagcaccgccttcaacctgcaggtggccacccctggggggaaagccatggaatttgtggatgtgactgagagcaatgcacgctgggtgcaagacttccgcctcaaggctta

SEQ ID NO: 617191 - DNA, 120 bp, Artificial Sequence
  ENSG00000177225_2 (sequence is synthesized)
cgccagccccgccaagctcgagtccatcgatggtgcccggtaccatgccctcctgatccccagctgtcctggggccctgaccgacctggccagcagtggctccctggcccgtatcctgca

SEQ ID NO: 617192 - DNA, 120 bp, Artificial Sequence
  ENSG00000177225_3 (sequence is synthesized)
gcacttccactctgagagcaaacccatctgcgccgtcggccacggtgtcgccgccctgtgctgtgccaccaacgaggacagatcctgggtgttcgacagctacagcctgacagggccctc

SEQ ID NO: 617193 - DNA, 120 bp, Artificial Sequence
  ENSG00000177225_4 (sequence is synthesized)
tgtgtgtgagctcgtcagggcccccggcttcgcccgcctgccgctcgtggtggaggacttcgtgaaggattcgggcgcctgcttcagtgcaagcgagcctgacgctgtccacgtcgtgct

SEQ ID NO: 617194 - DNA, 120 bp, Artificial Sequence
  ENSG00000177225_5 (sequence is synthesized)
ggaccgccacctggtcacaggccagaatgccagctccactgtcccggccgtgcagaacctgctcttcctctgtggcagccggaaatgaacctgctgggtagatgcaccccctgagacagc

SEQ ID NO: 617195 - DNA, 120 bp, Artificial Sequence
  ENSG00000177225_6 (sequence is synthesized)
ccaggtgtctccagaggcagccccgtctcaggcttcagggaccccgcctcttccctcctgacaagggccctggatggcagcctggtctggccctgatgggattgttggaggcctcctgga

SEQ ID NO: 617196 - DNA, 120 bp, Artificial Sequence
  ENSG00000177225_7 (sequence is synthesized)
atcagctctgagggggtgtcggctctcctggagggtccaaacccccatcctcctgcatgttctctggtaggaggcagagaaaagaccccacgtgcctggagagctgtgctagctgctagg

SEQ ID NO: 617197 - DNA, 120 bp, Artificial Sequence
  ENSG00000177225_8 (sequence is synthesized)
tggtcctcgggaattccaggctgggttttctagggaggactggttgtcacgtgtggtcactgttgactagacagagtcggctcgggggtcctctgtgtgggtttgccctgctgtggcctg

SEQ ID NO: 617198 - DNA, 120 bp, Artificial Sequence
  ENSG00000177225_9 (sequence is synthesized)
tctgccacccaccacctctttcactgttggtgggggccttgaggggagggcccagccggcgggagctggctcagaactttggccaaaggtgaacggaattttttaggagcagcagcctcc

SEQ ID NO: 617199 - DNA, 120 bp, Artificial Sequence
  ENSG00000177225_10 (sequence is synthesized)
tgccccaaggccgaccggcactggcagcactttcctgttgaagaaatcttcctggcgtgtggtttcaaagtgtaagcacctcagtgatgcaccctgtcctaagcattgagaggcacgttt

SEQ ID NO: 617200 - DNA, 120 bp, Artificial Sequence
  ENSG00000177225_11 (sequence is synthesized)
acttgtgaatatgagaccatgagattctcaatgataggaaagtgctgtcccccacggccttgcacagtggcctcgggtagagcggctatcaagagcagacagtggtccagcctgctgggc

SEQ ID NO: 617201 - DNA, 120 bp, Artificial Sequence
  ENSG00000177225_12 (sequence is synthesized)
acctggcctgggctgtggccctccagcgggctgccccctggccccaggttagggcgtccaggagaggcttaggccctctacttcctcacagttccccagtttgagccatcgaaggccttc

SEQ ID NO: 617202 - DNA, 120 bp, Artificial Sequence
  ENSG00000177225_13 (sequence is synthesized)
ttcctgcccacctccccgtctcagccacagccgttcccaagcaccagcgtggctcctggtgccagtgacctgccaggaggccccttgtgattataaaaccgttcagttgggccgggcgca

SEQ ID NO: 617203 - DNA, 61 bp, Artificial Sequence
  ENSG00000177225_14 (sequence is synthesized)
gtgaaaccccatctctactaaaaaacaaaaatacaaaaagttagcctggcatggtggtggg

SEQ ID NO: 617204 - DNA, 120 bp, Artificial Sequence
  ENSG00000177225_15 (sequence is synthesized)
tgggtggatcatctgaagtcaggagtttgggaaaagcctggccaacatggtgaaactaaaatacaaaaatgagccgggtgtggtgtcaggcgcctgtattcccagctacttgggaggctg

SEQ ID NO: 617205 - DNA, 120 bp, Artificial Sequence
  ENSG00000177225_16 (sequence is synthesized)
gccattgcactccaacctgggcaatgagtgaaactccgtctcaaaaataaaaaataataaaataaagccgttcaataaggagaatttggaaaaaagtggaagaaggaagcgctgcagcca

SEQ ID NO: 617206 - DNA, 120 bp, Artificial Sequence
  ENSG00000177225_17 (sequence is synthesized)
catccccgccctgaaggctgcgtccctccagtgcctcgcagattagtcaggatgcccacttagcactggccacggggccttgctctgtcccgggtccactctcatccccgtgtggtgatg

SEQ ID NO: 617207 - DNA, 90 bp, Artificial Sequence
  ENSG00000177225_18 (sequence is synthesized)
tgctctgtcccgggtccactctcatccccgtgtggtgatggacctctgtggacaaatgctttgtctctcgtcacccaggctggagtgcag

SEQ ID NO: 617208 - DNA, 71 bp, Artificial Sequence
  ENSG00000177225_19 (sequence is synthesized)
atccatccggctaacaagtacttttttatttttattttattttttggatggagtctcactctgtcgcccag

SEQ ID NO: 617209 - DNA, 76 bp, Artificial Sequence
  ENSG00000177225_20 (sequence is synthesized)
cctacaggcaagctcatgtcttaatgtcctagtccatttgggctcctataagaaaatactgtaaactggccgggca

SEQ ID NO: 617210 - DNA, 66 bp, Artificial Sequence
  ENSG00000177225_21 (sequence is synthesized)
tgggactacaggcaagctcatgtcttaatgtcctagtccatttgggctcctataagaaaatactgt

SEQ ID NO: 617211 - DNA, 69 bp, Artificial Sequence
  ENSG00000177225_22 (sequence is synthesized)
tctattgtaaacctagtggcttataaacaacagaaatcagtttcagttttggaggctggaagcccaaga

SEQ ID NO: 617212 - DNA, 120 bp, Artificial Sequence
  ENSG00000177225_23 (sequence is synthesized)
acagaaatcagtttcagttttggaggctggaagcccaagatgaaagcaccagtagatgcaacctcttttgtgagggtgatggtcccatgatgaggctgtgcccctgccctgtgaccggat

SEQ ID NO: 617213 - DNA, 120 bp, Artificial Sequence
  ENSG00000177225_24 (sequence is synthesized)
gacctcccaaatgccccacctaataccatccccttgcaggtgaggacttaagcaggtgggttttggggggacgtgctcaggccacagcagggtgcatgaagagccagtgagcctcattga

SEQ ID NO: 617214 - DNA, 120 bp, Artificial Sequence
  ENSG00000177225_25 (sequence is synthesized)
gcccctctggtcagccagatctgacattgagcccagcattgaagatcaaagcaggtggggctttgggatgtgaagtgggttctgacgcggggccccacagacctgtctccgcgtgagctg

SEQ ID NO: 617215 - DNA, 120 bp, Artificial Sequence
  ENSG00000177225_26 (sequence is synthesized)
cctgcaggcccctgcgtcattcctcagctgcgtgcgaggcctctggcttggagagcctccccgctgtgcacagttctctctttgccagggcagggcttggggcagcaccaggctggggca

SEQ ID NO: 617216 - DNA, 120 bp, Artificial Sequence
  ENSG00000177225_27 (sequence is synthesized)
gaggaggaaagcaagaggacagacctccagaagagcagcggagggcgggtgaggatttccccatataccagtgtgtgttcatctacccatgaggaataaaaccatgcagcagcatgcaaa

SEQ ID NO: 617217 - DNA, 120 bp, Artificial Sequence
  ENSG00000177225_28 (sequence is synthesized)
aagagaggtgggaagactccaggtaggcgtttctggatctctggtcagtggccactgcagtggttgtgggcaggaggcagggactgccccttcccccgacacacacagactttgtcgtct

SEQ ID NO: 617218 - DNA, 120 bp, Artificial Sequence
  ENSG00000177225_29 (sequence is synthesized)
gtggagcagcagcctcctgccccaaggccgaccggcactggcagcactttcctgttgaagaaatcttcctggcgtgtggtttcaaagtggcagggcttggggcagcaccaggctggggca

SEQ ID NO: 617219 - DNA, 120 bp, Artificial Sequence
  ENSG00000177225_30 (sequence is synthesized)
ggagctcggggcggggtcggggggtcgtgatggatcccggcgccgcgtcgctcctccgagtctcgtctgcccggcgaggcggcccgggcccgacgtttctagcggagggagccgcgtgcc

SEQ ID NO: 617220 - DNA, 120 bp, Artificial Sequence
  ENSG00000177225_31 (sequence is synthesized)
tgggcctggtctctgaggccgctgcgctgcgagaggggagcccgggtgtggggaggggccattccgggagttgacccagctctgaggtcgggcggccgcggggaccctgaccttctgagc

SEQ ID NO: 617221 - DNA, 120 bp, Artificial Sequence
  ENSG00000177225_32 (sequence is synthesized)
cacgcgggtcggagcgcagcggggtgcgtcccctggcgctgagcctgcagggtctcagggcagcaggggagggatgagcagcggagcacgagggtgcctggccttgttctgagccttttg

SEQ ID NO: 617222 - DNA, 120 bp, Artificial Sequence
  ENSG00000177225_33 (sequence is synthesized)
gagagggaagtgagcagcccaaggtcaccgcaccacggagaggtgtgtcggcccagtccttcctccactgtttcacgatggccagcaccgccttcaacctgcaggtggccacccctgggg

SEQ ID NO: 617223 - DNA, 120 bp, Artificial Sequence
  ENSG00000177225_34 (sequence is synthesized)
acccagcgccgagcccgagccatggcgtccgagcggctccctaacaggcccgcctgtctgctcgtggccagcggcgccgccgaaggggaaagccatggaatttgtggatgtgactgagag

SEQ ID NO: 617224 - DNA, 120 bp, Artificial Sequence
  ENSG00000177225_35 (sequence is synthesized)
tgcttcagtggtgagcctcgagggtgccccctgcacttacagaagatggggtggggggcttccctgctgcagcctgggggagaagcctcctgggccctgggttctatagacccccatggc

SEQ ID NO: 617225 - DNA, 120 bp, Artificial Sequence
  ENSG00000177225_36 (sequence is synthesized)
cggccgtgcagaacctgctcttcctctgtggcagccggtgagggcaccagggtgggcacattcctgccacatcagagctgcacccggtgcttttgcccaagctttgaccacacgtctgtc

SEQ ID NO: 617226 - DNA, 120 bp, Artificial Sequence
  ENSG00000177238_0 (sequence is synthesized)
actgtgtgcccatcacgcgtggtgtccactgccagctgcccctgtgagtccctgtccttgcttggagcctgctgcttgtctcagatccttggacccagccctgaccccagtccagctaag

SEQ ID NO: 617227 - DNA, 120 bp, Artificial Sequence
  ENSG00000177238_1 (sequence is synthesized)
ctcaaccctgaccggtcctccttcgagactctttcagcctaagatctccaaccagacctgcccgccatgtcggctgcgcccggcctcctgcaccaggagctgtcctgcccgctgtgcctg

SEQ ID NO: 617228 - DNA, 120 bp, Artificial Sequence
  ENSG00000177238_2 (sequence is synthesized)
cagctgttcgacgcgcccgtgacagccgagtgcggccacagtttctgccgcgcctgcctaggccgcgtggccggggagccggcggcggatggcaccgttctctgcccctgctgccaggcc

SEQ ID NO: 617229 - DNA, 120 bp, Artificial Sequence
  ENSG00000177238_3 (sequence is synthesized)
cccacgcggccgcaggcactcagcaccaacctgcagctggcgcgcctggtggaggggctggcccaggtgccgcagggccactgcgaggagcacctggacccgctgagcatctactgcgag

SEQ ID NO: 617230 - DNA, 120 bp, Artificial Sequence
  ENSG00000177238_4 (sequence is synthesized)
caggaccgcgcgctggtgtgcggagtgtgcgcctcactcggctcgcaccgcggtcatcgcctcctgcctgccgccgaggcccacgcacgcctcaagacacagctgccacagcagaaactg

SEQ ID NO: 617231 - DNA, 120 bp, Artificial Sequence
  ENSG00000177238_5 (sequence is synthesized)
cagctgcaggaggcatgcatgcgcaaggagaagagtgtggctgtgctggagcatcagctggtggaggtggaggagacagtgcgtcagttccggggggccgtgggggagcagctgggcaag

SEQ ID NO: 617232 - DNA, 120 bp, Artificial Sequence
  ENSG00000177238_6 (sequence is synthesized)
atgcgggtgttcctggctgcactggagggctccttggaccgcgaggcagagcgtgtacggggtgaggcaggggtcgccttgcgccgggagctggggagcctgaactcttacctggagcag

SEQ ID NO: 617233 - DNA, 120 bp, Artificial Sequence
  ENSG00000177238_7 (sequence is synthesized)
ctgcggcagatggagaaggtcctggaggaggtggcggacaagccgcagactgagttcctcatgaaatactgcctggtgaccagcaggctgcagaagatcctggcagagtctcccccaccc

SEQ ID NO: 617234 - DNA, 120 bp, Artificial Sequence
  ENSG00000177238_8 (sequence is synthesized)
gcccgtctggacatccagctgccaattatctcagatgacttcaaattccaggtgtggaggaagatgttccgggctctgatgccagcgctggaggagctgacctttgacccgagctctgcg

SEQ ID NO: 617235 - DNA, 120 bp, Artificial Sequence
  ENSG00000177238_9 (sequence is synthesized)
cacccgagcctggtggtgtcttcctctggccgccgcgtggagtgctcggagcagaaggcgccgccggccggggaggacccgcgccagttcgacaaggcggtggcggtggtggcgcaccag

SEQ ID NO: 617236 - DNA, 120 bp, Artificial Sequence
  ENSG00000177238_10 (sequence is synthesized)
cagctctccgagggcgagcactactgggaggtggatgttggcgacaagccgcgctgggcgctgggcgtgatcgcggccgaggccccccgccgcgggcgcctgcacgcggtgccctcgcag

SEQ ID NO: 617237 - DNA, 120 bp, Artificial Sequence
  ENSG00000177238_11 (sequence is synthesized)
ggcctgtggctgctggggctgcgcgagggcaagatcctggaggcacacgtggaggccaaggagccgcgcgctctgcgcagccccgagaggcggcccacgcgcattggcctttacctgagc

SEQ ID NO: 617238 - DNA, 120 bp, Artificial Sequence
  ENSG00000177238_12 (sequence is synthesized)
ttcggcgacggcgtcctctccttctacgatgccagcgacgccgacgcgctcgtgccgctttttgccttccacgagcgcctgcccaggcccgtgtaccccttcttcgacgtgtgctggcac

SEQ ID NO: 617239 - DNA, 120 bp, Artificial Sequence
  ENSG00000177238_13 (sequence is synthesized)
gacaagggcaagaatgcccagccgctgctgctcgtgggtcccgaaggcgccgaggcctgagccgccggacgggtagtggaggggcgcgggggcctgggttgaagcttaggtctccttggt

SEQ ID NO: 617240 - DNA, 120 bp, Artificial Sequence
  ENSG00000177238_14 (sequence is synthesized)
cgggtctgacgggagaagggtggggagcgggttgccagggcccagggggctgggaactgggggatctcccagaatactgacaagcgtggggtaggactggcttggtggctcatgcctgta

SEQ ID NO: 617241 - DNA, 67 bp, Artificial Sequence
  ENSG00000177238_15 (sequence is synthesized)
ctctactgaaaatacaaaaatgagctgggcgcggtggcatacgcctgtaatcccagctagttgggag

SEQ ID NO: 617242 - DNA, 120 bp, Artificial Sequence
  ENSG00000177238_16 (sequence is synthesized)
gactctgtctcaaaaaaaaaaaaaagtgtgggggttggcatggcctggggactgctggtgaggggttggagtgacgctggggacaagacccagtggggtagggagatctggagtcaggtc

SEQ ID NO: 617243 - DNA, 120 bp, Artificial Sequence
  ENSG00000177238_17 (sequence is synthesized)
ggtcagtggggaaatcagaatttgggaaccaggaggcctgagaattccaggaagaaactaaggttgagcgagggagggacagggccaggttgggggattgatgggaggagcttgagaacc

SEQ ID NO: 617244 - DNA, 120 bp, Artificial Sequence
  ENSG00000177238_18 (sequence is synthesized)
tgtagataaggggctccttttgcctcacactcccctcctccttaggccttgggtcccccgctccagattcaccttacccaaaagccttctccttagttctccaccttaggcatgcattaa

SEQ ID NO: 617245 - DNA, 120 bp, Artificial Sequence
  ENSG00000177238_19 (sequence is synthesized)
ttaaaatcacctttttaaagcccttagccatgacttgttaaagcatagggtgctaagtttctgatttagtaggttggacaggtcaaaaatgctcatttcttttttttatttctttttttt

SEQ ID NO: 617246 - DNA, 120 bp, Artificial Sequence
  ENSG00000177238_20 (sequence is synthesized)
attacagacatgagccactgcacctggctgaaaatgctcatttttttttttttaatttagtttttgtagaaatggtgtctcgttacattgcccaggctgatcttgaactcttggcctcag

SEQ ID NO: 617247 - DNA, 86 bp, Artificial Sequence
  ENSG00000177238_21 (sequence is synthesized)
ttagtttttgtagaaatggtgtctcgttacattgcccaggctgatcttgaactcttggcctcaggtgatcctcctgccttggcctt

SEQ ID NO: 617248 - DNA, 120 bp, Artificial Sequence
  ENSG00000177238_22 (sequence is synthesized)
cgctgctggccacaggggctgacgctgcgggaagccctgacctagtgcacaacccattgggctcttcactgtcagtgtagaggcataggtccaaaatatgtttccccagtcaaaaacatg

SEQ ID NO: 617249 - DNA, 120 bp, Artificial Sequence
  ENSG00000177238_23 (sequence is synthesized)
taaggtttgcaccaggagtggaaggaaacaaacaaacataaaccaaagcaaagacacttaagggctgggtactcatgcctgtaaacccaacactttgggagtttgaggcaggaggctcat

SEQ ID NO: 617250 - DNA, 120 bp, Artificial Sequence
  ENSG00000177238_24 (sequence is synthesized)
ggccaggagtttgagaccagcctggggaacatagtgagaccctgttgcaacaaaaaccagaaaaacaacaaaaagaagacattggaaaatggctggagctgattctaggtgaataaacaa

SEQ ID NO: 617251 - DNA, 120 bp, Artificial Sequence
  ENSG00000177238_25 (sequence is synthesized)
acaaccctcgacttaacttgctttgcctctgggatatgtttatcgagcgtcttgaacgttgaggaagccagccaagagaaagagcctgatgccaaggtcacactggtccctgctgctcat

SEQ ID NO: 617252 - DNA, 120 bp, Artificial Sequence
  ENSG00000177238_26 (sequence is synthesized)
ggggaagagaaggcccccaactagatgtcccagaactggccgctccccacttacttgctggttcacaccttctttggttttagcgcacagggcatttcttgggctctggagtaaccactg

SEQ ID NO: 617253 - DNA, 120 bp, Artificial Sequence
  ENSG00000177238_27 (sequence is synthesized)
aggccagagtgagagtccctcttccctggagggagaggcctttggggatccagacaggcttctctcctgagggaagacgctggcctggggtcactcattttcacggggagggtgtgctgg

SEQ ID NO: 617254 - DNA, 120 bp, Artificial Sequence
  ENSG00000177238_28 (sequence is synthesized)
cgggatgggtggaagggcctggggccccggcagcccattgcggaggttttctcgggagatggtgggtatgggactaagggtgaaagggaagttgtgagttgggtaagaaaggcctgagga

SEQ ID NO: 617255 - DNA, 120 bp, Artificial Sequence
  ENSG00000177238_29 (sequence is synthesized)
tctggcaggggaaggcggcacacctgggtgtgtctcccagaggaaggcctgtggagccctggcttcaggagacagaagagaggattaacggtagaagctctttcatgttagaaaataaaa

SEQ ID NO: 617256 - DNA, 120 bp, Artificial Sequence
  ENSG00000177238_30 (sequence is synthesized)
caatatagctaagggattatttggttgtaaaatccaacaccattaataaaactgttatattctgactccttcctcattaaatccacatgaaaagacatgtgacctactgcaaggcctcct

SEQ ID NO: 617257 - DNA, 120 bp, Artificial Sequence
  ENSG00000177238_31 (sequence is synthesized)
aattgccctccagcctttaatcctgacttggtaatgtttccaaaaatgcaaatgtggtcacgggactcagttgctcaaaactttcaacaactccctcttgcctacaggataaagccccca

SEQ ID NO: 617258 - DNA, 90 bp, Artificial Sequence
  ENSG00000177238_32 (sequence is synthesized)
ttcaacaactccctcttgcctacaggataaagcccccagtctttggcttagcatttgagctgttctgccattttttttgttggttggttt

SEQ ID NO: 617259 - DNA, 74 bp, Artificial Sequence
  ENSG00000177238_33 (sequence is synthesized)
tgacctcaggccttccagcttcatctgtttttagttaaaaaacaatttttttttttgagacaaggtcttgctct

SEQ ID NO: 617260 - DNA, 120 bp, Artificial Sequence
  ENSG00000177238_34 (sequence is synthesized)
tcactgcagccttgacctcctgggctcacatgatcctcccactccagcctcctgagtagataggatggcaggcacccatcaccatgcctgactattttttattttttgtattttggtaga

SEQ ID NO: 617261 - DNA, 120 bp, Artificial Sequence
  ENSG00000177238_35 (sequence is synthesized)
tgactattttttattttttgtattttggtagagatgaggtctcactatgttgctcatgctggtctcgagctcctggcctcaagcgatcctcccatcttggcttcccaaagtgttgggatt

SEQ ID NO: 617262 - DNA, 78 bp, Artificial Sequence
  ENSG00000177238_36 (sequence is synthesized)
ggtgacactacgcctagctgatttttgtatttctagtggggacaggggcttcactatgttggccagcctggtctcgaa

SEQ ID NO: 617263 - DNA, 120 bp, Artificial Sequence
  ENSG00000177238_37 (sequence is synthesized)
ggcctcccaaagtactaggattacaggcttgaaccgccgcgcccagccccagcttcatcttaaaaagaaaagttctctgttttaatatctaacagggcaaatattgaaagataaaaccac

SEQ ID NO: 617264 - DNA, 120 bp, Artificial Sequence
  ENSG00000177238_38 (sequence is synthesized)
gcaaatattgaaagataaaaccacataacaaaagctctttgggatcctagtgttggggaaaggctgctgtccattgactgtcactgaactctctgtcattgctcaggctaaggactggcc

SEQ ID NO: 617265 - DNA, 120 bp, Artificial Sequence
  ENSG00000177238_39 (sequence is synthesized)
acagtgagggagggacctgtggtctcctgtgttgctcctcaccctgtagactgtgggctgtgggctgtgtccagcctcaccttggatcaccgccctgtgcatgtctacactctggctatg

SEQ ID NO: 617266 - DNA, 71 bp, Artificial Sequence
  ENSG00000177238_40 (sequence is synthesized)
cttggatcaccgccctgtgcatgtctacactctggctatgctgaactgaactgctggggtctctgcacctc

SEQ ID NO: 617267 - DNA, 65 bp, Artificial Sequence
  ENSG00000177238_41 (sequence is synthesized)
cgggcctggcccctgcacttcttttttaggaatgtcagttccctcccacttatccttcatggctc

SEQ ID NO: 617268 - DNA, 120 bp, Artificial Sequence
  ENSG00000177238_42 (sequence is synthesized)
ttaggaatgtcagttccctcccacttatccttcatggctctcccaaaacaccaccatttcctgtcctctcttgaccttctaggcctccaggaagaatcagttactctcctctctggatcg

SEQ ID NO: 617269 - DNA, 120 bp, Artificial Sequence
  ENSG00000177238_43 (sequence is synthesized)
cccagcagctcctccaccatgtgtagcccacggcattgaattgtctacacacaggccatggtgtctggagggatggtggtatctgagacccaaagcctccttctgaggaaatgggtactc

SEQ ID NO: 617270 - DNA, 120 bp, Artificial Sequence
  ENSG00000177238_44 (sequence is synthesized)
tgagaagcagatgccaagataggattaaatgggcagagattttaggagggaagatgcccatgtgagggaagatggggagggccatcagaccgtgtcgcaagtctgctgttcgtgtgggag

SEQ ID NO: 617271 - DNA, 120 bp, Artificial Sequence
  ENSG00000177238_45 (sequence is synthesized)
ggagggagggaaggctcttgtggcgtctccggcagccagagccaccgtccaaacactcctgtgccttccgggacccgggctggctttagtctccctgcagagctgagtaatgtatgctgc

SEQ ID NO: 617272 - DNA, 120 bp, Artificial Sequence
  ENSG00000177238_46 (sequence is synthesized)
cttttgttggaattatatcaggaaactttctttcgaagctgccacaggttctttctgcgtatagttgccccagcttgagctgcatgcattgaaggaaatggcccatggctgactgagtga

SEQ ID NO: 617273 - DNA, 120 bp, Artificial Sequence
  ENSG00000177238_47 (sequence is synthesized)
ggtgggctttgtgggaaaagctgcgtaatccaggtggtccttgtcgggtggggctgcctgacccaggcagggtctccctggggatgtaggaaggtgaaatgtgaacagagaaaggagttc

SEQ ID NO: 617274 - DNA, 120 bp, Artificial Sequence
  ENSG00000177238_48 (sequence is synthesized)
ctccagcacatgtgttctaaagcaccagcgtcccctccgtgagtccctcctctccacgggaacgctggaaacccccagaaactggctgccaagacatttcctgtgtttcctgacatcttt

SEQ ID NO: 617275 - DNA, 120 bp, Artificial Sequence
  ENSG00000177238_49 (sequence is synthesized)
gacatttcctgtgtttcctgacatctttaggtagcataatagcaaacttgaacctgccaaggccatgataaaactgcaagcaagaacatttatcgtggccaggtgcagtggctcacgcct

SEQ ID NO: 617276 - DNA, 77 bp, Artificial Sequence
  ENSG00000177238_50 (sequence is synthesized)
gatgagctgagatcgggccactgcattccagtctgggtgagagagttaaaacaggaattaaaagaaattaaagaatg

SEQ ID NO: 617277 - DNA, 85 bp, Artificial Sequence
  ENSG00000177238_51 (sequence is synthesized)
aaaactcagttgtatgtaagaaaaccccattcaccctgaggaagagaaagagctaaatagtgagccttatctctctccctttccc

SEQ ID NO: 617278 - DNA, 78 bp, Artificial Sequence
  ENSG00000177238_52 (sequence is synthesized)
ctagctgtgcagctgcaaggtcactagtaaaaaatgatgtaatgcatgtctcaactgaataactgtctttgtttcttg

SEQ ID NO: 617279 - DNA, 68 bp, Artificial Sequence
  ENSG00000177238_53 (sequence is synthesized)
agtcataaaacatgtttttccttgaaaagtaaaaaatgatgtaatgcatgtctcaactgaataactgc

SEQ ID NO: 617280 - DNA, 120 bp, Artificial Sequence
  ENSG00000177238_54 (sequence is synthesized)
tccgcctcaaaaaaaaaaaaaaaaaaaggtaaccggactctttgttcagggctcagtctttttggatgttaatctgaccgggccagtgcacctaactaaataataaataataagtatcct

SEQ ID NO: 617281 - DNA, 120 bp, Artificial Sequence
  ENSG00000177238_55 (sequence is synthesized)
taataaataataagtatcctcctcaacctcttggtctctctgattcctaaattatcccactgcagaatgagactctgtctcaaaggaaaaaaaagaaaatttattgagaccttattatgc

SEQ ID NO: 617282 - DNA, 120 bp, Artificial Sequence
  ENSG00000177238_56 (sequence is synthesized)
atgcgtcaatagctctctattcagaatctcactgatcttcgcaaccctggatctcacaacaacgagagccccactaggttgcctcttttgttttgttttgttttttttttgagatggagt

SEQ ID NO: 617283 - DNA, 120 bp, Artificial Sequence
  ENSG00000177238_57 (sequence is synthesized)
acaggcgtgagccaccgcgtccggcttaggttgcctcttatactgggttcacgcatcccctgggtgcatgacagtctgaccacaaaggaccccggtccacagaagcatgatgcatcttgg

SEQ ID NO: 617284 - DNA, 120 bp, Artificial Sequence
  ENSG00000177238_58 (sequence is synthesized)
agtatcgactttatgccaatattcttcttcttgatactggtggtggtgagaaagttgggtaatttaaccaaaagtaaaaatcaagatgtcacgttcccattaaaacaaacatagagtaca

SEQ ID NO: 617285 - DNA, 120 bp, Artificial Sequence
  ENSG00000177239_0 (sequence is synthesized)
gttgacggcgctgcgatggctgcctgcgagggcaggagaagcggagctctcggttcctctcagtcggacttcctgacgccgccagtgggcggggccccttgggccgtcgccaccactgta

SEQ ID NO: 617286 - DNA, 120 bp, Artificial Sequence
  ENSG00000177239_1 (sequence is synthesized)
gtcatgtacccaccgccgccgccgccgcctcatcgggacttcatctcggtgacgctgagctttggcgagaactatgacaacagcaagagttggcggcggcgctcgtgctggaggaaatgg

SEQ ID NO: 617287 - DNA, 120 bp, Artificial Sequence
  ENSG00000177239_2 (sequence is synthesized)
aagcaactgtcgagattgcagcggaatatgattctcttcctccttgcctttctgcttttctgtggactcctcttctacatcaacttggctgaccattggaaagctctggctttcaggcta

SEQ ID NO: 617288 - DNA, 120 bp, Artificial Sequence
  ENSG00000177239_3 (sequence is synthesized)
gaggaagagcagaagatgaggccagaaattgctgggttaaaaccagcaaatccacccgtcttaccagctcctcagaaggcggacaccgaccctgagaacttacctgagatttcgtcacag

SEQ ID NO: 617289 - DNA, 120 bp, Artificial Sequence
  ENSG00000177239_4 (sequence is synthesized)
aagacacaaagacacatccagcggggaccacctcacctgcagattagacccccaagccaagacctgaaggatgggacccaggaggaggccacaaaaaggcaagaagcccctgtggatccc

SEQ ID NO: 617290 - DNA, 120 bp, Artificial Sequence
  ENSG00000177239_5 (sequence is synthesized)
cgcccggaaggagatccgcagaggacagtcatcagctggaggggagcggtgatcgagcctgagcagggcaccgagctcccttcaagaagagcagaagtgcccaccaagcctcccctgcca

SEQ ID NO: 617291 - DNA, 120 bp, Artificial Sequence
  ENSG00000177239_6 (sequence is synthesized)
ccggccaggacacagggcacaccagtgcatctgaactatcgccagaagggcgtgattgacgtcttcctgcatgcatggaaaggataccgcaagtttgcatggggccatgacgagctgaag

SEQ ID NO: 617292 - DNA, 120 bp, Artificial Sequence
  ENSG00000177239_7 (sequence is synthesized)
cctgtgtccaggtccttcagtgagtggtttggcctcggtctcacactgatcgacgcgctggacaccatgtggatcttgggtctgaggaaagaatttgaggaagccaggaagtgggtgtcg

SEQ ID NO: 617293 - DNA, 120 bp, Artificial Sequence
  ENSG00000177239_8 (sequence is synthesized)
aagaagttacactttgaaaaggacgtggacgtcaacctgtttgagagcacgatccgcatcctgggggggctcctgagtgcctaccacctgtctggggacagcctcttcctgaggaaagct

SEQ ID NO: 617294 - DNA, 120 bp, Artificial Sequence
  ENSG00000177239_9 (sequence is synthesized)
gaggattttggaaatcggctaatgcctgccttcagaacaccatccaagattccttactcggatgtgaacatcggtactggagttgcccacccgccacggtggacctccgacagcactgtg

SEQ ID NO: 617295 - DNA, 120 bp, Artificial Sequence
  ENSG00000177239_10 (sequence is synthesized)
gccgaggtgaccagcattcagctggagttccgggagctctcccgtctcacaggggataagaagtttcaggaggcagtggagaaggtgacacagcacatccacggcctgtctgggaagaag

SEQ ID NO: 617296 - DNA, 120 bp, Artificial Sequence
  ENSG00000177239_11 (sequence is synthesized)
tgggcgccagggccgacagctactatgagtacctgctgaagcagtggatccagggcgggaagcaggagacacagctgctggaagactacgtggaagccatcgagggtgtcagaacgcacc

SEQ ID NO: 617297 - DNA, 120 bp, Artificial Sequence
  ENSG00000177239_12 (sequence is synthesized)
tgctgcggcactccgagcccagtaagctcacctttgtgggggagcttgcccacggccgcttcagtgccaagatggaccacctggtgtgcttcctgccagggacgctggctctgggcgtct

SEQ ID NO: 617298 - DNA, 120 bp, Artificial Sequence
  ENSG00000177239_13 (sequence is synthesized)
accacggcctgcccgccagccacatggagctggcccaggagctcatggagacttgttaccagatgaaccggcagatggagacggggctgagtcccgagatcgtgcacttcaacctttacc

SEQ ID NO: 617299 - DNA, 120 bp, Artificial Sequence
  ENSG00000177239_14 (sequence is synthesized)
cccagccgggccgtcgggacgtggaggtcaagccagcagacaggcacaacctgctgcggccagagaccgtggagagcctgttctacctgtaccgcgtcacaggggaccgcaaataccagg

SEQ ID NO: 617300 - DNA, 120 bp, Artificial Sequence
  ENSG00000177239_15 (sequence is synthesized)
actggggctgggagattctgcagagcttcagccgattcacacgggtcccctcgggtggctattcttccatcaacaatgtccaggatcctcagaagcccgagcctagggacaagatggaga

SEQ ID NO: 617301 - DNA, 120 bp, Artificial Sequence
  ENSG00000177239_16 (sequence is synthesized)
gcttcttcctgggggagacgctcaagtatctgttcttgctcttctccgatgacccaaacctgctcagcctggatgcctacgtgttcaacaccgaagcccaccctctgcctatctggaccc

SEQ ID NO: 617302 - DNA, 120 bp, Artificial Sequence
  ENSG00000177239_17 (sequence is synthesized)
ctgcctagggtggatggctgctggtgtggggacttcgggtgggcagaggcaccttgctgggtctgtggcattttccaagggcccacgtagcaccggcaaccgccaagtggcccaggctct

SEQ ID NO: 617303 - DNA, 120 bp, Artificial Sequence
  ENSG00000177239_18 (sequence is synthesized)
gaactggctctgggctcctcctcgtctctgctttaatcaggacaccgtgaggacaagtgaggccgtcagtcttggtgtgatgcggggtgggctgggccgctggagcctccgcctgcttcc

SEQ ID NO: 617304 - DNA, 120 bp, Artificial Sequence
  ENSG00000177239_19 (sequence is synthesized)
tccagaagacacgaatcatgactcacgattgctgaagcctgagcaggtctctgtgggccgaccagaggggggcttcgaggtggtccctggtactggggtgaccgagtggacagcccaggg

SEQ ID NO: 617305 - DNA, 120 bp, Artificial Sequence
  ENSG00000177239_20 (sequence is synthesized)
tgcagctctgcccgggctcgtgaagcctcagatgtccccaatccaagggtctggaggggctgccgtgactccagaggcctgaggctccagggctggctctggtgtttacaagctggactc

SEQ ID NO: 617306 - DNA, 120 bp, Artificial Sequence
  ENSG00000177239_21 (sequence is synthesized)
agggatcctcctggccgccccgcagggggcttggagggctggacggcaagtccgtctagctcacgggcccctccagtggaatgggtcttttcggtggagataaaagttgatttgctctaa

SEQ ID NO: 617307 - DNA, 120 bp, Artificial Sequence
  ENSG00000177239_22 (sequence is synthesized)
tggaaagctccaggaggcatatatggcaacgaattggcaagaaatcaagataaagagaaaggtagagctgtatgtaaccacctggctagaacacagatgttaatttgatgctgtctgact

SEQ ID NO: 617308 - DNA, 120 bp, Artificial Sequence
  ENSG00000177239_23 (sequence is synthesized)
gcaggtactgtgtgtgtgtgtgtatgtgcatgtgtgttttcaggttttttactgtgataaaacacacaaaacgcaccaccttaaccatttccaggcgtggtcggtggtgttacattcacg

SEQ ID NO: 617309 - DNA, 120 bp, Artificial Sequence
  ENSG00000177239_24 (sequence is synthesized)
gcaaatgtgcgttcctggttggggcagccgtgggcggctcgcctgcagcggtctcagcggcccaaattctgcggggcggtggtgggaagagggctcagagccccagcaggttttctgggc

SEQ ID NO: 617310 - DNA, 82 bp, Artificial Sequence
  ENSG00000177239_25 (sequence is synthesized)
gtgcaggcatgcaggtcggtggtgttacacacaacgctgttgcaggcgtgcaggtcagtggtacacacattcacgctattgc

SEQ ID NO: 617311 - DNA, 120 bp, Artificial Sequence
  ENSG00000177239_26 (sequence is synthesized)
gtggtgttacacacaacgctgttgcaggcgtgcaggtcagtggtacacacattcacgctattgcaggcgtgcaggccggtggtgttacattcacgctgttgcaggcgtgcaggttggtgt

SEQ ID NO: 617312 - DNA, 80 bp, Artificial Sequence
  ENSG00000177239_27 (sequence is synthesized)
gcaggttggtgttacacacattcacacttgcaggcgtgcgggtcggtggtttacacacattcacacttgcaggcgtgcag

SEQ ID NO: 617313 - DNA, 88 bp, Artificial Sequence
  ENSG00000177239_28 (sequence is synthesized)
gcgtgcaggtcggtggtgttacattcacactgttgcaggtgtgcaggttggtgttacacacattcacactgttgcaggcttgcaggcg

SEQ ID NO: 617314 - DNA, 83 bp, Artificial Sequence
  ENSG00000177239_29 (sequence is synthesized)
ggtggtgttacacacattcacactgctgttgcaggcatgcaggtcggtagtgttacacattcatgctgttgcaggcgtgcagg

SEQ ID NO: 617315 - DNA, 120 bp, Artificial Sequence
  ENSG00000177239_30 (sequence is synthesized)
caggtcggtggtgttgcacattcatgctgttgcaggcatgcaggtcggtggtgttacattcacgctgttgcaggagtacaggtcagtggtgttacacacattcatgctgttgtgcagcta

SEQ ID NO: 617316 - DNA, 120 bp, Artificial Sequence
  ENSG00000177239_31 (sequence is synthesized)
tcacttccatctccagagcccttttcatcttaaaactgaagctctcccatcacacagtgacccttcatgtccctccccagtccctgaaaaacactgttcaggtttttcttcctggacctc

SEQ ID NO: 617317 - DNA, 120 bp, Artificial Sequence
  ENSG00000177239_32 (sequence is synthesized)
actgttcaggtttttcttcctggacctcattgtgtggagttcctcgtgtgagtgcagtcacacacgatttgtcctttttttgttttcgtttgttgagacagagtctcattctgtcactca

SEQ ID NO: 617318 - DNA, 120 bp, Artificial Sequence
  ENSG00000177239_33 (sequence is synthesized)
tcactgcaacctccactcccagattcctttttcaggctgaatatctgctgcgtggctaggccactttttgtttaatcctctctcctctggtggacaccaggactgtgctgttttggttgc

SEQ ID NO: 617319 - DNA, 120 bp, Artificial Sequence
  ENSG00000177239_34 (sequence is synthesized)
tgtaagcgcgggtgcacacgcctgcctgaggctgtgttttggccgttgtgagtgtgggtgcacacacctgcctgaggctctgctttgttgtgagtgcgggtgcacacacctgcctgaggc

SEQ ID NO: 617320 - DNA, 120 bp, Artificial Sequence
  ENSG00000177239_35 (sequence is synthesized)
aggctgtgttttgggtgttgtgagtgtgggtgcacacacctgcctgaggctgtgttttgggtgttgtgagtgtgggtgcacacacctgcctgaggctgtggcgcgatctcggctcactgc

SEQ ID NO: 617321 - DNA, 64 bp, Artificial Sequence
  ENSG00000177239_36 (sequence is synthesized)
tcagcctcccgagtagctgggaccacacccaccaccacaccccgtggaactgacctcaggtgat

SEQ ID NO: 617322 - DNA, 67 bp, Artificial Sequence
  ENSG00000177239_37 (sequence is synthesized)
tttactttgttaatggtgtattttgatagataacagattgtcattttcatgaagcacagctggtcag

SEQ ID NO: 617323 - DNA, 120 bp, Artificial Sequence
  ENSG00000177239_38 (sequence is synthesized)
agataacagattgtcattttcatgaagcacagctggtcagtttattgttgctcatgtatttggcctcatgttcgagtccctgtttttaatcatgagctggacacagccctctttagagca

SEQ ID NO: 617324 - DNA, 120 bp, Artificial Sequence
  ENSG00000177239_39 (sequence is synthesized)
actgtgaccacttgtggtgagaagtgcagcccacaccatccacgtgaggctcccacacgccatccacgtgaggctcccatgcagacatttagaaggcgttttcactgcagctcagaaaat

SEQ ID NO: 617325 - DNA, 120 bp, Artificial Sequence
  ENSG00000177239_40 (sequence is synthesized)
ggccccaggcccccatgggcacccccatgtcaccagggcctctggttgctgccggtacacagggataggcagccaggcctcgaaggtgctgggcatgggtttgggtgtctgcgttgggta

SEQ ID NO: 617326 - DNA, 120 bp, Artificial Sequence
  ENSG00000177239_41 (sequence is synthesized)
gaggagctgagggtggctgtgacttggaggatgagtaggagctcaccaggagggcgtggagccgaggcgtttaatatcatcaggagcaacactgggctcagaaggcaggcacacttgccg

SEQ ID NO: 617327 - DNA, 120 bp, Artificial Sequence
  ENSG00000177239_42 (sequence is synthesized)
tccctccagagccatggctgacggccaggcctggtgggctctcgtgaggacagtgcctgtggttgtcagatgctgtcccttcgagtaagggatgagagccatcctgaagatgggtcagct

SEQ ID NO: 617328 - DNA, 120 bp, Artificial Sequence
  ENSG00000177239_43 (sequence is synthesized)
ctgtggtgaccacccgttgggagcagtgacattcaggtgcgttgcactggtggctgtgtggctgtgtggtacggccaccaggagccatgtgggcaaggacagctgtgggctgggcacaga

SEQ ID NO: 617329 - DNA, 120 bp, Artificial Sequence
  ENSG00000177239_44 (sequence is synthesized)
gctctctctgctgggagtcagtcggtgctggggcgaggggaggcagagctcacagagcccctctacagctcaccctgcagctcggccctggccagtaaacccaccatccccctttctgcc

SEQ ID NO: 617330 - DNA, 86 bp, Artificial Sequence
  ENSG00000177239_45 (sequence is synthesized)
ctcgtgatccacccgcctgtaccacacccggctgatttatccttttatttgggctcctttcactcagcgtctttaagcttcatacg

SEQ ID NO: 617331 - DNA, 120 bp, Artificial Sequence
  ENSG00000177239_46 (sequence is synthesized)
gctcccccgttcccgcagccccccactcctgctgcccccagctcccacggcccccgctcctgctgccccccgccacactgtgtgtcaggaaaccgcagccgtgccaggcctggcccaggc

SEQ ID NO: 617332 - DNA, 120 bp, Artificial Sequence
  ENSG00000177239_47 (sequence is synthesized)
atttatgtggagggcgtattcattcacctctcaccgtggcctctgggggggtgaggggggcatcttcactgagggccatgggctgtgcagggtggcaccttctgtccggcaagggccagg

SEQ ID NO: 617333 - DNA, 120 bp, Artificial Sequence
  ENSG00000177239_48 (sequence is synthesized)
cctgctgtacttgtgtgggcccaggatgtgcctgtccctggtgccccacgggagccgatgcaccgtcctggtagagtgagatgactgctggtgtccacaggctgctggaagactacgtgg

SEQ ID NO: 617334 - DNA, 120 bp, Artificial Sequence
  ENSG00000177239_49 (sequence is synthesized)
gtgagcacctgtcctcgccccgcgtggtcacggccaccgggccacaggcacggctgggctgtggggctcaggctggctccgctcttggtggtggctgtgacctggatccgggaggggcgg

SEQ ID NO: 617335 - DNA, 120 bp, Artificial Sequence
  ENSG00000177239_50 (sequence is synthesized)
gcttgccgcagcctcggggtggccacactgcagcttgggggccctggcatccccatccccactgagcttcatggttgtgggacccagagtacttggaggggctgggcacccctcattttc

SEQ ID NO: 617336 - DNA, 120 bp, Artificial Sequence
  ENSG00000177239_51 (sequence is synthesized)
atttctcagggcctgtctagggagggtctctgctgtgggcccagcatccccccagtttaggaggcacacgcacccatgactggggcaccatccccactgtggaccaggccctgttttagg

SEQ ID NO: 617337 - DNA, 120 bp, Artificial Sequence
  ENSG00000177239_52 (sequence is synthesized)
tcacgccctccacgccagagtgtcacttcctggctctgctgtgatcttggcctgaggcccccgctgcctccgctcccaccgtctgccctgtgccctgtgccctgtgcggcaactgtgagg

SEQ ID NO: 617338 - DNA, 120 bp, Artificial Sequence
  ENSG00000177239_53 (sequence is synthesized)
ctggtgggcttgaacactcagcctaaataaccacacaaatttcgtagcactcattagcgtgtgtttggaaaagaccaggcagagttctggtgaggatgtggagaatctcttctcacttgg

SEQ ID NO: 617339 - DNA, 88 bp, Artificial Sequence
  ENSG00000177239_54 (sequence is synthesized)
tgcaggtcggtggtgttacacacattcacgctgttgcagatgtgcaggtcggtgctgttacattcacgctgttgcaattgctggcgtg

SEQ ID NO: 617340 - DNA, 84 bp, Artificial Sequence
  ENSG00000177239_55 (sequence is synthesized)
tgcaggtcggtggtgttacattcacgctgttgctgttgcagacatgcaggtcggtgctgttacacacattcatgctgttgcagg

SEQ ID NO: 617341 - DNA, 120 bp, Artificial Sequence
  ENSG00000177239_56 (sequence is synthesized)
tgcaggtcagtggtgttacacacattcacgctgttgcaggcatgcaggtcggtggtgttacacacattcacgcttttgcaggcgtgcaggtcggtggtcttacattcatactgttgcagg

SEQ ID NO: 617342 - DNA, 71 bp, Artificial Sequence
  ENSG00000177239_57 (sequence is synthesized)
actgttgcaggcgtgcaggtcggtggtacactggtgttgcaggcgtgcaggtcggtgttacacacatgctg

SEQ ID NO: 617343 - DNA, 120 bp, Artificial Sequence
  ENSG00000177239_58 (sequence is synthesized)
ctcccacgttggctgcccgtgcagctgcaggctgagggcagggcctgggatctggggctgaagagaccctctgattccaggaccacctggtgtgcttcctgccagggacgctggctctgg

SEQ ID NO: 617344 - DNA, 120 bp, Artificial Sequence; identical to SEQ ID NO: 614201
  ENSG00000177243_0 (sequence is synthesized)

SEQ ID NO: 617345 - DNA, 120 bp, Artificial Sequence; identical to SEQ ID NO: 614202
  ENSG00000177243_1 (sequence is synthesized)

SEQ ID NO: 617346 - DNA, 120 bp, Artificial Sequence; identical to SEQ ID NO: 614203
  ENSG00000177243_2 (sequence is synthesized)

SEQ ID NO: 617347 - DNA, 120 bp, Artificial Sequence; identical to SEQ ID NO: 614204
  ENSG00000177243_3 (sequence is synthesized)

SEQ ID NO: 617348 - DNA, 120 bp, Artificial Sequence
  ENSG00000177257_0 (sequence is synthesized)
agactcagctcctggtgaagctcccagccatcagccatgagggtcttgtatctcctcttctcgttcctcttcatatttctgatgcctcttccaggtgtttttggtggtataggcgatcct

SEQ ID NO: 617349 - DNA, 120 bp, Artificial Sequence
  ENSG00000177257_1 (sequence is synthesized)
gcaaaaagccatgaggaggccaagaagctgctgtggctgatgcggattcagaaagggctccctcatcagagacgtgcgacatgtaaaccaaattaaactatggtgtccaaagatacgcaa

SEQ ID NO: 617350 - DNA, 120 bp, Artificial Sequence
  ENSG00000177272_0 (sequence is synthesized)
agacccagacagagcatcgcggctttggctgcaacaggcggtgggctcggctcgggggcggaggcggcgaaagggcggggagcgcgaggaggagcgacctggcctcaccgctgccgcctc

SEQ ID NO: 617351 - DNA, 120 bp, Artificial Sequence
  ENSG00000177272_1 (sequence is synthesized)
cctcttccccgccgcatggacgagcgcctcagccttctgcgctcgccgccgccgccctcagcccgccaccgcgcccaccctcctcagcgcccagcgagcagcggcggtgcccacacgctg

SEQ ID NO: 617352 - DNA, 120 bp, Artificial Sequence
  ENSG00000177272_2 (sequence is synthesized)
accacggctacgcggagcccgccgcaggccgcgagctgccgcccgacatgaccgtggtgcccggggaccacctgctggagccggaggtggccgatggtggaggggccccgcctcaaggcg

SEQ ID NO: 617353 - DNA, 120 bp, Artificial Sequence
  ENSG00000177272_3 (sequence is synthesized)
gctgtggcggcggcggctgcgaccgctacgagccgctgccgccctcactgccggccgcgggcgagcaggactgctgcggggagcgcgtggtcatcaacatctccgggctgcgcttcgaga

SEQ ID NO: 617354 - DNA, 120 bp, Artificial Sequence
  ENSG00000177272_4 (sequence is synthesized)
cgcagctgaagaccctttgccagttccccgagacgctgctgggcgaccccaagcggcgcatgaggtacttcgacccgctccgcaacgagtacttcttcgaccgcaaccggcccagcttcg

SEQ ID NO: 617355 - DNA, 120 bp, Artificial Sequence
  ENSG00000177272_5 (sequence is synthesized)
acgccatcctctactactatcagtccgggggccgcatccgccggccggtcaacgtgcccatcgacattttctccgaggagatccgcttctaccagctgggcgaggaggccatggagaagt

SEQ ID NO: 617356 - DNA, 120 bp, Artificial Sequence
  ENSG00000177272_6 (sequence is synthesized)
tccgcgaggacgagggcttcctgcgggaggaggagcggcccttgccccgccgcgacttccagcgccaggtgtggctgctcttcgagtaccccgagagctccgggccggcccggggcatcg

SEQ ID NO: 617357 - DNA, 120 bp, Artificial Sequence
  ENSG00000177272_7 (sequence is synthesized)
ccatcgtgtccgtgctggtcatcctcatctccattgtcatcttctgcctggagacgctgccggagttccgcgacgagaaggactaccccgcctcgacgtcgcaggactcattcgaagcag

SEQ ID NO: 617358 - DNA, 120 bp, Artificial Sequence
  ENSG00000177272_8 (sequence is synthesized)
ccggcaacagcacgtcggggtcccgcgcaggagcctccagcttctccgatcccttcttcgtggtggagacgctgtgcatcatctggttctccttcgaactgctggtgcggttcttcgctt

SEQ ID NO: 617359 - DNA, 120 bp, Artificial Sequence
  ENSG00000177272_9 (sequence is synthesized)
gtcctagcaaagccaccttctcgcgaaacatcatgaacctgatcgacattgtggccatcattccttattttatcactctgggtaccgagctggccgaacgacagggcaatggacagcagg

SEQ ID NO: 617360 - DNA, 120 bp, Artificial Sequence
  ENSG00000177272_10 (sequence is synthesized)
ggggctgcagatcctcgggcaaacgctgaaggcgtccatgcgggagctgggattgctcatcttcttcctctttattggggtcatccttttctccagcgcggtctactttgccgaggcaga

SEQ ID NO: 617361 - DNA, 120 bp, Artificial Sequence
  ENSG00000177272_11 (sequence is synthesized)
cgaccccacttcaggtttcagcagcatcccggatgccttctggtgggcagtggtaaccatgacaacagtgggttacggcgatatgcacccagtgaccatagggggcaagattgtgggatc

SEQ ID NO: 617362 - DNA, 120 bp, Artificial Sequence
  ENSG00000177272_12 (sequence is synthesized)
tctctgtgccatcgccggtgtcttgaccatcgcattgccagttcccgtgattgtttccaacttcaattacttctaccaccgggagacagaaggggaagagcaatcccagtacatgcacgt

SEQ ID NO: 617363 - DNA, 120 bp, Artificial Sequence
  ENSG00000177272_13 (sequence is synthesized)
gggaagttgccagcacctctcctcttcagccgaggagctccgaaaagcaaggagtaactcgactctgagtaagtcggagtatatggtgatcgaagaggggggtatgaaccatagcgcttt

SEQ ID NO: 617364 - DNA, 120 bp, Artificial Sequence
  ENSG00000177272_14 (sequence is synthesized)
cccccagacccctttcaaaacgggcaattccactgccacctgcaccacgaacaataatcccaactcttgtgtcaacatcaaaaagatattcaccgatgtttaatatgtgatacaagtgac

SEQ ID NO: 617365 - DNA, 120 bp, Artificial Sequence
  ENSG00000177272_15 (sequence is synthesized)
atgctgtgctcagtattgtgtggaacgtgcccccttggtctgcctatgcccttgttttatacatttccagaccattcatcaaggaaaggacctgaagaagtggaaagcacacttcattct

SEQ ID NO: 617366 - DNA, 120 bp, Artificial Sequence
  ENSG00000177272_16 (sequence is synthesized)
ccctctccctgctgcttcatactgaaacaggtgcctgttttgcaagtgggctgcattctctcagctctccttttccctcttaccctctctctcttaacattgtaaacaacagacttacgt

SEQ ID NO: 617367 - DNA, 120 bp, Artificial Sequence
  ENSG00000177272_17 (sequence is synthesized)
taaacttcatttctagtacacgccctatttaaaaaagagcagtacatcctgggaggaaatgaaactaaagaacagttagagtaactgtttaacctcagaattttaaaggcagttgtttct

SEQ ID NO: 617368 - DNA, 120 bp, Artificial Sequence
  ENSG00000177272_18 (sequence is synthesized)
ttcctaagcacatcaattcgtagtaaatgatgcttcggtttgatggacctttcaacgttatttattgaatatgtatttcggttgcctaccctgtagatatgtggatgaagagtctaacta

SEQ ID NO: 617369 - DNA, 120 bp, Artificial Sequence
  ENSG00000177272_19 (sequence is synthesized)
gaataatgacttgtaaacccaccatgagttatttggtttttgacttaaattcctatttgaatcccctttcccggaattttaagtgtctctacaactttgaataaagggaaatgcccaaga

SEQ ID NO: 617370 - DNA, 120 bp, Artificial Sequence
  ENSG00000177275_0 (sequence is synthesized)
gctacaggacttccaactgggaagttgtctttcatccttttccttgctcctttcaaatcacatatccccttctccctgtaaactgtcagctaatcggaaggaaatcgctgaactgagtat

SEQ ID NO: 617371 - DNA, 120 bp, Artificial Sequence
  ENSG00000177275_1 (sequence is synthesized)
cacccaatgcctctgagtcactctcaaggacatgacattgaaacaaacatctgagtagcatgaacagcagctggacaccatgagggaggaaggggtgttgagcccagtgtgctaaatgtg

SEQ ID NO: 617372 - DNA, 120 bp, Artificial Sequence
  ENSG00000177275_2 (sequence is synthesized)
aaaggccctgcctggaatgtcctgtgcggagcggaacgtggttaaaaaatagagaattcatgatgggccatcagaatcacactttcagcagtgatttcatacttttgggattgttctctt

SEQ ID NO: 617373 - DNA, 120 bp, Artificial Sequence
  ENSG00000177275_3 (sequence is synthesized)
cttccccaacaagtgtggtcttcttcttagttttatttgtcattttcattatgagtgtaacagaaaatacgctcatgatcctcctcattcgcagtgactcccgactccacactccaatgt

SEQ ID NO: 617374 - DNA, 120 bp, Artificial Sequence
  ENSG00000177275_4 (sequence is synthesized)
attttctgctcagccatctctccttaatggatatcttgcatgtttccaacatcgttcccaaaatggtcactaactttctgtcaggcagcagaactatttcatttgcaggttgtgggttcc

SEQ ID NO: 617375 - DNA, 120 bp, Artificial Sequence
  ENSG00000177275_5 (sequence is synthesized)
aggtatttctgtccctcaccctcctgggtggtgagtgccttctcctggctgcaatgtcctgtgatcgctatgtggctatctgtcacccgctgcgctatccgattcttatgaaggagtatg

SEQ ID NO: 617376 - DNA, 120 bp, Artificial Sequence
  ENSG00000177275_6 (sequence is synthesized)
ccagcgctctcatggctggaggctcctggctcattggggttttcaactccacagtccacacagcttatgcactgcagtttcccttctgtggctctagggcaattgatcacttcttctgtg

SEQ ID NO: 617377 - DNA, 120 bp, Artificial Sequence
  ENSG00000177275_7 (sequence is synthesized)
gatcttcctgctgatccctttctccttgatctctgcttcttatggccaaattattcttactgtcctccagatgaaatcatcagaggcaaggaaaaagtcattttccacttgttccttcca

SEQ ID NO: 617378 - DNA, 120 bp, Artificial Sequence
  ENSG00000177275_8 (sequence is synthesized)
catgattgtggtcacgatgtactatgggccatttatttttacatatatgagacctaaatcataccacactccaggccaggataagttcctggcaatattctatacgatcctcacacccac

SEQ ID NO: 617379 - DNA, 120 bp, Artificial Sequence
  ENSG00000177275_9 (sequence is synthesized)
actcaaccctttcatctacagctttaggaataaagatgttctggcggtgatgaaaaatatgctcaaaagtaactttctgcacaaaaaaatgaataggaaaattcctgaatgtgtgttctg

SEQ ID NO: 617380 - DNA, 120 bp, Artificial Sequence
  ENSG00000177275_10 (sequence is synthesized)
tctatttctatgttaaatgcctgaaggatactcatgagaggtttcctagaaagaaatcaaagcttctatcttaccacatataagaagtgaatatttcagaaacattgttaataataaaca

SEQ ID NO: 617381 - DNA, 120 bp, Artificial Sequence
  ENSG00000177275_11 (sequence is synthesized)
ataatatgtgtttgtgttgtaaacacgtacctctaaaaatgtagtgttccttctgtggtaccaattataatcatgcaacagttacaggaagtagaagttacccaaggcgtcctattccct

SEQ ID NO: 617382 - DNA, 120 bp, Artificial Sequence
  ENSG00000177275_12 (sequence is synthesized)
aacaccaaaattgtaagacttatgagaatatccctaaaaatacagtcacacatccattgtataaaagacaaatccatgtttatttttataaaactttgttaaattatattgctaacaatc

SEQ ID NO: 617383 - DNA, 120 bp, Artificial Sequence
  ENSG00000177275_13 (sequence is synthesized)
acttatcaaaaattcacaaattccatatgaaatcattattctttgcctggtttatcaacacctttatttagtaaaattttacagatacacatatatatgcacacacacatatatatgtac

SEQ ID NO: 617384 - DNA, 120 bp, Artificial Sequence
  ENSG00000177275_14 (sequence is synthesized)
acacatatatacagatataagttgtgttaaaattgaattactcatcctatgctagaagcaactatacaatattagataggaatatcataaaaattgccttatttcatttatacatacagg

SEQ ID NO: 617385 - DNA, 120 bp, Artificial Sequence
  ENSG00000177283_0 (sequence is synthesized)
gggaagttgggctaagggcgctgctcccgccgaggaggaggcggcggctgggcgcgggccgcgccactcaggtgtccgctccgccttccggtctggatttgctcctgggtgtccagcagg

SEQ ID NO: 617386 - DNA, 120 bp, Artificial Sequence
  ENSG00000177283_1 (sequence is synthesized)
aaggagactgtgtgcacctcgcccgactgcggccggagcgcggcgctgacttttccaggcggcgggggtccgtctgtcccggcggcggacggacgaaggacggacgccggagaaagaggg

SEQ ID NO: 617387 - DNA, 80 bp, Artificial Sequence
  ENSG00000177283_2 (sequence is synthesized)
cggacgccggagaaagagggcggcggcctgggccgaggcgggtccccaactccggcggcggcggcggcggcttggccttg

SEQ ID NO: 617388 - DNA, 120 bp, Artificial Sequence
  ENSG00000177283_3 (sequence is synthesized)
agcggcccggcccagccatcttgactgcgcaccgcggccccagaggaaacttgcggcgcctccgccctctctgtccggcggagtcaccgccgcccggcgcggcggggagaagtggtcggg

SEQ ID NO: 617389 - DNA, 120 bp, Artificial Sequence
  ENSG00000177283_4 (sequence is synthesized)
cgcgcggagaggaggcgagcgagcgcgggacgatgagccgaggcccggccgctctgcgccgcgagggctgagcgcgacccggggccagcagagcggacctacggactgtggcgcgcgcct

SEQ ID NO: 617390 - DNA, 120 bp, Artificial Sequence
  ENSG00000177283_5 (sequence is synthesized)
gcagccgccttcaaacccccggagcggcggaaaggagtgcggaagggccctgcccaggctgcgggccgcgccgctgcggacgcgcccctagaaggggttagattatcggcagacccccct

SEQ ID NO: 617391 - DNA, 120 bp, Artificial Sequence
  ENSG00000177283_6 (sequence is synthesized)
cccgggcgaagcataagggagaccccagatcacccgctgtacccgtctgcggctctctcgtgggccccccccccggcacccctctgcgcgccgcctggagggcgagggcaccgggccgag

SEQ ID NO: 617392 - DNA, 120 bp, Artificial Sequence
  ENSG00000177283_7 (sequence is synthesized)
gcgcacagcatggagtggggttacctgttggaagtgacctcgctgctggccgccttggcgctgctgcagcgctctagcggcgctgcggccgcctcggccaaggagctggcatgccaagag

SEQ ID NO: 617393 - DNA, 120 bp, Artificial Sequence
  ENSG00000177283_8 (sequence is synthesized)
atcaccgtgccgctgtgtaagggcatcggctacaactacacctacatgcccaatcagttcaaccacgacacgcaagacgaggcgggcctggaggtgcaccagttctggccgctggtggag

SEQ ID NO: 617394 - DNA, 120 bp, Artificial Sequence
  ENSG00000177283_9 (sequence is synthesized)
atccagtgctcgcccgatctcaagttcttcctgtgcagcatgtacacgcccatctgcctagaggactacaagaagccgctgccgccctgccgctcggtgtgcgagcgcgccaaggccggc

SEQ ID NO: 617395 - DNA, 120 bp, Artificial Sequence
  ENSG00000177283_10 (sequence is synthesized)
tgcgcgccgctcatgcgccagtacggcttcgcctggcccgaccgcatgcgctgcgaccggctgcccgagcaaggcaaccctgacacgctgtgcatggactacaaccgcaccgacctaacc

SEQ ID NO: 617396 - DNA, 80 bp, Artificial Sequence
  ENSG00000177283_11 (sequence is synthesized)
gactacaaccgcaccgacctaaccaccgccgcgcccagcccgccgcgccgcctgccgccgccgccgcccggcgagcagcc

SEQ ID NO: 617397 - DNA, 80 bp, Artificial Sequence
  ENSG00000177283_12 (sequence is synthesized)
ggtggcgggaaggcgcggccccctggcggcggcgcggctccctgcgagcccgggtgccagtgccgcgcgcctatggtgag

SEQ ID NO: 617398 - DNA, 120 bp, Artificial Sequence
  ENSG00000177283_13 (sequence is synthesized)
atggtgagcgtgtccagcgagcgccacccgctctacaaccgcgtcaagacaggccagatcgctaactgcgcgctgccctgccacaacccctttttcagccaggacgagcgcgccttcacc

SEQ ID NO: 617399 - DNA, 120 bp, Artificial Sequence
  ENSG00000177283_14 (sequence is synthesized)
gtcttctggatcggcctgtggtcggtgctctgcttcgtgtccaccttcgccaccgtctccaccttccttatcgacatggagcgcttcaagtacccggagcggcccattatcttcctctcg

SEQ ID NO: 617400 - DNA, 120 bp, Artificial Sequence
  ENSG00000177283_15 (sequence is synthesized)
tcctctcggcctgctacctcttcgtgtcggtgggctacctagtgcgcctggtggcgggccacgagaaggtggcgtgcagcggtggcgcgccgggcgcggggggcgctgggggcgcgggcg

SEQ ID NO: 617401 - DNA, 120 bp, Artificial Sequence
  ENSG00000177283_16 (sequence is synthesized)
cggtggagcagcacgtgcgctacgagaccaccggccccgcgctgtgcaccgtggtcttcttgctggtctacttcttcggcatggccagctccatctggtgggtgatcttgtcgctcacat

SEQ ID NO: 617402 - DNA, 120 bp, Artificial Sequence
  ENSG00000177283_17 (sequence is synthesized)
ggttcctggcggccggtatgaagtggggcaacgaagccatcgccggctactcgcagtacttccacctggccgcgtggcttgtgcccagcgtcaagtccatcgcggtgctggcgctcagct

SEQ ID NO: 617403 - DNA, 120 bp, Artificial Sequence
  ENSG00000177283_18 (sequence is synthesized)
cggtggacggcgacccggtggcgggcatctgctacgtgggcaaccagagcctggacaacctgcgcggcttcgtgctggcgccgctggtcatctacctcttcatcggcaccatgttcctgc

SEQ ID NO: 617404 - DNA, 120 bp, Artificial Sequence
  ENSG00000177283_19 (sequence is synthesized)
tggccggcttcgtgtccctcttccgcatccgctcggtcatcaagcaacaggacggccccaccaagacgcacaagctggagaagctgatgatccgcctgggcctgttcaccgtgctctaca

SEQ ID NO: 617405 - DNA, 120 bp, Artificial Sequence
  ENSG00000177283_20 (sequence is synthesized)
ccgtgcccgccgcggtggtggtcgcctgcctcttctacgagcagcacaaccgcccgcgctgggaggccacgcacaactgcccgtgcctgcgggacctgcagcccgaccaggcacgcaggc

SEQ ID NO: 617406 - DNA, 120 bp, Artificial Sequence
  ENSG00000177283_21 (sequence is synthesized)
ccgactacgccgtcttcatgctcaagtacttcatgtgcctagtggtgggcatcacctcgggcgtgtgggtctggtccggcaagacgctggagtcctggcgctccctgtgcacccgctgct

SEQ ID NO: 617407 - DNA, 80 bp, Artificial Sequence
  ENSG00000177283_22 (sequence is synthesized)
aagacgctggagtcctggcgctccctgtgcacccgctgctgctgggccagcaagggcgccgcggtgggcgggggcgcggg

SEQ ID NO: 617408 - DNA, 120 bp, Artificial Sequence
  ENSG00000177283_23 (sequence is synthesized)
gcgggggctccctctacagcgacgtcagcactggcctgacgtggcggtcgggcacggcgagctccgtgtcttatccaaagcagatgccattgtcccaggtctgagcggaggggagggggc

SEQ ID NO: 617409 - DNA, 120 bp, Artificial Sequence
  ENSG00000177283_24 (sequence is synthesized)
gcccaggaggggtggggaggggggcgaggagagccaagtgcagcgaagggacacttgatgggctgaggttcccaccccttcacagtgttgattgctattagcatgataatgaactcttaa

SEQ ID NO: 617410 - DNA, 120 bp, Artificial Sequence
  ENSG00000177283_25 (sequence is synthesized)
tggtatccattagctgggacttaaatgactcacttagaacaaagtacctggcattgaagcctcccagacccagccccttttcctccattgatgtgcggggagctcctcccgccacgcgtt

SEQ ID NO: 617411 - DNA, 120 bp, Artificial Sequence
  ENSG00000177283_26 (sequence is synthesized)
aatttctgttggctgaggagggtggactctgcggcgtttccagaacccgagatttggagccctccctggctgcacttggctgggtttgcagtcagatacacagatttcacctgggagaac

SEQ ID NO: 617412 - DNA, 120 bp, Artificial Sequence
  ENSG00000177283_27 (sequence is synthesized)
ctctttttctccctcgactcttcctacgtaaactcccacccctgacttaccctggaggaggggtgaccgccacctgatgggattgcacggtttgggtattcttaatgaccaggcaaatgc

SEQ ID NO: 617413 - DNA, 120 bp, Artificial Sequence
  ENSG00000177283_28 (sequence is synthesized)
cttaagtaaacaaacaagaaatgtcttaattatacaccccacgtaaatacgggtttcttacattagaggatgtatttatataattatttgttaaattgtaaaaaaaaaagtgtaaaatat

SEQ ID NO: 617414 - DNA, 120 bp, Artificial Sequence
  ENSG00000177283_29 (sequence is synthesized)
gtatatatccaaagatatagtgtgtacatttttttgtaaaaagtttagaggcttacccctgtaagaacagatataagtattctattttgtcaataaaatgacttttgataaatgatttaa

SEQ ID NO: 617415 - DNA, 120 bp, Artificial Sequence
  ENSG00000177283_30 (sequence is synthesized)
ccattgccctctcccccgcctcttctgagctgtcacctttaaagtgcttgctaaggacgcatggggaaaatggacattttctggcttgtcattctgtacactgaccttaggcatggagaa

SEQ ID NO: 617416 - DNA, 120 bp, Artificial Sequence
  ENSG00000177283_31 (sequence is synthesized)
aattacttgttaaactctagttcttaagttgttagccaagtaaatatcattgttgaactgaaatcaaaattgagtttttgcaccttccccaaagacggtgtttttcatgggagctctttt

SEQ ID NO: 617417 - DNA, 120 bp, Artificial Sequence
  ENSG00000177283_32 (sequence is synthesized)
ctgatccatggataacaactctcactttagtggatgtaaatggaacttctgcaaggcagtaattccccttaggccttgttatttatcctgcatggtatcactaaaggtttcaaaaccctg

SEQ ID NO: 617418 - DNA, 120 bp, Artificial Sequence
  ENSG00000177291_0 (sequence is synthesized)
ggtcactgcagttgtcaggaatgtttcgcctcagaggcaaacggcttagggccgtctcaacttggagacagaaaaacccacctcctactcctggctcagacctttgctttcttatctcca

SEQ ID NO: 617419 - DNA, 120 bp, Artificial Sequence
  ENSG00000177291_1 (sequence is synthesized)
gctcacacctttaagtcttatgtagttaaaggacatttatccgcctccttggagaacacagccctccagtgtctcctgcagcctggagcctgggacattctggaagcatggaaggcgtgg

SEQ ID NO: 617420 - DNA, 120 bp, Artificial Sequence
  ENSG00000177291_2 (sequence is synthesized)
acttgctagggtttctcatcatcacattaaactgcaacgtgaccatggtgggaaagctctggttcgtcctcacgatgctgctgcggatgctggtgattgtcttggcggggcgacccgtct

SEQ ID NO: 617421 - DNA, 120 bp, Artificial Sequence
  ENSG00000177291_3 (sequence is synthesized)
accaggacgagcaggagaggtttgtctgcaacacgctgcagccgggatgcgccaatgtttgctacgacgtcttctcccccgtgtctcacctgcggttctggctgatccagggcgtgtgcg

SEQ ID NO: 617422 - DNA, 120 bp, Artificial Sequence
  ENSG00000177291_4 (sequence is synthesized)
tcctcctcccctccgccgtcttcagcgtctatgtcctgcaccgaggagccacgctcgccgcgctgggcccccgccgctgccccgacccccgggagccggcctccgggcagagacgctgcc

SEQ ID NO: 617423 - DNA, 120 bp, Artificial Sequence
  ENSG00000177291_5 (sequence is synthesized)
cgcggccattcggggagcgcggcggcctccaggtgcccgacttttcggccggctacatcatccacctcctcctccggaccctgctggaggcagccttcggggccttgcactactttctct

SEQ ID NO: 617424 - DNA, 120 bp, Artificial Sequence
  ENSG00000177291_6 (sequence is synthesized)
tccctgctgatgctgttcctctgggcggtcagcgcgctgtcttttctgctgggcctcgccgacctggtctgcagcctgcggcggcggatgcgcaggaggccgggaccccccacaagcccc

SEQ ID NO: 617425 - DNA, 120 bp, Artificial Sequence
  ENSG00000177291_7 (sequence is synthesized)
tccatccggaagcagagcggagcctcaggccacgcggagggacgccggactgacgaggagggtgggcgggaggaagagggggcaccggcgcccccgggtgcacgcgccggaggggagggg

SEQ ID NO: 617426 - DNA, 120 bp, Artificial Sequence
  ENSG00000177291_8 (sequence is synthesized)
gctggcagccccaggcgtacatccagggtgtcagggcacacgaagattccggatgaggatgagagtgaggtgacatcctccgccagcgaaaagctgggcagacagccccggggcaggccc

SEQ ID NO: 617427 - DNA, 120 bp, Artificial Sequence
  ENSG00000177291_9 (sequence is synthesized)
caccgagaggccgcccaggaccccaggggctcaggatccgaggagcagccctcagcagcccccagccgcctggccgcgcccccttcctgcagcagcctgcagccccctgacccgcctgcc

SEQ ID NO: 617428 - DNA, 120 bp, Artificial Sequence
  ENSG00000177291_10 (sequence is synthesized)
ccctgacccgcctgccagctccagtggtgctccccacctgagagccaggaagtctgagtgggtgtgaaaaaaacagcacctggcggtgccccggggctcacgcctgtaatcccaacactt

SEQ ID NO: 617429 - DNA, 120 bp, Artificial Sequence
  ENSG00000177291_11 (sequence is synthesized)
gaggatcgtttgagaatatatctccttgcccaagagtttgagaccagcctggacaacataatgagaccctcgtctctacaaaatatctaaaaattagctgggcacagtggctccctcctg

SEQ ID NO: 617430 - DNA, 84 bp, Artificial Sequence
  ENSG00000177291_12 (sequence is synthesized)
catttgagcctgggagatcgaggctgcagtgagccaagatcacggcactgcgctgcagcctgggcaacacagtgagaccctgtc

SEQ ID NO: 617431 - DNA, 120 bp, Artificial Sequence
  ENSG00000177294_0 (sequence is synthesized)
gcagacccggggcgcccatggagttggcgtcggagcaacagctgcgcgggcggagcagaaagcaagtgattgctttcctttcctcatttttggaagccctgcctaacacacagctgcact

SEQ ID NO: 617432 - DNA, 120 bp, Artificial Sequence
  ENSG00000177294_1 (sequence is synthesized)
gtacatcccagttcctggatggacgaagaaagtgaactgatccagccccaagaccagagctgctgggcctttctgcccgatttgtgtctgtgccgtgttttctggtggctaggagacagg

SEQ ID NO: 617433 - DNA, 120 bp, Artificial Sequence
  ENSG00000177294_2 (sequence is synthesized)
gacaggtccagggctgctcttgtctgcagaaagtggaaccagatgatgtattctgctgagctctggcggtacagaaccatcaccttcagcgggagaccttccagggtacatgcatctgaa

SEQ ID NO: 617434 - DNA, 120 bp, Artificial Sequence
  ENSG00000177294_3 (sequence is synthesized)
gttgagtcagctgtttggtatgttaagaagtttggtcgttatctggagcacctggaggtcaaattcatgaatccttacaatgctgtcttgaccaagaagttccaggtcaccatgcggggc

SEQ ID NO: 617435 - DNA, 120 bp, Artificial Sequence
  ENSG00000177294_4 (sequence is synthesized)
ctcctgtcttgtctgagtaagagcaacaaccgtctgaaatctctttccatccaatacctggagctggaccgcctggtatggaggaacagcatcaggagctcattcatcagcagcttgagc

SEQ ID NO: 617436 - DNA, 120 bp, Artificial Sequence
  ENSG00000177294_5 (sequence is synthesized)
ttcttcttaaagaagatgggcaaacgcctggattatctcaacctaaaaggggccaggctgaccgtggagcaaggctgccaaattctcgactccctcagctacatgaggaatgagaatgtg

SEQ ID NO: 617437 - DNA, 120 bp, Artificial Sequence
  ENSG00000177294_6 (sequence is synthesized)
atctcagagctcaacatcgaggactatttcagccatcaccttgctgtctacaacagcccccagttcaaaaagaccatgtccacattccacaatcttgtgtccctgaacctcaactacaac

SEQ ID NO: 617438 - DNA, 120 bp, Artificial Sequence
  ENSG00000177294_7 (sequence is synthesized)
ctccgacgagctgcttgagaacttgtgtgagaatgccagcaccctccggaccatcaacatcaaatgccacgttcatgacccccacggacaggtcatctggggtatgtcctgggccaagct

SEQ ID NO: 617439 - DNA, 120 bp, Artificial Sequence
  ENSG00000177294_8 (sequence is synthesized)
ggccaggcaggccaccaatctgaaggtgaacttcttctttgaacggatcatgaagtacgaacgcttggcccgaatcctcttgcaggagatcccgatcaggagcatcagtctgagaagctg

SEQ ID NO: 617440 - DNA, 120 bp, Artificial Sequence
  ENSG00000177294_9 (sequence is synthesized)
ctatttcagtgacccagactgttcaatgagacccactctgatagatctcctgcccaccttccggcacactctgcagaaattaacttgtgaattcaacaacaaccatgagtcactcgacga

SEQ ID NO: 617441 - DNA, 120 bp, Artificial Sequence
  ENSG00000177294_10 (sequence is synthesized)
ggagctgcacctcctcatcatatcctgcaggaagttgttttacttcaaaatctgggctttccttgatgttagttttgtggagcggatcctgaagagtcagaaagaacggcagtgtgccct

SEQ ID NO: 617442 - DNA, 120 bp, Artificial Sequence
  ENSG00000177294_11 (sequence is synthesized)
gcgtgtattcaaggcgagaatttatacaaacagatatgagacgaatgaagaggacaagaccctgcaggaaatttacaggaagtacagaaagctgatcgaatcagagcttagctattttgt

SEQ ID NO: 617443 - DNA, 120 bp, Artificial Sequence
  ENSG00000177294_12 (sequence is synthesized)
catcgtttactctgtgatgtaatgagcactctacagatgaagaaagctgggagcactttgaacttgaaaatcatttctcttagaactacacttgggcactgccggcccttttgctcctct

SEQ ID NO: 617444 - DNA, 120 bp, Artificial Sequence
  ENSG00000177294_13 (sequence is synthesized)
ctctcccctccactttttttttttgtcagctccatgacaacatgaccagctcagcaaaggctgagactgcccatgacctgaaggctccaggtggctttaaagcgctatgtttaccaacta

SEQ ID NO: 617445 - DNA, 120 bp, Artificial Sequence
  ENSG00000177294_14 (sequence is synthesized)
gtggtatttggaccagtggccacttgccattgacttggttttacaaggcctcagaatcggttcggatgcaggaactgtgtttgacgtttatgtcgaagttctcatcaaagcctggaaaat

SEQ ID NO: 617446 - DNA, 120 bp, Artificial Sequence
  ENSG00000177294_15 (sequence is synthesized)
acaagtgccagtgattaacaaagaatgtttacttaatttacttcagatctggtctcagttaaaggttagctcatccttatcaggtggtcacagaaactagatcccagtagcagagtgacc

SEQ ID NO: 617447 - DNA, 120 bp, Artificial Sequence
  ENSG00000177294_16 (sequence is synthesized)
tttggaagctagaattgtagtcaatggacttaaagtgagatcgtgggagccagttcttcacttaattaagcagagttgaaagactttcttctttccagctccctattttccttccttggg

SEQ ID NO: 617448 - DNA, 120 bp, Artificial Sequence
  ENSG00000177294_17 (sequence is synthesized)
ctattttctgtaagtcagacttggtttgcctcaatactacatatgccctgtaaaaataaattaactacaagagactgttgactgtatggccaccagccctgccctggtgtgtgtcctttg

SEQ ID NO: 617449 - DNA, 120 bp, Artificial Sequence
  ENSG00000177294_18 (sequence is synthesized)
caacactagtgtctgaggtggagccctccattcctcgtgtttttcatccactccccctttccttcctctcccccgccagtagaggactgtttgcgcaagagaccaatggattagccagca

SEQ ID NO: 617450 - DNA, 120 bp, Artificial Sequence
  ENSG00000177294_19 (sequence is synthesized)
aaaatctgggctttccttgatgttagttttgtggagcggatcctgaagagtcagaaagaacggcagtgtgccctgcgtgtattcaaggggatgatccagggaaaagaatgaatcaagcca

SEQ ID NO: 617451 - DNA, 120 bp, Artificial Sequence
  ENSG00000177294_20 (sequence is synthesized)
cagcatcagtgttcctattaatttcttgttagttttgtagctttgggtatctgcacttgtcaacagtaggctgtaagaatatttattggaaaccacaaaaatctcactagcctcctctat

SEQ ID NO: 617452 - DNA, 120 bp, Artificial Sequence
  ENSG00000177294_21 (sequence is synthesized)
cccggagcctgggatggcaaagtgctacaccagaaaagggctatgtggatcacaaggacagtgtaggcctcatgactctgagataacagaacagaggcacagagaggctaagcaacttac

SEQ ID NO: 617453 - DNA, 120 bp, Artificial Sequence
  ENSG00000177294_22 (sequence is synthesized)
cctaggtcacacagtaagaggaagagtgagccaggatttgaaccttggtgtgtctgacataaaggccagcatcccatctataaaatggagctagtaatcataccagcctcttcaggtttt

SEQ ID NO: 617454 - DNA, 120 bp, Artificial Sequence
  ENSG00000177300_0 (sequence is synthesized)
ctgataagattgatttatttggttaagaaatacttttcttaaacctatttttaaaaaataacactcagtattaccataacatgcacatttgaaatgtgagaactataagagatgaaaatc

SEQ ID NO: 617455 - DNA, 120 bp, Artificial Sequence
  ENSG00000177300_1 (sequence is synthesized)
tgacaggtgcagttagtgaaacacaaagcaggaggagttgaaccaaaaccatcagttaaacattttgcatttagacttaattctttgttagaaaggttgggaataacatgaaagccattt

SEQ ID NO: 617456 - DNA, 120 bp, Artificial Sequence
  ENSG00000177300_2 (sequence is synthesized)
taaccttgacaatgaaaggagattatcacttaattatatttcagtgacaaactgctttctgtcaaatccagcccacaggacacaaacacaatcttggccacaccttggcattactggttg

SEQ ID NO: 617457 - DNA, 120 bp, Artificial Sequence
  ENSG00000177300_3 (sequence is synthesized)
gcggcattatttccctatccttttgtgaaacccattcaacatggaatcaaacaatagcaactctggcaagaatcctcctatatacacaatgaagaaatatttctgagtttcataagttat

SEQ ID NO: 617458 - DNA, 120 bp, Artificial Sequence
  ENSG00000177300_4 (sequence is synthesized)
aacacaagtgtcacacttcttttcacagcaaccgaagggcaggagttagtttggctaaagctctcaggacattataatggctttagtatttagaactgtagctcaactagctggagtttc

SEQ ID NO: 617459 - DNA, 120 bp, Artificial Sequence
  ENSG00000177300_5 (sequence is synthesized)
attatctttgctgggatgggttttatcctgtcttacaaactacctgccacactggaagaacctcaacctggacttaaatgaaatggaaaactggaccatgggactctggcaaacctgtgt

SEQ ID NO: 617460 - DNA, 120 bp, Artificial Sequence
  ENSG00000177300_6 (sequence is synthesized)
catccaagaggaagtggggatgcaatgcaaggactttgactccttcctggctttgcctgctgaactcagggtctccaggatcttaatgtttctgtcaaatgggctgggatttctgggcct

SEQ ID NO: 617461 - DNA, 120 bp, Artificial Sequence
  ENSG00000177300_7 (sequence is synthesized)
gctggtctctgggtttggcctggactgtttgagaattggagagagtcagagagatctcaagaggcgactgctgatcctgggaggaattctgtcctgggcctcgggagtcacagccctggt

SEQ ID NO: 617462 - DNA, 120 bp, Artificial Sequence
  ENSG00000177300_8 (sequence is synthesized)
tcccgtctcttgggttgcccacaagacggttcaggagttctgggatgagaacgtcccagactttgtccccaggtgggagtttggggaggccctgtttctgggctggtttgctggactttc

SEQ ID NO: 617463 - DNA, 120 bp, Artificial Sequence
  ENSG00000177300_9 (sequence is synthesized)
tcttctgctaggagggtgtctgctccactgtgcagcctgctccagccacgctcccctagcttcgggccactacgcagtggcacaaacacaagatcatcatcaagaactggagacgagaaa

SEQ ID NO: 617464 - DNA, 120 bp, Artificial Sequence
  ENSG00000177300_10 (sequence is synthesized)
aacactggatttggtaggatgtcccgctctagtcatctcactgtgcttttgatttttgaaaatgcatcttttcctgtggctattaaactatagtttctttccaagactggtaaaccattt

SEQ ID NO: 617465 - DNA, 120 bp, Artificial Sequence
  ENSG00000177300_11 (sequence is synthesized)
ttatcttctagtctgagaccaaaatcaatcaagactgaatagtaatgacacccattactgtggatgagttttctcaattttaaaatagcgattgcacagaagtggtaaataaaacattaa

SEQ ID NO: 617466 - DNA, 120 bp, Artificial Sequence
  ENSG00000177300_12 (sequence is synthesized)
tctctatgtatctttgaaggtattattcatatggagcggaatcatttggcaaatcatttacttatttcaggtgtttaagataacctagtataataagcctgaggtcttgttgcatattta

SEQ ID NO: 617467 - DNA, 120 bp, Artificial Sequence
  ENSG00000177300_13 (sequence is synthesized)
tttaaaatgcatgacgtcttattatataaaataattactagctctttagaagcttcagaggtgaaaggtgtagacacatcatctccttctgaatcagagacctcagtgtctctatggaac

SEQ ID NO: 617468 - DNA, 120 bp, Artificial Sequence
  ENSG00000177300_14 (sequence is synthesized)
ctttttcaaaaggcagccacattcagtcacgccttctatactgtcagaggcaggagggcgatcttgggttttggatgattcaagtagactctgccacacaaacgtgcttctgcatcctgt

SEQ ID NO: 617469 - DNA, 120 bp, Artificial Sequence
  ENSG00000177300_15 (sequence is synthesized)
gttctgtatttcacgggcagcgtttctggcttcccaggcactgagcagcctgtggggggcacggcagggcaggactggggtgtgtgggtagataacctcctgggacggctgcctctctgt

SEQ ID NO: 617470 - DNA, 120 bp, Artificial Sequence
  ENSG00000177300_16 (sequence is synthesized)
ggagcacactgccagcccaggcgcagcgaccacagagcacatattctggagcccttcattttatttgctcaatgaaaatacttcgtccttttttatcagcaatacatatagttccaacaa

SEQ ID NO: 617471 - DNA, 120 bp, Artificial Sequence
  ENSG00000177300_17 (sequence is synthesized)
gaactattcatcacaaactgccagcctggggatttcttcatgaaatattttgtatttgcttggtacatggttcaaggaaactcttgtgtttgtgccaatcagggaaataaactgaacaat

SEQ ID NO: 617472 - DNA, 120 bp, Artificial Sequence
  ENSG00000177300_18 (sequence is synthesized)
aaacgacactgaaatagagtattaggcaatatgtagctttgtttttgcttttttttttaaaaaaaaccactgaatttttttccacccacaaacacatggaaagtgcagaaaccagttaat

SEQ ID NO: 617473 - DNA, 120 bp, Artificial Sequence
  ENSG00000177300_19 (sequence is synthesized)
ctatgtgatgtatttgcatacgtttacaaacaagacaaattaaaacagaaacatgttcagaatttaacctgattaaatattaagttcagtcctgagcttttgatatttaagacaatatag

SEQ ID NO: 617474 - DNA, 120 bp, Artificial Sequence
  ENSG00000177300_20 (sequence is synthesized)
ataaagcaatagcaaaaaattttaatttatttgatttgcatgctacagagatttagctaaactttgttcatttggctagcaatattctttttgtacctgtaacacttaagattctgatat

SEQ ID NO: 617475 - DNA, 120 bp, Artificial Sequence
  ENSG00000177301_0 (sequence is synthesized)
attctgtgctccctgccgaggagatgtgagggattttctcttgggggagaaatcagtggtcgagcgcctgcccagctcaaatgccacccggctcagagggaggcctgcggcccagggatc

SEQ ID NO: 617476 - DNA, 120 bp, Artificial Sequence
  ENSG00000177301_1 (sequence is synthesized)
ccggagggagagcaacgtcacacctcctgaggacagccaggactccagcttttgctgagctttgcatcttgcctccttccttcaaaaggctccaggcccatgctcggctgtcttcaagtc

SEQ ID NO: 617477 - DNA, 120 bp, Artificial Sequence
  ENSG00000177301_2 (sequence is synthesized)
ccgcatgcccctggccaggcacctcaccgcccctccagcccagcccaatcctagagctcacctccaggacccagagtctgcccttctgcccagaatgactcaccattatttctagctcga

SEQ ID NO: 617478 - DNA, 120 bp, Artificial Sequence
  ENSG00000177301_3 (sequence is synthesized)
gtgagaagacgtgatgaggagttgggctgcctgttggtgcatctcagattcctgcagcatctgatcagctctgcaaggaagagagcttcacgtctctggtcagccaagcgaggctgtctc

SEQ ID NO: 617479 - DNA, 120 bp, Artificial Sequence
  ENSG00000177301_4 (sequence is synthesized)
tccagctctcagagagctctcggggctctcctgcaggagaccaggccaatgctcctgtgcttcctggggccagtagcagcaccctgagctccctgccaccaggcagctgaaaggcatagc

SEQ ID NO: 617480 - DNA, 120 bp, Artificial Sequence
  ENSG00000177301_5 (sequence is synthesized)
gtgaggtgcttctctcagtcccaattatgacagtggccaccggagacccagcagacgaggctgctgccctccctgggcacccacaggacacctatgacccagaggcagaccacgagtgct

SEQ ID NO: 617481 - DNA, 120 bp, Artificial Sequence
  ENSG00000177301_6 (sequence is synthesized)
gtgagagggtggtgatcaacatctcagggctgcggtttgagacccagctaaagaccttagcccagtttccagagaccctcttaggggacccaaagaaacgaatgaggtactttgaccccc

SEQ ID NO: 617482 - DNA, 120 bp, Artificial Sequence
  ENSG00000177301_7 (sequence is synthesized)
tccgaaatgagtactttttcgatcggaaccgccctagctttgatgccattttgtactactaccagtcagggggccgattgaggcgacctgtgaatgtgcccttagatatattctctgaag

SEQ ID NO: 617483 - DNA, 120 bp, Artificial Sequence
  ENSG00000177301_8 (sequence is synthesized)
aaattcggttttatgagctgggagaagaagcgatggagatgtttcgggaagatgaaggctacatcaaggaggaagagcgtcctctgcctgaaaatgagtttcagagacaagtgtggcttc

SEQ ID NO: 617484 - DNA, 120 bp, Artificial Sequence
  ENSG00000177301_9 (sequence is synthesized)
tctttgaatacccagagagctcagggcctgccaggattatagctattgtgtctgtcatggtgattctgatctcaattgtcagcttctgtctggaaacattgcccatcttccgggatgaga

SEQ ID NO: 617485 - DNA, 120 bp, Artificial Sequence
  ENSG00000177301_10 (sequence is synthesized)
atgaagacatgcatggtagtggggtgaccttccacacctattccaacagcaccatcgggtaccagcagtccacttccttcacagaccctttcttcattgtagagacactctgcatcatct

SEQ ID NO: 617486 - DNA, 120 bp, Artificial Sequence
  ENSG00000177301_11 (sequence is synthesized)
ggttctcctttgaattcttggtgaggttctttgcctgtcccagcaaagccggcttcttcaccaacatcatgaacatcattgacattgtggccatcatcccctacttcatcaccctgggga

SEQ ID NO: 617487 - DNA, 120 bp, Artificial Sequence
  ENSG00000177301_12 (sequence is synthesized)
cagagttggctgagaagccagaggacgctcagcaaggccagcaggccatgtcactggccatcctccgtgtcatccggttggtaagagtctttaggattttcaagttgtccagacactcca

SEQ ID NO: 617488 - DNA, 120 bp, Artificial Sequence
  ENSG00000177301_13 (sequence is synthesized)
aaggtctccagattctaggtcagaccctcaaagccagcatgagagaattgggcctcctgatattctttctcttcataggggtcatccttttctctagtgctgtgtattttgcagaggccg

SEQ ID NO: 617489 - DNA, 120 bp, Artificial Sequence
  ENSG00000177301_14 (sequence is synthesized)
atgagcgagagtcccagttccccagcatcccagatgccttctggtgggcagtcgtctccatgacaactgtaggctatggagacatggttccgactaccattgggggaaagatagtgggtt

SEQ ID NO: 617490 - DNA, 120 bp, Artificial Sequence
  ENSG00000177301_15 (sequence is synthesized)
ccctatgtgcgattgcaggtgtgttaactattgccttaccggtccctgtcattgtgtccaatttcaactacttctaccaccgggagacagagggagaggaacaggcccaatacttgcaag

SEQ ID NO: 617491 - DNA, 120 bp, Artificial Sequence
  ENSG00000177301_16 (sequence is synthesized)
tgacaagctgtccaaagatcccatcctcccctgacctaaagaaaagtagaagtgcctctaccattagtaagtctgattacatggagatccaggagggtgtaaataacagtaatgaggact

SEQ ID NO: 617492 - DNA, 120 bp, Artificial Sequence
  ENSG00000177301_17 (sequence is synthesized)
ttagagaggaaaacttgaaaacagccaactgtaccttggctaacacaaactatgtgaatattaccaaaatgttaactgatgtctgattgaaacctattaccgtactcacagctcaatgga

SEQ ID NO: 617493 - DNA, 120 bp, Artificial Sequence
  ENSG00000177301_18 (sequence is synthesized)
actaatgcagatgttgcataatagcctgcattgtagtcagtgtgttctacagtgtgtatctggttctgcatggaaagcaatagttgtgcaagtgacttttgatcttttgacttttgattt

SEQ ID NO: 617494 - DNA, 120 bp, Artificial Sequence
  ENSG00000177301_19 (sequence is synthesized)
agaacacagaatatctatcatggctttcatgcacatcctcatcaccggcttatgaacttccaaagacgggagtcacctatcaagctaggatttcagatagacacgttgaggccacctcat

SEQ ID NO: 617495 - DNA, 120 bp, Artificial Sequence
  ENSG00000177301_20 (sequence is synthesized)
atcccatacacagtgcaccatatcagtgccatcattccttcctaatgaaatgcacacaacatccaagagatgcactcccctccccaccatcccaccaccttatttgagcccacctgccct

SEQ ID NO: 617496 - DNA, 120 bp, Artificial Sequence
  ENSG00000177301_21 (sequence is synthesized)
ttcacagaggaacacaatcatggcttagctttaaatagctggtgtttgttcaaaaggtcatactcatttttgcattgaaaagaacacacagtcctgtgtgttggaattactttctgtgtc

SEQ ID NO: 617497 - DNA, 120 bp, Artificial Sequence
  ENSG00000177301_22 (sequence is synthesized)
acaggctggagtttgtgaattgcagttgccaagtagatgctctggaggcttgtgtttcataacggaaaatgctgcattctgctttttctctgcagtgtcgatgtgagggaagcccggggg

SEQ ID NO: 617498 - DNA, 120 bp, Artificial Sequence
  ENSG00000177301_23 (sequence is synthesized)
agggacagttagtatgaccgaatatgagttgtcaagtttcacatttgttcccttaggcctatggggagaagctaacaaaccaacagacctctaagcctctgatttcaccatttttgcagg

SEQ ID NO: 617499 - DNA, 120 bp, Artificial Sequence
  ENSG00000177301_24 (sequence is synthesized)
ctccagggtcacaaaaacatgtctggtttcttactggagtttgcagacatctgctttcccactgatgtggcccagctacactgacactgcagtgaaatttaccagtgatgcaatagagct

SEQ ID NO: 617500 - DNA, 120 bp, Artificial Sequence
  ENSG00000177301_25 (sequence is synthesized)
gcatgggtgtttgttgcatgaatctcaatatttaaaacacaggagataacctattttcctagtagcctacacagtgttaatatttagagtattaataggcttggaatggtcttgaactag

SEQ ID NO: 617501 - DNA, 120 bp, Artificial Sequence
  ENSG00000177301_26 (sequence is synthesized)
gggtttttttcccatcagaaggcaaaaatccctccatcaggggaaaaaaaatagactatttggaatggaactaaaacttctggccccccagcctacctatccctgttcttctaaacagga

SEQ ID NO: 617502 - DNA, 120 bp, Artificial Sequence
  ENSG00000177301_27 (sequence is synthesized)
acgcagacctctgcaaagccagaagagtaagcggggaaggcagcatctgaacacctcacatgactgcaccttaggaattaacctagtcgcgggcatgactgtacagtggaccagggcatc

SEQ ID NO: 617503 - DNA, 120 bp, Artificial Sequence
  ENSG00000177301_28 (sequence is synthesized)
tggtcctgatgacaggcaggtctgtggatccagtgtatataaatatatatcgagtatctctctttcacgcgttcctctacctagctagtgatagaaaagaaattgcatttgaacattgta

SEQ ID NO: 617504 - DNA, 120 bp, Artificial Sequence
  ENSG00000177301_29 (sequence is synthesized)
tgtacaagcttatgcaatatttttgacaaagggcaatttatgcatgtgtttgactatgtgcactagggtgtatatatatacatacatatgtgtgtatatgtatacacacacacacacaca

SEQ ID NO: 617505 - DNA, 120 bp, Artificial Sequence
  ENSG00000177301_30 (sequence is synthesized)
cacacacacatatatatatatatatattcattttctggagttcaggttcaggagcaaatccactgcttggtgggttggctgtctaagaggcctaatgggttaatttgtctcattggtaac

SEQ ID NO: 617506 - DNA, 120 bp, Artificial Sequence
  ENSG00000177301_31 (sequence is synthesized)
taaccccactgggcctgggtttgctgccattgcctcagacactccggtatccatggattcctagacgttagaattgtctttctgccctccatgtgctgcagcttcagttcccatggctga

SEQ ID NO: 617507 - DNA, 120 bp, Artificial Sequence
  ENSG00000177301_32 (sequence is synthesized)
agcttgtcttactgagtgcacaagggccctgtggccctcacagttccagctgtcctgggccagacccaccccgggcctcctctctacagttcatcctgttcatcatctccattttcacct

SEQ ID NO: 617508 - DNA, 120 bp, Artificial Sequence
  ENSG00000177301_33 (sequence is synthesized)
cttcccttgccacttggatcttattatcatttggctctgcatccgtcactttcacaaacctttcgctaaagagccagaatggatcccctgctttgaaaccaaggacaccaaggagtagga

SEQ ID NO: 617509 - DNA, 120 bp, Artificial Sequence
  ENSG00000177301_34 (sequence is synthesized)
ctccctgggaccaaattccactgatctggacctaaagggagcctcctctatgtggaaatgtctgaagtccgggactaagtgatggagtccctagatgatccaaaggcatcattttgatct

SEQ ID NO: 617510 - DNA, 120 bp, Artificial Sequence
  ENSG00000177301_35 (sequence is synthesized)
ccagacccaaactctctccccattaaactggcaaccagagctgctttttaaaaagaaccaaaggatgggtaaagaatcatttcccaccccccagaagaagtagagtgcaaatgagcactg

SEQ ID NO: 617511 - DNA, 120 bp, Artificial Sequence
  ENSG00000177301_36 (sequence is synthesized)
cacagcctaaaggtagacagtaggttgaccctgaaatggcttcaggtagggggcttttaactcaccagactgggcgtctttgccttttgacggagtagcttaattttcccaaacagtgaa

SEQ ID NO: 617512 - DNA, 120 bp, Artificial Sequence
  ENSG00000177301_37 (sequence is synthesized)
ttgcaggggtcgggctatgcaggggtggctccagcccaggcctcactgctgcctagttagcacctacagttgtcttggggcatggggcaccagctcagggtgctaggcccagggtgctca

SEQ ID NO: 617513 - DNA, 120 bp, Artificial Sequence
  ENSG00000177301_38 (sequence is synthesized)
ttagtgcctggtcacccacatccccaggtatctgcagggcatcccatgcccagcacaaagcctctgtgcttctcttcctctccttcatgggaggtggtgctgaatttccaaggcatgggg

SEQ ID NO: 617514 - DNA, 120 bp, Artificial Sequence
  ENSG00000177301_39 (sequence is synthesized)
tgggagggacacagatctttggaaaatagaaggtaaagcaacccatatctgaggcctaggtcagggatagatatcttatcacagtgtccttggcccaggactctaaaatgttcacataca

SEQ ID NO: 617515 - DNA, 120 bp, Artificial Sequence
  ENSG00000177301_40 (sequence is synthesized)
gtcatgcacattcaccacaaaataggtacactgttgtcacacacaaacataaaacatgtaacgtgcaaaatacagacagaccaggttaacataaaagcaaacacagaagatatatggtta

SEQ ID NO: 617516 - DNA, 120 bp, Artificial Sequence
  ENSG00000177301_41 (sequence is synthesized)
taattgtatataaaatgcacactctgcacagatatagaatttacacagaacatacacaaaagacaaacatacaccacatacaaatatacaacctgaaactcagatgcaaaatacataaaa

SEQ ID NO: 617517 - DNA, 120 bp, Artificial Sequence
  ENSG00000177301_42 (sequence is synthesized)
aactacatggacaaaatgcatatgcatataagatacacaaaggctactttaccattgtttctacacataaaatacacacaaactcagtatatacacacgatgcattaacttataataggc

SEQ ID NO: 617518 - DNA, 120 bp, Artificial Sequence
  ENSG00000177301_43 (sequence is synthesized)
atacaagatacatagcacacatgcccaaaaatatcgcacaatacacatgaaatgcagacatatactcagacccattgccctgcccccagagctatgaattaacaggcacaaacaaaagat

SEQ ID NO: 617519 - DNA, 120 bp, Artificial Sequence
  ENSG00000177301_44 (sequence is synthesized)
cagatgtaatcacctttgcctggcctgtgtctatatcccccaggatctttcaaggaatctctttctctattcttttctctcactaccagatttcactcctgagaagtaactcctaggttt

SEQ ID NO: 617520 - DNA, 120 bp, Artificial Sequence
  ENSG00000177301_45 (sequence is synthesized)
caagcaggaggatgggccaccacatcaagcagatatctgactaagaccaggaattgcatggggtctctaccaattcaccttcctcccaccagaaacctgggtgcagggtgtgaaagtacc

SEQ ID NO: 617521 - DNA, 120 bp, Artificial Sequence
  ENSG00000177301_46 (sequence is synthesized)
tgggacagctggtagcctaatataggcctccttgccatgacccttccttccttccagcaaatccgcacagacaacccaatagcccaggctccccttctcccagcacctgggatctccaga

SEQ ID NO: 617522 - DNA, 120 bp, Artificial Sequence
  ENSG00000177301_47 (sequence is synthesized)
ttcagccctattctcttaaaagcagtaatggctcaagaaactgcaggatcttgagcccaggaccagggtaaagatgtccccaacattctctaagcccacagattttattgcccttccatc

SEQ ID NO: 617523 - DNA, 120 bp, Artificial Sequence
  ENSG00000177301_48 (sequence is synthesized)
ctttgcagctttgttgggggcacggtcaggaagttgagaccctatagagacctgtctcttaaaatgagccacctttacttgcttgtggcatttcacttgctcttgtgcataagcccaaag

SEQ ID NO: 617524 - DNA, 120 bp, Artificial Sequence
  ENSG00000177301_49 (sequence is synthesized)
ctcccctggatgccctgcctcccatccaattgctatgcaacccagttcagcttaagtaaaaagtgattaagaacatacatctaaggctaagcaagctaacactttttagagggcctgact

SEQ ID NO: 617525 - DNA, 120 bp, Artificial Sequence
  ENSG00000177301_50 (sequence is synthesized)
ttatcctatattctaaggccatatttaaatactttctaagattacccaccattttggattactcttggagctggttcttcccctaagtaggactagctgagagctgagtgcattttagca

SEQ ID NO: 617526 - DNA, 120 bp, Artificial Sequence
  ENSG00000177301_51 (sequence is synthesized)
aaggcttcacctacatcggaagtaaagagttgcagtcaggctttggatcaggcctcactcctgatttctgctcctgcagccatcccgttgtgtctcactctcccttccagtgatggtcgc

SEQ ID NO: 617527 - DNA, 120 bp, Artificial Sequence
  ENSG00000177301_52 (sequence is synthesized)
agctcccagtctctacagaaaaggtaacaacagtagggagtggacatatgggtccaaaacgtgtgctttgctggaaacttgtgtttccaggtcaaggtaccattcctgttggcttcatca

SEQ ID NO: 617528 - DNA, 120 bp, Artificial Sequence
  ENSG00000177301_53 (sequence is synthesized)
agtgcctctgtggattcattttcaagaaacttggagttttcaggagaccgaaaaggaataggcccaggaaaggtggagagattgtcaggaagagagagtggctgagtgggtcaaatttca

SEQ ID NO: 617529 - DNA, 120 bp, Artificial Sequence
  ENSG00000177301_54 (sequence is synthesized)
gagtaaactttttaggagccaacatttaattaagaaaataattaaggctctgtgctttctgaaacttcagtaatatttgacatgctctcttccttcttctctgcttgcctctgtccctct

SEQ ID NO: 617530 - DNA, 120 bp, Artificial Sequence
  ENSG00000177301_55 (sequence is synthesized)
cacctgtgtttctgaggctagtgttggcatgtcaccatgaggttagccttttaaaaggggccccacgggagtgtgcctctagattgcgttagcctagtatggaaagggctcccatggaag

SEQ ID NO: 617531 - DNA, 120 bp, Artificial Sequence
  ENSG00000177301_56 (sequence is synthesized)
ctatgatggcctgagaccccagcctgggtgttcatgttgctgctccgtgttgggagggcccaggactagcttgttctacctattcttcctggatctctcactatattatagtgaggactc

SEQ ID NO: 617532 - DNA, 120 bp, Artificial Sequence
  ENSG00000177301_57 (sequence is synthesized)
tatcagtatcaacccatgtggagagaggacagcaccctctgaagctcctcaggctggggattcagcactgcccacagtagtagagtcacagaggctgactcccccctaaggaaactatag

SEQ ID NO: 617533 - DNA, 120 bp, Artificial Sequence
  ENSG00000177301_58 (sequence is synthesized)
aacagtgtgcaaattgcatatgaaggtggcaccactacccctatgtcaggcaggggagcacagtgctttgacttgtttactcaagagaggggatgatggtgctgagctctgctccccaga

SEQ ID NO: 617534 - DNA, 120 bp, Artificial Sequence
  ENSG00000177301_59 (sequence is synthesized)
gctttcctggggcccattgtcataataacttgtatgtgggtgatggccgcctcatctgcgagggctataatatccatggtgctccttggttgcacaatggaggttcccctagccttggca

SEQ ID NO: 617535 - DNA, 120 bp, Artificial Sequence
  ENSG00000177301_60 (sequence is synthesized)
aggtatccattgccgggtttgaactcatgaccttaacctcattaacatcatcagtcacctgagccaacgcgcagagagggggatgctgggagctctctcagtagctattgtgaccatcat

SEQ ID NO: 617536 - DNA, 120 bp, Artificial Sequence
  ENSG00000177301_61 (sequence is synthesized)
ctatatcttcagacttagcccttgttgagtccaaccctgttcccctatcaaagcaaccagcagggacagatggaggtaggggctcccctacatgcaggaaggttctcttcctcaaactaa

SEQ ID NO: 617537 - DNA, 120 bp, Artificial Sequence
  ENSG00000177301_62 (sequence is synthesized)
cctagtttacttttcctttttttctgcttcccttcccaccaaatctcagcttcatctctcatagtttgtgtttgaatatttttaaagaggaaaagtgcaataaaataaatagtgactgtt

SEQ ID NO: 617538 - DNA, 120 bp, Artificial Sequence
  ENSG00000177301_63 (sequence is synthesized)
ttctttagcaatagctctttcaaaatcttgctctcaggactgaaaagtgatagatagtacctggattatcagataatgcccttgacttctgggggctcattcacagtctctgtagtttct

SEQ ID NO: 617539 - DNA, 120 bp, Artificial Sequence
  ENSG00000177301_64 (sequence is synthesized)
tcttcttcccacgtgttcacatgactcctgtcctcttgagatctgacctccttctggaatggacacatatgctaagatgcagtgtatgcacaaggaaggcctgtgagagggctttgtcac

SEQ ID NO: 617540 - DNA, 120 bp, Artificial Sequence
  ENSG00000177301_65 (sequence is synthesized)
tttgtctccttcctgtgtgcacctctctgtctccatgtgtgtctctgtcccctctccctctgtctccccatttctgcctgctgtcatacagcatccttacaacctctaggcatgaaaatc

SEQ ID NO: 617541 - DNA, 120 bp, Artificial Sequence
  ENSG00000177301_66 (sequence is synthesized)
ctaagtttgtgtgaccttttcagcccattttgttgactttccctcagtctggcagatgtaatggaagcctacacgaaagcacttcccaatagataagaataaagcatcctgagccattac

SEQ ID NO: 617542 - DNA, 120 bp, Artificial Sequence
  ENSG00000177301_67 (sequence is synthesized)
agaagatcatttccatgcactaaaagccattacttgatccttttgcttccccttctcccttccccagggagacggatgctgagggaatgtggcctggaggtttgcacttgggatcagtag

SEQ ID NO: 617543 - DNA, 120 bp, Artificial Sequence
  ENSG00000177301_68 (sequence is synthesized)
cctgggcagatttgggaattgccctctgactctctttcaaaataagctgacttgctcaaccaaagggactccgtgagagctgcagaaggaagcaggttcttgtgggtttcagtagaagtc

SEQ ID NO: 617544 - DNA, 120 bp, Artificial Sequence
  ENSG00000177301_69 (sequence is synthesized)
tacagggatagaagtttgggtggttagggcatgacattagtgaaataaagactctaccacccgctagagtgtgcagctgcacaaatatttgcacacatagccaggggcttcagaagagtc

SEQ ID NO: 617545 - DNA, 120 bp, Artificial Sequence
  ENSG00000177301_70 (sequence is synthesized)
ccctttcctaacatctgtgagcttaaatgttcagactggacaatcagggaaggctggcaaccccagggtcccattccatccttttttgatctaccttgctctatacacatatgtacagca

SEQ ID NO: 617546 - DNA, 120 bp, Artificial Sequence
  ENSG00000177301_71 (sequence is synthesized)
aaacctcagttaactgatggggaaacctcagggacaggaacatcctgattgctttgcaattttggttatttgagtgggaatgggaaagcatgtctggttcaacctttgttattgagaaaa

SEQ ID NO: 617547 - DNA, 120 bp, Artificial Sequence
  ENSG00000177301_72 (sequence is synthesized)
atatttcctaagtaggttagcataactttcctgccttagttaagtagagtgtttgaagataacagggaccttgccttgctcagggtcaacattgtaaacctcaatgcttattgtacagta

SEQ ID NO: 617548 - DNA, 120 bp, Artificial Sequence
  ENSG00000177301_73 (sequence is synthesized)
gtggacataggtagagaagaccaaagagacaggctgaatggctgctggctacaagacaggcctggaaatgggccactggggcacatcctggctcatcggagcccttgctgtcatttgcct

SEQ ID NO: 617549 - DNA, 120 bp, Artificial Sequence
  ENSG00000177301_74 (sequence is synthesized)
ctttctactgaaaggatagtaagaaaacataattcttgtcaatcgaggttttggttaattggtcctgagtttttagaggttttccatatatacatatatttatgtgtgtatatatatata

SEQ ID NO: 617550 - DNA, 120 bp, Artificial Sequence
  ENSG00000177301_75 (sequence is synthesized)
tatagtatatgtatatatgtatactatttttaaattatagaattatacattgaccaatctccttagtttcacttatgtggaataaatttggcaatccaaggaataaactgcatttatgtg

SEQ ID NO: 617551 - DNA, 120 bp, Artificial Sequence
  ENSG00000177301_76 (sequence is synthesized)
cattttttgaatgacctcctttgcattcttttcacctctccagttctactctttttttttctgcttagggacctctctagaaggcagatctttcataaaaaaagaacaggctacaggatc

SEQ ID NO: 617552 - DNA, 120 bp, Artificial Sequence
  ENSG00000177301_77 (sequence is synthesized)
acctctttcctttccctcccaggtggctgcctgactcagggataaaagggaagtctgatctaacagccaggtgctttagcctttcttctgtctgccctggttggctataacctcatcact

SEQ ID NO: 617553 - DNA, 120 bp, Artificial Sequence
  ENSG00000177301_78 (sequence is synthesized)
gaggatcagaaaagttattccaaactttgtactcgaggggagtggaaagcttgaagacctggcaaaggatttatctatttagcattctctttgtcattggtggtgccctaggtttgaggt

SEQ ID NO: 617554 - DNA, 120 bp, Artificial Sequence
  ENSG00000177301_79 (sequence is synthesized)
ttgtgagatctgaaagtaacattccaatgaagaactaaagcacatctctgccacacagaaggtgaggtttgtggcaatcaatggaactaacaaatccattctgttttttattatgactaa

SEQ ID NO: 617555 - DNA, 120 bp, Artificial Sequence
  ENSG00000177301_80 (sequence is synthesized)
acctaagttgagggtgtgggtattagagcagctgaaattcagttgcctctttgggggtaagctgtacacatcactcaagaaacagctggatgcaagctaaaacctgctctcattctccct

SEQ ID NO: 617556 - DNA, 120 bp, Artificial Sequence
  ENSG00000177301_81 (sequence is synthesized)
cttgcctgctagtgtgttagatccatggaagacagtttctctcagcctcacctcttgcatttgactgttgctttctacctagatgggagtgggagggatttttcactgtatctggagcaa

SEQ ID NO: 617557 - DNA, 120 bp, Artificial Sequence
  ENSG00000177301_82 (sequence is synthesized)
ttgaagtggtgcaggggtgtctgccatctccccacacccacagaagccctccagtctggctatgttagttgtgatcaggcagcagaagcccataacccagacttgacatgaccagctggt

SEQ ID NO: 617558 - DNA, 120 bp, Artificial Sequence
  ENSG00000177301_83 (sequence is synthesized)
gcactgaggcagttgaggtggcctgtctggatggctacttcttgtacttcatgaacctcagcatggaaatggatataactttctgtgctcctctgcactcctaaaatagtctaatatgtt

SEQ ID NO: 617559 - DNA, 120 bp, Artificial Sequence
  ENSG00000177301_84 (sequence is synthesized)
ccagatgagtttgcagctgagaactccctgcatcattccactgatggatgcacagggcatgattatgtaataatgtggacagctactgcaacatctagatcattgagggcagtgtagatg

SEQ ID NO: 617560 - DNA, 120 bp, Artificial Sequence
  ENSG00000177301_85 (sequence is synthesized)
tggctgtgtgctaggacccttggtagctatccagaggactcagtctggtgtctttctgagtctctgtgagaggcctctaagccctgcttctccttgaaaatgattccctagacaccgaat

SEQ ID NO: 617561 - DNA, 120 bp, Artificial Sequence
  ENSG00000177301_86 (sequence is synthesized)
gccttgtttgtatgagtgaataaatgctctgggctgctagagaaagcaataggaggagctgggaggaagagaatattcaggggcgcactttgctaccaaacaatttccatgtcagctgct

SEQ ID NO: 617562 - DNA, 120 bp, Artificial Sequence
  ENSG00000177301_87 (sequence is synthesized)
aacattactgcctttttagcctatgaagtgtagggcaaggactttgacctgccaggtggggctggaaaggagcacatcagctccaggctaagaaatgggatagaaaagcaagaagagagg

SEQ ID NO: 617563 - DNA, 120 bp, Artificial Sequence
  ENSG00000177301_88 (sequence is synthesized)
cctggctggctttggcgggggtgagtctcagctcctgagggtttgaacatgctctgtgcttgccccagttctgccttcacgtgggatccagcgacccagtttccttttgttgtcgtgctt

SEQ ID NO: 617564 - DNA, 120 bp, Artificial Sequence
  ENSG00000177301_89 (sequence is synthesized)
ggatggttccttcatttgaagggccccaggaagctggaaagtcccatgatcaagctctagcctgctgagcaaacaataccccagccaaattggcctcttcctggttttctgcatccctgc

SEQ ID NO: 617565 - DNA, 120 bp, Artificial Sequence
  ENSG00000177301_90 (sequence is synthesized)
acccctctctccactaaggataatcttggaacagttgcgattaatggtgccagcaatcaaggaagattctctagttttcatcagggacatagctgtaaagctcatgagtggaggatgcta

SEQ ID NO: 617566 - DNA, 120 bp, Artificial Sequence
  ENSG00000177301_91 (sequence is synthesized)
tgagtggaggatgctatttccttttccagacctgtgtgcttatgtgcttatataggctgcctctggagactttatattgtgtgtgatgtgtgtgtatatatatatacacacacatatata

SEQ ID NO: 617567 - DNA, 120 bp, Artificial Sequence
  ENSG00000177301_92 (sequence is synthesized)
tatatagagagagagagagagaggaaatggccgccactcacttaggctcatgcagcacagactccagttagggtttgcactggcttccttgctgcttgtgcatgaatcttcagctgccct

SEQ ID NO: 617568 - DNA, 120 bp, Artificial Sequence
  ENSG00000177301_93 (sequence is synthesized)
cccatgtcctgtctctaataattgctgaaaactcaaagaggtagataaataagcctccttgggatcaatagcagaaggaactccaaggctgatggtaaagcttcgtaaggatgatgccga

SEQ ID NO: 617569 - DNA, 120 bp, Artificial Sequence
  ENSG00000177301_94 (sequence is synthesized)
aagggaactggggtctccatggtgataagaggctggggaccaatgagagctgaaggcggagcaggacttgcggggaagactcatgggagttgggagtcatttaactatttgtttgcttct

SEQ ID NO: 617570 - DNA, 120 bp, Artificial Sequence
  ENSG00000177301_95 (sequence is synthesized)
tgaaaatttagacaccagctgtaactacattgcacaggatgtattgatattatcattcttgctgacatattctggaagctttcagccccaccaacactgccccacccaggacttctgcag

SEQ ID NO: 617571 - DNA, 120 bp, Artificial Sequence
  ENSG00000177301_96 (sequence is synthesized)
ctgagagttcctgtgtcagtagggtctgatatttgtacataggttatacatatatgtgtacatatgtgcctcaatgaacattgcctgtccacctgatcatgggtgtacatagacttcata

SEQ ID NO: 617572 - DNA, 120 bp, Artificial Sequence
  ENSG00000177301_97 (sequence is synthesized)
gagctccacagtcttttgtaaatattgacacaagtaaataagtatataaatatatattactggggatttattttaacatcattctgtgtgatatgaaaaaaataaaatttttgacagaca

SEQ ID NO: 617573 - DNA, 120 bp, Artificial Sequence
  ENSG00000177301_98 (sequence is synthesized)
ggggtctgcagatcctgtctggaggcaccacaataatagcaacacgtctctcccggggctggatcccgctgtgggcctggggtagctgctattgattatctcctccttgcctacttcatt

SEQ ID NO: 617574 - DNA, 80 bp, Artificial Sequence
  ENSG00000177301_99 (sequence is synthesized)
cagagccggctcccggctggccgcccgcaccccgccgccgcccgctgccggggttctgccggcgctggccgtaacctagg

SEQ ID NO: 617575 - DNA, 120 bp, Artificial Sequence
  ENSG00000177301_100 (sequence is synthesized)
gggagtcggggagtggagagggccagccctgcagtgctgcctgttcctgcggctcctctcggtgggggcgaacacagcagaagagtttctgccacactgcggaccgcacctgctgcattt

SEQ ID NO: 617576 - DNA, 120 bp, Artificial Sequence
  ENSG00000177301_101 (sequence is synthesized)
agtccttcctgagagcagctggggactagcaacctggatcaacccagggaggcccctggagaaggcaggcccagccaagcctgagtcttgctccctgggagaaaatgcttcaagctgatg

SEQ ID NO: 617577 - DNA, 120 bp, Artificial Sequence
  ENSG00000177301_102 (sequence is synthesized)
ggaagcctgcccagaagaggcaaggaggctgagggatagtcctcaggcctggcatcagaatagaggatgggcatgggggcctgttacctcccatgagggaagctgccagaccctcctaaa

SEQ ID NO: 617578 - DNA, 120 bp, Artificial Sequence
  ENSG00000177301_103 (sequence is synthesized)
gataaagtcactttgaacagaggtctgaaggatgtgaagaaggagccataaggatatctgaaagataggaggaaaataaaaaacaaaagactcaaaatactggcctgatgcagctctgat

SEQ ID NO: 617579 - DNA, 120 bp, Artificial Sequence
  ENSG00000177301_104 (sequence is synthesized)
ggaaaggaggacccctggccagagaggaagattcctaaggctcatcaaccaaccactgcagggagctttcagatttagaggagaagccccactccccctactaaacctctccaactggag

SEQ ID NO: 617580 - DNA, 120 bp, Artificial Sequence
  ENSG00000177301_105 (sequence is synthesized)
ctgacagtctttgccattggcctgtgaatgttcccttcctcctattggtcagcctggggccctgacccaccccacactccaaaattctgttaatttcatccagcattgttcaggtggctc

SEQ ID NO: 617581 - DNA, 120 bp, Artificial Sequence
  ENSG00000177301_106 (sequence is synthesized)
ctgtgcaccaggccgtgaggatacaaagatgactaagccttggccggcatcctggaggagctcacacggagagacctattaggactggcctgcactagcggtaggaatctggctggagct

SEQ ID NO: 617582 - DNA, 120 bp, Artificial Sequence
  ENSG00000177301_107 (sequence is synthesized)
gaacgttcacactcttttggcagatggagatggagggttccaggccagaagggaacgcctgcagcgacagagctgagaagggagctcggattttatgtgaccacccccacctcctgggag

SEQ ID NO: 617583 - DNA, 120 bp, Artificial Sequence
  ENSG00000177301_108 (sequence is synthesized)
aagccaaactacagaaacagagtcctggccttgccctgaggacaaagacccaaaatgtgcctgtacctaaagcaccctcccctttccaccataggactcaggggcgggagggagggaggg

SEQ ID NO: 617584 - DNA, 120 bp, Artificial Sequence
  ENSG00000177301_109 (sequence is synthesized)
ggctgcctccaaccttgctcactgctccgttgttagaagagggatctacaaatgacggaggcaagggtttgccctgcatgactgctggactgtgtgggcatttttcattaccaggctcct

SEQ ID NO: 617585 - DNA, 120 bp, Artificial Sequence
  ENSG00000177301_110 (sequence is synthesized)
tcaagatgctgatgagaatacacccccataattacacccctccccatcttacagcttcctcagggatgggtctccccatccccatcctgtcactcttgacaggttgccatgtggtcagtg

SEQ ID NO: 617586 - DNA, 120 bp, Artificial Sequence
  ENSG00000177301_111 (sequence is synthesized)
ggtttctttgtgagggtcagagagggaggcctgggcctgctgagaggactgagctcccatctgccttcatcagactggaaactgagccattcagaacctcatccaatgtgtttttttcca

SEQ ID NO: 617587 - DNA, 120 bp, Artificial Sequence
  ENSG00000177301_112 (sequence is synthesized)
acccagtttgattaaagtcagtatcacctgaaacccaagactaatgtatgtcgacaaggactcccaggtggccccctcggccaggacaactctccctccctgcagccctttggaaacaaa

SEQ ID NO: 617588 - DNA, 120 bp, Artificial Sequence
  ENSG00000177301_113 (sequence is synthesized)
ctcaacaggcaggaggcgccattaccacggggccaggagccgggcccttgctgagtgagaccgagacgccactctggaaagtctcagggcatcaatatttcatgccgctggagctgtctt

SEQ ID NO: 617589 - DNA, 120 bp, Artificial Sequence
  ENSG00000177301_114 (sequence is synthesized)
tgtttttatgcaaattgctcaggctgccagatgggcaaaggctggcagcgtcatccatcaccaggctgttccctcgtcagcaacctcaccggctgccagggccctgcaggctggcctcag

SEQ ID NO: 617590 - DNA, 120 bp, Artificial Sequence
  ENSG00000177301_115 (sequence is synthesized)
caggggactcacagatggacgactcataatgagataggaggcagctcgtcacttcagtgtgaatctgcatacctttcattttaacccacaaacctccacctgtgtggagggcatagcagg

SEQ ID NO: 617591 - DNA, 120 bp, Artificial Sequence
  ENSG00000177301_116 (sequence is synthesized)
gacatagcgagagtgggatgccataaatgactgaagtcaaggttgtaatggtccagcaacatttgcagaatcctgaaatggtgcacagaatcctgaaatggacaatcacctggaagcact

SEQ ID NO: 617592 - DNA, 120 bp, Artificial Sequence
  ENSG00000177301_117 (sequence is synthesized)
gctgtagagggacttccgcattgagaggggactggagccaactactcccaacacctcctttccagaattccaagtctcagggttcctgtgcatgtccacctgttttctcctcaacaaaac

SEQ ID NO: 617593 - DNA, 120 bp, Artificial Sequence
  ENSG00000177301_118 (sequence is synthesized)
aaaacaaaaaacttcccaagaacccaagagcatcctggtgggattctggaagattgggccaatccaagattctttgcagatgctggacatttaactctatcaaactggtaggagtcattc

SEQ ID NO: 617594 - DNA, 120 bp, Artificial Sequence
  ENSG00000177301_119 (sequence is synthesized)
cactcctacatatttgctcaaaggaaatgaaagcataaccccacacaaagactaaggcatgaatgttcacggcagctttccaaaaactgcaaccaacccaaaagtccagcagcaaatgaa

SEQ ID NO: 617595 - DNA, 120 bp, Artificial Sequence
  ENSG00000177301_120 (sequence is synthesized)
aagataaacaacttgtgttatatccattcagtggaatactacacaacaataaaaaggaatgaactattgatacattcaacaacattaatgaatcataaaatatttcttctgaatgaaaga

SEQ ID NO: 617596 - DNA, 120 bp, Artificial Sequence
  ENSG00000177301_121 (sequence is synthesized)
tgaaaaaatggagtctggatgaggatacactgtttgaaactggcactgccccactacctccaacaccaccctgaccctcatcagccaccctcctatatgcaactttgagctggacactgg

SEQ ID NO: 617597 - DNA, 120 bp, Artificial Sequence
  ENSG00000177301_122 (sequence is synthesized)
ggtgacgcaggtgggattgtaggggaatcctgtcctccaagaccaagcaggctgataggaaaagctctgcaaaacacagtcatgcatcctgaaaacttacaagagagctgaagagtgaag

SEQ ID NO: 617598 - DNA, 120 bp, Artificial Sequence
  ENSG00000177301_123 (sequence is synthesized)
gctgatcccctggaagctggtgctccaaactgaggacaaaagtgagcatctacacaagcaggctagcagcacagggagacagagggctctctcagacactggccagggcaggctcctggg

SEQ ID NO: 617599 - DNA, 120 bp, Artificial Sequence
  ENSG00000177301_124 (sequence is synthesized)
acaagaaagcgggactgattcacacctggaagataatcatcagggagcaccatctgcggtccaagaccccaaaggagaaaatggtgctccgaagacatgagatcaacacagagctggagt

SEQ ID NO: 617600 - DNA, 120 bp, Artificial Sequence
  ENSG00000177301_125 (sequence is synthesized)
cccccacccacagccatccagctgccaagcagttcaggacaaggcccccaaatcatcatgcgaattactgtgaagctacatttctccagggctttaccatgtacagagccaggatttgaa

SEQ ID NO: 617601 - DNA, 120 bp, Artificial Sequence
  ENSG00000177301_126 (sequence is synthesized)
ctcgggtggactgattctattctcagattccatcctgcctcccagccatcctactgctcaccgagccttgcagagcaggctggcacctggcatgcttggcagtgggtacatccttcctca

SEQ ID NO: 617602 - DNA, 120 bp, Artificial Sequence
  ENSG00000177301_127 (sequence is synthesized)
ttccacaactgaggaagcagcagctccgtgaaattaggccgtttgcaatggccacatactcctgagaggtagaatgggtactctaccagtgctgaccaaccagacttgagctcatcattc

SEQ ID NO: 617603 - DNA, 120 bp, Artificial Sequence
  ENSG00000177301_128 (sequence is synthesized)
aacacatggcacctgaactgagaaaaggggtcatgggatggaaagagctctggacccctgacaattctgtggccctagcctacagctccccacaaggctcagctcctatatagggactcc

SEQ ID NO: 617604 - DNA, 120 bp, Artificial Sequence
  ENSG00000177301_129 (sequence is synthesized)
atggtctagtgggaaaggccctgggccagaaggccatggccaggtttaggtcaggactctgtagcactagttatgtgaccttaggaagtcactttgtccctgtgacttggtttccgcatc

SEQ ID NO: 617605 - DNA, 120 bp, Artificial Sequence
  ENSG00000177301_130 (sequence is synthesized)
tgcaaaacagagataacatctaacctcacgtgattattgtcatctagtgagataagtgaatgtggaatcactttgaaaagactacaacactacactgcaggatagccttgtcgcctgtaa

SEQ ID NO: 617606 - DNA, 120 bp, Artificial Sequence
  ENSG00000177301_131 (sequence is synthesized)
aggaaacctctccaaggctgtgaccactacagattttgcctgaggttaagtcccttacttctctcccactcccacccccagcctgcctgggttcagtgttcttaaattgaaactgaagct

SEQ ID NO: 617607 - DNA, 120 bp, Artificial Sequence
  ENSG00000177301_132 (sequence is synthesized)
cggctttgctgcagagagggctttccccttcgctggggccgtgggctgccgccgagcccccgcgcttaaaaggaagctgagatctggggcggcagcctggcgcaggctactccccacccc

SEQ ID NO: 617608 - DNA, 120 bp, Artificial Sequence
  ENSG00000177301_133 (sequence is synthesized)
cagagatcaggttccgggattttgggttggacactgagcctcggcggtccctcggctggacgccgggggcttaagagctgaactgcgcttgggcccgcagcaggagccgaccgcgcgggc

SEQ ID NO: 617609 - DNA, 120 bp, Artificial Sequence
  ENSG00000177301_134 (sequence is synthesized)
aggagggggttaaggtggcgctagcggccgcggccagcgggagggtctggtcctctgcgcggaggcgagcgctgagtgcgccgaacggaatcccggccggagcccggggcgatggggaga

SEQ ID NO: 617610 - DNA, 120 bp, Artificial Sequence
  ENSG00000177301_135 (sequence is synthesized)
gggcccagacccctccccgccctggggccggcgggattgggtcggcagggggccagtccggaagccggcttcctccaggctccccctctcgctgctgccaagccgcctcgcagctaggca

SEQ ID NO: 617611 - DNA, 120 bp, Artificial Sequence
  ENSG00000177301_136 (sequence is synthesized)
ggtcagaaaagatctccctgataaagtcactttgaacagaggtctgaaggatgtgaagaaggagccataaggatatctgaaaggatctctatatggcaagagctaccaccaaatctctcc

SEQ ID NO: 617612 - DNA, 120 bp, Artificial Sequence
  ENSG00000177301_137 (sequence is synthesized)
gatgtgaagaaggagccataaggatatctgaaagttcatgtcctcaggtactaggcatgtgggctttcagaacagtaagaagcatctactagaaacccaatagggtctcagaaaacaaca

SEQ ID NO: 617613 - DNA, 120 bp, Artificial Sequence
  ENSG00000177301_138 (sequence is synthesized)
ctgcctaactaccaaggttattttgtgatgggccagaagaatcagtatgttctgatatcaggaaggcatgcagcagagcttctctcacagacctgtggacaacttagagaaatctcaagg

SEQ ID NO: 617614 - DNA, 120 bp, Artificial Sequence
  ENSG00000177301_139 (sequence is synthesized)
aagggtggtgagggaggctgcaatagcacccagtgttgacgctgtcctgatcagcattcccactgacgatttggatgaggacacggacagcatgctgatcaaacctgagagggcatgacc

SEQ ID NO: 617615 - DNA, 120 bp, Artificial Sequence
  ENSG00000177301_140 (sequence is synthesized)
cagaacagatgtcacagtccatcttaagagattcttcaggcaaagactttggagctttagttggcttgtctccgtattaaccaatcgtgtgatattactccaacaagtcattacttggag

SEQ ID NO: 617616 - DNA, 120 bp, Artificial Sequence
  ENSG00000177302_0 (sequence is synthesized)
ggaagttccacgccaagatactggattcggtgctgaggcggcggctgcggcacgggaaaggctcagtgactgaagctccaaaggccagcaggctggtggggacgtgaccgaagcgaggct

SEQ ID NO: 617617 - DNA, 120 bp, Artificial Sequence
  ENSG00000177302_1 (sequence is synthesized)
ctggttccctttcggtgggcgccatttgagcctcatctctggcttccccaggatgcgccggcagccggggagcggctccgggcgcgaggtctgaggatgatctttcctgtcgcccgctac

SEQ ID NO: 617618 - DNA, 120 bp, Artificial Sequence
  ENSG00000177302_2 (sequence is synthesized)
gcgctccggtggctgcgacggcccgaagaccgtgccttttcccgcgccgccatggagatggccctccgaggcgtgcggaaagtcctctgtgtggccgaaaaaaacgacgcggccaagggg

SEQ ID NO: 617619 - DNA, 120 bp, Artificial Sequence
  ENSG00000177302_3 (sequence is synthesized)
atcgccgacctgctgtcaaacggtcgcatgaggcggagagaaggactttcaaaattcaacaagatctatgaatttgattatcatctgtatggccagaatgttaccatggtaatgacttca

SEQ ID NO: 617620 - DNA, 120 bp, Artificial Sequence
  ENSG00000177302_4 (sequence is synthesized)
gtttctggacatttactggctcatgatttccagatgcagtttcgaaaatggcagagctgcaaccctcttgtcctctttgaagcagaaattgaaaagtactgcccagagaattttgtagac

SEQ ID NO: 617621 - DNA, 120 bp, Artificial Sequence
  ENSG00000177302_5 (sequence is synthesized)
atcaagaaaactttggaacgagagactcgccagtgccaggctctggtgatctggactgactgtgatagagaaggcgaaaacatcgggtttgagattatccacgtgtgtaaggctgtaaag

SEQ ID NO: 617622 - DNA, 120 bp, Artificial Sequence
  ENSG00000177302_6 (sequence is synthesized)
cccaatctgcaggtgttgcgagcccgattctctgagatcacaccccatgccgtcaggacagcttgtgaaaacctgaccgagcctgatcagagggtgagcgatgctgtggatgtgaggcag

SEQ ID NO: 617623 - DNA, 120 bp, Artificial Sequence
  ENSG00000177302_7 (sequence is synthesized)
gagctggacctgaggattggagctgcctttactaggttccagaccctgcggcttcagaggatttttcctgaggtgctggcagagcagctcatcagttacggcagctgccagttccccaca

SEQ ID NO: 617624 - DNA, 120 bp, Artificial Sequence
  ENSG00000177302_8 (sequence is synthesized)
ctgggctttgtggtggagcggttcaaagccattcaggcttttgtaccagaaatcttccacagaattaaagtaactcatgaccacaaagatggtatcgtagaattcaactggaaaaggcat

SEQ ID NO: 617625 - DNA, 120 bp, Artificial Sequence
  ENSG00000177302_9 (sequence is synthesized)
cgactctttaaccacacggcttgcctagttctctatcagttgtgtgtggaggatcccatggcaactgtggtagaggtcagatctaagcccaagagcaagtggcggcctcaagccttggac

SEQ ID NO: 617626 - DNA, 120 bp, Artificial Sequence
  ENSG00000177302_10 (sequence is synthesized)
actgtggagcttgagaagctggcttctcgaaagttgagaataaatgctaaagaaaccatgaggattgctgagaagctctacactcaagggtacatcagctatccccgaacagaaacaaac

SEQ ID NO: 617627 - DNA, 120 bp, Artificial Sequence
  ENSG00000177302_11 (sequence is synthesized)
atttttcccagagacttaaacctgacggtgttggtggaacagcagacccccgatccacgctggggggcctttgcccagagcattctagagcggggtggtcccaccccacgcaatgggaac

SEQ ID NO: 617628 - DNA, 120 bp, Artificial Sequence
  ENSG00000177302_12 (sequence is synthesized)
aagtctgaccaagctcaccctcccattcaccccaccaaatacaccaacaacttacagggagatgaacagcgactgtacgagtttattgttcgccatttcctggcttgctgctcccaggat

SEQ ID NO: 617629 - DNA, 120 bp, Artificial Sequence
  ENSG00000177302_13 (sequence is synthesized)
gctcaggggcaggagaccacagtggagatcgacatcgctcaggaacgctttgtggcccatggcctcatgattctggcccgaaactatctggatgtgtatccatatgatcactggagtgac

SEQ ID NO: 617630 - DNA, 120 bp, Artificial Sequence
  ENSG00000177302_14 (sequence is synthesized)
aagatcctccctgtctatgagcaaggatcccactttcagcccagcaccgtggagatggtggacggggagaccagcccacccaagctgctcaccgaggccgacctcattgccctcatggag

SEQ ID NO: 617631 - DNA, 120 bp, Artificial Sequence
  ENSG00000177302_15 (sequence is synthesized)
aagcatggcattggtacggatgccactcatgcggagcacatcgagaccatcaaagcccggatgtacgtgggcctcaccccagacaagcggttcctccctgggcacctgggcatgggactt

SEQ ID NO: 617632 - DNA, 120 bp, Artificial Sequence
  ENSG00000177302_16 (sequence is synthesized)
gtggaaggttatgattccatgggctatgaaatgtctaagcctgacctccgggctgaactggaagctgatctgaagctgatctgtgatggcaaaaaggacaaatttgtggttctaaggcag

SEQ ID NO: 617633 - DNA, 120 bp, Artificial Sequence
  ENSG00000177302_17 (sequence is synthesized)
caagtgcagaaatacaagcaggttttcattgaagcggtggctaaagcaaagaaattggacgaggccttggcccagtactttgggaatgggacagagttggcccagcaagaagatatctac

SEQ ID NO: 617634 - DNA, 120 bp, Artificial Sequence
  ENSG00000177302_18 (sequence is synthesized)
ccagccatgccagagcccatcaggaagtgcccacagtgcaacaaggacatggtccttaagaccaagaagaatggcgggttctacctcagctgcatgggtttcccagagtgtcgctcagct

SEQ ID NO: 617635 - DNA, 120 bp, Artificial Sequence
  ENSG00000177302_19 (sequence is synthesized)
gtgtggcttcctgactcggtgctggaggccagcagggacagcagtgtgtgtccagtttgtcagccacaccctgtgtacaggttaaagttaaagtttaagcgcggtagccttcccccgacc

SEQ ID NO: 617636 - DNA, 120 bp, Artificial Sequence
  ENSG00000177302_20 (sequence is synthesized)
atgcctctggagtttgtttgctgcatcggcggatgcgacgacaccctgagggagatcctggacctgagattttcagggggcccccccagggctagccagccctctggccgcctgcaggct

SEQ ID NO: 617637 - DNA, 120 bp, Artificial Sequence
  ENSG00000177302_21 (sequence is synthesized)
aaccagtccctgaacaggatggacaacagccagcacccccagcctgctgacagcagacagactgggtcctcaaaggctctggcccagaccctcccaccacccacggctgctggtgaaagc

SEQ ID NO: 617638 - DNA, 120 bp, Artificial Sequence
  ENSG00000177302_22 (sequence is synthesized)
aattctgtgacctgcaactgtggccaggaggctgtgctgctcactgtccgtaaggagggccccaaccggggccggcagttctttaagtgcaacggaggtagctgcaacttcttcctgtgg

SEQ ID NO: 617639 - DNA, 120 bp, Artificial Sequence
  ENSG00000177302_23 (sequence is synthesized)
gcagacagccccaatccgggagcaggagggcctcctgccttggcatatagacccctgggcgcctccctgggatgcccaccaggcccagggatccacctaggtgggtttggcaaccctggt

SEQ ID NO: 617640 - DNA, 120 bp, Artificial Sequence
  ENSG00000177302_24 (sequence is synthesized)
gatggcagtggtagtggcacatcctgcctttgcagccagccctccgtcacacggactgtgcagaaggatggacccaacaaggggcgccagttccacacatgtgccaagccgagagagcag

SEQ ID NO: 617641 - DNA, 120 bp, Artificial Sequence
  ENSG00000177302_25 (sequence is synthesized)
cagtgtggctttttccagtgggtcgatgagaacaccgctccagggacttctggagccccgtcctggacaggagacagaggaagaaccctggagtcggaagccagaagcaaaaggccccgg

SEQ ID NO: 617642 - DNA, 120 bp, Artificial Sequence
  ENSG00000177302_26 (sequence is synthesized)
gccagttcctcagacatggggtccacagcaaagaaaccccggaaatgcagcctttgccaccagcctggacacacccgtcccttttgtcctcagaacagatgagctcagggtagggtagag

SEQ ID NO: 617643 - DNA, 120 bp, Artificial Sequence
  ENSG00000177302_27 (sequence is synthesized)
tcttgtgttaaggggcacaaggtccagatcactctggagcaggccagctctgctggacagtgaccctcttcccaggcctcaggagtgaccatagccactgctgaaaagtcacgcagctgc

SEQ ID NO: 617644 - DNA, 120 bp, Artificial Sequence
  ENSG00000177302_28 (sequence is synthesized)
tccctcggaccccccaaggatggttgctgttagcagaggattggtgcagtcccagctgaagcccactgtgtgccaaaggaagaagctcccagggctgcttccttcacctgcagaaagccc

SEQ ID NO: 617645 - DNA, 120 bp, Artificial Sequence
  ENSG00000177302_29 (sequence is synthesized)
caagtgagccaccagcactcatggggcagtccctgtccaggctgcccagggcttctcatagacgtcctgagaaggacggtgtaatgcaaggaaatggctgtggtaacactgatccttcag

SEQ ID NO: 617646 - DNA, 120 bp, Artificial Sequence
  ENSG00000177302_30 (sequence is synthesized)
gctgtggtaacactgatccttcagaagaagcttcattccctcttaatctagttaagccaggacatccagaattcattgctttaataaagaacccaggccgggtgcagtggctcatgcctg

SEQ ID NO: 617647 - DNA, 63 bp, Artificial Sequence
  ENSG00000177302_31 (sequence is synthesized)
ctcaggagttcgagaccagccaggtgtgcgcctgtagacccggctactcaggaggctgaggca

SEQ ID NO: 617648 - DNA, 90 bp, Artificial Sequence
  ENSG00000177302_32 (sequence is synthesized)
gaggcggaggttgcagttagctgagattgcgccactggatttaaaaatttaaaaaaataaaaagaatccaaccccggcagggcgtggagg

SEQ ID NO: 617649 - DNA, 120 bp, Artificial Sequence
  ENSG00000177302_33 (sequence is synthesized)
atttaaaaaaataaaaagaatccaaccccggcagggcgtggaggctcacacctgtaatccagcacttagggaggccaaggctggaggattgcttgagatcaggagttcaagaccagcctg

SEQ ID NO: 617650 - DNA, 120 bp, Artificial Sequence
  ENSG00000177302_34 (sequence is synthesized)
acatagttagaccttgtctctatttttaaaaatataacaagcacagttgtacacgtctttagttcagctgctcaggaggctgaagtgggaggatcctttgaacccaagagtttgaggctg

SEQ ID NO: 617651 - DNA, 120 bp, Artificial Sequence
  ENSG00000177302_35 (sequence is synthesized)
ggtgacagagtaagaccctgtctcaaactttttttaaaatgaaagaatccaacctttttttactctgacctgcgagagtgcagagggtctggggaacatttgcagaagcaacaggtacca

SEQ ID NO: 617652 - DNA, 120 bp, Artificial Sequence
  ENSG00000177302_36 (sequence is synthesized)
gggtctggggaacatttgcagaagcaacaggtaccagccagtgctggaaggagctcaccctgggaggtctcgtcagcctctgtccttcatggctgtcccttgtgtcccatgtggagagcc

SEQ ID NO: 617653 - DNA, 120 bp, Artificial Sequence
  ENSG00000177302_37 (sequence is synthesized)
cttcctccctttccacatggtaagcactgagcccaatttcttctcaccccacagatggtccctcagagcagagatgtctaatgaaaggttcagattcagatcactaactttccatcttcc

SEQ ID NO: 617654 - DNA, 120 bp, Artificial Sequence
  ENSG00000177302_38 (sequence is synthesized)
actttttccagtggtggccatgttcccccgtttgccttcacaaaaaccttgtgaataatacaagccatatggactctgatttacagtttagaagatgagcagaggtgggtgtgagttgcc

SEQ ID NO: 617655 - DNA, 120 bp, Artificial Sequence
  ENSG00000177302_39 (sequence is synthesized)
cagtcatgttgctagttgttgaagaaactaggattgttctcaggtcttgggctcctggcccatagaccagtggctctgtgttctgatggggtattggggaggatttttacaaatgcaggt

SEQ ID NO: 617656 - DNA, 120 bp, Artificial Sequence
  ENSG00000177302_40 (sequence is synthesized)
tcctgagattgttcctggaacatctccgagtgggtgtgggttgtggccctgcgtgtgtgattttgcctatcccagctccggggtaccaccaaccactttttgtctctgtgggtttaccta

SEQ ID NO: 617657 - DNA, 70 bp, Artificial Sequence
  ENSG00000177302_41 (sequence is synthesized)
gggtaccaccaaccactttttgtctctgtgggtttacctactctggatattttgtttaaatggaatcata

SEQ ID NO: 617658 - DNA, 120 bp, Artificial Sequence
  ENSG00000177302_42 (sequence is synthesized)
gtgaaactctgtctcaagaaaaaaaaaaaaatgaaatcctaccatacatgacatcctgtgtctggtttctttgacttggctgatgtttgtcaggctcatccacattgtagcatgtcagtc

SEQ ID NO: 617659 - DNA, 120 bp, Artificial Sequence
  ENSG00000177302_43 (sequence is synthesized)
ggctcatccacattgtagcatgtcagtcctcgatgtttatgataagctgatagcccactgtatgaatataccacacgattatccatttgtcagttgatggacattgggttgtttccactt

SEQ ID NO: 617660 - DNA, 120 bp, Artificial Sequence
  ENSG00000177302_44 (sequence is synthesized)
tttggctattgtgaatagcactgttgtgaacattggtgtatgagtgtctgatgacttgttttcagttattttgggcatatgccgaggaatggaattgtagttttataccataactccatg

SEQ ID NO: 617661 - DNA, 120 bp, Artificial Sequence
  ENSG00000177302_45 (sequence is synthesized)
ttttgactttttgaggaacctacaaattttccacagtggatgcaccactttacacccaccagcagcacaccagggttactgcttctccatatccttgtgaacacttgttcctttcctttt

SEQ ID NO: 617662 - DNA, 120 bp, Artificial Sequence
  ENSG00000177302_46 (sequence is synthesized)
cttgtattatagccatcctagtgttttgtcatcctagtgggtatgaagtggcgtgtcattgtggttttgttttgcattttcctagtcattaatgacattgaccatctttccacaggctta

SEQ ID NO: 617663 - DNA, 90 bp, Artificial Sequence
  ENSG00000177302_47 (sequence is synthesized)
cctagtcattaatgacattgaccatctttccacaggcttactggccattggtatacattctttggagaatgtcgatttaagttcttcacc

SEQ ID NO: 617664 - DNA, 89 bp, Artificial Sequence
  ENSG00000177302_48 (sequence is synthesized)
tggtctcaaactcgtgacctcaggtgatctaacaggcaggagccatcacacctggtctcttcccccatttttaaattgtgttgtctgtc

SEQ ID NO: 617665 - DNA, 120 bp, Artificial Sequence
  ENSG00000177302_49 (sequence is synthesized)
acctggtctcttcccccatttttaaattgtgttgtctgtctttgttgttgagttgtaggagttcttaatagtttctggatatcagatgcctttgtggttttcacatctctgcaggcaact

SEQ ID NO: 617666 - DNA, 120 bp, Artificial Sequence
  ENSG00000177302_50 (sequence is synthesized)
gtgtgtctcaaaagcaaactgcaggattgggctgcaccatggactgggccaggcatctgagatcagacagacccaggctcagctcccacttcctggcctcttctgccaccctgggtgtgc

SEQ ID NO: 617667 - DNA, 120 bp, Artificial Sequence
  ENSG00000177302_51 (sequence is synthesized)
agcctcatccttggagccccagttgcctcatccgtaatggggtgtccttgttcatattgaggctctctagtgaaggcttacggtcaggcacgactgcaaattaaagcttcacaaatcaaa

SEQ ID NO: 617668 - DNA, 88 bp, Artificial Sequence
  ENSG00000177302_52 (sequence is synthesized)
atgtcttcctttttctactagacacagtaacgatctgatctctcttttccccacagttactagctaaaattaactccatcactatttc

SEQ ID NO: 617669 - DNA, 120 bp, Artificial Sequence
  ENSG00000177302_53 (sequence is synthesized)
ccccacagttactagctaaaattaactccatcactatttctgacagtacactcagtttaaaggttatggtgatgtttcctctttagacactgtacaccattgatttaacctaataggtaa

SEQ ID NO: 617670 - DNA, 120 bp, Artificial Sequence
  ENSG00000177302_54 (sequence is synthesized)
attggtcatctcacagcttcttgaactggtttgcctttatttcaaggggctttaagaaaagtgagtcctttatgatggagggcagtgtgatttgactttgaccttggtaacaccttgtgt

SEQ ID NO: 617671 - DNA, 120 bp, Artificial Sequence
  ENSG00000177302_55 (sequence is synthesized)
caccaaagtcactaccatgatttaaaaagctggttcccacccattgtataaatgtggctaagtggccaagggactgaagtaaactttttttatgaatggtagttgtttaaatcctaggaa

SEQ ID NO: 617672 - DNA, 120 bp, Artificial Sequence
  ENSG00000177302_56 (sequence is synthesized)
agttgtttaaatcctaggaataaaggctggacatggtggtttatgcctgtaatcccagcaatttgtggggccaaggcaggatcacatgaactccaggaatttgagaccagcctgggcaac

SEQ ID NO: 617673 - DNA, 120 bp, Artificial Sequence
  ENSG00000177302_57 (sequence is synthesized)
cttatcagtcctgttcacactcttggagaagtggacagtgtgtcatgcagagggtcatagccttactttcaattcaccgggaccttttcttttggggatacaccatgaacccattggaac

SEQ ID NO: 617674 - DNA, 120 bp, Artificial Sequence
  ENSG00000177302_58 (sequence is synthesized)
agtttgctgtcattagattggagggctctctgtcatgtactgagttgggactctgttttcatttcttttctaggcagagctgcaaccctcttgtcctctttgaagcagaaattgaaaagt

SEQ ID NO: 617675 - DNA, 120 bp, Artificial Sequence
  ENSG00000177302_59 (sequence is synthesized)
tactggctcatgatttccagatgcagtttcgaaaatggtcagtacaattctcaagggaaggactttcagattatagctggagtgcagtggcacaatcttgactcattgtaacctccacct

SEQ ID NO: 617676 - DNA, 120 bp, Artificial Sequence
  ENSG00000177302_60 (sequence is synthesized)
ctgtcttaagaataacaactgttaacaacctaaaggttcctggatatggggtgatcactttataatttatgaggagttctctttttaataaaatatggtcccatctcagctcttcattac

SEQ ID NO: 617677 - DNA, 120 bp, Artificial Sequence
  ENSG00000177302_61 (sequence is synthesized)
tgagctgggcacctgagtcaggtgcctcctctggagtgtgtacaccatctttcccttgctcctgccagaacccagagaggagtgtcggggattccactcaggccctgcaggggcgtagct

SEQ ID NO: 617678 - DNA, 120 bp, Artificial Sequence
  ENSG00000177302_62 (sequence is synthesized)
gtgttctgcagcagccagttcagcagggctggtccagttctgttgtgttccatgctgtcactgctttggcaggtatgaccctgtttggagtgggccatgggcaaagaaccatgaagggct

SEQ ID NO: 617679 - DNA, 120 bp, Artificial Sequence
  ENSG00000177302_63 (sequence is synthesized)
ctttccctgccctctccagatagatgattgctacaccaggcttaggaaattattcacatattaaatacaacatccaagcttgggctacgtagcaagaccccatctctttaaaaaaaaaaa

SEQ ID NO: 617680 - DNA, 120 bp, Artificial Sequence
  ENSG00000177303_0 (sequence is synthesized)
gggatttcctgcgggaggcgccgagccggccttggaaaaggagaaggagaaaggggggcaggggggagtgggagccaccgtcctgagtgccagggaccgagcagggccagccggaccccg

SEQ ID NO: 617681 - DNA, 120 bp, Artificial Sequence
  ENSG00000177303_1 (sequence is synthesized)
gcgggcggccgggagagagccctgagaccagtgcaccgctgctgcctgaggcccaagggaatgctggctgctctctgggtgggcactggtgttccacagccaagccgggaagattggtgt

SEQ ID NO: 617682 - DNA, 120 bp, Artificial Sequence
  ENSG00000177303_2 (sequence is synthesized)
gcccagtcccagcccatcctggagctgtcggaagccacaagctgatatccatccagatttccatgtagccttcaccccctcaaagattagctttccttcgtgtggtggcagttcacggag

SEQ ID NO: 617683 - DNA, 120 bp, Artificial Sequence
  ENSG00000177303_3 (sequence is synthesized)
cacctttgggagtatccctcagtacctgacgaggagcccactgcctgggacacctgacttgctcccccggaaccgggagccctccaaggggctgtggcatggcgccctgacgccccagct

SEQ ID NO: 617684 - DNA, 120 bp, Artificial Sequence
  ENSG00000177303_4 (sequence is synthesized)
tggacccgttgcctgcctttgccctggactcctgagtgtagagctcagcccaggagccagtatgggtcgtgaacaggacctgatcctcgccgtcaagaatggagatgtgaccggtgtgca

SEQ ID NO: 617685 - DNA, 120 bp, Artificial Sequence
  ENSG00000177303_5 (sequence is synthesized)
gaaactggtggcgaaggtcaaggccacaaagacaaagctcctgggctccacaaagaggctcaacgtgaactaccaggatgctgatggattctctgccctccaccacgctgctttgggggg

SEQ ID NO: 617686 - DNA, 120 bp, Artificial Sequence
  ENSG00000177303_6 (sequence is synthesized)
cagcctggagctcatagccttgctgctagaggctcaggccactgttgacatcaaggacagcaatggcatgcgcccgctgcactacgcagcctggcagggccggctggagcctgtgaggct

SEQ ID NO: 617687 - DNA, 120 bp, Artificial Sequence
  ENSG00000177303_7 (sequence is synthesized)
gctgctgcgcgcctctgcggctgtcaatgccgcctcgctggacggacagatccccctgcacctggctgcacagtatggacattatgaggtgtcagaaatgctcctccagcatcagtccaa

SEQ ID NO: 617688 - DNA, 120 bp, Artificial Sequence
  ENSG00000177303_8 (sequence is synthesized)
cccatgcctggtcaacaaggccaagaagacgcccctggacctggcctgtgaatttggccgactcaaggtggcccagctgcttctgaacagccacttatgtgtggcactgctggagggtga

SEQ ID NO: 617689 - DNA, 120 bp, Artificial Sequence
  ENSG00000177303_9 (sequence is synthesized)
ggccaaagacccgtgtgaccccaactacaccacgcccctgcacttggctgccaagaatggccacagagaagtcatcaggcagctcctgagagctgggatcgagatcaaccgccagaccaa

SEQ ID NO: 617690 - DNA, 120 bp, Artificial Sequence
  ENSG00000177303_10 (sequence is synthesized)
gacgggtacggcgctccacgaggccgcactgtatggcaagaccgaggtggtgcggctgcttctggagggaggtgtggacgtgaacatccggaatacgtataaccagacggcgctggacat

SEQ ID NO: 617691 - DNA, 120 bp, Artificial Sequence
  ENSG00000177303_11 (sequence is synthesized)
agtgaatcagttcaccacctcccaggccagccgggaaatcaagcagctactgcgggaggcctcagggatcctgaaggtccgagcgctcaaggatttctggaacctccacgatcccactgc

SEQ ID NO: 617692 - DNA, 120 bp, Artificial Sequence
  ENSG00000177303_12 (sequence is synthesized)
tctcaatgtccgggcaggggatgtcatcacggtgctagaacagcatcccgacggccgctggaagggccacatccacgagagccagaggggcacagaccgcataggctacttccccccggg

SEQ ID NO: 617693 - DNA, 120 bp, Artificial Sequence
  ENSG00000177303_13 (sequence is synthesized)
cattgtcgaggtggtcagcaagcgggtgggcatccctgcagcccgcctcccctccgcacccacccccctgcgcccaggcttctcccggacaccgcagcctcctgccgaagaacccccgca

SEQ ID NO: 617694 - DNA, 120 bp, Artificial Sequence
  ENSG00000177303_14 (sequence is synthesized)
ccctcttacctacagccagcttcctcgggtgggcctcagcccagacagcccagcaggtgacaggaatagtgtgggcagtgagggcagcgtgggcagcatccgcagtgccggcagcgggca

SEQ ID NO: 617695 - DNA, 120 bp, Artificial Sequence
  ENSG00000177303_15 (sequence is synthesized)
gagctctgagggcactaatggccatggccctggcctcctgattgagaacgcccagccactgccctctgctggagaggaccaggtgctgccaggactccacccgccgtccctggcagacaa

SEQ ID NO: 617696 - DNA, 120 bp, Artificial Sequence
  ENSG00000177303_16 (sequence is synthesized)
cctgagccaccgccctctggccaactgccgctctggggagcagatcttcacccaggacgtgcggccagaacagctgctggaggggaaggacgcgcaggccattcataactggctaagcga

SEQ ID NO: 617697 - DNA, 120 bp, Artificial Sequence
  ENSG00000177303_17 (sequence is synthesized)
gttccagctggagggctacactgcccactttctgcaggccggctatgatgtgcctaccatcagccgcatgacacctgaggacctgacggccatcggggtgaccaagcctgggcacaggaa

SEQ ID NO: 617698 - DNA, 120 bp, Artificial Sequence
  ENSG00000177303_18 (sequence is synthesized)
gaagatcgcctcagagatcgctcagctcagcatcgccgagtggctgcccagctacatcccaacggacctgctggagtggctgtgtgcactggggctgccacagtaccacaagcagctggt

SEQ ID NO: 617699 - DNA, 120 bp, Artificial Sequence
  ENSG00000177303_19 (sequence is synthesized)
gagcagcggctacgactccatggggctggtggccgacctcacctgggaggagctgcaggagattggggtcaacaagctcgggcatcagaagaagctcatgctgggggtgaagcggctggc

SEQ ID NO: 617700 - DNA, 120 bp, Artificial Sequence
  ENSG00000177303_20 (sequence is synthesized)
cgccggctggccaagggtccggagctgatggccatcgagggactggagaacggagaaggcccagctacagctggcccacggctcctcaccttccagggcagcgaactaagcccagagcta

SEQ ID NO: 617701 - DNA, 120 bp, Artificial Sequence
  ENSG00000177303_21 (sequence is synthesized)
caggcggccatggcagggggtggccctgaaccactccccctcccacctgcccgctctcccagccaggagagcatcggggcacgctcacgggggtctggccactcacaggaacagcctgcc

SEQ ID NO: 617702 - DNA, 120 bp, Artificial Sequence
  ENSG00000177303_22 (sequence is synthesized)
ccacagcccagcggtggagatcccagccccccccaggagaggaacctcccagagggcacagagcggccccctaagctttgttcttcacttcctggccaaggacccccaccctatgttttt

SEQ ID NO: 617703 - DNA, 120 bp, Artificial Sequence
  ENSG00000177303_23 (sequence is synthesized)
atgtacccccagggctcaccctctagcccggccccagggccacctcctggcgcaccctgggccttctcctacttggccgggccccctgccactcccccagacccgcctcgacctaagcgc

SEQ ID NO: 617704 - DNA, 120 bp, Artificial Sequence
  ENSG00000177303_24 (sequence is synthesized)
cggtcccacagcctaagccgccctggccccacagagggggatgctgagggggaggccgaagggccagtgggcagcaccctaggcagttatgctacccttacccggcggccaggacgcagt

SEQ ID NO: 617705 - DNA, 120 bp, Artificial Sequence
  ENSG00000177303_25 (sequence is synthesized)
gcccttgtccggaccagtcctagtgtgaccccaaccccagctcgggggactcctcgcagccagtcctttgccctgcgggcccggcgcaaaggccccccgcccccgccccccaagcgcctc

SEQ ID NO: 617706 - DNA, 120 bp, Artificial Sequence
  ENSG00000177303_26 (sequence is synthesized)
agctccgtctctggccccagcccggagccacctccactagatgagagcccagggcccaaggaaggggccacagggccccgaaggcgaacactgagtgaacctgctggcccctcagagccc

SEQ ID NO: 617707 - DNA, 120 bp, Artificial Sequence
  ENSG00000177303_27 (sequence is synthesized)
cctggcccacctgccccggctgggcccgcgtcagacacggaggaggaggagccaggccctgaggggacgcccccatctcggggcagctctggggaagggctgccgtttgcagaggaaggg

SEQ ID NO: 617708 - DNA, 120 bp, Artificial Sequence
  ENSG00000177303_28 (sequence is synthesized)
aacctgaccatcaaacagcgcccgaagcccgctggccccccgccccgagagacacccgtgccccccggcctcgatttcaacctcacggaatcagacactgttaagcggaggcccaagtgc

SEQ ID NO: 617709 - DNA, 120 bp, Artificial Sequence
  ENSG00000177303_29 (sequence is synthesized)
cgggagagagagccactgcagaccgcactgctggccttcggagtggccagtgccacgcctggccccgctgccccactgccttccccaactcctggcgagtctcctccagcttctagcctt

SEQ ID NO: 617710 - DNA, 120 bp, Artificial Sequence
  ENSG00000177303_30 (sequence is synthesized)
ccccagcccgagcccagcagccttccagcccaaggagttccaaccccccttgctcccagccccgccatgcagcctccagtgccgccctgcccagggccaggtctggaaagctcagcagct

SEQ ID NO: 617711 - DNA, 120 bp, Artificial Sequence
  ENSG00000177303_31 (sequence is synthesized)
agtcggtggaatggggagacagaacccccggccgcccctgctgccctcctcaaggtgcccggagcaggaacagcccccaagcctgtgtcggtggcctgcacccagctggcattttctggc

SEQ ID NO: 617712 - DNA, 120 bp, Artificial Sequence
  ENSG00000177303_32 (sequence is synthesized)
cctaagctagcgccccggctcggcccccgcccagtgcctcctccacggcctgagagcactgggactgtgggcccaggccaggcccagcagagactggagcagaccagctcgtccctggca

SEQ ID NO: 617713 - DNA, 120 bp, Artificial Sequence
  ENSG00000177303_33 (sequence is synthesized)
gctgcactgagagccgcagagaagagcattggcaccaaggagcaagagggcacccccagcgcctccaccaagcacattctggatgacatcagcaccatgttcgacgccctggctgaccag

SEQ ID NO: 617714 - DNA, 120 bp, Artificial Sequence
  ENSG00000177303_34 (sequence is synthesized)
ctggacgccatgctggactgagccctccagcagtgcccactgtgacctgccgaagtccactgcctttgccccagcacagaagaggcccctgccaccctagggacgggccaagggctggtc

SEQ ID NO: 617715 - DNA, 120 bp, Artificial Sequence
  ENSG00000177303_35 (sequence is synthesized)
aggctgaagtgcccctcctagcagggccccttcccactcagcccgcggctgtgggcaccacagctcttgtggggcagcccaccttagaacctgactagcgagggacctccgctgcatctc

SEQ ID NO: 617716 - DNA, 120 bp, Artificial Sequence
  ENSG00000177303_36 (sequence is synthesized)
agcaaagcccctcccagggtttgatcgattgagcaggacagccctgctcctggacagggaccctggtaagagctctctcctcagggaggaagtaggggtggggctttgggggtgctttct

SEQ ID NO: 617717 - DNA, 120 bp, Artificial Sequence
  ENSG00000177303_37 (sequence is synthesized)
ctgtaccccccagcccatgtcccaagttgtgccaagggaatgcctcttgccacccaccatcctgcccaggccctgagaggctggaggaggcgtgtgtctggccgggccccctctccgtag

SEQ ID NO: 617718 - DNA, 120 bp, Artificial Sequence
  ENSG00000177303_38 (sequence is synthesized)
gtgtacagaggacatgtaaatacacagcggtggtgcccaggcagctcctgcccccgccttccctcactgaggcagggctagcaggggtgggaggcagtggggttaacagatcccacaagt

SEQ ID NO: 617719 - DNA, 120 bp, Artificial Sequence
  ENSG00000177303_39 (sequence is synthesized)
cctaacttttcaattgtaaatgttattttctaagcagagagaaatgcatatattttaaatggaatttattctatcaactgcctgagaggacacaatgggggaggggcttcggaccacagc

SEQ ID NO: 617720 - DNA, 120 bp, Artificial Sequence
  ENSG00000177303_40 (sequence is synthesized)
aggagccccgactgcccacctgagggcagggagagcctgaccccattggcccaggccctggctctgtaaccattaacctcttcccccaactaacaccaatgaaaacaccattccacgtga

SEQ ID NO: 617721 - DNA, 120 bp, Artificial Sequence
  ENSG00000177303_41 (sequence is synthesized)
ttgtcctgctcctctcgggagggactgcatcccgccacccagctgcctcatcccaaactgtccaggctgttggaagaggagggctaatggaagagtgggcagcttgaagggtgctctgtg

SEQ ID NO: 617722 - DNA, 120 bp, Artificial Sequence
  ENSG00000177303_42 (sequence is synthesized)
cggtgagggaccccaagcaggcattcctttgcaaatacaaatgattgctgttacttatttgggcacctgctatgttaccacgttctgctctgaggtctctatatgcaccctcatttaatt

SEQ ID NO: 617723 - DNA, 120 bp, Artificial Sequence
  ENSG00000177303_43 (sequence is synthesized)
cttcttaaagccagggaaggcagtgctgttagcatttcttctttacagatgacaaaattgagaattaaacaaaataaaatcaagagaaattcaagtgacttgcccaaggtcacacagcta

SEQ ID NO: 617724 - DNA, 120 bp, Artificial Sequence
  ENSG00000177303_44 (sequence is synthesized)
cctttcatgctgtggctcagccactgcgctcccacggcagggctgctggggttgggggggccagtaacccatccctgccagcccccaggataggttcgggtatggaagaccaggatttgg

SEQ ID NO: 617725 - DNA, 120 bp, Artificial Sequence
  ENSG00000177311_0 (sequence is synthesized)
atgacagtcatgtccctttccagggacctcaaggacgactttcacagtgacacggtactctccatcttaaatgagcagcgcattcggggcattttatgcgatgtcactatcattgtggaa

SEQ ID NO: 617726 - DNA, 120 bp, Artificial Sequence
  ENSG00000177311_1 (sequence is synthesized)
gataccaaatttaaagcccatagcaatgttctggcagcttcaagcctgtattttaaaaatatcttttggagccatacaatctgtatttccagccacgtcctggagctggacgatctcaaa

SEQ ID NO: 617727 - DNA, 120 bp, Artificial Sequence
  ENSG00000177311_2 (sequence is synthesized)
gctgaagtgtttactgaaatacttaattatatctacagttccacagtcgttgtcaagagacaggaaacagtcactgatctcgcagctgcaggaaaaaagctgggaatatcgttcttggaa

SEQ ID NO: 617728 - DNA, 120 bp, Artificial Sequence
  ENSG00000177311_3 (sequence is synthesized)
gaccttactgatcgcaacttctcaaattccccgggtccctatgtattctgtattactgaaaagggagtggttaaagaagaaaaaaatgaaaaaaggcatgaagaaccagccatcactaat

SEQ ID NO: 617729 - DNA, 120 bp, Artificial Sequence
  ENSG00000177311_4 (sequence is synthesized)
gggccaaggatcacaaatgcattttccatcatcgaaacagaaaatagtaataacatgttttccccgctggacttgagggcaagtttcaaaaaggtctccgactccatgagaacagctagc

SEQ ID NO: 617730 - DNA, 120 bp, Artificial Sequence
  ENSG00000177311_5 (sequence is synthesized)
ctttgcctggagaggacggacgtctgccacgaggcagagcctgtccgcacacttgccgagcactcatacgctgtttcttccgtagctgaagcttacagaagtcagcctgtacgtgaacat

SEQ ID NO: 617731 - DNA, 120 bp, Artificial Sequence
  ENSG00000177311_6 (sequence is synthesized)
gatggcagttcacctggtaacacagggaaagaaaattgtgaagcccttgcagcgaaaccgaaaacatgccggaagccaaagacattctccataccacaggattcggattcagccacagaa

SEQ ID NO: 617732 - DNA, 120 bp, Artificial Sequence
  ENSG00000177311_7 (sequence is synthesized)
aatataccaccccctccagtatccaacttagaggttaatcaagaaagaagtccacaaccagctgctgttctcactcgttcaaaatctccaaacaatgaaggagatgtccatttttccagg

SEQ ID NO: 617733 - DNA, 120 bp, Artificial Sequence
  ENSG00000177311_8 (sequence is synthesized)
gaagatgaaaatcaatcttctgatgttcccgggccgccagccgcagaggttccacctctggtgtacaattgtagctgctgttccaaagcctttgacagcagcactctgctcagtgcccac

SEQ ID NO: 617734 - DNA, 120 bp, Artificial Sequence
  ENSG00000177311_9 (sequence is synthesized)
atgcagcttcacaagccaacccaggagcctttagtgtgcaagtattgcaacaaacaattcaccaccctgaacaggttggatcggcatgaacagatctgcatgaggtcaagccacatgccc

SEQ ID NO: 617735 - DNA, 120 bp, Artificial Sequence
  ENSG00000177311_10 (sequence is synthesized)
attcctggaggaaaccaacgctttttagaaaactatcctaccattggacaaaatggaggttcattcacaggtccagaacctttattatctgaaaataggattggtgaattttccagtacc

SEQ ID NO: 617736 - DNA, 120 bp, Artificial Sequence
  ENSG00000177311_11 (sequence is synthesized)
ggaagtactttgccagacacggaccacatggttaaatttgttaatgggcaaatgctctacagttgcgttgtgtgcaaacgtagttatgtgaccttatctagcctccgaagacatgcaaat

SEQ ID NO: 617737 - DNA, 120 bp, Artificial Sequence
  ENSG00000177311_12 (sequence is synthesized)
gttcactcctggagaagaacatatccttgccattactgcaacaaagtatttgcattggctgagtacaggacaaggcatgaaatttggcatacgggagaaagacgatatcagtgcattttc

SEQ ID NO: 617738 - DNA, 120 bp, Artificial Sequence
  ENSG00000177311_13 (sequence is synthesized)
tgtcttgaaactttcatgacctactatatactcaaaaatcatcagaagtctttccatgccatcgatcatagactttccatcagtaaaaaaacagcaaatggaggcttgaagcctagtgtc

SEQ ID NO: 617739 - DNA, 120 bp, Artificial Sequence
  ENSG00000177311_14 (sequence is synthesized)
gagtctgcacctggtacctatgttgttcagaatccacacagctctgaattaccaacgctgaatttccaagatactgtaaacaccctgaccaacagtccagccatcccattggaaacatct

SEQ ID NO: 617740 - DNA, 120 bp, Artificial Sequence
  ENSG00000177311_15 (sequence is synthesized)
gcatgtcaggacatacccacttctgccaatgtacaaaatgcagagggtaccaaatggggagaggaggcattgaaaatggatcttgacaataacttttattcaactgaggtgtcagtttct

SEQ ID NO: 617741 - DNA, 120 bp, Artificial Sequence
  ENSG00000177311_16 (sequence is synthesized)
tccactgaaaatgctgtcagttctgacctccgggcaggggatgtacctgttttatctttgagtaatagcagtgagaatgccgcctctgtgatcagctacagtggctctgcaccctcggtc

SEQ ID NO: 617742 - DNA, 120 bp, Artificial Sequence
  ENSG00000177311_17 (sequence is synthesized)
attgtacacagcagccagttttcatcggtgatcatgcacagcaatgccattgctgccatgaccagcagcaaccacagagccttttcagacccagctgtcagtcagtccctgaaagatgac

SEQ ID NO: 617743 - DNA, 120 bp, Artificial Sequence
  ENSG00000177311_18 (sequence is synthesized)
agtaagcccgagccagataaagtgggtaggtttgcaagcagacccaaaagcattaaggagaaaaagaaaactacatcacataccaggggagaaataccggaggagtcaaactatgttgct

SEQ ID NO: 617744 - DNA, 120 bp, Artificial Sequence
  ENSG00000177311_19 (sequence is synthesized)
gatcctggaggatcactgagcaaaaccacaaatattgctgaagaaaccagcaaaattgaaacctacattgcaaaacctgctctgccgggaacctccacaaatagtaatgttgcacccctt

SEQ ID NO: 617745 - DNA, 120 bp, Artificial Sequence
  ENSG00000177311_20 (sequence is synthesized)
tgccaaataacagtgaaaattggaaacgaagccattgtgaaaaggcacattctaggatctaaattgttttataaaagagggagaagacccaagtatcagatgcaggaggagcctttgcca

SEQ ID NO: 617746 - DNA, 120 bp, Artificial Sequence
  ENSG00000177311_21 (sequence is synthesized)
caggggaatgacccagaacccagtggagacagcccactcgggctttgccaatccgagtgcatggagatgagtgaagtgttcgatgacgcaagtgaccaggattccactgacaaaccgtgg

SEQ ID NO: 617747 - DNA, 120 bp, Artificial Sequence
  ENSG00000177311_22 (sequence is synthesized)
cgcccttactacaactacaaacccaaaaagaaatccagacagttgaaaaaaatgaggaaagtcaactggaggaaggagcacggaaacaggagcccgagccataaatgtaaatacccagca

SEQ ID NO: 617748 - DNA, 120 bp, Artificial Sequence
  ENSG00000177311_23 (sequence is synthesized)
gaactggattgcgccgtggggaaggctcctcaggataaaccctttgaggaagaagaaactaaagagatgcccaagctgcagtgtgaactctgtgatggagacaaagcagtgggggctgga

SEQ ID NO: 617749 - DNA, 120 bp, Artificial Sequence
  ENSG00000177311_24 (sequence is synthesized)
aaccaaggaaggccccaccgacatcttacttctcggccatatgcctgcgagctctgcgccaagcagttccagagcccttccacactcaaaatgcacatgagatgtcacaccggggagaag

SEQ ID NO: 617750 - DNA, 120 bp, Artificial Sequence
  ENSG00000177311_25 (sequence is synthesized)
ccataccagtgcaagacctgcggacggtgcttttcggtgcaaggaaacttacagaaacatgaacgcatccacctgggcttgaaggagttcgtctgtcagtattgcaacaaggcattcacc

SEQ ID NO: 617751 - DNA, 120 bp, Artificial Sequence
  ENSG00000177311_26 (sequence is synthesized)
ttgaatgagaccctcaaaatccatgaaagaatccatactggagaaaagcgttaccactgtcagttctgctttcagagatttttgtatctctccaccaaaaggaatcacgagcagaggcat

SEQ ID NO: 617752 - DNA, 120 bp, Artificial Sequence
  ENSG00000177311_27 (sequence is synthesized)
attcgggagcataatgggaagggctatgcctgcttccagtgccccaaaatttgcaaaacagctgctgcccttggaatgcaccaaaagaaacacttattcaaaagcccaagtcagcaggag

SEQ ID NO: 617753 - DNA, 120 bp, Artificial Sequence
  ENSG00000177311_28 (sequence is synthesized)
aaaataggtgacgtgtgccacgaaaactcaaatcccttggagaatcaacatttcattggttcagaagacaatgaccaaaaggataacatacaaaccggtgtggaaaatgttgtcctttga

SEQ ID NO: 617754 - DNA, 120 bp, Artificial Sequence
  ENSG00000177311_29 (sequence is synthesized)
agttggtctccatcgctttacataaaaatggctgagtgtcttgtcatgctagcactgcattaagtgatgcatacagatcttgatgtggaagaaatggaggactcagaaccaaggatttcc

SEQ ID NO: 617755 - DNA, 120 bp, Artificial Sequence
  ENSG00000177311_30 (sequence is synthesized)
aagaaatggaggactcagaaccaaggatttccaagtgatttcttccaaagcacaggaatctcactctgttaaagctggtctgttctaactgaggctggagtacaatggcgcaatcttggc

SEQ ID NO: 617756 - DNA, 120 bp, Artificial Sequence
  ENSG00000177311_31 (sequence is synthesized)
ggagtgaaattaaaaaaaaaaaaaactcatttgtgaaaattccagaaaaaggatcctaatatctactttgggttttagcattaactttatgcaaagtgcacaaaaacaaaatagctgact

SEQ ID NO: 617757 - DNA, 120 bp, Artificial Sequence
  ENSG00000177311_32 (sequence is synthesized)
cctccaatatcccaagtttcttgtgaaagttaataaaattcttagctgtggtatttctaccagtgaaaaaaggagtttaattttagcctagtttaaaactttctaataattgctaataag

SEQ ID NO: 617758 - DNA, 120 bp, Artificial Sequence
  ENSG00000177311_33 (sequence is synthesized)
aactggctgctgaactgtctttagtcactggagaaaataagggtcagatatcctgaagatggcatcttcgtaaatatgttacgtggtaataagctgtgtgacggtctttattcccatctg

SEQ ID NO: 617759 - DNA, 120 bp, Artificial Sequence
  ENSG00000177311_34 (sequence is synthesized)
gcttctgcactattaaaatttgtttaaattaatggatacacatgaaatacttaaacaatataactgaaattatgtgcataatgagtaacctaaagtaggacattcatacattatgtagaa

SEQ ID NO: 617760 - DNA, 120 bp, Artificial Sequence
  ENSG00000177311_35 (sequence is synthesized)
ctacttttctgcaacacaaaccttgtaaaatacatatataaatcactataacttttaactgtccatatcccctgtagagaattatgaggagcaatagatctgcaaataatgaggactgat

SEQ ID NO: 617761 - DNA, 120 bp, Artificial Sequence
  ENSG00000177311_36 (sequence is synthesized)
gtaaaaatcaatagaaagcattttgaatatgatttaagagcatgtgaatgcttttagatggaatgctgttcccttgaagttatggctgagctgttcttagaactggtctactcaattcac

SEQ ID NO: 617762 - DNA, 120 bp, Artificial Sequence
  ENSG00000177311_37 (sequence is synthesized)
agaaaacataggtcatgccttatctatgggggaacaccctcccagaatttacctgtgattacctgtgctgcatattactttgcaatggcctcatctcagagaatgaaagagggtcacatt

SEQ ID NO: 617763 - DNA, 120 bp, Artificial Sequence
  ENSG00000177311_38 (sequence is synthesized)
gttctgaaactctctgcagtcttccaaccaccacaaggccatggatgtgggggtctattccagacagacttaagggctcaagtggaacctgccatctcccattccactgaaggactgtcc

SEQ ID NO: 617764 - DNA, 120 bp, Artificial Sequence
  ENSG00000177311_39 (sequence is synthesized)
aagagatttagtgcaaggtacactgcagtagtgaattcccaggcacttgaaagtgactgcctaatccctacaattactagccttgttggagattatgcagcccacaagtacagactagta

SEQ ID NO: 617765 - DNA, 120 bp, Artificial Sequence
  ENSG00000177311_40 (sequence is synthesized)
taaagcaaaaggacaaaggaacccccaccctccaccccacccattaatgacttgagtgggcaagaagaagtgatggccttccttgcctaaaacagtagctttgtttttagggggtgggaa

SEQ ID NO: 617766 - DNA, 120 bp, Artificial Sequence
  ENSG00000177311_41 (sequence is synthesized)
ggtaggatgtggagtgacatggttctatcctttacttatgagactcagaaatatatctacaaagccagatgctctgtcttcatatttgcagacatctagaccccttgctaaaaacccact

SEQ ID NO: 617767 - DNA, 120 bp, Artificial Sequence
  ENSG00000177311_42 (sequence is synthesized)
gaagttttttttttatgttctttgacccacaccatcaacactaccctcaaatctaattgccctacagcatattctatcatgtggactaggttcctggaaagccggaactcatgattcttt

SEQ ID NO: 617768 - DNA, 120 bp, Artificial Sequence
  ENSG00000177311_43 (sequence is synthesized)
ttcaaactgccagaatagaagggagagagaaaacatttctaccctttgatcaccagtgtgaacagaatccggaatgcagtttcagcgtgacctgcagtcattcatgttcattggatttga

SEQ ID NO: 617769 - DNA, 120 bp, Artificial Sequence
  ENSG00000177311_44 (sequence is synthesized)
cagatggaaacccaaggttatcgaagattggaaggttatcattgtgaagaagtagctcaaaggactccggtttctgtctacaagtgtgatgtctccatgaagaagacttagtatggattt

SEQ ID NO: 617770 - DNA, 120 bp, Artificial Sequence
  ENSG00000177311_45 (sequence is synthesized)
gggtgggtaagaaagcatttaaacgcccaggaaaggacatgattaaagttgaccttttaatactgtagtaccttgctgttaagtaaccccactattgtatctgcatttatcttttgttca

SEQ ID NO: 617771 - DNA, 120 bp, Artificial Sequence
  ENSG00000177311_46 (sequence is synthesized)
tctactttcacttacatacagtattatataagtagagaaaaatgggaaaatgcaagcaaattcaactttattttatacattgtatatatgtacaccctacactattcatttgggttttat

SEQ ID NO: 617772 - DNA, 120 bp, Artificial Sequence
  ENSG00000177311_47 (sequence is synthesized)
taaagagatagtcacaaagggcttacgaaaatcatttttgaattgataattagaatattgaataagcaatcctatgatccactaatttgttttatcagttaataatattaatcaaagaca

SEQ ID NO: 617773 - DNA, 120 bp, Artificial Sequence
  ENSG00000177311_48 (sequence is synthesized)
tttactgtatattctagtcattttgatttgagttaaccccaaatataaaattacctgtagtgatgtctctctcccagcccttatatgtggatattttttaagtggacttgtatgctgata

SEQ ID NO: 617774 - DNA, 120 bp, Artificial Sequence
  ENSG00000177311_49 (sequence is synthesized)
attctagaccaaagtaaatatggcagaatatttatacatgaaaaaataattttgcaaatattttctataattgtattcatttaaaatgttgatagcttgtgttagtttcagggaggggtg

SEQ ID NO: 617775 - DNA, 120 bp, Artificial Sequence
  ENSG00000177311_50 (sequence is synthesized)
tatattttgataaaaaaatacttgactttgtaattctgtatattctatacaatttatagcagagccgttttaagacagccttgtcacatttttttgttaattgtgaaaattttattgagt

SEQ ID NO: 617776 - DNA, 120 bp, Artificial Sequence
  ENSG00000177311_51 (sequence is synthesized)
gatgtttaagtatgcattgagtacatgaccaactagaattaaagtaagtgtaaacagtgaacatactgtatgctgtacaagatataatgtaacttgctgttttagcatctgtattttggt

SEQ ID NO: 617777 - DNA, 120 bp, Artificial Sequence
  ENSG00000177311_52 (sequence is synthesized)
tagaagatattattaaatgcagatgttaaggattggaaaagtctaattttatttttagaaataatggatataaatttgtttttgcttgattaaaatagcttattcctacattaagtctct

SEQ ID NO: 617778 - DNA, 120 bp, Artificial Sequence
  ENSG00000177311_53 (sequence is synthesized)
ttttaaatgttttcatgttatttcttttgtgcagctatttcatctgtgtgagtcacagctttgtttccacgtattattcagtttatttctgtttccttacttgtttacattccgtggtac

SEQ ID NO: 617779 - DNA, 120 bp, Artificial Sequence
  ENSG00000177311_54 (sequence is synthesized)
ctacttacatgcttaggagtcaaatggattatgacattaggaaaaaagcagaataaaagagattgaagtcttctgatgattgagtgttttggataggcctgatcttataatgataaatca

SEQ ID NO: 617780 - DNA, 120 bp, Artificial Sequence
  ENSG00000177311_55 (sequence is synthesized)
gagaatgaaatgctctccaggaagcattctgctccactcatccgtgggaaacaaattacatttattgagtaccaggcactgggcaatgtctttacataggctatttcattaacacacacg

SEQ ID NO: 617781 - DNA, 120 bp, Artificial Sequence
  ENSG00000177311_56 (sequence is synthesized)
caccagaattcgacctcattatcctcgttttatagtgactttgagaaggtctcacaaccagacaaagccaggatgctaacctaggtctgcctgactccaaagcccatgtttttgttcctt

SEQ ID NO: 617782 - DNA, 120 bp, Artificial Sequence
  ENSG00000177311_57 (sequence is synthesized)
ctcaacactgtagagaaaaatcatttatagaaactgaacagagtatgaggaaaggagatatgataaagtaatgcagctttaggatggcagttagtgactgccctggaacaggattaaagg

SEQ ID NO: 617783 - DNA, 120 bp, Artificial Sequence
  ENSG00000177311_58 (sequence is synthesized)
aggctgtgtcaggttcagcttcccctgaattgggcttcccttatatctcaggagattgccctataaaatcagtaaaatttgtgcacttttttaaggatatggagtaaaattgtaatagca

SEQ ID NO: 617784 - DNA, 120 bp, Artificial Sequence
  ENSG00000177311_59 (sequence is synthesized)
ttataagctggtaattttcacacaaagaaaaaaatacgttccgtcgtcacagactctactcctaaacttagctaactaactatcttgcaaatgcctgcagtttgtcccagtgggcaatgt

SEQ ID NO: 617785 - DNA, 120 bp, Artificial Sequence
  ENSG00000177311_60 (sequence is synthesized)
gagaggggatgtcggtggctcaggcagcacagtccatcaccaacacagagaaaattactgccaggcctaccggtggctggccagtagcatcaattttgtattggaagggcaatccaaacc

SEQ ID NO: 617786 - DNA, 120 bp, Artificial Sequence
  ENSG00000177311_61 (sequence is synthesized)
agattcaccaaaaatttgataactgttatctgctaaaactaacttcattatgtacaagaacaacagatttaatattgaaagcatctgtaacaattgggaaagtaaaagcataaaacaaaa

SEQ ID NO: 617787 - DNA, 120 bp, Artificial Sequence
  ENSG00000177311_62 (sequence is synthesized)
gcattcatgagcagatgttaagttgagaagccctcaaatgcaaaaatttgaatttgtgatgtaggcaagatgtttttgctttcttaccttccctggttgacagtggggggtctccatgct

SEQ ID NO: 617788 - DNA, 120 bp, Artificial Sequence
  ENSG00000177311_63 (sequence is synthesized)
attttctgggcggtgctgtgcagcgctgcggccggactcacgggtccggaagcaccatggacccccggggaaacgcgccggcggcgaaggagccgagccccatcttgatgtggaagaaat

SEQ ID NO: 617789 - DNA, 120 bp, Artificial Sequence
  ENSG00000177311_64 (sequence is synthesized)
aggcctggccctgacgtcacccacgcccggccactggcctccctctgaagccaggaaactagttggggagtggcactcgcagctgcagcaaatctcaaaataaagaggcaacggcctttc

SEQ ID NO: 617790 - DNA, 120 bp, Artificial Sequence
  ENSG00000177311_65 (sequence is synthesized)
tcttcctctccatctccctatagcacaccttttatttcttttcttcttttttttaagcctcacgaaagattttacttgtagatcaactttcaaaatgtaggaagtcagaatgggtgacat

SEQ ID NO: 617791 - DNA, 120 bp, Artificial Sequence
  ENSG00000177311_66 (sequence is synthesized)
catcagaaaaatatgtggagctgatcacaagaagtgaagaacccagagcacgaaagcggttgtgactcctgggcccagggagttgacagcgtctgggtttcagaggagccagcgcctccg

SEQ ID NO: 617792 - DNA, 120 bp, Artificial Sequence
  ENSG00000177311_67 (sequence is synthesized)
agttgtcttgaagtgaggctctgctgtagtcctgttcttctggctctaagatctgaatgttgtgaccactaatttgctctttcctggagagtaaccccagtttggtccacaaggcttgct

SEQ ID NO: 617793 - DNA, 120 bp, Artificial Sequence
  ENSG00000177311_68 (sequence is synthesized)
gcccaatctttgccaacaggactgcaaagaaaattagctcagcctgcagaacaacgagaccacgagcaattgaaccaagactctgaggctgatatgcaatgtcacttacaacattaatca

SEQ ID NO: 617794 - DNA, 120 bp, Artificial Sequence
  ENSG00000177311_69 (sequence is synthesized)
gatactgcatttaaggtaggaggcaaggtggattctatttttaactcttatgcactccatcatgtgcaagcaacttgggttctcaaatttgtattttcaatgctggtatcagtggtttga

SEQ ID NO: 617795 - DNA, 120 bp, Artificial Sequence
  ENSG00000177311_70 (sequence is synthesized)
ttttcagcaaatgtgacagtggcctttgcagtggtcagctccgagctttgaactctcagaggaggaaggggaaaaaaattcaacacaccacctccttggttgcagtctcagaaaaacctt

SEQ ID NO: 617796 - DNA, 120 bp, Artificial Sequence
  ENSG00000177311_71 (sequence is synthesized)
ggatgagaaacttcttttttcaatcctgttttcctgttgataaattcagttctgtgatcacagttcattcaagctgttctgcgtatgatttttgtgtgtatgtgacaattgcatctaaaa

SEQ ID NO: 617797 - DNA, 120 bp, Artificial Sequence
  ENSG00000177311_72 (sequence is synthesized)
gtttttatagttttttttgagccatgcagcaagaacattagatgcattagaatatgacttttaaaaaaacaaaaattaaataagacagctgtaatcttttgggggagggtttttaattgg

SEQ ID NO: 617798 - DNA, 120 bp, Artificial Sequence
  ENSG00000177311_73 (sequence is synthesized)
acagcctctgctattcagatagtatataaatgtatagcttttacaaacttagtaaatgattctgccataaaagggagattttttttaaaaaaaaatcatatatatgataggtgtggtgcc

SEQ ID NO: 617799 - DNA, 120 bp, Artificial Sequence
  ENSG00000177311_74 (sequence is synthesized)
attagacaacaaaagaattttttgaaaagagtgatgattcagctccatttcagcttgaaactaaaaataaatgggtttctggagatgatttcaaagagcgtaaacaagcttaataagaaa

SEQ ID NO: 617800 - DNA, 120 bp, Artificial Sequence
  ENSG00000177311_75 (sequence is synthesized)
ataagaaacattaaaaatatttaaattttaagaagcggtctttaaacgtgtttatgaaagatgaaaataaaaactgatatgcttccaaaattaattttaggtaatatacaagaatacatt

SEQ ID NO: 617801 - DNA, 120 bp, Artificial Sequence
  ENSG00000177311_76 (sequence is synthesized)
aaatgaaaccgagcccctagaatggttcattgcagaccatatagctgtggttctggcacttttcaaaataatttcatgagctctttcttttgaacttaacttctcaaatatattttagtt

SEQ ID NO: 617802 - DNA, 120 bp, Artificial Sequence
  ENSG00000177311_77 (sequence is synthesized)
tcaaatttaacactgggccagaacctgtttccttggtaaccaaatcgtatttaaacatgtaataacagatatgcaaaagaatgtctttaaaaaggaaacaaatgtttaatgaaaaattta

SEQ ID NO: 617803 - DNA, 120 bp, Artificial Sequence
  ENSG00000177311_78 (sequence is synthesized)
cagttctttttcctctcatatagaatctgaactggttttagatggtttttaatgcggtcttcaagccttaaaaattaagccatgtttctaaacatatagagaaagcttgcacagtgacag

SEQ ID NO: 617804 - DNA, 120 bp, Artificial Sequence
  ENSG00000177311_79 (sequence is synthesized)
cttttctctccctcctttgtgctcagtactttcaaaattaaggttttctttgcagtatgctccagaatgcaggtcaaggtttgtgtacagaggtgtagtttcattatcacaagttcacca

SEQ ID NO: 617805 - DNA, 120 bp, Artificial Sequence
  ENSG00000177311_80 (sequence is synthesized)
gcgccactgaaacaaaaggtatttcagaaattctgagaatcagaaaatgcttgtactcttgccttccctgatccctccgttggtaacctcagtgctgtcggtagaaaaggacccacatcc

SEQ ID NO: 617806 - DNA, 120 bp, Artificial Sequence
  ENSG00000177311_81 (sequence is synthesized)
aagcctacccctccaatgacaagtgcaccctgaacctttgtggaaatatctctataggtgtgttaggaagatggtgctaaacctgaaacctccccgaggtttgcttcaatgtgaagaaca

SEQ ID NO: 617807 - DNA, 120 bp, Artificial Sequence
  ENSG00000177311_82 (sequence is synthesized)
ttgagattcaaaaccatctgtgtaaatggctgctttattctagcagtttaactaatattctattccatagcactatcgtagaattgaacctctctaatgggctgaagggtggtggtggtt

SEQ ID NO: 617808 - DNA, 120 bp, Artificial Sequence
  ENSG00000177311_83 (sequence is synthesized)
gttgtcatgttgttttgtggccaactaaaatattttgcttggagtctttctctggttcaattattttggaacgtgattcatctcatactgattttgttctccaggcttgccatgaaatac

SEQ ID NO: 617809 - DNA, 120 bp, Artificial Sequence
  ENSG00000177311_84 (sequence is synthesized)
ccttcctgcaacaccttttttttttttttttttggctgttgggagccattttccttcttgcctgtgactttaaatgactaagtacattttgaatatagtatcaatcagaagattgtaaac

SEQ ID NO: 617810 - DNA, 120 bp, Artificial Sequence
  ENSG00000177311_85 (sequence is synthesized)
tgaagggaaatatcagaaacctgattcaatattgcctattttttttagtaccaacagcattaacagttgcaataggatcaagctaattgtcattcgctcttgagcaaataatgagccagg

SEQ ID NO: 617811 - DNA, 120 bp, Artificial Sequence
  ENSG00000177311_86 (sequence is synthesized)
catttataattaaaacactactgctagtcagaaagcttataactacaatgtcttctattttgataggccagtacaaagtaatcattttgcacctatttgaatcttaattacaagattaga

SEQ ID NO: 617812 - DNA, 120 bp, Artificial Sequence
  ENSG00000177311_87 (sequence is synthesized)
tggatgcaatgcaattgttttaccattaaaatgaatgcctgatagattcaacagtgtatttcttctttatagaatgtcgattcttttgtttgtgactcaagcatggttgcgtcatcttgt

SEQ ID NO: 617813 - DNA, 120 bp, Artificial Sequence
  ENSG00000177311_88 (sequence is synthesized)
agattttcatacttaatggcgtttttttgtggcattattcacttatgttgctcttagtcttgcctaaaagaattttaaacccaattcaaggatctagaaagccaaataagattgttggga

SEQ ID NO: 617814 - DNA, 120 bp, Artificial Sequence
  ENSG00000177311_89 (sequence is synthesized)
caatgtcacttacaacattaatcagatactgcatttaaggtgagctgtcccttgcctcctccttccccagtgctcgtgtgctgcatgcagtgcgtatcttgcttctgcgagcctaagatg

SEQ ID NO: 617815 - DNA, 120 bp, Artificial Sequence
  ENSG00000177311_90 (sequence is synthesized)
gcaggcaggattagccgtgcttgtgctgtgtgtgcatgctgtgtctagaattcattacacgttgcctagtatttcagatgtgagtatgtaaatgctctgtatgccatatcatctggtagc

SEQ ID NO: 617816 - DNA, 120 bp, Artificial Sequence
  ENSG00000177311_91 (sequence is synthesized)
gaagacttgtttttgcctcattacagccttagatatttcaacatcacctttcatttccaattcatttgcttctggatgtttgtttttcatcacattcaaaatatgattttaccttttttt

SEQ ID NO: 617817 - DNA, 120 bp, Artificial Sequence
  ENSG00000177311_92 (sequence is synthesized)
ttttaacaaaaccaaaaccccccacaaaccctaaaaacaaaaacaacaacaacaaaactctgctaccagatggtgtctctcctttcttcgtgcatttgctgtcttttaaataatgtatgt

SEQ ID NO: 617818 - DNA, 120 bp, Artificial Sequence
  ENSG00000177311_93 (sequence is synthesized)
agctgatcatgcatttttctacaagcctgccggcaccatttaggattttgaaaaataatctagaaatgctataccctttatcaaaattattttttactttgcaagagcttaacagttttg

SEQ ID NO: 617819 - DNA, 120 bp, Artificial Sequence
  ENSG00000177311_94 (sequence is synthesized)
gttttttcttagcaattctataaaattaacatctataaaatgcatcccggaccagatacatactgtattgaaagctttcttcaggaagagaatatgagagtgttctttccagcttatttt

SEQ ID NO: 617820 - DNA, 120 bp, Artificial Sequence
  ENSG00000177311_95 (sequence is synthesized)
cacagaagccctctagccaaggcctcgggcagccctaccaaatgaatatgggcacttgagttttctaggagggctttcctgctgccctgggtctcatccaactggtatccatctaaacat

SEQ ID NO: 617821 - DNA, 120 bp, Artificial Sequence
  ENSG00000177311_96 (sequence is synthesized)
tcccacccagggttattcatgctagaggaagaagaatgccctttccagagccagttcttggggaaaagaggaactgttgatatagccagagcccgaaaagaagattactctgcaacagct

SEQ ID NO: 617822 - DNA, 120 bp, Artificial Sequence
  ENSG00000177311_97 (sequence is synthesized)
ctcatccataagaagcaactcctcatctgatcaagttttataataagattgcagaaattcagtctcatctttaggctccacttctagttcttatgctatttccaccacatctgcagttac

SEQ ID NO: 617823 - DNA, 120 bp, Artificial Sequence
  ENSG00000177311_98 (sequence is synthesized)
aggctgcccagaggggctccagcataagcaggagacatggagactcttgcctccatcatggaggaggttcacaccagaagccagctctgcccttggagactctcttcccccagtgctccc

SEQ ID NO: 617824 - DNA, 120 bp, Artificial Sequence
  ENSG00000177311_99 (sequence is synthesized)
aaccaagactctgaggctgatatgcaatgtcacttacaacattaatcagatactgcatttaagatcttgatgtggaagaaatggaggactcagaaccaaggatttccaagtgatttcttc

SEQ ID NO: 617825 - DNA, 120 bp, Artificial Sequence
  ENSG00000177311_100 (sequence is synthesized)
actcataaaacggatatcaacccagtgtcagcactgacctcctgatgtcaatgtcatcatgcaagcatagctaaaataagcctcaaagtaaaacaaagaaacattgcatctcagcacaac

SEQ ID NO: 617826 - DNA, 120 bp, Artificial Sequence
  ENSG00000177311_101 (sequence is synthesized)
tcctggcctgctggtctgtgccggcgagtgtgctgagaggagggcctctggacatcaaaggttccttttgtccccttccgagtggcagggcagcccggcccgggctgctggcgatgactc

SEQ ID NO: 617827 - DNA, 120 bp, Artificial Sequence
  ENSG00000177311_102 (sequence is synthesized)
tgatgtggaagaaatggaggactcagaaccaaggatttccaagtgatttcttccaaagcacaggaatctcactctgttaaagctggtctgttctaactgagacggagtttcgctcttgtt

SEQ ID NO: 617828 - DNA, 120 bp, Artificial Sequence
  ENSG00000177311_103 (sequence is synthesized)
ctcgagtccagcgggctcgggcactgctttgacagtcacacctcccgtctcctggattgggaatcggaccctagtcctgaccctatgggaacttgatgatttccttgatgcaacaccaag

SEQ ID NO: 617829 - DNA, 120 bp, Artificial Sequence
  ENSG00000177311_104 (sequence is synthesized)
cccctggaattgaaagggacgtgcaaaggcagggacctgcccccaggggtttgcagtctcagccgcctacttctgcagtagtaaggtctgctctgttggtacaacatacaacacaaccgc

SEQ ID NO: 617830 - DNA, 120 bp, Artificial Sequence
  ENSG00000177311_105 (sequence is synthesized)
aggttgtccaagctggcctccctctctgctgagtgcactccagcagcttcccgatgttggcctttagaacagcctgaatttcagttaaaaaataagcttcccctgtcacacgatgccttc

SEQ ID NO: 617831 - DNA, 120 bp, Artificial Sequence
  ENSG00000177311_106 (sequence is synthesized)
ttgaatctgatagcttaagtgcagtaaaatctgataaatgtagcttttctgtgcccgtttcaggccacatttagaaggcaacatcaacaggattttccttttcctagacacagctcaact

SEQ ID NO: 617832 - DNA, 120 bp, Artificial Sequence
  ENSG00000177311_107 (sequence is synthesized)
ccataaaggacttctgttttgtaatctgttttcgagatctgatgcgtgtgtttctaacaccccgtcacgtgaggaggtctgacgtagtcacccaacatgactttgagaaaatatactgta

SEQ ID NO: 617833 - DNA, 120 bp, Artificial Sequence
  ENSG00000177311_108 (sequence is synthesized)
tggtacagccagctcactgaagcaaaatatcctttgtcggaaaactttccgcagggaataacagacctgcgcagtagatttcactttgatatggcccctgtgctggcccagtatggactg

SEQ ID NO: 617834 - DNA, 120 bp, Artificial Sequence
  ENSG00000177311_109 (sequence is synthesized)
agtctcctattctacatgctgaggatgccagagggtccccttaccaccactcctcaccaccccctaccaccctcctccccatcactgtactagatctgaattaaacattaaatgaaataa

SEQ ID NO: 617835 - DNA, 120 bp, Artificial Sequence
  ENSG00000177324_0 (sequence is synthesized)
attgtgcctcggacaacgagtgtacgcagttaccacacagttaccaagcagttacctcagagccgcggcgcagacgtaggcctcaggtctcgggcctcaggtctcgggcctcagagccag

SEQ ID NO: 617836 - DNA, 120 bp, Artificial Sequence
  ENSG00000177324_1 (sequence is synthesized)
accccgccatctcacgatgtcagagaggacccaggaacaggattttgttattataactgtcgacgacagtgatgataacaatgattgcagtattgagatggtggaagtttctgaaacagc

SEQ ID NO: 617837 - DNA, 120 bp, Artificial Sequence
  ENSG00000177324_2 (sequence is synthesized)
agataattccactaatgacatagcagatgattccacttatgtcacagcagataatcccactgatgacacagccacacaaccaaattttccaggcggcaatgatggccatcaccgtccact

SEQ ID NO: 617838 - DNA, 80 bp, Artificial Sequence
  ENSG00000177324_3 (sequence is synthesized)
ttggactcaagcaattcttccacctcagccttcccagtagctgggatgacaggcgcacgccaccatgcccagtagcccat

SEQ ID NO: 617839 - DNA, 120 bp, Artificial Sequence
  ENSG00000177324_4 (sequence is synthesized)
ctgggatgacaggcgcacgccaccatgcccagtagcccatggtgaccaaatagtttcacagataaaccacccagtacatttaagaagatacagttacaactcagaggaagtggattttcc

SEQ ID NO: 617840 - DNA, 120 bp, Artificial Sequence
  ENSG00000177324_5 (sequence is synthesized)
aaaaagaggaagattctatactccagaggtacagtctagcatatcaccaccagcggaaaggcaggaaacccatgcctgggccagccctgctgtaacatctcttgagtcagcagcatgtca

SEQ ID NO: 617841 - DNA, 120 bp, Artificial Sequence
  ENSG00000177324_6 (sequence is synthesized)
tgaactgcaggaagcagacctcagtgagagtttatcatatcccagaattgtctcctcaagttcattacagcagtatgtcgcacaaggtggctcatttccttgtttcggtatgccatggaa

SEQ ID NO: 617842 - DNA, 120 bp, Artificial Sequence
  ENSG00000177324_7 (sequence is synthesized)
ctttatcagtggaggtgctgaaagtaccaatgctgtcatctcatttgccaatgctactacagcagtacctatggcagttctgtcacgaagagaatccagtctggcaaataaccctggtgt

SEQ ID NO: 617843 - DNA, 120 bp, Artificial Sequence
  ENSG00000177324_8 (sequence is synthesized)
ggtgaattactctgctctaccagaaaatgaaaatgtgggcccaggtagagccttgtcatctttctgcttccatcccaatttggaaatgccagaaagaccagcaaacagcagtaaaaacag

SEQ ID NO: 617844 - DNA, 120 bp, Artificial Sequence
  ENSG00000177324_9 (sequence is synthesized)
cactgagacagcgaattatccaactttaatgggaaattacaatggccaaaatactgcctctttatctgtcttcatccctccctattttgctgagaaaattatacttactgaaatgccagg

SEQ ID NO: 617845 - DNA, 120 bp, Artificial Sequence
  ENSG00000177324_10 (sequence is synthesized)
aacaacagaaaccaacgtggaaaataactctcagacagtgtattacccagctttatcgggaaatacgagtgccccatatccagcctcttcatatcttcccatcacttctaattttgaatc

SEQ ID NO: 617846 - DNA, 120 bp, Artificial Sequence
  ENSG00000177324_11 (sequence is synthesized)
tggcccacaaatgagttatgggacaatgagttactcaactgaaatgaaaaataactgtgaccaagatgatgcttcagcatctgcctgcctcactcccgattttgcactgttacctctgaa

SEQ ID NO: 617847 - DNA, 120 bp, Artificial Sequence
  ENSG00000177324_12 (sequence is synthesized)
tattttggtaaaagtagacaccaacacggaaaacagcgtcaacacaatgaatcgctcaactttattggacagtgacagtggccaggattcttcctcatcatctgtctgtatccctcccaa

SEQ ID NO: 617848 - DNA, 120 bp, Artificial Sequence
  ENSG00000177324_13 (sequence is synthesized)
gtatggctatcttggtgatccaaaaagaaatgtcagagtacttaaaatccatttgctggccgtacaaaatatggccaaacctaagcaagcagcctgctacttggttcgtattttgttctc

SEQ ID NO: 617849 - DNA, 120 bp, Artificial Sequence
  ENSG00000177324_14 (sequence is synthesized)
caaggaaatcctgattagcagctcagtggatatccatttgaaagacagccaatccctcgacccgaacaaaatggctgcattgagagaatatctggcaacaacttttcccacctgtgattt

SEQ ID NO: 617850 - DNA, 120 bp, Artificial Sequence
  ENSG00000177324_15 (sequence is synthesized)
gcatgaacatggaaaagactggcaggactgtatttctggtatcaattctatgatctactgtttatgttctgaaggcaagagtactccaaaaactgttcgcaaaaataaaaaacgtaccaa

SEQ ID NO: 617851 - DNA, 120 bp, Artificial Sequence
  ENSG00000177324_16 (sequence is synthesized)
ccgtgttgcatcggcatctgcagatagaaatgaccaaaggggcagagatggtggtgaaggctgttcttggatgtttcagccaatgaataactccaaaatgagagaaaagaggaacttgca

SEQ ID NO: 617852 - DNA, 120 bp, Artificial Sequence
  ENSG00000177324_17 (sequence is synthesized)
gccaaacagtaatgctatccctgaaggaatgcgagaaccttccactgataatccagaggaacctggtgaagcatggagctattttggaagaccatggagaaatatacggatgccatgttc

SEQ ID NO: 617853 - DNA, 120 bp, Artificial Sequence
  ENSG00000177324_18 (sequence is synthesized)
agtactgactttggcaaaaactaagtcttgcgcaagcctgtcggctagataccttattcagaaactcttcacaaaagatgtcctggtccaaagtaacgtctatggcaatctgaagcatgg

SEQ ID NO: 617854 - DNA, 120 bp, Artificial Sequence
  ENSG00000177324_19 (sequence is synthesized)
aaactacccaatttgtgatctctcggaaaatggaagagactggaagtcgtgtgtgacctccatcaacagcggtatccgtagccttagacatgacgtcagaagggctgaagccaggtctca

SEQ ID NO: 617855 - DNA, 120 bp, Artificial Sequence
  ENSG00000177324_20 (sequence is synthesized)
gtcgcttccagcagtgacccctccagagctggagcaggagtcaaagccaggagatcccgacgccactgacccaagcacctgaacggcagctgccaaactttttttttttttttaactgtt

SEQ ID NO: 617856 - DNA, 120 bp, Artificial Sequence
  ENSG00000177324_21 (sequence is synthesized)
aagactattttgtaagtttctcaagttctaattccaaaatcagcctgctgtactggcagagtagtttgcattgacacctgtagtaatcgccaaacctctttttctgctcataaaggaggt

SEQ ID NO: 617857 - DNA, 120 bp, Artificial Sequence
  ENSG00000177324_22 (sequence is synthesized)
agaatcacattaggaagatacgtaatgtttcatctgtggatttgatgacaacctctgattgagggaatggtagtaaactcctcatgggcttgtgacccatggctttgacttagataattg

SEQ ID NO: 617858 - DNA, 120 bp, Artificial Sequence
  ENSG00000177324_23 (sequence is synthesized)
acattaatatactttgtttttttgataaggtagagaaagaaattcaatagaaagtaaggagccactcagtcaaataatataattcgtataaaacttgacaagtctttttatttttgtgac

SEQ ID NO: 617859 - DNA, 120 bp, Artificial Sequence
  ENSG00000177324_24 (sequence is synthesized)
tgacttgtgagatagtttaagatatttttatgtgaccaatttgtagaatgaatacatattttcaaagttatcttttcaaaattcaacttttagagtattttagcaaaatatatgtatagt

SEQ ID NO: 617860 - DNA, 120 bp, Artificial Sequence
  ENSG00000177324_25 (sequence is synthesized)
aatatagaagtatagctttataaagatattaaggatttattttttaaaataattctctgaatagtttgctgtagtagttgccttcagcttaataaaaccatagtacttctacatacatct

SEQ ID NO: 617861 - DNA, 87 bp, Artificial Sequence
  ENSG00000177324_26 (sequence is synthesized)
ccttcagcttaataaaaccatagtacttctacatacatctttataagttaggctatgcctacaaaggtcttaaaaagtagataattt

SEQ ID NO: 617862 - DNA, 90 bp, Artificial Sequence
  ENSG00000177324_27 (sequence is synthesized)
agattgtgccactgcactcggggaaaagaaaaaaaagaagtagataattaaaaaaatcttgcataaaaaaaaatcttccataaagggcaa

SEQ ID NO: 617863 - DNA, 120 bp, Artificial Sequence
  ENSG00000177324_28 (sequence is synthesized)
aaaaaatcttgcataaaaaaaaatcttccataaagggcaaaaaggctttaacttccattattcagatttaatccaactaagatagtctttggcttcattcactgttcagtttcacaagtt

SEQ ID NO: 617864 - DNA, 120 bp, Artificial Sequence
  ENSG00000177324_29 (sequence is synthesized)
ttttacaactactagtaacagagctaatacagaatagtaatccacattataaacatagatcaaaataccacatcataccccataaatacatgcagttattatttgtcaattaaaaataaa

SEQ ID NO: 617865 - DNA, 120 bp, Artificial Sequence
  ENSG00000177324_30 (sequence is synthesized)
atttttttaaaagaaaagtacagttcgaccctaggcaagaagaaatttcaaattgtatatgcatattttgaatttggtttatattttgtggtatctgaaatattccctggactagaagca

SEQ ID NO: 617866 - DNA, 120 bp, Artificial Sequence
  ENSG00000177324_31 (sequence is synthesized)
aaaccacagaaacaaaactttacatttagaaaaaaatttcaagacttctattgctaactttattacattagtggtttttagaagttatttagagcagtcttgtctgatagaactttccac

SEQ ID NO: 617867 - DNA, 120 bp, Artificial Sequence
  ENSG00000177324_32 (sequence is synthesized)
catgatggaaatgtaaataaatataccacattaaaaatataaatttgcaatgtccaataggctcgtatggctattgagcatttaagatgtaattaattagacagaggaagtaaatttaac

SEQ ID NO: 617868 - DNA, 120 bp, Artificial Sequence
  ENSG00000177324_33 (sequence is synthesized)
attttctctcattttagctaattagaatttaaagtgaaatagccacaagtggatagtggctactgtgttggatggcacagttcaaaatgcctcttatttataaaaaaaagtgtttaaaag

SEQ ID NO: 617869 - DNA, 120 bp, Artificial Sequence
  ENSG00000177324_34 (sequence is synthesized)
tggttcccatggcttgaagaggaataatatacacataacttctttaaaatcacattttgtttgagatggagatcttgctatattgcccaggcttatctggaactcctgggctcaagaggg

SEQ ID NO: 617870 - DNA, 120 bp, Artificial Sequence
  ENSG00000177324_35 (sequence is synthesized)
aggatcacatttgactggacaaaatacattttataaaggtgttttgtattttatgttaaagtggaattgtgtcttcaaaattgtgtcttcaaaatttcacaagttaatactattactgta

SEQ ID NO: 617871 - DNA, 120 bp, Artificial Sequence
  ENSG00000177324_36 (sequence is synthesized)
ttagtccaatgttaaacattttaaatgcctgctcataagactcatttttgataaataaatgtatctttaatgttttgtttcccaaatagatacaataaataaacatttaaaatgccttaa

SEQ ID NO: 617872 - DNA, 120 bp, Artificial Sequence
  ENSG00000177352_0 (sequence is synthesized)
gggcggccatgttggagcagcggaggcggcgcagaggcgcgtcttgggtccccgcggcggcgccggtgccaagcgctggtttgcggatacccaggcagatctgcagtgcctaatgccatg

SEQ ID NO: 617873 - DNA, 120 bp, Artificial Sequence
  ENSG00000177352_1 (sequence is synthesized)
agtgtggtggttcagcatgtggaggaaaaagctgtgcactcctggtcgcgcatctccacggcagggaagaaggccctggaagaggcactgcttgtctttaacccaatgagccaggatctc

SEQ ID NO: 617874 - DNA, 120 bp, Artificial Sequence
  ENSG00000177352_2 (sequence is synthesized)
agtgccacagaggcccagcttgtggccttcctgcagggcctgcgagatgatggcttccaacctaccatcctgcgcagtggtgatgtctatggctatagttcatgcacagctaatccccca

SEQ ID NO: 617875 - DNA, 120 bp, Artificial Sequence
  ENSG00000177352_3 (sequence is synthesized)
agccagacgaaactgcaagctcgtgcccctaacccaactgccacatcacctccagccagtgctccccgaactgccatgcggttgcctgcaggtcgggccacactgcttcccatgccgcta

SEQ ID NO: 617876 - DNA, 120 bp, Artificial Sequence
  ENSG00000177352_4 (sequence is synthesized)
tctggcagactggccaaagcatccacaccagcccttgccaagcatgctaccaccaacctgctgctgagctctctgaagcaatcaagtgccagccatgcccggggtgcagcagtgggcttc

SEQ ID NO: 617877 - DNA, 120 bp, Artificial Sequence
  ENSG00000177352_5 (sequence is synthesized)
cccacccacctttatccaggtgtctaccctgccatgcggctctctgttgtccttgaggccctggttccacttaagactcccatgccctgcttgggtgccaagcacaaggcacagtcactg

SEQ ID NO: 617878 - DNA, 120 bp, Artificial Sequence
  ENSG00000177352_6 (sequence is synthesized)
cagctctcacttgcagactctcctctgaaactgcggaaaagttcagggaagggtccggggaaccctcggcccaaagctcccagaaaaaccacaagcaagggccccaagtgtctgactcgc

SEQ ID NO: 617879 - DNA, 120 bp, Artificial Sequence
  ENSG00000177352_7 (sequence is synthesized)
aaaacagcccaggccaaggtagctcgaacactggccaaagctgctcgtgcccaagccaaggtggctcgaacacaggccaaggctgctaaggcccgggccaaggccaaggcagcacaggtc

SEQ ID NO: 617880 - DNA, 120 bp, Artificial Sequence
  ENSG00000177352_8 (sequence is synthesized)
aaggctaaggccaaagctaaggcagcacaggtcaaggccaaggccaaagtcatggcagcatgggccaaggccaaggctaaagccaaggcagtacgggccaaggccaaggtggctcggacc

SEQ ID NO: 617881 - DNA, 120 bp, Artificial Sequence
  ENSG00000177352_9 (sequence is synthesized)
cagcccaggggcagaggcaggccaaagggatctgctaaggccagaactacaaggaagggccagaaaaaccgccctgagactgttgggcagaagaggaaaagggctgaggaggcaaaagat

SEQ ID NO: 617882 - DNA, 120 bp, Artificial Sequence
  ENSG00000177352_10 (sequence is synthesized)
cttcctcccaagaagagaacacggcttgggccccgatctcctaaggcatggctagggcctggaacagcaaagctgctgaagttccgtgccataaaggtagataggcggtcctcggatgat

SEQ ID NO: 617883 - DNA, 120 bp, Artificial Sequence
  ENSG00000177352_11 (sequence is synthesized)
gaggtgcggcagcgggctcagcggatcctccgcgtgaacctgtcacctgtaatacggctccagccattgctgccatattcagcagtctgattccttcacacggcaatgtttggggaaact

SEQ ID NO: 617884 - DNA, 120 bp, Artificial Sequence
  ENSG00000177352_12 (sequence is synthesized)
aagcccagctgtctgtgtggctagtggcacagtgtgctatgtccgtggactccacaatcttgaggactcccggtgcctctctagggccctggtgaccaccagcctcctttcagaaaccag

SEQ ID NO: 617885 - DNA, 120 bp, Artificial Sequence
  ENSG00000177352_13 (sequence is synthesized)
agtgggtggggtacggtggggtgggtgggcgggaggggtgttttcatggcgcgatgcactgtgacttgttattcaagttgtatgtctactgttccatctatcacgttttatacctttcca

SEQ ID NO: 617886 - DNA, 120 bp, Artificial Sequence
  ENSG00000177354_0 (sequence is synthesized)
ggactgtttgcctcttccccaccaagaacaccatttggtttcccccggctgggtctctatttagatgggcagtgatgacaccaaatataagcataaaaagacgttttaaaactacagatc

SEQ ID NO: 617887 - DNA, 120 bp, Artificial Sequence
  ENSG00000177354_1 (sequence is synthesized)
ctgaaacccagcacggcaggcacctgcagcttccagtgctgtaacagagaaaaaaaaaaatccccactttgcaattgcatctggtcaatgagaggctctagttttggggaagagggaaac

SEQ ID NO: 617888 - DNA, 120 bp, Artificial Sequence
  ENSG00000177354_2 (sequence is synthesized)
acctaaccttgacagaatcatcaccagagacacctgccggctgacaaggacagctttcttggagccaacagatgatgcaaggaaataagaagtgcacagacgcgttcagcgactcctcca

SEQ ID NO: 617889 - DNA, 120 bp, Artificial Sequence
  ENSG00000177354_3 (sequence is synthesized)
gcatcggcagcgtgttggatgatgcagacagggaggtgagcagcctaacagaccgggcattccggagtttgtgcatctccgaggacacatccttccatgactcctatctggctgtgtccc

SEQ ID NO: 617890 - DNA, 120 bp, Artificial Sequence
  ENSG00000177354_4 (sequence is synthesized)
cggatatcacccgacaggtgtttgggacttttcaccagagaacagtgggccacacccagaggaaaagtggcatttggagccagttaccgtcacagggcacggaacattcgggctgggcgg

SEQ ID NO: 617891 - DNA, 120 bp, Artificial Sequence
  ENSG00000177354_5 (sequence is synthesized)
ccaccttccaacagctacccaagtacgttcagggagaggaaaagtaccccaaaaccagccccccaccaacgccagtccagaggagactggaggtgccagtttccggcctaaggagcagca

SEQ ID NO: 617892 - DNA, 120 bp, Artificial Sequence
  ENSG00000177354_6 (sequence is synthesized)
ataagcctgtctccaaagtatcaacactaattaaatctttcgacaggaccgagagccaacgttgtgagagcaggcccactgccagcaagcctccggctctgaaaaatcctcccaaattcg

SEQ ID NO: 617893 - DNA, 120 bp, Artificial Sequence
  ENSG00000177354_7 (sequence is synthesized)
ctcctcttccagaaaacagtgtcaacttctgcttcgattctgcctttctgacagtcaggagggtgcccgctgaagtttccaacacccatcagaacagctaccagccaggcaggaagcacg

SEQ ID NO: 617894 - DNA, 120 bp, Artificial Sequence
  ENSG00000177354_8 (sequence is synthesized)
gagaacaggagtcctccaagaatccagaaatggcctgtcacggctccagcagcttcctcccagcagccaatgacacggccaccttatgtgagtcaaagttcccctctccacaccacaagc

SEQ ID NO: 617895 - DNA, 120 bp, Artificial Sequence
  ENSG00000177354_9 (sequence is synthesized)
cagtcacgggtgagcctgggagaggcaaaggtacctttctgcacagtgaaaatagtgcttttgagtcatggaatgcccaccaaccaaagctgctggagagaaaggacacagctggaaccg

SEQ ID NO: 617896 - DNA, 120 bp, Artificial Sequence
  ENSG00000177354_10 (sequence is synthesized)
tcccagaaagcaaagctcccaagcactatggggacacgaccttgctaagagaaccctgtcctcctgagcgcacagtctctccctgccaggtccaggccagctgcagtcaggaagagaaca

SEQ ID NO: 617897 - DNA, 120 bp, Artificial Sequence
  ENSG00000177354_11 (sequence is synthesized)
gacttgcagcaggggctctgtccacatctataccctgggggtgcagggatccaggagcccaggtatttgctgtggaaggaaaagctcccagctcacaacctgattctcaagagaagccag

SEQ ID NO: 617898 - DNA, 120 bp, Artificial Sequence
  ENSG00000177354_12 (sequence is synthesized)
cccagcccccatggaggaagccaaagactggcaaaaaagggaaagaaagtctacaagatactttagaagaaaagacacagaccaaccagagaggcccacctttgtatacaaaacacaacc

SEQ ID NO: 617899 - DNA, 120 bp, Artificial Sequence
  ENSG00000177354_13 (sequence is synthesized)
cccaggaacagttttcagaaaacaatgctcttgacctgcctgtggaacccaatgaacattatgatcccccctttaacatcagtaagctcctgacccccatcatacccagcaagcacgccc

SEQ ID NO: 617900 - DNA, 120 bp, Artificial Sequence
  ENSG00000177354_14 (sequence is synthesized)
tggattcagcagacagccagccagcagagcgaaccccatcacccccaggacagctaaacggataccaagagaaggagcccagtgaatgtcagtctcgagacagctacaagtccaaagccc

SEQ ID NO: 617901 - DNA, 120 bp, Artificial Sequence
  ENSG00000177354_15 (sequence is synthesized)
ctagcctgctgttcaacctcaaggacgtgcggaagcgtgttaagagcacatacagttcctcacctctcttgaaagtgcttgatgagaaaactagaggtaaggttgatggaaagcaagaac

SEQ ID NO: 617902 - DNA, 120 bp, Artificial Sequence
  ENSG00000177354_16 (sequence is synthesized)
ctgtgagcaacggtgtcatcctccccaatgggcttgaggaaagccctccaaatgagctttctaaggagagacccgctgatgaccccactgcatcacacatcaatccccagaaggacccta

SEQ ID NO: 617903 - DNA, 120 bp, Artificial Sequence
  ENSG00000177354_17 (sequence is synthesized)
cagctgaccccagtgagccctctgcagacagctatctaactcttagcacagctccgactatcgccaaagcccccttctatgtcaatggggaggctgctgagagaagcagttatgagaaca

SEQ ID NO: 617904 - DNA, 120 bp, Artificial Sequence
  ENSG00000177354_18 (sequence is synthesized)
aggaggtggaaggagagttggagatgggtcctgccggatccagctggtgtccagactccagggaacaccgccccaggaaacacctctccctgaggctttgcaatagggatcctgagcctg

SEQ ID NO: 617905 - DNA, 120 bp, Artificial Sequence
  ENSG00000177354_19 (sequence is synthesized)
gaggggctacagagaaaatgaagacccaccagctagagaatgggctctccagatctgtgtcccaagagacagaacctgagagggaagcaggacttcagaacacacatttgaaccagaaat

SEQ ID NO: 617906 - DNA, 120 bp, Artificial Sequence
  ENSG00000177354_20 (sequence is synthesized)
tcttcccagggcccctctctcctgaggaggaagatgtgttttacagtgacagccaatccgattttatgccaagcctcaaaggtaaggccaaattcagcaccagctcttcagatcaatcct

SEQ ID NO: 617907 - DNA, 120 bp, Artificial Sequence
  ENSG00000177354_21 (sequence is synthesized)
aaggagaatgtgatgcggaaggatgagctgcagtactgtgccttaagcaatgggcacgcatgcctggaaaaccgcagccagggggaagcattgcaaagagaaagggaaagtgtgtctgga

SEQ ID NO: 617908 - DNA, 120 bp, Artificial Sequence
  ENSG00000177354_22 (sequence is synthesized)
ggaagaaccaggaaggcatcagcagaggaagctaatttcagaggctcttggattggggaaaataagggcacaaccttttcacaggccaaagaccttactccctcaccatcttctgcttca

SEQ ID NO: 617909 - DNA, 120 bp, Artificial Sequence
  ENSG00000177354_23 (sequence is synthesized)
aacaggcacatgctgtttacgattaaagacaacaccctcagagctacccccgtaattaaacctatcatgctgcctctcctgaggaccatgtccttggaggactccctcagcagtggccac

SEQ ID NO: 617910 - DNA, 120 bp, Artificial Sequence
  ENSG00000177354_24 (sequence is synthesized)
aaagaggaggaattgccaaggccagaatggggtgaggatcctgggttttgtgcccccgaaaaccaggacattcttggtacatcgacacccactaacacacggggcacacgtgtgaagtgc

SEQ ID NO: 617911 - DNA, 120 bp, Artificial Sequence
  ENSG00000177354_25 (sequence is synthesized)
atggccaacgaggtcatggaggaccctgggcaggggtcgagcatggccaggatggaggcctctcagccagccccaaaggggaatttcccatctatgcctctggtgggagagggggaccgg

SEQ ID NO: 617912 - DNA, 120 bp, Artificial Sequence
  ENSG00000177354_26 (sequence is synthesized)
gtgaaggcaccaccagatgctgcacctggcctcgtggcaagcaattgcaagagcggttctgcagactcagggaagctggcagccccatggcacatccccaccattgctttacccgagggt

SEQ ID NO: 617913 - DNA, 120 bp, Artificial Sequence
  ENSG00000177354_27 (sequence is synthesized)
gacatagaagaccagccacccccatggcagcccgaaaactgttgggaagagcaaacaccaggtttcaagagtcactttttgtccacacccagagcagggccccctggcagaagactggtc

SEQ ID NO: 617914 - DNA, 120 bp, Artificial Sequence
  ENSG00000177354_28 (sequence is synthesized)
cccagtgagagggcgaattcccccaaccccggctcccccggggagagcagtgcctgctcccctgctgccagcaacatttgggaggagtcttcccaggcccctggaggaccagagctgctt

SEQ ID NO: 617915 - DNA, 120 bp, Artificial Sequence
  ENSG00000177354_29 (sequence is synthesized)
cccgaggagcctaatcaagccagcccctgggccagctccagtcctgccagggtcacccggagggaggacctgacccacgccctcgtgtgggagggcggctctgaccccctacttgagctg

SEQ ID NO: 617916 - DNA, 120 bp, Artificial Sequence
  ENSG00000177354_30 (sequence is synthesized)
tcggcagaagacctccggaccctctctccaagaggttcattgctggatgtggccaccagcccagcaggcacctctgggagacttgagcttcctgcacagctagagaggacagcaagcaag

SEQ ID NO: 617917 - DNA, 120 bp, Artificial Sequence
  ENSG00000177354_31 (sequence is synthesized)
ccacctgcagtcccacccaaaacagagaaagccctgcggcgggcaaagaagctggcaagtaagaggaggaagacggatcaggctcaggagaagcatggcgagtcacaggagggaaagccc

SEQ ID NO: 617918 - DNA, 120 bp, Artificial Sequence
  ENSG00000177354_32 (sequence is synthesized)
tgcccggaggacttggagcagacacagcaaaggccgctgtgccccagagagaggccccgacacaatttccccgtggtccgttccctgccccctcccgtgcaccgccactccgtgtccggc

SEQ ID NO: 617919 - DNA, 120 bp, Artificial Sequence
  ENSG00000177354_33 (sequence is synthesized)
ttctcggagcctgtcgggaggcggcccgggggcccccagtccctcacacccctgcccgcgtaccccgccacccagaaggtcctccaggatccgcagtccggggagtactttgtcttcgac

SEQ ID NO: 617920 - DNA, 120 bp, Artificial Sequence
  ENSG00000177354_34 (sequence is synthesized)
ttgccactccaggtgaaaatcaagaccttctatgacccagagacgggcaagtatgtcaaggtctccatcccgtcctccgagggggcctccccagagccgcccccaccggacgccctggcc

SEQ ID NO: 617921 - DNA, 120 bp, Artificial Sequence
  ENSG00000177354_35 (sequence is synthesized)
gctccctatgtgctgtaccccggcttccagccagtgcccgtgacggccttgatgccgctgcgctgctcctctcagctctccgcgcccaccttcctcaggcagggccctcgtgcctccgcg

SEQ ID NO: 617922 - DNA, 120 bp, Artificial Sequence
  ENSG00000177354_36 (sequence is synthesized)
gcccgcgccaggacccagagtgtccacgagtctggactacagctggacccagggcctcacggtgactgcaccccgcactctgcaggccagcgccctcatggtcctccccagagcccagga

SEQ ID NO: 617923 - DNA, 120 bp, Artificial Sequence
  ENSG00000177354_37 (sequence is synthesized)
gaggagggtgtagaagctccaggcctgggcatcatctccactgatgacctagaggactttgccacagaaggcatttcttgagttactgcaggctgtcccccacccccagatgaacccaga

SEQ ID NO: 617924 - DNA, 85 bp, Artificial Sequence
  ENSG00000177354_38 (sequence is synthesized)
tcaacacatacttagcctttttagatccataaagtccagaaggcagtagggatcccaagacgacctcacccaaagggctccctgg

SEQ ID NO: 617925 - DNA, 120 bp, Artificial Sequence
  ENSG00000177354_39 (sequence is synthesized)
gtagggatcccaagacgacctcacccaaagggctccctggctctcctctgatggaggggcactgcttgcttggcccggtcccctccgtgccagttcccaggcgcactctactccagccct

SEQ ID NO: 617926 - DNA, 120 bp, Artificial Sequence
  ENSG00000177354_40 (sequence is synthesized)
tctccctccctcccttcctccctctcctggcccaccctgctcttccctcgccctgcaaattaggtgggtgtggcaagggcaccgcctggtcccaagtgtccctctgtacccacacccacc

SEQ ID NO: 617927 - DNA, 120 bp, Artificial Sequence
  ENSG00000177354_41 (sequence is synthesized)
cactcacttgtaagctccttgatgagcaaacccctaaggcccccagctcagactcagcaggcattcaggtcaactcaggcagactggctaaggaccagcccagggcaattttgcagaaat

SEQ ID NO: 617928 - DNA, 120 bp, Artificial Sequence
  ENSG00000177354_42 (sequence is synthesized)
gatcatttgcacagaatgggtttccttcacagggagaaacttgcctctgaaagctattttctgatcaagaaaaggcccactttttaaaaagtgaaacaagtttgcagatacggttctctt

SEQ ID NO: 617929 - DNA, 120 bp, Artificial Sequence
  ENSG00000177354_43 (sequence is synthesized)
cactgatcttcctcaggtgggtaggtttgtgagctagaggaggcttgggtcctgaatccactctcctatcacctttgggcagcctggataaagaggaaagaagtcttggctgctgggcag

SEQ ID NO: 617930 - DNA, 120 bp, Artificial Sequence
  ENSG00000177354_44 (sequence is synthesized)
cacgcagagagcggaagatgggcagtgatgacaccaaatataagcataaaaagacgttttaaaactacagatcctgaaacccagcacggcaggcacctgcagcttccagtgctgtaacag

SEQ ID NO: 617931 - DNA, 120 bp, Artificial Sequence
  ENSG00000177363_0 (sequence is synthesized)
gaagatacaacctgacagcacagcctgagatcttggggatccctcagcctaacacccacagacgtcagctggtggattcccgctgcatcaaggcctacccactgtctccatgctgggctc

SEQ ID NO: 617932 - DNA, 120 bp, Artificial Sequence
  ENSG00000177363_1 (sequence is synthesized)
tccctgccttctgtggctcctggccgtgaccttcttggttcccagagctcagcccttggcccctcaagactttgaagaagaggaggcagatgagactgagacggcgtggccgcctttgcc

SEQ ID NO: 617933 - DNA, 120 bp, Artificial Sequence
  ENSG00000177363_2 (sequence is synthesized)
ggctgtcccctgcgactacgaccactgccgacacctgcaggtgccctgcaaggagctacagagggtcgggccggcggcctgcctgtgcccaggactctccagccccgcccagccgcccga

SEQ ID NO: 617934 - DNA, 120 bp, Artificial Sequence
  ENSG00000177363_3 (sequence is synthesized)
cccgccgcgcatgggagaagtgcgcattgcggccgaagagggccgcgcagtggtccactggtgtgcccccttctccccggtcctccactactggctgctgctttgggacggcagcgaggc

SEQ ID NO: 617935 - DNA, 120 bp, Artificial Sequence
  ENSG00000177363_4 (sequence is synthesized)
tgcgcagaaggggcccccgctgaacgctacggtccgcagagccgaactgaaggggctgaagccagggggcatttatgtcgtttgcgtagtggccgctaacgaggccggggcaagccgcgt

SEQ ID NO: 617936 - DNA, 120 bp, Artificial Sequence
  ENSG00000177363_5 (sequence is synthesized)
gccccaggctggaggagagggcctcgagggggccgacatccctgccttcgggccttgcagccgccttgcggtgccgcccaacccccgcactctggtccacgcggccgtcggggtgggcac

SEQ ID NO: 617937 - DNA, 120 bp, Artificial Sequence
  ENSG00000177363_6 (sequence is synthesized)
ggccctggccctgctaagctgtgccgccctggtgtggcacttctgcctgcgcgatcgctggggctgcccgcgccgagccgccgcccgagccgcaggggcgctctgaaaggggcctggggg

SEQ ID NO: 617938 - DNA, 120 bp, Artificial Sequence
  ENSG00000177363_7 (sequence is synthesized)
catctcgggcacagacagccccacctggggcgctcagcctggcccccgggaaagaggaaaacccgctgcctccagggagggctggacggcgagctgggagccagccccaggctccagggc

SEQ ID NO: 617939 - DNA, 120 bp, Artificial Sequence
  ENSG00000177363_8 (sequence is synthesized)
cacggcggagtcatggttctcaggactgagcgcttgtttaggtccggtacttggcgctttgtttcctggctgaggtctgggaaggaatagaaaggggcccccaatttttttttaagcggc

SEQ ID NO: 617940 - DNA, 120 bp, Artificial Sequence
  ENSG00000177363_9 (sequence is synthesized)
ttattatgtgggtatttatatgacctttgtaaccatttaaaaatgtaaaaacgacctgacttagtaatgcgaacctatagtagcagctactccagaggctgaaatgggaggatctcttga

SEQ ID NO: 617941 - DNA, 120 bp, Artificial Sequence
  ENSG00000177363_10 (sequence is synthesized)
gcccaggagttggagtccagtccagccagggcaacacagccagacgcccttgttttttattttgttttgttttggttttttgttttttgaggagtttccctctgtcacacaagctggagg

SEQ ID NO: 617942 - DNA, 64 bp, Artificial Sequence
  ENSG00000177363_11 (sequence is synthesized)
tgttttttgaggagtttccctctgtcacacaagctggagggcaatggcgccatctcaattagtt

SEQ ID NO: 617943 - DNA, 70 bp, Artificial Sequence
  ENSG00000177363_12 (sequence is synthesized)
ctggtctcaaactcctgacctcaggtactccacccggcagacccccttctttaaagatgtaaaacccggc

SEQ ID NO: 617944 - DNA, 79 bp, Artificial Sequence
  ENSG00000177363_13 (sequence is synthesized)
gaaaaagaaaaaagatgtaaaaaccattcttagtttgtgggccttacaaatcaggccactggcccattgcttgtagtta

SEQ ID NO: 617945 - DNA, 120 bp, Artificial Sequence
  ENSG00000177363_14 (sequence is synthesized)
ggccttacaaatcaggccactggcccattgcttgtagttagttgatccatgtcatgcaccctaaaaatggctctgtcactgtgagtggcttcagtaggattttgagaataagtttatatt

SEQ ID NO: 617946 - DNA, 120 bp, Artificial Sequence
  ENSG00000177363_15 (sequence is synthesized)
cttgctaggtaaaacaaaacaaaaacgacagtaataccaaggaatctccccccccttttaccctccatttgtgtttattgcatatccactataacaacattaaaggacctttaaaaggaa

SEQ ID NO: 617947 - DNA, 120 bp, Artificial Sequence
  ENSG00000177370_0 (sequence is synthesized)
gggcagcgactgtcatggcggcggccgcccccaatgccggaggctcggcccctgagacagcgggttccgccgaagctccgctgcagtacagcctgctcctgcagtacctggtgggtgaca

SEQ ID NO: 617948 - DNA, 120 bp, Artificial Sequence
  ENSG00000177370_1 (sequence is synthesized)
agcgtcagccccggctcctggagcctgggagcctgggcgggatcccaagtccagccaagagtgaggagcagaagatgatcgagaaggcgatggaaagctgcgctttcaaggctgcgctgg

SEQ ID NO: 617949 - DNA, 120 bp, Artificial Sequence
  ENSG00000177370_2 (sequence is synthesized)
cctgcgtgggaggatttgtcttaggaggtgcatttggggtgtttaccgctggcatcgataccaacgtgggctttgaccctaaggatccttaccgtacaccgactgcaaaagaagtgctga

SEQ ID NO: 617950 - DNA, 120 bp, Artificial Sequence
  ENSG00000177370_3 (sequence is synthesized)
aagacatggggcagagaggaatgtcctatgccaaaaatttcgccattgtgggagccatgttttcttgtactgagtgtttgatagaatcttaccggggaacatcagactggaagaacagtg

SEQ ID NO: 617951 - DNA, 120 bp, Artificial Sequence
  ENSG00000177370_4 (sequence is synthesized)
tcatcagtggctgcatcacgggaggagctattggtttcagagctggcttaaaggctggggccattggttgtggaggttttgctgctttctctgctgcgattgattattacctccggtgag

SEQ ID NO: 617952 - DNA, 120 bp, Artificial Sequence
  ENSG00000177370_5 (sequence is synthesized)
agtaattgcctgcagggaaggatgatgccagccccggatccgggctgctctctggaggacagtttctgtaccacaccagggccttgcttcagggcctgaagacattcattttccctcatg

SEQ ID NO: 617953 - DNA, 120 bp, Artificial Sequence
  ENSG00000177370_6 (sequence is synthesized)
tcgttggtattctgagggagctgcctggcttctctgcctccagcctttggggtagccacactttgctgctcctggactccagccagccttcacagaggacgtcccgtgccagattctctc

SEQ ID NO: 617954 - DNA, 120 bp, Artificial Sequence
  ENSG00000177370_7 (sequence is synthesized)
acagcagatcgggagacaggatgttgacatataggaattcagctccacaaagcttcaggcctgaccacagctggccctctaggttgtttggtgttgtgggcacagaggtgacagtgtctc

SEQ ID NO: 617955 - DNA, 120 bp, Artificial Sequence
  ENSG00000177370_8 (sequence is synthesized)
tgcaggcactcaggaagctgttctaccttggaactccatgcaactatccgtctcgaataccagggcagggcaaggcggactgatgccgtccaaccaattatctcacttgttttgtgttct

SEQ ID NO: 617956 - DNA, 120 bp, Artificial Sequence
  ENSG00000177370_9 (sequence is synthesized)
gtcatccttgttttttttttaaaaatacactcccctcccccaccgccacacaccttacagttcaaaaggttggtttatttgtattttattttcaaattccctattccaaaaatagtgccg

SEQ ID NO: 617957 - DNA, 120 bp, Artificial Sequence
  ENSG00000177370_10 (sequence is synthesized)
ggtggcccaaagataacatctgaagggaaagaatgagaaagctcccagggaagcgggggatggggcgctgaggcagggttgttagaggactgtgtcatcctcaccaagctcattacatct

SEQ ID NO: 617958 - DNA, 120 bp, Artificial Sequence
  ENSG00000177370_11 (sequence is synthesized)
gccagggcctgcctcaagaagcccagcccagccttttcctgggatgcagtgaaatcccatccatgaactcgatgggcccctcctgtgccggccgagaggcacacactgccttcacgacgt

SEQ ID NO: 617959 - DNA, 120 bp, Artificial Sequence
  ENSG00000177370_12 (sequence is synthesized)
gactgctggacctggccgagcttgaggccacatgtgaagggtcctgctgtggtcatcttggtgactcggtcacagcagctactggccaagatcagacgtcgctgaggggctgttcaccac

SEQ ID NO: 617960 - DNA, 120 bp, Artificial Sequence
  ENSG00000177370_13 (sequence is synthesized)
ggtatttttcttggcctagttgtgtgccatggatattaaaaaaaaaaaaaaaaaaatccgtctacagttgggcttcagcactggtgctgctttaccctggtgctctgtggggggatgaca

SEQ ID NO: 617961 - DNA, 120 bp, Artificial Sequence
  ENSG00000177370_14 (sequence is synthesized)
ctgctggagtcaggcctttgctcttgggtggggcacaggcaggtcgcttggtgggggccacacagtgctgggcaccttcagccagtggtgatgagtctcctttttcctataatacggtaa

SEQ ID NO: 617962 - DNA, 120 bp, Artificial Sequence
  ENSG00000177370_15 (sequence is synthesized)
ttcctctatcctttccttttttgccttcttcctcatctgccctgtcttctggcccacacactcttaaccagcgttcacactcagtgtacatggcctggaggcccgagtgtttgtacatga

SEQ ID NO: 617963 - DNA, 120 bp, Artificial Sequence
  ENSG00000177370_16 (sequence is synthesized)
gtgatgatgtcaaacccagctggtaacaccttccttgggtcatgtttgccattttcttggaatgaatgtgagttcctgctcagggctcatgtccttttacagtgaattctatataacgcc

SEQ ID NO: 617964 - DNA, 120 bp, Artificial Sequence
  ENSG00000177370_17 (sequence is synthesized)
cctcccagtctcacagctaggaggcttcatcactgctaggccagttggagcgttccctagagctcagaacaaattgtttcctctgctgtccctaaatataggacacctacaagcactctg

SEQ ID NO: 617965 - DNA, 120 bp, Artificial Sequence
  ENSG00000177370_18 (sequence is synthesized)
aagcaagggcagacattcccacctggtacctgtcaaagtcctaggatgcctgggatcttccatctttcagtctagcacgtgggaccaaatacaagagatgctgccctcacaacagccttg

SEQ ID NO: 617966 - DNA, 120 bp, Artificial Sequence
  ENSG00000177370_19 (sequence is synthesized)
gaaaagatgagcgccagggctgtcagtacccatcggttcagtaagcgaggcattgtccacgctgcctattcactcgagagatgaatagtttcctgttttcgatggctggggagccagtat

SEQ ID NO: 617967 - DNA, 120 bp, Artificial Sequence
  ENSG00000177370_20 (sequence is synthesized)
gagctcataaaccaaacagcaattttcagagacatctgttcctgatcttcagaataaactcagtgtccagttgcttcggctggtgggagccaatattcacgccactgactctctcaaagg

SEQ ID NO: 617968 - DNA, 120 bp, Artificial Sequence
  ENSG00000177370_21 (sequence is synthesized)
gagggtgggccctcggagacccagcttctctgacaagcagattagaccaaaaggctgcctcaaagatatgccactttgaaggaaagcgtagagaagcgtttacataaaagaagacgcttc

SEQ ID NO: 617969 - DNA, 120 bp, Artificial Sequence
  ENSG00000177370_22 (sequence is synthesized)
ctgttcagtggacaacttcatgccactttcaaggcacaccgatggccaggtgggacatttgtactgtagcagcacatggcaaaggtgagccagaagcagcctggatgctggctgatccgg

SEQ ID NO: 617970 - DNA, 120 bp, Artificial Sequence
  ENSG00000177370_23 (sequence is synthesized)
aggcctttgtgaagagcaaggagagggctccagcccacctccccgcagctctgccccagcccccgtgggccacagggaggctcaaggggagtgaactaggtaaacagattcctggaaact

SEQ ID NO: 617971 - DNA, 120 bp, Artificial Sequence
  ENSG00000177370_24 (sequence is synthesized)
cacatctggatgcagctggaagagttaaatatttacattggtggcttccctggaccaccgcgaacacaaacatccacaccacagggctgagttttgtgcaaatgatggggctttgcattt

SEQ ID NO: 617972 - DNA, 120 bp, Artificial Sequence
  ENSG00000177370_25 (sequence is synthesized)
tttattaacattttcctctcacgtggtttacatcaatttataataatctacataagttgaaacagaacatagacaaaaaaatatatccttaccaacttattaaagtcagatattcatgaa

SEQ ID NO: 617973 - DNA, 120 bp, Artificial Sequence
  ENSG00000177374_0 (sequence is synthesized)
atgacttttcctgaagcggacattttacttaaatcgggagagtgtgctgggcagacgatgctggacacgatggaggcgcccggccactccaggcagctgctgctgcagctcaacaaccag

SEQ ID NO: 617974 - DNA, 120 bp, Artificial Sequence
  ENSG00000177374_1 (sequence is synthesized)
cgcaccaagggcttcttgtgcgacgtgatcatcgtggtgcagaacgccctcttccgcgcgcacaagaacgtgctggcggccagcagcgcctacctcaagtccctggtggtgcatgacaac

SEQ ID NO: 617975 - DNA, 120 bp, Artificial Sequence
  ENSG00000177374_2 (sequence is synthesized)
ctgctcaacctggaccatgacatggtgagcccggccgtgttccgcctggtgctggacttcatctacaccggccgcctggctgacggcgcagaggcggctgcggccgcggccgtggccccg

SEQ ID NO: 617976 - DNA, 120 bp, Artificial Sequence
  ENSG00000177374_3 (sequence is synthesized)
ggggctgagccgagcctgggcgccgtgctggccgccgccagctacctgcagatccccgacctcgtggcgctgtgcaagaaacgcctcaagcgccacggcaagtactgccacctgcggggc

SEQ ID NO: 617977 - DNA, 80 bp, Artificial Sequence
  ENSG00000177374_4 (sequence is synthesized)
cggcggcggcggctacgcgccctatggtcggccgggccggggcctgcgggccgccacgccggtcatccaggcctgctacc

SEQ ID NO: 617978 - DNA, 120 bp, Artificial Sequence
  ENSG00000177374_5 (sequence is synthesized)
gcggagccgccctcgggcccagaggccgcggtcaacacgcactgcgccgagctgtacgcgtcgggacccggcccggccgccgcactctgtgcctcggagcgccgctgctcccctctttgt

SEQ ID NO: 617979 - DNA, 120 bp, Artificial Sequence
  ENSG00000177374_6 (sequence is synthesized)
ctgctcccctctttgtggcctggacctgtccaagaagagcccgccgggctccgcggcgccagagcggccgctggctgagcgcgagctgcccccgcgcccggacagccctcccagcgccgg

SEQ ID NO: 617980 - DNA, 120 bp, Artificial Sequence
  ENSG00000177374_7 (sequence is synthesized)
gagccgcctctcgccctgccgtcgctgccgccgctgcccttccagaagctggaggaggccgcaccgccttccgacccatttcgcggcggcagcggcagcccgggacccgagccccccggc

SEQ ID NO: 617981 - DNA, 120 bp, Artificial Sequence
  ENSG00000177374_8 (sequence is synthesized)
cgccccgacgggcctagtctcctctatcgctggatgaagcacgagccgggcctgggtagctatggcgacgagctgggccgggagcgcggctcccccagcgagcgctgcgaagagcgtggt

SEQ ID NO: 617982 - DNA, 120 bp, Artificial Sequence
  ENSG00000177374_9 (sequence is synthesized)
gggcccccgctcggcctggcgccgccgccgcgctaccctggcagcctggacgggcccggcgcgggcggcgacggcgacgactacaagagcagcagcgaggagaccggtagcagcgaggac

SEQ ID NO: 617983 - DNA, 120 bp, Artificial Sequence
  ENSG00000177374_10 (sequence is synthesized)
gaggagaccggtagcagcgaggaccccagcccgcctggcggccacctcgagggctacccatgcccgcacctggcctatggcgagcccgagagcttcggtgacaacctgtacgtgtgcatt

SEQ ID NO: 617984 - DNA, 120 bp, Artificial Sequence
  ENSG00000177374_11 (sequence is synthesized)
ccgtgcggcaagggcttccccagctctgagcagctgaacgcgcacgtggaggctcacgtggaggaggaggaagcgctgtacggcagggccgaggcggccgaagtggccgctggggccgcc

SEQ ID NO: 617985 - DNA, 120 bp, Artificial Sequence
  ENSG00000177374_12 (sequence is synthesized)
tggcctgggagagctgctgcggccctaccgctgcgcgtcgtgcgacaagagctacaaggacccggccacgctgcggcagcacgagaagacgcactggctgacccggccctacccatgcac

SEQ ID NO: 617986 - DNA, 120 bp, Artificial Sequence
  ENSG00000177374_13 (sequence is synthesized)
catctgcgggaagaagttcacgcagcgtgggaccatgacgcgccacatgcgcagccacctgggcctcaagcccttcgcgtgcgacgcgtgcggcatgcggttcacgcgccagtaccgcct

SEQ ID NO: 617987 - DNA, 120 bp, Artificial Sequence
  ENSG00000177374_14 (sequence is synthesized)
cacggagcacatgcgcatccactcgggcgagaagccctacgagtgccaggtgtgcggcggcaagttcgcacagcaacgcaacctcatcagccacatgaagatgcacgccgtggggggcgc

SEQ ID NO: 617988 - DNA, 120 bp, Artificial Sequence
  ENSG00000177374_15 (sequence is synthesized)
cggccggggcgctggcgggcttgggggggctccccggcgtccccggccccgacggcaagggcaagctcgacttccccgagggcgtctttgctgtggctcgcctcacggccgagcagctga

SEQ ID NO: 617989 - DNA, 120 bp, Artificial Sequence
  ENSG00000177374_16 (sequence is synthesized)
gcagctgagcctgaagcagcaggacaaggcggccgcggccgagctgctggcgcagaccacgcacttcctgcacgaccccaaggtggcgctggagagcctctacccgctggccaagttcac

SEQ ID NO: 617990 - DNA, 120 bp, Artificial Sequence
  ENSG00000177374_17 (sequence is synthesized)
ggccgagctgggcctcagccccgacaaggcggccgaggtgctgagccagggcgctcacctggcggccgggcccgacggccggaccatcgaccgtttctctcccacctagagcgcccctcg

SEQ ID NO: 617991 - DNA, 120 bp, Artificial Sequence
  ENSG00000177374_18 (sequence is synthesized)
gtttctctcccacctagagcgcccctcgccagcccgctctgtcgctgctgcgcggccctggcccgcaccccagggagcggcgggggcggcgcgcagggcccactgtgcccgggacaaccg

SEQ ID NO: 617992 - DNA, 120 bp, Artificial Sequence
  ENSG00000177374_19 (sequence is synthesized)
ctcggcggcctcacctggcctcactgcttcgtgccttagctcgggggtcgggggagaaccccgggacgggggtgggatggggtaagggaaatttatatttttgatatcagctttgaccaa

SEQ ID NO: 617993 - DNA, 120 bp, Artificial Sequence
  ENSG00000177374_20 (sequence is synthesized)
aggagaccccaggcccctcccgcctcttcctgtggttcgtcggccccctcccccggctccgcgctgctcttagagggggaggggtgtcactgtcggggcactcctagccctacctccggc

SEQ ID NO: 617994 - DNA, 120 bp, Artificial Sequence
  ENSG00000177374_21 (sequence is synthesized)
ccttgcgaccacacccattctcactgtgaatctccccgctggggtcggagcgtcgggcagagttggggagtggggaggggactgagccggccggagggccccccgcacccccgctcccac

SEQ ID NO: 617995 - DNA, 120 bp, Artificial Sequence
  ENSG00000177374_22 (sequence is synthesized)
ccaccccgggactgataatgtgaagttcctcattttgcacaagtggcactagccccagggccaacccttccttcctcagtcaccaagggcggggagttctggagtcggaaggcgaagagc

SEQ ID NO: 617996 - DNA, 120 bp, Artificial Sequence
  ENSG00000177374_23 (sequence is synthesized)
ctaccaccaggtctcccactcccgcggtgccctcccttcccttccctgcggccccggaccatatttattgcatgcgccccggcggccccccatcccgagcccaggctgggctgggctgga

SEQ ID NO: 617997 - DNA, 120 bp, Artificial Sequence
  ENSG00000177374_24 (sequence is synthesized)
acgcggtctctttagctccctcctcttcgtttgtatatttcctaccttgtacacaggctcttccagagccgcttccattttctatactcgaaccaaacagcaataaagcagtaaccaagg

SEQ ID NO: 617998 - DNA, 120 bp, Artificial Sequence
  ENSG00000177374_25 (sequence is synthesized)
accaggacgcggggaggacggaccagcaggacagaccgaccgggggcccggcgggcggagggcagcgcagccacgtcccccctggatccgccgtcagccgggcccggggctttcgacatg

SEQ ID NO: 617999 - DNA, 120 bp, Artificial Sequence
  ENSG00000177374_26 (sequence is synthesized)
agtgctgcaaacgggacagaaaggagagctgggtctccctcccgaccacccagtcatcggccttccagctggggagagaatcttaaaggagaggccggggaccctgtactccaaagagcc

SEQ ID NO: 618000 - DNA, 120 bp, Artificial Sequence
  ENSG00000177374_27 (sequence is synthesized)
cagtcttctgagactctaggggactcctacccccaaactactggccttggctcccctacacggtaccccatcgcttctggcatagtcctgggcctcagggagggcagagctgcgcaccca

SEQ ID NO: 618001 - DNA, 120 bp, Artificial Sequence
  ENSG00000177374_28 (sequence is synthesized)
tcctccaggcaggctgtgcagtcaggccatgggctctggggtatcccccactggtcccattaagatttgcccctggctccaccgaaaaccccgtcttcccctaagttgtccttgtctctg

SEQ ID NO: 618002 - DNA, 120 bp, Artificial Sequence
  ENSG00000177374_29 (sequence is synthesized)
gccctgggtttcaggaactcattcttggtaaggaagcctccccactgaggtaccagctaaaggggcaaggaaagggcccctgtgtcagtgtcagtttttccggggagtgagggcaaagct

SEQ ID NO: 618003 - DNA, 120 bp, Artificial Sequence
  ENSG00000177374_30 (sequence is synthesized)
agaaaccaggttaggcgacggtgccccagcactggaatgcctcaggctgggctgtccacgcctggaagtttctcccagcacaggagccgagggtggaaggccctgggtgggagacctgta

SEQ ID NO: 618004 - DNA, 120 bp, Artificial Sequence
  ENSG00000177374_31 (sequence is synthesized)
ctaggttcctgccatgggtagtagagagggaaagttcagagtgagaacccctatgacgaggaaccgcggtgaagaaatgaaggggatcagggaggtgaaaaggatcaactagaaggggaa

SEQ ID NO: 618005 - DNA, 120 bp, Artificial Sequence
  ENSG00000177374_32 (sequence is synthesized)
gaagggtgaggggctattctggagggagggtaggcgggcaaggaggggtgaagggggagctgaggggagtcaggacatttcctgaagaggaagctagacggaaagaaaggccagtgagga

SEQ ID NO: 618006 - DNA, 120 bp, Artificial Sequence
  ENSG00000177374_33 (sequence is synthesized)
gagagggagcaggtggaggccacccgagagcacgggcctgagaccagatgcccctttcctctagactcatgactgtccacggggacgcaactggcgaagtgtgagggacccaggttgata

SEQ ID NO: 618007 - DNA, 120 bp, Artificial Sequence
  ENSG00000177374_34 (sequence is synthesized)
agggcaggaagaggagcagcaggaagggtgtgtggtaagtctggggtggatggtagaagaggtgggggcccagggctgctgttagggacatgctgtctagaagccgacttgggttcatgg

SEQ ID NO: 618008 - DNA, 120 bp, Artificial Sequence
  ENSG00000177374_35 (sequence is synthesized)
gcgagtccaggcctcagggagactggggacacacaccctgggcacttcttcctgacttaaccaaagcctcttgaacacattcacgacagaggttctgaagatgaaagggaactgtgattt

SEQ ID NO: 618009 - DNA, 120 bp, Artificial Sequence
  ENSG00000177374_36 (sequence is synthesized)
cactgcatctgacggaaactcagaacccctgccctgtctccactggagaaagtggctgcgtccccaggcgagaaggccctccctcagccttggaatgagacgggggagggagaaaggctg

SEQ ID NO: 618010 - DNA, 120 bp, Artificial Sequence
  ENSG00000177374_37 (sequence is synthesized)
agagcatgggcggcctatctggcttgcccagctgctgttgctgtagccagccacctccctgctaaatcctggcagcccaggagggtcccagcagcttccgcccgatccttgggaggggct

SEQ ID NO: 618011 - DNA, 120 bp, Artificial Sequence
  ENSG00000177374_38 (sequence is synthesized)
ctgtgaggagcaggtcccccacagcatggccgtggcgtgggttggaagaggatggtttattgtctgggtggattggtggctcaggcacgtgggcatcttccgtgctacactgggcgcctg

SEQ ID NO: 618012 - DNA, 120 bp, Artificial Sequence
  ENSG00000177374_39 (sequence is synthesized)
gtggcctttcaggaacggttccacggggggggggccccagtgtggctccctcagcccacctgggcccacgtgaggaaggctgggatgtcccgtacaggaacattccttgtgagcgccttc

SEQ ID NO: 618013 - DNA, 120 bp, Artificial Sequence
  ENSG00000177374_40 (sequence is synthesized)
acacgcaggttccggtcatccgtcaacagcaccacctcccgcagtagccggattggctcctctgtgggcatgagagagcagaaggctgtcactgaggacaggaggcagagggctggctgc

SEQ ID NO: 618014 - DNA, 120 bp, Artificial Sequence
  ENSG00000177374_41 (sequence is synthesized)
tcttctcaccctggagaatgtggtcctggggagggggtgccacgctagccgtgtcttggctcttctaccagtcctttcctccgtccgggctctcagccccggggaccctcccctgctggc

SEQ ID NO: 618015 - DNA, 120 bp, Artificial Sequence
  ENSG00000177374_42 (sequence is synthesized)
ctagagagggctgcactgggcttctgccttgactccggcctcccatacaggactctcttctgcctagttcccaaaagctgcccaaacccgtcagcctcccaggaccctaaactgagggaa

SEQ ID NO: 618016 - DNA, 120 bp, Artificial Sequence
  ENSG00000177374_43 (sequence is synthesized)
tagaagcagccccttgacctctactcctttttaccacatggctggcccccagatcacaacaccgctctccccacaccccacttttttttttttaacaagtcctctccctctaaaagccag

SEQ ID NO: 618017 - DNA, 120 bp, Artificial Sequence
  ENSG00000177374_44 (sequence is synthesized)
caggttgaagctttacgcatccagaggcagaaaactaaagatggaacagaaaatgtatccagggttttccagatgtggggagaggggttaagggagccctgaggagaggagagggtaagg

SEQ ID NO: 618018 - DNA, 120 bp, Artificial Sequence
  ENSG00000177374_45 (sequence is synthesized)
gtcttggcagaattgtgccaagggcacaccaaggctttggccaaccggtcgcccctgctaagtaacagtaatccatgtatacaggcgaaagtctctaagaggacagaagagtaaaaagga

SEQ ID NO: 618019 - DNA, 120 bp, Artificial Sequence
  ENSG00000177374_46 (sequence is synthesized)
agagtagagttaagatgatgatcccagttctccgtcttgtaccccagggaagacctgtgtatccttccaggtttctttaggcacatttacaagtacatacacttggacatataacctttt

SEQ ID NO: 618020 - DNA, 120 bp, Artificial Sequence
  ENSG00000177374_47 (sequence is synthesized)
tttcctacagcatcatgatcatattagccacactttcagagtatatacttaaaaggtcttgctatagtggcacagatatctttcattctttttagatgactttttttttttttaagcaca

SEQ ID NO: 618021 - DNA, 120 bp, Artificial Sequence
  ENSG00000177374_48 (sequence is synthesized)
gtctctccactacctctctttccctaactccctaatctttaacacattggagagaatttaagccagggacaagcactcacacaagtgacatccctaccctgacaggcctgcttgggtggc

SEQ ID NO: 618022 - DNA, 120 bp, Artificial Sequence
  ENSG00000177374_49 (sequence is synthesized)
aggtctactcgtcagtcccaggctgggcatttcctgacagaggtccaggtccggcagacagcaaggcacaggaagtgtcctgctgtgctcactgactgcgtgggctggcgggggtggggg

SEQ ID NO: 618023 - DNA, 120 bp, Artificial Sequence
  ENSG00000177374_50 (sequence is synthesized)
gctgcaaatatccatgtcggacctgagcagtctcaggcttgccagctccaggcagggaggctgagaactggctttcagcctggggaggagtttggaggattcgggagggagaggtttgtg

SEQ ID NO: 618024 - DNA, 120 bp, Artificial Sequence
  ENSG00000177374_51 (sequence is synthesized)
gggttggtggtggcgagagaagaggacaggaggaaggagagtgtgaagggaggcaaggggctgtgggcagaggggaaaggaaggtggcctcgggtgaggggatactcagagactactcag

SEQ ID NO: 618025 - DNA, 120 bp, Artificial Sequence
  ENSG00000177374_52 (sequence is synthesized)
ctgcctgggccaggcccctctgcagataagtgtggctggggtggtggtatgcagggctgtgtggggctcccagctgactggctgcgtctgtagcagccccactattcctgccctgggcct

SEQ ID NO: 618026 - DNA, 120 bp, Artificial Sequence
  ENSG00000177374_53 (sequence is synthesized)
caaaccaggagcgtcccaggccttaggtcagctaaccaaggcccgacattgctggcaggggtctgcaggggtttctgtggatactttgacatttttcacaataaacatcctctgttttga

SEQ ID NO: 618027 - DNA, 120 bp, Artificial Sequence
  ENSG00000177374_54 (sequence is synthesized)
aacctgaccttcacgtggggcgcgggaccttgcggggtcccagccgcaggcgcccctgttgtttccttcgggcgggtgggttggagaagaagtccacgcgggattcttcaaaacggcgta

SEQ ID NO: 618028 - DNA, 120 bp, Artificial Sequence
  ENSG00000177374_55 (sequence is synthesized)
cagggggattctagggccccatggttacttctttggaccccccggaggcgctgtccagccacttccagtcgccctgatgactcgtcgtgggttcctttaggagacccgaaagttcagggc

SEQ ID NO: 618029 - DNA, 120 bp, Artificial Sequence
  ENSG00000177374_56 (sequence is synthesized)
gggctgtgtgggtacaggtgggagggcgaacctgcgggtagggtgggcccctccccgcgggctcagcatctgtgcgcctccagctcaggtgcgcgggaggaaggcagcggcctgccgcgc

SEQ ID NO: 618030 - DNA, 120 bp, Artificial Sequence
  ENSG00000177374_57 (sequence is synthesized)
cttcccccaactggggcaacttctcccgaggcgggaggcgctggttcctcggctccctttctccctacttgggtaaagttctccgccctgaatgacttttcctgaagcggacattttact

SEQ ID NO: 618031 - DNA, 120 bp, Artificial Sequence
  ENSG00000177374_58 (sequence is synthesized)
taaatcgggtaactgtctccaaaagggtcactgcgcctgaacagttttcttctcggaagccccagcacccagccaggtgccctggggcgtgcaggccgccctggcctcccctccaccggc

SEQ ID NO: 618032 - DNA, 120 bp, Artificial Sequence
  ENSG00000177374_59 (sequence is synthesized)
ggccgctcacctcctgctccttctcctggtccgggcgggccggcctgggctcccactccagagggcagccggtccttcgccggtgcccaggccgcagggctgatgcccccgctcagctga

SEQ ID NO: 618033 - DNA, 120 bp, Artificial Sequence
  ENSG00000177374_60 (sequence is synthesized)
ggggaagtggaggggagaagtgccgggctggggccaggcggccagggcgccgcacggctctcacccggccggtgtgtgtccccgcaggagagtgtgctgggcagacgatgctggacacga

SEQ ID NO: 618034 - DNA, 120 bp, Artificial Sequence
  ENSG00000177374_61 (sequence is synthesized)
aacctgaccttcacgtggggcgcgggaccttgcggggtcccagccgcaggcgcccctgttgtttccttcgggcggctcaggtgcgcgggaggaaggcagcggcctgccgcgcagagccct

SEQ ID NO: 618035 - DNA, 120 bp, Artificial Sequence
  ENSG00000177374_62 (sequence is synthesized)
gagtatcccagagcgctagggctgcgggaaggggcgggtgtgcttctggaaacatgagcgcctgttagtatcagtgcctggatagggctggggacaaatcagtttatgccgcgcacaccg

SEQ ID NO: 618036 - DNA, 120 bp, Artificial Sequence
  ENSG00000177374_63 (sequence is synthesized)
gtgccgtacagtaatgtctacggggagttccaggagagctcggctactcctgcgcaggataacctctcccccaccacccgagtcccgtgctcgcgggcaggacttttccgaactggggct

SEQ ID NO: 618037 - DNA, 80 bp, Artificial Sequence
  ENSG00000177380_0 (sequence is synthesized)
agcgcccaagccggagccagagacgcggagcccgcgcgagcgtcggagacagggctccagggctccgaagcgacagagcc

SEQ ID NO: 618038 - DNA, 120 bp, Artificial Sequence
  ENSG00000177380_1 (sequence is synthesized)
ctccaccccacgtccctcctgcagcccagctccgcccgcagccgccgcggaccaggcaggcccgcaccgccgccatgatgtgcgaggtgatgcccaccatcagcgaggatggccggcggg

SEQ ID NO: 618039 - DNA, 120 bp, Artificial Sequence
  ENSG00000177380_2 (sequence is synthesized)
gctcggcgctgggcccggacgaggcgggcggggagctggagcgcctcatggtcacgatgctcacggagcgcgagcgcctgctggagacgctgcgcgaggcacaggacgggttggctacag

SEQ ID NO: 618040 - DNA, 120 bp, Artificial Sequence
  ENSG00000177380_3 (sequence is synthesized)
cgcagctgcggctgcgcgagctcggccacgagaaggactcgctgcagcgccagctcagcatcgcgctgccccaggagtttgcagctctgacgaaggagctgaacttatgtcgggagcagc

SEQ ID NO: 618041 - DNA, 120 bp, Artificial Sequence
  ENSG00000177380_4 (sequence is synthesized)
tgctggagagggaggaagagattgcagagctgaaggcggaacggaacaacacgcggctgctcctggaacacctggagtgcctggtgtccaggcacgagaggtcactgcgcatgaccgtgg

SEQ ID NO: 618042 - DNA, 120 bp, Artificial Sequence
  ENSG00000177380_5 (sequence is synthesized)
tgaagcgccaggcccagtccccgggtggggtctcctcggaggtagaagtgctcaaagctctaaagtctctcttcgagcaccacaaggccctggatgagaaggtccgggagcggctgcgga

SEQ ID NO: 618043 - DNA, 120 bp, Artificial Sequence
  ENSG00000177380_6 (sequence is synthesized)
tggcgctggagcgcgtggcagtgctcgaggaggagctggaactgagcaatcaggagactctgaaccttcgagaacagctgtctaggcggcggtcagggctggaagagccgggcaaggatg

SEQ ID NO: 618044 - DNA, 120 bp, Artificial Sequence
  ENSG00000177380_7 (sequence is synthesized)
gggatgggcagactcttgccaatggcctgggtcctggcggggattccaaccggcgcacagcagagctggaggaggccctggagcggcagcgcgccgaggtgtgccagctgcgggagcgcc

SEQ ID NO: 618045 - DNA, 120 bp, Artificial Sequence
  ENSG00000177380_8 (sequence is synthesized)
tggcggtgctgtgccgtcagatgagccagctggaggaggagttgggcaccgcgcaccgtgagctgggcaaggcagaggaagccaactccaagctgcagcgcgacctcaaggaggcgctgg

SEQ ID NO: 618046 - DNA, 120 bp, Artificial Sequence
  ENSG00000177380_9 (sequence is synthesized)
cgcagcgggaagatatggaggagcggattacaacactggagaagcgctacctgagcgcccagcgggaggccacgtctctgcacgacgccaacgacaaactggagaacgagttagctagca

SEQ ID NO: 618047 - DNA, 120 bp, Artificial Sequence
  ENSG00000177380_10 (sequence is synthesized)
aggagtcgttgtatcggcagagtgaagagaagagccgtcagctggccgagtggttggacgacgccaagcagaagctgcagcagacgctgcagaaagcggagaccttgcccgagatagagg

SEQ ID NO: 618048 - DNA, 120 bp, Artificial Sequence
  ENSG00000177380_11 (sequence is synthesized)
cgcagctggcgcagcgcgtggcggcgctcaacaaggccgaggaacgtcatgggaattttgaggagcggcttcggcagctggaggcccagctggaagagaagaatcaagagctgcagcggg

SEQ ID NO: 618049 - DNA, 120 bp, Artificial Sequence
  ENSG00000177380_12 (sequence is synthesized)
cccggcagcgggagaagatgaacgatgaccacaataagcggctgtccgagacggtggacaagctgctgagcgagtccaacgagcgcttacagcttcacctcaaggagcgcatgggggcgc

SEQ ID NO: 618050 - DNA, 120 bp, Artificial Sequence
  ENSG00000177380_13 (sequence is synthesized)
tggaggagaagaactccctgagcgaggagatagccaacatgaagaagcttcaggatgagttgctgctaaacaaggagcagctcttggccgaaatggagcggatgcagatggagatcgacc

SEQ ID NO: 618051 - DNA, 120 bp, Artificial Sequence
  ENSG00000177380_14 (sequence is synthesized)
agctgcgggggaggccaccatcctcctactccaggtctctccctggcagtgccctggagctccgttactctcaggcacccactttaccttctggtgcccacctggatccctatgtggctg

SEQ ID NO: 618052 - DNA, 120 bp, Artificial Sequence
  ENSG00000177380_15 (sequence is synthesized)
gcagtggtcgggcaggcaagaggggccgctggtcaggggtcaaggaggagccctccaaggattgggagcggtctgcccctgcgggctccataccacccccattccctggggaactggacg

SEQ ID NO: 618053 - DNA, 120 bp, Artificial Sequence
  ENSG00000177380_16 (sequence is synthesized)
gctccgatgaggaggaggcagaggggatgtttggggccgagctgctgtcccccagtgggcaggctgacgtgcagacgctggccatcatgcttcaggagcagctggaggccatcaacaagg

SEQ ID NO: 618054 - DNA, 120 bp, Artificial Sequence
  ENSG00000177380_17 (sequence is synthesized)
agatcaagctgatccaagaggagaaggagacaacagaacagagggcagaggagctggagagtcgggtgtccagctctggcttggactcgttgggccgctaccgcagcagctgctccctgc

SEQ ID NO: 618055 - DNA, 120 bp, Artificial Sequence
  ENSG00000177380_18 (sequence is synthesized)
ccccctccctcaccacctctacccttgccagcccctcccctcccagctctggccactcaacaccccgcctggcaccccctagccctgcccgtgagggcaccgacaaggctaatcatgtcc

SEQ ID NO: 618056 - DNA, 120 bp, Artificial Sequence
  ENSG00000177380_19 (sequence is synthesized)
cgaggggaggggccggccatcccaggagacaccccaccacccactccccgctctgcccgtcttgagagaatgacccaggccttggcactgcaggcggggtccctggaagatgggggaccc

SEQ ID NO: 618057 - DNA, 120 bp, Artificial Sequence
  ENSG00000177380_20 (sequence is synthesized)
ccacggggaagtgagggcaccccagattctctgcacaaagcccccaagaagaagagcatcaagtcatccataggccgtctctttggcaagaaagagaagggacgaatgggacccccaggc

SEQ ID NO: 618058 - DNA, 120 bp, Artificial Sequence
  ENSG00000177380_21 (sequence is synthesized)
cgggacagctcttctctggctggaacaccctcagatgagacactggccactgaccctctggggctagccaagctgacaggcccaggagacaaggaccgaaggaacaagaggaagcatgaa

SEQ ID NO: 618059 - DNA, 120 bp, Artificial Sequence
  ENSG00000177380_22 (sequence is synthesized)
ctcctggaggaggcctgccgccagggcctaccttttgctgcctgggacgggcccaccgtggtgtcctggctggagctgtgggtgggcatgcctgcctggtatgtggccgcctgccgggcc

SEQ ID NO: 618060 - DNA, 120 bp, Artificial Sequence
  ENSG00000177380_23 (sequence is synthesized)
aatgtcaagagcggtgccatcatggccaacctgtcagacacggagatccagcgcgagatcggcatcagcaacccgctgcaccgactcaagctacgcctcgccatccaggagatggtctcg

SEQ ID NO: 618061 - DNA, 120 bp, Artificial Sequence
  ENSG00000177380_24 (sequence is synthesized)
ctcacctcgccctcagcccccgcctcctcccgcacttccacaggaaacgtgtggatgacacacgaggagatggagtcccttacggccacgaccaagcccgagaccaaggagatcagctgg

SEQ ID NO: 618062 - DNA, 120 bp, Artificial Sequence
  ENSG00000177380_25 (sequence is synthesized)
gagcagatcctggcatatggcgacatgaaccacgagtgggtggggaacgactggctgcccagcctggggctgccccaataccgcagctacttcatggagtcgctggtggacgctcgaatg

SEQ ID NO: 618063 - DNA, 120 bp, Artificial Sequence
  ENSG00000177380_26 (sequence is synthesized)
ttagatcaccttaacaagaaggagctccggggccaactcaagatggtggacagctttcacagggtgagtctacattatgggattatgtgcctgaaacggctcaactatgaccggaaggac

SEQ ID NO: 618064 - DNA, 120 bp, Artificial Sequence
  ENSG00000177380_27 (sequence is synthesized)
ctggagcggaggcgggaagaaagtcagacccagatccgagacgtgatggtgtggtccaatgagcgggtcatgggttgggtgtccgggctgggcctgaaggaatttgccacgaacctcacg

SEQ ID NO: 618065 - DNA, 120 bp, Artificial Sequence
  ENSG00000177380_28 (sequence is synthesized)
gagagcggggtacacggggcactgctcgccctggacgagaccttcgactactccgacctggccttgctcctgcagatccccacgcagaatgcacaggcccggcagcttctggagaaggaa

SEQ ID NO: 618066 - DNA, 120 bp, Artificial Sequence
  ENSG00000177380_29 (sequence is synthesized)
ttcagcaaccttatctccttaggcacagacaggcggctggacgaggacagcgccaagtctttcagccgctccccatcctggcggaagatgttccgggagaaggacctccgaggcgtaact

SEQ ID NO: 618067 - DNA, 120 bp, Artificial Sequence
  ENSG00000177380_30 (sequence is synthesized)
cccgactcagctgagatgttgccccccaactttcgttcggctgcagcgggagccctgggctctccggggctccctctccgcaagctgcagccagaaggccagacttctgggagttcccgg

SEQ ID NO: 618068 - DNA, 120 bp, Artificial Sequence
  ENSG00000177380_31 (sequence is synthesized)
gcagacggcgtttcggtccggacctattcctgctagtgcaggcctccaggtgacctcactcggacggaagaatcttcccgaggctgggctgttccctctcctgcccggactgtggcctcg

SEQ ID NO: 618069 - DNA, 120 bp, Artificial Sequence
  ENSG00000177380_32 (sequence is synthesized)
ccggggagagcgggcgggggagctcgcgccgaggactggaccatctgtacagaccagcgggagtgcgcgcgcccgcctcgcacagggccggggcctggaccaaaccacatgaactggact

SEQ ID NO: 618070 - DNA, 120 bp, Artificial Sequence
  ENSG00000177380_33 (sequence is synthesized)
gagagggggaagaagcggggaggaagaaatcccgccccaaacgtccgctttccttttctctactttgtaatttattgatcagtttctgttgggagacgggtgtcctttacccgcgggaag

SEQ ID NO: 618071 - DNA, 120 bp, Artificial Sequence
  ENSG00000177380_34 (sequence is synthesized)
ggggcggggcttccctcccgggccgcatgcggggagaggctgctccctcccctttttcctgcccagtcgcggggcccaagtcttccttcttcgtccgaaaggaggggaggggggactcgc

SEQ ID NO: 618072 - DNA, 120 bp, Artificial Sequence
  ENSG00000177380_35 (sequence is synthesized)
tgctacaagcctcgccccctgtgccactcagctccgccccgccgcgtccggtcgccggtcccccgggtcatctgcgggcgggttcccctctccctcccccgtgtctcgtgtccccggggc

SEQ ID NO: 618073 - DNA, 120 bp, Artificial Sequence
  ENSG00000177380_36 (sequence is synthesized)
ctcaccgccccccgtgctgtggccgtgtccgtgccccgggggtagggggcgcagaatggcgcttccccttctcctctggctccggggtttgcatgggagaatcctctttccacgatgccg

SEQ ID NO: 618074 - DNA, 120 bp, Artificial Sequence
  ENSG00000177380_37 (sequence is synthesized)
ctgggcgacgtggcgtgggggcagggggacggtgggggagccctcgcccccgactctcggtcggcctccccgccccaggcgtcactcagtgatcacgggtaaagagaactgtttcaaaaa

SEQ ID NO: 618075 - DNA, 120 bp, Artificial Sequence
  ENSG00000177380_38 (sequence is synthesized)
acaggacgggttggctacagcgcagctgcggctgcgcgagctcggccacgagaaggactcgctgcagcgccagctcagcatcgcgctgccccaggtctgggcgggacaggggcggggcat

SEQ ID NO: 618076 - DNA, 120 bp, Artificial Sequence
  ENSG00000177380_39 (sequence is synthesized)
gagggggcggggcctcggggggaagaaggcggtccggaaggggccgggcttggcgcctggaagggaggagtctgggcgaggcttgccgttaatgggcggggcctgagtggcaagggacag

SEQ ID NO: 618077 - DNA, 120 bp, Artificial Sequence
  ENSG00000177380_40 (sequence is synthesized)
cgggacttagcagggagggcgggaccttcaaacttccagtcccagtgaatgaaggagacagggaaaggattgagccgaatgtccagatcctgccaatgtctggacaggagtttgcagctc

SEQ ID NO: 618078 - DNA, 120 bp, Artificial Sequence
  ENSG00000177380_41 (sequence is synthesized)
catttgcacagggccacacagcaaaatgcatggcagggtcccaattccaacctgaatttgttcaactccaaagtcacattgcctggtacatggcaggtgccctataataagaatcattcc

SEQ ID NO: 618079 - DNA, 120 bp, Artificial Sequence
  ENSG00000177380_42 (sequence is synthesized)
ttttctctgttactgcttgccccagaaagcaggagggacataaacgtgtggcccagggccttcaggaggacaccctccttcctctcccccacgcgaagccctctcccaccatccattaac

SEQ ID NO: 618080 - DNA, 120 bp, Artificial Sequence
  ENSG00000177380_43 (sequence is synthesized)
accaaggagatcagctgggagcaggtagggggcgcggggcggggcgtgagcgcatgaacaggctgtgcacgacgcatggatgcccctcctccgagccctgcccctgccttcaccagaaca

SEQ ID NO: 618081 - DNA, 120 bp, Artificial Sequence
  ENSG00000177380_44 (sequence is synthesized)
tgccatcatccccatgggggggcgctgcgccaagcttggctctggactgttccattatggcttggcggtggggagggtagaggggatgcgatgtggaagcccagactgttgcatagtcag

SEQ ID NO: 618082 - DNA, 120 bp, Artificial Sequence
  ENSG00000177380_45 (sequence is synthesized)
atgcgttgcccgcagggagagaaggaaaagaaggaactgagtgaaagtccctcctgctttccgccgggccagctggacccgtcggacctgatgcccgcaccgccgccatgatgtgcgagg

SEQ ID NO: 618083 - DNA, 120 bp, Artificial Sequence
  ENSG00000177380_46 (sequence is synthesized)
ctttctgtcttctcctcttccctgctcccacttcctggctggtctcccactctggtgccactccttcctccctgtctccataacttttctcttttctgtaccaccggttccttgaccccg

SEQ ID NO: 618084 - DNA, 120 bp, Artificial Sequence
  ENSG00000177380_47 (sequence is synthesized)
acctcctctcttttcctgacctgtctcggtgctcctttatatggctccatcttttcctccatgtgtccgccctacctgtcaccctttttctcacatctgccccttttcccttgcctcttt

SEQ ID NO: 618085 - DNA, 120 bp, Artificial Sequence
  ENSG00000177380_48 (sequence is synthesized)
gtctcctcttacaccatccacaaggaattcttccagcccaacactcactccgctgtccaggcatcccctaggatacactcagaagtcttctatgtgctacctacacatataccccccagc

SEQ ID NO: 618086 - DNA, 120 bp, Artificial Sequence
  ENSG00000177380_49 (sequence is synthesized)
cagtactcaccattccccaacacaccaaagcctgcatccccaaatagcccagttcctcttgatgcatcaagaatcttccattacgccatcgattttgtggtttcacataaccagtgccca

SEQ ID NO: 618087 - DNA, 120 bp, Artificial Sequence
  ENSG00000177380_50 (sequence is synthesized)
gaaacccatgtggagcccggcgatcgttgtgacatcgggaagggaagtccaaagggaggaatcctggagaggaacagggaggagggtgctccaggctgaaccgctgctcgctctccctcc

SEQ ID NO: 618088 - DNA, 120 bp, Artificial Sequence
  ENSG00000177380_51 (sequence is synthesized)
aagaagagcgcagccagtggggagggacccgtaggagcagcagtctaggggactggaaagctcatccgtgactccacttcccctgctgctcagggtgagtctacattatgggattatgtg

SEQ ID NO: 618089 - DNA, 120 bp, Artificial Sequence
  ENSG00000177383_0 (sequence is synthesized)
ggaagtggcccctcgcgcgggcgcggactgaggctgcgcgccgcaggttccggctgctggcggcgttgcggccgcaggtttgactcccgtgcggtgcggcccagcagccacaaagctccc

SEQ ID NO: 618090 - DNA, 120 bp, Artificial Sequence
  ENSG00000177383_1 (sequence is synthesized)
gctgccattgctccttgtactcccgccgtcactgccgctgtccaacccctcccccggggcttgcgcggcggctcccacacccctcggcccgtgtacgcgctctgcacctgcctgcccgaa

SEQ ID NO: 618091 - DNA, 120 bp, Artificial Sequence
  ENSG00000177383_2 (sequence is synthesized)
aacatgttgcagacaccagagagcagggggctcccggtcccgcaggccgagggggagaaggatggcggccatgatggtgagacccgggccccgaccgcctcgcaggagcgccccaaggag

SEQ ID NO: 618092 - DNA, 120 bp, Artificial Sequence
  ENSG00000177383_3 (sequence is synthesized)
gagcttggcgccgggagggaggagggggctgcggagcccgccctcacccggaaaggcgcgagggccttggcggccaaagccttggcaaggcgcagggcctaccgccggctgaatcggacg

SEQ ID NO: 618093 - DNA, 120 bp, Artificial Sequence
  ENSG00000177383_4 (sequence is synthesized)
gtggcggagttggtgcagttcctcctggtgaaagacaagaagaagagtcccatcacacgctcggagatggtgaaatacgttattggagacttgaagattctgttcccggacatcatcgca

SEQ ID NO: 618094 - DNA, 120 bp, Artificial Sequence
  ENSG00000177383_5 (sequence is synthesized)
agggccgcagagcatctgcggtatgtctttggttttgagctgaaacagtttgaccgcaagcaccacacttacatcctgatcaacaaactaaaacctctggaggaggaggaggaggaggat

SEQ ID NO: 618095 - DNA, 120 bp, Artificial Sequence
  ENSG00000177383_6 (sequence is synthesized)
ctgggaggagatggccccagattgggtctgttaatgatgatcctgggccttatctatatgagaggtaatagcgccagggaggcccaggtctgggagatgctgcgtcggttgggggtgcaa

SEQ ID NO: 618096 - DNA, 120 bp, Artificial Sequence
  ENSG00000177383_7 (sequence is synthesized)
tttgggtatccgaagaggcttattatggaagattttgtgcagcagcgatatctcagttacaggcgggtgcctcacaccaatccaccagaatatgaattctcttggggtccccgaagcaac

SEQ ID NO: 618097 - DNA, 120 bp, Artificial Sequence
  ENSG00000177383_8 (sequence is synthesized)
ctggaaatcagcaagatggaagtcctggggttcgtggccaaactgcataagaaggaaccgcagcactggccagtgcagtaccgtgaggccctagcagacgaggccgacagggccagagcc

SEQ ID NO: 618098 - DNA, 120 bp, Artificial Sequence
  ENSG00000177383_9 (sequence is synthesized)
aaggccagagctgaagccagtatgagggccagggccagtgctagggccggcatccacctctggtgagggttggtgaaaagttggccagtgggtccccgtgaggacgaactactgtcctga

SEQ ID NO: 618099 - DNA, 120 bp, Artificial Sequence
  ENSG00000177383_10 (sequence is synthesized)
gtcataagtaatatgggtggggcgagggtcttatttctgtagaaatcgtgtgactttaaggatttagattttgtatcttatgttttgtaacatttaataattactgttaaaatgctgttt

SEQ ID NO: 618100 - DNA, 120 bp, Artificial Sequence
  ENSG00000177383_11 (sequence is synthesized)
gtaaatgagattggtctactttttcctgtaggattttattgtagagttttgctggttttgtaaaatggatggaagaactttgtatttatactgtgattttgaacagattatgcaacattg

SEQ ID NO: 618101 - DNA, 120 bp, Artificial Sequence
  ENSG00000177383_12 (sequence is synthesized)
gaaggaaggctgtactttgatggtttgaaggaactcagcagtatgatgatctggttccaggggaaaaaaatagctggttggtgtctagccccccaacacttttgtctgttgtgtataaaa

SEQ ID NO: 618102 - DNA, 120 bp, Artificial Sequence
  ENSG00000177383_13 (sequence is synthesized)
gaagaaagactggcatgtaccttcatttgcttagctatttgagtatctagagaaaaattaaaatgcaatgagttagcagtataccctggcacacttaataaattaaacatttgtggagca

SEQ ID NO: 618103 - DNA, 120 bp, Artificial Sequence
  ENSG00000177398_0 (sequence is synthesized)
atgctcaggacctcggggctggcactgctggctctggtcagtgctgtgggcccaagccaggccagcggcttcacagaaaaaggcctctccctgttgggctaccagctatgcagccaccgt

SEQ ID NO: 618104 - DNA, 120 bp, Artificial Sequence
  ENSG00000177398_1 (sequence is synthesized)
gtgacccacactgtacagaaggtggaggccgtgcagacgtcctacacgtcctatgtgtcctgcggcggctggatcccctggaggcggtgccctaagatggtttaccggacacagtacctg

SEQ ID NO: 618105 - DNA, 120 bp, Artificial Sequence
  ENSG00000177398_2 (sequence is synthesized)
gtagtggaggtccccgagtccaggaacgtgactgactgctgtgagggctatgaacagctcggcctctactgtgtcttgcccctgaatcagtccgggcagttcacgtcaagacctggggcc

SEQ ID NO: 618106 - DNA, 120 bp, Artificial Sequence
  ENSG00000177398_3 (sequence is synthesized)
tgccccgcagaggggcctgaaccatccacctccccctgcagcttggacatcgactgtcctggacttgagaagtgctgcccctggtcaggggggcgctactgcatggcccctgcaccccaa

SEQ ID NO: 618107 - DNA, 120 bp, Artificial Sequence
  ENSG00000177398_4 (sequence is synthesized)
gctccagagagggaccctgtgggctcctggtacaacgtcaccatactggtgaaaatggacttcaaggaactccagcaagtggaccccaggctcctgaaccacatgcgccttctgcattcc

SEQ ID NO: 618108 - DNA, 120 bp, Artificial Sequence
  ENSG00000177398_5 (sequence is synthesized)
ttggtcaccagcgccctgcaaccaatggcctccaccgtccaccacctgcactcagcccctgggaacgcctccaccacagtgtcgcggctgctactgggcctgccacggccactgcctgtg

SEQ ID NO: 618109 - DNA, 120 bp, Artificial Sequence
  ENSG00000177398_6 (sequence is synthesized)
gctgacgtctccaccctgctgggtgacattgcgaagcgtgtctatgaagtgatcagcgtccaggtgcaagatgtcaatgagtgtttctatgaggagctcaatgcctgctctggaagggaa

SEQ ID NO: 618110 - DNA, 120 bp, Artificial Sequence
  ENSG00000177398_7 (sequence is synthesized)
ctgtgcgcaaacctggagggctcgtactggtgcgtctgtcaccaggaagctccagccacgtctccacggaagctgaacctggagtgggaagattgtcctccagtcagtgactacgtggtc

SEQ ID NO: 618111 - DNA, 120 bp, Artificial Sequence
  ENSG00000177398_8 (sequence is synthesized)
ctcaacgtcaccagtgacagttttcaagtatcctggcgtttaaattctacacagaaccacactttccatgtccgggtttaccggggtatggagttgctcaggagcgccaggacacagagc

SEQ ID NO: 618112 - DNA, 120 bp, Artificial Sequence
  ENSG00000177398_9 (sequence is synthesized)
caggcactggcagtggctgggctggaggctggagtgctgtacagggtgaagaccagctaccaggggtgcggggccgacgtctccaccacgctgaccatcaaaaccaatgcccaggtattt

SEQ ID NO: 618113 - DNA, 120 bp, Artificial Sequence
  ENSG00000177398_10 (sequence is synthesized)
gaagtcacaataaagattgtaaaccacaacctgacggagaagttactcaaccgcagcagtgtggagtaccaggacttttctagacaactgcttcacgaggtcgagagctccttcccacca

SEQ ID NO: 618114 - DNA, 120 bp, Artificial Sequence
  ENSG00000177398_11 (sequence is synthesized)
gtggtgtctgacttgtaccgaagtgggaagctgagaatgcagatcgtgtctctccaggcgggaagtgtggtcgtgaggctcaagctcaccgtgcaggaccccgggtttcccatgggcatc

SEQ ID NO: 618115 - DNA, 120 bp, Artificial Sequence
  ENSG00000177398_12 (sequence is synthesized)
tccacgctggcccccatactccagcccctgttggcaagcacagtgttccagattgaccggcaggggacacgcgtgcaagactgggacgagtgtgtggacagcgcggaacacgactgctca

SEQ ID NO: 618116 - DNA, 120 bp, Artificial Sequence
  ENSG00000177398_13 (sequence is synthesized)
ccggctgcctggtgcatcaacctggagggctcctacacctgccagtgccgtaccaccagggacgccaccccctcccgcgcaggccgggcctgtgagggtgacctggtgagccccatgggc

SEQ ID NO: 618117 - DNA, 120 bp, Artificial Sequence
  ENSG00000177398_14 (sequence is synthesized)
ggtggactgtctgcggcaacaggggtaacggtcccaggtcttggcacgggaacagcagccctcggcctagagaacttcaccttgtcacccagtcctgggtaccctcagggcaccccggca

SEQ ID NO: 618118 - DNA, 120 bp, Artificial Sequence
  ENSG00000177398_15 (sequence is synthesized)
gcaggccaggcctggaccccagagccctcacccagaagagggggcagcaatgtggtcgggtatgacaggaacaacacaggaaaaggcgtggagcaggaggtgcccagcactgccccgggt

SEQ ID NO: 618119 - DNA, 120 bp, Artificial Sequence
  ENSG00000177398_16 (sequence is synthesized)
ctggggatggaccaggggagccccagccaggtgaaccccagccaggggagccccagccaggggagcctcagacaggagagtaccagccaggcgagccccagccagaggagcaccagccag

SEQ ID NO: 618120 - DNA, 120 bp, Artificial Sequence
  ENSG00000177398_17 (sequence is synthesized)
gggagccccagccaggtgaaccccagccagcggagcaccagccacgcgaactccagccaggggagccccagccaggggagccccagccaggagagccccagccaggggagcaccagccag

SEQ ID NO: 618121 - DNA, 120 bp, Artificial Sequence
  ENSG00000177398_18 (sequence is synthesized)
gcgagccccagccataggaacactatcggggtgataggcaccacctcctccccgaaggctactgggtcaacccacagcttccctcctggggccacagatggcccactggccctccctgga

SEQ ID NO: 618122 - DNA, 120 bp, Artificial Sequence
  ENSG00000177398_19 (sequence is synthesized)
cagctacagggaaactccatcatggagccaccctcctggccttcccctactgaggaccccaccggccacttcctgtggcatgccacccgttccacccgggaaacacttctgaatcccacg

SEQ ID NO: 618123 - DNA, 120 bp, Artificial Sequence
  ENSG00000177398_20 (sequence is synthesized)
tggctgcgaaatgaggacagtggaccctccggttctgtagacctgccattgacctccaccctcacagctctgaagacccccgcctgtgttcctgtctccattgggaggatcatggtctcc

SEQ ID NO: 618124 - DNA, 120 bp, Artificial Sequence
  ENSG00000177398_21 (sequence is synthesized)
ctagagacctggaacacgagtgtgacactgtcggggctggagcctggggtcttgcacctggttgagatcatggccaaagcatgtgggaaagaaggtgccagagctcatctgaaagtgagg

SEQ ID NO: 618125 - DNA, 120 bp, Artificial Sequence
  ENSG00000177398_22 (sequence is synthesized)
acagcagcccggaagctcattggaaaggtcagaatcaaaaatgtcaggtactcagaatcctttcgcaacgcaagcagccaggagtatcgagatttcctagaactattcttcaggatggtg

SEQ ID NO: 618126 - DNA, 120 bp, Artificial Sequence
  ENSG00000177398_23 (sequence is synthesized)
cggggctccctgccagccaccatgtgtcagcacatggacgctggtggggtcaggatggaagtcgtcagcgtcaccaacggcagcatcgtggtggagtttcacttgctgataatcgcagat

SEQ ID NO: 618127 - DNA, 120 bp, Artificial Sequence
  ENSG00000177398_24 (sequence is synthesized)
gtggatgtccaggaggtgtcagctgcatttctcaccgccttccagaccgtgcctctgctggaggtgatcagaggcgacaccttcatacaggattacgatgagtgtgaaaggaaggaggac

SEQ ID NO: 618128 - DNA, 120 bp, Artificial Sequence
  ENSG00000177398_25 (sequence is synthesized)
gactgtgtgccggggacatcctgtcgaaacaccctcgggtctttcacttgtagctgcgagggaggagcccccgacttccctgtggaatattctgagagaccctgtgaaggtgactctcct

SEQ ID NO: 618129 - DNA, 120 bp, Artificial Sequence
  ENSG00000177398_26 (sequence is synthesized)
ggcaatgaaacctgggccaccagcccagagaggcctctcaccacagcagggaccaaggctgcctttgtgcaaggcaccagccccaccccccaaggcctgccccagcggctgaacctgacc

SEQ ID NO: 618130 - DNA, 120 bp, Artificial Sequence
  ENSG00000177398_27 (sequence is synthesized)
ggagcagtcagggtgctctgtgagatcgagaaggtggttgtcgccatccagaagcgcttcctgcagcaggaatccatccccgagtcctcgttgtacctcagccacccctcctgcaacgtg

SEQ ID NO: 618131 - DNA, 120 bp, Artificial Sequence
  ENSG00000177398_28 (sequence is synthesized)
agccacagcaatggcacacacgtgctcctggaggccggctggagcgagtgtgggaccctcatgcagagcaacatgacgaacaccgtggtgaggaccacgctgaggaacgacctgtcccag

SEQ ID NO: 618132 - DNA, 120 bp, Artificial Sequence
  ENSG00000177398_29 (sequence is synthesized)
gagggcatcatccaccacctgaagatcctgagccccatctactgcgccttccagaatgacctgctgacatcctccggcttcaccctggagtggggggtttacaccatcatcgaggacctc

SEQ ID NO: 618133 - DNA, 120 bp, Artificial Sequence
  ENSG00000177398_30 (sequence is synthesized)
cacggcgctgggaattttgttaccgaaatgcagttgtttatcggagactctcccatacctcagaattatagcgtgtctgccagtgacgatgtcaggatcgaagtggggctctacaggcag

SEQ ID NO: 618134 - DNA, 120 bp, Artificial Sequence
  ENSG00000177398_31 (sequence is synthesized)
aaaagcaacctcaaggtggtcctgacggagtgctgggcaaccccgtctagcaacgcccgggaccccatcaccttcagcttcattaacaacagctgccctgtgcccaacacatacaccaac

SEQ ID NO: 618135 - DNA, 120 bp, Artificial Sequence
  ENSG00000177398_32 (sequence is synthesized)
gtgattgagaacggcaactccaataaggcccagttcaagctgaggatcttttcctttatcaacgactccatcgtctacctgcactgcaaactccgcgtctgcatggaatcccccggagcc

SEQ ID NO: 618136 - DNA, 120 bp, Artificial Sequence
  ENSG00000177398_33 (sequence is synthesized)
acgtgcaaaatcaattgcaataactttcggttgctgcaaaatagtgaaacctctgccacacaccagatgtcctggggacccctcatccggtctgaaggtgagcctcctcatgcagaagca

SEQ ID NO: 618137 - DNA, 120 bp, Artificial Sequence
  ENSG00000177398_34 (sequence is synthesized)
ggcctgggtgccggttatgtggtccttattgtggtggccatcttcgtgctggtggcgggaacagccacccttctgatcgtgcgctaccagagaatgaatgggagatacaactttaaaatc

SEQ ID NO: 618138 - DNA, 120 bp, Artificial Sequence
  ENSG00000177398_35 (sequence is synthesized)
cagtccaacaacttcagctaccaggtgttctacgaataggaggcgcaggctgacaggaaggtcgccgtgagtcaagctgcctccagaacctcagagcttccctggtgggctcccccggga

SEQ ID NO: 618139 - DNA, 120 bp, Artificial Sequence
  ENSG00000177398_36 (sequence is synthesized)
tccccagtgtctctctgcacctccacccatccctcggttcttaactcttcaagccttaacggaggtctgctctgacgggtgggctctgccagagcccgggtgagcccagaaaggaagaca

SEQ ID NO: 618140 - DNA, 120 bp, Artificial Sequence
  ENSG00000177398_37 (sequence is synthesized)
gcagccaccgtctgtcccgaagaggcaggccgtcctgtaggtcctagaggagccacagcccaggggcagatgaaggggctgcggaagacgggggcagtcctgggggtgctgcggctacac

SEQ ID NO: 618141 - DNA, 120 bp, Artificial Sequence
  ENSG00000177398_38 (sequence is synthesized)
caccacccgcgcggcccccgcagcctagacctcccaggcctgtgaccctccacaccagccctcagaaccctcctgggcttgccctcccttggcgtccgtcaccctttggcaaatatagaa

SEQ ID NO: 618142 - DNA, 120 bp, Artificial Sequence
  ENSG00000177398_39 (sequence is synthesized)
tatttcacattctcagagagacccgaccgcgctcttgatgctctttcgaaaataggtcagtcttagaaatacactgctaatgttatttttagtggatgtttatgctgtttgacttttctc

SEQ ID NO: 618143 - DNA, 120 bp, Artificial Sequence
  ENSG00000177398_40 (sequence is synthesized)
ctgtgtaccaaggtattgcttttatttacacgacagcgactcaaaaggcactcgattaatgtgacaaccttttcaataagcagaaataacgtaggtacacatcactctttacatttttct

SEQ ID NO: 618144 - DNA, 120 bp, Artificial Sequence
  ENSG00000177398_41 (sequence is synthesized)
aagcattttcacagccgtttcttcatataatccgaccacagtgggaggtgtgatttacccattacacaatgagaaaccagaggagccgatgagttacttaattgaggtcacagaatgaat

SEQ ID NO: 618145 - DNA, 120 bp, Artificial Sequence
  ENSG00000177398_42 (sequence is synthesized)
tagcaagaaaatggttctaaaatctaagtattttagtctagaattttctccattacatcatcctaagagataatgctctgtacttcatttgaaataaactggaattgtattagatagctc

SEQ ID NO: 618146 - DNA, 120 bp, Artificial Sequence
  ENSG00000177398_43 (sequence is synthesized)
cgctggtttcctctggaggctgcgagggagaaaccgtcccctgcctctcccaggctctggggtgagcccttcctggcatcccgggctcattgtagatggatcactccaatctccatggct

SEQ ID NO: 618147 - DNA, 120 bp, Artificial Sequence
  ENSG00000177398_44 (sequence is synthesized)
tctcagggcttccctccatgcacctcaaatctctctctccttccttttgtaaggatgccagtcattggatttaggttcaccttaaatccaggatgatctcatctaaattacatctgcaaa

SEQ ID NO: 618148 - DNA, 120 bp, Artificial Sequence
  ENSG00000177398_45 (sequence is synthesized)
gtcattcatacagaacatttggggaaaggagtattttgatttactggatattctcagagtcagtaaagaatgacagtgggtaatatgtgtggatcacagattctgatcaagtagaatcaa

SEQ ID NO: 618149 - DNA, 120 bp, Artificial Sequence
  ENSG00000177398_46 (sequence is synthesized)
tcgcataagacactgaaatgtggctggttgtgctggatgctccatttgggatggtccatcacaggctcgctgagcatccaacgagggccggtgctgtgttgggcacgctggggaggccag

SEQ ID NO: 618150 - DNA, 120 bp, Artificial Sequence
  ENSG00000177398_47 (sequence is synthesized)
aaacgcatctctggttcttcccaagtcatgtcccgctgttctgatgtcagctgaggagctttcacttgcctttcttggaagagcatgacacatattcagtaaaaccagctgttgagcccc

SEQ ID NO: 618151 - DNA, 120 bp, Artificial Sequence
  ENSG00000177398_48 (sequence is synthesized)
gctaagcagcacaggctctaagactaaactcttagcccatttcctgtctccattgggaggatcatggtctccaatgtgaccagcaccggcttccacctggcatgggaggcggatcttgct

SEQ ID NO: 618152 - DNA, 120 bp, Artificial Sequence
  ENSG00000177398_49 (sequence is synthesized)
accctgtgggctcctggtacaacgtcaccatactggtgaaaatggacttcaaggaactccagcaagtggaccccaggctcctgaaccacatgcgccttctgcattccttgcttgttaagg

SEQ ID NO: 618153 - DNA, 120 bp, Artificial Sequence
  ENSG00000177398_50 (sequence is synthesized)
accctgtgggctcctggtacaacgtcaccatactggtgaaaatggacttcaaggaactccagcaagtggaccccaggctcctgaaccacatgcgccttctgcattccttggtaggtgaga

SEQ ID NO: 618154 - DNA, 120 bp, Artificial Sequence
  ENSG00000177398_51 (sequence is synthesized)
ggatttgcatggagctagttggtggcagaggcaagctatgctctcagagcatgcctgcattttaaaaggctggaaggaaatacgtccacatgctaacttgcccctggccacgcttttctg

SEQ ID NO: 618155 - DNA, 120 bp, Artificial Sequence
  ENSG00000177398_52 (sequence is synthesized)
gttcttatccatgttctgcagtaaacctgttttgctgtcaacaatcaacccagcatcatggcgaaaggcaaatggcctgagggccttctgcccagggttgggcttgcagcctgggtccct

SEQ ID NO: 618156 - DNA, 120 bp, Artificial Sequence
  ENSG00000177398_53 (sequence is synthesized)
ggggcctgtgcatctcctggttactcccgggaactgaagggatggccctgctctgcccagatccccctcccagccctgggccagaatcctccttccagaacagcccctgcagacatactt

SEQ ID NO: 618157 - DNA, 120 bp, Artificial Sequence
  ENSG00000177398_54 (sequence is synthesized)
aagagatccttcctccttggcctcacaaagcgctgggattgcaggcaggagaccccgtgttcagcctaagcacgtggccttgagatccacttagaacttcgcgccacgtccacatcccac

SEQ ID NO: 618158 - DNA, 120 bp, Artificial Sequence
  ENSG00000177398_55 (sequence is synthesized)
accctgtgggctcctggtacaacgtcaccatactggtgaaaatggacttcaaggaactccagcaagtggaccccaggctcctgaaccacatgcgccttctgcattccttgatgtcaatga

SEQ ID NO: 618159 - DNA, 120 bp, Artificial Sequence
  ENSG00000177409_0 (sequence is synthesized)
actctgacacaccctcagaaagtcagagtactgggagaacagaagacttcacaatttaatgcctcagtttttaaaaaaggatccttacacttcatgtctcctagccatcagaagaggaat

SEQ ID NO: 618160 - DNA, 120 bp, Artificial Sequence
  ENSG00000177409_1 (sequence is synthesized)
gagacagcaaaagttcaaatggcctgtttcaagtttctgatataaaacgatgacattttcaggaaaatcctgcatttccagagagagactggctggttaaatttctgaaagaggacacca

SEQ ID NO: 618161 - DNA, 120 bp, Artificial Sequence
  ENSG00000177409_2 (sequence is synthesized)
gctaaaagaaggtattgcatctcacccgagcagactgtgtctgtggaaagtgtaagccccttgccagaagagcagcttcccagcaaaggcagagggtgaaaacagcaaaggtcttaagac

SEQ ID NO: 618162 - DNA, 120 bp, Artificial Sequence
  ENSG00000177409_3 (sequence is synthesized)
actggggacctagagtcaaaagggacctcctccagggaaaacgctgtgtgagaaatggcctcattcggtgactgtgagtgacacagcagaaagttgggtcattccggctgcttttttgag

SEQ ID NO: 618163 - DNA, 120 bp, Artificial Sequence
  ENSG00000177409_4 (sequence is synthesized)
aagtccctgaagagatcaataacagcaagagggaacctggcaaggaagctattcctataatccaggaaagagatgaggaaggcttggaccaggtggtagtggtgtcaggtagtcaaatgc

SEQ ID NO: 618164 - DNA, 120 bp, Artificial Sequence
  ENSG00000177409_5 (sequence is synthesized)
tgggtatattttgaagatacaccccataggatttgctccacattgaatgtggaatgctggaagagagataaagtgtacctgtcacatactttttgagttttatttattttcttagaagta

SEQ ID NO: 618165 - DNA, 120 bp, Artificial Sequence
  ENSG00000177409_6 (sequence is synthesized)
agtacacaaagagatgctacctaggagaagggtattcttttcactattctttcaaattttctgtatgttcaaacattttcatagtagaaagttggggggaaaatctgtttcataaacatt

SEQ ID NO: 618166 - DNA, 120 bp, Artificial Sequence
  ENSG00000177409_7 (sequence is synthesized)
tcctcagcagcagtccagtctattgcattttaattggttgtgatatcattgttttatgcaatacgttctcaacaagtatatcctccggcaaactgaacaaggaccaagtctgttctgcct

SEQ ID NO: 618167 - DNA, 120 bp, Artificial Sequence
  ENSG00000177409_8 (sequence is synthesized)
acagctctgcttcctcatagctgctttccagaacgtgactcttgcaaattatcaagaaaggggaactaatctaagggatccagatcaaacagcctcatgaagacttattttatgtttcta

SEQ ID NO: 618168 - DNA, 120 bp, Artificial Sequence
  ENSG00000177409_9 (sequence is synthesized)
atataaagatagaagttttcagaaaagccctgctacacagaggatcagagcaggggtgggcctgctgggctgcagctgggattctgagcatcctttcccggaggcacggaaagtgagtga

SEQ ID NO: 618169 - DNA, 120 bp, Artificial Sequence
  ENSG00000177409_10 (sequence is synthesized)
gtgagcccagtgaggaagaagttgaagctttgatatgagtaaacaagtatctctacctgaaatgattaaagactggaccaaagagcatgtgaaaaaatgggtaaatgaagaccttaagat

SEQ ID NO: 618170 - DNA, 120 bp, Artificial Sequence
  ENSG00000177409_11 (sequence is synthesized)
taatgagcaatacgggcaaattctgctcagtgaagaagtaacaggattagtcctgcaggaattaactgagaaggaccttgtagaaatggggctaccatggggtccagcacttttgataaa

SEQ ID NO: 618171 - DNA, 120 bp, Artificial Sequence
  ENSG00000177409_12 (sequence is synthesized)
acgttcatacaacaaattgaatagtaagtcccctgaaagtgacaatcatgatccgggacaattagataattcaaaaccgtccaaaacagaacaccagaaaaatccaaaacacaccaaaaa

SEQ ID NO: 618172 - DNA, 120 bp, Artificial Sequence
  ENSG00000177409_13 (sequence is synthesized)
ggaagaagaaaattcaatgtcatctaatattgattatgatcccagagagatcagagatatcaaacaagaagaatcaattcttatgaaagaaaatgtgttagatgaagtagcaaatgctaa

SEQ ID NO: 618173 - DNA, 120 bp, Artificial Sequence
  ENSG00000177409_14 (sequence is synthesized)
acacaagaaaaagggtaagctaaaacctgaacaattgacttgtatgccatatccttttgatcagttccatgacagccatcgctacatagaacattatactctacaacctgaaacaggagc

SEQ ID NO: 618174 - DNA, 120 bp, Artificial Sequence
  ENSG00000177409_15 (sequence is synthesized)
actcaatctcattgatccaatacatgagttcaaagctctcacaaacacagaaacagccacggaagtggacattaagatgaaattcagcaatgaagtcttccgatttgcatcagcttgtat

SEQ ID NO: 618175 - DNA, 120 bp, Artificial Sequence
  ENSG00000177409_16 (sequence is synthesized)
gaattcacgcaccaatggcaccatccattttggagtcaaggacaaaccccatggagaaattgttggtgtgaaaatcaccagtaaggctgccttcattgaccacttcaatgtaatgatcaa

SEQ ID NO: 618176 - DNA, 120 bp, Artificial Sequence
  ENSG00000177409_17 (sequence is synthesized)
aaagtattttgaagaaagtgagatcaatgaagccaagaagtgtattcgggagccaaggtttgtggaagtccttctgcagaacaatacaccatctgacagatttgtcattgaagttgatac

SEQ ID NO: 618177 - DNA, 120 bp, Artificial Sequence
  ENSG00000177409_18 (sequence is synthesized)
tattccaaaacactctatatgtaatgataagtatttctacattcagatgcaaatttgtaaagataaaatatggaaacaaaaccaaaatctttcactgtttgtaagagaaggggctagctc

SEQ ID NO: 618178 - DNA, 120 bp, Artificial Sequence
  ENSG00000177409_19 (sequence is synthesized)
tagggatatcctggccaattccaagcaacgggatgtagatttcaaggcatttttacaaaatttaaagtcactggtagcatctagaaaagaggctgaagaagagtatggaatgaaggcaat

SEQ ID NO: 618179 - DNA, 120 bp, Artificial Sequence
  ENSG00000177409_20 (sequence is synthesized)
gaagaaggagagtgaaggactaaagctggttaaacttctcataggaaaccgagactcactggataattcatactatgactggtacattcttgtaacaaataaatgccatccaaaccaaat

SEQ ID NO: 618180 - DNA, 120 bp, Artificial Sequence
  ENSG00000177409_21 (sequence is synthesized)
aaagcacttagattttttaaaagaaattaaatggtttgctgtgttggagtttgatcctgaatctatgatcaatggagtggtcaaagcttacaaagaaagtcgggtggcaaaccttcactt

SEQ ID NO: 618181 - DNA, 120 bp, Artificial Sequence
  ENSG00000177409_22 (sequence is synthesized)
tccaaatcaatatgaagacaagacaactaacatgtgggagaagatttctactcttaatctttaccaacagcccagctggattttctgcaacggcagatcagacctgaaaagcgagacata

SEQ ID NO: 618182 - DNA, 120 bp, Artificial Sequence
  ENSG00000177409_23 (sequence is synthesized)
taaacctctagaaccacatttatggcagagagaaagagcttcagaagtcaggaaactaattttatttctcacagatgaaaatataatgacaagaggaaaatttttggtagtgtttctatt

SEQ ID NO: 618183 - DNA, 120 bp, Artificial Sequence
  ENSG00000177409_24 (sequence is synthesized)
actctcttcagtggaaagcccaggagatccactcattgaaactttctgggctttctatcaagctctcaaaggaatggaaaatatgttgtgtatctctgtaaactcacatatttatcaacg

SEQ ID NO: 618184 - DNA, 120 bp, Artificial Sequence
  ENSG00000177409_25 (sequence is synthesized)
atggaaagatctactacaaacaagaatgaagatggaagatgaactaacaaaccacagtatttccactttaaatatagaactggtaaacagcactatccttaaactaaaatcggtgactcg

SEQ ID NO: 618185 - DNA, 120 bp, Artificial Sequence
  ENSG00000177409_26 (sequence is synthesized)
gtcatcaagaaggtttttgcccgcccgtggatcttcttcagttatcctagagaaaaagaaagaggatgtcttgactgcactggaaatcctctgtgaaaatgagtgtacagagacagacat

SEQ ID NO: 618186 - DNA, 120 bp, Artificial Sequence
  ENSG00000177409_27 (sequence is synthesized)
cgagaaagacaaatctaaattcctggagtttaagaaatcaaaagaagaacacttttatcgaggtggcaaagtatcctggtggaacttctatttttcttctgaaaactattcttcagattt

SEQ ID NO: 618187 - DNA, 120 bp, Artificial Sequence
  ENSG00000177409_28 (sequence is synthesized)
tgttaaaagggacagttatgaaaagcttaaagatttaatacactgctgggcagagtctcctaaaccaatatttgcaaaaatcatcaatctttatcatcatccaggctgtggaggtaccac

SEQ ID NO: 618188 - DNA, 120 bp, Artificial Sequence
  ENSG00000177409_29 (sequence is synthesized)
gattttgcagaaattgcagagcaagtgatcaatctggtcacctatagggcaaagagccatcaggattacattcctgtgcttctccttgtggatgattttgaagaacaagaaaatgtctac

SEQ ID NO: 618189 - DNA, 120 bp, Artificial Sequence
  ENSG00000177409_30 (sequence is synthesized)
tttctacaaaatgccatccattccgttttagcagaaaaggatttgcgatatgaaaaaacattggtaattatcttaaactgcatgagatcccggaatccagatgaaagtgcaaaattggca

SEQ ID NO: 618190 - DNA, 120 bp, Artificial Sequence
  ENSG00000177409_31 (sequence is synthesized)
gacagtattgcactaaattaccaactttcttccaaggaacaaagagcttttggtgccaaactgaaggaaattgaaaagcagcacaagaactgtgaaaacttttattccttcatgatcatg

SEQ ID NO: 618191 - DNA, 120 bp, Artificial Sequence
  ENSG00000177409_32 (sequence is synthesized)
aaaagcaattttgatgaaacatatatagaaaatgtagtcaggaatatcctaaaaggacaggatgttgacagcaaggaagcacaactcatttccttcctggctttactcagctcttatgtt

SEQ ID NO: 618192 - DNA, 120 bp, Artificial Sequence
  ENSG00000177409_33 (sequence is synthesized)
actgactctacaatttcagtttcacagtgtgaaatatttttgggaatcatatacactagtacaccctgggaacctgaaagcttagaagacaagatgggaacttattctacacttctaata

SEQ ID NO: 618193 - DNA, 120 bp, Artificial Sequence
  ENSG00000177409_34 (sequence is synthesized)
aaaacagaagttgcagaatatgggagatacacaggtgtgcgtatcattcaccctctgattgccctgtactgtctaaaagaactggaaagaagctatcacttggataaatgtcaaattgca

SEQ ID NO: 618194 - DNA, 120 bp, Artificial Sequence
  ENSG00000177409_35 (sequence is synthesized)
ttgaatatattagaagagaatttattctatgattctggaataggaagagacaaatttcaacatgatgttcaaactcttctgcttacaagacagcgcaaggtgtatggagatgaaacagac

SEQ ID NO: 618195 - DNA, 120 bp, Artificial Sequence
  ENSG00000177409_36 (sequence is synthesized)
actctgttttccccattaatggaagctttacagaataaagacattgaaaaggtcttgagtgcaggaagtagacgattcccacaaaatgcattcatttgtcaagccttagcaagacatttc

SEQ ID NO: 618196 - DNA, 120 bp, Artificial Sequence
  ENSG00000177409_37 (sequence is synthesized)
tacattaaagagaaggactttaacacagctctggactgggcacgtcaggccaaaatgaaagcacctaaaaattcctatatttcagatacactaggtcaagtctacaaaagtgaaatcaaa

SEQ ID NO: 618197 - DNA, 120 bp, Artificial Sequence
  ENSG00000177409_38 (sequence is synthesized)
tggtggttggatgggaacaaaaactgtaggagcattactgttaatgacctaacacatctcctagaagctgcggaaaaagcctcaagagctttcaaagaatcccaaaggcaaactgatagt

SEQ ID NO: 618198 - DNA, 120 bp, Artificial Sequence
  ENSG00000177409_39 (sequence is synthesized)
aaaaactatgaaaccgagaactggtcaccacagaagtcccagagacgatatgacatgtataacacagcttgtttcttgggtgaaatagaagttggtctttacactatccagattcttcag

SEQ ID NO: 618199 - DNA, 120 bp, Artificial Sequence
  ENSG00000177409_40 (sequence is synthesized)
ctcactccctttttccacaaagaaaatgaattatccaaaaaacatatggtgcaatttttatcaggaaagtggaccattcctcctgatcccagaaatgaatgttatttggctcttagcaag

SEQ ID NO: 618200 - DNA, 120 bp, Artificial Sequence
  ENSG00000177409_41 (sequence is synthesized)
ttcacatcccacctaaaaaatttacaatcagatctgaaaaggtgctttgacttttttattgattatatggttcttctgaaaatgaggtatacccaaaaagaaattgcagaaatcatgtta

SEQ ID NO: 618201 - DNA, 120 bp, Artificial Sequence
  ENSG00000177409_42 (sequence is synthesized)
agcaagaaagtcagtcgttgtttcaggaaatacacagaacttttctgtcatttggatccatgtctattacaaagtaaagagagtcaattactccaggaggagaattgcaggaaaaagcta

SEQ ID NO: 618202 - DNA, 120 bp, Artificial Sequence
  ENSG00000177409_43 (sequence is synthesized)
gaagctctgagagcagataggtttgctggactcttggaatatcttaatccaaactacaaagatgctaccaccatggaaagtatagtgaatgaatatgccttcctactgcagcaaaactca

SEQ ID NO: 618203 - DNA, 120 bp, Artificial Sequence
  ENSG00000177409_44 (sequence is synthesized)
aaaaagcccatgacaaatgagaaacaaaattccattttggccaacattattctgagttgtctaaagcccaactccaagttaattcaaccacttaccacgctaaaaaaacaactccgagag

SEQ ID NO: 618204 - DNA, 120 bp, Artificial Sequence
  ENSG00000177409_45 (sequence is synthesized)
gtcttgcaatttgtaggactaagtcatcaatatccaggtccttatttcttggcctgcctcctgttctggccagaaaatcaagagctagatcaagattccaaactaatagaaaagtatgtt

SEQ ID NO: 618205 - DNA, 120 bp, Artificial Sequence
  ENSG00000177409_46 (sequence is synthesized)
tcatccttaaatagatccttcaggggacagtacaagcgcatgtgcaggtccaagcaggcaagcacacttttctatctgggcaaaaggaagggtctaaacagtattgttcacaaggccaaa

SEQ ID NO: 618206 - DNA, 120 bp, Artificial Sequence
  ENSG00000177409_47 (sequence is synthesized)
atagagcagtactttgataaagcacaaaatacaaattccctctggcacagtggggatgtgtggaaaaaaaatgaagtcaaagacctcctgcgtcgtctaactggtcaggctgaaggcaag

SEQ ID NO: 618207 - DNA, 120 bp, Artificial Sequence
  ENSG00000177409_48 (sequence is synthesized)
ctaatctctgtagaatatggaacagaggaaaaaataaaaataccagtaatatctgtttattcaggtccactcagaagtggtaggaacatagaaagagtgtctttctacctaggattttcc

SEQ ID NO: 618208 - DNA, 120 bp, Artificial Sequence
  ENSG00000177409_49 (sequence is synthesized)
attgaaggccctctggcatatgatatagaagtaatttaagacaatacatcacctgtagttcaaatacgtttatttatatctttatgattttattctctctctctattctcatggcacttt

SEQ ID NO: 618209 - DNA, 120 bp, Artificial Sequence
  ENSG00000177409_50 (sequence is synthesized)
cataacattatggctaacctctaattacagattttgcttttgcctccctgaatgaattacaagcctttttaagatatgaaatatgcctacccgcagagcttggcacaaagtggagtcaat

SEQ ID NO: 618210 - DNA, 120 bp, Artificial Sequence
  ENSG00000177409_51 (sequence is synthesized)
cttttaatgttttaaatatgcattttcagactcaaataattaagaagtttcattgatatccactggtcacatcataactgtctatagggcaataaaatctgtgttaaactcaattgcttt

SEQ ID NO: 618211 - DNA, 120 bp, Artificial Sequence
  ENSG00000177409_52 (sequence is synthesized)
tataagttttctaaattatttcttcactgtgacagcaaagatttaaataagatgaatgtaaaagagaaagcttattggactcaaacccacagatccacaccagagttctatttacctcat

SEQ ID NO: 618212 - DNA, 120 bp, Artificial Sequence
  ENSG00000177409_53 (sequence is synthesized)
atccacaccagagttctatttacctcatcttggtatcaataaaaacttatgtggaaggtaaatatattgttccccatccaccacataacactctccccaacacacacacacacacacaca

SEQ ID NO: 618213 - DNA, 120 bp, Artificial Sequence
  ENSG00000177409_54 (sequence is synthesized)
gtaccccttgcccttctcccagctcattgctccaggagagagaagagttcaaaaaataaagtaatcataaacttgaactctctccattctcttgttcccatttacaggtgaatctcttcc

SEQ ID NO: 618214 - DNA, 120 bp, Artificial Sequence
  ENSG00000177409_55 (sequence is synthesized)
tttaagccatttttgtctcctgtgaatacagccttatctccacctgtttcttagatcccatctcccctggcttattttttccattcattaccctctttgttccctttacttctcaacctg

SEQ ID NO: 618215 - DNA, 120 bp, Artificial Sequence
  ENSG00000177409_56 (sequence is synthesized)
tgctatatacatgctgttctctctgttgagattgccttatttccatctaacattctctctcctgctattctgatttgtcattcacaactgatttcaagagtcaccttcaccaggaagtct

SEQ ID NO: 618216 - DNA, 120 bp, Artificial Sequence
  ENSG00000177409_57 (sequence is synthesized)
tccttgaccaccatcattcctgcctgattagagggcttcctcatggtaatatgtgttctcaagttttcagtgtcaaggaatgccatcccagaagctcattctcagatgcacaacagccag

SEQ ID NO: 618217 - DNA, 120 bp, Artificial Sequence
  ENSG00000177409_58 (sequence is synthesized)
aacagtctcaagcagcattctagagcttggaatttaagaactacgcattgcctataaagtgaaacataggctaatatagattaaattgaatattgaataaaaaatatatttatttatcca

SEQ ID NO: 618218 - DNA, 120 bp, Artificial Sequence
  ENSG00000177414_0 (sequence is synthesized)
ccgcagatgaggaagtgcccaagtcttccttcgggaagttctcgtttagaggagtcaggagaaaaagtcattgttatatcccaactttagaagccgcttatcttggtaccgttctgaggt

SEQ ID NO: 618219 - DNA, 120 bp, Artificial Sequence
  ENSG00000177414_1 (sequence is synthesized)
tctagaaagcaagtaacttatatcagtttactaagtgtgggaaagtgacccataacttcaaacatctgcctcagagtaaacctgaggcatttggggacaagtgtcagaccctccgctgcc

SEQ ID NO: 618220 - DNA, 120 bp, Artificial Sequence
  ENSG00000177414_2 (sequence is synthesized)
tatcatgcacggcagagcttacctcttgctgcacagagacttctgtgatctcaaggagaacaattataagggtatcactgctaagcctgtaagtgaagatatgatggaatgggaagttga

SEQ ID NO: 618221 - DNA, 120 bp, Artificial Sequence
  ENSG00000177414_3 (sequence is synthesized)
aattgaaggtctacagaattcagtttggcagggtttagtcttccaactgacaatacattttacatcggagtacaactatgctcctccagttgtgaaatttataacaattccgtttcatcc

SEQ ID NO: 618222 - DNA, 120 bp, Artificial Sequence
  ENSG00000177414_4 (sequence is synthesized)
agtggaatacaaactatacattgagcagcatcttacttgccctacaggttatgctttctaatccagtgctagagaatccagtgaatttggaagcagccagaatactggttaaagatgaat

SEQ ID NO: 618223 - DNA, 120 bp, Artificial Sequence
  ENSG00000177414_5 (sequence is synthesized)
ctctgtacagaacaattctaagacttttcaacaggccattacaaatgaaagatgacagccaggagttacctaaagacccacgtaaatgtatcagaccaattaaaacaacctcatttagtg

SEQ ID NO: 618224 - DNA, 120 bp, Artificial Sequence
  ENSG00000177414_6 (sequence is synthesized)
attactaccagacatggtccagaatagctacatcaaaagccacagaatactacagaactccattgctcaaagttccaaatttcattggacagtattacaaatggaagaaaatggatctac

SEQ ID NO: 618225 - DNA, 120 bp, Artificial Sequence
  ENSG00000177414_7 (sequence is synthesized)
agcatcagaaagaatggaatttaaaatgaaaaatctttctttggaagcagcataggggaagagcatgagcttcagagtcaaacagatgttggagaaattcttaaccactctgaacttgtt

SEQ ID NO: 618226 - DNA, 120 bp, Artificial Sequence
  ENSG00000177414_8 (sequence is synthesized)
tttttatctgttaaatggagataaccttacctatcttgcaaagttgttttgcatttgacgcttattattttatatatatgatttcattcgagatataaataaaaattatataaaaatgtg

SEQ ID NO: 618227 - DNA, 120 bp, Artificial Sequence
  ENSG00000177414_9 (sequence is synthesized)
gatttgcttcctccggtgcgtggctgcggggttgcacctgtgaagcgaagacaacctgctaggaccctgataggcgtacacctctcactcccactcacgcgccgacgacatgggcttgtc

SEQ ID NO: 618228 - DNA, 120 bp, Artificial Sequence
  ENSG00000177414_10 (sequence is synthesized)
taattcccaccacagatgaaatttttcttgagtcaccaactgcaataaatagcatcacagacatttatgaaacagaagaggaggggtggaagagtgacacttcattatatgaaaatgaca

SEQ ID NO: 618229 - DNA, 120 bp, Artificial Sequence
  ENSG00000177414_11 (sequence is synthesized)
cagatgagcccagggaagaggaagtggaagatctgatctcctggaccaatactctcaatacaaatacttcagaagattaagcagaacattatcagattcaaaaaataaacagcctccgcc

SEQ ID NO: 618230 - DNA, 120 bp, Artificial Sequence
  ENSG00000177414_12 (sequence is synthesized)
atagcccagcgttgtggagcaattttggaagactctcagaacttggatttcattttttttaagttgttctcacccactcactgcaagtacaaattagaaatataagtacaaatcagtaaa

SEQ ID NO: 618231 - DNA, 120 bp, Artificial Sequence
  ENSG00000177425_0 (sequence is synthesized)
actttccgcgcggcggaagagcgcgcgccagcttcggcacacctgggagccggatcccagccctacgcctcgtcccctacaagctcctccaagccccgccggctgctgtgggagcggcgg

SEQ ID NO: 618232 - DNA, 120 bp, Artificial Sequence
  ENSG00000177425_1 (sequence is synthesized)
ccgtccctctcctggaggtcgtctcctggcatcctcggggccgcaggaaggaagaggaggcagcggccggagccctggtgggcggcctgaggtgagagcccgaccggcccctttgggaat

SEQ ID NO: 618233 - DNA, 120 bp, Artificial Sequence
  ENSG00000177425_2 (sequence is synthesized)
atggcgaccggtggctaccggaccagcagcggcctcggcggcagcaccacagacttcctggaggagtggaaggcgaaacgcgagaagatgcgcgccaagcagaaccccccgggcccggcc

SEQ ID NO: 618234 - DNA, 80 bp, Artificial Sequence
  ENSG00000177425_3 (sequence is synthesized)
gggggctctgggcaccccggcggccgccgctgccaacgagctcaacaacaacctcccgggcggcgcgccggccgcacctg

SEQ ID NO: 618235 - DNA, 80 bp, Artificial Sequence
  ENSG00000177425_4 (sequence is synthesized)
ggtcccgggggcgtgaactgcgcggtcggctccgccatgctgacgcgggcggcccccggcccgcggcggtcggaggacga

SEQ ID NO: 618236 - DNA, 120 bp, Artificial Sequence
  ENSG00000177425_5 (sequence is synthesized)
ccgccgccccagcgtgacgaggaggagccggacggcgtcccagagaagggcaagagctcgggccccagtgccaggaaaggcaaggggcagatcgagaagaggaagctgcgggagaagcgg

SEQ ID NO: 618237 - DNA, 120 bp, Artificial Sequence
  ENSG00000177425_6 (sequence is synthesized)
cgctccaccggcgtggtcaacatccctgccgcagagtgcttagatgagtacgaagatgatgaagcagggcagaaagagcggaaacgagaagatgcaattacacaacagaacactattcag

SEQ ID NO: 618238 - DNA, 120 bp, Artificial Sequence
  ENSG00000177425_7 (sequence is synthesized)
aatgaagctgtaaacttactagatccaggcagttcctatctgctacaggagccacctagaacagtttcaggcagatataaaagcacaaccagtgtctctgaagaagatgtctcaagtaga

SEQ ID NO: 618239 - DNA, 120 bp, Artificial Sequence
  ENSG00000177425_8 (sequence is synthesized)
tattctcgaacagatagaagtgggttccctagatataacagggatgcaaatgtttcaggtactctggtttcaagtagcacactggaaaagaaaattgaagatcttgaaaaggaagtagta

SEQ ID NO: 618240 - DNA, 120 bp, Artificial Sequence
  ENSG00000177425_9 (sequence is synthesized)
agagaaagacaagaaaacctaagacttgtgagactgatgcaagataaagaggaaatgattggaaaactcaaagaagaaattgatttattaaatagagacctagatgacatagaagatgaa

SEQ ID NO: 618241 - DNA, 120 bp, Artificial Sequence
  ENSG00000177425_10 (sequence is synthesized)
aatgaacagctaaagcaggaaaataaaactcttttgaaagttgtgggtcagctgaccaggtagaggattcaagactcaatgtggaaaaaatattttaaactactgattgaatgttaatgg

SEQ ID NO: 618242 - DNA, 120 bp, Artificial Sequence
  ENSG00000177425_11 (sequence is synthesized)
tcaatgctagcacaatattcctatgctgcaatacattaaaataactaagcaagtatatttatttctagcaaacagatgtttgttttcaaaatacttctttttcattattggttttaaaaa

SEQ ID NO: 618243 - DNA, 120 bp, Artificial Sequence
  ENSG00000177425_12 (sequence is synthesized)
agcattatccttttatctcacaaataagtaatatctttcagttattaaatgatagataatgcctttttggttttgtgtggtattcaactaatacatggtttaaagtcacagccgtttgaa

SEQ ID NO: 618244 - DNA, 120 bp, Artificial Sequence
  ENSG00000177425_13 (sequence is synthesized)
tatattttatcttggtagtacattttctcccttaggaatatacatagtctttgtttacatgagttcaaatacttttgggatgttaccttcacatgtcctattactgatgtgtgcaacctt

SEQ ID NO: 618245 - DNA, 120 bp, Artificial Sequence
  ENSG00000177425_14 (sequence is synthesized)
ttatgtgttgatgactcactcataaaggtttttgtctactgtcatttgttctttccacttattctaagcatttagagtaatagagtcatacttttttataacagcaaccttttaaaagga

SEQ ID NO: 618246 - DNA, 120 bp, Artificial Sequence
  ENSG00000177425_15 (sequence is synthesized)
aagctcttataaagtcactgtcatgttttagttgactaaatataaatttaagagaatacttgaattgtgctatagtaaataaaaatttactattttgtgtttgaatattgaaaaattgaa

SEQ ID NO: 618247 - DNA, 120 bp, Artificial Sequence
  ENSG00000177425_16 (sequence is synthesized)
tcactttaactcctgaaaaacatacaattgtaatttcaatgtaaaatttcttatgtaggtactacctttttttatcgttccaaggtttgctagtgaacacaggatattttaaaagttttt

SEQ ID NO: 618248 - DNA, 120 bp, Artificial Sequence
  ENSG00000177425_17 (sequence is synthesized)
tattcttcgggcctggaaagtgtacaaagtcagtgtaggagaaaaaaatccatatttttatattagcatgcacactaaaaaccaaaatattattcatacttaaaacattcatacaaaaca

SEQ ID NO: 618249 - DNA, 120 bp, Artificial Sequence
  ENSG00000177425_18 (sequence is synthesized)
atatgtaagcagaaatagtactaaaatactttgcctaatttctaagttgaagaataacactgggacacagttttttcatatgagagaatattccgctatttcaaatttaagggattttct

SEQ ID NO: 618250 - DNA, 120 bp, Artificial Sequence
  ENSG00000177425_19 (sequence is synthesized)
ttgaaattttaaaaacagagttacttctaaataattatacagattttttcttctattaaatattattatttagaattgtttttgtattacatattcatgttaagaaccccgtcttccctt

SEQ ID NO: 618251 - DNA, 120 bp, Artificial Sequence
  ENSG00000177425_20 (sequence is synthesized)
cttcccttaaaatacattaaaattatgacatttttgctttgtgattgaatttcaaatagcagtatggtatccttttatctagttaatatatgaaagtggcttgaatatagtcaaatccat

SEQ ID NO: 618252 - DNA, 120 bp, Artificial Sequence
  ENSG00000177425_21 (sequence is synthesized)
tttaggtactctactgactttttccttcacttgccaagcccttttattgttcactgttagaaaaatagagaaggtgagacagctgggggaaaatgtggagtaaatgataatcaaatgttg

SEQ ID NO: 618253 - DNA, 120 bp, Artificial Sequence
  ENSG00000177425_22 (sequence is synthesized)
aattctaaaagtctctacatttacctaggttggctttctcccccagttcagaagtttccagcttggccaatcatcagaatcacttgaggaacttagaaagaactccctggctgtagctcc

SEQ ID NO: 618254 - DNA, 120 bp, Artificial Sequence
  ENSG00000177425_23 (sequence is synthesized)
tatgtaggtttaggttgagactctggattccacaatttttaaaggttaccatctgaggtttctgatcatagtctacttttgaagcagctgctgctgtttctttattccattgaacaccct

SEQ ID NO: 618255 - DNA, 120 bp, Artificial Sequence
  ENSG00000177425_24 (sequence is synthesized)
ggaattgacataattttatctatcagcatttctccccttttagtttatttaataattaacccggtctccagggcagttttcatatgaccatgtgtatattcactgctcacgaaaaagttt

SEQ ID NO: 618256 - DNA, 120 bp, Artificial Sequence
  ENSG00000177425_25 (sequence is synthesized)
aatgttagattaccaaatttaatatagttacagaattactgcataagggcttcccttcttggagactcttacccagcatgggaacagtgatctgcccacatgacagggtggtatgccagg

SEQ ID NO: 618257 - DNA, 120 bp, Artificial Sequence
  ENSG00000177425_26 (sequence is synthesized)
catagttaactgcttttggttgtgaggtactcatcttcctttagttacccttagttatgtggcacacatgtccttattgcctagttcgtcatccacactttggatcttgtgaaaatgctg

SEQ ID NO: 618258 - DNA, 120 bp, Artificial Sequence
  ENSG00000177425_27 (sequence is synthesized)
tcttgtgaaaatgctgttagtatccaaccttaaaatatattagtatatgggtttttattaaaagaattactttgaattttctatttaattcatatgtaaataaaggaacatttcatttca

SEQ ID NO: 618259 - DNA, 87 bp, Artificial Sequence
  ENSG00000177425_28 (sequence is synthesized)
ttattaatacttttaaagactgagctgtttaagaattttttggggaacatttctagcagtgatttttttggcctttaatgatagcgt

SEQ ID NO: 618260 - DNA, 120 bp, Artificial Sequence
  ENSG00000177425_29 (sequence is synthesized)
catttctagcagtgatttttttggcctttaatgatagcgtaaagacaggagccttacaacttaggcaaagcatttcacatgcagtccttcttccatctcaaaatatgtacttattttaca

SEQ ID NO: 618261 - DNA, 120 bp, Artificial Sequence
  ENSG00000177425_30 (sequence is synthesized)
tacagaattttacactaaccattgaaaaataaagtaggatctgctacagtttcacctgaaaatttataaaaagtgttgagattggtagaaggtagtttttaagtacatgtgcactaccct

SEQ ID NO: 618262 - DNA, 120 bp, Artificial Sequence
  ENSG00000177425_31 (sequence is synthesized)
aaaagacttgtctattgtcaataaagtgttagtatttgtgaaattattattcctgttcagaaatactatttcttaaatctcctgggaatttgtggcataataaagcacattcaaagttct

SEQ ID NO: 618263 - DNA, 120 bp, Artificial Sequence
  ENSG00000177425_32 (sequence is synthesized)
aatgtatttatgagctcattttcaaaatagtaagtttgtcatctttaaaatgaacatgacttgcctccttgatttctgaaatgaattaattgaagattgctatagtaatctttatttcat

SEQ ID NO: 618264 - DNA, 120 bp, Artificial Sequence
  ENSG00000177425_33 (sequence is synthesized)
ctttctagagttgttgacaattttattatacaacagttaccattagagaaggagggaagggcttttgggtgtgtatttataggtactaagggatttactaaatatagtagattagcactg

SEQ ID NO: 618265 - DNA, 120 bp, Artificial Sequence
  ENSG00000177425_34 (sequence is synthesized)
tcacacttgttcaagtagtttcaaacatagaaaattaagtatcaggtatgtggagcaatgtagtttttttttttcttcagtttaaaaaatttttaattgtggtagaagcaatgtattctt

SEQ ID NO: 618266 - DNA, 120 bp, Artificial Sequence
  ENSG00000177425_35 (sequence is synthesized)
tagtacaagtcagtgtaatagagaagcattcatatattcaacactgtaagacaaaacagcagagaccttggatttgataattgatctgatatcctggacagtattcatatgtacagtgat

SEQ ID NO: 618267 - DNA, 120 bp, Artificial Sequence
  ENSG00000177425_36 (sequence is synthesized)
aggtatctttctttggagttttttttttgtgcatatgtgtatagttttatgggttctgagttggtgaccagtaagttgcatgtagtgctggcacttacttaataactattcatgatattg

SEQ ID NO: 618268 - DNA, 120 bp, Artificial Sequence
  ENSG00000177425_37 (sequence is synthesized)
ttaataacttgttataggattgtattcccaattacagtctctaagattgtaattgatattatctgagaggtagtgtgacaactttcttttgttgttacattaagccgaaaacataatact

SEQ ID NO: 618269 - DNA, 120 bp, Artificial Sequence
  ENSG00000177425_38 (sequence is synthesized)
aatagacaactaacagtttgcttatcaggcacatcaactaaggcacctccccccatgctaagtttctcctggatatatggaagttgattgtttcccagtttaaaaacttgaactaatatc

SEQ ID NO: 618270 - DNA, 120 bp, Artificial Sequence
  ENSG00000177425_39 (sequence is synthesized)
tcctaagaaaatctgagtccatattgtttttattttacttagctagaatctcatagcatgttaaagtcatatccttatccccactaaaaataactatgtctatgtgagaggaatatagta

SEQ ID NO: 618271 - DNA, 120 bp, Artificial Sequence
  ENSG00000177425_40 (sequence is synthesized)
tgtgggagctgtattaaatactattacaggtgttacagaatctttaaataaatggacatggaccaactttccatctagtagtgtacgatctatatagtgcatgtcagtagcacaaaatgc

SEQ ID NO: 618272 - DNA, 120 bp, Artificial Sequence
  ENSG00000177425_41 (sequence is synthesized)
agtcttagcattagcctgtctaatctgaatagtttactcaaaagtacttctttgtgttaagtattcagccactgtttttagatctagttaataggttctatttaatttgctacaacattt

SEQ ID NO: 618273 - DNA, 120 bp, Artificial Sequence
  ENSG00000177425_42 (sequence is synthesized)
actgaatggtggagtgaaaaaactgatgcatactgggaaatatctaccattttttaaagataatgttaattaggaaaagaacacttttaaggaatttatagcagtgatgaaatgaattca

SEQ ID NO: 618274 - DNA, 120 bp, Artificial Sequence
  ENSG00000177425_43 (sequence is synthesized)
gttatatcagatacaccaaactgttgatggtatttaaatgtgacttcaagttagtatttctgtatatattattgattactggtttgtttttagatatgtaagtctgttctaatctacagt

SEQ ID NO: 618275 - DNA, 120 bp, Artificial Sequence
  ENSG00000177425_44 (sequence is synthesized)
tcacatatcgacagttactctggtaataatagaatgttagtgatgatcacttggtggatgttgattaagtgcctgtgttttgtttcctcctctggataccaaataggtgtatgctacttt

SEQ ID NO: 618276 - DNA, 120 bp, Artificial Sequence
  ENSG00000177425_45 (sequence is synthesized)
tttggtgaacttatttcttggaagatttggctatgctattcagggtttttattcttatgtttttcttctaaatttaagtagcatcctgctgctaccatattaaagctaaaatttaacttt

SEQ ID NO: 618277 - DNA, 120 bp, Artificial Sequence
  ENSG00000177425_46 (sequence is synthesized)
tgctgaagaatcagctaattcaggtaatccaaatatttgtggaaaaacatctggataatttattgaacacattagtattgtgttagacagctttgatcattcccatttcataggttttta

SEQ ID NO: 618278 - DNA, 120 bp, Artificial Sequence
  ENSG00000177425_47 (sequence is synthesized)
ttgtggaatagtcaacttaatatagattcactttcaatttgcatgtataaagtaatactcaataaaatttttttcatttatttttcaacagtggttattttttttcttcctgtactatca

SEQ ID NO: 618279 - DNA, 120 bp, Artificial Sequence
  ENSG00000177425_48 (sequence is synthesized)
gtaaaatcctgactatgagttttacttttgaagctaaaggataatgctggtaatctaattatgtacctcttacagaaaccatatgcagcactttaaaaatctttatttggtatattattt

SEQ ID NO: 618280 - DNA, 120 bp, Artificial Sequence
  ENSG00000177425_49 (sequence is synthesized)
taggtggacaatgatttaagactcaaagccatcatattaaggtctaaatacattagtggtggggtttctcgaataaatgaggaagtgcacaaaagttcagcctgactgaaaattttaatt

SEQ ID NO: 618281 - DNA, 120 bp, Artificial Sequence
  ENSG00000177425_50 (sequence is synthesized)
gtgttttaaaactacatgaataatttcttgattcaaaatcagaactcttataaactaaatctgatggtgtccaaagaatttcaggtccttcaaagtttgtaaaagataagtaggggccta

SEQ ID NO: 618282 - DNA, 120 bp, Artificial Sequence
  ENSG00000177425_51 (sequence is synthesized)
ggaatataaaaatttagacttttttagtaaatggtttacataaccttttgtcttaatttgtcattcttcatacacaggcacaagctaatcagtcttctctacttctagaactctaaatct

SEQ ID NO: 618283 - DNA, 120 bp, Artificial Sequence
  ENSG00000177425_52 (sequence is synthesized)
tctcagtaatgtcatacaagtctaacaagaggaaaagcatccttaagtcagtctatttagataaactcttcaagtccctatataaggacgtattccactagcaagccagtaaatttttcc

SEQ ID NO: 618284 - DNA, 120 bp, Artificial Sequence
  ENSG00000177425_53 (sequence is synthesized)
aaggtcacataatcttacatgaaatggaacctttcatcttagacttcatcaaactcaattttttcccttctagattcactttgtgtttatgcatgcatgcacgcgtgcacacaattctat

SEQ ID NO: 618285 - DNA, 120 bp, Artificial Sequence
  ENSG00000177425_54 (sequence is synthesized)
cagcagctgtaaactacccacatattttcttaatctcattttttcagtttttcttcatctttaaaagaggttacatttcattcctggtcaactcttaaaaagaattatgtaatgttgggc

SEQ ID NO: 618286 - DNA, 120 bp, Artificial Sequence
  ENSG00000177425_55 (sequence is synthesized)
cttcatattaaagagagagactggttataagatcctttacagtccattcattttattctgatgtctaaccagatagacactagcaagcaaaacttccctcttaatcctggaccaaatgca

SEQ ID NO: 618287 - DNA, 120 bp, Artificial Sequence
  ENSG00000177425_56 (sequence is synthesized)
taattttactgtcactttcaaaaatctgttatgactgaatcaaaatccttttaaagaaaggaaaaagctccttttgtgtcaaatagttgaacaacatgaaaacagtatgagccggttaaa

SEQ ID NO: 618288 - DNA, 120 bp, Artificial Sequence
  ENSG00000177425_57 (sequence is synthesized)
gatagattgaatttttactttacacatatgaaaaacagtaagttttgactgctgtgtatgttattcatgttaatatgtgctcagttattcactattgttaatccacatataatcagttgc

SEQ ID NO: 618289 - DNA, 120 bp, Artificial Sequence
  ENSG00000177425_58 (sequence is synthesized)
tatccctggttagacacactatggaacttgaaatgcacaatatttacattgttagaggcttctatccaaatatctgcattcctttaaaatgtgaactatttgctgtgattaaccaaaggt

SEQ ID NO: 618290 - DNA, 120 bp, Artificial Sequence
  ENSG00000177425_59 (sequence is synthesized)
agattatgtcatcagtggacattttagctttatggaaacaaattattaagaaatgaatagaaaggtgtctttttctttgtgtagtgcaaaagcctaaagctatcagtcaaaggcctaaga

SEQ ID NO: 618291 - DNA, 120 bp, Artificial Sequence
  ENSG00000177425_60 (sequence is synthesized)
aatccacatttgaaaaacgtaaatcatgattggtaagaatacattcatctgatagtattgagaaaagttgaaaaactgttagccttccataacacattaaacattttatgtatggatggc

SEQ ID NO: 618292 - DNA, 120 bp, Artificial Sequence
  ENSG00000177425_61 (sequence is synthesized)
tgaaagtattgagaaaagctgaaaaactgttagccttccataacacattaaacgttttgtgtatggatggcttaggacaataaacaacatcattaaagtaaaattatgtcagtctgttca

SEQ ID NO: 618293 - DNA, 120 bp, Artificial Sequence
  ENSG00000177425_62 (sequence is synthesized)
tattaacttatttaaatcaatgaaaattttgatgagatgactaaatggatgctttggaaatgcaggattataggaggcctaaaagtgcatcttgtttcttgtaacccttttaaaaccaat

SEQ ID NO: 618294 - DNA, 120 bp, Artificial Sequence
  ENSG00000177425_63 (sequence is synthesized)
atgcctggctaggtgcagtggctcatgcctgtaataccaacggggtaacacagggttatgccgtctatacaaaaaaataaatgagctgggcaagatggcatgcacctgtagtcccagctg

SEQ ID NO: 618295 - DNA, 67 bp, Artificial Sequence
  ENSG00000177425_64 (sequence is synthesized)
ggcatgcacctgtagtcccagctgcttggtaggctgagggggaaggattgcttgagcctgggaggtc

SEQ ID NO: 618296 - DNA, 120 bp, Artificial Sequence
  ENSG00000177425_65 (sequence is synthesized)
ataatcaatatagtttcaatgaagcaaagcatctcaggtaacaatttgagcataactttaaccataacttatgatagcataataacattcattagtaattcagtagccgtatgtgccagg

SEQ ID NO: 618297 - DNA, 120 bp, Artificial Sequence
  ENSG00000177425_66 (sequence is synthesized)
ctgtgttaggtgctttatatattgtttaatttttaaaaacttgtggagtgtacagattggtaaggtgacattgtatcacaaagctagtctttgagtccaaagttttgtggttttatgtta

SEQ ID NO: 618298 - DNA, 120 bp, Artificial Sequence
  ENSG00000177425_67 (sequence is synthesized)
tgatatacttttatcatggaattgtcttattaaatgttttgccagtggttcttaaagtgtgtttctgacaccagtagcattgacttcacttagaaacctgttagaaatacaaattatttg

SEQ ID NO: 618299 - DNA, 120 bp, Artificial Sequence
  ENSG00000177425_68 (sequence is synthesized)
gccccacccaacacttgagtcacaaactttgcagatggggctcaatctgttttaacaagcgcttcatgtaattttgatgcaggcctaagtttttgagccactgcagtatgcatttctatt

SEQ ID NO: 618300 - DNA, 120 bp, Artificial Sequence
  ENSG00000177425_69 (sequence is synthesized)
ctaagtttttgagccactgcagtatgcatttctatttttaagcaaagatcttggtctttctttttggacattgtagaaataacatgaacttgttttttgtttgtttttgttttgttttgt

SEQ ID NO: 618301 - DNA, 120 bp, Artificial Sequence
  ENSG00000177425_70 (sequence is synthesized)
gattgtatcaggagaagcctcagcatggacattggcatcctgacataacccccattaatttagtattctttctgaaactcaaatggattctcaagtccaagagactatggaataaaatca

SEQ ID NO: 618302 - DNA, 120 bp, Artificial Sequence
  ENSG00000177425_71 (sequence is synthesized)
ttgtttgtctgtgttaagttttatctctgttattgcctgaagacttttggtaacaataatgcgctttcatcaaacttttaagacttgattggaaaaaataaatgtatgtttcatcagtta

SEQ ID NO: 618303 - DNA, 120 bp, Artificial Sequence
  ENSG00000177425_72 (sequence is synthesized)
gaaacagcacttcatcaggtggcttttgcgggaggaagcactgttaatgcccttaggcgtaagggtaaatgattcaacttacttaaggaaatacattttcttctaacttgaaacattaaa

SEQ ID NO: 618304 - DNA, 74 bp, Artificial Sequence
  ENSG00000177425_73 (sequence is synthesized)
aacttgaaacattaaaaacaaaaaatatctacaaacttttactatagaaagatcaaatgtgggttctagaccag

SEQ ID NO: 618305 - DNA, 120 bp, Artificial Sequence
  ENSG00000177425_74 (sequence is synthesized)
gcctcctctgcgaaccggctaggagctccgcgcctcgccttgggagtggggttgtagctgacggggacctcggaccggcggtggctagagcgcggagcaggcgatacgacgagccgacag

SEQ ID NO: 618306 - DNA, 120 bp, Artificial Sequence
  ENSG00000177425_75 (sequence is synthesized)
aagatactaaaaggatggaagccagttaagtagttgttggttatttgggaatttcagaatatatcctgtacttctgaatatttgatacttattctaaaagtaggatttacccttgagtct

SEQ ID NO: 618307 - DNA, 120 bp, Artificial Sequence
  ENSG00000177425_76 (sequence is synthesized)
attgctaagctttataatgtctattttagtggaaaattcctctagctataatctcttaatgctgccaatctcattctcatgatagttttagaataatagtgtaattttccccaacacaac

SEQ ID NO: 618308 - DNA, 120 bp, Artificial Sequence
  ENSG00000177425_77 (sequence is synthesized)
accccctggtgtttctacataagatgcgaaaattcccagagggggaaaacttccagtaaggggtggcatttatctttgatgatactgtttcttttcccttttctgagcattatagttcat

SEQ ID NO: 618309 - DNA, 120 bp, Artificial Sequence
  ENSG00000177425_78 (sequence is synthesized)
gtctttgtagctaagagtggagggaggattctttttggatcgtattagagatttatgttaacattcctaagtaaaatgttaaaaactttttggagttaatgaacaatcttttattctgag

SEQ ID NO: 618310 - DNA, 120 bp, Artificial Sequence
  ENSG00000177425_79 (sequence is synthesized)
tattttgcactgtgcatatctggctttcaaaataggttaaatggctaaatttggcaataagatcaagtaacacaattcttcacaattatgacagtattccctaaaacataatacatattg

SEQ ID NO: 618311 - DNA, 88 bp, Artificial Sequence
  ENSG00000177425_80 (sequence is synthesized)
cacaattatgacagtattccctaaaacataatacatattgggaatgaagcactgattttgtttttcactattccttgcatttgcataa

SEQ ID NO: 618312 - DNA, 62 bp, Artificial Sequence
  ENSG00000177425_81 (sequence is synthesized)
gggaggcggaggcaggagaatcacttgactgcaggctgaggttgcagtgagccaaaatagtg

SEQ ID NO: 618313 - DNA, 120 bp, Artificial Sequence
  ENSG00000177425_82 (sequence is synthesized)
gcgtggtcaacatccctgccgcagagttaaaaatatgaagattaaggggaaattgaagacaaggctttggaaaagctacattcctcaacttgatttttaaaagtagctgatgatccaaat

SEQ ID NO: 618314 - DNA, 120 bp, Artificial Sequence
  ENSG00000177425_83 (sequence is synthesized)
tgtgagtgagcctagaagcagattctccagcccagttaagccttcagatgactgaagccccaaccaacatcttgattaaaaactcatgagaagccccgaatcataatcacccacctaagc

SEQ ID NO: 618315 - DNA, 120 bp, Artificial Sequence
  ENSG00000177425_84 (sequence is synthesized)
tgaaaatgaacagctaaagcaggaaaataaaactcttttgaaagttgtgggtcagctgaccagtgctaatgtgtccggaattggtgggttcttcgtctcactgacttcaagaatgaagct

SEQ ID NO: 618316 - DNA, 120 bp, Artificial Sequence
  ENSG00000177425_85 (sequence is synthesized)
accccatctcaaaaaaaaaaaaaaaaaagataatctgggagatctgtcctatcgtagttctcatagtatccatcactgaccttattttactgatcatcttgctttattattagttatatt

SEQ ID NO: 618317 - DNA, 120 bp, Artificial Sequence
  ENSG00000177425_86 (sequence is synthesized)
tattcccttttaaccaaaagctctatgaagggcagagtccatgtttgtgtttgctgttacgtcttcagtatccagaacagtgttcgttacttaacacctattcagtagatattggtcgaa

SEQ ID NO: 618318 - DNA, 120 bp, Artificial Sequence
  ENSG00000177425_87 (sequence is synthesized)
agaattaatggtacttttacatttttttcattgtgtgggaataatgattaacttctacagttacaaataagttgctactataaccatatgtccttggggaatgttaatttttttaagctc

SEQ ID NO: 618319 - DNA, 120 bp, Artificial Sequence
  ENSG00000177425_88 (sequence is synthesized)
tgtacttctcctgctttgtttttatagtgcttagatgagtacgaagatgatgaagcagggcagaaagagcggaaacgagaagatgcaattacacaacagaacactattcagaatgaagct

SEQ ID NO: 618320 - DNA, 120 bp, Artificial Sequence
  ENSG00000177426_0 (sequence is synthesized)
atcagaggcggctgtctcgtgcggctagagcagggccagtagagttcggggcagctgtcaaaaacgagacggggaggcttttcttcccgggggtggaggagggaaggagggaggtgtcct

SEQ ID NO: 618321 - DNA, 120 bp, Artificial Sequence
  ENSG00000177426_1 (sequence is synthesized)
tttttccatctgttgcagtttccgaaccaaacgcaccctcgccagccccgggaagaaaggcccaagggagaaacctggggcgctcggctggtgcccccaccgccgggcgagggatgcggg

SEQ ID NO: 618322 - DNA, 120 bp, Artificial Sequence
  ENSG00000177426_2 (sequence is synthesized)
cggtccgtgcgcggcaggcggaaaggatcgtgtttctggacccggccaccccccgcgtccgcaccgccgcccccgagggacgagtgacagcggccgccgcgctcggtccagtcttcccgg

SEQ ID NO: 618323 - DNA, 120 bp, Artificial Sequence
  ENSG00000177426_3 (sequence is synthesized)
ctggaaggtgcgggggaggggcggaggagcggcggggcgggagggggacggggcgggcggctgggggcggaggcaggacctcctgtaccttccctcctcgcctctctcactctgacagcg

SEQ ID NO: 618324 - DNA, 120 bp, Artificial Sequence
  ENSG00000177426_4 (sequence is synthesized)
ccgaggtgcgccgagcaggagcagggaacaaaggagcggagaggggaggggagagagttgggcgagggagagcccccggccggctgccagaagatcccggcgggaggaagcccaagtgtc

SEQ ID NO: 618325 - DNA, 120 bp, Artificial Sequence
  ENSG00000177426_5 (sequence is synthesized)
acttgaattccacccaaggagcgggcgcctgggatcagagcgtcctgtttagcaataacggctggagcacgtcctacaagttacgggagagtcggctgtgaaggagacgttcgcttatcc

SEQ ID NO: 618326 - DNA, 120 bp, Artificial Sequence
  ENSG00000177426_6 (sequence is synthesized)
cctgtgtccccgctcctggcccctccagacccccgccttgcctcgcgctgggaggggagatccagaatgaaaggcaagaaaggtattgttgcagcatctggcagtgagactgaggatgag

SEQ ID NO: 618327 - DNA, 120 bp, Artificial Sequence
  ENSG00000177426_7 (sequence is synthesized)
gacagcatggacattcccttggacctttcttcatccgctggctcaggcaagagaaggagaaggggcaacctacccaaggagtctgtgcagattcttcgggattggctgtatgagcaccgt

SEQ ID NO: 618328 - DNA, 120 bp, Artificial Sequence
  ENSG00000177426_8 (sequence is synthesized)
ctgtcccagcaaacacacctgtctacgctacaggtctgtaactggttcatcaacgcccgccgcaggctcctccctgacatgctgagaaaggatggcaaagatccaaatcagttcacaatt

SEQ ID NO: 618329 - DNA, 120 bp, Artificial Sequence
  ENSG00000177426_9 (sequence is synthesized)
tcccgccgtggggccaagatttctgaaacgagctctgtggagtccgtgatgggcatcaaaaacttcatgccagctctagaggagaccccatttcattcctgtacagctgggccaaaccca

SEQ ID NO: 618330 - DNA, 120 bp, Artificial Sequence
  ENSG00000177426_10 (sequence is synthesized)
accctagggaggccactgtctcctaagccgtcatccccgggatcagttttggctcgtccatcagtgatctgccataccactgtgactgcattgaaagatgtccctttctctctctgccag

SEQ ID NO: 618331 - DNA, 120 bp, Artificial Sequence
  ENSG00000177426_11 (sequence is synthesized)
tcggtcggtgtgggacaaaacacagatatacagcagatagcggccaaaaacttcacagacacctctctcatgtacccagaggacacttgtaaatctggaccaagtacgaatacacagagt

SEQ ID NO: 618332 - DNA, 120 bp, Artificial Sequence
  ENSG00000177426_12 (sequence is synthesized)
ggtcttttcaacactcctccccctactccaccggacctcaaccaggacttcagtggatttcagcttctagtggatgttgcactcaaacgggctgcagagatggagcttcaggcaaaactt

SEQ ID NO: 618333 - DNA, 120 bp, Artificial Sequence
  ENSG00000177426_13 (sequence is synthesized)
acagcttaacccattttcaagcaaaacagttctcagaaatgtcatgattgccggggtgaaggcaagagatgaattgcattattttatatattttttattaatatttgcacatgggattgc

SEQ ID NO: 618334 - DNA, 120 bp, Artificial Sequence
  ENSG00000177426_14 (sequence is synthesized)
taaaacagcttcctgttactgagatgtcttcaatggaatacagtcattccaagaactataaacttaaagctactgtagaaacaaagggttttcttttttaaatgtttcttggtagattat

SEQ ID NO: 618335 - DNA, 120 bp, Artificial Sequence
  ENSG00000177426_15 (sequence is synthesized)
tcataatgtgagatggttcccaatatcatgtgattttttttttcctccccttccctttttttgttattttttcagactgtgcaatacttagagaacctatagcatcttctcattcccatg

SEQ ID NO: 618336 - DNA, 120 bp, Artificial Sequence
  ENSG00000177426_16 (sequence is synthesized)
tggaacaggatgcccacatactgtctaattaataaattttccattttttttcaaacaagtatgaatctagttggttgatgccttttttttcatgacataataaagtattttctttaaaaa

SEQ ID NO: 618337 - DNA, 120 bp, Artificial Sequence
  ENSG00000177426_17 (sequence is synthesized)
gactcccgcccgcatctcggggtgggaagggttcaggaaacacagaccagcttatcttaaggaagcctggtcgggaatctttcaaaaacacatctgttacaagggggaaagacacctcca

SEQ ID NO: 618338 - DNA, 120 bp, Artificial Sequence
  ENSG00000177426_18 (sequence is synthesized)
ggacaacagtgatttgcctcagcggggcaaaggccaggcctgacggaagagcccagccttcgccgagggccgcagggagccagagactcgagcctgcggttccagccccgccgcggttcc

SEQ ID NO: 618339 - DNA, 120 bp, Artificial Sequence
  ENSG00000177426_19 (sequence is synthesized)
ggccccgccgcgatcccgaggcctgcgcatgctcggtgctgcgcggggctccctccttaccgcaggagctcctcatcgagaaacccaggttggtgtcttttccacgtggtagaagctggc

SEQ ID NO: 618340 - DNA, 120 bp, Artificial Sequence
  ENSG00000177426_20 (sequence is synthesized)
agcatgtgagcgtgacaagtgtctgtccgcaacgtgtcagatttcgaaactgccttgcaatccagtccggaactcgcagctttagcccgggggaacagacgttcgtttaggctgtgtctc

SEQ ID NO: 618341 - DNA, 120 bp, Artificial Sequence
  ENSG00000177426_21 (sequence is synthesized)
atcattcccccccgccccacccccgccgacctcccactgtcgctgctggaggaagagccccgggaggagaagggtgcgccgcgccgcgcccgcgtgtcaatggcagccgcgcattctgga

SEQ ID NO: 618342 - DNA, 120 bp, Artificial Sequence
  ENSG00000177426_22 (sequence is synthesized)
ctctcgctcttgccctctggggacccaaaaggcccctggtcctcaagtcagccacctctgtgtcttcctccatccaaaagacctgcaggagcttctgagcctggtgacacttgctgggga

SEQ ID NO: 618343 - DNA, 120 bp, Artificial Sequence
  ENSG00000177426_23 (sequence is synthesized)
ccaagaccatcctactccgccccagccacgctgcatgacctcatctcagcccaaaaacagacattgggaacatctgaccatccatcccgttcccccgctctttttggctacctgcagtga

SEQ ID NO: 618344 - DNA, 120 bp, Artificial Sequence
  ENSG00000177426_24 (sequence is synthesized)
cacaacatttccttgtatgtggatagcgtgaaagaagcttgtgatcctgcccccaccctccccaccgccacattttttaaagtgtattgttgcagcatctggcagtgagactgaggatga

SEQ ID NO: 618345 - DNA, 120 bp, Artificial Sequence
  ENSG00000177426_25 (sequence is synthesized)
caatgcctatccttcagagcaagaaaaagcgttgctgtcccagcaaacacacctgtctacgctacaggtaaagaaagagagcgtgaggtttatggatgcatttttagtttcaaagtcatt

SEQ ID NO: 618346 - DNA, 120 bp, Artificial Sequence
  ENSG00000177426_26 (sequence is synthesized)
ttatggcattcctgtgtgtcaagtcattaagctccttgccactcaaagacagaaggaatatctttttattgtaaacttgatagtgttaaaagctaataactagctatttagagaacacag

SEQ ID NO: 618347 - DNA, 120 bp, Artificial Sequence
  ENSG00000177426_27 (sequence is synthesized)
aaacacttgacagtcatctatcagatagcatttcctttaatgcctaaaagaaccttcctttatgcaacagacattaaaaggaggttaaaccttactctattgtccaggaaactggtttga

SEQ ID NO: 618348 - DNA, 120 bp, Artificial Sequence
  ENSG00000177426_28 (sequence is synthesized)
tatttaaacaaggacgacttcagtgaggtaattcatgttatgtctgttgacacagtcatttgaactgggaaaaatcagttactgggaggagtggcccttttcataaggagaggttttcct

SEQ ID NO: 618349 - DNA, 120 bp, Artificial Sequence
  ENSG00000177426_29 (sequence is synthesized)
gtagttgattaacttaaatgttggggcagtaggtgataggttaaaatggggagagttaaaaagtaaacctctctctcaaatcatttttaagcatttgagattgtatgtctttttcttcgt

SEQ ID NO: 618350 - DNA, 120 bp, Artificial Sequence
  ENSG00000177426_30 (sequence is synthesized)
atgccattgtttgtaattcatttctgtttttaagattctagattgtctacaagcaaaagaatgtatttctttagtcattcggagtagcctgctgtagtttttgaaaggtattgttgcagc

SEQ ID NO: 618351 - DNA, 120 bp, Artificial Sequence
  ENSG00000177426_31 (sequence is synthesized)
aaagtacttacagccaaaagagcttcctctggggcttgcatattcagtttcctttgtcatgtaatcatttaagactgaactctgcttattgatatgtagtattctattctaggttgagct

SEQ ID NO: 618352 - DNA, 120 bp, Artificial Sequence
  ENSG00000177426_32 (sequence is synthesized)
caaactggtagctgaaatttaggagacatttttaattcatttagtattaggcatcttttgaccttactaaagtaccagtagtagaaaaatatttttgtgtgatgaaactgaaaacatcag

SEQ ID NO: 618353 - DNA, 120 bp, Artificial Sequence
  ENSG00000177426_33 (sequence is synthesized)
tggtcgtatttaataaaaggtgactagtactgcccatttaaagtaggtgtctaactttgaataaatgtggatagcaatgaataagaaatgaccatgcatggtgttagcagaaaattttaa

SEQ ID NO: 618354 - DNA, 120 bp, Artificial Sequence
  ENSG00000177426_34 (sequence is synthesized)
catgtgttttacctttagaatactaactgggttcagcgtagtatgtaattttccttccttatatccatgaaaaaaaatgtacgagtgctccctttcatttcaaaccttcagtagaggaag

SEQ ID NO: 618355 - DNA, 120 bp, Artificial Sequence
  ENSG00000177426_35 (sequence is synthesized)
gaggaagagtagcatttaaaatgtacattaggactggttaggttgcttttcctagttagcactgatcttagaaagaaggttggtaggcatattccaactgccacagcacccttcctgttt

SEQ ID NO: 618356 - DNA, 120 bp, Artificial Sequence
  ENSG00000177426_36 (sequence is synthesized)
caaatgtggcaggttattcattttgggtgcagtttgtctcctccaatgattagacgaaagagttttctgaccatcattcaaaaggaatgtgagaagttaatgaatcctagaggaaagcgg

SEQ ID NO: 618357 - DNA, 120 bp, Artificial Sequence
  ENSG00000177426_37 (sequence is synthesized)
ctgagaaaaggcatctggcatttggttgagagcctcctatgtggtgctagtcaaactacttttacttggaccctgaattcaggacagaaaacactgctccttctcctcgctctcagttgt

SEQ ID NO: 618358 - DNA, 120 bp, Artificial Sequence
  ENSG00000177426_38 (sequence is synthesized)
tgggaaagcatggttacattgaatggtcagcgttaagtgagctttgcaatagttgctgtgcttataaagcaactgacaactggcccttgtcctttcctaggtattgttgcagcatctggc

SEQ ID NO: 618359 - DNA, 120 bp, Artificial Sequence
  ENSG00000177426_39 (sequence is synthesized)
taagaaaataaaatattagccgagtgtggcgtcacacgcctgtagtcctatctacttgggaggctgagacaggaggatctcttgagctcaggagttcaagactgcagtgagctgtgatgg

SEQ ID NO: 618360 - DNA, 120 bp, Artificial Sequence
  ENSG00000177426_40 (sequence is synthesized)
cgtcactgcactccagcctgggcgacaaaacgaggctctgtccccaaacaccaaaaacctcacaaggctcttccaggttggtgtcttttccacgtggtagaagctggctaacctccactt

SEQ ID NO: 618361 - DNA, 120 bp, Artificial Sequence
  ENSG00000177426_41 (sequence is synthesized)
tttctgtgggaggccctgaaacgcgcggagcttccctctgcctccaggctttcccagcgagagtgaaattaaacttgaaactcggatcaactggcagtcgttgtattgttgcagcatctg

SEQ ID NO: 618362 - DNA, 120 bp, Artificial Sequence
  ENSG00000177426_42 (sequence is synthesized)
gggaggccctgaaacgcgcggagcttccctctgcctccaggctttcccagcgagagtgaaattaaacttgaaactcggatcaactggcagtcgttgttggtagaacgccctaaggacccc

SEQ ID NO: 618363 - DNA, 120 bp, Artificial Sequence
  ENSG00000177426_43 (sequence is synthesized)
tccccgcgggacggagggaggactcgggacagggaattggccctgggagaaaacgcgcggggggcgtccgagacgccccgtgaaagccgtgccgacccttgggaggactgacaggtctag

SEQ ID NO: 618364 - DNA, 120 bp, Artificial Sequence
  ENSG00000177426_44 (sequence is synthesized)
agacacgcgctgtctgttgtggtgggcctcccgggaataagtgaggggctctgtgtttcgaggatggttctagcgcagagccgggtgtctgccggggtgggctccccgcattgttcgggc

SEQ ID NO: 618365 - DNA, 120 bp, Artificial Sequence
  ENSG00000177426_45 (sequence is synthesized)
tccggcgggggcggctctgattcctttccatggcccgcctcccaccccgggaatccccagtgctccttttccacggcttttctggcgtccccccgactctcccgcggcactttggcctac

SEQ ID NO: 618366 - DNA, 120 bp, Artificial Sequence
  ENSG00000177426_46 (sequence is synthesized)
ctaccttcccccagcgccgtggtcctccctggcgaccccctctgcgctcctggggtcctcctgcgccccccctcctccaccggcgcgctgcccacagccgcgtgccctctccccggagct

SEQ ID NO: 618367 - DNA, 120 bp, Artificial Sequence
  ENSG00000177426_47 (sequence is synthesized)
accaaggctgggccccgccggccgcatcggtgggaacttccgcggtccccatcccagggcgcacagggtccagctcctcggcgccgactcctggaaacaatgaaaggtattgttgcagca

SEQ ID NO: 618368 - DNA, 120 bp, Artificial Sequence
  ENSG00000177426_48 (sequence is synthesized)
tggcttgtccccaggaccgcgctccccccgagccgttttaggtgtgtgttctcttctgtcccgagcagtcagcaaaccacagaagaaaaaaatcgtaaggtattgttgcagcatctggca

SEQ ID NO: 618369 - DNA, 120 bp, Artificial Sequence
  ENSG00000177426_49 (sequence is synthesized)
acattctttcagacccggcccgctgcggggcgttcctggggggtagcctcaaggccagcggggttccttcggctgcgtttctgtgggaggccctgaaacgcgcggagcttccctctgcct

SEQ ID NO: 618370 - DNA, 120 bp, Artificial Sequence
  ENSG00000177426_50 (sequence is synthesized)
cagcgttggctggggggaggcagtgggggtgcatctacgggagcggttgggctgtaagctttcgctacatcacagaattgtgccagtgtttctctttggagtgcctcgccagctttaaca

SEQ ID NO: 618371 - DNA, 120 bp, Artificial Sequence
  ENSG00000177426_51 (sequence is synthesized)
aattcagagtatttctgttgagggaggtgcttcttaaaaataagtaggaatatagcaccccagtgagcaggaagctgggggggtagggtgcagtgttagggggtgtcaccagctctttga

SEQ ID NO: 618372 - DNA, 120 bp, Artificial Sequence
  ENSG00000177426_52 (sequence is synthesized)
aaacctgtggacaacaagccagtttgcataaacaggatgtgtgatatttactcttgataggaggcatagcaggcccttagagctttacttaaactgcatggcaaattgaaatgaatcatt

SEQ ID NO: 618373 - DNA, 120 bp, Artificial Sequence
  ENSG00000177426_53 (sequence is synthesized)
ttagtgtttagctagccactaaatcccttgctgatctgtcctgcgtagtttaaaacgtggccatgttataaagaaaagtcttgaagcatccggttattgctgagttttcagaagaaaaca

SEQ ID NO: 618374 - DNA, 120 bp, Artificial Sequence
  ENSG00000177426_54 (sequence is synthesized)
acgcaagcaatctcttgccctttttccacgttaccctttaaaataacctttgttcagtggtacatttagttaaggcatttgtattcaaatgtagcatagtatttgcagagaaattacctt

SEQ ID NO: 618375 - DNA, 120 bp, Artificial Sequence
  ENSG00000177426_55 (sequence is synthesized)
ttaaaacatctcaaaagtgttttctaaaatgatgaaataaacggtggggttctgtctatggtgggattgtcagtttattaggtgagtattttccaaggtctcagtttgtgaaaaaatggt

SEQ ID NO: 618376 - DNA, 120 bp, Artificial Sequence
  ENSG00000177426_56 (sequence is synthesized)
gctatgtacaagtggagtttgttgggatagacaatcacttacaaagcccagatggccagaagggaattggtgttgctcctttcacttgtatggttgagcagatttgtcacatgccacaaa

SEQ ID NO: 618377 - DNA, 120 bp, Artificial Sequence
  ENSG00000177426_57 (sequence is synthesized)
accattctttgtagtcatgcttagtatgagcttgctttgttgttacggtcatgttctttccagccctgccccagctatgaattgtctaagtgtgagggagcatcagagcttcagtattgt

SEQ ID NO: 618378 - DNA, 120 bp, Artificial Sequence
  ENSG00000177426_58 (sequence is synthesized)
ttaaagaatgtagaaaaatacaaatttgtctaattttgaaactattttagaaagtccctactgtagaaagagctaaactcaaagactttccttgtaagtgaaagaaaaaaactgctgatg

SEQ ID NO: 618379 - DNA, 120 bp, Artificial Sequence
  ENSG00000177426_59 (sequence is synthesized)
attaccaagaggcgtaagaaaattaggtgagggaatgttgtgctctagcctgtggggtgcagcttcgtagggcacatcagcttagaatggtctggcctcacctcagagagtcacagaaat

SEQ ID NO: 618380 - DNA, 120 bp, Artificial Sequence
  ENSG00000177426_60 (sequence is synthesized)
agacaaaaacccaaaaagtactagtaaagtaaatacaaggaacaaaataaacattaataaaaatgaatgacgcaaaggtgatccagaatcattacttgctccaacagctagatcaaaggc

SEQ ID NO: 618381 - DNA, 120 bp, Artificial Sequence
  ENSG00000177426_61 (sequence is synthesized)
tgaacattttgctttagtatagatgagggaaatgagcaagtcctaaaaggtttgccctgttacggtgtttcatcactcatactggaaggagaaggaaaggagccatatgactcatttaaa

SEQ ID NO: 618382 - DNA, 120 bp, Artificial Sequence
  ENSG00000177426_62 (sequence is synthesized)
agaaaaactgtaagtcaccttaaattccctatgttttacttcattttttccctattgaggttgttacaggtcatggttgataatagttggtgttgaatgaatgtaatccattatttaaaa

SEQ ID NO: 618383 - DNA, 120 bp, Artificial Sequence
  ENSG00000177426_63 (sequence is synthesized)
acaggtacatttaagtgaaaagataaatgtaaaaagctgttcatatcaaagccaaatagaaatgatttttatgcttataatttacatggtgcaatatatctttttaatttgtttactttt

SEQ ID NO: 618384 - DNA, 120 bp, Artificial Sequence
  ENSG00000177426_64 (sequence is synthesized)
caaggtaagtagatatttctttaagggggatgacctggaagttgcacacttcattttcactcaccattggcttgaacctagtcatgtgaccacatcagtcaagaaggcaggctgcgatct

SEQ ID NO: 618385 - DNA, 120 bp, Artificial Sequence
  ENSG00000177426_65 (sequence is synthesized)
atagtctccagctgtcagccatgtacagttgtcccttggtatccatgggggattggttccaggatgctacctcagaaattaaaatgtgcaaatgctcaagttcattatataaaatggcat

SEQ ID NO: 618386 - DNA, 120 bp, Artificial Sequence
  ENSG00000177426_66 (sequence is synthesized)
tacttgtaatcatctttagattacttataatatctaatacaatgtgaatgctatataaatagttgttatactgtattattcagtacagatgcaactatagtaggcctaactacattttct

SEQ ID NO: 618387 - DNA, 120 bp, Artificial Sequence
  ENSG00000177426_67 (sequence is synthesized)
atccacagttggttgaatctgcacatacagaacccatggaaacccagggccaactgtgtgtgtgtgtgtgtattcagctaaaatttagggggaaaggattattactaaagatgagtagga

SEQ ID NO: 618388 - DNA, 87 bp, Artificial Sequence
  ENSG00000177426_68 (sequence is synthesized)
aaatttagggggaaaggattattactaaagatgagtaggaatagtgagagatggactcattggactcttatttagatattaaaaatc

SEQ ID NO: 618389 - DNA, 120 bp, Artificial Sequence
  ENSG00000177427_0 (sequence is synthesized)
attcccaggctggtctgagctccggggccgtggtcccgctgcctcctccggtcgtcgtgcggaagctgcgacgcaggcagaccatggcagagttctcccagaaacgggggaagcggcgta

SEQ ID NO: 618390 - DNA, 120 bp, Artificial Sequence
  ENSG00000177427_1 (sequence is synthesized)
gcgacgaagggctgggcagcatggtggacttcctcctggccaatgcccgcctggtgctgggcgtgggcggggctgctgtgctgggcattgccaccctggccgtgaagcggttcattgaca

SEQ ID NO: 618391 - DNA, 120 bp, Artificial Sequence
  ENSG00000177427_2 (sequence is synthesized)
gggccactagcccgcgggatgaggatgacaccaaggcagacagctggaaggaactgagcctgctcaaggccacaccacacctgcagccccggcctccacctgctgcccttagccagccag

SEQ ID NO: 618392 - DNA, 120 bp, Artificial Sequence
  ENSG00000177427_3 (sequence is synthesized)
tgttgcccttggccccctcgtcgtctgccccagaagggcctgcagaaactgatcctgaggtgacaccacagctcagctccccagcaccgctgtgtctgacactgcaggagaggctgctgg

SEQ ID NO: 618393 - DNA, 120 bp, Artificial Sequence
  ENSG00000177427_4 (sequence is synthesized)
ccttcgagcgggaccgtgtgaccatcccagcagcccaggtggctttggccaaacagctggctggcgacatcgccctggagctgcaggcctactttcggagcaagttcccggaactgccct

SEQ ID NO: 618394 - DNA, 120 bp, Artificial Sequence
  ENSG00000177427_5 (sequence is synthesized)
ttggggcattcgtgcctggggggccgctctacgacgggctgcaggcgggggctgcggaccatgtgcgtctcctggtgccactggtgctggagccgggcctgtggagcctggtgccgggcg

SEQ ID NO: 618395 - DNA, 120 bp, Artificial Sequence
  ENSG00000177427_6 (sequence is synthesized)
tggacactgtggcgagggaccctcgctgctgggccgtgcgcaggacgcagcttgagttctgcccccgtgggagcagcccctgggaccgcttcctggtcgggggctacctctcctcccgcg

SEQ ID NO: 618396 - DNA, 120 bp, Artificial Sequence
  ENSG00000177427_7 (sequence is synthesized)
tcctgctggagctactccgcaaggcgctggctgcttctgtcaactggccggccattggcagccttctcgggtgcctgatccggcccagcatggcctcggaggagctgctgctcgaggtgc

SEQ ID NO: 618397 - DNA, 120 bp, Artificial Sequence
  ENSG00000177427_8 (sequence is synthesized)
agcacgaacgcctggagctcactgtggctgtgcttgtggcagtccctggggtcgatgctgacgaccgcctcctcttggcctggcccctggaggggctggcggggaacctctggctgcagg

SEQ ID NO: 618398 - DNA, 120 bp, Artificial Sequence
  ENSG00000177427_9 (sequence is synthesized)
acctgtatccagtggaggctgctaggctgcgagccctggacgaccatgacgctgggactcgccggcggctgctgctgctgctgtgtgctgtctgccgtggttgctcggctctggggcagc

SEQ ID NO: 618399 - DNA, 120 bp, Artificial Sequence
  ENSG00000177427_10 (sequence is synthesized)
taggccggggtcacctgacccaggtggtcctgcgtctgggggaggacaacgtggattggacggaggaggccttgggtgagcgcttcctgcaagccctggagctgctcatcggcagcctgg

SEQ ID NO: 618400 - DNA, 120 bp, Artificial Sequence
  ENSG00000177427_11 (sequence is synthesized)
agcaggccagcctgccctgccacttcaaccccagcgtgaacctcttcagcagcttgcgtgaggaggagattgacgacattggctatgcgctatacagtggcctacaggagcccgaggggc

SEQ ID NO: 618401 - DNA, 120 bp, Artificial Sequence
  ENSG00000177427_12 (sequence is synthesized)
tgctctaggtgggtggaaacgggtggttgccatgttttctaatgctggggagctgcacccacctcccttccagggatttgaatagtggtttttctctagctttttgccagaacaaaggag

SEQ ID NO: 618402 - DNA, 120 bp, Artificial Sequence
  ENSG00000177427_13 (sequence is synthesized)
cttggagtgccagccattcctgcaagcaccgtttcagctcttggggccaaccccaggacctttggctctgtccatcaccagcaaccaatccaccaacagaatgtggtttctgccatcctg

SEQ ID NO: 618403 - DNA, 120 bp, Artificial Sequence
  ENSG00000177427_14 (sequence is synthesized)
ggcagaagctgaaggccagcttcacatttctgctgagagaaggtgacttaacgccttttccggccctagctccaggcgttttgaggcgtctggtgcctgatggtaggtatggtgtgtttg

SEQ ID NO: 618404 - DNA, 120 bp, Artificial Sequence
  ENSG00000177427_15 (sequence is synthesized)
ttctgtcccccaggggctggagtcacctggtgcccctgaaggacagatttttggctgttaaaggatggcattttcctgctgtcttctgtgcgtttagttttcttgctgagcgggagctca

SEQ ID NO: 618405 - DNA, 120 bp, Artificial Sequence
  ENSG00000177427_16 (sequence is synthesized)
gtatgacttgccacccacctgatacctcagggcaaggccctttttccctccagccaggtgagtgttttcttcaggcagctgagggtcctgggggagctgaggctctgtgctgcaccccca

SEQ ID NO: 618406 - DNA, 120 bp, Artificial Sequence
  ENSG00000177427_17 (sequence is synthesized)
gcccacagctggggcatctcactggagctgttccaggccccactggagagcagaggacctgatcccccactagagaggtccggtgtgcacagccggcctcccagtgtgccaaaatgaact

SEQ ID NO: 618407 - DNA, 120 bp, Artificial Sequence
  ENSG00000177427_18 (sequence is synthesized)
gctctcagctgatggctgtattctgactttgaagcctgttaagaggtagcaagggggctagaggagggagattccacctcccctcccaagtgaccctcctcctgcctctggtatccttcc

SEQ ID NO: 618408 - DNA, 120 bp, Artificial Sequence
  ENSG00000177427_19 (sequence is synthesized)
ttttgaaacgaagctcagcttcgaagatgtgaacaagaataaaaggaaaaaattctaatgtatatataactcaggctggataagggagtcttggtgctttcatacgcagctgttgagggt

SEQ ID NO: 618409 - DNA, 120 bp, Artificial Sequence
  ENSG00000177427_20 (sequence is synthesized)
tttctgtaagtcctgtggcttgtcctggcactttggcaagagtgcttgaggtcaattggaggtggtagagtttactttaaaaagtagcatcttggccgggtgtggtggctcgcatctgta

SEQ ID NO: 618410 - DNA, 73 bp, Artificial Sequence
  ENSG00000177427_21 (sequence is synthesized)
tctgtctcaaaaaaataaataaataagcatcttggcccccggtagatcacctgaggttgggaattcaagacca

SEQ ID NO: 618411 - DNA, 67 bp, Artificial Sequence
  ENSG00000177427_22 (sequence is synthesized)
atcacctgaggttgggaattcaagaccaggctgaccaacgtggagaaactccatctctggtaaaaat

SEQ ID NO: 618412 - DNA, 120 bp, Artificial Sequence
  ENSG00000177427_23 (sequence is synthesized)
gtgtcacattcaagagacgcagcccaggctttgccctgactgactgtgtgaccctgcgcgagtccctgcttctctctcggttgtgggctcctcagatatttaatgggggtggtgtttctt

SEQ ID NO: 618413 - DNA, 120 bp, Artificial Sequence
  ENSG00000177427_24 (sequence is synthesized)
tgccctgttcctggagcaaggtggtagcgttgtgatggtggggagctttagatggggaaactgaggtccagaggggcgtgacatacctacctactctgcatgaagctgttgtcgccaggg

SEQ ID NO: 618414 - DNA, 120 bp, Artificial Sequence
  ENSG00000177427_25 (sequence is synthesized)
catgttccccgccccttcactctgcagaagggcctgcagaaactgatcctgaggtgacaccacagctcagctccccagcaccgctgtgtctgacactgcaggagaggctgctggccttcg

SEQ ID NO: 618415 - DNA, 120 bp, Artificial Sequence
  ENSG00000177427_26 (sequence is synthesized)
tggggaggggtggggactgcccaaggccttcatgggagcccagggcacctgcttctccacccagcacgctggtctgctttgccctgggctttgctatgactgcccagatttcatatacac

SEQ ID NO: 618416 - DNA, 120 bp, Artificial Sequence
  ENSG00000177427_27 (sequence is synthesized)
tgatctgtgtgactgtgcttgcagttcattgacagggccactagcccgcgggatgaggatgacaccaaggcagacagctggaaggaactgagcctgctcaaggccacaccacacctgcag

SEQ ID NO: 618417 - DNA, 120 bp, Artificial Sequence
  ENSG00000177427_28 (sequence is synthesized)
gtgatggtggggagctttagatggggaaactgaggtccagaggggcgtgacatacctacctactctgcatgaagctgttgtcgccagggtgttggactctggggcaatgagaactcgtca

SEQ ID NO: 618418 - DNA, 120 bp, Artificial Sequence
  ENSG00000177432_0 (sequence is synthesized)
aagatctctctggaccagctcgggtgcagggcctctgcgggagccctcctagacctctgcggcttctcctctaacatggccgactcggaaaaccaggggcctgcggagcctagccaggcg

SEQ ID NO: 618419 - DNA, 120 bp, Artificial Sequence
  ENSG00000177432_1 (sequence is synthesized)
gcggcagcggcggaggcagcggcagaggaggtaatggcggaaggcggtgcgcagggtggagactgtgacagcgcggctggtgaccctgacagcgcggctggtcagatggctgaggagccc

SEQ ID NO: 618420 - DNA, 120 bp, Artificial Sequence
  ENSG00000177432_2 (sequence is synthesized)
cagacccctgcagagaatgccccaaagccgaaaaatgactttatcgagagcctgcctaattcggtgaaatgccgagtcctggccctcaaaaagctgcagaagcgatgcgataagatagaa

SEQ ID NO: 618421 - DNA, 120 bp, Artificial Sequence
  ENSG00000177432_3 (sequence is synthesized)
gccaaatttgataaggaatttcaggctctggaaaaaaagtataatgacatctataagcccctactcgccaagatccaagagctcaccggcgagatggaggggtgtgcatggaccttggag

SEQ ID NO: 618422 - DNA, 120 bp, Artificial Sequence
  ENSG00000177432_4 (sequence is synthesized)
ggggaggaggaggaggaagaggagtacgaggatgacgaggaggagggggaagacgaggaggaggaggaggctgcggcagaggctgccgcgggggccaaacatgacgatgcccacgccgag

SEQ ID NO: 618423 - DNA, 120 bp, Artificial Sequence
  ENSG00000177432_5 (sequence is synthesized)
atgcctgatgacgccaagaagtaaggggggcagagatggatgaagagaaagcccacgaagaaaaaagcctggttttgtttttcccagaatatcgatggacttaaaaaggctcaggttttt

SEQ ID NO: 618424 - DNA, 120 bp, Artificial Sequence
  ENSG00000177432_6 (sequence is synthesized)
gaccaaaatacaatgtgaatttattctgacattcctaaaatagattaaattaaagcaattagatcctggccagctcgattcaaatttgactttcattttgaacataataaatatatcaaa

SEQ ID NO: 618425 - DNA, 120 bp, Artificial Sequence
  ENSG00000177432_7 (sequence is synthesized)
cattcatcacacagcatacgctacacatggaacacccaagccatgactgaacacgttctcagtgcttaattcttaaatttctttactcatgacatttcgcagtgcagagaaggcagaacc

SEQ ID NO: 618426 - DNA, 120 bp, Artificial Sequence
  ENSG00000177432_8 (sequence is synthesized)
caagaaaaacgtcatctttgagactttgcttttgtaacgcagacatcagctttacacttcacaggagattgatggcattgaggaagattgcaatggagatcatgacactactgttaataa

SEQ ID NO: 618427 - DNA, 120 bp, Artificial Sequence
  ENSG00000177432_9 (sequence is synthesized)
ggccaggaaaactgccatttcaagttctgaaaaatgttttgagtatttgaatttagagaaacaacatggttccaagaaggagggtgtaaaacctgtaaaatactgtcaacatatgtattc

SEQ ID NO: 618428 - DNA, 120 bp, Artificial Sequence
  ENSG00000177432_10 (sequence is synthesized)
attagttacaatctcatgtttgtgttttcttagtactgtctatttacaaacacgtaaaaaataccccaaatatgtttaagtattaaatcactttacctagcgttttagaaatattaattt

SEQ ID NO: 618429 - DNA, 120 bp, Artificial Sequence
  ENSG00000177432_11 (sequence is synthesized)
acttgaagagatgtagaatgtagcaaattatgtaaagcatgtgtatccagcgttatgtactttgcgccttgtgacgtctttctgtcatgtagcttttagggtgtagctgtgaaaatcatc

SEQ ID NO: 618430 - DNA, 120 bp, Artificial Sequence
  ENSG00000177432_12 (sequence is synthesized)
agaactcttcactgaagctaatgtttggaaaaaatatatacttgaagaaccaatccaagtgtgtgcccctacccccagctcagaagtagaaagggtttaagtttgcttgtattagctgtg

SEQ ID NO: 618431 - DNA, 120 bp, Artificial Sequence
  ENSG00000177432_13 (sequence is synthesized)
ccttcattattttgctatgtaaatgtgacatattaattataaaatggtgcataatcaaattttactgcttgaggacagatgcatacagtaaggatttttaggaagaatatatttaatgta

SEQ ID NO: 618432 - DNA, 120 bp, Artificial Sequence
  ENSG00000177432_14 (sequence is synthesized)
aagactcttagcttctgtgtgggttttgaattatgtgtgagccagtgatctataaagaaacataagcttaaagttgtttatcactgtggtgttaataaaacagtattttcaaaaaatata

SEQ ID NO: 618433 - DNA, 120 bp, Artificial Sequence
  ENSG00000177453_0 (sequence is synthesized)
ggggtttgccctgggccgctgccggtcaggtcggccgcccctgacagctccgggagcctcaagcgcgacagcggcgccctcacctcgggacatccacacaccgaccgctcctgctccaga

SEQ ID NO: 618434 - DNA, 120 bp, Artificial Sequence
  ENSG00000177453_1 (sequence is synthesized)
ggcaacaacccagcgcgcctagcctggcgccgtgcagcgaagcccaagagctggcctcgccacgaaggttgaaccagccaaattttcgagacagctcacggcttagaggaaggttcatct

SEQ ID NO: 618435 - DNA, 120 bp, Artificial Sequence
  ENSG00000177453_2 (sequence is synthesized)
aaataaaggccggctaaagtgacattgcagggattaaatccttctttggctgcctgtgtgaccagaaggcttatttgcaagtttcttctttcctggggtccagattattaggtctccagc

SEQ ID NO: 618436 - DNA, 120 bp, Artificial Sequence
  ENSG00000177453_3 (sequence is synthesized)
gccctgcagcttgacagaaagagaagcatgaaatgaaggtcagagatgagatcccgcagcagggacgtgggggcctcccaggggcatttacgcaccagagtgcaagattctctggccatc

SEQ ID NO: 618437 - DNA, 120 bp, Artificial Sequence
  ENSG00000177453_4 (sequence is synthesized)
aagggaaatagcaaacagaagcctttgtcctggggcacagccacctaccacaaagcatcagactccacgtctggccagaaagttcctggagtcccatcaggccagtgggtatgtaacatg

SEQ ID NO: 618438 - DNA, 120 bp, Artificial Sequence
  ENSG00000177453_5 (sequence is synthesized)
tgcctaattgtacagctagagcctgcaagttcaacgtgagggaaggtgggaaatgtcttgagtgaggcgagcagctcctggctgggctgggcagactcagctaccacgttcactgccttc

SEQ ID NO: 618439 - DNA, 120 bp, Artificial Sequence
  ENSG00000177453_6 (sequence is synthesized)
ctctcactaaagccgagagggaggctgctcagctctcaggaaaactcttttgaaccctgggcacctgctgtcctcagttggcatctcccaccctctgagcctcttctgctcctgcacaac

SEQ ID NO: 618440 - DNA, 120 bp, Artificial Sequence
  ENSG00000177453_7 (sequence is synthesized)
ctgcctcttcgctgagatggagacgtgagcccccgtggacgatgactgcagtgtatatgaatggaggtggcctggtgaacccccactatgcccggtgggatcggcgcgacagtgtagaaa

SEQ ID NO: 618441 - DNA, 120 bp, Artificial Sequence
  ENSG00000177453_8 (sequence is synthesized)
gtggctgtcagaccgagagtagcaaggagggtgaggagggacagccccgccagctgacgcccttcgagaaactgacacaggacatgtcccaggatgagaaggtggtgagggagatcacgc

SEQ ID NO: 618442 - DNA, 120 bp, Artificial Sequence
  ENSG00000177453_9 (sequence is synthesized)
gggaaatcggaagtggaaacttctcccaagtgaagcttgggattcactccctaaccaaagaaaaggtggccattaagatcctggacaagaccaagttagaccagaaaacccagaggctac

SEQ ID NO: 618443 - DNA, 120 bp, Artificial Sequence
  ENSG00000177453_10 (sequence is synthesized)
tatcccgagaaatctccagcatggaaaagctgcaccatcccaacatcatccgcctttacgaagtggtggagaccctatccaagctgcacttggtgatggagtatgcagggggtggggagc

SEQ ID NO: 618444 - DNA, 120 bp, Artificial Sequence
  ENSG00000177453_11 (sequence is synthesized)
tcttcggaaaaattagcactgaggggaagctctctgaaccagaaagcaagctcatcttctcccagattgtgtctgccgtgaagcacatgcatgaaaaccaaattattcatagagatctga

SEQ ID NO: 618445 - DNA, 120 bp, Artificial Sequence
  ENSG00000177453_12 (sequence is synthesized)
aagcagaaaatgtattctataccagtaatacttgtgtgaaggtgggcgattttggattcagcacagtaagcaaaaaaggtgaaatgctgaacactttctgtgggtctcctccctacgctg

SEQ ID NO: 618446 - DNA, 120 bp, Artificial Sequence
  ENSG00000177453_13 (sequence is synthesized)
cgcctgaactcttccgggacgagcactacatcggcatttacgtggatatctgggccttgggggtgcttttgtacttcatggtgactggcaccatgccatttcgggcagaaaccgtggcca

SEQ ID NO: 618447 - DNA, 120 bp, Artificial Sequence
  ENSG00000177453_14 (sequence is synthesized)
aactaaaaaagagcatcctcgagggcacatacagtgtaccgccgcacgtgtcagagccctgccaccgactcatccgaggagtccttcagcagatccccacggagaggtacggaatcgact

SEQ ID NO: 618448 - DNA, 120 bp, Artificial Sequence
  ENSG00000177453_15 (sequence is synthesized)
gcatcatgaatgatgaatggatgcaaggggtgccataccctacacctttggaacctttccaactggatcccaaacatttgtcggaaaccagcactctcaaggaagaagaaaatgaggtca

SEQ ID NO: 618449 - DNA, 120 bp, Artificial Sequence
  ENSG00000177453_16 (sequence is synthesized)
aaagcactttagaacatttgggcattacagaagagcatattcgaaataaccaagggagagatgctcgcagctcaatcacaggggtctatagaattattttacatagagtccaaaggaaga

SEQ ID NO: 618450 - DNA, 120 bp, Artificial Sequence
  ENSG00000177453_17 (sequence is synthesized)
aggctttggaaagtgtcccagtcatgatgctaccagaccctaaagaaagagacctcaaaaaagggtcccgtgtctacagagggataagacacacatccaaattttgctcgattttataaa

SEQ ID NO: 618451 - DNA, 120 bp, Artificial Sequence
  ENSG00000177453_18 (sequence is synthesized)
ttgcactagactgcttgtaactaaccaagatgattgttgctgcttctaaatttttttcaaggacaacttgagtggagacatttttgtaatttttaaataaacttaaatttgagatatgca

SEQ ID NO: 618452 - DNA, 120 bp, Artificial Sequence
  ENSG00000177453_19 (sequence is synthesized)
agagccctaaggcaccagaccaaatctggagcgtttgttacaagggcagaagaccggcgtgatctccccacgcgcgccggccggtgctgctggtggagagaactgacatctaacgcatgt

SEQ ID NO: 618453 - DNA, 120 bp, Artificial Sequence
  ENSG00000177453_20 (sequence is synthesized)
ggcccaggagaacaaaaccttccattgcaccccacgccgcgactctccccagcgaaaggtgcttcttttggaagaccgcacgaagtaaggaagagcctcttttcctcttcctggatatcc

SEQ ID NO: 618454 - DNA, 120 bp, Artificial Sequence
  ENSG00000177453_21 (sequence is synthesized)
ctccaggaatattagaagctccaggactccttgatacgaccaggaaaagatcgcaaccgggtctttaaaatatcgattccagccagcttctgcgtgcttgacacatcttggcagatggag

SEQ ID NO: 618455 - DNA, 120 bp, Artificial Sequence
  ENSG00000177453_22 (sequence is synthesized)
aagtcaaggcaatagataacatgggcagcaaagattctgctatagcacttctttcctttctgttttttccttccctccttccctccttttccctcttctccctccctcctttcctcctcc

SEQ ID NO: 618456 - DNA, 120 bp, Artificial Sequence
  ENSG00000177453_23 (sequence is synthesized)
tcctctccccttctcttctcctcctccctccctccctttctccctttctcctctcttttccccttccctcccctgttttcgtcctcctgagtacagtagacaagagggctctctgtctac

SEQ ID NO: 618457 - DNA, 120 bp, Artificial Sequence
  ENSG00000177453_24 (sequence is synthesized)
cccccctcccccaccccattcctcatcccgtttcaaaataagagcgaatgaatcacattctaagctcttacccgtgcagttctgacaagtttggaaattacacaaatcgcgtttgcaatt

SEQ ID NO: 618458 - DNA, 120 bp, Artificial Sequence
  ENSG00000177453_25 (sequence is synthesized)
gaggccgcgggaatccaaaagggaaacaaacgaaaccagatgaaaaaaagtgattccaagtcaagatttcaaatggaaatctaaggttgaaccagccaaattttcgagacagctcacggc

SEQ ID NO: 618459 - DNA, 120 bp, Artificial Sequence
  ENSG00000177453_26 (sequence is synthesized)
gaaaccagcttacaaggtccaggccggcgtccgggtgcactacaggccccccgtccctccttccccacgccagcccctcgctccggattggtccttcaggaaacgctgtggggcgtctcg

SEQ ID NO: 618460 - DNA, 83 bp, Artificial Sequence
  ENSG00000177453_27 (sequence is synthesized)
gagctggcctcgccacgaagagatggggtctcactgtgttgcctaggctggtcttgagctcctggactcaaaccatccacccg

SEQ ID NO: 618461 - DNA, 80 bp, Artificial Sequence
  ENSG00000177453_28 (sequence is synthesized)
tgtgagccaccacaaccagcctattttctttttaaagatggcgtttcactcttgtcgcccactgcctcctgggttcaaac

SEQ ID NO: 618462 - DNA, 120 bp, Artificial Sequence
  ENSG00000177455_0 (sequence is synthesized)
aggcccctgcctgccccagcatcccctgcgcgaagctgggtgccccggagagtctgaccaccatgccacctcctcgcctcctcttcttcctcctcttcctcacccccatggaagtcaggc

SEQ ID NO: 618463 - DNA, 120 bp, Artificial Sequence
  ENSG00000177455_1 (sequence is synthesized)
ccgaggaacctctagtggtgaaggtggaagagggagataacgctgtgctgcagtgcctcaaggggacctcagatggccccactcagcagctgacctggtctcgggagtccccgcttaaac

SEQ ID NO: 618464 - DNA, 120 bp, Artificial Sequence
  ENSG00000177455_2 (sequence is synthesized)
ccttcttaaaactcagcctggggctgccaggcctgggaatccacatgaggcccctggccatctggcttttcatcttcaacgtctctcaacagatggggggcttctacctgtgccagccgg

SEQ ID NO: 618465 - DNA, 120 bp, Artificial Sequence
  ENSG00000177455_3 (sequence is synthesized)
ggcccccctctgagaaggcctggcagcctggctggacagtcaatgtggagggcagcggggagctgttccggtggaatgtttcggacctaggtggcctgggctgtggcctgaagaacaggt

SEQ ID NO: 618466 - DNA, 120 bp, Artificial Sequence
  ENSG00000177455_4 (sequence is synthesized)
cctcagagggccccagctccccttccgggaagctcatgagccccaagctgtatgtgtgggccaaagaccgccctgagatctgggagggagagcctccgtgtctcccaccgagggacagcc

SEQ ID NO: 618467 - DNA, 120 bp, Artificial Sequence
  ENSG00000177455_5 (sequence is synthesized)
tgaaccagagcctcagccaggacctcaccatggcccctggctccacactctggctgtcctgtggggtaccccctgactctgtgtccaggggccccctctcctggacccatgtgcacccca

SEQ ID NO: 618468 - DNA, 120 bp, Artificial Sequence
  ENSG00000177455_6 (sequence is synthesized)
aggggcctaagtcattgctgagcctagagctgaaggacgatcgcccggccagagatatgtgggtaatggagacgggtctgttgttgccccgggccacagctcaagacgctggaaagtatt

SEQ ID NO: 618469 - DNA, 120 bp, Artificial Sequence
  ENSG00000177455_7 (sequence is synthesized)
attgtcaccgtggcaacctgaccatgtcattccacctggagatcactgctcggccagtactatggcactggctgctgaggactggtggctggaaggtctcagctgtgactttggcttatc

SEQ ID NO: 618470 - DNA, 120 bp, Artificial Sequence
  ENSG00000177455_8 (sequence is synthesized)
catcttcaaagagccctggtcctgaggaggaaaagaaagcgaatgactgaccccaccaggagattcttcaaagtgacgcctcccccaggaagcgggccccagaaccagtacgggaacgtg

SEQ ID NO: 618471 - DNA, 120 bp, Artificial Sequence
  ENSG00000177455_9 (sequence is synthesized)
ctgtctctccccacacccacctcaggcctcggacgcgcccagcgttgggccgcaggcctggggggcactgccccgtcttatggaaacccgagcagcgacgtccaggcggatggagccttg

SEQ ID NO: 618472 - DNA, 120 bp, Artificial Sequence
  ENSG00000177455_10 (sequence is synthesized)
gggtcccggagcccgccgggagtgggcccagaagaagaggaaggggagggctatgaggaacctgacagtgaggaggactccgagttctatgagaacgactccaaccttgggcaggaccag

SEQ ID NO: 618473 - DNA, 120 bp, Artificial Sequence
  ENSG00000177455_11 (sequence is synthesized)
ctctcccaggatggcagcggctacgagaaccctgaggatgagcccctgggtcctgaggatgaagactccttctccaacgctgagtcttatgagaacgaggatgaagagctgacccagccg

SEQ ID NO: 618474 - DNA, 120 bp, Artificial Sequence
  ENSG00000177455_12 (sequence is synthesized)
gtcgccaggacaatggacttcctgagccctcatgggtcagcctgggaccccagccgggaagcaacctccctggggtcccagtcctatgaggatatgagaggaatcctgtatgcagccccc

SEQ ID NO: 618475 - DNA, 120 bp, Artificial Sequence
  ENSG00000177455_13 (sequence is synthesized)
cagctccgctccattcggggccagcctggacccaatcatgaggaagatgcagactcttatgagaacatggataatcccgatgggccagacccagcctggggaggagggggccgcatgggc

SEQ ID NO: 618476 - DNA, 120 bp, Artificial Sequence
  ENSG00000177455_14 (sequence is synthesized)
acctggagcaccaggtgatcctcaggtggccagcctggatctcctcaagtccccaagattcacacctgactctgaaatctgaagacctcgagcagatgatgccaacctctggagcaatgt

SEQ ID NO: 618477 - DNA, 90 bp, Artificial Sequence
  ENSG00000177455_15 (sequence is synthesized)
gaagacctcgagcagatgatgccaacctctggagcaatgttgcttaggatgtgtgcatgtgtgtaagccagtgacacttccagtcccctt

SEQ ID NO: 618478 - DNA, 120 bp, Artificial Sequence
  ENSG00000177455_16 (sequence is synthesized)
cctggctggacagtcaatgtggagggcagcggtgagggccgggctggggcaggggcaggaggagagaagggaggccaccatggacagaagaggtccgcggccacaatggagctggagaga

SEQ ID NO: 618479 - DNA, 120 bp, Artificial Sequence
  ENSG00000177455_17 (sequence is synthesized)
ggggctggagggattgagggcgaaactcggagctaggtgggcagactcctggggcttcgtggcttcagtatgagctgcttcctgtccctctacctctcactgtcttctctctctctgcgg

SEQ ID NO: 618480 - DNA, 120 bp, Artificial Sequence
  ENSG00000177455_18 (sequence is synthesized)
gtctttgtctctatttatctctgtctttgagtctctatctctctccctctcctgggtgtctctgcatttggttctgggtctcttcccaggggagctgttccggtggaatgtttcggacct

SEQ ID NO: 618481 - DNA, 120 bp, Artificial Sequence
  ENSG00000177455_19 (sequence is synthesized)
gtgggacctcagagacttaggtgtaattgcagcgctgtgacactcctagaaggggtccctggagttctctctcttctgccacagctgagtcttatgagaacgaggatgaagagctgaccc

SEQ ID NO: 618482 - DNA, 120 bp, Artificial Sequence
  ENSG00000177455_20 (sequence is synthesized)
aggacccagagcctgaagtcgtaatcaagagcagaacttcgccccagaactgaaggcctcggccctagatttagattccgccccagggttcaaggccgggttcctagacccagagtccat

SEQ ID NO: 618483 - DNA, 120 bp, Artificial Sequence
  ENSG00000177455_21 (sequence is synthesized)
tcgcagagcccaaaacatcctcttcccgtgccccgccgcgcggacccttagccttgaccgcccccatctcttctgaccccgtcttacaatgcccctctcaccaggacgcgcccagcgttg

SEQ ID NO: 618484 - DNA, 120 bp, Artificial Sequence
  ENSG00000177455_22 (sequence is synthesized)
tcaactgggaggcatctgtgtgggggtactgggaagaagtggaagccagtcaatcttagattcccccaacccgagggctactcccagcctcaccccaaaccccaacttccacacagaaca

SEQ ID NO: 618485 - DNA, 120 bp, Artificial Sequence
  ENSG00000177459_0 (sequence is synthesized)
agagctggagaaacttccgcggctacgggtgcagttgccttcggttcccggttccgggccgacacccgcgcagggctgagacaggtgtctgcgctccccgcaatgggctgctccagcagc

SEQ ID NO: 618486 - DNA, 120 bp, Artificial Sequence
  ENSG00000177459_1 (sequence is synthesized)
gccctcaacaaggccggcgacagcagcaggttccccagcgtaacttcaaatgagcatttttcaactgcagaagaaagtgagtcctgctttgcccaaccaaagccacatgcactgggaaga

SEQ ID NO: 618487 - DNA, 120 bp, Artificial Sequence
  ENSG00000177459_2 (sequence is synthesized)
gaatctactgttgatggcaatgtacaaagggaaagccgtcctcccttacaaaagctcaaggtttcagcagagcctacagctaatggtgttaaacccctccaagaacagcccctggccaag

SEQ ID NO: 618488 - DNA, 120 bp, Artificial Sequence
  ENSG00000177459_3 (sequence is synthesized)
gacgtagcccctggaagggatgccacagaccaatcagggtccacagaaaagactcagcctggagagggactggaggaatctgggccgcctcaaccaggtggcaaagaggatgccccagca

SEQ ID NO: 618489 - DNA, 120 bp, Artificial Sequence
  ENSG00000177459_4 (sequence is synthesized)
gcagaaggaaagaagaaagatgcaggagcagggacagaggccgagtctctaaaaggaaatgctgaagctcagcctttaggaccagaagccaagggtcagcctttgcaggcagcagtagag

SEQ ID NO: 618490 - DNA, 120 bp, Artificial Sequence
  ENSG00000177459_5 (sequence is synthesized)
aaggactctctcagagcagtggaggtcactgagaatccacaaactgctgcagagatgaagcctctaggaacaactgagaacgttctgactctgcaaatagctggagagctacaacctcag

SEQ ID NO: 618491 - DNA, 120 bp, Artificial Sequence
  ENSG00000177459_6 (sequence is synthesized)
ccagaaatattggaaggaagtcagtttgtggaaacagctgaagagcagcaacttcaggcaacattgggaaaagaggagcagccccagcttctagaaagaattcccaaagagaatgtaaca

SEQ ID NO: 618492 - DNA, 120 bp, Artificial Sequence
  ENSG00000177459_7 (sequence is synthesized)
ccagaagtattggacagaagtcagcttgtggaaaagcctgttatgaatgatccattccataaaactcctgaaggtccaggaaacatggagcagattcaacctgaaggaatagttggaagc

SEQ ID NO: 618493 - DNA, 120 bp, Artificial Sequence
  ENSG00000177459_8 (sequence is synthesized)
atggagcatccagcacgaaatgtagaggcaggagcatatgtggaaatgatcaggaacatccatactaatgaagaggaccaacgcattgaaggtgagacaggggaaaaggtggaaacagac

SEQ ID NO: 618494 - DNA, 120 bp, Artificial Sequence
  ENSG00000177459_9 (sequence is synthesized)
atggagaatgagaaagtgagtgaaggggctgaaaccaaagaagaagaaacaggagaagtggtggacctttcagcagccacatagatagaagagtgaaccgacacagtgtgttatcataga

SEQ ID NO: 618495 - DNA, 120 bp, Artificial Sequence
  ENSG00000177459_10 (sequence is synthesized)
ggagacaaaaatggtagtgaagcttgtggttatgtatcttatctttctacatttacatgttttctgtaaggagtgtggttatagagagactgttggaaccatgagaaggatgtttctgtg

SEQ ID NO: 618496 - DNA, 120 bp, Artificial Sequence
  ENSG00000177459_11 (sequence is synthesized)
ttcttgattatattgttctgcaaaactgctaagccatgaacagttttcttagctacttagaatggttatacatttaaaagtataaaaaccaaagccaataaaaatgatgtgattatttaa

SEQ ID NO: 618497 - DNA, 120 bp, Artificial Sequence
  ENSG00000177462_0 (sequence is synthesized)
atggaaaatgggagctatacctcttatttcattctcctaggactctttaaccacaccagagcccaccaagtcctcttcatgatggttctgagtatcgttttgacctccctgtttggcaat

SEQ ID NO: 618498 - DNA, 120 bp, Artificial Sequence
  ENSG00000177462_1 (sequence is synthesized)
tccctcatgattctcctgattcactgggaccaccggctccacacgcccatgtacttcctcctgagccaactttccctcatggacgtgatgctggtttccaccactgtgcccaaaatggcg

SEQ ID NO: 618499 - DNA, 120 bp, Artificial Sequence
  ENSG00000177462_2 (sequence is synthesized)
gctgactacttgaccggaagtaaggccatctcccgcgctggctgtggtgcgcagatcttcttcctccccacactgggtggtggagagtgcttcctcttagcagccatggcctatgaccgc

SEQ ID NO: 618500 - DNA, 120 bp, Artificial Sequence
  ENSG00000177462_3 (sequence is synthesized)
gggctcctgcaggctgttgctaccctgagcttcccatattgcggtgcacacgagatcgatcacttcttctgcgagacccccgtgctggtgcgtttggcttgtgctgacacttcagtcttc

SEQ ID NO: 618501 - DNA, 120 bp, Artificial Sequence
  ENSG00000177462_4 (sequence is synthesized)
gaaaacgccatgtacatctgctgtgtgttaatgctcctggtccccttttccctcatcctgtcctcctatggtctcatcctcgctgctgttctgcacatgcgctctacagaagcccgcaag

SEQ ID NO: 618502 - DNA, 120 bp, Artificial Sequence
  ENSG00000177462_5 (sequence is synthesized)
aaggcctttgccacctgctcttcacatgtggctgtggtgggactcttttatggagctgccatttttacctatatgagacccaaatcccacaggtccactaaccacgacaaggttgtgtca

SEQ ID NO: 618503 - DNA, 120 bp, Artificial Sequence
  ENSG00000177462_6 (sequence is synthesized)
gccttctatactatgttcacccctttactaaaccccctcatctacagtgtgaagaacagtgaggtgaagggagccctgacaaggtgtatgggtcggtgtgtggccttaagtcgtgaataa

SEQ ID NO: 618504 - DNA, 120 bp, Artificial Sequence
  ENSG00000177462_7 (sequence is synthesized)
cattgcaacaaagtaccttgtacagttaatgaaaatgtgtgtttaccattatactcttacactgcaaagaaataaaaaatatccaagaaggtcagtactgttttcagtctatcacctata

SEQ ID NO: 618505 - DNA, 120 bp, Artificial Sequence
  ENSG00000177462_8 (sequence is synthesized)
aaggaggactaaatgtgttcacaactccaaattaactatgttttcatctgcagactcagcctttccagacctgagaatataagtcaccctctttagaaaggaaaaaaagtcttcttggat

SEQ ID NO: 618506 - DNA, 120 bp, Artificial Sequence
  ENSG00000177463_0 (sequence is synthesized)
aggttctctaatgatcttggttcaccatggctacaaatatggaggggctggttcagcacagagtggggacccagcaggtggctgaggtaacacgtacacagacctctcggccggaatctc

SEQ ID NO: 618507 - DNA, 120 bp, Artificial Sequence
  ENSG00000177463_1 (sequence is synthesized)
cagggatgaccagcccctccccacgcatccagataatctccaccgactctgctgtagcctcacctcagcgcattcagattgtcacagaccagcagacaggacagaaaatccagatagtca

SEQ ID NO: 618508 - DNA, 120 bp, Artificial Sequence
  ENSG00000177463_2 (sequence is synthesized)
ccgcagtggacgcctccggatcccccaaacagcagttcatcctgaccagcccagatggagctggaactgggaaggtgatcctggcttccccagagacatccagcgccaagcaactcatat

SEQ ID NO: 618509 - DNA, 120 bp, Artificial Sequence
  ENSG00000177463_3 (sequence is synthesized)
tcaccacctcagacaacctcgtccctggcaggatccagattgtcacggattctgcctctgtggagcgtttactggggaagacggacgtccagcggccccaggtggtagagtactgtgtgg

SEQ ID NO: 618510 - DNA, 120 bp, Artificial Sequence
  ENSG00000177463_4 (sequence is synthesized)
tctgtggcgacaaagcctccggccgtcactatggggctgtcagttgtgaaggttgcaaaggtttcttcaaaaggagtgtgaggaaaaatttgacctacagctgccggagcaaccaagact

SEQ ID NO: 618511 - DNA, 120 bp, Artificial Sequence
  ENSG00000177463_5 (sequence is synthesized)
gcatcatcaataaacatcaccggaaccgctgtcagttttgccggctgaaaaaatgcttagagatgggcatgaaaatggaatctgtgcagagtgaacggaagcccttcgatgtgcaacggg

SEQ ID NO: 618512 - DNA, 120 bp, Artificial Sequence
  ENSG00000177463_6 (sequence is synthesized)
agaaaccaagcaattgtgctgcttcaactgagaaaatctatatccggaaagacctgagaagtcccctgatagctactcccacgtttgtggcagacaaagatggagcaagacaaacaggtc

SEQ ID NO: 618513 - DNA, 120 bp, Artificial Sequence
  ENSG00000177463_7 (sequence is synthesized)
ttcttgatccagggatgcttgtgaacatccagcagcctttgatacgtgaggatggtacagttctcctggccacggattctaaggctgaaacaagccagggagctctgggcacactggcaa

SEQ ID NO: 618514 - DNA, 120 bp, Artificial Sequence
  ENSG00000177463_8 (sequence is synthesized)
gccaacctaagtgaatctttgaacaacggtgacacttcagaaatccagccagaggaccagtctgcaagtgagataactcgggcatttgataccttagctaaagcacttaataccacagac

SEQ ID NO: 618515 - DNA, 120 bp, Artificial Sequence
  ENSG00000177463_9 (sequence is synthesized)
agctcctcttctccaagcttggcagatgggatagacaccagtggaggagggagcatccacgtcatcagcagagaccagtcgacacccatcattgaggttgaaggccccctcctttcagac

SEQ ID NO: 618516 - DNA, 120 bp, Artificial Sequence
  ENSG00000177463_10 (sequence is synthesized)
acacacgtcacatttaagctaacaatgcccagtccaatgccagagtacctcaacgtgcactacatctgtgagtctgcatcccgtctgcttttcctctcaatgcactgggctcggtcaatc

SEQ ID NO: 618517 - DNA, 120 bp, Artificial Sequence
  ENSG00000177463_11 (sequence is synthesized)
ccagcctttcaggcacttgggcaggactgcaacaccagccttgtgcgggcctgctggaatgagctcttcaccctcggcctggcccagtgtgcccaggtcatgagtctctccaccatcctg

SEQ ID NO: 618518 - DNA, 120 bp, Artificial Sequence
  ENSG00000177463_12 (sequence is synthesized)
gctgccattgtcaaccacctgcagaacagcatccaggaagataaactttctggtgaccggataaagcaagtcatggagcacatctggaagctgcaggagttctgtaacagcatggcgaag

SEQ ID NO: 618519 - DNA, 120 bp, Artificial Sequence
  ENSG00000177463_13 (sequence is synthesized)
ctggatatagatggctatgagtatgcataccttaaagctatagttctctttagccccgatcatccaggtttgaccagcacaagccagattgaaaaattccaagaaaaggcacagatggag

SEQ ID NO: 618520 - DNA, 120 bp, Artificial Sequence
  ENSG00000177463_14 (sequence is synthesized)
ttgcaggactatgttcagaaaacctactcagaagacacctaccgattggcccggatcctcgttcgcctgccggcactcaggctgatgagctccaacataacagaagaacttttttttact

SEQ ID NO: 618521 - DNA, 120 bp, Artificial Sequence
  ENSG00000177463_15 (sequence is synthesized)
ggtctcattggcaatgtttcgatagacagcataatcccctacatcctcaagatggagacagcagagtataatggccagatcaccggagccagtctatagcgcaaaccacacacctgccaa

SEQ ID NO: 618522 - DNA, 120 bp, Artificial Sequence
  ENSG00000177463_16 (sequence is synthesized)
aacattcgccctcctcctaccagcgcgcgggcggcggcggcggcggcaccggggtcacgaactctgacctttcactgacaaaaacaataacaaacccccccttctccgcgaccccggcgg

SEQ ID NO: 618523 - DNA, 120 bp, Artificial Sequence
  ENSG00000177463_17 (sequence is synthesized)
aaaacaataacaaacccccccttctccgcgaccccggcggcgcccccgggcccgtccccgccaccccgctcccacctcggcgtctcgtctctcgcccgctgccccgcgagcccgcggccc

SEQ ID NO: 618524 - DNA, 120 bp, Artificial Sequence
  ENSG00000177463_18 (sequence is synthesized)
ttagccatttcctgtctggtttctccttatctgttaatcccagacaatagcaattaaaagactagtaggatcctttcctgacataagaaatgttttaatgccttttgatgaagcagcaga

SEQ ID NO: 618525 - DNA, 120 bp, Artificial Sequence
  ENSG00000177463_19 (sequence is synthesized)
ttttggaacaatcttttaactcaatttgtatttagaaattctcaaagggcaaaaaacaaaaaaaaaggttttataatgtcagagactagtattaaagaaaactgaaagaacctgagagaa

SEQ ID NO: 618526 - DNA, 120 bp, Artificial Sequence
  ENSG00000177463_20 (sequence is synthesized)
gcacggggcagaagagaaacagaactcacagcgcactcagcctcaaaaagttgtaatttgggacttgcttttagtggcagaaacattttaataataaaatagatatacttgtttacataa

SEQ ID NO: 618527 - DNA, 120 bp, Artificial Sequence
  ENSG00000177463_21 (sequence is synthesized)
tcaatgtgtaacgttagcaacatcttgcctgtgggcagggcaaatggaaaactgtgtatgtcttttgccgaaatgctaatgatttctgtgaaaactcactagggtacaggagacaatcat

SEQ ID NO: 618528 - DNA, 120 bp, Artificial Sequence
  ENSG00000177463_22 (sequence is synthesized)
ttatgtttaagaaaagaaggcatcattcctaattgtgtgcacatgttgtggagttgagctgaattctgtgaatggaaacgtggctcatttgcatcatgcagtaagtgggagtgtggtagc

SEQ ID NO: 618529 - DNA, 120 bp, Artificial Sequence
  ENSG00000177463_23 (sequence is synthesized)
acagtcggtggtgacccagttcagaagcttctagccatagagcagacacttgtcaggttccctgactacttggtcctggtctctgatgggcatctgcagactcctctagaacctggggtt

SEQ ID NO: 618530 - DNA, 120 bp, Artificial Sequence
  ENSG00000177463_24 (sequence is synthesized)
ctcctttgatgactggttatctgaattggattgcaactagtcagacattaactgccaaatgagatgtacagttcctccagcaagtgaaaacatccccaagtcacatccgccgctcgtggc

SEQ ID NO: 618531 - DNA, 120 bp, Artificial Sequence
  ENSG00000177463_25 (sequence is synthesized)
agatggagccttgtgaccaaaaagtgcaaggtgggcattttgagctcttgacagtacttccaatacaattgggggtgcttgtgtgtttgtccagatggaggagtgtggccttggagtgtg

SEQ ID NO: 618532 - DNA, 120 bp, Artificial Sequence
  ENSG00000177463_26 (sequence is synthesized)
agcgttaccttcccagggctttccactccaaatgcccccttgaaaagggctcgtgtttctgcagctccatcataactgtgaggctggattggggctgggcaggagcctgctgccgcctgg

SEQ ID NO: 618533 - DNA, 120 bp, Artificial Sequence
  ENSG00000177463_27 (sequence is synthesized)
cgagagtggttagggcctggtaaagctggatggaaggtttcaggacaatttcttcctgttgaccttaaataccagagattttaaaaatgtgtatagactcagcatctctgttggcaagtc

SEQ ID NO: 618534 - DNA, 120 bp, Artificial Sequence
  ENSG00000177463_28 (sequence is synthesized)
tgttaatgttaccagcacactgtgcactttggttcccccaggtgtgtgccagccgaccaccccggagcattttaaatgcaggctgcttgctccttaaaaacaaccctcaatttccagggt

SEQ ID NO: 618535 - DNA, 120 bp, Artificial Sequence
  ENSG00000177463_29 (sequence is synthesized)
gatagtctttctcctcataaattgtagcaaccagagtttacagcaagaacagtatgcgcttaaaaggaagttatgtctaacttcaaacacccgtaaattcccacggatgtgaatatatag

SEQ ID NO: 618536 - DNA, 120 bp, Artificial Sequence
  ENSG00000177463_30 (sequence is synthesized)
caagcttttcctgtttgagaacagtggcatgtggaagacccggtcaattgctttgtcttttgctttttaaatagtccagattaagaaaatacaccctgttgggttaaatttgcctctctt

SEQ ID NO: 618537 - DNA, 120 bp, Artificial Sequence
  ENSG00000177463_31 (sequence is synthesized)
gatttgttaatcagatgatatccaaaaagatccctggacactcccctgactcacaggtgctctgatctggctcaggctggcgccacatgtgctccacaggggtgcagtctggccagctac

SEQ ID NO: 618538 - DNA, 120 bp, Artificial Sequence
  ENSG00000177463_32 (sequence is synthesized)
agacgcccctgtggtgccacattggacagaatggaagctgctgcaggctcaaggcagaacaggatgcttgatcctgaagggttagcagcactttacgcaagtcagtgttagtagggtaag

SEQ ID NO: 618539 - DNA, 120 bp, Artificial Sequence
  ENSG00000177463_33 (sequence is synthesized)
tgggaacagtgtttccaacttctaaattcttgtttggatttaattatatcattttataattcttgccttggcagcaaattttggagagtagtgggagtggccattataaaatgatggaaa

SEQ ID NO: 618540 - DNA, 120 bp, Artificial Sequence
  ENSG00000177463_34 (sequence is synthesized)
ggatttaattttgccagcttaaagtaatttttacttttctaaccctgatgtgttttcagtttcaaaattaagacaaaaaaccagctgagacaatggaattagggcaggtttgtttcattt

SEQ ID NO: 618541 - DNA, 120 bp, Artificial Sequence
  ENSG00000177463_35 (sequence is synthesized)
tccgtcgttttgatccttgagagtgaccatgagggccatgttgcagttccctgggaatacaagcataacagctttcagatcccagttcttggtgttggtgaaaaggtctccaccagcccc

SEQ ID NO: 618542 - DNA, 120 bp, Artificial Sequence
  ENSG00000177463_36 (sequence is synthesized)
tcctctcattcccaggtcattcagtggcagccagtaggctgcttagactcaggctggataaggaagtgttgggctgtggtgaaacaaccttgcagaaaacgtgattttgcttggaaaggt

SEQ ID NO: 618543 - DNA, 120 bp, Artificial Sequence
  ENSG00000177463_37 (sequence is synthesized)
gctgattctaacctggtcctgctctttaagtccccttgctggtgatggctgattccagggactgttttgggctttgaacacctcttggttggtttctgagatcctcttggccttactttg

SEQ ID NO: 618544 - DNA, 120 bp, Artificial Sequence
  ENSG00000177463_38 (sequence is synthesized)
aagtggccttttctttaaggatcatgtccacgtaacctgtattcttgctgctttaactcatttcaagcctctgactgcaggtccatttcatctcctgtcaggttggttaagtaaagtcag

SEQ ID NO: 618545 - DNA, 120 bp, Artificial Sequence
  ENSG00000177463_39 (sequence is synthesized)
cccaaagtcaagaattacttaaagagatgcaaaccaaatatttgggctccaactttcacagggcttatagcccttattagcagtttgtgaaactttgggtttcatgaagtgagacctgtc

SEQ ID NO: 618546 - DNA, 120 bp, Artificial Sequence
  ENSG00000177463_40 (sequence is synthesized)
ctctggctactgaactccatggagccacgttcatgctccctcttctactggcctggctgctcctccctcaatgaggagaggcagctggctcagagaggtgggacagacacatgctgtcat

SEQ ID NO: 618547 - DNA, 120 bp, Artificial Sequence
  ENSG00000177463_41 (sequence is synthesized)
cagttaagtgagctcttttccagaagtatctcagataatgttgggttaagacagatagatgttgaaaatggtggagatcattacacattagcataaaacaggacaggaagagattttttg

SEQ ID NO: 618548 - DNA, 120 bp, Artificial Sequence
  ENSG00000177463_42 (sequence is synthesized)
aaagaccaaattagttgagcaagtaatacttttcaagttactcctggaaggtgtttttaaggaagtgtgttacctaccatactctcctaatttgacatttctgtgtcctgaggagttaca

SEQ ID NO: 618549 - DNA, 120 bp, Artificial Sequence
  ENSG00000177463_43 (sequence is synthesized)
tttattgtctaacccttgccataaggctgtggtttgaggttcttttgctgttctgggctttatatttaatttcaggtgtagtcacttctaagatgtgtaattgccctcaagagggactga

SEQ ID NO: 618550 - DNA, 120 bp, Artificial Sequence
  ENSG00000177463_44 (sequence is synthesized)
tttttagcttgtcattgtcagtattgaatgtggactcttctgaggcagttaggacaccagccatggtgttaacagtggatgcgttaggctccttaatctcaaggcaatatccacgctaca

SEQ ID NO: 618551 - DNA, 120 bp, Artificial Sequence
  ENSG00000177463_45 (sequence is synthesized)
cacatacttattagctgtcttacttgtttgggggatagttacggcaaggagcaaaaaattctaaggactctagctgtttctagtgcttttactttcatagtcctttgaggacatttcctg

SEQ ID NO: 618552 - DNA, 120 bp, Artificial Sequence
  ENSG00000177463_46 (sequence is synthesized)
cagagcactcttgctcacagcccgccctctgcagggcttccagcccctggccgcaatcagcagttcatgccacatgtgtacatccatgttctgggacctgatctcattggagtccagaag

SEQ ID NO: 618553 - DNA, 120 bp, Artificial Sequence
  ENSG00000177463_47 (sequence is synthesized)
cttgttgcccactttccagtgtaaatgactttatgtgcaatggggtcataggtaacattttaactcttttcttagtccaggtcataggaagtctcatcatctgacagccacttttctccc

SEQ ID NO: 618554 - DNA, 120 bp, Artificial Sequence
  ENSG00000177463_48 (sequence is synthesized)
agggaaggcggtgcccactgggccctgggaatgcctgagccagcagagcagatgccccacgtgcttcctttatccagcttccattctctcagttatgaggctctttgaaaatgtcttaac

SEQ ID NO: 618555 - DNA, 120 bp, Artificial Sequence
  ENSG00000177463_49 (sequence is synthesized)
tttgatgtaaatttttaaagccaacccctcatcaagacagggttggtttgggtcttttgtacacagggtctggaccttctcattgtgtgcctcccaccagcgtgcacttcgtatgtccag

SEQ ID NO: 618556 - DNA, 120 bp, Artificial Sequence
  ENSG00000177463_50 (sequence is synthesized)
ccctgggtcccttcagcagcattgtgcgtgtacaggtttctaggctgtaagactgaatgaatgtacatgtgtttatatcctctccatatgtacagtgtatatagtgtgtgtatgtgtaca

SEQ ID NO: 618557 - DNA, 120 bp, Artificial Sequence
  ENSG00000177463_51 (sequence is synthesized)
tagatgtatattatgtatacagacatgtatccaaactttcctttaaagagagtttttcataaagttgctaatgtaaactgatatgggtgttccaaggtccctcggcagggaagatttgct

SEQ ID NO: 618558 - DNA, 120 bp, Artificial Sequence
  ENSG00000177463_52 (sequence is synthesized)
ggtgattttcttcactccattttcctttgggtgagcctgcctgggaagggccatgaagtcagaatctccactctgcaaaaggaagaattccaggcagaagaggttctgacagggtgacat

SEQ ID NO: 618559 - DNA, 120 bp, Artificial Sequence
  ENSG00000177463_53 (sequence is synthesized)
ttccgtatattctctaggttcggacaagagccaggaagctggaagacagtttatcttaatatccaaaactaagtgggaatttttaaccttttcatgcacctattcatggccctacctgga

SEQ ID NO: 618560 - DNA, 120 bp, Artificial Sequence
  ENSG00000177463_54 (sequence is synthesized)
aggaacttggcagttgggttgagccatcagccttcccagctattcagctctgttgagtagcccagagacaggcgtcacggtcagagattcagaacggtctgtgtcagtgaggcctgactc

SEQ ID NO: 618561 - DNA, 120 bp, Artificial Sequence
  ENSG00000177463_55 (sequence is synthesized)
ccaaagatggtagcaatttcccaggcttgcgctgtgctcagtcagcaagatgtggggcactgtcctatgactgaataaatagtaattcccatctttctatcgccagttaaaaataaacaa

SEQ ID NO: 618562 - DNA, 120 bp, Artificial Sequence
  ENSG00000177463_56 (sequence is synthesized)
cctaccaagtattattctttaaaactaagcatggatgttgatggctaacttctgcggcatataagctacagatctcaagttacttctctaactgtaagcatgtaaatgactttaactcct

SEQ ID NO: 618563 - DNA, 120 bp, Artificial Sequence
  ENSG00000177463_57 (sequence is synthesized)
ttctataagttatgattttaaattttcagataagaattgcattttaatatggatatgtgtgcccttaaaagctacagataccaaattttcctcgtccaggtctactcggacgaattttcc

SEQ ID NO: 618564 - DNA, 120 bp, Artificial Sequence
  ENSG00000177463_58 (sequence is synthesized)
cccttaatctggccttaaactgagactcggcccttgagagccagggcctggcccagcagtagttgctcatagacctgggaagcaggggcctgctggaaggaatcactagattgctgcaaa

SEQ ID NO: 618565 - DNA, 120 bp, Artificial Sequence
  ENSG00000177463_59 (sequence is synthesized)
aactcacataatccacagtttcctctttttctttttaaaataagttatcaaaatgttttaaaaacactttatgagaccatagtactcagtgccttttgtgagacagtgggtcatttagcc

SEQ ID NO: 618566 - DNA, 120 bp, Artificial Sequence
  ENSG00000177463_60 (sequence is synthesized)
ttcagcttccctgtttttgatgtagagaaagcttctatttcactggcctcatcccacaagattgtgcgacctttccccgtcatagcctgtcgtgacaatcacgctattgaaagtggcttt

SEQ ID NO: 618567 - DNA, 120 bp, Artificial Sequence
  ENSG00000177463_61 (sequence is synthesized)
ctagttaaaatgcaattggaaacttgacagtctctaaatgaattaaaagtttcctttggggctatttagcttaacagcagtctacaaataattaaagtgtgagcttaagaaaagtatctt

SEQ ID NO: 618568 - DNA, 120 bp, Artificial Sequence
  ENSG00000177463_62 (sequence is synthesized)
tgcggggagaaaaatgtcagatatttttaatgcccagctataaataattttggtgtcttgatatttatacatgcaaaatagaaaaaaaatgttcaacatttattgattgatagactgtta

SEQ ID NO: 618569 - DNA, 120 bp, Artificial Sequence
  ENSG00000177463_63 (sequence is synthesized)
aaatttaatgtttggaataacatttggaagtagtagactttgcattaaaaaatggcttttctttaggaaagtataatcaattattttaatgaccatagcattcatggactcaaatgctgc

SEQ ID NO: 618570 - DNA, 120 bp, Artificial Sequence
  ENSG00000177463_64 (sequence is synthesized)
tgccacacacaactcaagtgctggaatatttttctacagtctctctgttctacggattatcttgtaaaccagtgttcaactagttttataactgaaaagctgcacatttttcacagtaca

SEQ ID NO: 618571 - DNA, 120 bp, Artificial Sequence
  ENSG00000177463_65 (sequence is synthesized)
agccgtagtttttacctgtagtttggacttctctgttagaatgtaactgcattaccagcccttttaaaggcatctatctatcaaaggaaaatttgggtgttagattttcttgggaccgtt

SEQ ID NO: 618572 - DNA, 120 bp, Artificial Sequence
  ENSG00000177463_66 (sequence is synthesized)
tctgtaacctttgcccttcacaatatagaaaatattggttttgccattacattttaatgccaggtttaaaacctgttgaaagctgcagctttatacagctttcttctccctgtgaaatca

SEQ ID NO: 618573 - DNA, 120 bp, Artificial Sequence
  ENSG00000177463_67 (sequence is synthesized)
ctttgtttatgtgatggcatttaaaaaatagcatgttctttttaaactgaattttatatctaatcaatgtcttcagtcttgaagaagaatttgcattgttgtgtttgtatatagagtatt

SEQ ID NO: 618574 - DNA, 120 bp, Artificial Sequence
  ENSG00000177463_68 (sequence is synthesized)
gcagtgcatgaattagctttatgcattttattaaatgctgtttcaatgtggcattattgttgtggcttaatactactacctaaatgaggtttatactattaaaagtgaattaaagactaa

SEQ ID NO: 618575 - DNA, 120 bp, Artificial Sequence
  ENSG00000177463_69 (sequence is synthesized)
ataaaacatatgcaaagcacccacaggaagctactttcagaaactgttttccaattttactttgaagtaattatacatttaaaataatttactatgaaggaagtacagtgctattacaga

SEQ ID NO: 618576 - DNA, 120 bp, Artificial Sequence
  ENSG00000177463_70 (sequence is synthesized)
gctcccacatagccttcgcccaggtcctcccagtggttatgtcatacatacctacggtacagtatcacaacgaggacattggctttggtacaaaccatatgtattgttctgtctttttta

SEQ ID NO: 618577 - DNA, 120 bp, Artificial Sequence
  ENSG00000177463_71 (sequence is synthesized)
tatttcactcttcttcaacttcatttccttcaacatacctttctgttaatgaggatcttacagtagctgcacagtattctatgtgtctgttgtgatttaatcatttctgtttatgacctt

SEQ ID NO: 618578 - DNA, 120 bp, Artificial Sequence
  ENSG00000177463_72 (sequence is synthesized)
gtttatgaccttttctactgattctagtttttcattttgtaatcaagacataaccttgtgtgtacatatcttggtttgagtatatctctggctttcttttctttttctttttcttttttt

SEQ ID NO: 618579 - DNA, 120 bp, Artificial Sequence
  ENSG00000177463_73 (sequence is synthesized)
ctggagtacagtggtatgatcttggctcattgcaacctgcacctcccaggctcaagcaatcttcttacctcagccttccgagtagctgggactgtaggtgcacagcaccacgcctggcta

SEQ ID NO: 618580 - DNA, 89 bp, Artificial Sequence
  ENSG00000177463_74 (sequence is synthesized)
ttcgtattttttttgtagagacggtgtttcagactcaagcaattcacccaccttagtccctgcagagtgctgagattacaggcgtgagc

SEQ ID NO: 618581 - DNA, 120 bp, Artificial Sequence
  ENSG00000177463_75 (sequence is synthesized)
agtgctgagattacaggcgtgagccactacccctggctttcttttttaattgaaatataattcacatgccataaaactcacccttttagtgtataatgtagtggtttttggtatatttac

SEQ ID NO: 618582 - DNA, 120 bp, Artificial Sequence
  ENSG00000177463_76 (sequence is synthesized)
aaggttgtacaaaccatccccactatctagttttagaatattttcgtcacctcagaataaaccccaaaccctattatgtagtcactcctcctttccccctcttctcaaaccctaccaacc

SEQ ID NO: 618583 - DNA, 120 bp, Artificial Sequence
  ENSG00000177463_77 (sequence is synthesized)
actaatctgctttctgactctatggttttgtcaactctgtacatttcatataaaggaaatcatacaatatatggtcttttgtggctggcttctttcacttagcatgatgtttctaagggt

SEQ ID NO: 618584 - DNA, 120 bp, Artificial Sequence
  ENSG00000177463_78 (sequence is synthesized)
catcatgatatagcatgtatcagtacttcattcctttttattgccaaataatgcacctctgtttttttttaaagacaagagtttcgctcttgtttccttggctagagtgcagtggtgcca

SEQ ID NO: 618585 - DNA, 65 bp, Artificial Sequence
  ENSG00000177463_79 (sequence is synthesized)
gtttcgctcttgtttccttggctagagtgcagtggtgccacctcggctcactgcaacttctgcct

SEQ ID NO: 618586 - DNA, 68 bp, Artificial Sequence
  ENSG00000177463_80 (sequence is synthesized)
tacccagctaattttgtcgtgcgatctcggcttactgcagcctccgcctcccgagttcaagcgattct

SEQ ID NO: 618587 - DNA, 120 bp, Artificial Sequence
  ENSG00000177463_81 (sequence is synthesized)
aggacctaagtaactgataccatctcttgggacagtcagtccaggatgctgaggcttttgaaggctgtaggtaatgatggtttggccatacctattaacatttttttattatttaaagaa

SEQ ID NO: 618588 - DNA, 120 bp, Artificial Sequence
  ENSG00000177463_82 (sequence is synthesized)
tgttttttaagagaatagttgatcattagaaggattttagttaaaacattcatagacttattcatagacttcatccttttcttgaagaatgatcctggatagcacttcaataaacacttg

SEQ ID NO: 618589 - DNA, 120 bp, Artificial Sequence
  ENSG00000177463_83 (sequence is synthesized)
ccgcgccctgccctccgcgccgggggccgcccgccgcagacacgggacccgcttcgaggccgctttggcgccaaatcctgaggaccgcctatggctgcggtagcagtgagagaagctctc

SEQ ID NO: 618590 - DNA, 120 bp, Artificial Sequence
  ENSG00000177463_84 (sequence is synthesized)
ctccttgttcatttttaagcagcttccaaagctgctgttgatgatgcctgatgctgctttgaaggcagaaaaccaacagtgagatcaagaattgtaacacgtacacagacctctcggccg

SEQ ID NO: 618591 - DNA, 120 bp, Artificial Sequence
  ENSG00000177463_85 (sequence is synthesized)
ggagaggccggcgcctggtcttgggtcagcaggtgggctgcttccctccgcctggaacgcgtctcgaatgagtactgaggaacaatagtaataaaggtaacacgtacacagacctctcgg

SEQ ID NO: 618592 - DNA, 120 bp, Artificial Sequence
  ENSG00000177463_86 (sequence is synthesized)
ctgatgtttctgaacgtgaacatgttgtcatcattggtgtagaaagagccctgcagattgtatgtgacctagtgttcttatgataggtgttttgctagataaatacataaacgcttttaa

SEQ ID NO: 618593 - DNA, 120 bp, Artificial Sequence
  ENSG00000177463_87 (sequence is synthesized)
attcttgcctttacagccccaaagaaatatgctgcagtgcctgatgatgtcacgcactgaatagatttaatctgtgtcctaattaaaccattggccaaacaagactacaccatacaaaag

SEQ ID NO: 618594 - DNA, 120 bp, Artificial Sequence
  ENSG00000177463_88 (sequence is synthesized)
tgtgctgccacccgatgtcctttcttttttttccggccctttgccagtttccaagttttgttagcgcatataatccagtacacattgaagttccacttgtttgcccacagactgtgtata

SEQ ID NO: 618595 - DNA, 120 bp, Artificial Sequence
  ENSG00000177463_89 (sequence is synthesized)
gcactgcagagcatgctaaaaggtatgttcgcaggagatgaagaggcagcaatcacgatgcctgggctggcctcactccccttattaactgttctctcaagtcctctggaaaagtcactt

SEQ ID NO: 618596 - DNA, 120 bp, Artificial Sequence
  ENSG00000177463_90 (sequence is synthesized)
aggctaattgttcacctcacagtaaggggttggacacagcttaacctttttgtcttccttcccagcccttcactcacaaacaacaaaatagctaataaaattgggacaaattatataatt

SEQ ID NO: 618597 - DNA, 120 bp, Artificial Sequence
  ENSG00000177463_91 (sequence is synthesized)
atttagaaagtaaatgacaatttgtaattttatgtgatagtttttaaaactatgtgttttctagggtagtaggaagccagatgtccagaaccaatcatgtggggctgttcagactgggat

SEQ ID NO: 618598 - DNA, 120 bp, Artificial Sequence
  ENSG00000177463_92 (sequence is synthesized)
ccactcagggtccccgacccgctcccaggaacttcaggcctgggcagaaaacagaggaaaagccagtgttctaataatacccaaactagatcagtctttgagttcaatttgttgtactta

SEQ ID NO: 618599 - DNA, 120 bp, Artificial Sequence
  ENSG00000177463_93 (sequence is synthesized)
agaagtttgcagaagtttgactaaaagtactaagaagtctacaagtgagacttttcaaatacagagggaactgggggggggtacttttctgttttcagatcatccaggtttgaccagcac

SEQ ID NO: 618600 - DNA, 120 bp, Artificial Sequence
  ENSG00000177463_94 (sequence is synthesized)
gtcaaaccaaacaactcactcattcttccccaagatttttctgatgtgctccatgatctccttattgctcttggtctccacatccaccaggacctgctccccagaatctggaaacggaaa

SEQ ID NO: 618601 - DNA, 120 bp, Artificial Sequence
  ENSG00000177464_0 (sequence is synthesized)
gctgttctgccccgcgggggcatccgctgggtccccgcgccgttgtcaagaccggggacctggacgcagcggagagaggtgccgccgcccgccccgtccagtcgccgcgcgcaggcactg

SEQ ID NO: 618602 - DNA, 120 bp, Artificial Sequence
  ENSG00000177464_1 (sequence is synthesized)
actgcagtcagcggtgaactgacttcatcccaatccctcagcccccaccaggaccagtctggagtccctcccctgcccccattgaaatttcccttccgtccccaaacttacctctgatct

SEQ ID NO: 618603 - DNA, 120 bp, Artificial Sequence
  ENSG00000177464_2 (sequence is synthesized)
agaccttactcacctccttcctgtttcctaagactccttcctgccgtccacagaccgagccttttatctttgtccaccctgtgccagacacctccttttccagaaccttctccttactgg

SEQ ID NO: 618604 - DNA, 120 bp, Artificial Sequence
  ENSG00000177464_3 (sequence is synthesized)
tgaccttacttatctctgttgctttctggggtcctaggaaatgccagcactcccacccacattgcctgaactttccaacactccctaactgcgctgtgtcctatctcaacactttctcat

SEQ ID NO: 618605 - DNA, 120 bp, Artificial Sequence
  ENSG00000177464_4 (sequence is synthesized)
gtatttcttgtgtcttctagaacattcccccgccattattacttcaatatggctacacatacttcctaattgccctgcaaaccatctccttctcaccattgcccagcgatgctttcgtct

SEQ ID NO: 618606 - DNA, 120 bp, Artificial Sequence
  ENSG00000177464_5 (sequence is synthesized)
cctccataaacactcccggagaccaatttttgtgtcacccccatactccctcgttgacacactgactccatacataacctccttgaaaaacctctttattaatctcaccatcctccagac

SEQ ID NO: 618607 - DNA, 120 bp, Artificial Sequence
  ENSG00000177464_6 (sequence is synthesized)
ttccctcctgtcataattccatccctcctccaacttttccctctcaagctctgcccttcccagcccagcccagcctacccaacctcatctcttccctgtagaccacatcccaccatgttc

SEQ ID NO: 618608 - DNA, 120 bp, Artificial Sequence
  ENSG00000177464_7 (sequence is synthesized)
ccctgagcctccaaggaaggggctcagggggccccatggcctcccgctccctgtggccccacagcccccgtgggccaggggaagcgccccagaagccgaagtgcccaccatgggcaacca

SEQ ID NO: 618609 - DNA, 120 bp, Artificial Sequence
  ENSG00000177464_8 (sequence is synthesized)
cacgtgggagggctgccacgtggactcgcgcgtggaccacctctttccgccatccctctacatctttgtcatcggcgtggggctgcccaccaactgcctggctctgtgggcggcctaccg

SEQ ID NO: 618610 - DNA, 120 bp, Artificial Sequence
  ENSG00000177464_9 (sequence is synthesized)
ccaggtgcaacagcgcaacgagctgggcgtctacctgatgaacctcagcatcgccgacctgctgtacatctgcacgctgccgctgtgggtggactacttcctgcaccacgacaactggat

SEQ ID NO: 618611 - DNA, 120 bp, Artificial Sequence
  ENSG00000177464_10 (sequence is synthesized)
ccacggccccgggtcctgcaagctctttgggttcatcttctacaccaatatctacatcagcatcgccttcctgtgctgcatctcggtggaccgctacctggctgtggcccacccactccg

SEQ ID NO: 618612 - DNA, 120 bp, Artificial Sequence
  ENSG00000177464_11 (sequence is synthesized)
cttcgcccgcctgcgccgcgtcaagaccgccgtggccgtgagctccgtggtctgggccacggagctgggcgccaactcggcgcccctgttccatgacgagctcttccgagaccgctacaa

SEQ ID NO: 618613 - DNA, 120 bp, Artificial Sequence
  ENSG00000177464_12 (sequence is synthesized)
aacctctatcgggtgttcgtgggcttcctcttcccgtgggcgctcatgctgctgtcgtaccggggcatcctgcgggccgtgcggggcagcgtgtccaccgagcgccaggagaaggccaag

SEQ ID NO: 618614 - DNA, 120 bp, Artificial Sequence
  ENSG00000177464_13 (sequence is synthesized)
atcaagcggctggccctcagcctcatcgccatcgtgctggtctgctttgcgccctatcacgtgctcttgctgtcccgcagcgccatctacctgggccgcccctgggactgcggcttcgag

SEQ ID NO: 618615 - DNA, 120 bp, Artificial Sequence
  ENSG00000177464_14 (sequence is synthesized)
gagcgcgtcttttctgcataccacagctcactggctttcaccagcctcaactgtgtggcggaccccatcctctactgcctggtcaacgagggcgcccgcagcgatgtggccaaggccctg

SEQ ID NO: 618616 - DNA, 120 bp, Artificial Sequence
  ENSG00000177464_15 (sequence is synthesized)
cacaacctgctccgctttctggccagcgacaagccccaggagatggccaatgcctcgctcaccctggagaccccactcacctccaagaggaacagcacagccaaagccatgactggcagc

SEQ ID NO: 618617 - DNA, 120 bp, Artificial Sequence
  ENSG00000177464_16 (sequence is synthesized)
tgggcggccactccgccctcccagggggaccaggtgcagctgaagatgctgccgccagcacaatgaaccccgagtggcacagaatccccagttttcccctctcatcccacagtcccttct

SEQ ID NO: 618618 - DNA, 120 bp, Artificial Sequence
  ENSG00000177464_17 (sequence is synthesized)
ctcctggtctggtgtatgcaaattgtatggaaaaagggctgtgttaatattcataagaatacaagaacttaggaagagtgaggttggtgtgtcactggtcaacctttgtgctcccagatc

SEQ ID NO: 618619 - DNA, 120 bp, Artificial Sequence
  ENSG00000177464_18 (sequence is synthesized)
cactggtcaacctttgtgctcccagatcccatcacagtttggcgattgtggagggcctcctgaaggaggagatgagtaaatatatttttttggagacagggtctcactgtgttgcccagg

SEQ ID NO: 618620 - DNA, 89 bp, Artificial Sequence
  ENSG00000177464_19 (sequence is synthesized)
gctcactgcagcctccacctcctgggctctccagcgatcttcccacatcagcctcccgagtagctgggaccacaaatgtgatgtagaaa

SEQ ID NO: 618621 - DNA, 84 bp, Artificial Sequence
  ENSG00000177464_20 (sequence is synthesized)
cagattagagatgtgagccgccatgtctggccagataaattaagtcaaacatttggtttccagaaaataaagacaaatagagaa

SEQ ID NO: 618622 - DNA, 120 bp, Artificial Sequence
  ENSG00000177464_21 (sequence is synthesized)
tcaaacatttggtttccagaaaataaagacaaatagagaaggttagatttttttttttccaacaagtggataaaagtctgtgactcgggggaaagtggaaggagaaatgcagccgatata

SEQ ID NO: 618623 - DNA, 120 bp, Artificial Sequence
  ENSG00000177464_22 (sequence is synthesized)
gagtcattatgtttgcaaagcccctggtcatacaggccagggaacataagaccgcaattctaagtttctagataaacagcgatctccaagtcaagactgaggatgaagagggagaatgtc

SEQ ID NO: 618624 - DNA, 120 bp, Artificial Sequence
  ENSG00000177464_23 (sequence is synthesized)
agaactcaagtgaagggcaatcagggcagactgcctggaggagtgatgccagaaggtttgggaagaaggtgtgggacaagaagaaagggtatttattcattcattcaacagaggtttatg

SEQ ID NO: 618625 - DNA, 120 bp, Artificial Sequence
  ENSG00000177464_24 (sequence is synthesized)
tagggcactgtgctgggtggggctggggacacaacaatgactgaggcagcctggccttgccttcacagggctcaccatacacaagtaaataaaaaatatgtaatgtttggaattgctaaa

SEQ ID NO: 618626 - DNA, 120 bp, Artificial Sequence
  ENSG00000177465_0 (sequence is synthesized)
ttgggcgccacaccttgcgcgccccggggcccaaggagacgaccctgaagaggagcctggctacttttgcctcagacgagtccggagcgccgggttaaccggtctgaagtcccaggggct

SEQ ID NO: 618627 - DNA, 120 bp, Artificial Sequence
  ENSG00000177465_1 (sequence is synthesized)
ttctgggactgctcagccaccggcagcttccggcaccaggggacgccggacgccgtccggacattcggcgcgcttgccacgatcttggacgggtctcgggcctcgacctttgaattcccc

SEQ ID NO: 618628 - DNA, 120 bp, Artificial Sequence
  ENSG00000177465_2 (sequence is synthesized)
gctccggctccaagatgtcagcaacgctgatcctggagcccccaggccgctgctgctggaacgagccggtgcgcattgccgtgcgcggcctggccccggagcagcgggttacgctgcgcg

SEQ ID NO: 618629 - DNA, 120 bp, Artificial Sequence
  ENSG00000177465_3 (sequence is synthesized)
cgtccctgcgcgacgagaagggcgcgctcttccgggcccacgcgcgctactgcgccgacgcccgcggcgagctggacctggagcgcgcacccgcgctgggcggcagcttcgcgggactcg

SEQ ID NO: 618630 - DNA, 120 bp, Artificial Sequence
  ENSG00000177465_4 (sequence is synthesized)
agcccatggggctgctctgggccctggaacccgagaagcctttttggcgcttcctgaagcgggacgtacagattccttttgtcgtggagttggaggtgctggacggccacgaccccgagc

SEQ ID NO: 618631 - DNA, 120 bp, Artificial Sequence
  ENSG00000177465_5 (sequence is synthesized)
ctggacggctgctgtgccaggcgcagcacgagcgccacttcctcccgccaggggtgcggcgccagtcggtgcgagcgggccgggtgcgcgccacgctcttcctgccgccaggacctggac

SEQ ID NO: 618632 - DNA, 120 bp, Artificial Sequence
  ENSG00000177465_6 (sequence is synthesized)
ccttcccagggatcattgacatctttggtattggagggggcctcttggaatatcgagccagcctccttgctggccatggctttgccacgttggctctagcttattataactttgaagatc

SEQ ID NO: 618633 - DNA, 120 bp, Artificial Sequence
  ENSG00000177465_7 (sequence is synthesized)
tccccaataacatggacaacatatccctggagtacttcgaagaagccgtatgctacatgcttcaacatccccaggtaaaaggcccaggcattgggcttttgggcatttctctaggagctg

SEQ ID NO: 618634 - DNA, 120 bp, Artificial Sequence
  ENSG00000177465_8 (sequence is synthesized)
atatttgtctctcaatggcctcattcttgaagaatgtctcagccacagtttccatcaatggatctgggatcagtgggaacacagccatcaactataagcacagtagcattccaccattgg

SEQ ID NO: 618635 - DNA, 120 bp, Artificial Sequence
  ENSG00000177465_9 (sequence is synthesized)
caagaaccccagcatgattccaatagagaaggcccaggggcccatcctgctcattgttggtcaggatgaccataactggagaagtgagttgtatgcccaaacagtctctgaacggttaca

SEQ ID NO: 618636 - DNA, 120 bp, Artificial Sequence
  ENSG00000177465_10 (sequence is synthesized)
ggcccatggaaaggaaaaaccccagatcatctgttaccctgggactgggcattacatcgagcctccttacttccccctgtgcccagcttcccttcacagattactgaacaaacatgttat

SEQ ID NO: 618637 - DNA, 120 bp, Artificial Sequence
  ENSG00000177465_11 (sequence is synthesized)
atggggtggggagcccagggctcattctaaggcccaggaagatgcctggaagcaaattctagccttcttctgcaaacacctgggaggtacccagaaaacagctgtccctaaattgtaatg

SEQ ID NO: 618638 - DNA, 120 bp, Artificial Sequence
  ENSG00000177465_12 (sequence is synthesized)
catttgtctgttgttgacatgagagattcaagatcagattctagtgttcagtaaccctatgtgaatcagatgtctcctggataacattaaagccatgtctttgtcattaatggtgtattt

SEQ ID NO: 618639 - DNA, 120 bp, Artificial Sequence
  ENSG00000177465_13 (sequence is synthesized)
tacgtaactttgttgaataagctttgtcgttagttttactaatgtaacttgcttgttgtagaagattaagaggcatatgacacatataagtgaaaaacattcccaccagttaacatttgt

SEQ ID NO: 618640 - DNA, 120 bp, Artificial Sequence
  ENSG00000177465_14 (sequence is synthesized)
gtttccttctagatttttttagttaatgttttgagtcacaggtgagctttaaagctggtgactttttccatcactatgaaagaatggtcacttaatgtttgctgttcaaccatcagtagc

SEQ ID NO: 618641 - DNA, 120 bp, Artificial Sequence
  ENSG00000177465_15 (sequence is synthesized)
agggtagaattttctttggccagaaacatacagaggggtgttaatatgaggaaaggcagctgaccttttcattataaacgtgagagaagactcttttgacaggaggagatgagacctgtc

SEQ ID NO: 618642 - DNA, 120 bp, Artificial Sequence
  ENSG00000177465_16 (sequence is synthesized)
tctagaatagttaagtctgtactctcttccaagggtgaattactacgatctattttccctctcacttcctctctaagagcagaccctggggccgagtacagtggctcacacctgtaatcc

SEQ ID NO: 618643 - DNA, 120 bp, Artificial Sequence
  ENSG00000177465_17 (sequence is synthesized)
cagtactttgggaagtcaaggggggcatattgcttgagctcaggatttcatgaccagcttaggcaacatggcaaaacccaatccctacaaaaattagccaaacatggtacacacctgtag

SEQ ID NO: 618644 - DNA, 120 bp, Artificial Sequence
  ENSG00000177465_18 (sequence is synthesized)
ctacaaaaattagccaaacatggtacacacctgtagtcccagctactcgagactcagatgggacgattgcttgagcccgggaggtcaagattggtgcagtgagccgtgattgcaccactg

SEQ ID NO: 618645 - DNA, 120 bp, Artificial Sequence
  ENSG00000177468_0 (sequence is synthesized)
agttcaagcacacaccaactagctgtccaggaagcagcctaaccagagagaggggcgtgggagggagagaggcggggaaaagcagcgtctccgcttttcttctcacgtcttgccgcggag

SEQ ID NO: 618646 - DNA, 120 bp, Artificial Sequence
  ENSG00000177468_1 (sequence is synthesized)
aagtgggttcctgggcagtgcagattttttttttttaattcaagattttctttaatttcccgcctaaagcctccccacggtagggccgcatcccctgtaataaaatgaattctgattcga

SEQ ID NO: 618647 - DNA, 120 bp, Artificial Sequence
  ENSG00000177468_2 (sequence is synthesized)
gctctgtctccagcagagcttcatctccggacatggatgagatgtacctgagggaccaccaccaccgccaccaccaccaccaggagagccgtctcaactcggtctcgtccacgcagggcg

SEQ ID NO: 618648 - DNA, 120 bp, Artificial Sequence
  ENSG00000177468_3 (sequence is synthesized)
atatgatgcagaagatgcccggggaaagcctctcgcgggctggcgccaaggccgcgggagagagcagcaagtacaaaatcaagaagcagctgtcggagcaggacctacagcagttgaggc

SEQ ID NO: 618649 - DNA, 120 bp, Artificial Sequence
  ENSG00000177468_4 (sequence is synthesized)
tgaagatcaacggacgcgaacgcaagcggatgcacgacctgaacctagccatggacgggctgcgcgaagtcatgccctacgcgcatgggccgtcggtgcgcaagctctccaagatcgcca

SEQ ID NO: 618650 - DNA, 120 bp, Artificial Sequence
  ENSG00000177468_5 (sequence is synthesized)
cactcctgctcgccagaaactacatcctcatgctcaccagctccctggaggagatgaagaggctggttggcgagatctatgggggccaccactcggcctttcactgcgggaccgtgggcc

SEQ ID NO: 618651 - DNA, 120 bp, Artificial Sequence
  ENSG00000177468_6 (sequence is synthesized)
actcggccggccaccccgcgcacgcggccaactccgtgcacccggtgcaccccatcttgggcggcgcgctctcatctggcaacgcctcgtcaccgctgtccgccgcctcacttcccgcca

SEQ ID NO: 618652 - DNA, 120 bp, Artificial Sequence
  ENSG00000177468_7 (sequence is synthesized)
tcggcaccatccggcctccccactcgctactcaaggcgccctccacgccgcccgcgctgcagctgggcagcggcttccagcactgggctggtctgccctgcccctgcaccatctgccaga

SEQ ID NO: 618653 - DNA, 120 bp, Artificial Sequence
  ENSG00000177468_8 (sequence is synthesized)
tgccgccgccgccgcacctgtccgctctctccacagccaacatggcccggctgtcggccgagtccaaggacttgctcaagtgagcagcgggcgggcccggctgccaaggaggagggagag

SEQ ID NO: 618654 - DNA, 120 bp, Artificial Sequence
  ENSG00000177468_9 (sequence is synthesized)
gagggaggctgcacgctcggcccacgggagggcaggctccggggcccgcagcctcccacgctgtctgagagatctcagactccacttgacccccggagggaaaggaccaaaatcaaaccg

SEQ ID NO: 618655 - DNA, 120 bp, Artificial Sequence
  ENSG00000177468_10 (sequence is synthesized)
caatttctaggtggtagcaaagggggactcgaaccagatgtcgtgtgttttgcatgcatgcttcttttccccatgccgcgccagtatttttcactgccatatgctcttgtcaaaactgca

SEQ ID NO: 618656 - DNA, 120 bp, Artificial Sequence
  ENSG00000177468_11 (sequence is synthesized)
tttgttgtataaagatgggatcggtgtagttaaaaacttgcgaagggacttttgagttggctttctctgactctgtgttctcgctttggaaaaagacggccatcccttttgtgcaaaaca

SEQ ID NO: 618657 - DNA, 120 bp, Artificial Sequence
  ENSG00000177468_12 (sequence is synthesized)
aatgtaaatattttcttgagatggatgcgattatgattgtctctgtccttgccacagtttttctagagacaatggagagagaaagagagagagagcgcgagagagatcaagacccaagtt

SEQ ID NO: 618658 - DNA, 120 bp, Artificial Sequence
  ENSG00000177468_13 (sequence is synthesized)
ttgaatctcaaccgaggtccagggcatgacacctcctatgtgggttttcctttcgacgcagtgtaggtcaaaagaatgcatgcacgcttctaaatgaatcttgtctgaatatgtcgtgca

SEQ ID NO: 618659 - DNA, 120 bp, Artificial Sequence
  ENSG00000177468_14 (sequence is synthesized)
ggctgtggtgccgttttccttgtaacaaggatttattagtgaattatcccaagtactccatatatctgtctgtggttgtatgaaatgaaaaaaggggcagagtgcaaagacccacactca

SEQ ID NO: 618660 - DNA, 120 bp, Artificial Sequence
  ENSG00000177468_15 (sequence is synthesized)
cgcacacgcgcttcttctcccacccccacccccttcaaactttattcggaaccttcctttgctgttctggggccgctattgtaaaagcctgggctccctctagtagcttgcgccaccccc

SEQ ID NO: 618661 - DNA, 120 bp, Artificial Sequence
  ENSG00000177468_16 (sequence is synthesized)
cctcgctcagttattctgcatgcggggttggctctctctattatcagctttgaaaacttatcctggttttgggaggggtgccgtttttattttcctgaacatttgcttgaaatattttgt

SEQ ID NO: 618662 - DNA, 120 bp, Artificial Sequence
  ENSG00000177468_17 (sequence is synthesized)
tagggcctcaaagacgatacctgtctttattttttatatattcttgataactatgatatatttattaataaccagtgtttctggatgagatttcaaataaaaaagaacctttaaatcgtg

SEQ ID NO: 618663 - DNA, 120 bp, Artificial Sequence
  ENSG00000177469_0 (sequence is synthesized)
agttctggccgctgtcccggtgcgcacggacgtggctcgagtttcctctgctctccgctctcgcccgctagctctcctcccttccgctcctgcttctctccgggtctcccgctccagctc

SEQ ID NO: 618664 - DNA, 120 bp, Artificial Sequence
  ENSG00000177469_1 (sequence is synthesized)
cagccccacccggccggtcccgcacggctccgggtagccatggaggaccccacgctctatattgtcgagcggccgcttcccgggtaccccgacgccgaggccccggagccttcctccgct

SEQ ID NO: 618665 - DNA, 120 bp, Artificial Sequence
  ENSG00000177469_2 (sequence is synthesized)
ggggctcaggcagcggaggagccgtcgggggccggctcagaagagctgatcaagtcggaccaggtgaacggcgtgctggtgctgagcctcctggacaaaatcatcggggccgtagaccag

SEQ ID NO: 618666 - DNA, 120 bp, Artificial Sequence
  ENSG00000177469_3 (sequence is synthesized)
atccagctgactcaagcacagctggaggagcggcaggcggagatggagggcgcagtgcagagcatccagggcgagctgagcaagctgggcaaggcgcacgccaccacgagcaatacggtg

SEQ ID NO: 618667 - DNA, 120 bp, Artificial Sequence
  ENSG00000177469_4 (sequence is synthesized)
agcaagctgctggagaaggtgcgcaaggtcagcgtcaacgtgaagaccgtgcgcggcagcctggagcgccaggcggggcagatcaagaagctggaggtcaacgaggccgagctgctgcgg

SEQ ID NO: 618668 - DNA, 120 bp, Artificial Sequence
  ENSG00000177469_5 (sequence is synthesized)
cgccgcaactttaaagtcatgatctaccaggatgaagtgaagctgccggccaaactgagcatcagcaaatcgctgaaagagtcggaggcgctgccagagaaggagggcgaggagctgggc

SEQ ID NO: 618669 - DNA, 120 bp, Artificial Sequence
  ENSG00000177469_6 (sequence is synthesized)
gagggcgagcggcccgaggaggacgcagcggcgctggagctttcgtcggacgaggcggtggaggttgaggaggttattgaggagtcccgcgcagagcgtatcaagcgcagcggcctgcgg

SEQ ID NO: 618670 - DNA, 120 bp, Artificial Sequence
  ENSG00000177469_7 (sequence is synthesized)
cgcgtggacgacttcaagaaggccttctccaaggagaagatggagaagaccaaggtgcgtacccgcgagaacctggagaagacgcgcctcaagaccaaggaaaacctggagaagacgcgg

SEQ ID NO: 618671 - DNA, 120 bp, Artificial Sequence
  ENSG00000177469_8 (sequence is synthesized)
cacaccctggagaagcgcatgaacaagctgggcacgcgcctggtgcccgccgagcggcgcgagaaactgaagacgtcgcgggacaagttgcgcaaatccttcacgcccgaccacgtggtg

SEQ ID NO: 618672 - DNA, 120 bp, Artificial Sequence
  ENSG00000177469_9 (sequence is synthesized)
tacgcgcgctccaagaccgcggtctacaaggtgccacccttcaccttccacgtcaagaagatccgcgagggccaggtggaagtgctcaaggccaccgagatggtggaggtgggcgccgac

SEQ ID NO: 618673 - DNA, 120 bp, Artificial Sequence
  ENSG00000177469_10 (sequence is synthesized)
gacgacgagggcggcgcggagcgcggggaggccggcgacctgcggcgcgggagcagccccgacgtgcacgcgctgctggagatcaccgaggagtcggacgccgtgctggtggacaagagc

SEQ ID NO: 618674 - DNA, 120 bp, Artificial Sequence
  ENSG00000177469_11 (sequence is synthesized)
gacagcgactgagccgcccccgctgccacccaccccattcctcgctccttccgaacttcctctttcgcattctctctcggctcgagctggctgagatttttctaaattgaaaacacgccc

SEQ ID NO: 618675 - DNA, 120 bp, Artificial Sequence
  ENSG00000177469_12 (sequence is synthesized)
ccctccccacacctccaggaactccactcccagtcttagagctgttaggacccgatggggaggcagcccccgcagtggacaacccccgcttggacacagtccgagtggaatgggaaggga

SEQ ID NO: 618676 - DNA, 120 bp, Artificial Sequence
  ENSG00000177469_13 (sequence is synthesized)
atggtcaatccctgtcctggttgtccaagtcgggatctcagaggaaattgcagtgattccacggttaggcccccctgggggggctgccttcccctcagcctctccccacaccacccaccc

SEQ ID NO: 618677 - DNA, 120 bp, Artificial Sequence
  ENSG00000177469_14 (sequence is synthesized)
tgaatcctaaaggggatccctgcccccatgggaggccccctactagaaggacgtgaaagcagcttttgggggaaactgaggcagtggggaagacagagcagaatgagccctcaccctggc

SEQ ID NO: 618678 - DNA, 120 bp, Artificial Sequence
  ENSG00000177469_15 (sequence is synthesized)
tgggggtccagcacaggctgtatctgcagagggtcccagaggaacgctggagccaagagaagccctgggaaggaggggtggggaacgacatgcatgtgagggatggcacactgatgtgtt

SEQ ID NO: 618679 - DNA, 120 bp, Artificial Sequence
  ENSG00000177469_16 (sequence is synthesized)
cactgatgtgtttatgcacctgtacacaggagcgcatggccatggctttggaaaggagaatggaaaaatagaagaaggtcggccgggcttggtggcttatgcctgtaaccccagcacttt

SEQ ID NO: 618680 - DNA, 79 bp, Artificial Sequence
  ENSG00000177469_17 (sequence is synthesized)
tgggcggatcacctgaagtcaggagttcgggaccagcctggcaaacaccccatctctactaagcgaaatgcgcatgcct

SEQ ID NO: 618681 - DNA, 120 bp, Artificial Sequence
  ENSG00000177469_18 (sequence is synthesized)
tctcaacagaaggaaaaaaaaggaaaataggagaaggtggaaatgggtgaagagagaagtcccctcactagctgcatgagaaatctatcttactgtggttctccatgggcagcaggacca

SEQ ID NO: 618682 - DNA, 120 bp, Artificial Sequence
  ENSG00000177469_19 (sequence is synthesized)
tttttcagaatcaagagggaggacagtgtgagaaggcgatgatccaaagaagacagagaggtcagccccacccgatccctcaaatgggctcttggaggcacccccaggggcagcccattt

SEQ ID NO: 618683 - DNA, 120 bp, Artificial Sequence
  ENSG00000177469_20 (sequence is synthesized)
ctcaaagtccagaaaattagggtcccagaagggggcagcagcaggctgggagttaggagggagagcagggtgccggccctgccaccaagttgagagctggaggggaggtggggagagaac

SEQ ID NO: 618684 - DNA, 120 bp, Artificial Sequence
  ENSG00000177469_21 (sequence is synthesized)
gaggtggggagagaacatcacagagcagccagccctggttcactcctggcagtttcttctcaagctccttccctaggagcatggtggcacgtgcctgtggtctcagctacttgggaggct

SEQ ID NO: 618685 - DNA, 120 bp, Artificial Sequence
  ENSG00000177469_22 (sequence is synthesized)
aggagtttgaggctgcagtgagctatgagggtgcctctgtgctccatcctaggcaacagagtgatacgctgtttaaaaaggaaaaaatccttccctagagctagtatcctaaagctgcag

SEQ ID NO: 618686 - DNA, 120 bp, Artificial Sequence
  ENSG00000177469_23 (sequence is synthesized)
agctgcagagctagcccagacctcattggtttccttgtccttggggtgcttttcctgaatctttgcgggtgaagggagtgttgctcccagtccagaggcctgattctgtttggactgggt

SEQ ID NO: 618687 - DNA, 120 bp, Artificial Sequence
  ENSG00000177469_24 (sequence is synthesized)
tctcaagacacgaccaggttctcaagacacgagtccccttgttcctccccattaaagggggtttgtcagaagcaagaacagcccctctccccagtcacagcctgaagggaggccccgaga

SEQ ID NO: 618688 - DNA, 120 bp, Artificial Sequence
  ENSG00000177469_25 (sequence is synthesized)
gcttcctccttccccccacctgctccttaccttctctgccctgctttttagaactgcagttcattgttttaagggattgggggagggagcctggggacacaaaccttttatacaatacaa

SEQ ID NO: 618689 - DNA, 120 bp, Artificial Sequence
  ENSG00000177469_26 (sequence is synthesized)
agctttgctttttttttttttttcttccttttccctttctcggttctcttctctcctctgaatggctgaagacccctctgccgagggaggttggggattgtgggacaaggtcccttggtg

SEQ ID NO: 618690 - DNA, 120 bp, Artificial Sequence
  ENSG00000177469_27 (sequence is synthesized)
ctgatggcctgaaggggcctgagctgtgggcagatgcagttttctgtgggcttggggaacctctcacgttgctgtgtcctggtgagcagcccgaccaataaacctgcttttctaaaagga

SEQ ID NO: 618691 - DNA, 120 bp, Artificial Sequence
  ENSG00000177476_0 (sequence is synthesized)
atgggattgggcaatgagagttccctaatggatttcatccttctaggcttctcagaccaccctcgtctggaggctgttctctttgtatttgtccttttcttctacctcctgacccttgtg

SEQ ID NO: 618692 - DNA, 120 bp, Artificial Sequence
  ENSG00000177476_1 (sequence is synthesized)
ggaaacttcaccataatcatcatctcatatctggatccccctcttcataccccaatgtacttttttctcagcaacctctctttactggacatctgcttcactactagccttgctcctcag

SEQ ID NO: 618693 - DNA, 120 bp, Artificial Sequence
  ENSG00000177476_2 (sequence is synthesized)
accttagttaacttgcaaagaccaaagaagacgatcacttacggtggttgtgtggcgcaactctatatttctctggcactgggctccactgaatgtatcctcttggctgacatggccttg

SEQ ID NO: 618694 - DNA, 120 bp, Artificial Sequence
  ENSG00000177476_3 (sequence is synthesized)
agtggtttggctagttccctaatccatgcaacttttaccttgcaattgcctctctgtggcaaccataggctggaccattttatttgcgaagtaccagctcttctcaagttggcttgtgtg

SEQ ID NO: 618695 - DNA, 120 bp, Artificial Sequence
  ENSG00000177476_4 (sequence is synthesized)
gacaccactgtcaatgaattggtgctttttgttgttagtgttctgtttgttgtcattccaccagcactcatctccatctcctatggcttcataactcaagctgtgctgaggatcaaatca

SEQ ID NO: 618696 - DNA, 120 bp, Artificial Sequence
  ENSG00000177476_5 (sequence is synthesized)
gtagaggcaaggcacaaagccttcagcacctgctcctcccaccttacagtggtgattatattctatggcaccataatctacgtgtacctgcaacctagtgacagctatgcccaggaccaa

SEQ ID NO: 618697 - DNA, 120 bp, Artificial Sequence
  ENSG00000177476_6 (sequence is synthesized)
gggaagtttatctccctcttctacaccatggtgacccccactttaaatcctatcatctatactttaaggaacaaggatatgaaagaggctctgaggaaacttctctcgggaaaattgtga

SEQ ID NO: 618698 - DNA, 120 bp, Artificial Sequence
  ENSG00000177479_0 (sequence is synthesized)
gcaacggcgccaagcacttccggagctgtggggacgactcttctggaggaagcagcgcgggcttgaccggcgtcggcccgccgcctccgctgccgcttcgccccaatccggtccctctgg

SEQ ID NO: 618699 - DNA, 120 bp, Artificial Sequence
  ENSG00000177479_1 (sequence is synthesized)
cccggcctgacccggtctggcttgttcgggctcagcggccgcgaggccgcagctcccgatggaaatcatattatgtagaatacttgggtgacatctgcctgagagatctccaagaattac

SEQ ID NO: 618700 - DNA, 120 bp, Artificial Sequence
  ENSG00000177479_2 (sequence is synthesized)
agaagacaaaaatactaatgcatttgagaaagcggtagttttggggggagggggaaaaagcaactgctttcctgatctgcaacttggctggatgctaagatgtcagtggacatgaatagc

SEQ ID NO: 618701 - DNA, 120 bp, Artificial Sequence
  ENSG00000177479_3 (sequence is synthesized)
caggggtctgacagcaatgaagaggactatgacccaaattgtgaggaagaggaagaagaagaagaagacgaccctggggacatagaggactattacgtgggagtagccagcgatgtggag

SEQ ID NO: 618702 - DNA, 120 bp, Artificial Sequence
  ENSG00000177479_4 (sequence is synthesized)
cagcagggggctgatgcctttgatcccgaggagtaccagttcacttgcttgacctacaaggaatctgagggtgccctcaatgagcacatgaccagcttagcttctgtcctaaaggtatct

SEQ ID NO: 618703 - DNA, 120 bp, Artificial Sequence
  ENSG00000177479_5 (sequence is synthesized)
cattcagttgctaaacttatattagttaatttccactggcaagtttcagagatattggacagatacaagtccaattctgctcaactgcttgttgaggctcgagttcagcctaatccatca

SEQ ID NO: 618704 - DNA, 120 bp, Artificial Sequence
  ENSG00000177479_6 (sequence is synthesized)
aaacatgttcccacatcccatccccctcaccactgtgcagtgtgtatgcagtttgtgcgaaaggaaaacctactctctctggcctgtcagcaccagttttgccgcagctgctgggagcag

SEQ ID NO: 618705 - DNA, 120 bp, Artificial Sequence
  ENSG00000177479_7 (sequence is synthesized)
cactgctcagttctcgtcaaggacggcgtgggcgtgggagtctcttgcatggctcaggactgtccactccgtacaccagaggactttgtgtttccattgcttcccaatgaagaattgaga

SEQ ID NO: 618706 - DNA, 120 bp, Artificial Sequence
  ENSG00000177479_8 (sequence is synthesized)
gagaaatacaggcgctacctcttcagggactatgtggagagtcattaccagctccagctgtgccctggtgcagactgccccatggttattcgggtacaggagcctagagctcgccgagta

SEQ ID NO: 618707 - DNA, 120 bp, Artificial Sequence
  ENSG00000177479_9 (sequence is synthesized)
cagtgcaatcggtgcaacgaggtcttctgtttcaagtgtcgtcagatgtatcacgcacccacagactgtgccacaatccggaaatggctcacgaagtgtgcagacgactctgaaacagcc

SEQ ID NO: 618708 - DNA, 120 bp, Artificial Sequence
  ENSG00000177479_10 (sequence is synthesized)
aactacattagtgctcacactaaagactgtcccaagtgcaacatctgcattgagaagaatggaggctgcaatcacatgcaatgctccaaatgtaaacacgacttctgctggatgtgtcta

SEQ ID NO: 618709 - DNA, 120 bp, Artificial Sequence
  ENSG00000177479_11 (sequence is synthesized)
ggagattggaagactcatggcagtgaatactatgagtgcagtcgttacaaggagaatcctgacatcgtgaaccagagccaacaagcccaggcgagggaagccctcaagaagtacttattc

SEQ ID NO: 618710 - DNA, 120 bp, Artificial Sequence
  ENSG00000177479_12 (sequence is synthesized)
tactttgagaggtgggaaaaccacaataaaagcttgcagctagaggcacagacataccagcggattcacgagaagattcaggagagggtcatgaacaatctggggacatggatcgactgg

SEQ ID NO: 618711 - DNA, 120 bp, Artificial Sequence
  ENSG00000177479_13 (sequence is synthesized)
cagtacctacagaatgctgccaagctcttggccaagtgtcgatacaccctgcaatacacctacccatatgcatattacatggagtccggacccaggaagaagctgtttgaataccagcag

SEQ ID NO: 618712 - DNA, 120 bp, Artificial Sequence
  ENSG00000177479_14 (sequence is synthesized)
gctcagctggaggctgagatcgaaaacctctcatggaaagtggagcgtgcagacagctatgacagaggggacttggagaaccagatgcatatagcggagcagcggaggagaaccctgctg

SEQ ID NO: 618713 - DNA, 120 bp, Artificial Sequence
  ENSG00000177479_15 (sequence is synthesized)
aaagatttccatgacacctaagttgggatgtggatgtgccggggtgaggaagatgtggctgcaaggtctcccggctgccatactgcatgctgcaggctctgcctttcatgaccccaggca

SEQ ID NO: 618714 - DNA, 120 bp, Artificial Sequence
  ENSG00000177479_16 (sequence is synthesized)
acagccagggccccactcctgagagacactggcaacacctcttagttgatttctgttttcttctcttttcactttttgtttctaccagggtagaggccatgttgaactggcctcttttca

SEQ ID NO: 618715 - DNA, 120 bp, Artificial Sequence
  ENSG00000177479_17 (sequence is synthesized)
ggacttttatttccccctggatggttgttgggagggagggaaagtgttttctgaatggctattaatagtattagatcattacaacttatgtaactttcaaaggttgtacaattatacaaa

SEQ ID NO: 618716 - DNA, 120 bp, Artificial Sequence
  ENSG00000177479_18 (sequence is synthesized)
aaaaaaaaaaaggcaaactataggataacacagagccctttttgaaaataaattggcattggagtgttttaccctctagctgttttacttagaatgtaacatatgctgcctacccacctc

SEQ ID NO: 618717 - DNA, 120 bp, Artificial Sequence
  ENSG00000177479_19 (sequence is synthesized)
aaaatgtctgtactgcaagagggccctgggcctctgctttccatattcacgtttggccagagttgtagtcccaaagaagagcatgggtggcagatggtagggaattgaactggcctgtgc

SEQ ID NO: 618718 - DNA, 120 bp, Artificial Sequence
  ENSG00000177479_20 (sequence is synthesized)
cacaaggggtcacagcatgcctcctgccttaccgtggcagtacggagacagtccagaacatggtcttcttgccacggggtgttgttgtctctggtggtgctgcatgtctgtggctcacct

SEQ ID NO: 618719 - DNA, 120 bp, Artificial Sequence
  ENSG00000177479_21 (sequence is synthesized)
ttattcttgaaactgaggtttacctggatctggctactgaggctagagcccacagcagaatggggttgggcctgtggccccccaaactagggggtgtgggttcatcacagtgttgccttt

SEQ ID NO: 618720 - DNA, 120 bp, Artificial Sequence
  ENSG00000177479_22 (sequence is synthesized)
tgtctcctaaagatagggatctacttttgaagggaattgttcctcccaaataaatttgctttaccttggtcctttcttttgtgccagtattcaagtggtatagctctgagcagggtcaca

SEQ ID NO: 618721 - DNA, 120 bp, Artificial Sequence
  ENSG00000177479_23 (sequence is synthesized)
tttggccaaacctgacactgtcttgctgcattctcctttggcaaacatcagggtcagaattcaggatagcccttcctagggcactggactttctggcatgggggctgtgtttgcacaagt

SEQ ID NO: 618722 - DNA, 120 bp, Artificial Sequence
  ENSG00000177479_24 (sequence is synthesized)
tattttcatgttacctggagagtgtccagaggctgctctgaggctgaggtgtgttcccccttgcctggttccagctgtcagagggataccatcctagggtctgggaatccaaggccacga

SEQ ID NO: 618723 - DNA, 120 bp, Artificial Sequence
  ENSG00000177479_25 (sequence is synthesized)
gactccttggtttgtggtccgagatcctgtactaaggagggtctggccagaggaacagaccagcttttgcacaatgaagcgcaagggaacaagtggtttgcctggtgtcctacctgtcct

SEQ ID NO: 618724 - DNA, 120 bp, Artificial Sequence
  ENSG00000177479_26 (sequence is synthesized)
gaacctggtcctgtgggccattgaaaagttagatctgtgatctctggggtttttgtggctttgttcaatgcttccactctagggcaggcagagcagtctatactctcccaagcctgcttg

SEQ ID NO: 618725 - DNA, 120 bp, Artificial Sequence
  ENSG00000177479_27 (sequence is synthesized)
acctccaagtagagctgatacagagatctgtgaatattgtgatagaaattctttggtattcatacatttcagctgcaagtcagcaatttcccaggtaccatgtaagctataaaacagtca

SEQ ID NO: 618726 - DNA, 120 bp, Artificial Sequence
  ENSG00000177479_28 (sequence is synthesized)
ttcttaaagacagaggatagctgtgactcatgggatcatgaggtccatggctggttgcaggttccctttttccttcctcaggttttgtctcttcctgtgttgtccccagcaagggagaga

SEQ ID NO: 618727 - DNA, 120 bp, Artificial Sequence
  ENSG00000177479_29 (sequence is synthesized)
ctgtggggtggattgggagaacagattaggagtatagcaaatgaacccagaatggaacagtggggagctaactgtgaatgaggagagtacctgctgcaggacctggaggtcaggtgtgaa

SEQ ID NO: 618728 - DNA, 120 bp, Artificial Sequence
  ENSG00000177479_30 (sequence is synthesized)
tgctgtattggcacagggaataaatatcctggcgtctggagccttcacctctccgtcaagtccttcctgtgatactgccatggcacaggatctgagttgcagctctgcaccctaaatcac

SEQ ID NO: 618729 - DNA, 120 bp, Artificial Sequence
  ENSG00000177479_31 (sequence is synthesized)
accctgggcattgtctgggctgcagggctgccaggttctgtacttgtgtccagctgtggccctggatgctggagctggagggttttctgtgctcagactgtagcctgtagctcttggcct

SEQ ID NO: 618730 - DNA, 120 bp, Artificial Sequence
  ENSG00000177479_32 (sequence is synthesized)
gtgtagagccccctcctgtgccctcagtggctgtcgtttgttaacatcatcaggaagatgggaaaggtcaggcagaatttttctgccctacaaagggtggaagagaaaggacacagtatt

SEQ ID NO: 618731 - DNA, 120 bp, Artificial Sequence
  ENSG00000177479_33 (sequence is synthesized)
ttcatgaatttaccatatatctttgtttttcttcaacgaaaaagttaattgaggcaatgtcatctgctcaaagttgagtggtttattcacaataaactgtaagtttctgattataaaaat

SEQ ID NO: 618732 - DNA, 120 bp, Artificial Sequence
  ENSG00000177479_34 (sequence is synthesized)
gtgtctagagtctttcttcatggggtctaggtagtcttctgagcccacaggggtctggccagtgaacaccagaggagtgccttcctatcagtcagccccttcttccagagggctgtggag

SEQ ID NO: 618733 - DNA, 120 bp, Artificial Sequence
  ENSG00000177479_35 (sequence is synthesized)
gccccagtggccaaactcggctctgttttccctttctggctgttgggggagagggcacctgtaagtgatccctgtggaatgaagtagaaaatcctgccagttttccgctctcctctccct

SEQ ID NO: 618734 - DNA, 120 bp, Artificial Sequence
  ENSG00000177479_36 (sequence is synthesized)
cagtacaggctgaatcattccccaccacagatagatcccagggttgtggtagagtactgatataaatgtcccaacccccccattctgagacctccggacccctccaaagcagacatggga

SEQ ID NO: 618735 - DNA, 120 bp, Artificial Sequence
  ENSG00000177479_37 (sequence is synthesized)
atgtagggctgtggaatatggcagggtgaactccagcttcacgggagccctaagggttatgaagagacaacttggggcagaaacaagtgtggagtctaatctcaagggtgaaggacagga

SEQ ID NO: 618736 - DNA, 120 bp, Artificial Sequence
  ENSG00000177479_38 (sequence is synthesized)
aatgaggtttggattgattaagggggtccacatttgtggtgtcagaagtggcagtagtgtcagtgataagtagctcaggggtagagtggaggctccatagctgtgggcaacatgcacagg

SEQ ID NO: 618737 - DNA, 120 bp, Artificial Sequence
  ENSG00000177479_39 (sequence is synthesized)
gcacctgtggctagaagaggcctcatacattgccagtctgaactccgcagctcttcctctggacctcaggtgtgccaagccccacgcttggcacctgggcatacagtggtatgcaagtga

SEQ ID NO: 618738 - DNA, 120 bp, Artificial Sequence
  ENSG00000177479_40 (sequence is synthesized)
ttcacgtgctctagcttccaggagcttccaatccatggggaacatagaaggaattgatcactagtgaatgtttgttttttgttttgagacagtctcgctctatcgcccagactggagtac

SEQ ID NO: 618739 - DNA, 61 bp, Artificial Sequence
  ENSG00000177479_41 (sequence is synthesized)
gtgcaatctctgctcactgcaacctccgacaaaaatactaatgcatttgagaaagcggtag

SEQ ID NO: 618740 - DNA, 120 bp, Artificial Sequence
  ENSG00000177479_42 (sequence is synthesized)
tattttgctctgttgaaaaatttaaagtggattcttcaggctccagcctgatttccttattgttcctctccctaactcatatacttgattttaacctcctccaacctattgtcagcatct

SEQ ID NO: 618741 - DNA, 120 bp, Artificial Sequence
  ENSG00000177479_43 (sequence is synthesized)
ccgcccttcttgcaaccctcgagagactgctaagccctccaactttttttaacccgtctcagagaagctgtgtctgacctctcctgtatccctgtgcattcctgagggcttggaagacct

SEQ ID NO: 618742 - DNA, 120 bp, Artificial Sequence
  ENSG00000177479_44 (sequence is synthesized)
gtttggatagccttttgtttggattctggctctgggcacagggaataacactactttctgaggacagtatcaggattgtctgtagttcctgtgagcctgaggtgctgcatgtgcccaccc

SEQ ID NO: 618743 - DNA, 120 bp, Artificial Sequence
  ENSG00000177479_45 (sequence is synthesized)
cttggtgtgtaaggcccagtggcactttcttgtggttgggtctccgttactatttaagtgagtacttctgccatgaaatgacaaaacatagaagaacctcagtcacttaacagtcacagt

SEQ ID NO: 618744 - DNA, 89 bp, Artificial Sequence
  ENSG00000177479_46 (sequence is synthesized)
agtagagatgggattttgccatgttggctaggctggcctcaatctcctggcctcaggtgatctggccaccttggtctcccaaagtgccg

SEQ ID NO: 618745 - DNA, 120 bp, Artificial Sequence
  ENSG00000177479_47 (sequence is synthesized)
aggccgcagctcccggctggagtgcagtggtgcagtctcggttcactgcagcctccatctcccagatcaagcaattctcctgccgtagcctcccgagtagctgggattacagatggaaat

SEQ ID NO: 618746 - DNA, 87 bp, Artificial Sequence
  ENSG00000177479_48 (sequence is synthesized)
cagttttgccgcagctgctgggagcagcactgctcagttctcgtcaaggacggcgtgggcgtgtgcatgatctcagctcaccacaac

SEQ ID NO: 618747 - DNA, 120 bp, Artificial Sequence
  ENSG00000177479_49 (sequence is synthesized)
cctgagtagttgggattacaggagtctcttgcatggctcaggactgtccactccgtacaccagaggactttgtgtttccattgcttcccaatgaagaattgagagagaaatacaggcgct

SEQ ID NO: 618748 - DNA, 120 bp, Artificial Sequence
  ENSG00000177479_50 (sequence is synthesized)
cctccaaagcaccactgctgttgctccatgtgagggcggcactggaagaggcagggtctctgagccaacagaacagctgtgctccaagtggtttcaagtgtcgtcagatgtatcacgcac

SEQ ID NO: 618749 - DNA, 120 bp, Artificial Sequence
  ENSG00000177479_51 (sequence is synthesized)
ccacagactgtgccacaatccggaaatggctcacgaagtgtgcagacgactctgaaacagccaactacattagtgctcacactaaagaccctcagcgacctgccacatttaagtgaggtg

SEQ ID NO: 618750 - DNA, 120 bp, Artificial Sequence
  ENSG00000177479_52 (sequence is synthesized)
tgtaatcccccccagttaaatctaaggatgagctgttgttaattaatgtctcctccagactaattgaatggccttgtagcttgaaaccaaatttaagtgtatgtcaacatcatttggaca

SEQ ID NO: 618751 - DNA, 120 bp, Artificial Sequence
  ENSG00000177479_53 (sequence is synthesized)
ccacacccggccagtagaactctttaaacctgaaaaatcagtcaactttgcagactagaggaggatgttgaacacctatgtgtgttttttttttctttaccaactatgcacctatttttc

SEQ ID NO: 618752 - DNA, 120 bp, Artificial Sequence
  ENSG00000177479_54 (sequence is synthesized)
agacacctaaaagtaatgtctgtgaaacagtggttttctttttctacatattacagcaggaagtgttcctatttatgtactgtctgtatcaatactaacggggcatgataagcaaaattt

SEQ ID NO: 618753 - DNA, 120 bp, Artificial Sequence
  ENSG00000177479_55 (sequence is synthesized)
taaactttggtagttaaacctttatgttgcctcccctctgggctgccagctgtggggatgtgcttctcccttaaggactttggcaagaataacaagttcattggaatttgactttctgac

SEQ ID NO: 618754 - DNA, 120 bp, Artificial Sequence
  ENSG00000177479_56 (sequence is synthesized)
atagagcagacagccttgccctgtcatgccaggcctttcatgtgaagttaccatttattagctgcttctgtctctccagggaaggatttcccttttataagcctgggccagggggatgat

SEQ ID NO: 618755 - DNA, 120 bp, Artificial Sequence
  ENSG00000177479_57 (sequence is synthesized)
agtaagattccccatgtgataccagagttggaataggctgtagtgagattagggccaggactgtcccattttgattcttgaatggtttctgttacaacttgtcatggggaaaaagtaaca

SEQ ID NO: 618756 - DNA, 77 bp, Artificial Sequence
  ENSG00000177479_58 (sequence is synthesized)
ctggcccggcctgacccggtctggcttgttcgggctcagcggccgcgaggccgcagctcccggctcatggttggagt

SEQ ID NO: 618757 - DNA, 120 bp, Artificial Sequence
  ENSG00000177483_0 (sequence is synthesized)
gttacccaacaggcgccgcggctgctccggtggcgccactgactcggaggcggctgcggagagcggggcgctggcccgtggaggcggcagcggcggcggctttctagcggatccgagatt

SEQ ID NO: 618758 - DNA, 120 bp, Artificial Sequence
  ENSG00000177483_1 (sequence is synthesized)
atatatctttgaatgatgcaggccactgcagtggtggagacagcatctggtaaaggctaccacagtaatggaggcaacctccaaaaagataaaccttcaaatccaaagaaagaaaatttg

SEQ ID NO: 618759 - DNA, 120 bp, Artificial Sequence
  ENSG00000177483_2 (sequence is synthesized)
ttattatcctccaatggttgtgatgaagtcaaattgacttttcctgatgatgactggaattcttcgacactagagcaaagagctaataataaagaaatcagcaatattgacaaaatggat

SEQ ID NO: 618760 - DNA, 120 bp, Artificial Sequence
  ENSG00000177483_3 (sequence is synthesized)
ttattagagccatttttttcagtgagtcaagatactaacacagagagtactcagtttcagtcaagtgaacttgaagacagtactgactatgctttcttgaataaaacatattctatacct

SEQ ID NO: 618761 - DNA, 120 bp, Artificial Sequence
  ENSG00000177483_4 (sequence is synthesized)
tattcagagtcaaaactaaagaaggaaagtcttactcctttaagttcagaattagatcctgaagtgcagaaaaaagaggaggttttttttaatattttggaacatcaagataagactgtt

SEQ ID NO: 618762 - DNA, 120 bp, Artificial Sequence
  ENSG00000177483_5 (sequence is synthesized)
ggcttggaaagaatctacaatatttcagatgctaattatagagaaagtgctgaagatacacaaaagcatgatacagatgaagactcacagcaggaatatcacagtgcagaagaacaagaa

SEQ ID NO: 618763 - DNA, 120 bp, Artificial Sequence
  ENSG00000177483_6 (sequence is synthesized)
tacataagtaaccatttatcttttgaccaaacaaaagcattagatatatctaatccagaagttgttgaattaggaaattcgggttatgaagttaaatgtgctagcaatgtagaagataat

SEQ ID NO: 618764 - DNA, 120 bp, Artificial Sequence
  ENSG00000177483_7 (sequence is synthesized)
cgtgttaactcgggaagtggttctatcatctctttcgattcacttgatgtttatggacaagaagagtcacttcatgtctccaaatttcagaattctgttatgttaagagaatatcatgac

SEQ ID NO: 618765 - DNA, 120 bp, Artificial Sequence
  ENSG00000177483_8 (sequence is synthesized)
ctaaagcatgaaaagtataaggaacaagagactaattcaatgtaccacactgtatttgatggcagtgtactaagaagcaattctccaggaaaccaggaatctcaatctaagagtggttcc

SEQ ID NO: 618766 - DNA, 120 bp, Artificial Sequence
  ENSG00000177483_9 (sequence is synthesized)
ttgagccctcaaaaagtattaaaaatgaaaatttatactgaaaacatgaaatctcaaataaatgaaggtaaagatttttgtggaaataaaattgttgagaacaaaatattactgcacctt

SEQ ID NO: 618767 - DNA, 120 bp, Artificial Sequence
  ENSG00000177483_10 (sequence is synthesized)
gaaaatcctagcacattaccacaggataaagctttagagacattactccaaccctgtaaagattgtcaaacttcctggacctctgtttttgatgattcgataatttctgcctgtggatat

SEQ ID NO: 618768 - DNA, 120 bp, Artificial Sequence
  ENSG00000177483_11 (sequence is synthesized)
tatgaaagcctacaaaacactgctgactcagccttagatttttctgctatgctaccaaagatcgcagtcagagataatcaggcaatagaagataatacgtccctaaaagttgctcatagc

SEQ ID NO: 618769 - DNA, 120 bp, Artificial Sequence
  ENSG00000177483_12 (sequence is synthesized)
agtaccacaaagaaaacatgctttcacaatataggagaaatgtgtactaaatcattgacagatgcagcaagttgtacagtcacaattaatcagacagtggacgttagcactgattttagg

SEQ ID NO: 618770 - DNA, 120 bp, Artificial Sequence
  ENSG00000177483_13 (sequence is synthesized)
gcttgtttcacaaccagcagggcaacaagtgcaagaccttctgtagtatctacatcaagcaacacagagataacaatgatgaataaaaaacgacctgatgaatggcaaaatgagaaacaa

SEQ ID NO: 618771 - DNA, 120 bp, Artificial Sequence
  ENSG00000177483_14 (sequence is synthesized)
aaaagtgtggcttgtagtacagattggtcatacagtgaagattgtatagatacacagatggctataacaaaaggatcaggaaaatctctctccgttgacagtttaaaacctaatggaaat

SEQ ID NO: 618772 - DNA, 120 bp, Artificial Sequence
  ENSG00000177483_15 (sequence is synthesized)
tttctaaataaggatttcctggaattaagaaaagcatgtggtatcacagacctaaagaaacatcctgagagggaatttcaactttttaaagatacagagaaggatttgccatcaatgtgc

SEQ ID NO: 618773 - DNA, 120 bp, Artificial Sequence
  ENSG00000177483_16 (sequence is synthesized)
tgtcagaagataatgcagagagccataaaagcagagctgcaccttttaaatgttcactatcagatgtgtcgtcgccattgttgtgatatttacaaacttgtcatggaaaatagggaagga

SEQ ID NO: 618774 - DNA, 120 bp, Artificial Sequence
  ENSG00000177483_17 (sequence is synthesized)
gatatgtgactttgaaagaaaaaatacacaaaggcataccactggaagagctgcccccactgtcactagaatcaaaattattatctaccttctctacttttgcttccaggctaatgaaaa

SEQ ID NO: 618775 - DNA, 120 bp, Artificial Sequence
  ENSG00000177483_18 (sequence is synthesized)
aagaaacacatgtcttttcagaagcagatgctgaacaagataatcagagggctcatgatgttgatgtttcttcaaacctaaaaaagacactctctcaaatgtctttatcatctgacaata

SEQ ID NO: 618776 - DNA, 120 bp, Artificial Sequence
  ENSG00000177483_19 (sequence is synthesized)
gtcatgctacacaaaacatatcacccaagaaagatgactttaaaaatggtgatataaatgcagactttagtcaactgaaacttggtgataaagactgcagacattaccaagagacaagcg

SEQ ID NO: 618777 - DNA, 120 bp, Artificial Sequence
  ENSG00000177483_20 (sequence is synthesized)
aagactggtctgatgctaaagagagcctgacaggagttgacgtctcagggacacagggaaatcaagtagaacaagacacatggaatttggatcttacaggagaaatgaagaatgttgaac

SEQ ID NO: 618778 - DNA, 120 bp, Artificial Sequence
  ENSG00000177483_21 (sequence is synthesized)
cctcacaaagagataaaggttatttgatacatgttggtggcctctgcccttcagtatctgaggccgatttaaggtctcatttccaaaaataccaagtttctgaaatttcaatttatgatt

SEQ ID NO: 618779 - DNA, 120 bp, Artificial Sequence
  ENSG00000177483_22 (sequence is synthesized)
ctactaattacagatatgcatctcttgcttttacaaaaaacagcgatgcaaagatagctgtgaaagaaatgaatgggatagaaataaatggaaagtcagtaaatgtgtggcctgttaaaa

SEQ ID NO: 618780 - DNA, 120 bp, Artificial Sequence
  ENSG00000177483_23 (sequence is synthesized)
ttcttggagaatatacatcaccactttcctccaaaaatgggaatagaattagttcgaataatttagagaaaagcaccaacaaacaaatccactcagaattctccatttctagattgccca

SEQ ID NO: 618781 - DNA, 120 bp, Artificial Sequence
  ENSG00000177483_24 (sequence is synthesized)
gaactaggccacggcagctgggttctgagcaagacagtgaggttttcccttccgaccagggtgtcaagaagaattgtaagcagattgaatctgctaaattattacctgatacacccgttc

SEQ ID NO: 618782 - DNA, 120 bp, Artificial Sequence
  ENSG00000177483_25 (sequence is synthesized)
aattcatacctccaaatacattgaaccttcgtagctttaccaagatcataaagagactggctgaactgcatccagaagtcagcagagaccatattataaatgcacttcaggaagtgagaa

SEQ ID NO: 618783 - DNA, 120 bp, Artificial Sequence
  ENSG00000177483_26 (sequence is synthesized)
taagacataaaggttttctgaatggcttatctattactactattgtggagatgacttcatctcttctgaaaaactctgcttccagttaggaattcaaaaaacaataaagagaacttcctt

SEQ ID NO: 618784 - DNA, 120 bp, Artificial Sequence
  ENSG00000177483_27 (sequence is synthesized)
ggaaagtgtgtttcctccttcagagaatgttctacagcacttaggaaaaagtagtaataacaagatgatgtaattaaataggctctataaatgggctaagctgttaaaatattctacttt

SEQ ID NO: 618785 - DNA, 120 bp, Artificial Sequence
  ENSG00000177483_28 (sequence is synthesized)
ggctctataaatgggctaagctgttaaaatattctactttatatccctcctttaaaatctagcaacagttgtctatacaatattaagatcttctctatatatttaaagttaaaatataat

SEQ ID NO: 618786 - DNA, 120 bp, Artificial Sequence
  ENSG00000177483_29 (sequence is synthesized)
cttagaacattaagatgcatatttgtgatctaaagaaattgtcttgtccattttaaaaacctttattaagtcacttttaaaatgtattgaccaagaaggaggtttgttgttacatcaatg

SEQ ID NO: 618787 - DNA, 120 bp, Artificial Sequence
  ENSG00000177483_30 (sequence is synthesized)
tttgtgaaatgatttccatacataaaaaatgtaatttacctgaactttgtcttaagactcttacattggattataggataacagataaataaactgtatagatacattcagtatcataca

SEQ ID NO: 618788 - DNA, 120 bp, Artificial Sequence
  ENSG00000177483_31 (sequence is synthesized)
acattttggaatgtgtatgctttcaggcttccaagataattaaattactgtcatgatacatttcatgcattttttatgacttcagtataaaacattcaggtgtgttagccttccctggga

SEQ ID NO: 618789 - DNA, 120 bp, Artificial Sequence
  ENSG00000177483_32 (sequence is synthesized)
agggtaaacttgtatgtgctttggtaaagtacttaaattccaatgttccctatagtgcttgcattcattttgtgaaaagttttgttgtattgttagaacaattttcaaaggctgatttta

SEQ ID NO: 618790 - DNA, 120 bp, Artificial Sequence
  ENSG00000177483_33 (sequence is synthesized)
ttgtattgttagaacaattttcaaaggctgattttatgccttatctgatagaaatatagaatagatagttctttaattgcttactttttaaaagtaatataatatttaagttgcattttt

SEQ ID NO: 618791 - DNA, 120 bp, Artificial Sequence
  ENSG00000177483_34 (sequence is synthesized)
tttaaatgttttaaatgtttatagcattcaatgtgtagttggatttacttgactaaaaattagccctttaacgtttatatttgttgtatttatatttaataaaggcatctaatctttagt

SEQ ID NO: 618792 - DNA, 120 bp, Artificial Sequence
  ENSG00000177483_35 (sequence is synthesized)
gaaattcgcacatatgcttcttcttgccgtggagactgatggagcctctgctgcggggcggggactctagcgagagggggacgtgaagttcgttccgtactcaggcgtgtgtgcccctga

SEQ ID NO: 618793 - DNA, 120 bp, Artificial Sequence
  ENSG00000177483_36 (sequence is synthesized)
ccgacgcgtaggacgccctggaggacggcgccagctcctgacctagtgtgaggtgcccggacggtttccctaagaagcgcgtatttaagatgagatctgaagttgagcgtgaactcaaga

SEQ ID NO: 618794 - DNA, 120 bp, Artificial Sequence
  ENSG00000177483_37 (sequence is synthesized)
aaatttaaaataataatataatcacaaaataatatgaaattttaaaacaagcatactgtaattagttaactactaaggcaaaactaattaccctaaaattgactggcttaaacaacactc

SEQ ID NO: 618795 - DNA, 120 bp, Artificial Sequence
  ENSG00000177483_38 (sequence is synthesized)
ataaactcacagtttgcagatcaggattcaggagtgacttagccgggtagttttagctcagggtttttcatgttgcagtcaagatgttggcctggactgtagtcattcagaggcttccct

SEQ ID NO: 618796 - DNA, 120 bp, Artificial Sequence
  ENSG00000177483_39 (sequence is synthesized)
gagaccagaggatctgcttctcagggggctcattcacatgtctgttggcaagaggcctcagttcctcaccacataggctcttccataaggctcttcaaatgtctttgcatcatggcagct

SEQ ID NO: 618797 - DNA, 120 bp, Artificial Sequence
  ENSG00000177483_40 (sequence is synthesized)
aaacagttcggcaaggaggccgggcccctgtcccgcctctgagggcggaggactcggcctgcaccggacccaagcgaggggcagtctggcctctgctggcagaagcagcgcttccaagta

SEQ ID NO: 618798 - DNA, 120 bp, Artificial Sequence
  ENSG00000177483_41 (sequence is synthesized)
ttttcatatggtgactttgcagagctgcgcggtccagacgagggtttcaggctgcaaagcgggaaagtcttgggggccgctctgcgctccaagacagacgcccacaatctcttctacgtc

SEQ ID NO: 618799 - DNA, 120 bp, Artificial Sequence
  ENSG00000177483_42 (sequence is synthesized)
atatgtgtttattaatttcaaatctgttttttcttagaaatgtgtcactagctttaagtttattctagagagtttctctaattttcatttttgaagagtaaaatgaggagtagattgtta

SEQ ID NO: 618800 - DNA, 120 bp, Artificial Sequence
  ENSG00000177483_43 (sequence is synthesized)
ctgggtttgttagttagcctaagggtaatagaacccttgagtttcatggaggggccacagtgcgtggttggcatgatgaatccagtgaaaacatagatttgttttttctttataaagttc

SEQ ID NO: 618801 - DNA, 120 bp, Artificial Sequence
  ENSG00000177483_44 (sequence is synthesized)
actgcctttagaaaaacatatttactgtggttcatttttttcttttactcagcatttaaaagaaaatatttagagttctagtaaaattagaaccaagtggggttgggcaaggtggcttgt

SEQ ID NO: 618802 - DNA, 120 bp, Artificial Sequence
  ENSG00000177483_45 (sequence is synthesized)
gggaagctgaggcaggagaatcacttaaggccaagagttcaagaccaatgtgggcaacataataggacccccgtctctacaatacatttttttacaaattagctgggcattgtggcacac

SEQ ID NO: 618803 - DNA, 80 bp, Artificial Sequence
  ENSG00000177483_46 (sequence is synthesized)
aataggacccccgtctctacaatacatttttttacaaattagctgggcattgtggcacacatgtagtcctagcaacttgc

SEQ ID NO: 618804 - DNA, 120 bp, Artificial Sequence
  ENSG00000177485_0 (sequence is synthesized)
gcctttggcttcagcgcttcgcccccgcgctgtgccctctgtcggcggcgtggggcagctgtagcagcgttggcggcaggaggcggcggccgcgtcgacgtcgacccagactggagcgac

SEQ ID NO: 618805 - DNA, 120 bp, Artificial Sequence
  ENSG00000177485_1 (sequence is synthesized)
gtttaaagaaggggcagaatcgctggggagtgcggcttcttcttgttgggggactcccagccttccgcgcgtccggaggaggagaagcggcggcgccgggaagcaggcatggagagtaga

SEQ ID NO: 618806 - DNA, 120 bp, Artificial Sequence
  ENSG00000177485_2 (sequence is synthesized)
aaactgatttctgctacagacattcagtactctggcagtctgctgaactccttgaatgagcaacgtggccatggactcttctgtgatgttaccgttattgtggaagaccgaaaattccgg

SEQ ID NO: 618807 - DNA, 120 bp, Artificial Sequence
  ENSG00000177485_3 (sequence is synthesized)
gctcacaagaatattctttcagcttctagtacctacttccatcagctcttctctgttgctgggcaagttgttgaactgagctttataagagcagagatctttgcagaaattctcaattat

SEQ ID NO: 618808 - DNA, 120 bp, Artificial Sequence
  ENSG00000177485_4 (sequence is synthesized)
atctatagttctaaaattgttcgtgttagatcagatttgcttgatgagttaattaaatcagggcagttattaggagtgaaatttatagcagagcttggtgtcccattgtcacaggttaaa

SEQ ID NO: 618809 - DNA, 120 bp, Artificial Sequence
  ENSG00000177485_5 (sequence is synthesized)
agcatctcaggtacagcgcaggatggtaatactgagcctttacctcctgattctggtgacaagaaccttgtaatacagaaatcaaaagatgaagcccaagataatggggctactataatg

SEQ ID NO: 618810 - DNA, 120 bp, Artificial Sequence
  ENSG00000177485_6 (sequence is synthesized)
cctattataacagagtctttttcattatctgccgaagattatgaaatgaaaaagatcattgttaccgattctgatgatgatgatgatgatgtcattttttgctccgagattctgcccaca

SEQ ID NO: 618811 - DNA, 120 bp, Artificial Sequence
  ENSG00000177485_7 (sequence is synthesized)
aaggagactttgccgagtaataacacagtggcacaggtccaatctaacccaggccctgttgctatttcagatgttgcacctagtgctagcaataactcgccccctttaacaaatatcaca

SEQ ID NO: 618812 - DNA, 120 bp, Artificial Sequence
  ENSG00000177485_8 (sequence is synthesized)
cctactcagaaacttcctactcctgtgaatcaggcaactttgagccaaacacaaggaagtgaaaaattgttggtatcttcagctccaacacatctgactcccaatattattttgttaaat

SEQ ID NO: 618813 - DNA, 120 bp, Artificial Sequence
  ENSG00000177485_9 (sequence is synthesized)
cagacaccactttctacaccaccaaatgtcagttcttcacttccaaatcatatgccctcttcaatcaatttacttgtgcagaatcagcagacaccaaacagtgctattttaacaggaaac

SEQ ID NO: 618814 - DNA, 120 bp, Artificial Sequence
  ENSG00000177485_10 (sequence is synthesized)
aaggccaatgaagaggaggaggaggaaataatagatgatgatgatgacactattagctccagtcctgactcggccgtcagtaatacatctttggtcccacaggctgatacctcccaaaat

SEQ ID NO: 618815 - DNA, 120 bp, Artificial Sequence
  ENSG00000177485_11 (sequence is synthesized)
accagttttgatggatcattaatacagaagatgcagattcctacacttcttcaagaaccactttccaattccttaaaaatttcagatataattactagaaatactaatgatccaggcgta

SEQ ID NO: 618816 - DNA, 120 bp, Artificial Sequence
  ENSG00000177485_12 (sequence is synthesized)
ggatcaaaacatctaatggagggtcagaagatcattactttagatacagctactgaaattgaaggcttatcgactggttgcaaggtttatgcaaatatcggtgaagatacttatgatata

SEQ ID NO: 618817 - DNA, 120 bp, Artificial Sequence
  ENSG00000177485_13 (sequence is synthesized)
gtgatccctgtcaaagatgaccctgatgaaggggaggccagacttgagaatgaaataccaaaaacgtctggcagcgagatggcaaacaaacgtatgaaagtaaaacatgatgatcactat

SEQ ID NO: 618818 - DNA, 120 bp, Artificial Sequence
  ENSG00000177485_14 (sequence is synthesized)
gagttaatagtagatggaagggtctattatatctgtattgtatgcaaaaggtcatatgtctgtctgacaagcttgcggagacattttaacattcattcttgggagaagaagtatccgtgc

SEQ ID NO: 618819 - DNA, 120 bp, Artificial Sequence
  ENSG00000177485_15 (sequence is synthesized)
cgttactgtgagaaggtatttcctcttgcagaatatcgcacaaagcatgaaattcatcacacaggggagcgaaggtatcagtgtttggcctgtggcaaatctttcatcaactatcagttt

SEQ ID NO: 618820 - DNA, 120 bp, Artificial Sequence
  ENSG00000177485_16 (sequence is synthesized)
atgtcttcacatataaagtcagttcatagtcaagatccttctggggactcaaagctttatcgtttacatccatgcaggtctttacaaatcagacaatatgcatatctttccgatagatca

SEQ ID NO: 618821 - DNA, 120 bp, Artificial Sequence
  ENSG00000177485_17 (sequence is synthesized)
agcactattcctgcaatgaaggatgatggtattgggtataaggttgacactggaaaagaacctccagtagggaccactacatctactcagaacaagccaatgacctgggaagatattttt

SEQ ID NO: 618822 - DNA, 120 bp, Artificial Sequence
  ENSG00000177485_18 (sequence is synthesized)
attcagcaggaaaatgattcaatttttaaacaaaatgtaacagatggcagtactgagtttgaatttataataccagagtcttactaaactcctttgaaatactagaaagttttgttttgg

SEQ ID NO: 618823 - DNA, 120 bp, Artificial Sequence
  ENSG00000177485_19 (sequence is synthesized)
atgatggggcaggggtttcagaagatctgtaaaacaaattaaggtgcgaacaagttaatttgatctgccacattatctgaaggaagtgtagtgggatttttgttgataatttttagaagc

SEQ ID NO: 618824 - DNA, 120 bp, Artificial Sequence
  ENSG00000177485_20 (sequence is synthesized)
aaattttcctgaaagttttgagtagaggtgagaccccctccccaagtatctgtttatatagttagttttcagctcatttaaaagaggcaaaaattaaaagcttggagagatagtttcctg

SEQ ID NO: 618825 - DNA, 120 bp, Artificial Sequence
  ENSG00000177485_21 (sequence is synthesized)
gcataccctagtacatcttacagctttccccttccatgttagcactttactgctgaattctcaattttcttaacattgagacaataaatgtgtgttttgtcttgtatatggcataaagag

SEQ ID NO: 618826 - DNA, 120 bp, Artificial Sequence
  ENSG00000177485_22 (sequence is synthesized)
taaataagttttagagttgttctggaaaatgtcagaataagtcagtacttgggttgtgtaatctgctagtccaagcgaacagcaacctcctgctaccctccctctatgaaaatagccatg

SEQ ID NO: 618827 - DNA, 120 bp, Artificial Sequence
  ENSG00000177485_23 (sequence is synthesized)
cagacaagtctctcatctgaagaacaaattagatttagctaattagaattaatcctggctttcattgccatagtctgtaaaagactttggtggctagaccactttataccttcgcagtgt

SEQ ID NO: 618828 - DNA, 120 bp, Artificial Sequence
  ENSG00000177485_24 (sequence is synthesized)
ggtctctgggggcaaaaaactaatgaaaacaatctctgtaatggcagataggaggagatgaaaagttctgttgcatggatttttaattctctggctaccacatagtagagaatggaatga

SEQ ID NO: 618829 - DNA, 120 bp, Artificial Sequence
  ENSG00000177485_25 (sequence is synthesized)
agatttccttttggcttcttaaggttaaaaatattcccatgaacatgaaaattttcaaattttgaatctgaaagccaccaaatgtatctttatgtataaatccttgtaaatgatagattc

SEQ ID NO: 618830 - DNA, 120 bp, Artificial Sequence
  ENSG00000177485_26 (sequence is synthesized)
catgggtgagactttacatattttgggtgggaggctactggcatatatttttaaatgttcatattgcgtagaatctccactaggaagtctttatttgaaatagttgaatcagtgatctag

SEQ ID NO: 618831 - DNA, 120 bp, Artificial Sequence
  ENSG00000177485_27 (sequence is synthesized)
tattttcctttcggcaagatttgttaggtttttaccccttctaaaataagttttattccatctgcaaattgctgcaatattatagtaatcagaaactacataaggaatgttatataggct

SEQ ID NO: 618832 - DNA, 120 bp, Artificial Sequence
  ENSG00000177485_28 (sequence is synthesized)
tgtcagttcccatttttcttgacaacaataaataccacttttaaaaatgacacatatttaaacacttagaaaataaagttaacacttactgaagtgctagtactaaactgtgctagtact

SEQ ID NO: 618833 - DNA, 120 bp, Artificial Sequence
  ENSG00000177485_29 (sequence is synthesized)
aaaagaaaacaggttggaacatacatatagcctagcatttataacagaattgttgaacgtctgtaaatgattttttttttttttgcaaaggaaaaaattgatactggaaaagattgttgt

SEQ ID NO: 618834 - DNA, 120 bp, Artificial Sequence
  ENSG00000177485_30 (sequence is synthesized)
gcatagttattagtcatttgtaaccttgcttaagtatttcttagtccaacatagatattttctttctcctgaccatgtattttaaaatatagtctatttcttgactttgaacttaaagct

SEQ ID NO: 618835 - DNA, 120 bp, Artificial Sequence
  ENSG00000177485_31 (sequence is synthesized)
ttaatcataatttctcatgtatacatcgttcttctgatggtaagctggatttgaaggtagtggtttcagtgtttcttaagttggtagctgagggtatcaggcatcagttcatgcaataat

SEQ ID NO: 618836 - DNA, 120 bp, Artificial Sequence
  ENSG00000177485_32 (sequence is synthesized)
acaagaaaaaaaatcctttgcttgccaagaggtagagtgatgtgcatttatctgttttctgttctgtaagtctagaccttcaaaccatttgtaaactaacccctgggaaatttgaaatta

SEQ ID NO: 618837 - DNA, 120 bp, Artificial Sequence
  ENSG00000177485_33 (sequence is synthesized)
cctgataacttaagactctgtgatctctggaatcaccatatgtttcttttttgtgtagatattaataacattactctttgactatagtgtgcactctgaaatgtactcagtgaaaatttg

SEQ ID NO: 618838 - DNA, 120 bp, Artificial Sequence
  ENSG00000177485_34 (sequence is synthesized)
ttttgagtttcattaatgctatttcaccagttagacataattacttctaccgatgtgaatgatacggatgccggcagagcttccagatctttcagactcaactgctaggtcaattagttt

SEQ ID NO: 618839 - DNA, 120 bp, Artificial Sequence
  ENSG00000177485_35 (sequence is synthesized)
gtcataataaaacttggcagattctacaagtctattatgacaaaccaggaactaattctataatggaaaactatccattctgaataataggtatgtaattatttgctgctgctgctgtgc

SEQ ID NO: 618840 - DNA, 120 bp, Artificial Sequence
  ENSG00000177485_36 (sequence is synthesized)
tctgtaaattctgaatatgacatttaaactctgtgcctactaaaggtatcttctggagtttttgggaggagagaaactggaaaattaaattgtatttttgccagaagactcttacttgca

SEQ ID NO: 618841 - DNA, 120 bp, Artificial Sequence
  ENSG00000177485_37 (sequence is synthesized)
tgtgtctcagggtcttcagtttttctataagtttccatatccaaagttcagaattcatgtgaaatacttctttggggcaaaagtccttcattcctggtatttattggattggaaatctgt

SEQ ID NO: 618842 - DNA, 120 bp, Artificial Sequence
  ENSG00000177485_38 (sequence is synthesized)
agcaagatgctgtttaaaattaccatattgtttttttatcttatacttagctctctggctattgaacttccttttcttgtttgaagttagcttcaaatttgctcctatgctaaattacct

SEQ ID NO: 618843 - DNA, 120 bp, Artificial Sequence
  ENSG00000177485_39 (sequence is synthesized)
gtaaatattctggataggaactacttgaaatagtaatttgttaaaagatatgacaaaatgaaaatgcttaaactacagaaatttaaaaatgccataacaatcttgcgagactaactttaa

SEQ ID NO: 618844 - DNA, 120 bp, Artificial Sequence
  ENSG00000177485_40 (sequence is synthesized)
aatatactttaaatgattattatgattttggtggtaacgatcccccacacacaaccactatgaagaaataatgccgcatttttcccccattgtaccaaaaagataaaaaaatggtaaaca

SEQ ID NO: 618845 - DNA, 120 bp, Artificial Sequence
  ENSG00000177485_41 (sequence is synthesized)
ctgatcaaggtattttgtattgtcaaggcatgcatattctaaagaattaaatgctaacttaacagcactggctttctggctggtcaactatatgaaaccttgttcattcctccgagtact

SEQ ID NO: 618846 - DNA, 120 bp, Artificial Sequence
  ENSG00000177485_42 (sequence is synthesized)
gtaatgttcacacttgtacaatcttccctgtcatgactttaagttctacttttcattaaccatggcctgatattagttcttagagcttcttgtggcaaaaataaaatgatttaattctga

SEQ ID NO: 618847 - DNA, 120 bp, Artificial Sequence
  ENSG00000177489_0 (sequence is synthesized)
atggggatggtgagacataccaatgagagcaacctagcaggtttcatccttttagggttttctgattatcctcagttacagaaggttctatttgtgctcatattgattctgtatttacta

SEQ ID NO: 618848 - DNA, 120 bp, Artificial Sequence
  ENSG00000177489_1 (sequence is synthesized)
actattttggggaataccaccatcattctggtttctcgtctggaacccaagcttcatatgccgatgtatttcttcctttctcatctctccttcctgtaccgctgcttcaccagcagtgtt

SEQ ID NO: 618849 - DNA, 120 bp, Artificial Sequence
  ENSG00000177489_2 (sequence is synthesized)
attccccagctcctggtaaacctgtgggaacccatgaaaactatcgcctatggtggctgtttggttcacctttacaactcccatgccctgggatccactgagtgcgtcctcccggctgtg

SEQ ID NO: 618850 - DNA, 120 bp, Artificial Sequence
  ENSG00000177489_3 (sequence is synthesized)
accctggtacagtccaccctcaccctgcagctgcccttctgtgggcatcgccaagtggatcatttcatctgcgaggtccctgtgctcatcaagctggcttgtgtgggcaccacgtttaac

SEQ ID NO: 618851 - DNA, 120 bp, Artificial Sequence
  ENSG00000177489_4 (sequence is synthesized)
gaggctgagctttttgtggctagtatccttttccttatagtgcctgtctcattcatcctggtctcctctggctacattgcccacgcagtgttgaggattaagtcagctaccaggagacag

SEQ ID NO: 618852 - DNA, 120 bp, Artificial Sequence
  ENSG00000177489_5 (sequence is synthesized)
aaagcattcgggacctgcttctcccacctgacagtggtcaccatcttttatggaaccatcatcttcatgtatctgcagccagccaagagtagatccagggaccagggcaagtttgtttct

SEQ ID NO: 618853 - DNA, 120 bp, Artificial Sequence
  ENSG00000177489_6 (sequence is synthesized)
ctcttctacactgtggtaacccgcatgcttaaccctcttatttataccttgaggatcaaggaggtgaaaggggcattaaagaaagttctagcaaaggctctgggagtaaatattttatga

SEQ ID NO: 618854 - DNA, 120 bp, Artificial Sequence
  ENSG00000177494_0 (sequence is synthesized)
actctgcgcaggaaagatcagagagaagtccagagccttgcctgcttgtgatcctggtggagaaggtggagtatggtgagctgcttgctaaggacagccaggcaacgctgtgtttgtgaa

SEQ ID NO: 618855 - DNA, 120 bp, Artificial Sequence
  ENSG00000177494_1 (sequence is synthesized)
gatgtgctccaccttctcctctgtgcatcccagctcctcctgctgaaacagctgagcttgctttttggatttcttagactcctggcctctgagagacacctctaaggacaaactgacctt

SEQ ID NO: 618856 - DNA, 120 bp, Artificial Sequence
  ENSG00000177494_2 (sequence is synthesized)
gcattgggaactttattatccagatcctcataggctttgtctactctggattgcttgttgcaacagttcttaggaagcaagattgtctcctgcaccagcatctgcctgtgtttgctttta

SEQ ID NO: 618857 - DNA, 120 bp, Artificial Sequence
  ENSG00000177494_3 (sequence is synthesized)
cctactttgagcaagacccagtgaggccctagctctgttggtcctgaaaagcctgaaccctgaggctgtttctcctgcctccaaaatgcaattataggaaataagaagcacagaaacagt

SEQ ID NO: 618858 - DNA, 120 bp, Artificial Sequence
  ENSG00000177494_4 (sequence is synthesized)
ggaaacaaccaggaggagaaacaagaaaacctaaaattttcaatattcaaaaatacctgtcgtggtggttgatgcagaaaacactgagttcatcaaagagctttgtaattgttggaccag

SEQ ID NO: 618859 - DNA, 120 bp, Artificial Sequence
  ENSG00000177494_5 (sequence is synthesized)
agaacccctttgctacaggaactgatatgttttgtctttctggcctagtcaagggaggataagtaagtatctggggcatggaaggaatgcactcttgggctgttttgcttgtatctgact

SEQ ID NO: 618860 - DNA, 120 bp, Artificial Sequence
  ENSG00000177494_6 (sequence is synthesized)
cacccctgactctccagtgaagcagaaaggaagaaacctcacaccacccaggtgtggccagactttggccattattgtgaatccccaagagttaccacaggcccttcccaaatatatatt

SEQ ID NO: 618861 - DNA, 120 bp, Artificial Sequence
  ENSG00000177494_7 (sequence is synthesized)
taatcttgtggttcaaataagcttttggctcacatctaagcacatcataaagaacgctgtagaagaggtgacatgatgaggcgggaagacgaggaagaggagggaacaatgatgaaggca

SEQ ID NO: 618862 - DNA, 120 bp, Artificial Sequence
  ENSG00000177494_8 (sequence is synthesized)
aaaggggacttagagatgaaggaggaggaagagattagtgagacaggagaactggttggcccttttgtgagtgctatgcccactccaatgccccacaacaagggcacccggttctctgag

SEQ ID NO: 618863 - DNA, 120 bp, Artificial Sequence
  ENSG00000177494_9 (sequence is synthesized)
tatgccacctgccgcctgtgtggcaggcaggtgagccgtggccctggggtcaacgtgggcaccactgcactgtggaagcatctgaaaagcatgcacagagaggagctggagaagagtggc

SEQ ID NO: 618864 - DNA, 120 bp, Artificial Sequence
  ENSG00000177494_10 (sequence is synthesized)
catggtcaggctgggcagcgccaggatccaaggccccacgggccccagctccccacaggcattgagggtaactggggtaggctcctggagcaggtgggcaccatggctttgtgggccagc

SEQ ID NO: 618865 - DNA, 120 bp, Artificial Sequence
  ENSG00000177494_11 (sequence is synthesized)
caaagggaaaaggaggtgcttaggagggaaagggcagtggaatggcgggagagggctgtggaaaaaagggagcgagccctggaggaggtggaaagggccatcctggagatgaagtggaag

SEQ ID NO: 618866 - DNA, 120 bp, Artificial Sequence
  ENSG00000177494_12 (sequence is synthesized)
gtgagggctgagaaggaggcatgccagcgggagaaagagctgcctgcagcagtacatcccttccattttgtttaaattgggcttggagaatctattctgaaaacattgactctagacttg

SEQ ID NO: 618867 - DNA, 120 bp, Artificial Sequence
  ENSG00000177494_13 (sequence is synthesized)
tagaaaagagccattttagtttcaactcaaatgtaaagcaaagtagtttggtgacattttgcttttatgtgaaatagtgcacagtatgagttaatctgagcaggtctgaattgaccaaat

SEQ ID NO: 618868 - DNA, 120 bp, Artificial Sequence
  ENSG00000177494_14 (sequence is synthesized)
gcttatctacgaggttcctagagctctgctgacccttggccgaaactctaaaatgtacctattaaagataaatgcttctaccaaagtaaaactctgtgagttgtttcagggcagaatgta

SEQ ID NO: 618869 - DNA, 120 bp, Artificial Sequence
  ENSG00000177494_15 (sequence is synthesized)
ccagccagtcagcgttgtttaacaaaataatcagatttttgcctagcactcggttttggtggagctgacgattttgagggctgaggctggttaggtagctggaatgtgcctatgtgacca

SEQ ID NO: 618870 - DNA, 120 bp, Artificial Sequence
  ENSG00000177494_16 (sequence is synthesized)
gctcacttgcagacaccctgccggaagcagagcttaatcttcctaggactgaggtcttagcacatgtactggtggagtttccagaccaccagtatgaataaaagcttgttctgtgtgacc

SEQ ID NO: 618871 - DNA, 120 bp, Artificial Sequence
  ENSG00000177494_17 (sequence is synthesized)
cagcaagtggaaggacaaagaactgtgagcctcagatctttggacctttccaatgcgtctctttctcctgttattgctgcaatgtattttcttgcttatattaaagttgtttcatcagta

SEQ ID NO: 618872 - DNA, 120 bp, Artificial Sequence
  ENSG00000177504_0 (sequence is synthesized)
atgtggatgctgggagaagtatgtgagatggaaaagttgtttcatggcatccaagaagtgaatgatcctcaaggtgtagcagaggaatttgtaggagagagggatgattgacgtcttcgt

SEQ ID NO: 618873 - DNA, 120 bp, Artificial Sequence; identical to SEQ ID NO: 556826
  ENSG00000177504_1 (sequence is synthesized)

SEQ ID NO: 618874 - DNA, 120 bp, Artificial Sequence; identical to SEQ ID NO: 556827
  ENSG00000177504_2 (sequence is synthesized)

SEQ ID NO: 618875 - DNA, 120 bp, Artificial Sequence
  ENSG00000177504_3 (sequence is synthesized)
gcgggaagaaaggggctgcgacaaagatggcggccgtgacggcacctgaggcggagagcgcgccagcggcacccggccccagcgaccagcccagccaggagctccctcagcacgagctgc

SEQ ID NO: 618876 - DNA, 80 bp, Artificial Sequence
  ENSG00000177504_4 (sequence is synthesized)
agcgaccagcccagccaggagctccctcagcacgagctgccgccggaggagccagtgagcgaggggacccagcacgaccc

SEQ ID NO: 618877 - DNA, 120 bp, Artificial Sequence
  ENSG00000177504_5 (sequence is synthesized)
gcttttcccctgtctccgagagcaccgactaagttcaggcccagccgccagacctcagagatctcaccagcggggtgcttgccattctgaagataataaaatgaatgtgttgcaaattga

SEQ ID NO: 618878 - DNA, 120 bp, Artificial Sequence
  ENSG00000177508_0 (sequence is synthesized)
agacagacaccgacacacaccccccgcgcggcaccctaagtgtccacaacttttggctgccttacttagcccagggcgcagaggctggaaaggtcgcggggagtatcgtgtgagtaaaga

SEQ ID NO: 618879 - DNA, 120 bp, Artificial Sequence
  ENSG00000177508_1 (sequence is synthesized)
gagagatttacaaaatagaagtagtgagaaaggaagaagtgaagggaacggaccggagagcaaaagccctcgtgagaaagggaaagagaaggggagaggagaaaggagagtttcatagcg

SEQ ID NO: 618880 - DNA, 120 bp, Artificial Sequence
  ENSG00000177508_2 (sequence is synthesized)
tccagggcagtgcaggagcccgaagcagcggaagcgatcctggggggaagaggagtgcggagaggggaggggagaggaagggcgaggagggggagtgaaaactagaggagggcgaaggaa

SEQ ID NO: 618881 - DNA, 120 bp, Artificial Sequence
  ENSG00000177508_3 (sequence is synthesized)
gcgaggcgcgacactgctggggagaggagggcagtgaggagcgaggagcgggcagaggcagctccggcggccgagaggagggagcgcggcgcagagaggaggggcttgcgccccgtagaa

SEQ ID NO: 618882 - DNA, 120 bp, Artificial Sequence
  ENSG00000177508_4 (sequence is synthesized)
atgtcaatcagagcccggagccccgggaatctccgccaatctgttcggacctgacctggctcctcgccgccgccctcgccgccgccgtcgccgccgcggagcagatcaataggcgaacgc

SEQ ID NO: 618883 - DNA, 80 bp, Artificial Sequence
  ENSG00000177508_5 (sequence is synthesized)
ataggcgaacgcggagcacagcgcagcgcgggcggcagcgcggccccaagcccggcccagcccccgatgcgcgccggagc

SEQ ID NO: 618884 - DNA, 120 bp, Artificial Sequence
  ENSG00000177508_6 (sequence is synthesized)
gtccgtgccccgcgggccaccatgtccttcccccagctgggataccaatacatccgcccgctttacccgtccgagcgcccgggggccgctggcggcagcggcggcagcgcgggggcccgg

SEQ ID NO: 618885 - DNA, 120 bp, Artificial Sequence
  ENSG00000177508_7 (sequence is synthesized)
gcctgggtgccggagcctcggagctgaacgcctcggggtccctgtccaacgtgctctcgtccgtgtacggggcgccctacgccgcggccgctgcggccgccgccgcccaaggctacggcg

SEQ ID NO: 618886 - DNA, 120 bp, Artificial Sequence
  ENSG00000177508_8 (sequence is synthesized)
ccttcctgccctacgccgcggagctgcccatcttcccgcagctgggcgcgcagtatgagctgaaggacagccccggggtgcagcatccggccgcggctgccgcgtttccgcacccgcacc

SEQ ID NO: 618887 - DNA, 120 bp, Artificial Sequence
  ENSG00000177508_9 (sequence is synthesized)
ccgccttctacccgtatggccagtaccagttcggggacccgtcccgtcccaagaacgccaccagggagagcaccagcacgctgaaggcctggctcaacgagcaccgcaagaacccctacc

SEQ ID NO: 618888 - DNA, 120 bp, Artificial Sequence
  ENSG00000177508_10 (sequence is synthesized)
agatgacttgggcgcctcgcagccgcactgacgaggagggaaacgcttatgggagcgagcgcgaggaggaagacgaagaggaggacgaggaggacggcaaacgcgagctagagctggagg

SEQ ID NO: 618889 - DNA, 120 bp, Artificial Sequence
  ENSG00000177508_11 (sequence is synthesized)
aggaggagctcgggggggaggaggaggacacggggggcgagggcctggctgacgacgacgaggacgaggagatcgatttggagaacttagacggcgcggccaccgagcctgagctgtccc

SEQ ID NO: 618890 - DNA, 120 bp, Artificial Sequence
  ENSG00000177508_12 (sequence is synthesized)
tggctggggcggcgcgcagggatggcgacctaggcctgggacccatttcggactccaaaaatagcgactcggaagatagctctgagggcttagaggaccggccactaccggtcctgagtc

SEQ ID NO: 618891 - DNA, 120 bp, Artificial Sequence
  ENSG00000177508_13 (sequence is synthesized)
tggctccagcgccaccaccagtggccgtggcctcgccgtctctgccgtcgccccccgtgagcctggacccctgcgctcccgcaccagcccccgcctccgccctgcagaagcccaagatct

SEQ ID NO: 618892 - DNA, 120 bp, Artificial Sequence
  ENSG00000177508_14 (sequence is synthesized)
atctggtccctcgcggagactgccacaagcccggacaacccgcgccgctcgcctcccggcgcgggggggtctccaccgggggcagcggtcgcgccttccgccctgcagctctctccggcc

SEQ ID NO: 618893 - DNA, 120 bp, Artificial Sequence
  ENSG00000177508_15 (sequence is synthesized)
ccgccgccgccgctcacagactggtctcagcgccgctgggcaagttcccggcttggaccaaccggccgtttccaggcccaccgcccggcccccgcctgcacccgctctccctgctgggct

SEQ ID NO: 618894 - DNA, 120 bp, Artificial Sequence
  ENSG00000177508_16 (sequence is synthesized)
ctgcccctccgcacctgctgggacttcccggagccgcgggccacccggctgccgccgccgccttcgctcggccagcggagcccgaaggcggaacagatcgctgtagtgccttggaagtgg

SEQ ID NO: 618895 - DNA, 120 bp, Artificial Sequence
  ENSG00000177508_17 (sequence is synthesized)
agaaaaagttactcaagacagctttccagcccgtgcccaggcggccccagaaccatctggacgccgccctggtcttatcggctctctcctcatcctagttctttaaaaaaaacaaaaaaa

SEQ ID NO: 618896 - DNA, 120 bp, Artificial Sequence
  ENSG00000177508_18 (sequence is synthesized)
caaaaaaaactttttttaatcgttgtaataattgtataaaaaaaatcgctctgtatagttacaacttgtaagcatgtccgtgtataaatacctaaaagcaaaactaaacaaagaaagtaa

SEQ ID NO: 618897 - DNA, 120 bp, Artificial Sequence
  ENSG00000177508_19 (sequence is synthesized)
gaaaaagaaataaaaccagtcctcctcagccctccccaagtcgcttctgtggcaccccgcattcgctgtgaggtttgtttgtccggttgattttggggggtggagtttcagtgagaataa

SEQ ID NO: 618898 - DNA, 120 bp, Artificial Sequence
  ENSG00000177508_20 (sequence is synthesized)
acgtgtctgcctttgtgtgtgtgtatatatacagagaaatgtacatatgtgtgaaccaaattgtacgagaaagtatctatttttggctaaataaatgagctgctgccactttgactataa

SEQ ID NO: 618899 - DNA, 120 bp, Artificial Sequence
  ENSG00000177508_21 (sequence is synthesized)
gggctctgcgggtagtgccggagctggccgggaggggcagggcccggggggcgcagggcgcgcgtccctctccactcctgctttctgcggccctgggcgccggcaccgagcgctctaaag

SEQ ID NO: 618900 - DNA, 120 bp, Artificial Sequence
  ENSG00000177508_22 (sequence is synthesized)
accgagcgctctaaaggccctcctttttcttcccccgcttcccttagatcgctgtagtgccttggaagtggagaaaaagttactcaagacagctttccagcccgtgcccaggcggtaaga

SEQ ID NO: 618901 - DNA, 120 bp, Artificial Sequence
  ENSG00000177508_23 (sequence is synthesized)
aaccccgaggttgaggggccagggggactggctggcggggaaaggagaggacgccgagcaccacgcacggccttttgccccggggtaggggggaaccctgctgggacgcattttgtaaaa

SEQ ID NO: 618902 - DNA, 80 bp, Artificial Sequence
  ENSG00000177511_0 (sequence is synthesized)
ccttcgccacgccgccgcgcagcccctccatcttcctgctcggcaccgggccccgcgcgcccctgcctacggggtcccgc

SEQ ID NO: 618903 - DNA, 120 bp, Artificial Sequence
  ENSG00000177511_1 (sequence is synthesized)
tgctctccggggctcctgccagccccaacccccggccccggtggcctccccccacccccgcccgggtccccctcctccgccacacgcgcgcgcgctcacacacacacacacacacacaca

SEQ ID NO: 618904 - DNA, 120 bp, Artificial Sequence
  ENSG00000177511_2 (sequence is synthesized)
cgctcaatggaccgatttccccggtttccctgaacccagcccagcccgggatgagaaactgcaaaatggcccgggtcgccagtgtgctggggctggtcatgctcagcgtcgccctgctga

SEQ ID NO: 618905 - DNA, 120 bp, Artificial Sequence
  ENSG00000177511_3 (sequence is synthesized)
ttttatcgctcatcagctacgtgtccctgaaaaaggagaacatcttcaccactcccaagtacgccagcccgggggcgccccgaatgtacatgttccacgcgggattccggtcacaatttg

SEQ ID NO: 618906 - DNA, 120 bp, Artificial Sequence
  ENSG00000177511_4 (sequence is synthesized)
cgctgaagtttctagacccgtcattcgtgcccattacgaattctctcacccaggaactccaagagaaaccttctaagtggaaatttaatcggacagcgtttttacatcaaaggcaagaaa

SEQ ID NO: 618907 - DNA, 120 bp, Artificial Sequence
  ENSG00000177511_5 (sequence is synthesized)
ttcttcagcatgtcgatgtaataaaaaatttttctttgaccaagaatagtgttcggattggacaactgatgcactatgattattccagccataaatatgttttctctattagcaataact

SEQ ID NO: 618908 - DNA, 120 bp, Artificial Sequence
  ENSG00000177511_6 (sequence is synthesized)
tccggtcacttcttccagatgtgtcacccattatgaacaagcattataatatttgtgctgtggttggaaatagtgggatcctgacagggagccagtgtggacaagaaatagataaatcag

SEQ ID NO: 618909 - DNA, 120 bp, Artificial Sequence
  ENSG00000177511_7 (sequence is synthesized)
attttgttttccgttgcaatttcgcccctacggaggctttccaaagagatgttggaagaaaaaccaatcttaccaccttcaaccccagcatcctggaaaaatattacaacaatctcttga

SEQ ID NO: 618910 - DNA, 120 bp, Artificial Sequence
  ENSG00000177511_8 (sequence is synthesized)
ctattcaggaccgtaacaactttttcctcagtttaaaaaagcttgacggggccattctttggatccctgcatttttcttccacacttcagcaactgtgaccaggacattagttgactttt

SEQ ID NO: 618911 - DNA, 120 bp, Artificial Sequence
  ENSG00000177511_9 (sequence is synthesized)
ttgttgaacacagaggtcagttaaaagtccaactggcttggccgggaaatataatgcaacatgtcaacaggtactggaaaaacaaacatttgtcacctaaacggctgagcacaggtattc

SEQ ID NO: 618912 - DNA, 120 bp, Artificial Sequence
  ENSG00000177511_10 (sequence is synthesized)
ttatgtacacccttgcatcagcaatatgtgaagagatccacttgtatggattttggccgtttggatttgaccccaacacaagggaagatcttccataccattactatgacaaaaaaggaa

SEQ ID NO: 618913 - DNA, 120 bp, Artificial Sequence
  ENSG00000177511_11 (sequence is synthesized)
ccaaatttaccaccaagtggcaggagtcccaccagctgcctgctgagtttcagctgctgtaccgaatgcatggggaagggctcaccaagctgactctgtcacactgtgcctaagaactcc

SEQ ID NO: 618914 - DNA, 120 bp, Artificial Sequence
  ENSG00000177511_12 (sequence is synthesized)
aaacggaaagcgccaaatggctgtttaaaaagtgccccaaatcaaattgaatagccttcagaatagaaccctagagaatgtcttataaggattgtctgccatttaaaaggaaagatgtct

SEQ ID NO: 618915 - DNA, 120 bp, Artificial Sequence
  ENSG00000177511_13 (sequence is synthesized)
tttctcttttgcactgctcttttaagagttttagcagatttagcaggacagatgcattgaagccacatggtttagacttgattgataaagggaatgttgcatttgggactatgctgctaa

SEQ ID NO: 618916 - DNA, 120 bp, Artificial Sequence
  ENSG00000177511_14 (sequence is synthesized)
cgaaatggtttgaagtattttcatgtttggattttaataataaactgcctctcatttttatgaggactagagctatagtttctgcagctctgctcagatagtcctcataatcagaggcct

SEQ ID NO: 618917 - DNA, 120 bp, Artificial Sequence
  ENSG00000177511_15 (sequence is synthesized)
ctggccaactggggcaggacctgttttgctggtgggatcagactctgaaaaatggaaacgtaaaaaactggtttgcatatctcatcttctatctatctccctatctccatctctatcacc

SEQ ID NO: 618918 - DNA, 120 bp, Artificial Sequence
  ENSG00000177511_16 (sequence is synthesized)
atctcactccttccctctgcaactactccctgccctaccaccgtggagtttaataatttgctaggaatcctattgaattcgctttgcttgtatatgttgcatttgtacttgatgtgttta

SEQ ID NO: 618919 - DNA, 120 bp, Artificial Sequence
  ENSG00000177511_17 (sequence is synthesized)
aggttctgggtaactttgatgcttcatgacaaaataggcaaatcacgatggactcccttgtgattccttttttaaagaaatgcctctgatgcagtcctcaccagtccattcagtcattct

SEQ ID NO: 618920 - DNA, 120 bp, Artificial Sequence
  ENSG00000177511_18 (sequence is synthesized)
acagcaagatggtccctctgtggtgagtgggatataaggcagtgcatctttcatgatcacaaagaaagcctatgttgtggatagcattgcgtctcttgatgtaggcattgttatggcaaa

SEQ ID NO: 618921 - DNA, 120 bp, Artificial Sequence
  ENSG00000177511_19 (sequence is synthesized)
taatagcactgtggccacatctgtaaggccattccagcctaaatttagtgtctcccataatcccaacccatgcactaggctgggtgttctctcagaatatagaggcaatgaatcagctta

SEQ ID NO: 618922 - DNA, 120 bp, Artificial Sequence
  ENSG00000177511_20 (sequence is synthesized)
agaccctgggacacacaaaggaaaaggaagaagaatatttagaagttgttatggaatcctgtgtaccctaaagtgtggtaaccatgttacccattccagctgggttaaagtggaggagga

SEQ ID NO: 618923 - DNA, 120 bp, Artificial Sequence
  ENSG00000177511_21 (sequence is synthesized)
tcttggccaggccaggtgcccaggtgactagtgctgaggtgcgatcgttttccgtatcattgtgtgcaccaccaccaatccagaaccatttgctctctttgagaacattgtagcactgga

SEQ ID NO: 618924 - DNA, 120 bp, Artificial Sequence
  ENSG00000177511_22 (sequence is synthesized)
tattccctctttccactgaagtcagatctatacaactacaaattaagcatttcaaaagaaaaagccattgtgcagtggcaagagttggaatccaagattatgtagacctgcgatgaagga

SEQ ID NO: 618925 - DNA, 120 bp, Artificial Sequence
  ENSG00000177511_23 (sequence is synthesized)
agtagctggccattctcattttctttatttcagccatatgagtagaaatcaaatcattcccatccctggctttttactgagcagcactttgttcttccaattcagcccaacgtctggcca

SEQ ID NO: 618926 - DNA, 120 bp, Artificial Sequence
  ENSG00000177511_24 (sequence is synthesized)
agttgatgttaaattttaataagagtttctttcttctttccaaatgccagtcaagcatatttgttatgcatttgagtggggtagctcattcttttcctgaaatctcatctagattgcttg

SEQ ID NO: 618927 - DNA, 120 bp, Artificial Sequence
  ENSG00000177511_25 (sequence is synthesized)
caatgcgacaaataactgtttaaaaaatgtgctgtagttcagtgatgagctcattgcccctctttaggaaggtaagatcatgcctaaaattaaaccgaatatggtaaggaaagacactat

SEQ ID NO: 618928 - DNA, 120 bp, Artificial Sequence
  ENSG00000177511_26 (sequence is synthesized)
cgttatgctcacgttctgcctggtcctaaacctgccttattattattttcagaaagcaatctaattagagcaacttgcatagatctagatattaactaatgaaagaaacaccaagttcaa

SEQ ID NO: 618929 - DNA, 120 bp, Artificial Sequence
  ENSG00000177511_27 (sequence is synthesized)
atgtgttaccaattatgacacacattacaatataattataaggggagacattaaaaacattttgtaattcagtggtataatttgatgggtatcacaaccacaccgtgtttgttccctgtc

SEQ ID NO: 618930 - DNA, 120 bp, Artificial Sequence
  ENSG00000177511_28 (sequence is synthesized)
cctttgaagaggactgtactaccatcctcacactgtgctctgttgggatcactgagagattgacaactgacagaagtgtttagttggctgttcctgagcacttagttcatttggttatag

SEQ ID NO: 618931 - DNA, 120 bp, Artificial Sequence
  ENSG00000177511_29 (sequence is synthesized)
ctaagtgatattaatgccaatattacttgggccagattctgactctggagttttaatcccaatgtgcccattcattttcactaaatataaatgcatagacactttaaaccaagaagatta

SEQ ID NO: 618932 - DNA, 120 bp, Artificial Sequence
  ENSG00000177511_30 (sequence is synthesized)
aaagaggaaaagaccagaatctctaaaaaacagtttactgttctgtagtggacaatttaaattttatctcatcataatgccaaggatttttgtttgttttttaagttcagggagattttt

SEQ ID NO: 618933 - DNA, 120 bp, Artificial Sequence
  ENSG00000177511_31 (sequence is synthesized)
taaatctccttgcagtcttggctccatcttaaccttagagtgggaggactttcccatcccccaccaccgtgttatctatcactttaatgaaaactcaaaatagtgaggaaatggactttt

SEQ ID NO: 618934 - DNA, 120 bp, Artificial Sequence
  ENSG00000177511_32 (sequence is synthesized)
cttcagaacttgaggggtttagagatcaggctcatctctgcttataaggaggacttcctggagatgatcccaatagatcacccttcacttttgaagaatagcagcttctagctgaccatg

SEQ ID NO: 618935 - DNA, 120 bp, Artificial Sequence
  ENSG00000177511_33 (sequence is synthesized)
caaaatctctgtttgtttttaaagactgtttcaaagattaaatctatacaaccacttttatgaccaaaaaagttgttgtgtcccaagtgtcctaattagaaaggcagctggctctcctgc

SEQ ID NO: 618936 - DNA, 120 bp, Artificial Sequence
  ENSG00000177511_34 (sequence is synthesized)
agctcccaggcttgtgtagtcaagtgcagtgaactgggcagtaatcagctcaggaccattggctctttcctcctctttcagctacagacacatgccctggcttttgcattgaccttgctt

SEQ ID NO: 618937 - DNA, 120 bp, Artificial Sequence
  ENSG00000177511_35 (sequence is synthesized)
tgttagttctagactaatttatccttttgtcagacactttcccttttttaggatactcacaacagagtccactttcagctattggaatacattttaccataaagcccccaaggctttcta

SEQ ID NO: 618938 - DNA, 120 bp, Artificial Sequence
  ENSG00000177511_36 (sequence is synthesized)
cccataacaccaacacaaaaaaccaattaagttgcagaggggggaaataatcacaaacttttggcaacctgcttaatgctagacgctctgttttcactggttattctgagtgtcatatgc

SEQ ID NO: 618939 - DNA, 120 bp, Artificial Sequence
  ENSG00000177511_37 (sequence is synthesized)
agatgcagatccaagggagacagggctaaatggtggtgtcaagaattcctcccacaccccaaaaattctttccaatatttgattattaaaatatctatcatttctccaccttgtgtctgt

SEQ ID NO: 618940 - DNA, 120 bp, Artificial Sequence
  ENSG00000177511_38 (sequence is synthesized)
gtcttaagtgtctgtgaatattgtaaaagtgctgtatgtttagtagtgttgtgtgcctggcagtgctgactatgactactgtgccatctgtctgtgaccttgatgtcaggtacctggcca

SEQ ID NO: 618941 - DNA, 120 bp, Artificial Sequence
  ENSG00000177511_39 (sequence is synthesized)
tggggctaccagcaaggatgtgcaaaggaagaaccgctgcccctgccctcagcttccttatgcccgagccactacttatccgtgaatgtgagtgccaagagaaacctaatttggtgggga

SEQ ID NO: 618942 - DNA, 120 bp, Artificial Sequence
  ENSG00000177511_40 (sequence is synthesized)
agccaaggaatgggagaacgttttttctgatttgagtcaaggcactaattattagacactctcagacaacaaagcggtattgacctgagatcaaaggaagcagggacaatattgtagaat

SEQ ID NO: 618943 - DNA, 120 bp, Artificial Sequence
  ENSG00000177511_41 (sequence is synthesized)
gctaggacactggaaatgaagaggccttcagcttcgccagtcttgattcttgactttacaaatgagaaaatggagaaacagggaggctaggtgatttgccccagatgacactgtcaatta

SEQ ID NO: 618944 - DNA, 120 bp, Artificial Sequence
  ENSG00000177511_42 (sequence is synthesized)
aattatgattcctcctctagtacttcttggtcttaccagcatcaaatgaagctgggctcacagggaaagtggtttttggtctgggatctgcagagcacataaaataagttagaaagtcta

SEQ ID NO: 618945 - DNA, 120 bp, Artificial Sequence
  ENSG00000177511_43 (sequence is synthesized)
taaaagaggaaaaaaggttctcctctccctcccaaaaatgacttcccaacacagaacaataaaggagatgcttgtgtgggtatgcaactgtccaccaattatcacctaccttctccctga

SEQ ID NO: 618946 - DNA, 120 bp, Artificial Sequence
  ENSG00000177511_44 (sequence is synthesized)
gatgaaacaaaacacgcttggtaaatcatgatttgataaataacaattaagttactggtggttcatgcttgacagctgcaatcttacccaataagctattcatcttagtaaaaccttgtt

SEQ ID NO: 618947 - DNA, 120 bp, Artificial Sequence
  ENSG00000177511_45 (sequence is synthesized)
ttagtaatatacatgcataatttagaagttgaaggctgaaaattgttgtgttcttctccatatatatacaactttcatcggggtcccttgagttaagaaatgccttctattttataggta

SEQ ID NO: 618948 - DNA, 120 bp, Artificial Sequence
  ENSG00000177511_46 (sequence is synthesized)
atctcaacagcagactttgaaatattgtgtttggttcaatatgctaagaagatatacaaataataataacttcgtgagtcttcatgtgcaaaatgacaaactgagcaattttctgtataa

SEQ ID NO: 618949 - DNA, 120 bp, Artificial Sequence
  ENSG00000177511_47 (sequence is synthesized)
ttctagattcttaaaaccttttttcccataattgtttgaatgcactaggcacaagtttctgtttaagcctctgcttctccctgaatgtgtagaactgtcactttgcttacaaaggggctg

SEQ ID NO: 618950 - DNA, 120 bp, Artificial Sequence
  ENSG00000177511_48 (sequence is synthesized)
tgtgtttgtggctggcagcccagatagagcactctgggtgctggggattgagggcaccttggccagctgattgacctgtctggactctgtggcccaattaatcgaggccacagatcagtt

SEQ ID NO: 618951 - DNA, 120 bp, Artificial Sequence
  ENSG00000177511_49 (sequence is synthesized)
ggtactaagcatcaaaatgattcattatgcctctctcacactccgattgctttgccacatagataacagcatttgaaatgggaaacactttagaatgtcattattgtattatatattgtc

SEQ ID NO: 618952 - DNA, 120 bp, Artificial Sequence
  ENSG00000177511_50 (sequence is synthesized)
atcttatgcagtatttctgaaaatttatttttattgtgatgactgattgaagacatatgtgtatgaatagatgttcctcagtgaagcctattctcttgttgttgatgacagtggcatcag

SEQ ID NO: 618953 - DNA, 120 bp, Artificial Sequence
  ENSG00000177511_51 (sequence is synthesized)
agtgaagagttgttgcagagtaactgacttcagtttaaggttaccctggggttctggggttaggacccggattatgcagctgatctcccagcaaacacagctgtatgaaataagcaactc

SEQ ID NO: 618954 - DNA, 120 bp, Artificial Sequence
  ENSG00000177511_52 (sequence is synthesized)
ttcaaaatacaattcttgccactcattctggacctttgattcataatgtcctgggataagtccaacttacaaagattcccaggtgattcgtgtgaccaccatttggaaaccagtaatata

SEQ ID NO: 618955 - DNA, 120 bp, Artificial Sequence
  ENSG00000177511_53 (sequence is synthesized)
tacatccggagtcatatataccattttgaacaaagtagctaaatgcttatctctccttgtgcgattagtttcacatgttcgttgaggttatcatgttaaatggcaatatagacacagtct

SEQ ID NO: 618956 - DNA, 120 bp, Artificial Sequence
  ENSG00000177511_54 (sequence is synthesized)
tagtgattcaacaattcagctgtttcagccgaattgaccagttgctaatttataagcaaattgtaactgatcaatttagtcagaatggatgcaagcccaaagacaaggtggagagcaagc

SEQ ID NO: 618957 - DNA, 120 bp, Artificial Sequence
  ENSG00000177511_55 (sequence is synthesized)
tttaatatacactttgtctcaaggccagctcttcatatttccctctttatatttcaaactaagaggcagatctcaggtcactcatctttagaattggtgagaatgagaaacagggaactg

SEQ ID NO: 618958 - DNA, 120 bp, Artificial Sequence
  ENSG00000177511_56 (sequence is synthesized)
aagtgattcattcagattcaatttggaagtcattcccagagcctaaaatatttatctaaggggtctgatttatcaacctcaggtagtctccaaaacacaaaggtattcaggctaaaataa

SEQ ID NO: 618959 - DNA, 120 bp, Artificial Sequence
  ENSG00000177511_57 (sequence is synthesized)
aaccaatcaaaaaaggaaattcaggaggctccagttctaagactaacccagtataacaagggtgatcagttattacttgtggccttgtaccacctctgttggataatgtgccaccgtcct

SEQ ID NO: 618960 - DNA, 120 bp, Artificial Sequence
  ENSG00000177511_58 (sequence is synthesized)
aatgaagctttggccagacttctttctatagctgtgcacatagaaaggctttagacaacagtgataccaaagggttcctttgattttccttctgtgtgattctcagacagttttagctct

SEQ ID NO: 618961 - DNA, 120 bp, Artificial Sequence
  ENSG00000177511_59 (sequence is synthesized)
ttggtgtgctgccaaatgtttaacaactggctctggaaaacagtggaacccagatttttagcacctaccaatttctatggtgtaaatactctcatctcagccaatttcaggctactaact

SEQ ID NO: 618962 - DNA, 120 bp, Artificial Sequence
  ENSG00000177511_60 (sequence is synthesized)
taatgtcaaccagctgaaaacacaacaatatgttttcaagagccagtataagttggctccaatacagcatgagccagctccagcatagcactgcctgaacaatttttaagtcagtgagta

SEQ ID NO: 618963 - DNA, 120 bp, Artificial Sequence
  ENSG00000177511_61 (sequence is synthesized)
ccaaataggagaggctagcagaggctttggagggacttttaaatgtcccctccaccaagggaagcatttccatgttggttagttttactgatttttagtaaaagagcatattattggatc

SEQ ID NO: 618964 - DNA, 120 bp, Artificial Sequence
  ENSG00000177511_62 (sequence is synthesized)
ccaaggtgttcaaatattccacgtgactcttaggaacctctcaacagactccccagtatcttgggagattaccaactgtggcttttctaatttctaagggtgaccctccaggaaaacatt

SEQ ID NO: 618965 - DNA, 120 bp, Artificial Sequence
  ENSG00000177511_63 (sequence is synthesized)
ctttaatttaactaccagttaaaaccatgtttggctgatcttttttaaaaaatctatacctatagttcatcacttgtttccccaactttgtcattttccctatccacttgcccctcatcc

SEQ ID NO: 618966 - DNA, 120 bp, Artificial Sequence
  ENSG00000177511_64 (sequence is synthesized)
ttctgacacaataaaaaaaatacaggtacccacaaaacagtgcctgcaaaggagcaggggaagaacaaggcacccagtaagctcacttggctctacatatctggaaaggcactgaggttc

SEQ ID NO: 618967 - DNA, 120 bp, Artificial Sequence
  ENSG00000177511_65 (sequence is synthesized)
caaggtctctaccccaccaggggacacccagtaaacatcacgctgagagtttaagttgcactcaactggagttgatttgcccttagaaaagtttccaacggtgaagaaataccacttggt

SEQ ID NO: 618968 - DNA, 120 bp, Artificial Sequence
  ENSG00000177511_66 (sequence is synthesized)
aggaatatctctgggcaacttcattgctgactgggcaaactttgtaggataaggtgtcatgtgatgtaaggctggaccatgaaaaacaaaaatctactaatacacatttggcccctgcag

SEQ ID NO: 618969 - DNA, 120 bp, Artificial Sequence
  ENSG00000177511_67 (sequence is synthesized)
tcccctggcattgagcaatagagcaactgtcctttctcaccactagttgtgagtgtacttccaactgagtgtttagaaatcaggtaatctggtaatccacagaacaagctttgtttgcaa

SEQ ID NO: 618970 - DNA, 120 bp, Artificial Sequence
  ENSG00000177511_68 (sequence is synthesized)
attgcaaatttttctggtagaagtcattcttaggtgggcttcattaaatctttggagaggcaatgctgggaaaaaatatgcctaattcctaggacacagtgagtggccgtaagttgttat

SEQ ID NO: 618971 - DNA, 120 bp, Artificial Sequence
  ENSG00000177511_69 (sequence is synthesized)
ctgcatgtactaaatcaaaattagatcatgaaggaccaaatctacttccgttgctataataaaataccctacaggttctgtaaggcatttctaaactgtaaatgcttgaaacgcaagttg

SEQ ID NO: 618972 - DNA, 120 bp, Artificial Sequence
  ENSG00000177511_70 (sequence is synthesized)
gacattttctatactatgtgtaaaatgccaggttatacctctattttctttcttcctaatggtcattgaaatgagcttgtttctctacattgagcaagctacattttattttaaatgagt

SEQ ID NO: 618973 - DNA, 120 bp, Artificial Sequence
  ENSG00000177511_71 (sequence is synthesized)
caggtgcatgttcagatgtctgtattcccaatacattgcatgcagcctgagcacaagtatgccttcaccctctggctcttttcctgacaccaaacagagaagtccacagctacaagcaca

SEQ ID NO: 618974 - DNA, 120 bp, Artificial Sequence
  ENSG00000177511_72 (sequence is synthesized)
aggggcttgacaggtaggccttgttttattatgaacaaattcaccagaaaaccattcttgaggaaccagccactcccatagcatttttagtcttagggaagaaaattggcagggaagaaa

SEQ ID NO: 618975 - DNA, 120 bp, Artificial Sequence
  ENSG00000177511_73 (sequence is synthesized)
aattggcagacaatgggaaagaggtttggtcaacctgcataagtggaataaagtcattgaagtacttgcaaaaagaagagggaggtttccctctgaaggaatctagaccattttttaata

SEQ ID NO: 618976 - DNA, 120 bp, Artificial Sequence
  ENSG00000177511_74 (sequence is synthesized)
tggagaataactgtaccccatgttagaagtgctctttagccatatttcaagatccagatctgaacccatactgtgcagaaaagcacaagagcgcttacagccaagagccctgggaggagt

SEQ ID NO: 618977 - DNA, 120 bp, Artificial Sequence
  ENSG00000177511_75 (sequence is synthesized)
tgagtaacaggctgagatccggtcaccaagcatcattagttagcactgaaattctcccaggacacaaaacaaatgtatggaaacatcgcaatacactatcatttactcacatgggacaac

SEQ ID NO: 618978 - DNA, 120 bp, Artificial Sequence
  ENSG00000177511_76 (sequence is synthesized)
cacctaagtccatagcaaaactttacagatctagatgttatctcaagtcaggattccagatcaacatcctccatgtggagatgagacaactgaggttcagaaagttggagtgacttattt

SEQ ID NO: 618979 - DNA, 120 bp, Artificial Sequence
  ENSG00000177511_77 (sequence is synthesized)
gcccagctagctaactggaattagagtctgggtctcccaaccactgattctgctacaccacactgtgctgcttccattagttagatggacattgacaattaattgtgaaagcattaatta

SEQ ID NO: 618980 - DNA, 120 bp, Artificial Sequence
  ENSG00000177511_78 (sequence is synthesized)
gaagtcaagacaaaagaatgtttgtgatatcttctctcgcttaacatactttgatttcaccattgcatttcagcattttaaagaatagtgtatcagtatagaaggaggagcaaagctctt

SEQ ID NO: 618981 - DNA, 120 bp, Artificial Sequence
  ENSG00000177511_79 (sequence is synthesized)
taagagtaatgatgaaaccaaaaggtcaaaaagtagaagaatagcgaatgtaagttattaaataaatgagcaagaagtatgtgtcagggaaaataaatgcttcttatattgttaataccg

SEQ ID NO: 618982 - DNA, 120 bp, Artificial Sequence
  ENSG00000177511_80 (sequence is synthesized)
tgattccctgcccgctcaccccgtcactcaacacttgatgcatttgttttggaaagtgccattttatgctgagatactggtattgaaaacttccctctttcccaactctgtcagaagttc

SEQ ID NO: 618983 - DNA, 120 bp, Artificial Sequence
  ENSG00000177511_81 (sequence is synthesized)
tcttgctctttggaagaagccgagggccttaacaaatcagactgacctcccttgtgacaggcagcctcgcctgcccttggaaacaagctgccagaatgtgagggccacagagacccaaga

SEQ ID NO: 618984 - DNA, 120 bp, Artificial Sequence
  ENSG00000177511_82 (sequence is synthesized)
gaagccagcactgctagactgaggaacttgtaaatatcttctgctttcttggtgaacaaggacagaggcaattgcgtgtatattgtgactgtagtttgtgaagaaaatgcaaccatttgc

SEQ ID NO: 618985 - DNA, 120 bp, Artificial Sequence
  ENSG00000177511_83 (sequence is synthesized)
ttcgacagctcctcaaatgtacttgttaagtgtgaatgtgcctgcctcattgccttgtgttccaaacacagtactgaatgcgttgtttttaaataaaccatttcgttttgctttgggaaa

SEQ ID NO: 618986 - DNA, 120 bp, Artificial Sequence
  ENSG00000177511_84 (sequence is synthesized)
aacaggttctttgcaactttacattgctgtaaacagtgctctgatgaacatctttggaattaaatgtttgattatttccttagataaatcccttgaagtggattttcaagagaaaactta

SEQ ID NO: 618987 - DNA, 120 bp, Artificial Sequence
  ENSG00000177511_85 (sequence is synthesized)
ccaacaagttaggagaaaaacatgcatcatcattaaggaagacttcctcaacagaaggattatgcattattgtgtactaaataaggaaaataaataagctattgttgtgtgcttcttcaa

SEQ ID NO: 618988 - DNA, 120 bp, Artificial Sequence
  ENSG00000177519_0 (sequence is synthesized)
agaagagcctagctgctgcgcgcgtcggagaggctcctgggaaactcccacggcccagggactttcgaaagcagagcgaggagccctcgcacgcgctagtctgcgagtgagcgctcagcc

SEQ ID NO: 618989 - DNA, 120 bp, Artificial Sequence
  ENSG00000177519_1 (sequence is synthesized)
cggcacctgttcctccagcgccgccgccttcccacccctcggacccgcgccgctcgcggcgcccgcccgttcctgcgatgaatccggccctaggcaaccagacggacgtggcgggcctgt

SEQ ID NO: 618990 - DNA, 120 bp, Artificial Sequence
  ENSG00000177519_2 (sequence is synthesized)
tcctggccaacagcagcgaggcgctggagcgagccgtgcgctgctgcacccaggcgtccgtggtgaccgacgacggcttcgcggagggaggcccggacgagcgtagcctgtacataatgc

SEQ ID NO: 618991 - DNA, 120 bp, Artificial Sequence
  ENSG00000177519_3 (sequence is synthesized)
gcgtggtgcagatcgcggtcatgtgcgtgctctcactcaccgtggtcttcggcatcttcttcctcggctgcaatctgctcatcaagtccgagggcatgatcaacttcctcgtgaaggacc

SEQ ID NO: 618992 - DNA, 120 bp, Artificial Sequence
  ENSG00000177519_4 (sequence is synthesized)
ggaggccgtctaaggaggtggaggcggtggtcgtggggccctactgacccgccctctgcccccgcggcaaccgctcccacgcctgcccactttgctagcccggctgtgcccctcactatc

SEQ ID NO: 618993 - DNA, 120 bp, Artificial Sequence
  ENSG00000177519_5 (sequence is synthesized)
ctggcagtcggaggagagcgcccagactctgaactcagcagaaagtggcaagaagagggcgattagggcgcagaactttggaagctgctacttacttggaatgcggggagaccgacggtg

SEQ ID NO: 618994 - DNA, 120 bp, Artificial Sequence
  ENSG00000177519_6 (sequence is synthesized)
cgaaggcccttctccacccgcaggtgggccaagctctgggggcaggtggagagggcgggcaggggagagacccagcggcactgatcgccttgtgaccggaagagtgacctgttaaaagcc

SEQ ID NO: 618995 - DNA, 120 bp, Artificial Sequence
  ENSG00000177519_7 (sequence is synthesized)
acgcagcagactcatggggtctcacaaatccgtgtccgggtgcgctcccactcttctcctgctccccccctgccctggaggggaggggcgataaatacctttgattgtaacgtgccgttt

SEQ ID NO: 618996 - DNA, 120 bp, Artificial Sequence
  ENSG00000177519_8 (sequence is synthesized)
taagaggttttgtgtttgtttgcttgaatacaaatgtttgataagtctttttctgccccagtggcctgtttgcctgcctgaggagttacagttttgtcattgtgggagaaggggtggggg

SEQ ID NO: 618997 - DNA, 120 bp, Artificial Sequence
  ENSG00000177519_9 (sequence is synthesized)
gagggggagcctgcgaatttgaacggggtgagttgtttcttttagtgcatttcccactgggtcttttgggaggcgtctagcgttcctgctggccctgggacaaagacccagaatagaact

SEQ ID NO: 618998 - DNA, 120 bp, Artificial Sequence
  ENSG00000177519_10 (sequence is synthesized)
cgtagctcgtgactgcacggtttacgccacaaaagtgctcttgacatccgtgacaccgttttgactttttgtttttttcttatttaacatttccttaataaatgcaacatttaagcgttt

SEQ ID NO: 618999 - DNA, 120 bp, Artificial Sequence
  ENSG00000177535_0 (sequence is synthesized)
acaagtgccagaaaatgccgcaacatgaaaagtgacaaccatagcttcttaggggactcccctaaagccttcatccttctgggtgtgtctgacaggccgtggctggaactccctctcttt

SEQ ID NO: 619000 - DNA, 120 bp, Artificial Sequence
  ENSG00000177535_1 (sequence is synthesized)
gtggtcctcctgctgtcctatgtgctggccatgttggggaacgtcgccatcatcctggcatcccgggtggatcctcaactccacagccccatgtacatcttcctcagtcacctgtccttc

SEQ ID NO: 619001 - DNA, 120 bp, Artificial Sequence
  ENSG00000177535_2 (sequence is synthesized)
ctggacctctgctacaccaccacgacagtccctcagatgctggtcaacatgggcagttcccagaagaccatcagctatggaggctgcactgtgcaatatgcagtcttccactggctggga

SEQ ID NO: 619002 - DNA, 120 bp, Artificial Sequence
  ENSG00000177535_3 (sequence is synthesized)
tgcacggagtgcatcgtcctggccgccatggccctggaccgctacgtggccatctgcaagcccctgcactatgccgttctcatgcaccgtgctctctgtcagcagctcgtggctctggcc

SEQ ID NO: 619003 - DNA, 120 bp, Artificial Sequence
  ENSG00000177535_4 (sequence is synthesized)
aggtgccggccgtgatcaagctgtcgtgtgctgacaccgctgtgaatgacaccatactggctgtgctggtggccttcttcgtgttggtgcccctggctctcatccttctctcctatggct

SEQ ID NO: 619004 - DNA, 120 bp, Artificial Sequence
  ENSG00000177535_5 (sequence is synthesized)
ttattgcccgggcagtgctcaggatccagtcctccaagggacgacacaaggcctttgggacgtgttcctcccacctgatgatcgtctccctcttctacctacctgcgatttacatgtatc

SEQ ID NO: 619005 - DNA, 120 bp, Artificial Sequence
  ENSG00000177535_6 (sequence is synthesized)
tgcagcccccttccagctactcccaagagcagggcaaatttatttctctcttctattccataatcacccccactctcaatcccttcacctacaccctgagaaataaagatatgaaggggg

SEQ ID NO: 619006 - DNA, 120 bp, Artificial Sequence
  ENSG00000177535_7 (sequence is synthesized)
ctctgaggagacttctggccaggatctggaggctctgtggatgatgaggacatgagatgtagcatctccatcaattaaagaacacagcacaagtctattgtgcactcagagcatctttca

SEQ ID NO: 619007 - DNA, 120 bp, Artificial Sequence
  ENSG00000177535_8 (sequence is synthesized)
agagaatgaggtcaagttaaatctgagggataattttgaaatgaacagagagcgtgacacgggcaaggtgtgttgcctgaaagccttatcctcggaagtaacctccaccatgtcaaggta

SEQ ID NO: 619008 - DNA, 120 bp, Artificial Sequence
  ENSG00000177535_9 (sequence is synthesized)
cctataggcactctgggggactaaggttaaggcagttccaccgacctcacgtactgccaagggagagtccgggaaaccctgagtctccccagcaagcctgttgcaacggacagcagactc

SEQ ID NO: 619009 - DNA, 120 bp, Artificial Sequence
  ENSG00000177535_10 (sequence is synthesized)
cttctagactgagaataatctctcagacttgctcagagggttgggttccagtaaatggtaaggtcccagcagcccatcagaggaaatgtgctgtgtgttcctggaatatgaagagcattt

SEQ ID NO: 619010 - DNA, 120 bp, Artificial Sequence
  ENSG00000177535_11 (sequence is synthesized)
ctagtaagtccatccttaaatgtccctccgcgactaaggccaacacagactgcaatatagccttcagtcctaaagcaagtcttctgtaggagccaggaaccctggagggaatgatatata

SEQ ID NO: 619011 - DNA, 120 bp, Artificial Sequence
  ENSG00000177535_12 (sequence is synthesized)
tctaagggtgtatcacagcctgcgtgttcacagcctagcctgccagcagcccccagaagaaactgcgggaattcagcgtgaacatgatacaatcagcaggtaactcttgagcgacgggtt

SEQ ID NO: 619012 - DNA, 120 bp, Artificial Sequence
  ENSG00000177535_13 (sequence is synthesized)
cttacgtttttggtaattgaaacacctaaagatatctttgccttaaggcctgagtctcagaaagatgacttcgtgtgagggtgagtgaggggttgaaactgcctgcagagaggcaggtag

SEQ ID NO: 619013 - DNA, 120 bp, Artificial Sequence
  ENSG00000177535_14 (sequence is synthesized)
caagttccaagaggggtcctggtgggcgtttctgcccaggacggcagtggtgaggatacagacagtgcgtgcctgcaacgatgcaacattgtggtgggatcacagcattgtgtgggtgtt

SEQ ID NO: 619014 - DNA, 120 bp, Artificial Sequence
  ENSG00000177535_15 (sequence is synthesized)
gaattctttaacttcggtgctgaactagagtgaatgaggagtagaacatgaatagaaagaacctcagtacttggcatcacggtgactgaagggaactcagccagaattaagatgaaggag

SEQ ID NO: 619015 - DNA, 120 bp, Artificial Sequence
  ENSG00000177535_16 (sequence is synthesized)
atggtttgagtctggggggatggctgccaggtgaaatttgggatgcctcagttcacaatgtcaaaaagggggttagaggtcagtgaggaactgacaactgtagatacagcctgagggatt

SEQ ID NO: 619016 - DNA, 120 bp, Artificial Sequence
  ENSG00000177535_17 (sequence is synthesized)
ccgtctgaatgcgatggcgatgtttgtgggaactactgtgtccatccagggaagcaaggctgtgccttgagggggcacctgtacttgggtagtgggaagatgaaagaaggtcaaggagtg

SEQ ID NO: 619017 - DNA, 120 bp, Artificial Sequence
  ENSG00000177535_18 (sequence is synthesized)
cagaggctagacacctacgaaagctccgtgtggaaacacctgaacagaagggcatcagatccagggcatgaggggcagggctgggcagtgtccagctttgccattgagaaaccgtgtgtg

SEQ ID NO: 619018 - DNA, 120 bp, Artificial Sequence
  ENSG00000177535_19 (sequence is synthesized)
tgtgtgtgtgtgtgtgtgtgtgcgtgtgcacgtgcatgcatgtgtgtgcacgtgtgtacgtaagtgtgcacatgtacagtggactataattacaagaaaaccactcctctctaatccctg

SEQ ID NO: 619019 - DNA, 120 bp, Artificial Sequence
  ENSG00000177535_20 (sequence is synthesized)
aatccctgcccctttctatcctgtgaccttcctctccctcatctccccttcccaggaacttcttttgtctcagtcgtttacgcgactgcccttgctgctccccatgtcaccagctgctct

SEQ ID NO: 619020 - DNA, 120 bp, Artificial Sequence
  ENSG00000177535_21 (sequence is synthesized)
ttttttaaagcaaagttctggagagaatagtagtgaagagcaggagtttggctttcagtcctggctttaccatttgctgccgtgtaactaaggtagaccagctgtcctcccgagtcgctc

SEQ ID NO: 619021 - DNA, 120 bp, Artificial Sequence
  ENSG00000177535_22 (sequence is synthesized)
agtcaattaggggtgaaaacatggaccttgctgagatattaaggcaacatcaagttattattacagtacctggctcacagtgagtggtaaataacttgtctttattataaattgccgcat

SEQ ID NO: 619022 - DNA, 120 bp, Artificial Sequence
  ENSG00000177535_23 (sequence is synthesized)
acatttacccctctatctttcttgcttccttcattctctcatttctttcttcactatccctacaacttctcccttttctcccagtttaggctctgaaaagaaactctggaatcagaaatc

SEQ ID NO: 619023 - DNA, 120 bp, Artificial Sequence
  ENSG00000177535_24 (sequence is synthesized)
tcagaaagagaaatgtcataattcctttacttcttaataattagacttaaaaatgtgctagcttgactttgctcggccacagctcactgttttgacaggcatcttgagctcgttagagat

SEQ ID NO: 619024 - DNA, 120 bp, Artificial Sequence
  ENSG00000177535_25 (sequence is synthesized)
aagatcacattctgtgaagtttatttcataagtattgttgatagaatctgggaggagatacgataattgaatgtttcacaagaatattggcaactttctgacaaaacgtgtgtggttttg

SEQ ID NO: 619025 - DNA, 120 bp, Artificial Sequence
  ENSG00000177535_26 (sequence is synthesized)
aaactagagaagcaggagggaaaaactgaacttattcctccattgaaaccctggagtttgagttgttttccagtaacagtagagttcttcagaacatcaactggggcagcagggaacacc

SEQ ID NO: 619026 - DNA, 120 bp, Artificial Sequence
  ENSG00000177535_27 (sequence is synthesized)
tgttgcaacatgtaagctgagcagatctccgttagttttacagtctatgcataaggtaccaaatcaagaataaaaatccttcataaattatctgcttacaggatttattatgaataatga

SEQ ID NO: 619027 - DNA, 120 bp, Artificial Sequence
  ENSG00000177535_28 (sequence is synthesized)
ttaattaattattgtttattaataatatttttcaatcctatcatggagcataacatccccatcaggaactggaaggtgtgcaatgcttgagcgattgtaggaggtgagaagccaatggtg

SEQ ID NO: 619028 - DNA, 120 bp, Artificial Sequence
  ENSG00000177535_29 (sequence is synthesized)
cagtcgaaaggacccacgaatcagcaggtggcaacccagttgcttcctaacagcaatggtttcagaaatcaaattggctgttttctatcactgagaggtgacagctgctcggcaaagaaa

SEQ ID NO: 619029 - DNA, 120 bp, Artificial Sequence
  ENSG00000177535_30 (sequence is synthesized)
ttgtgcaggaaattggaatgtcactcaagccatcagataaaacctagccctagagggcagtctgatctttccgtagacaattccaggggctacctttctcacgccaatcaagagctttct

SEQ ID NO: 619030 - DNA, 120 bp, Artificial Sequence
  ENSG00000177535_31 (sequence is synthesized)
ccctgtgctcaaaattccatggtctggggtctcattaactaccatgacctattcaggggctgaagtaacgtataccttggctcttccactccagagactcacaggacctagaattgtgct

SEQ ID NO: 619031 - DNA, 120 bp, Artificial Sequence
  ENSG00000177535_32 (sequence is synthesized)
gcttttactgccagtgtgagtgacagggctgcctgtgcgtgtgtggtcatgacagcggagatcagcatgaatccgggagctggatgcaagcgtgagccagtgacggggggtggtcctatc

SEQ ID NO: 619032 - DNA, 120 bp, Artificial Sequence
  ENSG00000177535_33 (sequence is synthesized)
aatacagcccccagctgctcacaaagcccttctgcttgctttatgtcaccgcctgcctccctcctaccactacctcccaaaatgggaaagcctaagaaggtggacaattccttgtcgatg

SEQ ID NO: 619033 - DNA, 120 bp, Artificial Sequence
  ENSG00000177535_34 (sequence is synthesized)
cgctctacctggaacataattgtcattcgtgaggtattcttctcacatacttaatgtctctatcgtccccaagtcttggcaattgaaggaggtatttctccccattttacagatgcagaa

SEQ ID NO: 619034 - DNA, 120 bp, Artificial Sequence
  ENSG00000177535_35 (sequence is synthesized)
gttcaggaatattaaatggtttagttgcggccactgagtaggaaggagagcaaagacacagaggctgctactggggctcctggttctgacccttccgcatcccagcgtctccacagaggt

SEQ ID NO: 619035 - DNA, 120 bp, Artificial Sequence
  ENSG00000177535_36 (sequence is synthesized)
tgtcttcaaacatctcacttcctgttataatgccccaaatcccatagcgacaaagttcattttaaacgtataattctaagaggccatatatttttaagcattgtttaaatagacttcaat

SEQ ID NO: 619036 - DNA, 120 bp, Artificial Sequence
  ENSG00000177535_37 (sequence is synthesized)
aagtatgtgtggaattatttcacttccaatttcctgattcttttctcttttcctcttcctatatttcttttattctctccccatttgtctcttttctattactcctaagtatacacaaga

SEQ ID NO: 619037 - DNA, 120 bp, Artificial Sequence
  ENSG00000177535_38 (sequence is synthesized)
tgaagctgaaatacaatcttattttacttacaatgaataagtgtttttctccatatacttaaatctccacaaattttacacgactttttcagacaattccaggaatgaagtagattgcta

SEQ ID NO: 619038 - DNA, 120 bp, Artificial Sequence
  ENSG00000177535_39 (sequence is synthesized)
tcttcttcctgtgattttgatttttttttctctgtagttcacattttcttctatagaaagtttttccatgaaatgtaaactagtacaaacactagtacaaccacgatggaaaacattgtg

SEQ ID NO: 619039 - DNA, 90 bp, Artificial Sequence
  ENSG00000177535_40 (sequence is synthesized)
gcaatcccactacggggcgaaaaagatacttgctcatgcgtgtttatagcagcacaatttgcaattggaaaaatatggaaccatctgggc

SEQ ID NO: 619040 - DNA, 72 bp, Artificial Sequence
  ENSG00000177535_41 (sequence is synthesized)
cattatacgaaaaagatacttgctcatgcgtgtttatagcagcacaatttgcaattggaaaaatatggaacc

SEQ ID NO: 619041 - DNA, 64 bp, Artificial Sequence
  ENSG00000177535_42 (sequence is synthesized)
gagatcgcgccgaaaatgtgagatatataccatggaaaaatactattcagccataaaaaggaat

SEQ ID NO: 619042 - DNA, 120 bp, Artificial Sequence
  ENSG00000177535_43 (sequence is synthesized)
ataaaaaggaatgaaataatggcattctcagcaacctggccagttttaatgtcctaatgcccaaaggttctctttctctctttcaagctcagctatgtgtttctgattacattatttata

SEQ ID NO: 619043 - DNA, 120 bp, Artificial Sequence
  ENSG00000177535_44 (sequence is synthesized)
tatttatataggttatcaaagtgtttgtagcaggaaggcagtcggtaatagttcaccaagatgcagaaacccagtctccagttggtgctgctcagaagtgctaacaagacagagtttgca

SEQ ID NO: 619044 - DNA, 120 bp, Artificial Sequence
  ENSG00000177535_45 (sequence is synthesized)
acagaatgtaaatctcatactgtttcccttataaaaatagtcttcagggttttttttaaatgtcagctcatctaaaaggtatgtttaataatgtgattgttttacattcttatacaagct

SEQ ID NO: 619045 - DNA, 120 bp, Artificial Sequence
  ENSG00000177535_46 (sequence is synthesized)
ccttatatcgacagttcatagactacactttgagtagcaaagtgtggctactttgatggctaattgtacagaggaaatagtatttccatcctgagcaattccatgcggtttaagagttgt

SEQ ID NO: 619046 - DNA, 120 bp, Artificial Sequence
  ENSG00000177535_47 (sequence is synthesized)
ccatgtgtagagaagcaattagtaaatatttccttataacttaatgctctgtgaagtataatagatgaactgttcctcggatgggataaatccaaaataagctgttatcaactgaaagca

SEQ ID NO: 619047 - DNA, 120 bp, Artificial Sequence
  ENSG00000177535_48 (sequence is synthesized)
agatgcatcttctacataatacttctagttaggagcgcaggctctgatactctcaaacctttccctccacgattttcaatctcctatcctatcaaagatgaaattccactcattacagtt

SEQ ID NO: 619048 - DNA, 120 bp, Artificial Sequence
  ENSG00000177535_49 (sequence is synthesized)
agagtgaggtaacgttttaaaaattatctacaatggaatcatttgccaaagtgacttttaaaatgcaccaaacaatttaatttatctttagtggtttagagaaataatttgaaaaatttc

SEQ ID NO: 619049 - DNA, 120 bp, Artificial Sequence
  ENSG00000177535_50 (sequence is synthesized)
agcctaagaaggtggacaattccttgtcgatgtggatgtagagagaaatcaaacactctgacggtgatgggagctgcagcacgcttcgctctacctggaacataattgtcattcgtgaga

SEQ ID NO: 619050 - DNA, 120 bp, Artificial Sequence
  ENSG00000177542_0 (sequence is synthesized)
cccccggcagcttccccttctgtgtgagtgctgggctggagtgtggaagagccatccagagtgagtgcctggggcagagtgagagcaggaccagcgggcaggtggcggagcgggggtcgg

SEQ ID NO: 619051 - DNA, 120 bp, Artificial Sequence
  ENSG00000177542_1 (sequence is synthesized)
tggtggatggcccagccctggaaagccgaggtgaaggttacgagtccctgaggatctgtgggtgtgagccagccgcgtggccctgggcaacggcgctgccggacagaagtggcggttgct

SEQ ID NO: 619052 - DNA, 120 bp, Artificial Sequence
  ENSG00000177542_2 (sequence is synthesized)
gacgcctggaaattcccctgaaggtggagcaccacccaacccccctgggtcccaccctccctcaaggcctcctccacctccacctccaccccgcctggcctggcgtccacctctgcggct

SEQ ID NO: 619053 - DNA, 120 bp, Artificial Sequence
  ENSG00000177542_3 (sequence is synthesized)
cctacctgggtgcaatcgagttaaatggctgataagcagatcagcctgccagccaagctcatcaatggcggcatcgccgggctgatcggtgtcacctgcgtgtttcccatcgacctggcc

SEQ ID NO: 619054 - DNA, 120 bp, Artificial Sequence
  ENSG00000177542_4 (sequence is synthesized)
aagaccaggctgcagaaccagcagaacggccagcgcgtgtacacgagcatgtccgactgcctcatcaagaccgtccgctccgagggctacttcggcatgtaccggggagctgctgtgaac

SEQ ID NO: 619055 - DNA, 120 bp, Artificial Sequence
  ENSG00000177542_5 (sequence is synthesized)
ttgaccctcgtcacccccgagaaggccatcaagctggcagccaacgacttcttccgacatcagctctctaaggacgggcagaagctgaccctgcttaaagagatgctggcgggctgtggg

SEQ ID NO: 619056 - DNA, 120 bp, Artificial Sequence
  ENSG00000177542_6 (sequence is synthesized)
gctggcacctgccaggtgatcgtgaccacgcccatggagatgctgaagatccagctgcaggatgcagggcgcattgccgcccagaggaagatcctggctgcccagggccagctctcggcc

SEQ ID NO: 619057 - DNA, 120 bp, Artificial Sequence
  ENSG00000177542_7 (sequence is synthesized)
caggggggtgcccagccctcagtggaggctccagctgcccctcggcccacggccacccagctgacccgcgacctgctgcggagccgtggcattgccggtctctacaagggactcggggcc

SEQ ID NO: 619058 - DNA, 120 bp, Artificial Sequence
  ENSG00000177542_8 (sequence is synthesized)
acgctgctcagggatgtccccttctctgtggtgtacttcccgctctttgccaacctgaaccagctgggccgcccggcgtccgaggagaagtcgcctttctacgtgtccttcctggccggc

SEQ ID NO: 619059 - DNA, 120 bp, Artificial Sequence
  ENSG00000177542_9 (sequence is synthesized)
tgtgtggctgggagtgccgccgctgtggccgtcaacccctgtgatgtggtgaagacgcggctccagtcacttcagcgaggcgtcaacgaggacacctactctgggatcctggactgtgcc

SEQ ID NO: 619060 - DNA, 120 bp, Artificial Sequence
  ENSG00000177542_10 (sequence is synthesized)
aggaagatcctgcggcacgagggcccctcggccttcctgaagggcgcctactgccgcgcgctggtcatcgcgccccttttcggcatcgcacaggtggtctacttcctgggcatcgcggag

SEQ ID NO: 619061 - DNA, 120 bp, Artificial Sequence
  ENSG00000177542_11 (sequence is synthesized)
gcccagcacccgctccaccccagccagctgggcagggccggtgtggggctggagccaggcagctagcccaggacggagcaagggaagacccctccccagccctcccgtcggcaggggcag

SEQ ID NO: 619062 - DNA, 120 bp, Artificial Sequence
  ENSG00000177542_12 (sequence is synthesized)
cagggggcagggtgcagggtccacataggtggtgcacacgcaagccccccggggtgctgcctgcaccgttgggatcaatgtctcatttatgtagaaaatgcagaaatctttacattcctc

SEQ ID NO: 619063 - DNA, 120 bp, Artificial Sequence
  ENSG00000177542_13 (sequence is synthesized)
aagctagcccctgccccaatcctgccctggcctgaacacccccagggacagagctggtctctgggctgggggcccccgggcctgggccgggcaggctggaccatacccccagtccaccag

SEQ ID NO: 619064 - DNA, 120 bp, Artificial Sequence
  ENSG00000177542_14 (sequence is synthesized)
ctccagtctccacagccatcctggcccacacaggcaccccacacaaacctatttattgaatctgctggacccaagcggctctccagcccttccgtccttccccagccgctcttgtcgcct

SEQ ID NO: 619065 - DNA, 120 bp, Artificial Sequence
  ENSG00000177542_15 (sequence is synthesized)
tggcaggacttgactctgcctccctggccagccttgcaagaggactggggtctcctgccctctctgttgagccaggaatcccaagtgaggggttgccctgaggtctgactcttggggcaa

SEQ ID NO: 619066 - DNA, 120 bp, Artificial Sequence
  ENSG00000177542_16 (sequence is synthesized)
gcccgccacccactgtgggactttctggtgggctcctcagctcccaccccaggctggggcccagattgtgaggtctgtgtgcatgtgtgtgtgtatgtgtgtgtgcatgcgtgtgtgtgt

SEQ ID NO: 619067 - DNA, 120 bp, Artificial Sequence
  ENSG00000177542_17 (sequence is synthesized)
tgtggggatctggcctggcccttggggatggggctgctggggactgccccccttcccgccgtggccaggcgctctgtgtgctgtgtgtgccccaggctctgttgaccccgtccaggaact

SEQ ID NO: 619068 - DNA, 120 bp, Artificial Sequence
  ENSG00000177542_18 (sequence is synthesized)
aacttacccagcttggtctctcctgagtcctccaccctggcctgggattggccagggagcagggcgggcattgggaccagtgtggagcctgagggtgcctgccctgctctggagggaggg

SEQ ID NO: 619069 - DNA, 120 bp, Artificial Sequence
  ENSG00000177542_19 (sequence is synthesized)
ccaggagctgccacacccccaagtcctctcagggcccaccctcctttttcagcctctgcataaggcccctgggtacactgcagaagccccatccttcccgcctccgggcataaggcccct

SEQ ID NO: 619070 - DNA, 120 bp, Artificial Sequence
  ENSG00000177542_20 (sequence is synthesized)
gaccacacttcagaagccccatcccccctgccaccgggcgatccctgctgtgagccgaagctctccctgccccgccctggccatgtgatcgtgttggtgacagaccctgatgtgctggtg

SEQ ID NO: 619071 - DNA, 120 bp, Artificial Sequence
  ENSG00000177542_21 (sequence is synthesized)
ctgtgtccccaaaaccggggccctccacagaggccccttcccagcgacactacctggggctcaggcctggacccccccagttcacggttgctcctgggagctgcccctcccgtcacatca

SEQ ID NO: 619072 - DNA, 120 bp, Artificial Sequence
  ENSG00000177542_22 (sequence is synthesized)
gaaccttggaagctgctgctgctgcttacagaattatatttttttcttttgaagagttttaagaagttgtaactttttgtgtcttgtcatgtcagagaataaataaatattctaagtaga

SEQ ID NO: 619073 - DNA, 120 bp, Artificial Sequence
  ENSG00000177542_23 (sequence is synthesized)
acatacgtgtccccgagggtgggtgtccggggcccgagcccaaggaagaaaggccgacccgtgtgggacgcacacgtgggagttcaccggacatctgtggacacgtgcgtggccggagtc

SEQ ID NO: 619074 - DNA, 120 bp, Artificial Sequence
  ENSG00000177542_24 (sequence is synthesized)
gcggtggccaggcggaggacggagcggtcggctgagccccagcagtagggcaggggcctgagccggcctccgagcgcagagagcggcccccaacccgcttctcctttgtcctctggccga

SEQ ID NO: 619075 - DNA, 120 bp, Artificial Sequence
  ENSG00000177542_25 (sequence is synthesized)
ggcatcgcgcagttggagtccccttccgggaccctccagccagcaggatagaaagcaccgccccaagaggacggggacagcgggagattgaatggggagccgccggccagactcggagcc

SEQ ID NO: 619076 - DNA, 120 bp, Artificial Sequence
  ENSG00000177542_26 (sequence is synthesized)
agctctgcaggccctaggtggagctgccatgggaggagagctatacctgggatagctgagcccaggtcggggggtcttagggcgcccgggaccccagcccctagctcgaagggggcaggt

SEQ ID NO: 619077 - DNA, 120 bp, Artificial Sequence
  ENSG00000177542_27 (sequence is synthesized)
gcacatacgtgtccccgagggtgggtgtccggggcccgagcccaaggaagaaaggccgacccgtgtgggacgcacacgtgggagttcaccggacatctgtggacacgacagaagtggcgg

SEQ ID NO: 619078 - DNA, 120 bp, Artificial Sequence
  ENSG00000177542_28 (sequence is synthesized)
gctggccgagcgcggggcgggcaggcgagcgcggcggcggcggcgagcgtggctgccggaagcctctgcttgcccaaagtgaaagagaaagtgcccccccacccaagcccgccccacccc

SEQ ID NO: 619079 - DNA, 120 bp, Artificial Sequence
  ENSG00000177542_29 (sequence is synthesized)
agtgacggcttcagtctggggtggtgggtgaggggctgcgtgagagagggaggctgggggaggattactcttcgggtggccccaccctcactcattcccattccctcatccttctaggac

SEQ ID NO: 619080 - DNA, 120 bp, Artificial Sequence
  ENSG00000177542_30 (sequence is synthesized)
ggggaggcagggcagggcggccagcctgggcctggtgtgtgagcgtggacgtgtttgtgggggctgtgcctgtgcaggggggactggatctctggtgagtggtagttctcagcctctccc

SEQ ID NO: 619081 - DNA, 120 bp, Artificial Sequence
  ENSG00000177542_31 (sequence is synthesized)
gtggcagctccccacccccacttagtgcctggtgcgtgggatgccatggtacatctgtctcttctctggtggccacagctgcctctgccttctgggccaggctggaccccgtttgtggct

SEQ ID NO: 619082 - DNA, 120 bp, Artificial Sequence
  ENSG00000177542_32 (sequence is synthesized)
ggggatgggagggagtaaggggcattaccgcaaagcagcttaggacacaatccagagcctagatttggcagaagctctccagccctgagccttcggcactgagatgggggctctccacag

SEQ ID NO: 619083 - DNA, 120 bp, Artificial Sequence
  ENSG00000177542_33 (sequence is synthesized)
cctcccccgagctctggcccagtccagaccacacactcctgtgacctctggccccagccccctgccagcacaagcaccatctgtcctccagggagggagaggtatcctagggaggcctca

SEQ ID NO: 619084 - DNA, 120 bp, Artificial Sequence
  ENSG00000177548_0 (sequence is synthesized)
aaacagccgagaggacccggaagcggtgcgctccgtcaccagggagtgcgggaatccgccgtttgcgctgaggcaatggcggcagctgcgccggtggccgcggacgacgatgagcggcgg

SEQ ID NO: 619085 - DNA, 120 bp, Artificial Sequence
  ENSG00000177548_1 (sequence is synthesized)
cggcggccgggggctgcactggaggactcccggtcccaggaaggggcaaatggtgaggccgagtcaggtgagctcagccggcttcgggctgagctggcaggcgccctggcagaaatggaa

SEQ ID NO: 619086 - DNA, 120 bp, Artificial Sequence
  ENSG00000177548_2 (sequence is synthesized)
accatgaaggctgtggcagaggtgagcgagagcacgaaggccgaggctgtggctgcggtgcagcggcagtgccaagaggaggtggcctcgctgcaggccatcctgaaagactccatcagc

SEQ ID NO: 619087 - DNA, 120 bp, Artificial Sequence
  ENSG00000177548_3 (sequence is synthesized)
agctatgaagcccagatcaccgccctgaagcaggagcgacagcagcagcagcaggactgtgaggagaaggagcgggagctgggccgcctgaagcagctgctgtcccgggcctaccccctg

SEQ ID NO: 619088 - DNA, 120 bp, Artificial Sequence
  ENSG00000177548_4 (sequence is synthesized)
gactccctggagaagcagatggaaaaggcccacgaggactcggagaagctgcgggagatcgtactgcccatggaaaaggagatcgaggagctgaaggcgaagctgctgagggccgaggag

SEQ ID NO: 619089 - DNA, 120 bp, Artificial Sequence
  ENSG00000177548_5 (sequence is synthesized)
ctgattcaggagatccagagacgtccccggcatgccccttccctgcacggctccacggagttgctgcccctgtcccgggatccatcgcccccgctggagcctctggaggagctgagcgga

SEQ ID NO: 619090 - DNA, 120 bp, Artificial Sequence
  ENSG00000177548_6 (sequence is synthesized)
gatgggggtccagccgctgaggccttcgctcacaactgcgatgacagcgcctccatctcctccttctcccttggcggtggggtcggcagcagctcctccctgccccaaagccgccagggc

SEQ ID NO: 619091 - DNA, 120 bp, Artificial Sequence
  ENSG00000177548_7 (sequence is synthesized)
ctgagccctgaacaggaagagacggcctcgctggtgtctacgggcaccctggttcccgagggcatctacctgccccctcctggctaccagctcgtcccagacactcagtgggagcagctg

SEQ ID NO: 619092 - DNA, 120 bp, Artificial Sequence
  ENSG00000177548_8 (sequence is synthesized)
cagacagagggccgacagctgcagaaggacctggagagcgtcagtcgcgagcgggacgagctccaagagggcctgagacggagcaatgaggactgtgccaagcagatgcaggtgctcctg

SEQ ID NO: 619093 - DNA, 120 bp, Artificial Sequence
  ENSG00000177548_9 (sequence is synthesized)
ctgcggaccctgcaagggaccgtgagccaggcccaggagcgggtgcagctgcagatggcggagctggtcaccacccacaagtgcctgcaccatgaggtaaagcggttgaatgaggaaaac

SEQ ID NO: 619094 - DNA, 120 bp, Artificial Sequence
  ENSG00000177548_10 (sequence is synthesized)
caagggctccgggccgagcagctgccatcctcagccccccagggctcgcagcaggagcagggcgaggaggaatcactgcccagctctgtgccagagctgcagcagctgctgtgctgcacg

SEQ ID NO: 619095 - DNA, 120 bp, Artificial Sequence
  ENSG00000177548_11 (sequence is synthesized)
cggcaagaggcgagggcccggctgcaggcccaggagcacggggccgagcgcctgcggatcgagatcgtgacgctgcgggaggctctggaggaggagacagtggccagggccagcctggag

SEQ ID NO: 619096 - DNA, 120 bp, Artificial Sequence
  ENSG00000177548_12 (sequence is synthesized)
gggcagctgagggtgcagcgggaggagacagaggtgctggaggcctccctgtgcagcctgaggacagagatggagcgggtgcagcaggaacagagcaaggcccagctcccagacctcctc

SEQ ID NO: 619097 - DNA, 120 bp, Artificial Sequence
  ENSG00000177548_13 (sequence is synthesized)
tcagaacagagggccaaggtgctgcggctgcaggcagagctggagaccagtgagcaggtgcagagggatttcgtgcgactgtcccaggccctgcaggtgcgcctagagcggatccgccag

SEQ ID NO: 619098 - DNA, 120 bp, Artificial Sequence
  ENSG00000177548_14 (sequence is synthesized)
gctgagaccctggagcaagtgcgcagcatcatggatgaggcgccactcacggacgtcagggacatcaaggacacctgaggggtcaggatatccccacccccaccctgggaaagacgcctt

SEQ ID NO: 619099 - DNA, 120 bp, Artificial Sequence
  ENSG00000177548_15 (sequence is synthesized)
tccccactcctgaaccatgaggcctcgctctggggtcttggatggcttttccaccgtccctgagactggggttgaggggactgacgggggccaccaccgccccgccctccagcgcctcct

SEQ ID NO: 619100 - DNA, 120 bp, Artificial Sequence
  ENSG00000177548_16 (sequence is synthesized)
cccagggtggctgggcctcctgttctcagggatcacacctgggtgaggggcccaagcccctcccggaaccaaaggtgcaggctcaggcctgcggctttctggctgctgtgctgcctcctg

SEQ ID NO: 619101 - DNA, 120 bp, Artificial Sequence
  ENSG00000177548_17 (sequence is synthesized)
ggctccagccctcccctgcccccagcccgtcccctgcccagggcacagcggagccatgggggctgggagtccccatcagaggcagtgaggtgggccccggccctgggacaggcagctgcc

SEQ ID NO: 619102 - DNA, 120 bp, Artificial Sequence
  ENSG00000177548_18 (sequence is synthesized)
ttctggtctgcatgacactaagacgcttgtccacagcggcgacccaggcctccaagcttgcacagaggcaaggccagacttttccgtcgtttattttcaataaataagcagctcagcgca

SEQ ID NO: 619103 - DNA, 120 bp, Artificial Sequence
  ENSG00000177548_19 (sequence is synthesized)
gtcactttgaagaatctggcgggagaagaggaagtgcacggtgagggccgacttggaatggaatggcggacccactcaagattctgtccaggccttcagaagttaaacgtgatcacttgt

SEQ ID NO: 619104 - DNA, 120 bp, Artificial Sequence
  ENSG00000177548_20 (sequence is synthesized)
gctgggacagccaatagaggagtctgagatgatcatttccaaggagttcttcacagaggaggtagctttggagctgggctttgaggttgggcagtatttgaaacagtagagacggagcaa

SEQ ID NO: 619105 - DNA, 120 bp, Artificial Sequence
  ENSG00000177548_21 (sequence is synthesized)
cctggagaagcagatggaaaaggttgggattgggatggcttccctgctgccctgggatttggaagaatgttgaggactgtggatgtcccattccctggtcatggggtgcggggcacccag

SEQ ID NO: 619106 - DNA, 120 bp, Artificial Sequence
  ENSG00000177548_22 (sequence is synthesized)
gatggaaaaggtagcacattgcctcatggtccaagatgactgcttgagtgccagccatcatgtccacattccagccagcaaaaaggaggagaaggaggaataaagaaaggcacaccctct

SEQ ID NO: 619107 - DNA, 120 bp, Artificial Sequence
  ENSG00000177548_23 (sequence is synthesized)
gactccctggagaagcagatggaaaaggaaacaggctcagggatggtgtcagttacctagttagaaagaaagatgaagacaggagcccatgaaacaaagaccttcaagccacatcttccc

SEQ ID NO: 619108 - DNA, 120 bp, Artificial Sequence
  ENSG00000177548_24 (sequence is synthesized)
agaaaaatgaagccgacccggccctgccccgagggacgctccaagagggcggaggtgcagggagggccccgccacaattcgcggtaacgcaagccaggctcgggcggaagggcggccgga

SEQ ID NO: 619109 - DNA, 120 bp, Artificial Sequence
  ENSG00000177548_25 (sequence is synthesized)
gccgatcaaaggctggctccgggcaggggcagcgagggagcgagggggagctctccgcaggccggtgtcccggaggaggcataattggagcagggcttccaaggtcacggagagacgccg

SEQ ID NO: 619110 - DNA, 120 bp, Artificial Sequence
  ENSG00000177548_26 (sequence is synthesized)
ggcaagacctcttaaggatcctcttccgggcttgaaaggcaggcgtcctcccgaaccgcgcgacccagccaagaagagccggggcggggccggggccggggccgggggccgactcgggaa

SEQ ID NO: 619111 - DNA, 120 bp, Artificial Sequence
  ENSG00000177548_27 (sequence is synthesized)
tgagtacctgggggccctagggcaggagggcgaggagtccagcaggaatcagttgcacgtggtggaagggggcacgtgggaagtcaaggaacctgtcctgtccccagctgctcaggccac

SEQ ID NO: 619112 - DNA, 120 bp, Artificial Sequence
  ENSG00000177548_28 (sequence is synthesized)
accctggaaccggtgccaggtaggtaagagggttttggggcagctggtgccgtggccagaacagggcccctgcagccacacagagctgtttgatcttgagctaatcccagactcccagcc

SEQ ID NO: 619113 - DNA, 120 bp, Artificial Sequence
  ENSG00000177548_29 (sequence is synthesized)
agcctctgcctcaccatctataaaactgacataatgggccctagtttgcagagtcatgaggattaaaatcaaatctgactgggcgaggtgactcatacctgtaatcctagcactttggga

SEQ ID NO: 619114 - DNA, 73 bp, Artificial Sequence
  ENSG00000177548_30 (sequence is synthesized)
gtaatcctagcactttgggaggcctaggcggttggatcacctgaggtcaggagttcgagcctagccaacacag

SEQ ID NO: 619115 - DNA, 75 bp, Artificial Sequence
  ENSG00000177548_31 (sequence is synthesized)
gtgggcgcctataatcccagctacttggctgggcaggataatcgcttgaacccaggggacatgaaagcaaaactg

SEQ ID NO: 619116 - DNA, 120 bp, Artificial Sequence
  ENSG00000177548_32 (sequence is synthesized)
atagctaagtttagctcccagcttctatctgttgccttgtcccatgtcatttcttgtccctcactgatgattgatcaaccctgaagatgggcgagaaacttctcagttccccaaaccaac

SEQ ID NO: 619117 - DNA, 120 bp, Artificial Sequence
  ENSG00000177548_33 (sequence is synthesized)
gaaactggccaccgcgaagagatggagtgtaggcagcacccggcagagcgagtgggaagggggcggggcaggggcggggccaggtgagccgggcgggcccaggtgaaggaggccccagat

SEQ ID NO: 619118 - DNA, 120 bp, Artificial Sequence
  ENSG00000177551_0 (sequence is synthesized)
aattggtaccaggagagcccagaagccacacacgcatctctgcctctttgctctggctctcccaccctcttcccgtctttctctgcttccttgtcactgttactccaggagacgttcact

SEQ ID NO: 619119 - DNA, 120 bp, Artificial Sequence
  ENSG00000177551_1 (sequence is synthesized)
tttcaccaacctttctccaagcatctccaagccactgactatatatattttgctacaagagacctagaagaggaaaaaaggcacgagacttttcaacacatcgtttaaaaaaatcatcaa

SEQ ID NO: 619120 - DNA, 120 bp, Artificial Sequence
  ENSG00000177551_2 (sequence is synthesized)
cgaatttcttgcaatgtttgagaacaattaaaaggaaaaagcgttttttaaaaaatctatcaactaagtgaacaatcattcatatcgtctacatcctgagatattattgtccctcgctgc

SEQ ID NO: 619121 - DNA, 120 bp, Artificial Sequence
  ENSG00000177551_3 (sequence is synthesized)
ggacaccagcgagatgacagctgctttttcatttttgaatgtaataaatatttgctgcttttaatattttccggaatctcccctcgctattccttggaattttaactctaaagattggag

SEQ ID NO: 619122 - DNA, 120 bp, Artificial Sequence
  ENSG00000177551_4 (sequence is synthesized)
aacagattatcaaaaaggcttttgcaagcctccaaaatgatgctgagtccggaccaagcagcagattcggaccatcccagctcggcgcactcggatccggagtccctgggcggcacggac

SEQ ID NO: 619123 - DNA, 120 bp, Artificial Sequence
  ENSG00000177551_5 (sequence is synthesized)
accaaggtgctcggcagcgtgtcggacctggagccggtggaggaggccgagggcgacggcaagggcggcagccgagccgcgctctacccgcacccgcagcagctgagccgcgaggagaag

SEQ ID NO: 619124 - DNA, 120 bp, Artificial Sequence
  ENSG00000177551_6 (sequence is synthesized)
cgccgccgccggcgcgccacggccaagtaccgctcggcccacgccacccgcgagcgcatccgcgtggaagccttcaacttggccttcgccgagctccgcaaattgctgcccacgctgccc

SEQ ID NO: 619125 - DNA, 120 bp, Artificial Sequence
  ENSG00000177551_7 (sequence is synthesized)
ccggacaagaagctctccaagatcgagatcctgcgcctggccatctgctacatctcctatctcaaccacgtcctggacgtgtagggcggggtgcgccgcggggggccgcctgtcccggcg

SEQ ID NO: 619126 - DNA, 120 bp, Artificial Sequence
  ENSG00000177551_8 (sequence is synthesized)
tccgcgaaacgctacggatccggacgggcgccgtcgctcgggtggcggaggctgcggtggcccagcgagacggccgcctcgagagacggccggggaagaagctcgctacctgttctctct

SEQ ID NO: 619127 - DNA, 120 bp, Artificial Sequence
  ENSG00000177551_9 (sequence is synthesized)
ggtcagcagggcgacgagggaaggtttccgacgcaggcaggtggggttgtctggcgagcccgggggctcgcaggggggattttccaggccaggagaacctcgtggagacacccgagatga

SEQ ID NO: 619128 - DNA, 120 bp, Artificial Sequence
  ENSG00000177551_10 (sequence is synthesized)
cagagtatgcaggctcataactttaggctatctggaatttttctaatggacaaatcaccaaacactgggaaggaggagagaggagggatctctcccatagagatggaaggcacagaaagg

SEQ ID NO: 619129 - DNA, 120 bp, Artificial Sequence
  ENSG00000177551_11 (sequence is synthesized)
tgcgactggaaactttcctttctgttgtgaaaataaagattatattagaatccaaataaaccctgaatatttagtaagtttaaaaagacaaattgagaacaagtagacacactgtgggag

SEQ ID NO: 619130 - DNA, 120 bp, Artificial Sequence
  ENSG00000177551_12 (sequence is synthesized)
gatctgagcttggtgatattttatccccaagatatgacaccaaggtagacaggaaaatccatatttaaatggaaactttaatatctgattacttttgcaggcgaagtgcccctttatata

SEQ ID NO: 619131 - DNA, 120 bp, Artificial Sequence
  ENSG00000177551_13 (sequence is synthesized)
tccaaaaacatctatttgtgaccttaaacatgtggacccataggtgcagttagaaaaagacaacctatttttatttatgttagaaggagtagagtatttttttcaagacatttatttttc

SEQ ID NO: 619132 - DNA, 120 bp, Artificial Sequence
  ENSG00000177551_14 (sequence is synthesized)
agagtggtgatacttttactttggatactctgtgccaatttatttatagtcaagtgtttacactttttcctgtggaataattatgtctaactttttacgtgtttgttgagattatactgt

SEQ ID NO: 619133 - DNA, 120 bp, Artificial Sequence
  ENSG00000177551_15 (sequence is synthesized)
ggtctttctttctgctctaattatattgcacttgtataacaaatttcccacttctccctgtttctaaacatattttatatattaagatgtttgttcttgaaaggttcttttgttgtgaga

SEQ ID NO: 619134 - DNA, 120 bp, Artificial Sequence
  ENSG00000177551_16 (sequence is synthesized)
tcagcaacactagcacttcactattatagttttttaaaaagtgtattattcttatctgtagttatgtctgagaagtcctttacaagctgtttataaggagagtagcttctttgtgtgtgt

SEQ ID NO: 619135 - DNA, 120 bp, Artificial Sequence
  ENSG00000177551_17 (sequence is synthesized)
gatgtttgtgcgtgtgatgaatttagcaaattaagttattttcctaaaaaaaaaagaaaaaaagaattcagaactactttcctctgtgacaccaaaaagaaaagtctataacctgaaaat

SEQ ID NO: 619136 - DNA, 120 bp, Artificial Sequence
  ENSG00000177551_18 (sequence is synthesized)
gtttcatgttctctgctgtgaaactcttaaaacaaggagtgtattttagagacaagggaaaaaaaccacatctgctatccaaagattttagtctttttcagggtttttttgtgtctctgt

SEQ ID NO: 619137 - DNA, 120 bp, Artificial Sequence
  ENSG00000177551_19 (sequence is synthesized)
tgctttatataatgcaatattttgtagtgaaaatagatataatctggtttctatctgacgagtttttcatatctcatgaatggtgcgctgttttgcatataaataaaggtatcaaataaa

SEQ ID NO: 619138 - DNA, 120 bp, Artificial Sequence
  ENSG00000177551_20 (sequence is synthesized)
gagtatatctggatatgtttatttttctatgtcaatatatatctgttcctcaatatgtatttatactgaataataataataatgatagccaacacttactgaacatgagttctaggcatt

SEQ ID NO: 619139 - DNA, 120 bp, Artificial Sequence
  ENSG00000177551_21 (sequence is synthesized)
agtttaagcactttacatatattatcttgttcaccttcagaaaaaaacatgacataacattacataacatgctttgattattctcattttacagattagaaaactaaggtccaaaaaggt

SEQ ID NO: 619140 - DNA, 120 bp, Artificial Sequence
  ENSG00000177551_22 (sequence is synthesized)
taagtaacttacaactaaattcacacagctagcatatgacagagccacaaagccggactttttaagtcactacttatcacctccccattcatttaataatattatttaatattactctta

SEQ ID NO: 619141 - DNA, 120 bp, Artificial Sequence
  ENSG00000177551_23 (sequence is synthesized)
tagtctataatatcataatttgtatggtgcttactatttcatcaaatattttcaaatacattgggtctcatagcgagcctgtgaaatgagaagtgcaatattattattctcatttttaca

SEQ ID NO: 619142 - DNA, 120 bp, Artificial Sequence
  ENSG00000177551_24 (sequence is synthesized)
ggaaagaaaattgatagaactgaaccatgggtgtcctttagtggaagcgtttctatgttacaaatatctggggtacctctgtacatagagtcacatcataaatgaactgagtacctataa

SEQ ID NO: 619143 - DNA, 120 bp, Artificial Sequence
  ENSG00000177551_25 (sequence is synthesized)
tgtgtcaagctcagacattagtgctggggatataagctacagacctcccctggaagcatcatagcctaggaagagagaccagtgtggtaaccaagaaccaagaatcacggtacacaatat

SEQ ID NO: 619144 - DNA, 120 bp, Artificial Sequence
  ENSG00000177551_26 (sequence is synthesized)
gtagtctctaagggagacatgaaaggagtgcttatggagcacagaaggaggggccatctgtgccagggaggtcttagaaaaggcaaaggggtgggggagggggaggctttgatggaagaa

SEQ ID NO: 619145 - DNA, 120 bp, Artificial Sequence
  ENSG00000177551_27 (sequence is synthesized)
agaatgtgtgtgtgtgaatgtgaatccatgtctgtgtctatgacagtgtggctaggcatcactaagtatggatctgagtgtgtacctgtttatacaggcttacttctgtaagcattaatt

SEQ ID NO: 619146 - DNA, 120 bp, Artificial Sequence
  ENSG00000177551_28 (sequence is synthesized)
tttgtgtatgctggctgctggtatagaatgagtaagcctgaacataaaagggaatttgtctggtatcacacacaccatagcagaattggacctgccctgataggcacaccctgtcatgac

SEQ ID NO: 619147 - DNA, 120 bp, Artificial Sequence
  ENSG00000177551_29 (sequence is synthesized)
tccccaacaccaggggaaccagagatgctggtcctttcccactgtagcagctgcccactctagagctatggtgattagacccaccagtttttttcaatccatcagtatggatgtgtggtg

SEQ ID NO: 619148 - DNA, 120 bp, Artificial Sequence
  ENSG00000177551_30 (sequence is synthesized)
gtctaatagagccagccagcttgtatgatgaagggggaggaggtacaggtgtctgtgggtgtgcatctgtgtgcacacttctggttgtgtgtgaatgcttagcattggctgttcctaact

SEQ ID NO: 619149 - DNA, 120 bp, Artificial Sequence
  ENSG00000177551_31 (sequence is synthesized)
agagtgagaaaacctcccttctcccttcattgtcaccaccttggggtgtttatccactcacccatttccattgccacctgtatgggaccggcttccatcttcactttaacgttctgggga

SEQ ID NO: 619150 - DNA, 120 bp, Artificial Sequence
  ENSG00000177551_32 (sequence is synthesized)
tatctaaaatatacctctgtgctggggttaggcagaagcaaggctggggagtgttggtgcccttatttgttggaggcactccctcctttccccgacccctgccccattgtggtccaggaa

SEQ ID NO: 619151 - DNA, 120 bp, Artificial Sequence
  ENSG00000177551_33 (sequence is synthesized)
tctctcaaaggagcaaaaatgtgggcaaaggcaaatagtacttgtggaagccatgaaaaacccggagggtcactcccaggggtgggctgctcaatgtgcctcccctggtgataaaatctg

SEQ ID NO: 619152 - DNA, 120 bp, Artificial Sequence
  ENSG00000177551_34 (sequence is synthesized)
cttttagggcaaaattaaggaagacaagtgaggactcctctctccacaaatgttcccctaggaactggcggggtgggagtaaggctgtaatgctcttttatttctttaagcttgtatgat

SEQ ID NO: 619153 - DNA, 120 bp, Artificial Sequence
  ENSG00000177551_35 (sequence is synthesized)
acaagctaaaataatcacaaataatatgttattgatattaactatgagtatcttcataaagtggcaaaataattgaactagattttattttttattataaggtatacaaattcagggcca

SEQ ID NO: 619154 - DNA, 120 bp, Artificial Sequence
  ENSG00000177551_36 (sequence is synthesized)
gccatgggatcatgtaaggcaaaggcattatgtactgggacacactggtaatttgtgtttacatcttggcacaagcactgccacgcagtacaatatattagcatgttaagatgggcaaga

SEQ ID NO: 619155 - DNA, 120 bp, Artificial Sequence
  ENSG00000177551_37 (sequence is synthesized)
atgaagtgcaataatcaacacatgtagcatgtcatatttcagcttgaatgaatgagtgggtggagagaaaaacaaacatacagaaaagtagaattatctcatgtcgtggtccgtgaatat

SEQ ID NO: 619156 - DNA, 120 bp, Artificial Sequence
  ENSG00000177551_38 (sequence is synthesized)
gtggattctctttctagttccaccaatggcttaatctattgaaaggttcttaccatctattgataagttagtctcatagcagatcatttctcaaaaatgttaatatgcttaatcaaacct

SEQ ID NO: 619157 - DNA, 120 bp, Artificial Sequence
  ENSG00000177551_39 (sequence is synthesized)
tactgaagtatcttttaaaatgtaaatgatctctaataaatgttggctgttgcatgtctaaatactttattgcagcatcttatatagtatatatttccatgttctggacacaaatatttt

SEQ ID NO: 619158 - DNA, 120 bp, Artificial Sequence
  ENSG00000177551_40 (sequence is synthesized)
tctaaatattaagggaaagtggtggctttgtaatatgccaggggaattctttgatagtcaatatattgtttatttgtacttaaatatttcatcaataatctggaaaagagaaatagcctg

SEQ ID NO: 619159 - DNA, 120 bp, Artificial Sequence
  ENSG00000177551_41 (sequence is synthesized)
actacggctagatactgtttagaggctaagatttctatcatgaactgcttttcaattgttatattttatggcacagattcagtgggaatctgatctgctaaaatatttgggctgtgaaaa

SEQ ID NO: 619160 - DNA, 120 bp, Artificial Sequence
  ENSG00000177551_42 (sequence is synthesized)
ctcccacactgtgacagatgtcaagtccaattaagtgactcatgtccaggtttctgtccaataggatttcccattaaatatcaatttaggggaaaaaaattccatcccccttcctaagcc

SEQ ID NO: 619161 - DNA, 120 bp, Artificial Sequence
  ENSG00000177551_43 (sequence is synthesized)
tatagccaaaccttgaaagactttgaaactggaaaataggtgtctatttatacaacatacaagtaagtgagggaagaggaagaggcaaccttagctcctagttacagtattgtgttcctg

SEQ ID NO: 619162 - DNA, 120 bp, Artificial Sequence
  ENSG00000177551_44 (sequence is synthesized)
ggaactggggagatatcagctgaacaaagccttatctcaaaaaaaaaaaaaaaatcacttctgagcaagatcacatctctgtcctgcacttcccagtttctgctcagccgtattaaggaa

SEQ ID NO: 619163 - DNA, 120 bp, Artificial Sequence
  ENSG00000177551_45 (sequence is synthesized)
aagaaaggcatacgataggagcggaatcttatcttaaccatctttcttattgattattccgctattagaaagtggaggaatcagccctttgatgtgattgtgtttatctctgcatctctt

SEQ ID NO: 619164 - DNA, 120 bp, Artificial Sequence
  ENSG00000177551_46 (sequence is synthesized)
attattcatactgtatctatagatgcagttcattccataaagagataaaacgcatacacggcatactatttatgaatatttttaaagatctagaggagaatttaatgtgctttgagggca

SEQ ID NO: 619165 - DNA, 120 bp, Artificial Sequence
  ENSG00000177551_47 (sequence is synthesized)
acccaggaactttttaccagaactacaactatttagtggcttattgtgattttccattactcgtctatttatttctgccctttcaagctgactgtgtaggtgcaagttgttctactcata

SEQ ID NO: 619166 - DNA, 120 bp, Artificial Sequence
  ENSG00000177551_48 (sequence is synthesized)
aacgtacccgagaaaagcccgtagggagtcacatgcagctctctgggagcatttgtttttattttgccgtagaggacctgatttcctcgcagggaaattaaagctgttttggcccaattc

SEQ ID NO: 619167 - DNA, 120 bp, Artificial Sequence
  ENSG00000177551_49 (sequence is synthesized)
gctcctctgcaagtgcggtgctgggaaccgatcacccatccccttgcttttgtttctctagaagcaaacgctcctatacgtcgccgacgcggatttctcccgtgccgagcgtcgtggagg

SEQ ID NO: 619168 - DNA, 120 bp, Artificial Sequence
  ENSG00000177551_50 (sequence is synthesized)
ctgcccacgccggggccccgagttctcagcctggtcctcactcccgacgcccaggggcggtgcgtgcagcccctgcaggggcctttctcctcctgccgggccctttctcgaagcccgaat

SEQ ID NO: 619169 - DNA, 120 bp, Artificial Sequence
  ENSG00000177551_51 (sequence is synthesized)
tacccggaagcccagcggttctgagcggccccctcccagaaggcgcacagtccgggccagtgctccaggcgccccagagaagcctggccaggtggcgtttccaagagggcacagttaagt

SEQ ID NO: 619170 - DNA, 120 bp, Artificial Sequence
  ENSG00000177551_52 (sequence is synthesized)
tagaggaaggctaagcaccgacatgcccggacttggccaggccacccggggacagctgcagcctgccgagctccggttccgggagcgcccgaactttgccggcagagatgcagctcccgc

SEQ ID NO: 619171 - DNA, 120 bp, Artificial Sequence
  ENSG00000177551_53 (sequence is synthesized)
cgggacaacacgcgctgcacccgctagtccccgcctgccccgccccgggcccttcccttctcttcccttccctctgcatcctctcctccctcagcggcccggctgccggcattttcccgc

SEQ ID NO: 619172 - DNA, 120 bp, Artificial Sequence
  ENSG00000177551_54 (sequence is synthesized)
aaggtggtcgccagactgccgggcgcattgtctgatcccacgtcgccgtgtccctaggtcccctatgtgtgtggctgtctgcgtgacagatggtgctccgggagcctgcgagggcatcgg

SEQ ID NO: 619173 - DNA, 120 bp, Artificial Sequence
  ENSG00000177551_55 (sequence is synthesized)
agtcaattttctttttaaaggctcccccacgtttgtttagtcatttctttacgatttcggagaagcgcgaggggtccaagaagccttcccgcccccagccactggctctccgcctgcgct

SEQ ID NO: 619174 - DNA, 120 bp, Artificial Sequence
  ENSG00000177551_56 (sequence is synthesized)
aagccttcccgcccccagccactggctctccgcctgcgctccaggatggggattcctgaccggccgcaccccagagccaggcgcccccggcgcagccccagaccagcgccaggccctcgg

SEQ ID NO: 619175 - DNA, 120 bp, Artificial Sequence
  ENSG00000177551_57 (sequence is synthesized)
gcgagaagtgcaccccgcgtctccccgcccccgtgaaaacccagatgtattcgttgttcgaaatcgctcgtttgtccgggaaggggacgaagggagggaggaggaatagcgcggttggca

SEQ ID NO: 619176 - DNA, 120 bp, Artificial Sequence
  ENSG00000177551_58 (sequence is synthesized)
tttggccggaagaggcacaaaaacccagtcgcgaccccacaggcctgcggttgttccccaggcccagggccacaggcccgctgtggccgtctgcaagtcgaggtgtccagtctagtatgc

SEQ ID NO: 619177 - DNA, 120 bp, Artificial Sequence
  ENSG00000177551_59 (sequence is synthesized)
agtctagtatgcggcctgggtcaaccgcgtccccgccggctcccgcgccagggcgaggcgcagggctcgcgccctcgggccagatcctatcggcgccctcccgcgtcgcgcgccggcctg

SEQ ID NO: 619178 - DNA, 120 bp, Artificial Sequence
  ENSG00000177551_60 (sequence is synthesized)
ggcccgggccgcgcgtccgctgggaggaccggcgtggtaggcctcggcagccatccttccagcaaaataccctgattccttttactgattaattttccgacccctcctcagcctccaaaa

SEQ ID NO: 619179 - DNA, 120 bp, Artificial Sequence
  ENSG00000177556_0 (sequence is synthesized)
agccgaacccgccctccgaatccagagaggcgctgctgacaccgccgccacaccgccgccacaccgccgctgcctcagtcatgccgaagcacgagttctctgtggacatgacctgtggag

SEQ ID NO: 619180 - DNA, 120 bp, Artificial Sequence
  ENSG00000177556_1 (sequence is synthesized)
tgcttgcaaccctgaagaaaacaggaaagactgtttcctaccttggccttgagtagcaggggcctggtccccacagcccacaggatggaccaaagggggcaggatgctgatcctcccgct

SEQ ID NO: 619181 - DNA, 120 bp, Artificial Sequence
  ENSG00000177556_2 (sequence is synthesized)
ggcttccagacagacctgggacttggcagtcatgccgggtgatggtgttcctgcggagaccctcagttgtcctattccttcctagcttccctgcaataaaatcaagctgcttttgttgga

SEQ ID NO: 619182 - DNA, 120 bp, Artificial Sequence
  ENSG00000177556_3 (sequence is synthesized)
ggggcaggtgggtaaggccccagcacttgctgaacaaacctacagctcacacctctcatcagagcgaacaccttggcctttgagagcttgagtggagcgggagagccctctgggttcttt

SEQ ID NO: 619183 - DNA, 120 bp, Artificial Sequence
  ENSG00000177556_4 (sequence is synthesized)
tcaatccactgtccaccttctttggagtggttacaaatattttattattgtctaatgcaaatcacaagttcagggaattcttacagaccctgtgagtggacagagcactgtgtaatgtct

SEQ ID NO: 619184 - DNA, 120 bp, Artificial Sequence
  ENSG00000177556_5 (sequence is synthesized)
gcaaaaccgaaggcgcttctgcgacgcgcggaccgcaagactccaatcagactttagtgctgcccccaccctaaacgaaagcctccttctggtccgaaccgactggatcccttggccagg

SEQ ID NO: 619185 - DNA, 120 bp, Artificial Sequence
  ENSG00000177556_6 (sequence is synthesized)
caggggaggaaaaggccgggtgaccacgggcccggcccgcagaaaggaggcggcgcggccggcagggatcaggactggagggggcggagcctccctcgcggccgggcccggagtgggagg

SEQ ID NO: 619186 - DNA, 120 bp, Artificial Sequence
  ENSG00000177556_7 (sequence is synthesized)
agactaggagccggggatcccttcctgcctggcctccaacccactggggaacccaggcaatcctttctttccctggacccagatgctgcctctgagaatgcggcccttggatgaaagcag

SEQ ID NO: 619187 - DNA, 120 bp, Artificial Sequence
  ENSG00000177556_8 (sequence is synthesized)
gtttgagacagtgtttcactatatggcccaggctggagggtagtaactcttcataggtgtgatcatagtgcactatagcctttaactcctgggctcaagtgatgctcctgcctcagcctt

SEQ ID NO: 619188 - DNA, 120 bp, Artificial Sequence
  ENSG00000177556_9 (sequence is synthesized)
ctaagtaactggaactataggcacctatcaccacacatggctctggctttgataaactgactatctcatcagagttgacacttgtgccttgggccttgttctcctgtgccctgaccaagt

SEQ ID NO: 619189 - DNA, 120 bp, Artificial Sequence
  ENSG00000177556_10 (sequence is synthesized)
gagttaattcagactgtgccgctctctctacttgaaactgttgtcagcttcctgagcatgccctctgtccagactggtacaaaaacaatagcatgtttgagctagatgttcccttcactt

SEQ ID NO: 619190 - DNA, 120 bp, Artificial Sequence
  ENSG00000177556_11 (sequence is synthesized)
ttatgtaatccagtgatgcagtaaggggcactgtgccagcactcttcgctctggaaccaggcagaccttactcattgatccagccacagtctcagcagggcactcctggctgccactgcc

SEQ ID NO: 619191 - DNA, 120 bp, Artificial Sequence
  ENSG00000177556_12 (sequence is synthesized)
catgtagtgcatttgactcgtgaattacaatgatcgccacacctctgatgtggtttggtgccctgacgtgactgagaaaaatgaggccaagagaggggaagtgattcaaccagagtccca

SEQ ID NO: 619192 - DNA, 120 bp, Artificial Sequence
  ENSG00000177556_13 (sequence is synthesized)
ccctggtgagtagcagaggcaggaagaaagtcagatatcctgaatcggagttctgtaactgttactggtggcattgtccctgtgaatgggcccacagagaccccctggacagaggctagc

SEQ ID NO: 619193 - DNA, 120 bp, Artificial Sequence
  ENSG00000177556_14 (sequence is synthesized)
cacactgactggtaggtcctctttgaggatagcctccttcccaaaggcatacatttggaacctgagtcatagcagtgttctgtgtatgtggtaacatcacatgcaagttacaagatgtca

SEQ ID NO: 619194 - DNA, 120 bp, Artificial Sequence
  ENSG00000177556_15 (sequence is synthesized)
gatgcatctgttttcgtcatgcactttccatccatagatagaacccatattcaggaatgaacccaggatgaataatgaggaatctaggattctaattccaactttcctcatttcacactg

SEQ ID NO: 619195 - DNA, 120 bp, Artificial Sequence
  ENSG00000177556_16 (sequence is synthesized)
actttggggactttttacattacagagatttggtcttcccatcggtaaaatggggctaaaacctccaacctgctttcctgccttgtggggactgctgtgcaatctctccacatatgaaag

SEQ ID NO: 619196 - DNA, 120 bp, Artificial Sequence
  ENSG00000177556_17 (sequence is synthesized)
tttatcctctagggaagtaaaacatcagcggtttccagcatgttgaagaacagtgtttcttacatcattcctccacccctagggttttgtagggagggtgagtggatggggctttggacc

SEQ ID NO: 619197 - DNA, 120 bp, Artificial Sequence
  ENSG00000177556_18 (sequence is synthesized)
ctccatagctcccaaacggtcctgtgtcatattgggcttcccgtaagactgtattttataaaaacgctctgtaacaagaaggaatggaggcagagaaggaaaaaaatactcttcctgaac

SEQ ID NO: 619198 - DNA, 120 bp, Artificial Sequence
  ENSG00000177556_19 (sequence is synthesized)
tagctatatacatggggagccctaatgcacacatcttggattagaaactccaggcctgggcatacgaacttttttaactaaaaaagtaatatctgttggatgtaaaccatgtgtagctta

SEQ ID NO: 619199 - DNA, 120 bp, Artificial Sequence
  ENSG00000177556_20 (sequence is synthesized)
catgttttctcatgttattttattgagatgaaattcacaagacataataactattttaacccatttatgctgaatattgcaaagttttttatgtgaaaaatcaaaccttggtgatgacct

SEQ ID NO: 619200 - DNA, 87 bp, Artificial Sequence
  ENSG00000177556_21 (sequence is synthesized)
agtctatcatttagtggcatttggtgtgttcacaatgttgtatgaccaccatctctctctagtttcaaaattttttcatcatctcag

SEQ ID NO: 619201 - DNA, 120 bp, Artificial Sequence
  ENSG00000177556_22 (sequence is synthesized)
accatctctctctagtttcaaaattttttcatcatctcagaaacacaccctgtatccattaagaagtcactccccactacccatctctccatcccctggcagccactaatttgctttctg

SEQ ID NO: 619202 - DNA, 120 bp, Artificial Sequence
  ENSG00000177556_23 (sequence is synthesized)
ctactctggatttgcctaccctggacatgtcatataaaaagaattacattatatgtgacctttttgtgtctgcctttttccatgtagcataatgttttcaagattcattcaagtcatagc

SEQ ID NO: 619203 - DNA, 120 bp, Artificial Sequence
  ENSG00000177556_24 (sequence is synthesized)
atgtgttgtaaatcattccttccaatacttaataattttcatggtacttttaatctactttagattttttatgataggaagtttcaaacatgtgtaagtagagtaatagaatgaatcccc

SEQ ID NO: 619204 - DNA, 120 bp, Artificial Sequence
  ENSG00000177556_25 (sequence is synthesized)
aagtacccgtcactcagatccaacagttagtatttatttcaccaaggcctgttattttttgataaaagtgctctgtgacaagaaggaattaaggaagagaaggaaaaaaactcttctgga

SEQ ID NO: 619205 - DNA, 120 bp, Artificial Sequence
  ENSG00000177556_26 (sequence is synthesized)
gctatctgtatccatgtgggggagccctaatgcacacatcttggattagaaactccactgtcctcattgtttcatctgggtgatgaaacacccagattattttgaagcaaattctagaca

SEQ ID NO: 619206 - DNA, 120 bp, Artificial Sequence
  ENSG00000177556_27 (sequence is synthesized)
tcatgcccactccctcctgcccagattattttgaagcaaattctagacatcatgcaatcttacctgtacatatttcagtaaccatgtattgtttggaaaggctcctggaaattcagatgc

SEQ ID NO: 619207 - DNA, 120 bp, Artificial Sequence
  ENSG00000177556_28 (sequence is synthesized)
acagtactcagtaagaatcacccaataagccagctttagtccacatgctcaggcagcatgtctttgaagtctgttttaagaggctcctcagtgactgatttgaagccaggcttgggaacc

SEQ ID NO: 619208 - DNA, 120 bp, Artificial Sequence
  ENSG00000177556_29 (sequence is synthesized)
tcaaagatagagtgtttattggttttgaagtcaccttgatcatctgactcttggcagatttatttgccatgattttgttcattgcctttccaacctgtaacaggatagagagtgctgttg

SEQ ID NO: 619209 - DNA, 120 bp, Artificial Sequence
  ENSG00000177556_30 (sequence is synthesized)
actgggtatcctggcagccctggaaattccccagaagagggctttggcagtgattggcttagcaaggttaatgcgttccagccaacctaagtataacagacttcatgggagcagtgtgca

SEQ ID NO: 619210 - DNA, 120 bp, Artificial Sequence
  ENSG00000177556_31 (sequence is synthesized)
gggctggacactggggctctagtcctgctcctgcatctgcaccctgcgttttccacctcacccctgccttttagtgcaagactcttagtgcacccctgcgtcacccctgtctcttagtgc

SEQ ID NO: 619211 - DNA, 120 bp, Artificial Sequence
  ENSG00000177556_32 (sequence is synthesized)
tgcttgctcacatgtaggtggttatgcttacttgggttggagttttgagagttcccacctgggagtcagacaccctgtagattctgattctttgctgtgtgatctttagcaaatcacttc

SEQ ID NO: 619212 - DNA, 120 bp, Artificial Sequence
  ENSG00000177556_33 (sequence is synthesized)
ccctctctgggcctcattttttcctcacctataaagtggaggcattgacccagaacagtgatcccctttcttttcaccagtttcatagactctatattttgaaaaaatttgtctatcaag

SEQ ID NO: 619213 - DNA, 120 bp, Artificial Sequence
  ENSG00000177556_34 (sequence is synthesized)
tgaattgcacaagagattatcaaatgttaagcaagtggaatagtaggaagaggctgtggagacaaactgcctgggatagagttcaagctccagtacctcctagctgggccacttaacctc

SEQ ID NO: 619214 - DNA, 120 bp, Artificial Sequence
  ENSG00000177556_35 (sequence is synthesized)
tcagtgtccacagacaaaatgtgatgatagcatctactgcaaatggtggttgtggggattaaatgaaatgaaacatgtaaattaattacagcagtgattgctggttaaaaaatcactcag

SEQ ID NO: 619215 - DNA, 120 bp, Artificial Sequence
  ENSG00000177556_36 (sequence is synthesized)
gagacaaagctcatagctcaagaatcagtgttttgaaggtaggactgggaaaaagcattttaaactagatctccaggtgattctatttactatgtgccagacactgctaaaggatttata

SEQ ID NO: 619216 - DNA, 120 bp, Artificial Sequence
  ENSG00000177556_37 (sequence is synthesized)
gggatgattccattgaatacaacttgtgaggtagaaactcttagctactctatagttgaagagacgggctcagaaacaggcttctgatgagtctgatgccaaccaggtcctgcccagtct

SEQ ID NO: 619217 - DNA, 120 bp, Artificial Sequence
  ENSG00000177556_38 (sequence is synthesized)
ctctgtcttctgtcttgaccctgagtgggcctgtctgctggcactgtgtgggggtcactctacagggctcgggtcatggtccccctgtgtttgtttcagaagcacgagttctctgtggac

SEQ ID NO: 619218 - DNA, 120 bp, Artificial Sequence
  ENSG00000177556_39 (sequence is synthesized)
tagaggaaagggcaagggtggttgtgagtagtaatttagagcctgaactctttcttgctgtaactgggagggtctgtgcttcctctccccataccccatttcctcttcctgcaggagtta

SEQ ID NO: 619219 - DNA, 120 bp, Artificial Sequence
  ENSG00000177556_40 (sequence is synthesized)
gagcacagtgacaatccagactcagcggtgtttagagacttggaaagagtttgagaagccacttagccactttattttcagaagcacgagttctctgtggacatgacctgtggaggctgt

SEQ ID NO: 619220 - DNA, 120 bp, Artificial Sequence
  ENSG00000177558_0 (sequence is synthesized)
tcacaatgttcggggtggcaccagcccactgccacagccccagtccaccatgccacccatgctgtggctgctgctccactttgctgccccggcactggggttctacttttccatcagctg

SEQ ID NO: 619221 - DNA, 120 bp, Artificial Sequence
  ENSG00000177558_1 (sequence is synthesized)
ccccagtggtaagcagtgccaacaggccctactctcaggcaatgatattctcctgtattgcaactcctcgggggcgcactggtactatttattcacacaaggcaagaagggcaggctcac

SEQ ID NO: 619222 - DNA, 120 bp, Artificial Sequence
  ENSG00000177558_2 (sequence is synthesized)
cagcctcaccaatatttccaatatggaaataatgcccgagggcagccttctcattaaagatccattgccctcccagacgggcctctaccactgctggaacaagaatggccgccaagtggt

SEQ ID NO: 619223 - DNA, 120 bp, Artificial Sequence
  ENSG00000177558_3 (sequence is synthesized)
gcagtatgaaattgactttcaggatgtcaccaccctgcatataacacacaaggacctgggtcagaggcccctgcagaacgagaccctgcatttgggcagcaaacagctcatttttacctg

SEQ ID NO: 619224 - DNA, 120 bp, Artificial Sequence
  ENSG00000177558_4 (sequence is synthesized)
ggctctatctgggagaggtgctggtgtggtctagccgcttgcggcctgagctgcaggtggaagcctgccacgtccagtgcaccaataacacacagttaagggtggattacgtcatttttg

SEQ ID NO: 619225 - DNA, 120 bp, Artificial Sequence
  ENSG00000177558_5 (sequence is synthesized)
acaacttcaggctcgatgagaagacagaatttgtgtggctcgactgtcccttaggatccatgtacaggcccgtcaactggcgtgccaacgacacccccctgacgtgggagagccagctct

SEQ ID NO: 619226 - DNA, 120 bp, Artificial Sequence
  ENSG00000177558_6 (sequence is synthesized)
ccggccaggacttcaccacctttctggacccctccaccggcggcaggcagctgcaggttttccagccggccgtctacaagtgcttcgtgcagcaggagctcgtggcccagttcaaacccg

SEQ ID NO: 619227 - DNA, 120 bp, Artificial Sequence
  ENSG00000177558_7 (sequence is synthesized)
ccgccagtctggagacgctggaggctcagtggagagagaacgatgcccagtggcgggaggcaaggaaggccctgcggggcagggcggactccgtgctcaaggggctgaagctggtgctgc

SEQ ID NO: 619228 - DNA, 120 bp, Artificial Sequence
  ENSG00000177558_8 (sequence is synthesized)
tcgtggtcaccgtcctggccctgctgggggcgctgctcaagtgcatccacccttccccgggcaggagaagcacacaggtgctggtggtgaaataaagcgagcccccggtgcacaagcgga

SEQ ID NO: 619229 - DNA, 120 bp, Artificial Sequence
  ENSG00000177565_0 (sequence is synthesized)
gcgcggcagccgggccttgctccgggacgtgtttatttgtaacttagtgctttttatcgtcttaaggaggtatttggtggaggctctttgaagttgggttcaggagtgtagaattggcaa

SEQ ID NO: 619230 - DNA, 120 bp, Artificial Sequence
  ENSG00000177565_1 (sequence is synthesized)
agttattgccagcttcctgcatcaacaacagcaacttgtgattggcggtgaccggatattcagttgcacatccccacatcaatgcactgccaatgggttatatcctgtgttgtgacctca

SEQ ID NO: 619231 - DNA, 120 bp, Artificial Sequence
  ENSG00000177565_2 (sequence is synthesized)
tggtttaagtgggaataaagatgagtataagcagtgatgaggtcaacttcttggtatatagatacttgcaagagtcaggattttctcattcagcatttacctttggtatagaaagccata

SEQ ID NO: 619232 - DNA, 120 bp, Artificial Sequence
  ENSG00000177565_3 (sequence is synthesized)
tcagtcagtccaatataaatggtgccctcgtcccacccgctgcattgatttctatcatccagaaaggtctacagtatgtagaagcagaagttagtattaatgaggatggtaccttgtttg

SEQ ID NO: 619233 - DNA, 120 bp, Artificial Sequence
  ENSG00000177565_4 (sequence is synthesized)
atggtcgaccaatagagtctctgtccctgatagatgccgtaatgcctgatgtagtacaaacaagacaacaagcttatagagataagcttgcacagcaacaggcagcagctgctgcagctg

SEQ ID NO: 619234 - DNA, 120 bp, Artificial Sequence
  ENSG00000177565_5 (sequence is synthesized)
ccgcagctgcagccagccaacaaggatctgcaaaaaatggagaaaacacagcaaatggggaggagaatggagcacatactatagcaaataatcatactgatatgatggaagtggatgggg

SEQ ID NO: 619235 - DNA, 120 bp, Artificial Sequence
  ENSG00000177565_6 (sequence is synthesized)
atgttgaaatccctcctaataaagctgttgtgttgcggggccatgaatctgaagtttttatctgtgcctggaaccctgttagtgatctcctagcatcagggtctggagactcaacagcaa

SEQ ID NO: 619236 - DNA, 120 bp, Artificial Sequence
  ENSG00000177565_7 (sequence is synthesized)
gaatatggaatcttagtgagaacagcaccagtggctctacacagttagtacttagacattgtatacgagaaggagggcaagatgttccaagcaacaaggatgtcacatctctagattgga

SEQ ID NO: 619237 - DNA, 120 bp, Artificial Sequence
  ENSG00000177565_8 (sequence is synthesized)
atagtgaaggtacacttctagcaactggttcctatgatgggtttgccagaatatggactaaagatggtaaccttgctagcaccttagggcagcataaaggccctatatttgcattaaaat

SEQ ID NO: 619238 - DNA, 120 bp, Artificial Sequence
  ENSG00000177565_9 (sequence is synthesized)
ggaataagaaaggaaatttcatcctaagtgctggagtagacaagactacaattatttgggacgcacatactggtgaagccaagcaacagtttccttttcattcagcaccagcattggatg

SEQ ID NO: 619239 - DNA, 120 bp, Artificial Sequence
  ENSG00000177565_10 (sequence is synthesized)
ttgattggcagagcaacaacacctttgcttcttgtagtacagatatgtgcattcatgtctgtaaattaggacaagacagacctattaaaacattccaaggacatacgaatgaagtaaatg

SEQ ID NO: 619240 - DNA, 120 bp, Artificial Sequence
  ENSG00000177565_11 (sequence is synthesized)
ctatcaaatgggacccaactggcaatctcttggcctcctgttctgacgacatgactttaaagatatggagtatgaaacaagacaattgtgtccatgatttgcaagcacataataaagaaa

SEQ ID NO: 619241 - DNA, 120 bp, Artificial Sequence
  ENSG00000177565_12 (sequence is synthesized)
tttatactatcaaatggagtccaacaggaccagggactaataatccaaatgccaaccttatgttagcaagtgcatcctttgattctactgttaggttatgggatgtagaccgagggatat

SEQ ID NO: 619242 - DNA, 120 bp, Artificial Sequence
  ENSG00000177565_13 (sequence is synthesized)
gcatccataccttgacaaaacaccaagagcctgtgtacagtgtagctttcagtcctgatggcaggtatctggcaagtggttcttttgacaaatgtgtacacatctggaacacgcagacag

SEQ ID NO: 619243 - DNA, 120 bp, Artificial Sequence
  ENSG00000177565_14 (sequence is synthesized)
gtgctctagttcacagctataggggaacaggtggaatatttgaagtttgctggaatgcagcaggagacaaagttggagccagtgcatcagatggttcagtttgtgtattagaccttcgga

SEQ ID NO: 619244 - DNA, 120 bp, Artificial Sequence
  ENSG00000177565_15 (sequence is synthesized)
aatagcgctactagttggaagccatggaccgactatgaatgtgtacatagccaaaatgactgtccctgacccatgtactgctatagtcccacttgaaccatggccagtccactacagcca

SEQ ID NO: 619245 - DNA, 120 bp, Artificial Sequence
  ENSG00000177565_16 (sequence is synthesized)
aatctaaaagaaatatatacatacagtgtatataaacaaaattgcaccctgaagatgacagagttttgtcacagcttgtgaattctgttcaccaagtgctggaatctaatctgctgtgcc

SEQ ID NO: 619246 - DNA, 120 bp, Artificial Sequence
  ENSG00000177565_17 (sequence is synthesized)
cctaaaatagcatttagaagttttggatatgaaaaacagaagagagaaaaatatacattataaaagcagaacatacatgtaccagtttttggatactaaatgacagccttgtttctcccc

SEQ ID NO: 619247 - DNA, 120 bp, Artificial Sequence
  ENSG00000177565_18 (sequence is synthesized)
tttgaatcagcagacaccatggattatattctttttttcccttcagtagtgagcagtttgtatgtacagagaaaatggacttacaaaaacttgcagcagtagtttgttcttgctttaaaa

SEQ ID NO: 619248 - DNA, 120 bp, Artificial Sequence
  ENSG00000177565_19 (sequence is synthesized)
tttcgtttttggtttagattatggatgcatgaagtaagggagtgaatcagtttcttgtttatatttttttcaccttttaaacaaaaaattctttaaaatattttaatgcattcttttgaa

SEQ ID NO: 619249 - DNA, 120 bp, Artificial Sequence
  ENSG00000177565_20 (sequence is synthesized)
gaggtagatgtttggtacattttatggctcccagagcatatattcagttggtgcatgttgtggaagggggaattggaaattaaatgaaaacctatgactttggtcatgtcaatctgtaag

SEQ ID NO: 619250 - DNA, 73 bp, Artificial Sequence
  ENSG00000177565_21 (sequence is synthesized)
atgtggcttaaatgcaatagtttcttttttgggacatatttctgccaattaaagactagaagggcacaacttt

SEQ ID NO: 619251 - DNA, 120 bp, Artificial Sequence
  ENSG00000177565_22 (sequence is synthesized)
acatatttctgccaattaaagactagaagggcacaactttttttttaattaccatagagaagatacattaaaaaaaatcttctgatgttttgtagccataactaaattatggtaaaaatg

SEQ ID NO: 619252 - DNA, 120 bp, Artificial Sequence
  ENSG00000177565_23 (sequence is synthesized)
tgcactattgtgaaaaggagcaacgtagttttgggttttttgttgtttgtttgttttgctttgttttttaagagattaaaatgtttctggataaggattagcttctcgaagtgtccatca

SEQ ID NO: 619253 - DNA, 120 bp, Artificial Sequence
  ENSG00000177565_24 (sequence is synthesized)
ttctgtgtagaagcttaaatatgtaatgtaaccaaactccagtattaaaaatctctcatgttgttttctttatacaaagcaagataacggcatataacactgccattacatggcaaaatg

SEQ ID NO: 619254 - DNA, 120 bp, Artificial Sequence
  ENSG00000177565_25 (sequence is synthesized)
tttgctaccttagtttaaaaaacaatctcaaacaaaagacttgcttcaaggtgtttttaaatagcagtgattcagaattttttttaatgaaagtataattgcactaaccttcttcctgct

SEQ ID NO: 619255 - DNA, 120 bp, Artificial Sequence
  ENSG00000177565_26 (sequence is synthesized)
gctctgattctgcatttgtggtacttgtgactacgttttttcaaatatagatagatttaagctgctaatttttttttttttagtaatcactactatatcatgtcttttactctgtttata

SEQ ID NO: 619256 - DNA, 120 bp, Artificial Sequence
  ENSG00000177565_27 (sequence is synthesized)
atatcaagtattttcttaaagatatagatattaaaccttgtgctcatgcaacttagagtaacatatacagacaaatgattgcatgaggccatgtttatatgtgtgactaataaggcttgt

SEQ ID NO: 619257 - DNA, 120 bp, Artificial Sequence
  ENSG00000177565_28 (sequence is synthesized)
catgattaacataatccaggtatgtcatttctgaagagaatagtcatcaaatttatatctcgaagattttaattaaggaattgcttattgttgagcttagcaaattaataacactatttc

SEQ ID NO: 619258 - DNA, 120 bp, Artificial Sequence
  ENSG00000177565_29 (sequence is synthesized)
tgtcactaattattttgaggccttttagtactaaaattttaacctgtgttctaagtagaaactgatttaacccaagtaatgcagctttgattgatttcagcattcgttgctttgctattt

SEQ ID NO: 619259 - DNA, 120 bp, Artificial Sequence
  ENSG00000177565_30 (sequence is synthesized)
ttacaaaacagcattgattgaagcaagtcttggttttactaaggtagggtagcatttgctattggtaaagagaataaatacacttaatttcacaatacattgttatatgtaccccagttg

SEQ ID NO: 619260 - DNA, 120 bp, Artificial Sequence
  ENSG00000177565_31 (sequence is synthesized)
ttgttagtggggactatgatactgtaataatatttttaaaaatttacatcaagagaggcagtcattcacgatggttttgtgccagctctttttagggttttggatcacattagagatatt

SEQ ID NO: 619261 - DNA, 120 bp, Artificial Sequence
  ENSG00000177565_32 (sequence is synthesized)
tagaacatattaccctgtgacttacgtaggaaacctaatatgctgagtatctggcacttgaattcctgcttttattgctggaggtccacatctgtggttgacctctgttattgtttaaaa

SEQ ID NO: 619262 - DNA, 120 bp, Artificial Sequence
  ENSG00000177565_33 (sequence is synthesized)
gcaataattttaaaatgtgctcccaggaatagacacaaatgttttgagtatcttttaagctgcattttcctttagtgatgcatttgtcaattgcactgaatttaaatctgaaagtcagag

SEQ ID NO: 619263 - DNA, 120 bp, Artificial Sequence
  ENSG00000177565_34 (sequence is synthesized)
gtgattattgatagtacttttgtattttgatatggacagtttattcatttgcatacagttattgactttttcccagctgattaaaagatagtcaagaaattctgcaatatagctgccaaa

SEQ ID NO: 619264 - DNA, 120 bp, Artificial Sequence
  ENSG00000177565_35 (sequence is synthesized)
ctgttttttttttcttttttttctttagctattttacttaagcataatagccacaataggacatataaaagattataaatacagagctttattatcctgacgtcttgggtcttttaagta

SEQ ID NO: 619265 - DNA, 120 bp, Artificial Sequence
  ENSG00000177565_36 (sequence is synthesized)
agctttattatcctgacgtcttgggtcttttaagtatatacttttctgaaaggtatccattttgtaggcttgggttcttcatgagcatacgattgtttatttttgctgctgttctcaaca

SEQ ID NO: 619266 - DNA, 120 bp, Artificial Sequence
  ENSG00000177565_37 (sequence is synthesized)
tcatcattgcctgctgatgtgccacgatgctgctccaatagacagcaataagattgtctctaatttgagcagtaacatgattgcaagagaccaagtttcacagcttgtaaagttctgtat

SEQ ID NO: 619267 - DNA, 120 bp, Artificial Sequence
  ENSG00000177565_38 (sequence is synthesized)
ttgggattcttgcttatttttccgcctgtgtttttctgagaacttattcctgatgatcaattgaatccagtagtttttctatgctatttgttgttgtataagctactgtaagaaacttat

SEQ ID NO: 619268 - DNA, 120 bp, Artificial Sequence
  ENSG00000177565_39 (sequence is synthesized)
cataaggaaaaatagaaaggaaaacttgaatcaatactcattgattaaaatggaataaagaaagagcagctgccacttttaaacaacataaaggaatatctttttttgtctccgtgtagg

SEQ ID NO: 619269 - DNA, 120 bp, Artificial Sequence
  ENSG00000177565_40 (sequence is synthesized)
aaatcccataagttcttatatttgttccagttcccatttcctgccattgaccagataacatcattgactttcaaatgacttttagaagtgataactcttaatttcctaatagatactaga

SEQ ID NO: 619270 - DNA, 120 bp, Artificial Sequence
  ENSG00000177565_41 (sequence is synthesized)
ttgtattgaattctgttttaattattctctaggtaagtatgttttaggattaaataccttttacagatactgaaagtgcctccttttgtggtgtaaaaaacaaattatggtgcaaaaagt

SEQ ID NO: 619271 - DNA, 120 bp, Artificial Sequence
  ENSG00000177565_42 (sequence is synthesized)
aatcactagattgaaatacatgaaggttttttgctttttgacatacgaaaatgtcaagagaaaggccaaagatttgtactttttcacttacaaagcactcctttttcccttaaacttctt

SEQ ID NO: 619272 - DNA, 120 bp, Artificial Sequence
  ENSG00000177565_43 (sequence is synthesized)
tctgtcaaattagatttaatgagagagtactatttttaaggagctatctgtttatgtagaatgattttgttaagagtaatgtaaactattattgagtagaggcctaaagaggactgtgca

SEQ ID NO: 619273 - DNA, 120 bp, Artificial Sequence
  ENSG00000177565_44 (sequence is synthesized)
tttttgctatttaaaggaatcacaaatgatcatacttaagtgagcaaaaatgacaagttttactagctaagtagagaaataaatctcaaatgcagcgctacaattttcattatcttaagt

SEQ ID NO: 619274 - DNA, 120 bp, Artificial Sequence
  ENSG00000177565_45 (sequence is synthesized)
acattgtacatttctacagaacctgtgattattctcgcatgataaggatggtacttgcatatggtgaattactactgttgacagtttccgcagaaatcctatttcagtggaccaacattg

SEQ ID NO: 619275 - DNA, 120 bp, Artificial Sequence
  ENSG00000177565_46 (sequence is synthesized)
tggcatggcagcaaatgccaacattttgtggaatagcagcaaatctacaagagaccctggttggtttttcgttttgttttctttgttttttcccccttctcctgaatcagcagggatgga

SEQ ID NO: 619276 - DNA, 120 bp, Artificial Sequence
  ENSG00000177565_47 (sequence is synthesized)
aggagggtagggaagttatgaattactccttccagtagtagctctgaagtgtcacatttaatatcagttttttttaaacatgattctagttaaatgtagaagagagaagaaagaggaagt

SEQ ID NO: 619277 - DNA, 120 bp, Artificial Sequence
  ENSG00000177565_48 (sequence is synthesized)
gttcacttttttaatacactgatttagaaatttgatgtcttatatcagtagttctgaggtattgatagcttgctttatttctgcctttacgttgacagtgttgaagcagggtgaataact

SEQ ID NO: 619278 - DNA, 120 bp, Artificial Sequence
  ENSG00000177565_49 (sequence is synthesized)
agggcatatattttttttttttttgtaagctgtttcatgatgttttctttggaatttccggataagttcaggaaaacattctgcatgttgtatctagtctgatgtacttatccatctcat

SEQ ID NO: 619279 - DNA, 120 bp, Artificial Sequence
  ENSG00000177565_50 (sequence is synthesized)
tacaaacaaaaacacacagactgcatttgtagctctgtaatccttgaatacggaagtaaattttcttctttcctgactttgacattgtagctatactgtttccatttttgtttttacaaa

SEQ ID NO: 619280 - DNA, 120 bp, Artificial Sequence
  ENSG00000177565_51 (sequence is synthesized)
tcctttgggtctaattctgtgagcctacctatagcactggattaaaatgtctgcatcatttctttagttatccagttaactttaaaactgttgtaaaagtgtaaaccagcccatgacagg

SEQ ID NO: 619281 - DNA, 120 bp, Artificial Sequence
  ENSG00000177565_52 (sequence is synthesized)
tttttgtacatgttaaagaacttcattgttcagttttcatgattattgtgtaaggaagactgatgtagatgttctgtgctgtcctggaccatgttaattacacttacgacgtattttagt

SEQ ID NO: 619282 - DNA, 120 bp, Artificial Sequence
  ENSG00000177565_53 (sequence is synthesized)
tccacatcacaatgatttgtccccagtgacccttttatcctttctaggcacatttcttgttgttgttgttgttgcagttcccctttgcattgtattgctttgacaactgtaatttgaatc

SEQ ID NO: 619283 - DNA, 120 bp, Artificial Sequence
  ENSG00000177565_54 (sequence is synthesized)
agatctgaaagaggtccagaataaaatatattttgatattatgttggctgtgtacatatataaaacctttgatgtctatgtagtttatatagactatttactagtcaggtaaagagagag

SEQ ID NO: 619284 - DNA, 120 bp, Artificial Sequence
  ENSG00000177565_55 (sequence is synthesized)
ggatggtatttcttgtttacagtttgtttacattttaattgcttttacttctccagtgttctattgtagaataaacctttttttccaagttagccttcataacctataacacattcattc

SEQ ID NO: 619285 - DNA, 120 bp, Artificial Sequence
  ENSG00000177565_56 (sequence is synthesized)
tctcccatactggtgttactgattaataactgccatcagaacccaaaccactgtttttcataaacgtattgtttcccaagatatatactttaagcccataataaaattacaaattttact

SEQ ID NO: 619286 - DNA, 120 bp, Artificial Sequence
  ENSG00000177565_57 (sequence is synthesized)
atttttattacttcttgcaggagataagatttttttaaatgaaggggttatttactatttttattaaagtataatagagcatctaatcagctaagggattgtaatttttaattcttttga

SEQ ID NO: 619287 - DNA, 120 bp, Artificial Sequence
  ENSG00000177565_58 (sequence is synthesized)
aaaataaatattgtatttaaaagacgttatttcacagaagctgaaaaagagaccttagataacatttgtttggttagccacacggttgagcacaaaacaatgtgtagatgtgttgaagat

SEQ ID NO: 619288 - DNA, 120 bp, Artificial Sequence
  ENSG00000177565_59 (sequence is synthesized)
tagggcaggaggctcaacttctcggtgacctttttttgcttcacaacaagccaattatagttgaatcattttctctcttagctagttgttactacaaactttataagaaaaacaactaga

SEQ ID NO: 619289 - DNA, 120 bp, Artificial Sequence
  ENSG00000177565_60 (sequence is synthesized)
caccttctagttttaattaataccaactcctttagagttagagactttttaaaaagaatcattgagcatattttcttttttttttttttaagaatttacactctctaggtcttctatttt

SEQ ID NO: 619290 - DNA, 120 bp, Artificial Sequence
  ENSG00000177565_61 (sequence is synthesized)
tcctgtttatttccttaaacagaaataaattcaagcatagttttatgttttattagaaataagccactgcagttgctagaactgacatgctttcattttcaaggggttaacttttattgc

SEQ ID NO: 619291 - DNA, 120 bp, Artificial Sequence
  ENSG00000177565_62 (sequence is synthesized)
atggcatagattattagtaatatcctgcattgtatacttttccaaaaagggttggactcctaaggattagaatccttataagcttgagggaaagctgaaactaatttgaacagtaataga

SEQ ID NO: 619292 - DNA, 120 bp, Artificial Sequence
  ENSG00000177565_63 (sequence is synthesized)
agggattatttttaatttcatagttaacactttacaatggattagatttattacctagtataatccgtagcagatcagatcaaagtttactgttttaccaatatattcatttgaaaaaat

SEQ ID NO: 619293 - DNA, 120 bp, Artificial Sequence
  ENSG00000177565_64 (sequence is synthesized)
acagtggaggaaaagacactttagatggtagttttatggtgcttttctctgctgtaccaaagtgctttgtcatcaatgaaatgttaaccctatgctactttttctgcatgcttcttaaat

SEQ ID NO: 619294 - DNA, 120 bp, Artificial Sequence
  ENSG00000177565_65 (sequence is synthesized)
gtcatcttaatgcttaattgtcctaacttgtaatatttttgtattaaatttttttaggagttccttgtaatttctttacaatttaaaatatattaaacacaaagtgtttagtaaagtaca

SEQ ID NO: 619295 - DNA, 80 bp, Artificial Sequence
  ENSG00000177565_66 (sequence is synthesized)
ctggggacccgcgccgcgctccccgcccccgcccgcccggcgcccatcccccgcgccctccgctcgctggggttataatt

SEQ ID NO: 619296 - DNA, 120 bp, Artificial Sequence
  ENSG00000177565_67 (sequence is synthesized)
gcgccctccgctcgctggggttataattgcctctcaccccccggaggggttattttgggggtggttggaggcggtggcggcggcggcgaggaggggaatttccttgtgcctccattcccg

SEQ ID NO: 619297 - DNA, 120 bp, Artificial Sequence
  ENSG00000177565_68 (sequence is synthesized)
gaggtctcctgactcagtccaggactctttctattacatcatgcggcctgatatttgtctttatggaactcagcaacatcacatacagggtgagcttttttttttttttttaaatgaaca

SEQ ID NO: 619298 - DNA, 120 bp, Artificial Sequence
  ENSG00000177565_69 (sequence is synthesized)
aattacttgtgacacttttttattttactgctacctcttcttgacgtttgactattatttttaagagttaaactttcagaggatttcttaccaatgatgactgccactttatcacgcact

SEQ ID NO: 619299 - DNA, 120 bp, Artificial Sequence
  ENSG00000177565_70 (sequence is synthesized)
gtagcaacagtcgattaaaatttataacaggaattatttgtagagtgttacatttagattaaaaaaattacaaataagtccaagagtgtggataagatctaagcagctataatactagat

SEQ ID NO: 619300 - DNA, 120 bp, Artificial Sequence
  ENSG00000177565_71 (sequence is synthesized)
gcgttggaggccaccgtttccaggaacgtattgggaatatatttgaggtgtgggaataagtatctttggaagaccaggcactttatgcagtattgagctcaggaggcagtgagtgttaag

SEQ ID NO: 619301 - DNA, 120 bp, Artificial Sequence
  ENSG00000177565_72 (sequence is synthesized)
gcagtgagctgagattgcaccattgtgctccaatctgggcaacaagagcaagactctgtctcaaaaacaacaacaacaaaaaaaagtgatgtgactggcagcaccctatgccttattccc

SEQ ID NO: 619302 - DNA, 120 bp, Artificial Sequence
  ENSG00000177565_73 (sequence is synthesized)
attatgagaaattttaagtaaacaaaacagttgagccttcccagcctgataatcagtagcaatgtgtcagtaccaatgcatctgtgatttgtgccacattactgggctaaatttgaagag

SEQ ID NO: 619303 - DNA, 120 bp, Artificial Sequence
  ENSG00000177565_74 (sequence is synthesized)
gaaagctcggtcaaacattcttccagcttgtcatcttggataggctgaatgggaggtattttcaaggtgcatggtttgttgccatgtgcttttaagtagatctgccacctctagcttgac

SEQ ID NO: 619304 - DNA, 120 bp, Artificial Sequence
  ENSG00000177565_75 (sequence is synthesized)
tttaggttaccataaagctgcagaggtcacttttctgatttgtcagggccgaacacctgaagcatatatttcagttttcataacaggacctctgatctttgtcctgttatattgactggt

SEQ ID NO: 619305 - DNA, 120 bp, Artificial Sequence
  ENSG00000177565_76 (sequence is synthesized)
ttcataggagaatatatttttggattgagttttaattcttcagtagcagctgaataataaaataacgttgttacatttatgattcagcttaatgaatgattacattattagtattcctgc

SEQ ID NO: 619306 - DNA, 120 bp, Artificial Sequence
  ENSG00000177565_77 (sequence is synthesized)
ctgtgttttttgtttaaacatataacgtctttcaagaatagtgtacatatctgtctgggcactgtggtgcatgcttataatcccaacattttgggaggccagggtgggtggattgcttga

SEQ ID NO: 619307 - DNA, 120 bp, Artificial Sequence
  ENSG00000177565_78 (sequence is synthesized)
gttcaagaccagcctgggcaacacggtgagaccttgtctctacaaataattttttaaaaatcagctgggcatggtggcatgcacttgtaatcctagctacttaggaggtggaggcgggag

SEQ ID NO: 619308 - DNA, 120 bp, Artificial Sequence
  ENSG00000177565_79 (sequence is synthesized)
ggcgggaggatcactctagcccaggagttagaaggtgcagtgagctatgattgcacagctgcatccatcctgggtaacaacaagaccctgtctaaagaaaaaaaaggaacatacatacat

SEQ ID NO: 619309 - DNA, 120 bp, Artificial Sequence
  ENSG00000177565_80 (sequence is synthesized)
tattttagcttcttttataatcccctagcttaggaactggtcagtaaatatagagtgaataacagatttatactggaattatctttactagtttgttatacttcctctttaagatgtttt

SEQ ID NO: 619310 - DNA, 120 bp, Artificial Sequence
  ENSG00000177565_81 (sequence is synthesized)
gtcaaagaaattctgaatttattttgtttctctacatgttagctagactcatgtatcatttagcaacaacaaaaacttatttcatgtgatagactgactgtttacttctagctattgttg

SEQ ID NO: 619311 - DNA, 120 bp, Artificial Sequence
  ENSG00000177565_82 (sequence is synthesized)
gctatgtcagagagaccagataccttagccaagaatggttatcaagactggagaaactgaatatgtgtgtgagtaatcttttgagaacaggctggtattatctttttgtaaagggatcat

SEQ ID NO: 619312 - DNA, 120 bp, Artificial Sequence
  ENSG00000177565_83 (sequence is synthesized)
attacatttctagaatttcagaacttatttttatagttgaagctaagtccctcctctgattgctagaaataaagctatgtaatatttttatttcagcatttggatttattataatatgta

SEQ ID NO: 619313 - DNA, 120 bp, Artificial Sequence
  ENSG00000177565_84 (sequence is synthesized)
cgtgatctgtccgccttggcctcccaaaggtttgggattacagacgtgagccaccgcacccagccgatattgttttattttaatcaaggcaaaactggttatatcctgtgttgtgacctc

SEQ ID NO: 619314 - DNA, 87 bp, Artificial Sequence
  ENSG00000177565_85 (sequence is synthesized)
agatttactgtgagaaattgactcacgtgattatagaggctgagaagtcccacagtctgctgtctacaagctggagacccatgaaag

SEQ ID NO: 619315 - DNA, 120 bp, Artificial Sequence
  ENSG00000177565_86 (sequence is synthesized)
tcccacagtctgctgtctacaagctggagacccatgaaagatggaggtgtggttccattccagggccagagaaggagtgccaatggtatatggagtatgaaacaagacaattgtgtccat

SEQ ID NO: 619316 - DNA, 120 bp, Artificial Sequence
  ENSG00000177565_87 (sequence is synthesized)
acatccccacatcaatgcactgccaatgacagcaaaaccaacttctcctcagccttgtgaagaggatgaggaccttcaggatgattcacttccatttaatgaatgggttatatcctgtgt

SEQ ID NO: 619317 - DNA, 120 bp, Artificial Sequence
  ENSG00000177565_88 (sequence is synthesized)
ttattttgggggtggttggaggcggtggcggcggcggcgaggaggggaatttccttgtgcctccattcccgggaggggggagcggcgttggaggccaccgtttccagatattttcctctt

SEQ ID NO: 619318 - DNA, 120 bp, Artificial Sequence
  ENSG00000177565_89 (sequence is synthesized)
acaggcaaaaaggcttatgggcaggaagagcaaacaccagctaaagcagtgctgcttcatgactagaataaaaatacagcctgcaacttactcagcctgacaactctgagcaccagcatt

SEQ ID NO: 619319 - DNA, 120 bp, Artificial Sequence
  ENSG00000177565_90 (sequence is synthesized)
ggttcaggagtgtagaattggcaaagttattgccagcttcctggcttcttcaccagtttggataataaggccctcgtggtgtgttcatctacttacctgaaataacttggaataaataat

SEQ ID NO: 619320 - DNA, 120 bp, Artificial Sequence
  ENSG00000177565_91 (sequence is synthesized)
attttgggggtggttggaggcggtggcggcggcggcgaggaggggaatttccttgtgcctccattcccgggaggggggagcggcgttggaggccaccgtttccagagtttcactctgtca

SEQ ID NO: 619321 - DNA, 120 bp, Artificial Sequence
  ENSG00000177565_92 (sequence is synthesized)
cccaggctcgagtgcagtggcgtgttctcggctcactacaacctccgtcctctgggctcaagcagtcctcgcatctcagcctcccaaggagctgggacctcagcatcaacaacagcaact

SEQ ID NO: 619322 - DNA, 120 bp, Artificial Sequence
  ENSG00000177570_0 (sequence is synthesized)
gaccgcggcaggttggtcctggagcagataagcgcagaatatttaggcgaaagcgagaggaaggggggagcgcggggcaggaggagtacctcggccaagaaaattatgcatgcgttaggg

SEQ ID NO: 619323 - DNA, 120 bp, Artificial Sequence
  ENSG00000177570_1 (sequence is synthesized)
aagctctgagagaatggctgtggaagctctccactgtggtttgaatccacggggtattgatcaccctgcccatgctgaaggtattaaactgcaaattgaaggtgaaggtgtggaatctca

SEQ ID NO: 619324 - DNA, 120 bp, Artificial Sequence
  ENSG00000177570_2 (sequence is synthesized)
atccattaaaaataaaaatttccagaaggtgcctgaccagaaaggaactcccaagcgactgcaggcagaagctgagacggctaagtcagctacggtgaagctatctaaaccggtggctct

SEQ ID NO: 619325 - DNA, 120 bp, Artificial Sequence
  ENSG00000177570_3 (sequence is synthesized)
acagtgagtcattcaaacagcatgacataactgggcgagccctgctgagacttactgacaaaaagctcgagcgaatggggattgcccaggagaacctccggcagcacatcttacaacagg

SEQ ID NO: 619326 - DNA, 120 bp, Artificial Sequence
  ENSG00000177570_4 (sequence is synthesized)
tgctccagctgaaggtgcgagaagaagtcagaaatctacagttactcacacaagcatcatctgagggttctccataaacacggttagccttccaagctgctgtcctgccagttgatatga

SEQ ID NO: 619327 - DNA, 120 bp, Artificial Sequence
  ENSG00000177570_5 (sequence is synthesized)
acatggcctgttcctcacagaaagactaacccatggcactgccagaagatatccttggatcgtggacagattaactggattaactgaaaaaagcacccattcagtcaatattatgggttt

SEQ ID NO: 619328 - DNA, 120 bp, Artificial Sequence
  ENSG00000177570_6 (sequence is synthesized)
ggcctggccagctgaagctggagttgctctccaagtgtcggggccaggcggcactccgcggaggagtcggggtgctctccccagtccgagcgaagggagggaactacacttcccaggacg

SEQ ID NO: 619329 - DNA, 120 bp, Artificial Sequence
  ENSG00000177570_7 (sequence is synthesized)
tgcacctgtgggacagggaatatggtggatggagagagggtgtgtgccttttatgtcactttgtttgatgaaatgtatgagtatattaactatttaaaggaataaaatttttaaaaagaa

SEQ ID NO: 619330 - DNA, 120 bp, Artificial Sequence
  ENSG00000177570_8 (sequence is synthesized)
gtgtagtatctttgattggagattttaagaaacttagatgtggccttgggccttgaagatgctggtcacacctgagatcagatcctttggacttcatggaaaggaattgacgtggtattc

SEQ ID NO: 619331 - DNA, 120 bp, Artificial Sequence
  ENSG00000177570_9 (sequence is synthesized)
ctgagatgtgagagggagaaagagaagagaagagaaaattacctttggatttgtggtggttgttgttgttactcttagctgaacctaatcctaactaacatggtcagatttgcattttta

SEQ ID NO: 619332 - DNA, 120 bp, Artificial Sequence
  ENSG00000177570_10 (sequence is synthesized)
aagactatcctggctttattattatccctgaacacaaaaactttattcacatttccatattttgcattctcttttctttgtccttagggatgaagatgataaaaatgaagcaatccttca

SEQ ID NO: 619333 - DNA, 120 bp, Artificial Sequence
  ENSG00000177570_11 (sequence is synthesized)
tcaacacgaataacacttggtagttttcactttcaattcctgctagtggctggtttgaagtataggaaaatgatagacatgacccactattataaactaattgccaacaatatgggaacc

SEQ ID NO: 619334 - DNA, 120 bp, Artificial Sequence
  ENSG00000177570_12 (sequence is synthesized)
acatctcaataaataggttccctcccttttatcttgtattgagaaaaattgattagcatcttaaataggaaagttacgtgactctcatatctaaacagctgaaaaatgttaacatatgat

SEQ ID NO: 619335 - DNA, 120 bp, Artificial Sequence
  ENSG00000177570_13 (sequence is synthesized)
aatgatttgctacatcaacaatagcagactcttatttttttgaatgctatgatagtaagaacttaacaaattttactcaataaagacctttcctatctgcctttttctatagacaggggc

SEQ ID NO: 619336 - DNA, 120 bp, Artificial Sequence
  ENSG00000177570_14 (sequence is synthesized)
tgtgcagagaagtggtatgtaaagaggaacattcctccctcatattaatctgaattttctaggatgtttcaggagagcagagctgcttcctttccttttttataccccccactccagagt

SEQ ID NO: 619337 - DNA, 120 bp, Artificial Sequence
  ENSG00000177570_15 (sequence is synthesized)
ccaccaggatctcaatatcctagtaataacaaataatttgtgtagttgttttgaacaattaaatcatgctacttcatttcggtgtattaaacaaaaggaaaagccaacataagaaacaca

SEQ ID NO: 619338 - DNA, 120 bp, Artificial Sequence
  ENSG00000177570_16 (sequence is synthesized)
gtgaaaattggaggcattataaatccatcacatgaacagtattgtaatttccagtcgacataaaaaacatcctgataggaaggattttaaagcaccggaacaggctactgaaagaaattt

SEQ ID NO: 619339 - DNA, 120 bp, Artificial Sequence
  ENSG00000177570_17 (sequence is synthesized)
atcaaggtggtttctctagagatctttaaggggggaagaagcttatctatttgagtttgtttagaggaaacttaggaggaggctagaggctgaaattcttggcatttgaagattccttct

SEQ ID NO: 619340 - DNA, 120 bp, Artificial Sequence
  ENSG00000177570_18 (sequence is synthesized)
actagaatatttttaaagttgcttacaaagggaataacttcatgacctcagattaggcaaaaattcctgaaacaaagcacaaaaatggctaaccacaaggaaaaatgataaagtagatgt

SEQ ID NO: 619341 - DNA, 120 bp, Artificial Sequence
  ENSG00000177570_19 (sequence is synthesized)
attaaaattaaaagcctctgatcatcaagacatggcagaataaaaagacaagtcacaggctagctgaagatatttgcaatacataaatccagcaaagacttatatccagagtatataaag

SEQ ID NO: 619342 - DNA, 120 bp, Artificial Sequence
  ENSG00000177570_20 (sequence is synthesized)
aagttctgtaaatcagtgagaaaaaagacaaaccccccaattaagaatagtcaaaagatttgaacaggcacttcacaaaaggggggtattgaaatggccaataaacacataatcattact

SEQ ID NO: 619343 - DNA, 120 bp, Artificial Sequence
  ENSG00000177570_21 (sequence is synthesized)
tatcacagaaaagcaaattaaaaacagaaagagataccacaacctcctccccagaatgtctatatggaaacaaatgtcaataccagggtttgaccaaaaccaactggaactttcacacat

SEQ ID NO: 619344 - DNA, 120 bp, Artificial Sequence
  ENSG00000177570_22 (sequence is synthesized)
ttttgctaaagtgtaaactggtacaacctcttcagaaaactgtttgacaagatttttgtttttgtttttatacagttaaacacttaacttatgactaagcattctgctcctaggtattta

SEQ ID NO: 619345 - DNA, 120 bp, Artificial Sequence
  ENSG00000177570_23 (sequence is synthesized)
cccaagagaaatgaaaatgtatccaaacaaagacttgtacaagaatgtcacagcagctttactcaaaatacctacaaactagaaagaacccaggtgtccaccaataggagaagggaggaa

SEQ ID NO: 619346 - DNA, 120 bp, Artificial Sequence
  ENSG00000177570_24 (sequence is synthesized)
aaaactaaaaccaactttggtgtagtctctgcacagtaagaatgaattactcgtgcgtgtaacaatatggatgttgtacaaaacaaaaggagccagacacagaagactgtatgctgtatc

SEQ ID NO: 619347 - DNA, 120 bp, Artificial Sequence
  ENSG00000177570_25 (sequence is synthesized)
accccatttttgtaagattcaacagaaggcaaaaactaagagaggtaccagaatagcagttaccctggaaatgggggttggtgggaggggattgggtgccaagaaacatgaggggaaacc

SEQ ID NO: 619348 - DNA, 120 bp, Artificial Sequence
  ENSG00000177570_26 (sequence is synthesized)
ttctgggatgatggaatttcccaaggtcttgatggaggctgtgattgcatggtgtatacatatgcaaaatattattgcactgtacctgtaaagattagtgcaccttcctgttttcatacc

SEQ ID NO: 619349 - DNA, 120 bp, Artificial Sequence
  ENSG00000177570_27 (sequence is synthesized)
ccagctgaaggtgcgagaagaagtcagaaatctacagttactcacacaaggatattcaggaatatggagatatccctgactcttccaaaagaatgaccaagatcatgcctaattacctcc

SEQ ID NO: 619350 - DNA, 120 bp, Artificial Sequence
  ENSG00000177570_28 (sequence is synthesized)
atgtcctgggaaagccccgctgtaatggagatggcatcttctccagggctctatagggtggagaagatgaagaaacctgcacacagcccccatgaagattccagtgttgtggctgggaat

SEQ ID NO: 619351 - DNA, 120 bp, Artificial Sequence
  ENSG00000177570_29 (sequence is synthesized)
ctctgtctccctttatgttggctacatgaaaaaagagtgtttgcttacagagacctggtggccattagaaggtcttggctacttctatgctgctacttacttcacagaacttgttctgag

SEQ ID NO: 619352 - DNA, 86 bp, Artificial Sequence
  ENSG00000177570_30 (sequence is synthesized)
cttcacagaacttgttctgagtaaagattaaaatatagatctctggagtagaaagcactcaatgactgcaccaaaagcaatggcaa

SEQ ID NO: 619353 - DNA, 120 bp, Artificial Sequence
  ENSG00000177570_31 (sequence is synthesized)
aaaaatcttgctttgctgtggatttaaaatgaggtgcataatataatgccaactcattccaagtggtcattggcagaccattagctggaaaattgcttccagttttcatcactgtgcata

SEQ ID NO: 619354 - DNA, 120 bp, Artificial Sequence
  ENSG00000177570_32 (sequence is synthesized)
actcaagttccctttggggagctgtctgtgcccttcactagaagtcctgttttagcatggcaactactggattattttattatgtgtgcagatggcatgatgttttagaaaaaaaaaatt

SEQ ID NO: 619355 - DNA, 120 bp, Artificial Sequence
  ENSG00000177570_33 (sequence is synthesized)
acagcaattctgcaatctcagtggaagtgttcacaatattatgccctggtaggaatgtaaacacgtctcgattatgttagttatgatgtctaaaggtatactgtccaactcttaagcact

SEQ ID NO: 619356 - DNA, 120 bp, Artificial Sequence
  ENSG00000177570_34 (sequence is synthesized)
ttatatgagaacactacaccaagatgaatcagcacattcagcacatgtgagaaatcaagtattttctttttatttttataaatcttagtggtttttttttttccggctcagactgtccaa

SEQ ID NO: 619357 - DNA, 120 bp, Artificial Sequence
  ENSG00000177570_35 (sequence is synthesized)
gacaaactccactactcgcatatccccagttgtttgtggtaggttgatgtaaatatggccacaatactgttagacttcacctccagatactttattgaacaactggtttacttctagcac

SEQ ID NO: 619358 - DNA, 120 bp, Artificial Sequence
  ENSG00000177570_36 (sequence is synthesized)
caaagggaagaagaagggggtccagtgatggtgatatcttagcttgcttctttgttcacaggcactattgaccacatgaacatacaggtactcaaatacaggaggcttctatttggctcc

SEQ ID NO: 619359 - DNA, 120 bp, Artificial Sequence
  ENSG00000177570_37 (sequence is synthesized)
tccaagggaggagttcctccaagggaaaaaaggggatggtattcttttaatcaaagaccatggtggatggatggtaagggcaacagaatgcaattcttttgtgtggtctgacgttaacac

SEQ ID NO: 619360 - DNA, 120 bp, Artificial Sequence
  ENSG00000177570_38 (sequence is synthesized)
ttcggaaaaaattctaagtcaagttgaaatcgccattctctcaagagagaaacatcaagagagaaacatcaagtgaccccactatgtgcctagagaaggaaaagggtcaagtcctatact

SEQ ID NO: 619361 - DNA, 120 bp, Artificial Sequence
  ENSG00000177570_39 (sequence is synthesized)
aggttccttacttagggtagaacctactagtcccttgttaatcctttctgggattatacctgtgactaatttttttttttttaactatgtcttacgacaaagcacagtcctgggaaacca

SEQ ID NO: 619362 - DNA, 120 bp, Artificial Sequence
  ENSG00000177570_40 (sequence is synthesized)
gtcaacttaattattgcttgtctttgagcattagagacatgttcatattgacttgctacataacactgtagcatgttttttcctgaaaatatcaagttggttgaatggaaagctcagcaa

SEQ ID NO: 619363 - DNA, 120 bp, Artificial Sequence
  ENSG00000177570_41 (sequence is synthesized)
agtatgttctgtgtgcccactgtcccagcctgggactgacgggcatcagaggctttgctttaaaatatgggtaaccagttctggaagacttccaacgcaagcaagcttggtgttttaggg

SEQ ID NO: 619364 - DNA, 120 bp, Artificial Sequence
  ENSG00000177570_42 (sequence is synthesized)
tgtctccagatacataagcattgtctgcctccgctcagggtctcaggaaatacacagcccattggaaaccacccacgcctgagatttggaaacctgacggaaagggaggaaggtccaaat

SEQ ID NO: 619365 - DNA, 120 bp, Artificial Sequence
  ENSG00000177570_43 (sequence is synthesized)
gagtcagcagcaggatgactcaccacaagcctggcaggctgcagagccagagaagggggcttccaacaaggaactcagagaagttgcagtcaccaccaagatctggcccttcggcaggtc

SEQ ID NO: 619366 - DNA, 120 bp, Artificial Sequence
  ENSG00000177570_44 (sequence is synthesized)
agcaccaggactgccaggccctctgcagaccgtaattctcttcacatctataattaggaggccaaactccagctgccaacacccttggacacaatattccagtctccactgcccatctca

SEQ ID NO: 619367 - DNA, 120 bp, Artificial Sequence
  ENSG00000177570_45 (sequence is synthesized)
tgtggttcagttctaatagcaggtcttcttcttcctttcattccttcctttattcagcaagcatttgttgagcatctactatgtgccaagcattgtgcttgggcaacaacagtccacaaa

SEQ ID NO: 619368 - DNA, 120 bp, Artificial Sequence
  ENSG00000177570_46 (sequence is synthesized)
gcagactccccacctgcccttatgaaactgtatctcctcctccccaacattatcaccaccccaccatttccacaatgaaaactgaattcagacagcattctccattctgccagagtaacc

SEQ ID NO: 619369 - DNA, 120 bp, Artificial Sequence
  ENSG00000177570_47 (sequence is synthesized)
taggaagaagaacatggcagcagacggatcctcagggaggaggcagcagagtgacagatggtaaactgcatcaggccacatatttgcacctttcagatacagccaactcttccagggcct

SEQ ID NO: 619370 - DNA, 120 bp, Artificial Sequence
  ENSG00000177570_48 (sequence is synthesized)
agactgagctggttggagctccccaaagcagcattcagttgcttttccttgatatccaccctggctacctatattccctttctttatataggcacaaccattcaccactacgctggatta

SEQ ID NO: 619371 - DNA, 120 bp, Artificial Sequence
  ENSG00000177570_49 (sequence is synthesized)
tctaacactccaattctataactcatccaggggacacacagttgagtctgatgaagcctaagaactgccaggtgctgagatattgtaactgggaattaagatttagccaaggacattgtg

SEQ ID NO: 619372 - DNA, 120 bp, Artificial Sequence
  ENSG00000177570_50 (sequence is synthesized)
agactactgctgactctcttggaaaactggacatgctttgtagtgcaaatgttcactaaatgatggtggttcattgttacttactttggcctttgcaaaatattctgaacaattcaataa

SEQ ID NO: 619373 - DNA, 120 bp, Artificial Sequence
  ENSG00000177570_51 (sequence is synthesized)
gtagagtttcctagtttgtttgtttttttaagtcaaaggaacgctgtgaaattattgaaagatgatgggtgaagagggacctaggagaaggcaaaatgaagaccattaaagagccccatt

SEQ ID NO: 619374 - DNA, 120 bp, Artificial Sequence
  ENSG00000177570_52 (sequence is synthesized)
gaagactgtatctctaaaaatgccttaatgcctggcacatattccatatttgcatatgaactactattcttttccaaactgtcaacttctgtttgaaatcattgtgggggatagtttgga

SEQ ID NO: 619375 - DNA, 120 bp, Artificial Sequence
  ENSG00000177570_53 (sequence is synthesized)
aatatggtggcataaaatccaagcagtcaagagctaaaccagcaaaaaagaggaatgacttcattcacaggctttggcttctttattatgtggtggtcctctgtgatctcccatggttaa

SEQ ID NO: 619376 - DNA, 120 bp, Artificial Sequence
  ENSG00000177570_54 (sequence is synthesized)
cttcaactgtgctgtactttcttcccaagatgcatgtacggaatgttacctcctagaaatccagaaatagttgtggtgagttttgtttgataggaagcaagaggtggggaagtaaaggat

SEQ ID NO: 619377 - DNA, 120 bp, Artificial Sequence
  ENSG00000177570_55 (sequence is synthesized)
acatatttttatgtctaaggactgtaaactgttgatgcttgacttttccttttacctacacctgtgctacacctttattaaaaggctgacacccagacttgtgcaggaaaggcactcttg

SEQ ID NO: 619378 - DNA, 120 bp, Artificial Sequence
  ENSG00000177570_56 (sequence is synthesized)
ggaatgaacagaaatgaataattatgagactttccatggtgccaaggggattcgcttatttccactccagaactgaatatgcagagcattgccagtcctgctagtgtgaaaagcaaatta

SEQ ID NO: 619379 - DNA, 120 bp, Artificial Sequence
  ENSG00000177570_57 (sequence is synthesized)
cttcaatagtttgagacgtacctaggggaagagagatcctatcaactttctttgcgggtagtggcgtaccttcaaatccttgctcaggctctgtgaggtgtgcacccgcagatttcactt

SEQ ID NO: 619380 - DNA, 120 bp, Artificial Sequence
  ENSG00000177570_58 (sequence is synthesized)
ctacctccggaatcctggcaaacaagccaggaatctctccagagtcacttcgcagttgctcagaaagaggctaacggtccttagtcctgaggaaattctgccatttttaacattcaagga

SEQ ID NO: 619381 - DNA, 120 bp, Artificial Sequence
  ENSG00000177570_59 (sequence is synthesized)
gaaaaggcgtatcagctgtacgtgagaatatcaactaaggataaaaacctctaatggatcccccttgttacttgcaaatgctttctttgtctgcaaatgtcacataattgattttgcata

SEQ ID NO: 619382 - DNA, 120 bp, Artificial Sequence
  ENSG00000177570_60 (sequence is synthesized)
ggaacaacaaaagtctcaaggaattgaagtttttaataccccccttagcactttactttcaccaaaacctcctctttctagtacatgagcagttttgttctttgtgatgttttcctctac

SEQ ID NO: 619383 - DNA, 120 bp, Artificial Sequence
  ENSG00000177570_61 (sequence is synthesized)
tagactcttttgaaaaatctaatctttgaaaatgacacaaattcctttattgctttaaggctgttttcattcacccctcccacagccccctccactgcacttttttgttttttgcgggga

SEQ ID NO: 619384 - DNA, 120 bp, Artificial Sequence
  ENSG00000177570_62 (sequence is synthesized)
tttttttctttcatctctcttcttttaacatgatgctgtgggtagttttcaagaattctataaagaactcaacaaaaagtgtatttgttacctttttccccagtcctaatatttcttctt

SEQ ID NO: 619385 - DNA, 120 bp, Artificial Sequence
  ENSG00000177570_63 (sequence is synthesized)
aagcttgatcttggtgaaaatttgttgcccaaaaagcagtgaggtagggattaataacgctgaccagtcatctggaagattaattaatcccagtgcagccctgagatcaggaaggaggac

SEQ ID NO: 619386 - DNA, 120 bp, Artificial Sequence
  ENSG00000177570_64 (sequence is synthesized)
aggccaggagatgtttctactccaggcaccactaaggactctatttcaaaggcagatcctgctccttagtctttttagatctgaatctaatcctgaatccagaaaattatcctatgaatt

SEQ ID NO: 619387 - DNA, 120 bp, Artificial Sequence
  ENSG00000177570_65 (sequence is synthesized)
ctggtttatcaacgcacatgattcctggcaccattgcatagcttcaaggtaaaagagagccttgtttccattattttgctatggtggcttttgggaagacagagagcattcttttgaaag

SEQ ID NO: 619388 - DNA, 120 bp, Artificial Sequence
  ENSG00000177570_66 (sequence is synthesized)
cgggaaacttaaggaaaagttggccaagtacacaggaaagttctaccacaccttaatataaagaacaaaatagatgcttctcatttggggaaagtagctaaaaggacagtaacagtactg

SEQ ID NO: 619389 - DNA, 120 bp, Artificial Sequence
  ENSG00000177570_67 (sequence is synthesized)
atggccttctgtccatcaccttagctccacagggaaaattctgggtgagagcaagcactgtttctaaaatctaaattttttcaggtgaaatttaccagcaacaaatgtaaaagggaactg

SEQ ID NO: 619390 - DNA, 120 bp, Artificial Sequence
  ENSG00000177570_68 (sequence is synthesized)
ccatcaggcatagggctagttttatacttcctgcctaacggcaaaatgactgagacatgacttccatggaacagcagaaaatggatgccaaagatatcataaaactgaagttcaatttgc

SEQ ID NO: 619391 - DNA, 120 bp, Artificial Sequence
  ENSG00000177570_69 (sequence is synthesized)
cacgtaaggctatttaaaaaccctgatgcactccaagcattcttccttcagagctttcctcctacaattatatcaagcacaagaaggcaccaacagcatatacttaatgtaatgtaaaag

SEQ ID NO: 619392 - DNA, 120 bp, Artificial Sequence
  ENSG00000177570_70 (sequence is synthesized)
taaacatatgacttgtgttgaattaccattggctggttgacataataagtgtcatagatatttagacattatttctgatcatacaaaattattttcataatttcatattcttttcaattt

SEQ ID NO: 619393 - DNA, 120 bp, Artificial Sequence
  ENSG00000177570_71 (sequence is synthesized)
tcataaattcttttcaattttcataaattggagccaatggtttgggaggttttttgtttgtttgtttgtttggttggttggttatttgttgcgttgttgttttccaaacctcagatattt

SEQ ID NO: 619394 - DNA, 120 bp, Artificial Sequence
  ENSG00000177570_72 (sequence is synthesized)
tgagaagccttagaaaggctcttaagcccaggcctttttgcctcatgtgcagagtattaataacagccctactgatgtgaacctcaaggaaggaggctattaaattaatccatcactgga

SEQ ID NO: 619395 - DNA, 120 bp, Artificial Sequence
  ENSG00000177570_73 (sequence is synthesized)
gatactaatacctcaaacaattaaaacactgaagactctgctggttgccttccacattgtttataacctttttaaattcagtcatttggatcaagagaaataaatggttggtttcatatg

SEQ ID NO: 619396 - DNA, 120 bp, Artificial Sequence
  ENSG00000177570_74 (sequence is synthesized)
gcttttgccacattagcacagacacatctaccaaatgtagaagtccagactgagtggatgcatgagagcaaacagatctgtaatatgattgcatttaatcaccgccaccgcccaaattct

SEQ ID NO: 619397 - DNA, 120 bp, Artificial Sequence
  ENSG00000177570_75 (sequence is synthesized)
gtaaaaatatattcaaatatgtaatgctaaaaaaaatgcaaaacaggagactcttactagatcatgctttcacttagggtaggataactgatcttgaagataacttcatagaaaaatttg

SEQ ID NO: 619398 - DNA, 120 bp, Artificial Sequence
  ENSG00000177570_76 (sequence is synthesized)
ctggctgaaatgccccaggcacctcagggttggtcctgtcctattccacaaactgatcatggtcttctcccatcttctcagaggagttagccttgcctctaaaatagcaaaaatgccatg

SEQ ID NO: 619399 - DNA, 120 bp, Artificial Sequence
  ENSG00000177570_77 (sequence is synthesized)
aaattatctttctaacctctatagagacttcttatccaagtataattccaaaaatatgatttgagtttgagcatgcctgtggtccttgattctatgatccctaaatcagttctacttttc

SEQ ID NO: 619400 - DNA, 80 bp, Artificial Sequence
  ENSG00000177570_78 (sequence is synthesized)
tatatatatatatatataatctccagtattttttttcaaccacaatttagtgcatttagcgtgttaatgttgggaactgc

SEQ ID NO: 619401 - DNA, 120 bp, Artificial Sequence
  ENSG00000177570_79 (sequence is synthesized)
cacaatttagtgcatttagcgtgttaatgttgggaactgcctgctggctctatgtctacttttgacaatgcttatgtccagataccatacagtgcatttgagagaggaccaaggttatgt

SEQ ID NO: 619402 - DNA, 120 bp, Artificial Sequence
  ENSG00000177570_80 (sequence is synthesized)
tttcccacataccagctgctgcagaggtttcgaagtgcctgacccagttctttttcacatcaaaaaggccttcggttgcagatggaaaccttaaagatgaatgtagagtggggtaggaaa

SEQ ID NO: 619403 - DNA, 120 bp, Artificial Sequence
  ENSG00000177570_81 (sequence is synthesized)
ttcatgtttgaatgctgaaacccttgtcttttttagttttattcaattcccacctcagatcaccagaaagggaggcctctttggtgggtgttggccctcactgggggtaaaaggggttct

SEQ ID NO: 619404 - DNA, 120 bp, Artificial Sequence
  ENSG00000177570_82 (sequence is synthesized)
atttgcttaaactcatgctcgtaggcaattttagggctctctggggctctgaatggtttctccaccaccacctttcttccaccaatagaaagatgttgtccttacaaggccatgtctgag

SEQ ID NO: 619405 - DNA, 120 bp, Artificial Sequence
  ENSG00000177570_83 (sequence is synthesized)
aagaccatggtttaactagtaaaagaagctcacattgcagagagctgaataataccaggctcttgactttgtactgtgtgtcacagtcatgattgggacagaaggaaccagtctgctgaa

SEQ ID NO: 619406 - DNA, 120 bp, Artificial Sequence
  ENSG00000177570_84 (sequence is synthesized)
aagtcaagccagcacaaatatttggaaactaattccactgaaactcttgtatcattaaatcatactattgtagtttcagttaatgtaattatttaatatcaggcactaaattaaatagct

SEQ ID NO: 619407 - DNA, 120 bp, Artificial Sequence
  ENSG00000177570_85 (sequence is synthesized)
ttgcacaaaattttagaaaagatcaatcttgtaacaaaatttaatattaacagtaaaaagcacctgagaaaagaaaatatcgatctgttgtggtttatatacttgagttattcttagaac

SEQ ID NO: 619408 - DNA, 120 bp, Artificial Sequence
  ENSG00000177570_86 (sequence is synthesized)
tttgtggagattgacactgctctgataaaaaggaagaaaatgttttgaattcaagaatgctagactaatagaaatagcccagtctctctgggccactgctcttcagtatggggtgctctc

SEQ ID NO: 619409 - DNA, 120 bp, Artificial Sequence
  ENSG00000177570_87 (sequence is synthesized)
tgtccctccttagcagatggggttgtttggaggctaaaatgagctaagggaagaagctatactgtgcctccaatatcccttatgtgtaattagagtgccgatctgggctgcaggctttat

SEQ ID NO: 619410 - DNA, 120 bp, Artificial Sequence
  ENSG00000177570_88 (sequence is synthesized)
tcaatgattcctttcccttacttgaggctttctctgtagagctgttatttctgagcctccattctgggatttacaaaggaaacagaatgatgaagaagtaacaatcagcattttacacac

SEQ ID NO: 619411 - DNA, 120 bp, Artificial Sequence
  ENSG00000177570_89 (sequence is synthesized)
acgcacacacacacacacacacacactttttctaatatatgaggctagtctgcagagtccacagcccaggtgtccatttatttccacttcttcacctcccaaagatttagagctccatga

SEQ ID NO: 619412 - DNA, 120 bp, Artificial Sequence
  ENSG00000177570_90 (sequence is synthesized)
tctaccaaggtgaagactgccaatcccaggttggagaagacccgtcagagtgtggaggtgccaaactgagaggcacaggaagcagacagccacatcaaacttttttgatgaactactgca

SEQ ID NO: 619413 - DNA, 120 bp, Artificial Sequence
  ENSG00000177570_91 (sequence is synthesized)
aattggtgtttgttctaggaaagaaagaggaagaaaaattacacaatgtgaattgaacataagagcagtgctctttacagagtatgagaagggaggatgggggagaatctgattaaaaaa

SEQ ID NO: 619414 - DNA, 120 bp, Artificial Sequence
  ENSG00000177570_92 (sequence is synthesized)
atgattcattccttcacagacactaacaaacatggctaaaaagcacatgtcagaacacagaagcctaggtagatggttgacatttttataacttccttaagtgagtagttaaaccagcag

SEQ ID NO: 619415 - DNA, 120 bp, Artificial Sequence
  ENSG00000177570_93 (sequence is synthesized)
ttaagtgagtagttaaaccagcagtcttaattctgttggtcttccaagagtgtttaattacataagtattacctgtattcatttcccacaactgttgggtttttctttcttttttttttt

SEQ ID NO: 619416 - DNA, 120 bp, Artificial Sequence
  ENSG00000177570_94 (sequence is synthesized)
ctagaaaaactcccaggactagacttaggaggaggcaatcaagttatgtggtaaaacaagagtgccttttctgttggatatccactttagtttcctggcttccagggcataagatgttta

SEQ ID NO: 619417 - DNA, 120 bp, Artificial Sequence
  ENSG00000177570_95 (sequence is synthesized)
gaaactttttttctctaaacataagaattattgtgtaccacaattttgaaccaccgatttccatatcttcagcagctatcaacttgccaattccctttgggtctcctttgtatattctta

SEQ ID NO: 619418 - DNA, 120 bp, Artificial Sequence
  ENSG00000177570_96 (sequence is synthesized)
tgtttccttctgtttccagttgtcctcaaaaagagttgaggggggcatgactcttataaaatggataaaaatgaaactgtacagatgtttgcctcccttgtatctgtgagcatgatctct

SEQ ID NO: 619419 - DNA, 120 bp, Artificial Sequence
  ENSG00000177570_97 (sequence is synthesized)
atcaggctggaaaatctgctttatcattttgtatatttgactattttgtattcagcattacttgactccttatgtgcatggcaatgtattaaaatgtgggatttctattaccgtgtaaaa

SEQ ID NO: 619420 - DNA, 120 bp, Artificial Sequence
  ENSG00000177570_98 (sequence is synthesized)
aaaccttaaaagcaatccctggcattcacaacttttcaagctcaagattcctcttctgaatgggagatgtcaggaccttggtgcaagccccatcaatcaggccatctttgccagtcagac

SEQ ID NO: 619421 - DNA, 120 bp, Artificial Sequence
  ENSG00000177570_99 (sequence is synthesized)
ttgcccacccttctgccaataaaaggttggggccttcaaccctgaatactccttaagatcttcaaagggccacagatatgtaccatatggcaaaataaatgggtctttattttaaatcaa

SEQ ID NO: 619422 - DNA, 120 bp, Artificial Sequence
  ENSG00000177570_100 (sequence is synthesized)
gtaccctattgcttcctgatgggtggatggatggggagattagaagaaagaccaccttactattaggacagacaggagtcagggagaatttgttattgtttcttcacagaatttccatca

SEQ ID NO: 619423 - DNA, 120 bp, Artificial Sequence
  ENSG00000177570_101 (sequence is synthesized)
tagaaaatagtatacagatttaagattacttccctttgaaaacttttttcatagctcactagggagaaggatgcacaaataagtaatggatgagcaaacagaattacctgagctaacttc

SEQ ID NO: 619424 - DNA, 120 bp, Artificial Sequence
  ENSG00000177570_102 (sequence is synthesized)
aaggtggtcacgtacagttgtatggattgtgtactgcacaaccccagagaataccagtcacatcaatcagggtacgattgcactcactagagttgtataatgtgcagcctgcacaactgt

SEQ ID NO: 619425 - DNA, 120 bp, Artificial Sequence
  ENSG00000177570_103 (sequence is synthesized)
acagtccagctgtagctatcttcacctgcgccaattgtgagggcgctttagcatttgagtgattcaatagttacgatgaccagtgatataagtggagtttttgttgtatttttgttttgc

SEQ ID NO: 619426 - DNA, 120 bp, Artificial Sequence
  ENSG00000177570_104 (sequence is synthesized)
agtgggagaaaaacattttagatatgtattactatacatgaatgtattatacacacacactttagagattgtaagaaccccatttagcttcttgaaagtggaataatttttataatagac

SEQ ID NO: 619427 - DNA, 120 bp, Artificial Sequence
  ENSG00000177570_105 (sequence is synthesized)
tatagtgaatctaaaactacactgttaagagtatataattcttaacaggaattataaataacttcaatatgatgagagcacttaagatctcaataactgtggaagtgacaaaataaagct

SEQ ID NO: 619428 - DNA, 120 bp, Artificial Sequence
  ENSG00000177570_106 (sequence is synthesized)
agaattcgaagaaagccttaagttacactatatgtaactgatatgtctacatgagatttggatgctatcaaccttcattggctataaactttatttgttttattttagcgtccattgtac

SEQ ID NO: 619429 - DNA, 120 bp, Artificial Sequence
  ENSG00000177570_107 (sequence is synthesized)
atcgttttaaatgaaaggatgataaaatatgtgtttttgagagccttgagtatttgtcattctgcagaatattgtaattgcatgcataccgatattggagaaatctgggtcagccaagtt

SEQ ID NO: 619430 - DNA, 120 bp, Artificial Sequence
  ENSG00000177570_108 (sequence is synthesized)
tcatgttattgcatttagattaacctagtaatagtccatttgcctagaggaaataatgtgctccctgaaagatgactattctagaaggataaatatagatttcaagtgatcgtaaaatag

SEQ ID NO: 619431 - DNA, 120 bp, Artificial Sequence
  ENSG00000177570_109 (sequence is synthesized)
tattgtttgtctcatatgcattatttgcattttgtcctcagagatttccaatggtgaatttactggtatactaagtgatttaaatttgaatgtgaaatactgataggcttttaagcttct

SEQ ID NO: 619432 - DNA, 120 bp, Artificial Sequence
  ENSG00000177570_110 (sequence is synthesized)
tttaagaagtagatagaaatacgaagattatgataagaaagtctgtcacagtgctatttggaaaacggaaaatttacaagcaacctagaggtccagcaatgtgaaaagaatcaagtaatt

SEQ ID NO: 619433 - DNA, 120 bp, Artificial Sequence
  ENSG00000177570_111 (sequence is synthesized)
ctgcttaaattcataagattcagtataatgcccagttattaaaattacatctttaaagaatacatgacaacatgggaaattacgtaagtcatacaaggtgggaggaaaggtcatgtgtaa

SEQ ID NO: 619434 - DNA, 120 bp, Artificial Sequence
  ENSG00000177570_112 (sequence is synthesized)
aattgtatgcataatataagcccaattttgtaaaaaccatatattcttatatgtacagaaaaaaaggactgcaagtaaatatgccaaccattttaataaaggatctctctggattgtggg

SEQ ID NO: 619435 - DNA, 120 bp, Artificial Sequence
  ENSG00000177570_113 (sequence is synthesized)
caagtggttgaagaaacattgtccgaatcagtatcagatctacagtgagtcattcaaacagcatgacataactgcgtcttgctctgttgcccacgctggacttgagctcttggcacaaaa

SEQ ID NO: 619436 - DNA, 120 bp, Artificial Sequence
  ENSG00000177570_114 (sequence is synthesized)
gatcccatggccccaacctcacatgtagctgggattacagatgcacacaatcacacttggcttctaaattggtctttatcaaaattaaaagtcgtctgcttttctaagaatccatcaagg

SEQ ID NO: 619437 - DNA, 120 bp, Artificial Sequence
  ENSG00000177570_115 (sequence is synthesized)
aaatgaaaaagccaagccagagacaagaagaaagcacttttattatatatctaaaaaagaacttgtatacaaaatacataaagaacatttaaaactcaagaagacaacccaataatatgg

SEQ ID NO: 619438 - DNA, 120 bp, Artificial Sequence
  ENSG00000177570_116 (sequence is synthesized)
gcaaaagatttgaaatgatacgtcacaaagaaaatacaagaatggccaaaaggcacatgagagtatgctcagaaatattaagtcatcaagaaaatccaaataaaaatcacaatgaaataa

SEQ ID NO: 619439 - DNA, 120 bp, Artificial Sequence
  ENSG00000177570_117 (sequence is synthesized)
tccagctgaaggtgcgagaagaagtcagaaatctacagttactcacacaagattacacagatagaatgaaccattgggccaagaagaacagaaacttgagtatgaagaatgggaagtaag

SEQ ID NO: 619440 - DNA, 120 bp, Artificial Sequence
  ENSG00000177570_118 (sequence is synthesized)
agaagaagtcagaaatctacagttactcacacaagtgacttggtctccctggacagactgtgaaaagtcaaacacctccacaccaaaataactggtatatagtgggttgaaaattaaaaa

SEQ ID NO: 619441 - DNA, 120 bp, Artificial Sequence
  ENSG00000177570_119 (sequence is synthesized)
gttcctgtggattcacctgcctccctttgagacaagtagtgagtggctgttgatcagatgaaggagagttccagcctgtgacttctgagtcagtacactgggattcaaatcctgcctctg

SEQ ID NO: 619442 - DNA, 120 bp, Artificial Sequence
  ENSG00000177570_120 (sequence is synthesized)
tctgtattcacttaacttgatttcctccagatttgttcatgttgttgcaaatgacaggaatgcattattttaaggctgaatagtattctattatgtatatataccacattttctttatcc

SEQ ID NO: 619443 - DNA, 120 bp, Artificial Sequence
  ENSG00000177575_0 (sequence is synthesized)
attgaagaaaacatgagtatgaaatggaacctcagctctttcaatgacttccctttttgagttgactccgcctccatatgtagccttttcattttcatgaaagtgaagtgatttttagaa

SEQ ID NO: 619444 - DNA, 120 bp, Artificial Sequence
  ENSG00000177575_1 (sequence is synthesized)
ttcttagttgttttctttagaagaacatttctagggaataatacaagaagatttaggaatcattgaagttataaatctttggaatgagcaaactcagaatggtgctacttgaagactctg

SEQ ID NO: 619445 - DNA, 120 bp, Artificial Sequence
  ENSG00000177575_2 (sequence is synthesized)
gatctgctgacttcagaagacattttgtcaacttgagtcccttcaccattactgtggtcttacttctcagtgcctgttttgtcaccagttctcttggaggaacagacaaggagctgaggc

SEQ ID NO: 619446 - DNA, 120 bp, Artificial Sequence
  ENSG00000177575_3 (sequence is synthesized)
tagtggatggtgaaaacaagtgtagcgggagagtggaagtgaaagtccaggaggagtggggaacggtgtgtaataatggctggagcatggaagcggtctctgtgatttgtaaccagctgg

SEQ ID NO: 619447 - DNA, 120 bp, Artificial Sequence
  ENSG00000177575_4 (sequence is synthesized)
gatgtccaactgctatcaaagcccctggatgggctaattccagtgcaggttctggacgcatttggatggatcatgtttcttgtcgtgggaatgagtcagctctttgggattgcaaacatg

SEQ ID NO: 619448 - DNA, 120 bp, Artificial Sequence
  ENSG00000177575_5 (sequence is synthesized)
atggatggggaaagcatagtaactgtactcaccaacaagatgctggagtgacctgctcagatggatccaatttggaaatgaggctgacgcgtggagggaatatgtgttctggaagaatag

SEQ ID NO: 619449 - DNA, 120 bp, Artificial Sequence
  ENSG00000177575_6 (sequence is synthesized)
agatcaaattccaaggacggtggggaacagtgtgtgatgataacttcaacatagatcatgcatctgtcatttgtagacaacttgaatgtggaagtgctgtcagtttctctggttcatcta

SEQ ID NO: 619450 - DNA, 120 bp, Artificial Sequence
  ENSG00000177575_7 (sequence is synthesized)
attttggagaaggctctggaccaatctggtttgatgatcttatatgcaacggaaatgagtcagctctctggaactgcaaacatcaaggatggggaaagcataactgtgatcatgctgagg

SEQ ID NO: 619451 - DNA, 120 bp, Artificial Sequence
  ENSG00000177575_8 (sequence is synthesized)
atgctggagtgatttgctcaaagggagcagatctgagcctgagactggtagatggagtcactgaatgttcaggaagattagaagtgagattccaaggagaatgggggacaatatgtgatg

SEQ ID NO: 619452 - DNA, 120 bp, Artificial Sequence
  ENSG00000177575_9 (sequence is synthesized)
acggctgggacagttacgatgctgctgtggcatgcaagcaactgggatgtccaactgccgtcacagccattggtcgagttaacgccagtaagggatttggacacatctggcttgacagcg

SEQ ID NO: 619453 - DNA, 120 bp, Artificial Sequence
  ENSG00000177575_10 (sequence is synthesized)
tttcttgccagggacatgaacctgctatctggcaatgtaaacaccatgaatggggaaagcattattgcaatcacaatgaagatgctggcgtgacatgttctgatggatcagatctggagc

SEQ ID NO: 619454 - DNA, 120 bp, Artificial Sequence
  ENSG00000177575_11 (sequence is synthesized)
taagacttagaggtggaggcagccgctgtgctgggacagttgaggtggagattcagagactgttagggaaggtgtgtgacagaggctggggactgaaagaagctgatgtggtttgcaggc

SEQ ID NO: 619455 - DNA, 120 bp, Artificial Sequence
  ENSG00000177575_12 (sequence is synthesized)
agctgggatgtggatctgcactcaaaacatcttatcaagtgtactccaaaatccaggcaacaaacacatggctgtttctaagtagctgtaacggaaatgaaacttctctttgggactgca

SEQ ID NO: 619456 - DNA, 120 bp, Artificial Sequence
  ENSG00000177575_13 (sequence is synthesized)
agaactggcaatggggtggacttacctgtgatcactatgaagaagccaaaattacctgctcagcccacagggaacccagactggttggaggggacattccctgttctggacgtgttgaag

SEQ ID NO: 619457 - DNA, 120 bp, Artificial Sequence
  ENSG00000177575_14 (sequence is synthesized)
tgaagcatggtgacacgtggggctccatctgtgattcggacttctctctggaagctgccagcgttctatgcagggaattacagtgtggcacagttgtctctatcctggggggagctcact

SEQ ID NO: 619458 - DNA, 120 bp, Artificial Sequence
  ENSG00000177575_15 (sequence is synthesized)
ttggagagggaaatggacagatctgggctgaagaattccagtgtgagggacatgagtcccatctttcactctgcccagtagcaccccgcccagaaggaacttgtagccacagcagggatg

SEQ ID NO: 619459 - DNA, 120 bp, Artificial Sequence
  ENSG00000177575_16 (sequence is synthesized)
ttggagtagtctgctcaagatacacagaaattcgcttggtgaatggcaagaccccgtgtgagggcagagtggagctcaaaacgcttggtgcctggggatccctctgtaactctcactggg

SEQ ID NO: 619460 - DNA, 120 bp, Artificial Sequence
  ENSG00000177575_17 (sequence is synthesized)
gcacgttttggaaaaggaaatggtcagatctggaggcatatgtttcactgcactgggactgagcagcacatgggagattgtcctgtaactgctctaggtgcttcattatgtccttcagag

SEQ ID NO: 619461 - DNA, 120 bp, Artificial Sequence
  ENSG00000177575_18 (sequence is synthesized)
caagtggcctctgtaatctgctcaggaaaccagtcccaaacactgtcctcgtgcaattcatcgtctttgggcccaacaaggcctaccattccagaagaaagtgctgtggcctgcatagag

SEQ ID NO: 619462 - DNA, 120 bp, Artificial Sequence
  ENSG00000177575_19 (sequence is synthesized)
agtggtcaacttcgcctggtaaatggaggaggtcgctgtgctgggagagtagagatctatcatgagggctcctggggcaccatctgtgatgacagctgggacctgagtgatgcccacgtg

SEQ ID NO: 619463 - DNA, 120 bp, Artificial Sequence
  ENSG00000177575_20 (sequence is synthesized)
gtttgcagacagctgggctgtggagaggccattaatgccactggttctgctcattttggggaaggaacagggcccatctggctggatgagatgaaatgcaatggaaaagaatcccgcatt

SEQ ID NO: 619464 - DNA, 120 bp, Artificial Sequence
  ENSG00000177575_21 (sequence is synthesized)
tggcagtgccattcacacggctgggggcagcaaaattgcaggcacaaggaggatgcgggagttatctgctcagaattcatgtctctgagactgaccagtgaagccagcagagaggcctgt

SEQ ID NO: 619465 - DNA, 120 bp, Artificial Sequence
  ENSG00000177575_22 (sequence is synthesized)
gcagggcgtctggaagttttttacaatggagcttggggcactgttggcaagagtagcatgtctgaaaccactgtgggtgtggtgtgcaggcagctgggctgtgcagacaaagggaaaatc

SEQ ID NO: 619466 - DNA, 120 bp, Artificial Sequence
  ENSG00000177575_23 (sequence is synthesized)
aaccctgcatctttagacaaggccatgtccattcccatgtgggtggacaatgttcagtgtccaaaaggacctgacacgctgtggcagtgcccatcatctccatgggagaagagactggcc

SEQ ID NO: 619467 - DNA, 120 bp, Artificial Sequence
  ENSG00000177575_24 (sequence is synthesized)
agcccctcggaggagacctggatcacatgtgacaacaagataagacttcaggaaggacccacttcctgttctggacgtgtggagatctggcatggaggttcctgggggacagtgtgtgat

SEQ ID NO: 619468 - DNA, 120 bp, Artificial Sequence
  ENSG00000177575_25 (sequence is synthesized)
gactcttgggacttggacgatgctcaggtggtgtgtcaacaacttggctgtggtccagctttgaaagcattcaaagaagcagagtttggtcaggggactggaccgatatggctcaatgaa

SEQ ID NO: 619469 - DNA, 120 bp, Artificial Sequence
  ENSG00000177575_26 (sequence is synthesized)
gtgaagtgcaaagggaatgagtcttccttgtgggattgtcctgccagacgctggggccatagtgagtgtgggcacaaggaagacgctgcagtgaattgcacagatatttcagtgcagaaa

SEQ ID NO: 619470 - DNA, 120 bp, Artificial Sequence
  ENSG00000177575_27 (sequence is synthesized)
accccacaaaaagccacaacaggtcgctcatcccgtcagtcatcctttattgcagtcgggatccttggggttgttctgttggccattttcgtcgcattattcttcttgactaaaaagcga

SEQ ID NO: 619471 - DNA, 120 bp, Artificial Sequence
  ENSG00000177575_28 (sequence is synthesized)
agacagagacagcggcttgcagtttcctcaagaggagagaacttagtccaccaaattcaataccgggagatgaattcttgcctgaatgcagatgatctggacctaatgaattcctcagaa

SEQ ID NO: 619472 - DNA, 120 bp, Artificial Sequence
  ENSG00000177575_29 (sequence is synthesized)
aattcccatgagtcagctgatttcagtgctgctgaactaatttctgtgtctaaatttcttcctatttctggaatggaaaaggaggccattctgagccacactgaaaaggaaaatgggaat

SEQ ID NO: 619473 - DNA, 120 bp, Artificial Sequence
  ENSG00000177575_30 (sequence is synthesized)
ttataacccagtgagttcagcctttaagataccttgatgaagacctggactattgaatggagcagaaattcacctctctcactgactattacagttgcatttttatggagttcttcttct

SEQ ID NO: 619474 - DNA, 120 bp, Artificial Sequence
  ENSG00000177575_31 (sequence is synthesized)
cctaggattcctaagactgctgctgaatttataaaaattaagtttgtgaatgtgactacttagtggtgtatatgagactttcaagggaattaaataaataaataagaatgttattgattt

SEQ ID NO: 619475 - DNA, 120 bp, Artificial Sequence
  ENSG00000177575_32 (sequence is synthesized)
gagtttgctttaattacttgtccttaattctattaatttctaaatgggcttcctaattttttgtagagtttcctagatgtattataatgtgttttatttgacagtgtttcaatttgcata

SEQ ID NO: 619476 - DNA, 120 bp, Artificial Sequence
  ENSG00000177575_33 (sequence is synthesized)
tacagtactgtatattttttcttatttggtttgaataattttcctattaccaaataaaaataaatttatttttactttagtttttctaagacaggaaaagttaatgatattgaagggtct

SEQ ID NO: 619477 - DNA, 120 bp, Artificial Sequence
  ENSG00000177575_34 (sequence is synthesized)
gtaaataatatatggctaactttataaggcatgactcacaacgattctttaactgctttttgttactgtaattctgttcactagaataaaatgcagagccacacctggtgagggcacaaa

SEQ ID NO: 619478 - DNA, 120 bp, Artificial Sequence
  ENSG00000177575_35 (sequence is synthesized)
cagttaaaaaagtctaaaaatgtaataggaagcttagatgcatataatggacaagaatgactgaaaattattcttggagaatatcaaaattgcaatcatagggaggcctttagcttaaga

SEQ ID NO: 619479 - DNA, 120 bp, Artificial Sequence
  ENSG00000177575_36 (sequence is synthesized)
ggcctgtgattattcctgatagaggtatggaaagaaccatgcagaggaatattatgacttggacctcattttattaaaacagaaattaatcttacaaaagattgtcataagtgacagttt

SEQ ID NO: 619480 - DNA, 120 bp, Artificial Sequence
  ENSG00000177575_37 (sequence is synthesized)
aacttttttctttaaattttgttgtgtatatttaaggtatacaacatgattttatgggatgtatatagatagtaaaaagcttactaaagcaaagcaaatgaacacacccatcatctgaca

SEQ ID NO: 619481 - DNA, 120 bp, Artificial Sequence
  ENSG00000177575_38 (sequence is synthesized)
tagttacccttttttgtgttgttcttgtggcaagagcagctaaaacctactcacttagcatgaatcctacatacagcacaatgttattacctataatcctcatgttgtacattagacctc

SEQ ID NO: 619482 - DNA, 120 bp, Artificial Sequence
  ENSG00000177575_39 (sequence is synthesized)
tagactggttcattctacgtatctgctactttgtatcctctgacctacatacgtctttcacagtttcttccattcccatttcctgtcattttttttctctagcttgatatttattatatt

SEQ ID NO: 619483 - DNA, 120 bp, Artificial Sequence
  ENSG00000177575_40 (sequence is synthesized)
tttccctaaaagtctaaaaccttaaactttcaatatctttattgcatgagaagccatacaaatccacagaactagccttatttctcatcacatcatgctgttttatccttgaacttctat

SEQ ID NO: 619484 - DNA, 120 bp, Artificial Sequence
  ENSG00000177575_41 (sequence is synthesized)
ttagcaccagtgcactaattctgcatctgggcaggatgactttactgggttggaagaaatatcccaaaacccattgtctttactccatgaagggtccctgaccttctgagaggggcctgc

SEQ ID NO: 619485 - DNA, 120 bp, Artificial Sequence
  ENSG00000177575_42 (sequence is synthesized)
ctcacttcttccatccaaagaattatgcatctgctactgtgtcagggaacatatttaaggaacatgtactgttactgtgtcaggaaacatatttaagaaataggaaagactttctctgcc

SEQ ID NO: 619486 - DNA, 120 bp, Artificial Sequence
  ENSG00000177575_43 (sequence is synthesized)
ccttaaatcacacatgcttttcttcctagttatgggtggtgtttttagttgctcaaagagcctcacagttacgtgagaagaggtctggtttatttcccagtaattattttcttcctttca

SEQ ID NO: 619487 - DNA, 120 bp, Artificial Sequence
  ENSG00000177576_0 (sequence is synthesized)
gtcagctgcgtttccgcggtcgcgggtgagtgtgcccgggctagcggcctgggttgggctttgtagctgctccgcaggcccagcccgggccgcgctcgcagagtcctaggcggtgcgcgg

SEQ ID NO: 619488 - DNA, 120 bp, Artificial Sequence
  ENSG00000177576_1 (sequence is synthesized)
cctcctgcctcctccctcctcggcggtcgcggcccgccggcctccgcggtgcctgccttcgctctcaggttgaggagctcaagcttgggaaaatggtgtgcattccttgtatcgtcattc

SEQ ID NO: 619489 - DNA, 120 bp, Artificial Sequence
  ENSG00000177576_2 (sequence is synthesized)
cagttctgctctggatctacaaaaaattcctggagccatatatataccctctggtttcccccttcgttagtcgtatatggcctaagaaagcaatacaagaatccaatgatacaaacaaag

SEQ ID NO: 619490 - DNA, 120 bp, Artificial Sequence
  ENSG00000177576_3 (sequence is synthesized)
gcaaagtaaactttaagggtgcagacatgaatggattaccaacaaaaggaccaacagaaatctgtgataaaaagaaagactaaagaaattttcctaaaggaccccatcatttaaaaaatg

SEQ ID NO: 619491 - DNA, 120 bp, Artificial Sequence
  ENSG00000177576_4 (sequence is synthesized)
atctgagaccggaattcaggataggagtctagatatttacctgatactaatcaggaaatatatgatatccgtatttaaaatgtagttagttatatttaatgacctcattcctaagttcct

SEQ ID NO: 619492 - DNA, 120 bp, Artificial Sequence
  ENSG00000177576_5 (sequence is synthesized)
ttttcgttaatgtagctttcatttctgttattgctgtttgaataatatgattaaatagaaggtttgtgccagtagacattatgttactaaatcagcactttaaaatctttggttctctaa

SEQ ID NO: 619493 - DNA, 120 bp, Artificial Sequence
  ENSG00000177576_6 (sequence is synthesized)
ttcatatgaatttgctgtttgctctaatttctttgggctcttctaatttgagtggagtacaattttgttgtgaaacagtccagtgaaactgtgcagggaaatgaaggtagaattttggga

SEQ ID NO: 619494 - DNA, 120 bp, Artificial Sequence
  ENSG00000177576_7 (sequence is synthesized)
ggtaataatgatgtgaaacataaagatttaataattactgtccaacacagtggagcagcttgtccacaaatatagtaattactatttattgctctaaggaagattaaaaaaagataggga

SEQ ID NO: 619495 - DNA, 120 bp, Artificial Sequence
  ENSG00000177576_8 (sequence is synthesized)
aaagggggaaacttctttgaaaaatgaaacatctgttacattaatgtctaattataaaattttaatccttactgcatttcttctgttcctacaaatgtattaaacattcagtttaactgg

SEQ ID NO: 619496 - DNA, 120 bp, Artificial Sequence
  ENSG00000177576_9 (sequence is synthesized)
tggagcgaataattaaaataataatatctcgtagccaccttctagacttttctgacccagtttccatatgtgtgaagtaaaatatcttaccgaagtattattatgaagattaaaagataa

SEQ ID NO: 619497 - DNA, 120 bp, Artificial Sequence
  ENSG00000177576_10 (sequence is synthesized)
tagtggtgggacaacaattactattgttgcgtaacaagacactccaaaatttagtggttttcagcagcagtgactcgactgggcagttctttgctgttctgggctcactcatatggctgg

SEQ ID NO: 619498 - DNA, 120 bp, Artificial Sequence
  ENSG00000177576_11 (sequence is synthesized)
ctgggcctgggtctggacctgggccgctatgtgatttttatcttgggctttgaaaattcagtgtagggacctataaatattcaaagatgatgagatgcatccttatatattttttgtatt

SEQ ID NO: 619499 - DNA, 120 bp, Artificial Sequence
  ENSG00000177576_12 (sequence is synthesized)
cactctgaagctgggaaagattaaaaggaactcctgcccttgggtccctaatgaagtctgggtcctaactcaggctctattaagttctgtggctggtcaagtcactgatttaccttgggc

SEQ ID NO: 619500 - DNA, 120 bp, Artificial Sequence
  ENSG00000177576_13 (sequence is synthesized)
tttatttgatataaatcatgtaaatcagcaggtctcagcttttctgtccaaagccacctgagggataagataaattctcattagcaaataaacttttttaaggtataaatactattataa

SEQ ID NO: 619501 - DNA, 120 bp, Artificial Sequence
  ENSG00000177576_14 (sequence is synthesized)
aaataacagatatttacagtacaacaatgcaagaggatcctaaatgaaaagcgaatgttttttctcaactctcattcccttattccagctccacagaggtaaccaattgtttttttgttg

SEQ ID NO: 619502 - DNA, 120 bp, Artificial Sequence
  ENSG00000177576_15 (sequence is synthesized)
ttgttgttgtatggtttgtttttgttagacagtagtcttttcctgaacagtgctgctccttgtggagcaaggctaattcataggcagtgcatccagagtccgccccagttgattttgtgt

SEQ ID NO: 619503 - DNA, 120 bp, Artificial Sequence
  ENSG00000177576_16 (sequence is synthesized)
agtccgccccagttgattttgtgtgtaaccttctagcaactttttgaaaattaatttgttcttaaatatgcacatcatttttatttatttatgtttttgagacagggtctcactctgtca

SEQ ID NO: 619504 - DNA, 120 bp, Artificial Sequence
  ENSG00000177576_17 (sequence is synthesized)
gggtctcactctgtcactcaagctggagtgcagcagcatgatcacggctctctatggcctcgacctgcagtcctgaagtgatcctctcaccttagcctctcaagtagctgggactacagg

SEQ ID NO: 619505 - DNA, 120 bp, Artificial Sequence
  ENSG00000177576_18 (sequence is synthesized)
tgcccagctaatgttttttgtaattttttttatagagacagggtttcgtcatgttgcctgggctgatctcgatctcctgggctcaagcgatcctccactttggcttcccaaagtgctggg

SEQ ID NO: 619506 - DNA, 120 bp, Artificial Sequence
  ENSG00000177576_19 (sequence is synthesized)
ggcccacacatcatcttttaaaaattaagtaatattgcaacgtttctaattgtccctacttctttgctcctcaaaggttttacctactgagctgtgggctttttaaatttatctccatat

SEQ ID NO: 619507 - DNA, 88 bp, Artificial Sequence
  ENSG00000177576_20 (sequence is synthesized)
gagctgtgggctttttaaatttatctccatatttataaataaattataaaaatataaaaatataaacattttatgctggagtgcagcg

SEQ ID NO: 619508 - DNA, 77 bp, Artificial Sequence
  ENSG00000177576_21 (sequence is synthesized)
ctgagacggggtcttgctctgttgcccaagcgagtctcaaactcctggcctcaaagtgatcctcttgcctcagcctc

SEQ ID NO: 619509 - DNA, 89 bp, Artificial Sequence
  ENSG00000177576_22 (sequence is synthesized)
tgcctggctatactgttatattttgagccatcaacttcagacattgtttcccataatggttgagatgccgctatcttacactgcctctg

SEQ ID NO: 619510 - DNA, 120 bp, Artificial Sequence
  ENSG00000177576_23 (sequence is synthesized)
ggtgtctttcatttgcccctcccaagtctctgctcccctcatcctgctttcagcccaaggaagctgtatagacatcaacagacttcccatgtctctgggttctgctgggtttggccaata

SEQ ID NO: 619511 - DNA, 120 bp, Artificial Sequence
  ENSG00000177576_24 (sequence is synthesized)
gcgatccatagcaggagatggctggagggaggagaatgaaggcagagtgtttattcccttggccctctctctgcaaggtcacctcaggccaactgttcctcagccagaagtcactgtgcc

SEQ ID NO: 619512 - DNA, 120 bp, Artificial Sequence
  ENSG00000177576_25 (sequence is synthesized)
tcaaggaacactccaggcagccaactccacctgacttcttttatttttcctaacctgtccttcaccctgcccttttgggcccaggggtggtggtatttctgttactggctctgggctact

SEQ ID NO: 619513 - DNA, 120 bp, Artificial Sequence
  ENSG00000177576_26 (sequence is synthesized)
gcttcctctcaagagtgctatctggcttgctgggacactgcctgggagaatactattgctcactgcacaggttaatgcactgtgattgcgtcccttttaatatacaggtggtgtcttcct

SEQ ID NO: 619514 - DNA, 120 bp, Artificial Sequence
  ENSG00000177576_27 (sequence is synthesized)
ggagtgaccagtttaccttctccccatacacctctcctgcctagttgttgcctagacctggtgcacactgcagtcctcgggactttctgttgccaccctcctgtattggacgtcttgttt

SEQ ID NO: 619515 - DNA, 120 bp, Artificial Sequence
  ENSG00000177576_28 (sequence is synthesized)
ctggatttcctatcctcttccttcttggtttatccctcattttttctgtagcacagcagttttctaattcaatacttttaggaggttgagtatggataattttggaaagtgtccccggga

SEQ ID NO: 619516 - DNA, 120 bp, Artificial Sequence
  ENSG00000177576_29 (sequence is synthesized)
tgattccaatttatttaagcctgttttccagagagctgcgggtctcctaaggcctttctcatttctaacaagtctccctctctagaacactggttcccagtcgttgttttcatactagca

SEQ ID NO: 619517 - DNA, 120 bp, Artificial Sequence
  ENSG00000177576_30 (sequence is synthesized)
acattttaaaagcaggataggggtggctagtatgcaattgccaacttttgatttttccaagcaggagtatatcaaaaagctacaatttattaccagtatttcgtaaaagacagtttgaca

SEQ ID NO: 619518 - DNA, 120 bp, Artificial Sequence
  ENSG00000177576_31 (sequence is synthesized)
ccagaagagtgaaaaagaacatgggaatagtggacaaaaatagccatcagtttgaataagcgtatgaaaagtgttaattttatgaaaaattcactattttgttcatatttttcttatttt

SEQ ID NO: 619519 - DNA, 120 bp, Artificial Sequence
  ENSG00000177576_32 (sequence is synthesized)
ggaggctaattgttaaaagcttttatcagttatccatgggctggagttggtagccactgtttgataccacacaaatgtttctttgccctaaaatatcaacatctgtctgtgtaaaggtca

SEQ ID NO: 619520 - DNA, 120 bp, Artificial Sequence
  ENSG00000177576_33 (sequence is synthesized)
gggctgcctttttagtaagagctaccctttgttaaacacattgtacctgcactgttcatgggtgtttcacacacacaaacctacctggtctgcataaacctgaaatacagtcaagaaaac

SEQ ID NO: 619521 - DNA, 62 bp, Artificial Sequence
  ENSG00000177576_34 (sequence is synthesized)
ctacctggtctgcataaacctgaaatacagtcaagaaaacaggatccaccggaggcggtggg

SEQ ID NO: 619522 - DNA, 120 bp, Artificial Sequence
  ENSG00000177576_35 (sequence is synthesized)
ggtgacagagcaagactgtctcaaaagaaaagaaaaagaaaaacaggatcccagcctgggcaacatagggagacctcgcctccaccaaaaattaaaaaatttagctaggcatatggtgat

SEQ ID NO: 619523 - DNA, 73 bp, Artificial Sequence
  ENSG00000177576_36 (sequence is synthesized)
taaaggctacagtgagctgtgatcaagccactgcactctagcttggacaacagagcaagaccctgtcttaaaa

SEQ ID NO: 619524 - DNA, 120 bp, Artificial Sequence
  ENSG00000177576_37 (sequence is synthesized)
cactctagcttggacaacagagcaagaccctgtcttaaaaaaagaaaaaaagaataatggagtttaaatatgtaaatgacaagtctaagatttcaaggtcatactttcatgctaaggagc

SEQ ID NO: 619525 - DNA, 80 bp, Artificial Sequence
  ENSG00000177576_38 (sequence is synthesized)
gatttcaaggtcatactttcatgctaaggagccatcacagctacatatatatatagtgtatatatatatatagtgtgtat

SEQ ID NO: 619526 - DNA, 85 bp, Artificial Sequence
  ENSG00000177576_39 (sequence is synthesized)
gtgtgtatatatatagtgtgtgtatatatatatatttttgtttgtttgtttgtttttggaagatggagtttcgctcttgttgccc

SEQ ID NO: 619527 - DNA, 66 bp, Artificial Sequence
  ENSG00000177576_40 (sequence is synthesized)
aagcactgggcccggctgccacagctactaatatcttaattgttagtaataccttattgggaataa

SEQ ID NO: 619528 - DNA, 120 bp, Artificial Sequence
  ENSG00000177576_41 (sequence is synthesized)
actaatatcttaattgttagtaataccttattgggaataattaggcagaaatggagagggtgagtttagattaatcagtatgtgtgaacttgttttaaagtttctggaggctgaggtgag

SEQ ID NO: 619529 - DNA, 68 bp, Artificial Sequence
  ENSG00000177576_42 (sequence is synthesized)
aggatcgcttaagaggacaacagagcaataccccgtttcaaataaataataataaagttaattttgct

SEQ ID NO: 619530 - DNA, 120 bp, Artificial Sequence
  ENSG00000177595_0 (sequence is synthesized)
aggcgccgagcgcccgctgagcagccaccctttgcgcgccgcctgcagcgcagcttccccgggcgctgcctggacaggcctgcctgcgtgctgggacatgtctggcctccaaggaccgtc

SEQ ID NO: 619531 - DNA, 120 bp, Artificial Sequence
  ENSG00000177595_1 (sequence is synthesized)
ggtgggcgatggctgcaacggtggaggggccagagctggaggcagctgctgccgcaggagatgcttcagaggattcggacgcagggtccagggcgctgcctttcctgggcggcaaccggc

SEQ ID NO: 619532 - DNA, 120 bp, Artificial Sequence
  ENSG00000177595_2 (sequence is synthesized)
tgagcttggacctgtaccccgggggctgccagcagctgctgcacctgtgtgtccagcagcctctgcagctgctgcaggtggaattcttgcgtctgagcactcacgaggaccctcagctgc

SEQ ID NO: 619533 - DNA, 120 bp, Artificial Sequence
  ENSG00000177595_3 (sequence is synthesized)
tggaggccaccctggcccagctgcctcagagcctgtcctgcctccgctccctggtcctcaaaggagggcaacgccgggacacactgggtgcctgtctccggggtgccctgaccaacctgc

SEQ ID NO: 619534 - DNA, 120 bp, Artificial Sequence
  ENSG00000177595_4 (sequence is synthesized)
ccgctggtctgagtggcctggcccatctggcccacctggacctgagcttcaacagcctggagacactgccggcctgtgtcctgcagatgcgaggtctgggtgcgctcttgctgtctcaca

SEQ ID NO: 619535 - DNA, 120 bp, Artificial Sequence
  ENSG00000177595_5 (sequence is synthesized)
actgcctctctgagctgcctgaggctctgggggccctccccgccctcaccttcctcacagtgacacacaaccgcctgcagacgctgcccccagcactgggggccctatccaccctgcagc

SEQ ID NO: 619536 - DNA, 120 bp, Artificial Sequence
  ENSG00000177595_6 (sequence is synthesized)
gcctcgatctctctcagaatctgctggacacgctacctcctgagattggaggcctgggcagcctcctggagctcaacctggcctccaaccggctgcagagcctcccagcctctctggcgg

SEQ ID NO: 619537 - DNA, 120 bp, Artificial Sequence
  ENSG00000177595_7 (sequence is synthesized)
gacttcggtccttgcggctccttgtcctgcacagcaacctcctggcctctgtgccagctgacttggcccgccttccactcctcacccggctcgacctgagggacaaccagctccgggacc

SEQ ID NO: 619538 - DNA, 120 bp, Artificial Sequence
  ENSG00000177595_8 (sequence is synthesized)
tgccccctgagctgctagacgccccctttgtgcgcctgcaggggaaccccctgggtgaggcctcgccagacgccccgagttcaccagtggcagccctcattccagaaatgcccagactgt

SEQ ID NO: 619539 - DNA, 120 bp, Artificial Sequence
  ENSG00000177595_9 (sequence is synthesized)
tcctgacctcagatttggacagctttcctgtgacccctcaaggctgctcagtgaccctggcctgtggcgtccgcctgcagttcccagcgggagccaccgccacccccatcaccatccgct

SEQ ID NO: 619540 - DNA, 120 bp, Artificial Sequence
  ENSG00000177595_10 (sequence is synthesized)
atcggctgctgctgccggagccaggcctcgtccccctgggtcctcatgacgccctgctcagccatgtgctggagctgcagccccatggggtggccttccagcaggatgtggggctgtggc

SEQ ID NO: 619541 - DNA, 120 bp, Artificial Sequence
  ENSG00000177595_11 (sequence is synthesized)
tgctcttcaccccaccgcaggcccggcgctgccgtgaagtggtggtcaggacccggaatgacaacagctggggtgacctggagacctacctggaggaagaggcaccccagcggctctggg

SEQ ID NO: 619542 - DNA, 120 bp, Artificial Sequence
  ENSG00000177595_12 (sequence is synthesized)
catcctggggtcaaagtcatcttcccccctggggccactgaggagcctcgtcgagtctccatgcaggtggtgcgcatggctggccgagagctgcaggccctcctgggagaaccagaggct

SEQ ID NO: 619543 - DNA, 120 bp, Artificial Sequence
  ENSG00000177595_13 (sequence is synthesized)
gcagtgagccccctgctgtgcctgtcacagagcggtccccccagcttcctccaaccggtcaccgtgcagctgcctctgccctctggcatcacaggcctcagtctggaccgctcccgcctg

SEQ ID NO: 619544 - DNA, 120 bp, Artificial Sequence
  ENSG00000177595_14 (sequence is synthesized)
cacctgttgtactgggcccctcctgcagccacctgggatgacatcacagctcaggtggtcctggagctcacccacctgtacgcacgcttccaggtcacacacttctcctggtactggctc

SEQ ID NO: 619545 - DNA, 120 bp, Artificial Sequence
  ENSG00000177595_15 (sequence is synthesized)
tggtacaccaccaagaactgtgtgggaggcctggctcggaaggcctgggagcggctgcggctgcaccgtgtgaacctcatcgctctgcagcggcgccgggaccctgagcaggtcctgctg

SEQ ID NO: 619546 - DNA, 120 bp, Artificial Sequence
  ENSG00000177595_16 (sequence is synthesized)
cagtgcctgccccgaaacaaggtggacgccacccttcggcggctgctggagcggtaccggggccccgagccctctgacacggtggagatgttcgagggcgaagagttctttgcggccttc

SEQ ID NO: 619547 - DNA, 120 bp, Artificial Sequence
  ENSG00000177595_17 (sequence is synthesized)
gagcgcggcatcgacgtggatgctgaccgccctgactgtgtggagggcagaatctgctttgtcttctactcgcacctgaagaatgtgaaggaggtatacgtgaccaccactctggaccgg

SEQ ID NO: 619548 - DNA, 120 bp, Artificial Sequence
  ENSG00000177595_18 (sequence is synthesized)
gaggctcaggctgtgcggggccaggtgtccttctaccgtggcgcggtgcctgtgcgggtgcccgaggaggctgaggctgcccggcagaggaagggcgcagacgccctgtggatggccact

SEQ ID NO: 619549 - DNA, 120 bp, Artificial Sequence
  ENSG00000177595_19 (sequence is synthesized)
ctgcccatcaagctgccgagacttcgagggtccgaggggccacggcggggggctggcctctccttggcacccttgaatctgggagatgccgagaccggctttctgacgcagagcaacctg

SEQ ID NO: 619550 - DNA, 120 bp, Artificial Sequence
  ENSG00000177595_20 (sequence is synthesized)
ctgagtgtggctgggcgtctgggtctggactggccagccgtggccctgcacctgggggtgtcctaccgggaggtgcagcgcatccggcacgagttccgggatgatctggatgagcagatc

SEQ ID NO: 619551 - DNA, 120 bp, Artificial Sequence
  ENSG00000177595_21 (sequence is synthesized)
cgtcacatgctcttctcctgggctgagcgccaggctgggcagccaggggctgtggggctcctggtgcaggccctggagcagagtgaccggcaggacgtggctgaagaggtgcgcgcagtc

SEQ ID NO: 619552 - DNA, 120 bp, Artificial Sequence
  ENSG00000177595_22 (sequence is synthesized)
ttggagctcggccgccgcaagtaccaggacagcatccgacgcatgggcttggcccccaaggaccccgctctgcctggctcctcggctccacagcccccagagcctgcccaggcctaggcc

SEQ ID NO: 619553 - DNA, 120 bp, Artificial Sequence
  ENSG00000177595_23 (sequence is synthesized)
ccacagacttttaggctggcccagatattccccagtggatgggcagagcccccaccttcaagtctctccagtgtgtggggacgggtccctgtgagcaacaaaactgcactgtttctttca

SEQ ID NO: 619554 - DNA, 120 bp, Artificial Sequence
  ENSG00000177595_24 (sequence is synthesized)
catgttctcaaaggcaaaccccagtcccagccccagctccaggccgcccctcccggctccccaggtgtgaactgttctgctcttggtcctgtccagccccatcgccatcctcggtgatca

SEQ ID NO: 619555 - DNA, 120 bp, Artificial Sequence
  ENSG00000177595_25 (sequence is synthesized)
ccacccccagtgtggggctggctgggccctggctcctggaccctgacgctgcccagtgggggtctctccagaccacagtgcagatgttgttcctggggaaggttgtgggtgatggttgtc

SEQ ID NO: 619556 - DNA, 120 bp, Artificial Sequence
  ENSG00000177595_26 (sequence is synthesized)
agctgagatgagccggtggtctccacccctgcctccttccatttgcgggcacctctccagtgtttctgtctgtctgtccctgtctggctggggtgggggtggggtgggaggtctgtgcct

SEQ ID NO: 619557 - DNA, 120 bp, Artificial Sequence
  ENSG00000177595_27 (sequence is synthesized)
ctcgagcagctgtttctctggctggcagggtcgatctgggacctcggaccctggctctgagggccacatccgcctccccccttcccaggagggcaacgccgggacacactgggtgcctgt

SEQ ID NO: 619558 - DNA, 120 bp, Artificial Sequence
  ENSG00000177595_28 (sequence is synthesized)
cagctgcctcttggttgtccctccacctccctggcctttgagactccctcagtggctttgtcagagttctctgagcccagctgtggaggagagtctgaaacagctgctctgggaggcggc

SEQ ID NO: 619559 - DNA, 120 bp, Artificial Sequence
  ENSG00000177595_29 (sequence is synthesized)
ggtgagggccacccaggcctgccggtggcgagtggagagctgctgccctgagccgtgcacctctgcccagagcctcaccctggcaccttccaccctgccccgtccctcctggatcctgct

SEQ ID NO: 619560 - DNA, 120 bp, Artificial Sequence
  ENSG00000177595_30 (sequence is synthesized)
tccctatgtccctggcaccttccaccccaccccgtccctcctggatcctgcttccctgtgtccctggcaacttccaccccaccccgtccctcctggatcctgctccctgtgtccctggca

SEQ ID NO: 619561 - DNA, 120 bp, Artificial Sequence
  ENSG00000177595_31 (sequence is synthesized)
ccttccaccccgccccgtctctcctggatcctgctccctgtgtccctgactggctgtgccctgacccaggctcctgtgacctcctctctcccccatcccagcggctctgggctcactgcc

SEQ ID NO: 619562 - DNA, 120 bp, Artificial Sequence
  ENSG00000177595_32 (sequence is synthesized)
ccatcaagctgccggtgggactgagggacagcagaggggcggggcaggaccgaggcccaggggtgaccagggtgacatggtggagttgggggtggagcccagggcttaatgcactttttc

SEQ ID NO: 619563 - DNA, 120 bp, Artificial Sequence
  ENSG00000177595_33 (sequence is synthesized)
ccccagggctgagccctggctgcctggagggcccacctgattctgacagaagtttcttccaggggaggtgggggaagggcaaacaccaggctggaaaggaaaggtctggccgcacctggc

SEQ ID NO: 619564 - DNA, 120 bp, Artificial Sequence
  ENSG00000177595_34 (sequence is synthesized)
cccaggagccgggaactcccccacactccgaggcagagtgtggtggggggtcctgggcaggtggacaggacccctctgtcgcccatcctctgcctgcagggatgatctggatgagcagat

SEQ ID NO: 619565 - DNA, 120 bp, Artificial Sequence
  ENSG00000177595_35 (sequence is synthesized)
ccccgacgcccgggggatcccgagcctgcctcggggctggggcccgccccccacgccgtctgagcggtgcgcggtgcaccaccctccccagtggaccgaactggaaaggccgggagaggt

SEQ ID NO: 619566 - DNA, 120 bp, Artificial Sequence
  ENSG00000177595_36 (sequence is synthesized)
ttcctccggggctcacgaattggggtcccggccccaggaccccgaagctgcccaatggctcacgccccaggccctcacccttacacggccttccctgactttcggggcgcagtcaccccc

SEQ ID NO: 619567 - DNA, 120 bp, Artificial Sequence
  ENSG00000177595_37 (sequence is synthesized)
gcggtaggggagggtcacggccttcctggtaaaacggatgtaaatagaagggggactcatctccaggactggggaacagcccctatgacctcgcagctccacggctccattggccagatt

SEQ ID NO: 619568 - DNA, 120 bp, Artificial Sequence
  ENSG00000177595_38 (sequence is synthesized)
tccaggaccaggactgaagcctcactaccccggctttgctgctcatagcgaggtctccctgcccggtgctcctgcgagccatggcggtcccattccccaaccctctttccagtggtgacc

SEQ ID NO: 619569 - DNA, 120 bp, Artificial Sequence
  ENSG00000177595_39 (sequence is synthesized)
caggcctccggggttcagggtgaccacaaggtctcccccactctgcagcccaggcccagatggcctggctctagagctccccactccatccagagtccctgtttccccaaagagaagggc

SEQ ID NO: 619570 - DNA, 120 bp, Artificial Sequence
  ENSG00000177595_40 (sequence is synthesized)
ggaacggcgcgtgggcccgggcagaagctgctggcggtaggctcgccttgactccttggtggttccctggccgcggcgaccggtggtcccacgtccagccgggctcagtgagcttccccg

SEQ ID NO: 619571 - DNA, 120 bp, Artificial Sequence
  ENSG00000177595_41 (sequence is synthesized)
gctcttatagcgtggggcgaagggccaccgaaactcgtgggggcgttggacgaagcgagtccaaagggacggcatctgccttcggtacctagcacccccagcatgccacgcggcgcctac

SEQ ID NO: 619572 - DNA, 120 bp, Artificial Sequence
  ENSG00000177595_42 (sequence is synthesized)
agctcccaacatggagcgcggccgccacgcccgggactcaacctttgccagcgaactgcaagtcccatggtgcaccgctgccggaagtggcctgcgccgcgggcctacccggaacggcgc

SEQ ID NO: 619573 - DNA, 77 bp, Artificial Sequence
  ENSG00000177595_43 (sequence is synthesized)
tggcggtaggctcgccttgactccttggtggttccctggccgcggcgaccggtggtcccacgtccagccgggctcag

SEQ ID NO: 619574 - DNA, 120 bp, Artificial Sequence
  ENSG00000177599_0 (sequence is synthesized)
aactgtcaatccggggaagcagaaggccgcactcagagtctctgcactcctttgttgctggggtccgttgcgttctgcatccagtccttgctgctccgagaggccccaggtgcctccgcc

SEQ ID NO: 619575 - DNA, 120 bp, Artificial Sequence
  ENSG00000177599_1 (sequence is synthesized)
acggctcctgtgacgctgtcacctgcgctgtgacctgctccggagtcataaagaggacgccgggacaccaagaagcagggaaatggacccagtggcctttgaggatgtggctgtgaactt

SEQ ID NO: 619576 - DNA, 120 bp, Artificial Sequence
  ENSG00000177599_2 (sequence is synthesized)
cacccaggaggagtgggccttgttgaatcctttccagaagatctctacagagatgtgatgcaggaaaccttcacgaacctcatctgtatagaaattttatgggagagagactctttgaga

SEQ ID NO: 619577 - DNA, 120 bp, Artificial Sequence
  ENSG00000177599_3 (sequence is synthesized)
gtgcagaaggtagtcagtgtggagaaactttcacccaggttccggaagacatgctgaacaagaaaactcttcctggagtaaaatcatgtgaaagtggtacatgtggagaaatcttcatgg

SEQ ID NO: 619578 - DNA, 120 bp, Artificial Sequence
  ENSG00000177599_4 (sequence is synthesized)
gatattcatcctttaataggaacatcagaactgacactggacaccaaccacataagtgtcagaaatttttagagaagccatataaacataaacaacgtaggaaagccttgagccatagcc

SEQ ID NO: 619579 - DNA, 120 bp, Artificial Sequence
  ENSG00000177599_5 (sequence is synthesized)
actgctttcgaacacatgaaaggcctcacactagagagaaaccttttgattgtaaggaatgtgaaaaatctttcatttctcctgcaagcattcgaagatatatggtaacgcacagtggag

SEQ ID NO: 619580 - DNA, 120 bp, Artificial Sequence
  ENSG00000177599_6 (sequence is synthesized)
atggaccttataaatgtaagttttgtgggaaagccttggattgtctcagtttataccttacccatgaacgaactcacactggagagaaacgatatgaatgtaaacaatgtggtaaagcct

SEQ ID NO: 619581 - DNA, 120 bp, Artificial Sequence
  ENSG00000177599_7 (sequence is synthesized)
tcagttggcacagttctgttcgaatccatgaaagaactcacactggggagaagccatatgaatgtaaggagtgtgggaaatcattcaatttttccagttcctttcgcagacatgaaagga

SEQ ID NO: 619582 - DNA, 120 bp, Artificial Sequence
  ENSG00000177599_8 (sequence is synthesized)
cacacacaggagagaagccgtacaaatgtaaggaatgtgggaaagccttcaattgtcccagttcttttcacaggcatgaaaggactcacacaggagaaaaaccctatgaatgtaaactat

SEQ ID NO: 619583 - DNA, 120 bp, Artificial Sequence
  ENSG00000177599_9 (sequence is synthesized)
atgggaaagcattatctcgccttataagctttcgaagacacatgagaatgcacactggagagaggcctcataaatgtaagatatgtgggaaagccttttactctcccagttcatttcaaa

SEQ ID NO: 619584 - DNA, 120 bp, Artificial Sequence
  ENSG00000177599_10 (sequence is synthesized)
atttcaaaggcatgaaagaagtcacactggagagaaaccctacaaatgcaagcaatgtgggaaagccttcacttgttccacttcgtttcaatatcatgaaaggactcacactggagagaa

SEQ ID NO: 619585 - DNA, 120 bp, Artificial Sequence
  ENSG00000177599_11 (sequence is synthesized)
cactggagagaaacccgatgggtgtaagcaatgtgggaaagccttcagatctgccaagtacattcgaatacatggaaggactcacactggtgagaaaccctatgaatgtaagcaatgtgg

SEQ ID NO: 619586 - DNA, 120 bp, Artificial Sequence
  ENSG00000177599_12 (sequence is synthesized)
catagacatgaaaggactcacgctggagaaaaaccttatgaatgtaagcattgtgggaaagccttcacttgttccatatatattagaatacatgaaagaattcacactggagagaaacct

SEQ ID NO: 619587 - DNA, 120 bp, Artificial Sequence
  ENSG00000177599_13 (sequence is synthesized)
taccaatgtaaggaatgtgggaaagccttcattcgttccagttactgtcgaaaacatgaaagaactcacactattaatatatgagagaaatgctattttttaatttttattttaatagag

SEQ ID NO: 619588 - DNA, 120 bp, Artificial Sequence
  ENSG00000177599_14 (sequence is synthesized)
gttggtcttgaactcctggcctcaagcatccctcccagcttgaagtgtcaataaaggaaggcaataaaatgtagagatggagttaggtgatgccacgctgggattcactggtggcctatc

SEQ ID NO: 619589 - DNA, 120 bp, Artificial Sequence
  ENSG00000177599_15 (sequence is synthesized)
gctgggattcactggtggcctatcttacatatgatttcgaaggcagacatgaggaaggccttagtcacattttagagccagccaaattcacatgggctgtgtggccccctgattctagcc

SEQ ID NO: 619590 - DNA, 120 bp, Artificial Sequence
  ENSG00000177599_16 (sequence is synthesized)
cattttcctgattctctggcttgtcaatcaagagtatcctccaaatctcttgactttccttttttcagaggtgtaggtttccaaagatgtccccagaagctccacattcaagttctatct

SEQ ID NO: 619591 - DNA, 120 bp, Artificial Sequence
  ENSG00000177599_17 (sequence is synthesized)
acagtttggtttttctttaagtattgtaatgtacataccagagagataatgcagactgtcatgggtggggaatgttctctgatgctcaactcccctagtctgcagattgagttggtagga

SEQ ID NO: 619592 - DNA, 120 bp, Artificial Sequence
  ENSG00000177599_18 (sequence is synthesized)
ggtgtgatttgtttacatgcacctttgttcctgctggtagtgaccttgttcttgattcagcctgacagctactatgctgccatcagaaccaacttgatgagagctctgctgccctgtgca

SEQ ID NO: 619593 - DNA, 120 bp, Artificial Sequence
  ENSG00000177599_19 (sequence is synthesized)
gtgactggtctcatccaggactctcatgtgagaaggaacaccttgctctggtcaggaaatgtccagtgtttcctgttatccacaggagaatgtaatgcctcagttcattttcagttatct

SEQ ID NO: 619594 - DNA, 120 bp, Artificial Sequence
  ENSG00000177599_20 (sequence is synthesized)
tcattttcagttatctttgattatatgtgattgacaatgtgtatttttgagggagcaaagatttctgtacatatttcttaaaaatagtttattcagctgggtgcagtggctcatgcctgt

SEQ ID NO: 619595 - DNA, 65 bp, Artificial Sequence
  ENSG00000177599_21 (sequence is synthesized)
acaagagagcaatactctgtctcaaaaaaaaaaaaaaaggtttattcactgtttttcagttgtgt

SEQ ID NO: 619596 - DNA, 120 bp, Artificial Sequence
  ENSG00000177599_22 (sequence is synthesized)
aaaaaaaaaaaaaggtttattcactgtttttcagttgtgtacttgcaaatgtttttctcttttttttgtatactgagaagctctattaaaatatcccttgtcaacatggatcagatcaaa

SEQ ID NO: 619597 - DNA, 120 bp, Artificial Sequence
  ENSG00000177599_23 (sequence is synthesized)
ggagctcccctgggtgtttcccgggcagcctgccctctactgcaggtggcctccagctgctcagaacagctgcggaaggaatgtggatcctgagaagctacagagccctggaaagcagga

SEQ ID NO: 619598 - DNA, 120 bp, Artificial Sequence
  ENSG00000177599_24 (sequence is synthesized)
tgaagaaaaggcttttataagttgcatgaggaggcaaacaggattaaatacttgattagttacagtgatgctgtcgccgtatgtggacttgtcaacctgaaataaaagaatcagattcca

SEQ ID NO: 619599 - DNA, 120 bp, Artificial Sequence
  ENSG00000177599_25 (sequence is synthesized)
ggttacagaatgccctcgtttttgtcctgctccatcatggtcactgaggagcactgcttcacactgcaggtgtctgacatggcttaagatttggccttgtggtgaggggaggcagctccc

SEQ ID NO: 619600 - DNA, 120 bp, Artificial Sequence
  ENSG00000177599_26 (sequence is synthesized)
agacttgtggacctgtttttgctttacttattctccaaaacctaagatatttcttagagtgtatgaacactgttccacaaaatgctccagttaaaaatatataaaatcacttactcctta

SEQ ID NO: 619601 - DNA, 120 bp, Artificial Sequence
  ENSG00000177600_0 (sequence is synthesized)
ccttttcctccctgtcgccaccgaggtcgcacgcgtgagacttctccgccgcctccgccgcagacgccgccgcgatgcgctacgtcgcctcctacctgctggctgccctagggggcaact

SEQ ID NO: 619602 - DNA, 120 bp, Artificial Sequence
  ENSG00000177600_1 (sequence is synthesized)
acattgaagacgtcattgcccagggtattggcaagcttgccagtgtacctgctggtggggctgtagccgtctctgctgccccaggctctgcagcccctgctgctggttctgcccctgctg

SEQ ID NO: 619603 - DNA, 120 bp, Artificial Sequence
  ENSG00000177600_2 (sequence is synthesized)
cagcagaggagaagaaagatgagaagaaggaggagtctgaagagtcagatgatgacatgggatttggcctttttgattaaattcctgctcccctgcaaataaagcctttttacacatctc

SEQ ID NO: 619604 - DNA, 120 bp, Artificial Sequence
  ENSG00000177600_3 (sequence is synthesized)
ccaccgaggtcgcacgcgtgagacttctccgccgcctccgccgcagacgccgccgcgtgagtgtggtgaccgggcccggggtgccggctggggacgcggagtccgtggggatgcggggtg

SEQ ID NO: 619605 - DNA, 120 bp, Artificial Sequence
  ENSG00000177600_4 (sequence is synthesized)
ggcggcggggtatttttgggacggaggcctacgggccgagccacgcgcggcctcgcccggcggccccgggatgggccggcaggaggccgccggggtaactccgccgtcgcgtcctctccg

SEQ ID NO: 619606 - DNA, 120 bp, Artificial Sequence
  ENSG00000177600_5 (sequence is synthesized)
tgccctgtgtccttttgtcagtcctaagtctaagaaagctagtgtccatttatttttatatcacttcccaagtgaggctggtggctccctttgggcagtgcagttctggaaacttcaggg

SEQ ID NO: 619607 - DNA, 120 bp, Artificial Sequence
  ENSG00000177600_6 (sequence is synthesized)
cctattcccatgtggggaacccagtcctgctgtgactctgggagggagagggccggggatacaatcgtacattcctggtaacagccctgtgattgtctgcttcaggttatcagtgagctg

SEQ ID NO: 619608 - DNA, 120 bp, Artificial Sequence
  ENSG00000177600_7 (sequence is synthesized)
atcagtgagctgaatggaaaaaacattgaagacgtcattgcccagggtgagttgatgtggacgggctttcgtttgttttcatggtccatcctaatccctgccggtccatctgtggcctgc

SEQ ID NO: 619609 - DNA, 120 bp, Artificial Sequence
  ENSG00000177600_8 (sequence is synthesized)
caggtttcgcttgtggaccagagcaccctagaagcctcacccgaggagtgagcagggctccagtgggctcacgtcatgggcacttctagacactctcaggagcagggcagcagggggcac

SEQ ID NO: 619610 - DNA, 120 bp, Artificial Sequence
  ENSG00000177600_9 (sequence is synthesized)
gtgtcccatacaggcgattcttctgcctgatccggccacatgctggagggttcggggagaggctcgtttcagtctagttggcgatttcttggatagagaagttatcagtgagctgaatgg

SEQ ID NO: 619611 - DNA, 120 bp, Artificial Sequence
  ENSG00000177600_10 (sequence is synthesized)
ctggtggaacttgtttggaagttgagctgttggggcagctgttcttgtcttccatgcatgtgaccacgacagggccagctcagcaaacgggccaagccatgaacacagcgttgtggccag

SEQ ID NO: 619612 - DNA, 120 bp, Artificial Sequence
  ENSG00000177600_11 (sequence is synthesized)
agatgtggatactggggcagcacactcattccctacctagttatgaacatgtctgtccagtggacctctgagggtggaggtggggaaattgggcaggcaggcagtgtgggcctaattcct

SEQ ID NO: 619613 - DNA, 120 bp, Artificial Sequence
  ENSG00000177600_12 (sequence is synthesized)
ttgaggagtggctcagggagggagtgttcaggaagaacgggagacactggcatatggtgggtccagatatgttgggtgccatgtgccatctctggtgccatctaacttccctgtggaaca

SEQ ID NO: 619614 - DNA, 120 bp, Artificial Sequence
  ENSG00000177602_0 (sequence is synthesized)
gtttgcgtttgaacctcttggcgggtgccggccatggcggcttcgctcccgggacctgggagccggcttttccgcacatatggggctgcggacggcaggagacagcggcggccgggccgg

SEQ ID NO: 619615 - DNA, 120 bp, Artificial Sequence
  ENSG00000177602_1 (sequence is synthesized)
gaagccgcgcagtggttcccgccgcaggaccggaggcgtttcttcaacagcagcggcagcagcgacgccagcatcggcgacccctcgcagtccgacgatcctgacgatcccgacgacccc

SEQ ID NO: 619616 - DNA, 120 bp, Artificial Sequence
  ENSG00000177602_2 (sequence is synthesized)
gacttccccggcagcccggtgaggcggcggcggaggcgtcccggcggccgagtgcccaaggaccggcccagcctgaccgtgaccccaaagcgctggaagctgcgagctcgcccaagccta

SEQ ID NO: 619617 - DNA, 120 bp, Artificial Sequence
  ENSG00000177602_3 (sequence is synthesized)
accgtgaccccaagacgcctggggctgcgagctcggcccccgcagaagtgcagcacaccctgcggcccgctccgacttccgcccttccccagccgcgactccggccgcctcagcccggac

SEQ ID NO: 619618 - DNA, 120 bp, Artificial Sequence
  ENSG00000177602_4 (sequence is synthesized)
ctcagcgtgtgcggccagcccagggacggcgacgagctgggcatcagtgcctccctgttcagctctctggcctcgccctgccccgggtccccaacgccaagggacagtgtcatctcgatc

SEQ ID NO: 619619 - DNA, 120 bp, Artificial Sequence
  ENSG00000177602_5 (sequence is synthesized)
ggcacctccgcctgtctggttgcagcctcagccgtcccgagcggcctccacctcccagaagtctccctggaccgagcatctctcccctgctcccaggaggaagcgacaggaggagccaag

SEQ ID NO: 619620 - DNA, 120 bp, Artificial Sequence
  ENSG00000177602_6 (sequence is synthesized)
gacaccaggatggtccaccaaacccgcgccagcctcaggtcagttctctttggccttatgaactcaggaacccctgaggattctgagtttcgggcagatgggaagaatatgagagagtcc

SEQ ID NO: 619621 - DNA, 120 bp, Artificial Sequence
  ENSG00000177602_7 (sequence is synthesized)
tgctgtaaaaggaaactggtggtgggaaatggaccagagggtccaggtctgtcaagcacaggcaagaggagggccacaggccaggactcttgtcaagagagagggcttcaagaggccgtc

SEQ ID NO: 619622 - DNA, 120 bp, Artificial Sequence
  ENSG00000177602_8 (sequence is synthesized)
cggagagagcatcaggaggccagtgttcccaagggccgcattgtgccaaggggaatagacaggctggagagaactagatcaagccggaagagcaaacatcaggaggcaacggaaacctct

SEQ ID NO: 619623 - DNA, 120 bp, Artificial Sequence
  ENSG00000177602_9 (sequence is synthesized)
ctcctccattcccaccgctttaaaaagggccaaaagctgggaaaagattcgttccccacccaggacctgactcctttacagaatgtctgcttttggaccaaaaccagggcttccttcagt

SEQ ID NO: 619624 - DNA, 120 bp, Artificial Sequence
  ENSG00000177602_10 (sequence is synthesized)
ttccacaagaagaaaattgtgactgatgtgtcagaggtctgcagcatctataccactgccacttctctctctggatccctcctatcagaatgttcaaaccggcctgtcatgaacagaaca

SEQ ID NO: 619625 - DNA, 120 bp, Artificial Sequence
  ENSG00000177602_11 (sequence is synthesized)
atttgctaagccccttaaacactctaagtatttcaaacaaaaaggcatctgatgctgaaaaggtttatggggaatgcagtcagaagggtcctgtcccctttagccattgccttcccacag

SEQ ID NO: 619626 - DNA, 120 bp, Artificial Sequence
  ENSG00000177602_12 (sequence is synthesized)
aaaaactgcaacgctgtgagaagattggggaaggggtgtttggcgaagtgtttcaaacaattgctgatcacacacccgtagccataaaaatcattgctattgaaggaccagatttagtca

SEQ ID NO: 619627 - DNA, 120 bp, Artificial Sequence
  ENSG00000177602_13 (sequence is synthesized)
atggatcccatcagaaaacctttgaggaaatcctgccagagatcatcatctccaaagagttgagcctcttatccggtgaagtgtgcaaccgcacagaaggctttatcgggctgaactcag

SEQ ID NO: 619628 - DNA, 120 bp, Artificial Sequence
  ENSG00000177602_14 (sequence is synthesized)
tgcactgtgtccagggatcttaccctcccttgctcctcaaagcctgggatcactataattcaaccaaaggctctgcaaatgaccggcctgatttttttaaagacgaccagctcttcattg

SEQ ID NO: 619629 - DNA, 120 bp, Artificial Sequence
  ENSG00000177602_15 (sequence is synthesized)
tgctggaatttgagtttggagggattgacttagagcaaatgcgaaccaagttgtcttccttggctactgcaaagagcattctacaccagctcacagcctccctcgcagtggcagaggcat

SEQ ID NO: 619630 - DNA, 120 bp, Artificial Sequence
  ENSG00000177602_16 (sequence is synthesized)
cactgcgctttgagcaccgagacttacactgggggaacgtgctcttaaagaaaaccagcctcaaaaaactccactacaccctcaatgggaagagcagcactatccccagctgtgggttgc

SEQ ID NO: 619631 - DNA, 120 bp, Artificial Sequence
  ENSG00000177602_17 (sequence is synthesized)
aagtgagcatcattgactacaccctgtcgcgcttggaacgggatgggattgtggttttctgtgacgtttccatggatgaggacctgtttaccggtgacggtgactaccagtttgacatct

SEQ ID NO: 619632 - DNA, 120 bp, Artificial Sequence
  ENSG00000177602_18 (sequence is synthesized)
acaggctcatgaagaaggagaataacaaccgctggggtgaatatcacccttatagtaatgtgctctggttacattacctgacagacaagatgctgaaacaaatgaccttcaagactaaat

SEQ ID NO: 619633 - DNA, 120 bp, Artificial Sequence
  ENSG00000177602_19 (sequence is synthesized)
gtaacactcctgccatgaagcaaattaagagaaaaatccaggagttccacaggacaatgctgaacttcagctctgccactgacttgctctgccagcacagtctgtttaagtaagctaaat

SEQ ID NO: 619634 - DNA, 120 bp, Artificial Sequence
  ENSG00000177602_20 (sequence is synthesized)
gtatcttactgccccgaaatgagaggagactggtcttgaagcctctggtgctgtttcaacctccatccccacaggagggtggaactcccattctcacaggtttccagtcagcttttcaaa

SEQ ID NO: 619635 - DNA, 120 bp, Artificial Sequence
  ENSG00000177602_21 (sequence is synthesized)
caagaattttgtttccaaatggaaactgaaatatttgttgaaatgtttaaatttgctgataacaaatgttctgaaagaagtaaactagccgggcacagtggcgtgcgcctgtagtcccag

SEQ ID NO: 619636 - DNA, 73 bp, Artificial Sequence
  ENSG00000177602_22 (sequence is synthesized)
tatctagcctggtcaacatagcaagacccctgtctctatttttttaaataaataaactacatgtgaaaacaaa

SEQ ID NO: 619637 - DNA, 120 bp, Artificial Sequence
  ENSG00000177606_0 (sequence is synthesized)
gctcagagttgcactgagtgtggctgaagcagcgaggcgggagtggaggtgcgcggagtcaggcagacagacagacacagccagccagccaggtcggcagtatagtccgaactgcaaatc

SEQ ID NO: 619638 - DNA, 120 bp, Artificial Sequence
  ENSG00000177606_1 (sequence is synthesized)
ttattttcttttcaccttctctctaactgcccagagctagcgcctgtggctcccgggctggtgtttcgggagtgtccagagagcctggtctccagccgcccccgggaggagagccctgct

SEQ ID NO: 619639 - DNA, 120 bp, Artificial Sequence
  ENSG00000177606_2 (sequence is synthesized)
gcccaggcgctgttgacagcggcggaaagcagcggtacccacgcgcccgccgggggaagtcggcgagcggctgcagcagcaaagaactttcccggctgggaggaccggagacaagtggca

SEQ ID NO: 619640 - DNA, 120 bp, Artificial Sequence
  ENSG00000177606_3 (sequence is synthesized)
gagtcccggagccaacttttgcaagcctttcctgcgtcttaggcttctccacggcggtaaagaccagaaggcggcggagagccacgcaagagaagaaggacgtgcgctcagcttcgctcg

SEQ ID NO: 619641 - DNA, 120 bp, Artificial Sequence
  ENSG00000177606_4 (sequence is synthesized)
caccggttgttgaacttgggcgagcgcgagccgcggctgccgggcgccccctccccctagcagcggaggaggggacaagtcgtcggagtccgggcggccaagacccgccgccggccggcc

SEQ ID NO: 619642 - DNA, 120 bp, Artificial Sequence
  ENSG00000177606_5 (sequence is synthesized)
actgcagggtccgcactgatccgctccgcggggagagccgctgctctgggaagtgagttcgcctgcggactccgaggaaccgctgcgcacgaagagcgctcagtgagtgaccgcgacttt

SEQ ID NO: 619643 - DNA, 120 bp, Artificial Sequence
  ENSG00000177606_6 (sequence is synthesized)
tcaaagccgggtagcgcgcgcgagtcgacaagtaagagtgcgggaggcatcttaattaaccctgcgctccctggagcgagctggtgaggagggcgcagcggggacgacagccagcgggtg

SEQ ID NO: 619644 - DNA, 120 bp, Artificial Sequence
  ENSG00000177606_7 (sequence is synthesized)
cgtgcgctcttagagaaactttccctgtcaaaggctccggggggcgcgggtgtcccccgcttgccacagccctgttgcggccccgaaacttgtgcgcgcagcccaaactaacctcacgtg

SEQ ID NO: 619645 - DNA, 120 bp, Artificial Sequence
  ENSG00000177606_8 (sequence is synthesized)
aagtgacggactgttctatgactgcaaagatggaaacgaccttctatgacgatgccctcaacgcctcgttcctcccgtccgagagcggaccttatggctacagtaaccccaagatcctga

SEQ ID NO: 619646 - DNA, 120 bp, Artificial Sequence
  ENSG00000177606_9 (sequence is synthesized)
aacagagcatgaccctgaacctggccgacccagtggggagcctgaagccgcacctccgcgccaagaactcggacctcctcacctcgcccgacgtggggctgctcaagctggcgtcgcccg

SEQ ID NO: 619647 - DNA, 120 bp, Artificial Sequence
  ENSG00000177606_10 (sequence is synthesized)
agctggagcgcctgataatccagtccagcaacgggcacatcaccaccacgccgacccccacccagttcctgtgccccaagaacgtgacagatgagcaggagggcttcgccgagggcttcg

SEQ ID NO: 619648 - DNA, 120 bp, Artificial Sequence
  ENSG00000177606_11 (sequence is synthesized)
tgcgcgccctggccgaactgcacagccagaacacgctgcccagcgtcacgtcggcggcgcagccggtcaacggggcaggcatggtggctcccgcggtagcctcggtggcagggggcagcg

SEQ ID NO: 619649 - DNA, 120 bp, Artificial Sequence
  ENSG00000177606_12 (sequence is synthesized)
gcagcggcggcttcagcgccagcctgcacagcgagccgccggtctacgcaaacctcagcaacttcaacccaggcgcgctgagcagcggcggcggggcgccctcctacggcgcggccggcc

SEQ ID NO: 619650 - DNA, 120 bp, Artificial Sequence
  ENSG00000177606_13 (sequence is synthesized)
ccccagcagcagcagcagccgccgcaccacctgccccagcagatgcccgtgcagcacccgcggctgcaggccctgaaggaggagcctcagacagtgcccgagatgcccggcgagacaccg

SEQ ID NO: 619651 - DNA, 120 bp, Artificial Sequence
  ENSG00000177606_14 (sequence is synthesized)
cccctgtcccccatcgacatggagtcccaggagcggatcaaggcggagaggaagcgcatgaggaaccgcatcgctgcctccaagtgccgaaaaaggaagctggagagaatcgcccggctg

SEQ ID NO: 619652 - DNA, 120 bp, Artificial Sequence
  ENSG00000177606_15 (sequence is synthesized)
gaggaaaaagtgaaaaccttgaaagctcagaactcggagctggcgtccacggccaacatgctcagggaacaggtggcacagcttaaacagaaagtcatgaaccacgttaacagtgggtgc

SEQ ID NO: 619653 - DNA, 120 bp, Artificial Sequence
  ENSG00000177606_16 (sequence is synthesized)
caactcatgctaacgcagcagttgcaaacattttgaagagagaccgtcgggggctgaggggcaacgaagaaaaaaaataacacagagagacagacttgagaacttgacaagttgcgacgg

SEQ ID NO: 619654 - DNA, 120 bp, Artificial Sequence
  ENSG00000177606_17 (sequence is synthesized)
agagaaaaaagaagtgtccgagaactaaagccaagggtatccaagttggactgggttgcgtcctgacggcgcccccagtgtgcacgagtgggaaggacttggcgcgccctcccttggcgt

SEQ ID NO: 619655 - DNA, 120 bp, Artificial Sequence
  ENSG00000177606_18 (sequence is synthesized)
ggagccagggagcggccgcctgcgggctgccccgctttgcggacgggctgtccccgcgcgaacggaacgttggacttttcgttaacattgaccaagaactgcatggacctaacattcgat

SEQ ID NO: 619656 - DNA, 120 bp, Artificial Sequence
  ENSG00000177606_19 (sequence is synthesized)
ctcattcagtattaaaggggggagggggagggggttacaaactgcaatagagactgtagattgcttctgtagtactccttaagaacacaaagcggggggagggttggggaggggcggcag

SEQ ID NO: 619657 - DNA, 120 bp, Artificial Sequence
  ENSG00000177606_20 (sequence is synthesized)
gagggaggtttgtgagagcgaggctgagcctacagatgaactctttctggcctgccttcgttaactgtgtatgtacatatatatattttttaatttgatgaaagctgattactgtcaata

SEQ ID NO: 619658 - DNA, 120 bp, Artificial Sequence
  ENSG00000177606_21 (sequence is synthesized)
aacagcttcatgcctttgtaagttatttcttgtttgtttgtttgggtatcctgcccagtgttgtttgtaaataagagatttggagcactctgagtttaccatttgtaataaagtatataa

SEQ ID NO: 619659 - DNA, 120 bp, Artificial Sequence
  ENSG00000177606_22 (sequence is synthesized)
tttttttatgttttgtttctgaaaattccagaaaggatatttaagaaaatacaataaactattggaaagtactcccctaacctcttttctgcatcatctgtagatactagctatctaggt

SEQ ID NO: 619660 - DNA, 120 bp, Artificial Sequence
  ENSG00000177606_23 (sequence is synthesized)
ggagttgaaagagttaagaatgtcgattaaaatcactctcagtgcttcttactattaagcagtaaaaactgttctctattagactttagaaataaatgtacctgatgtacctgatgctat

SEQ ID NO: 619661 - DNA, 120 bp, Artificial Sequence
  ENSG00000177606_24 (sequence is synthesized)
ggtcaggttatactcctcctcccccagctatctatatggaattgcttaccaaaggatagtgcgatgtttcaggaggctggaggaaggggggttgcagtggagagggacagcccactgaga

SEQ ID NO: 619662 - DNA, 120 bp, Artificial Sequence
  ENSG00000177606_25 (sequence is synthesized)
agtcaaacatttcaaagtttggattgtatcaagtggcatgtgctgtgaccatttataatgttagtagaaattttacaataggtgcttattctcaaagcaggaattggtggcagattttac

SEQ ID NO: 619663 - DNA, 120 bp, Artificial Sequence
  ENSG00000177606_26 (sequence is synthesized)
aaaagatgtatccttccaatttggaatcttctctttgacaattcctagataaaaagatggcctttgcttatgaatatttataacagcattcttgtcacaataaatgtattcaaataccaa

SEQ ID NO: 619664 - DNA, 120 bp, Artificial Sequence
  ENSG00000177613_0 (sequence is synthesized)
agacgcctcgaagaatccgctatcggctgtctgcacaaccggaatcatgtcgagtttggcggtgagagacccggcaatggatcgatcactgcgttccgtgttcgtggggaacattccata

SEQ ID NO: 619665 - DNA, 120 bp, Artificial Sequence
  ENSG00000177613_1 (sequence is synthesized)
tgaggcaactgaggagcagttaaaggacattttctcggaggttggttctgttgtcagtttccggctggtatacgatagagagacgggaaaacccaagggctatggcttctgcgaatacca

SEQ ID NO: 619666 - DNA, 120 bp, Artificial Sequence
  ENSG00000177613_2 (sequence is synthesized)
agaccaggagaccgcgcttagtgccatgcggaacctcaatgggcgggagttcagtgggagagcgcttcgggtggacaatgctgccagtgaaaagaataaggaggagttaaagagccttgg

SEQ ID NO: 619667 - DNA, 120 bp, Artificial Sequence
  ENSG00000177613_3 (sequence is synthesized)
gcctgcagcgcccattattgactcaccctatggggatcccatcgatccagaagatgcccctgaatcgattaccagagcagtagccagtctccccccggagcagatgtttgagctgatgaa

SEQ ID NO: 619668 - DNA, 120 bp, Artificial Sequence
  ENSG00000177613_4 (sequence is synthesized)
gcagatgaagctctgtgtccaaaacagccaccaggaagctcgaaacatgttacttcaaaatccacaactggcttatgcactgttgcaggcacaagtagtgatgagaatcatggatccaga

SEQ ID NO: 619669 - DNA, 120 bp, Artificial Sequence
  ENSG00000177613_5 (sequence is synthesized)
gattgctctgaaaattctgcatcggaagatacatgtcacaccactgatcccaggcaaatctcagtctgtgtctgtctctggccctggccctggccctggccctgggctctgcccaggacc

SEQ ID NO: 619670 - DNA, 120 bp, Artificial Sequence
  ENSG00000177613_6 (sequence is synthesized)
taatgttctgctgaaccagcagaatcctccagctcctcagcctcagcatttggctagaagacctgtgaaggacattcctcctctgatgcagactcctatccagggtggaattccagctcc

SEQ ID NO: 619671 - DNA, 120 bp, Artificial Sequence
  ENSG00000177613_7 (sequence is synthesized)
agggccaataccagctgcagttcccggagctggtcctggttccttaactcctggaggagcaatgcagccccaacttggaatgccaggggttggcccagtgcctttagagcggggacaagt

SEQ ID NO: 619672 - DNA, 120 bp, Artificial Sequence
  ENSG00000177613_8 (sequence is synthesized)
gcagatgtcagatcctagagctcctatacctcgcggacccgtgactcctggtggtctgcctcctcgaggactgttaggagatgctccaaatgacccacgtggagggactttgctttcagt

SEQ ID NO: 619673 - DNA, 120 bp, Artificial Sequence
  ENSG00000177613_9 (sequence is synthesized)
cactggagaagtggagcccagaggttatctgggtccaccccatcagggtccccccatgcatcatgcctctggtcatgacactcgtggcccttcctcacatgagatgaggggagggccatt

SEQ ID NO: 619674 - DNA, 120 bp, Artificial Sequence
  ENSG00000177613_10 (sequence is synthesized)
aggagatcccagactgctaattggagagcccagaggccccatgatagatcaaaggggtctacctatggatggtagaggtggtagagattctcgagcgatggagactcgtgccatggaaac

SEQ ID NO: 619675 - DNA, 120 bp, Artificial Sequence
  ENSG00000177613_11 (sequence is synthesized)
tgaggtcttagagacacgtgtaatggagaggagaggaatggagacctgtgcgatggaaaccagagggatggaagcaaggggcatggatgcaagaggattggagatgaggggccctgtccc

SEQ ID NO: 619676 - DNA, 120 bp, Artificial Sequence
  ENSG00000177613_12 (sequence is synthesized)
cagttcaagaggccctatgactggtggaattcagggtcctggtcccattaatataggggcaggtggccctcctcagggacccagacaggtcccaggcatttcaggggtggggaatcctgg

SEQ ID NO: 619677 - DNA, 120 bp, Artificial Sequence
  ENSG00000177613_13 (sequence is synthesized)
agctggtatgcagggtacaggcatacaaggaacaggcatgcagggagcaggcatacaaggaggagggatgcagggggcaggcatacaaggagtcagtatacaaggaggaggtatacaagg

SEQ ID NO: 619678 - DNA, 120 bp, Artificial Sequence
  ENSG00000177613_14 (sequence is synthesized)
aggaggtatacagggggcaagcaagcaaggtggaagccagcctagcagttttagtcctgggcagagccaggtcactccacaggatcaggagaaggcagctttgatcatgcaggttcttca

SEQ ID NO: 619679 - DNA, 120 bp, Artificial Sequence
  ENSG00000177613_15 (sequence is synthesized)
actgactgcagatcagattgccatgctgccccctgagcaaaggcagagtatcctgattttaaaggaacaaatccagaaatccactggagcgtcttgaaaggttttagaaaatatttggct

SEQ ID NO: 619680 - DNA, 120 bp, Artificial Sequence
  ENSG00000177613_16 (sequence is synthesized)
gtagtctcaaattttattctgtagcatggagaatgggtgcaaaaagctgacttctgtatccccacacttggattagggtttccctcctcctagaacctaatcttattttttgttcttttt

SEQ ID NO: 619681 - DNA, 120 bp, Artificial Sequence
  ENSG00000177613_17 (sequence is synthesized)
tgagggtggggggaggagggagtgcgtctgttcactttaagttactttaaaataactctgaacatgattatattatgccaaataagattacaaagaataagcagcaatattgaagcatct

SEQ ID NO: 619682 - DNA, 120 bp, Artificial Sequence
  ENSG00000177613_18 (sequence is synthesized)
acagtatgttaactacattttttaaatgtcgagtaaaacttcgtgaaaactgctcataaagactaaaagttgacctgttaaaacgttaatgtactaagatagttttaagatttttggttg

SEQ ID NO: 619683 - DNA, 120 bp, Artificial Sequence
  ENSG00000177613_19 (sequence is synthesized)
tataacaaaataaaagtttacccaaaagtataagatacattttttggtaaaccatttaaaatacaaaatcctattttggaggcaataggataagcattgtcttagtgttttagaattatt

SEQ ID NO: 619684 - DNA, 120 bp, Artificial Sequence
  ENSG00000177613_20 (sequence is synthesized)
tttgaaacagagttaacaggataaggttacacttgtattagaattgtttttttctaaagttatgttacctgaaaaatcaaggagtgcacctgatttactgttgcttcatttatcccatcc

SEQ ID NO: 619685 - DNA, 120 bp, Artificial Sequence
  ENSG00000177613_21 (sequence is synthesized)
ttcagagaccagcaaggttctgccaggccccaagcatctgagcatgatgattttgctgtgacaattctaagatcaaccaggttacttaagtccgctctgatgaaacccagtctctcaata

SEQ ID NO: 619686 - DNA, 120 bp, Artificial Sequence
  ENSG00000177613_22 (sequence is synthesized)
ccttcctatttctcaatagtctttaagccctaaatctgagtcagtaattctctaaaaatccttcccaaaaatcagtgtctagggactggttgatctagatgagttataaatggtatttga

SEQ ID NO: 619687 - DNA, 120 bp, Artificial Sequence
  ENSG00000177613_23 (sequence is synthesized)
cttttcataagtagtggaaggtttcactaagtaaagatctgagtttcttggtatctgacgtttgtatacagatggtgtccatttgctcaaccagacaggagttaacttgtattagaattg

SEQ ID NO: 619688 - DNA, 120 bp, Artificial Sequence
  ENSG00000177613_24 (sequence is synthesized)
ttttttctaaagttatgttacctgagaaattaaggactgcacctggtttaatgttgcttcacttatcccaccctacagagaccagcaaggttctgccaggcctcgagcatccaagcatga

SEQ ID NO: 619689 - DNA, 120 bp, Artificial Sequence
  ENSG00000177613_25 (sequence is synthesized)
ttttgctgtgacaaatctaaaatcaaccaggctacttaagtctgctctgatgaaacccaataatctctcaataccttcctatttctcaatagtctttaaaccctaaatctgagtcagtaa

SEQ ID NO: 619690 - DNA, 120 bp, Artificial Sequence
  ENSG00000177613_26 (sequence is synthesized)
ttctcttacatccttcccaaaaatcagtgtctagggactagttgatctggatgagttatacatgatatttgacttttcataagtagtggaaggtttcactaagtaaaactctcagtttct

SEQ ID NO: 619691 - DNA, 120 bp, Artificial Sequence
  ENSG00000177613_27 (sequence is synthesized)
tggtatctggctttcttatacagatggtgtccatttgctccaccagacaggagttaaaaacctttaaagagcatttaacatgccttttagttttcttatttcataatctacttttctatc

SEQ ID NO: 619692 - DNA, 120 bp, Artificial Sequence
  ENSG00000177613_28 (sequence is synthesized)
attaatcatcttaccaggaataatcaaggcccaggtaggtagaagtttttatatagcctgaatactcacttgacttactgctcattttactttttgcatggaatacagccatttagtcct

SEQ ID NO: 619693 - DNA, 120 bp, Artificial Sequence
  ENSG00000177613_29 (sequence is synthesized)
aatatacataccaatgagacaattaaaaattggttggaagatggagcttatcacattgtgctactacgactttattttttcttgaaaataaagccttgaggatgtgaacataaatgttgg

SEQ ID NO: 619694 - DNA, 120 bp, Artificial Sequence
  ENSG00000177613_30 (sequence is synthesized)
tatcataaaacaagtagtaataaaagcataaattatcaaatatcaggtgatcttactatggagaagaaaaaccaatatctagttacagatgaaaaaatgtttaatacaaagagctgaaaa

SEQ ID NO: 619695 - DNA, 120 bp, Artificial Sequence
  ENSG00000177613_31 (sequence is synthesized)
tgtagaaattgagttatcttccctttgcaaaatttttacactttaaattagtaattctttgtttgcaaggttttcatccctatgctgttgttttctactacctgttttactcttgttcat

SEQ ID NO: 619696 - DNA, 120 bp, Artificial Sequence
  ENSG00000177613_32 (sequence is synthesized)
actgctactttcccatgtttcctatatgcctcccctatattggagaggataactcgcgtttacatatgtgatagttatgcttaatactaattcacagagttggctcgatcattttgagat

SEQ ID NO: 619697 - DNA, 120 bp, Artificial Sequence
  ENSG00000177613_33 (sequence is synthesized)
tctagttgctttatctcaaagctttcactgaagggctgtaactgaaaattattaaatgttagtctttagtcaaatctctgcattgtttcatgcagaaaataaagatacaattaaggctga

SEQ ID NO: 619698 - DNA, 120 bp, Artificial Sequence
  ENSG00000177614_0 (sequence is synthesized)
ggccatggccgagggcggcgggggcgcgcggaggagggcgccggcgctgctcgaggctgcccgcgcgcgctacgagagcctgcacatctcggacgacgtgttcggcgagtccggcccgga

SEQ ID NO: 619699 - DNA, 120 bp, Artificial Sequence
  ENSG00000177614_1 (sequence is synthesized)
tgcacatctcggacgacgtgttcggcgagtccggcccggacagcggcgggaaccccttctacagcacctcggccgcctcgcgctcctcctcggccgcctcctcggacgacgagcgcgagc

SEQ ID NO: 619700 - DNA, 120 bp, Artificial Sequence
  ENSG00000177614_2 (sequence is synthesized)
ccccgcgccccggacgcacaggagccggaggaggacgaggccggcgcgggctggagcgcagcgctgcgggaccgcccgcccccgcgcttcgaggataccggcggtcccacccgaaagatg

SEQ ID NO: 619701 - DNA, 120 bp, Artificial Sequence
  ENSG00000177614_3 (sequence is synthesized)
tcgaggataccggcggtcccacccgaaagatgccccccagcgccagtgccgtggacttcttccagctctttgtcccagacaacgtcctcaagaacatggtggtgcagacaaacatgtatg

SEQ ID NO: 619702 - DNA, 120 bp, Artificial Sequence
  ENSG00000177614_4 (sequence is synthesized)
ccaagaagttccaggagcggtttgggagcgacggagcctgggtggaggtgacgctgacggagatgaaggcgttcctgggctacatgatctccaccagcatctcccactgcgagtccgtcc

SEQ ID NO: 619703 - DNA, 120 bp, Artificial Sequence
  ENSG00000177614_5 (sequence is synthesized)
tcagcatctggagcggaggcttctacagcaaccgcagcctcgccctcgtcatgagccaggcccgcttcgagaagatcctcaagtacttccacgtcgtggccttccgctccagccagacca

SEQ ID NO: 619704 - DNA, 120 bp, Artificial Sequence
  ENSG00000177614_6 (sequence is synthesized)
cgcacgggctctacaaggtccagcccttcctcgactccctgcagaacagcttcgactctgccttcaggccttcccaaacccaggtgctacatgaacccctgatcgatgaggatcctgtat

SEQ ID NO: 619705 - DNA, 120 bp, Artificial Sequence
  ENSG00000177614_7 (sequence is synthesized)
tcattgccacgtgcacagagcgggagctgcgaaagaggaaaaagcggaaattcagcctctgggtcagacaatgttcttccactggcttcatcatccagatttatgtccacctgaaggaag

SEQ ID NO: 619706 - DNA, 120 bp, Artificial Sequence
  ENSG00000177614_8 (sequence is synthesized)
gtgggggcccagatggcctggatgcgctgaagaataagccccagctccacagcatggtggccaggagcctgtgccggaacgcggcaggcaagaactacatcattttcacggggcccagca

SEQ ID NO: 619707 - DNA, 120 bp, Artificial Sequence
  ENSG00000177614_9 (sequence is synthesized)
tcaccagcctgacgctgtttgaagagtttgagaagcaagggatttactgctgcggcttgctccgcgcgcggaagagtgactgcaccggcctcccactgtccatgctgaccaacccagcca

SEQ ID NO: 619708 - DNA, 120 bp, Artificial Sequence
  ENSG00000177614_10 (sequence is synthesized)
cacccccggcccggggccagtaccaaatcaagatgaaggggaacatgtccttgatctgctggtacaacaaaggacacttccgcttcctgaccaacgcctactccccggtgcagcagggag

SEQ ID NO: 619709 - DNA, 120 bp, Artificial Sequence
  ENSG00000177614_11 (sequence is synthesized)
tcatcatcaaaaggaagagtggggagatcccatgccccttggccgtggaggcgtttgccgctcacctgagctacatctgcagatacgatgacaaatacagcaagtatttcatttctcata

SEQ ID NO: 619710 - DNA, 120 bp, Artificial Sequence
  ENSG00000177614_12 (sequence is synthesized)
aaccaaacaagacctggcagcaggtgttctggttcgccatcagcatcgccatcaacaatgcctacatcctgtacaaaatgtcagacgcctaccacgtgaagaggtacagccgggcgcagt

SEQ ID NO: 619711 - DNA, 120 bp, Artificial Sequence
  ENSG00000177614_13 (sequence is synthesized)
ttggagagagactcgtcagagagctgctgggcttggaggatgcctctccgacccactgatgctgggggcgcaggactcggtcaagggaggggcaagaggaggaggagagcctgccgttcc

SEQ ID NO: 619712 - DNA, 120 bp, Artificial Sequence
  ENSG00000177614_14 (sequence is synthesized)
aacttgcccatcagagacccggacacggcctggtgtgtggcttgctgcctgggagggatgcacagggcctctggagggacaggatggacctggtcagaggacggttgctgtcctcatttg

SEQ ID NO: 619713 - DNA, 120 bp, Artificial Sequence
  ENSG00000177614_15 (sequence is synthesized)
cattccaagaagagcatgtcctccctcgagaaacagtgccgccggtgtgatgagcacttacacccacgttctcaagggcagattctctcatgacatccgtggagcttgcgaggcagcgtg

SEQ ID NO: 619714 - DNA, 120 bp, Artificial Sequence
  ENSG00000177614_16 (sequence is synthesized)
gactggtgactgtgaaggaaggcccccgtggtagaatgagctggagcacgctctaagagagatgcctgcttcctaaagatctacagcaatctgggacgtggttcaagttcaagacttgaa

SEQ ID NO: 619715 - DNA, 120 bp, Artificial Sequence
  ENSG00000177614_17 (sequence is synthesized)
ggaagcaaagacgccctgcatggttacaatggctcaggtgtcaggggaggccggagggttttccagcatttgcctcatgccagcacctttgaaccggtctcttagaagaagacacacatc

SEQ ID NO: 619716 - DNA, 120 bp, Artificial Sequence
  ENSG00000177614_18 (sequence is synthesized)
ctgggtgtacagtggtgaaatggggagtgggtgcccattctgaaaaacgaggcattcctgctcattccctctgcttagctggtgggcaggggagagagggaaatgccaaaaacttggagt

SEQ ID NO: 619717 - DNA, 120 bp, Artificial Sequence
  ENSG00000177614_19 (sequence is synthesized)
gaaggatgatgctattttttatttttaaatatatcttcaggttattttcttactgttgcttcagatctaatgtaaaaggcagatgtcccctcctctccacccccgacgctgaccccggcc

SEQ ID NO: 619718 - DNA, 120 bp, Artificial Sequence
  ENSG00000177614_20 (sequence is synthesized)
tcagtcacggctctttgcatgatcacagttctgtgttctggcctgtggcagggccgggaagggccgctggcttccgaacagacgtggttgctctccacgaggcgcatggggagcccgcgg

SEQ ID NO: 619719 - DNA, 120 bp, Artificial Sequence
  ENSG00000177614_21 (sequence is synthesized)
gccctaagctttgtcgcagatgtcatcattggcagaattacttgtcttgaaaaataagtagcattgctgaaacacacaaccgaattctctacgatggccatttgctcattgtctttcctc

SEQ ID NO: 619720 - DNA, 120 bp, Artificial Sequence
  ENSG00000177614_22 (sequence is synthesized)
tgtgtgtagtgagtgaccctggcagtgtttgcctgctcagagtggcccctcagaacaacagggctggccttggaaaaaccccaaaacaggactgtggtgacaactctggtcaggtgtgat

SEQ ID NO: 619721 - DNA, 120 bp, Artificial Sequence
  ENSG00000177614_23 (sequence is synthesized)
ttgacatgagggccggaggcggttgctgacggcaggactggagaggctgcgtgcccggcactggcagcgaggctcgtgtgtcccccaggcagatctgggcactttcccaacccaggttta

SEQ ID NO: 619722 - DNA, 120 bp, Artificial Sequence
  ENSG00000177614_24 (sequence is synthesized)
tgcgtctccagggaagcctcggtgccagagtggtgggcagatctgaccatccccacagaccagaaacaaggaatttctgggattacccagtcccccttcaacccagttgatgtaaccacc

SEQ ID NO: 619723 - DNA, 120 bp, Artificial Sequence
  ENSG00000177614_25 (sequence is synthesized)
tcattttttacaaatacagaatctattctactcaggctatgggcctcgtcctcactcagttattgcgagtgttgctgtccgcatgctccgggccccacgtggctcctgtgctctagatca

SEQ ID NO: 619724 - DNA, 120 bp, Artificial Sequence
  ENSG00000177614_26 (sequence is synthesized)
tggtgactcccccgccctgtggttggaatcgatgccacggattgcaggccaaatttcagatcgtgtttccaaacacccttgctgtgccctttaatgggattgaaagcacttttaccacat

SEQ ID NO: 619725 - DNA, 120 bp, Artificial Sequence
  ENSG00000177614_27 (sequence is synthesized)
ggagaaatatatttttaatttgtgatgcttttctacaaggtccactatttctgagtttaatgtgtttccaacacttaaggagactctaatgaaagctgatgaattttcttttctgtccaa

SEQ ID NO: 619726 - DNA, 120 bp, Artificial Sequence
  ENSG00000177614_28 (sequence is synthesized)
ttttctgtccaaacaagtaaaataaaaataaaagtctatttagatgttgattctccgttaatacgtgaattcgtttaaaaggtcagggaacaggcggggtgcggtggctcatgcctgtaa

SEQ ID NO: 619727 - DNA, 88 bp, Artificial Sequence
  ENSG00000177614_29 (sequence is synthesized)
ggctgaagcgggcattggcaacatggcgaaagcccatttctacaaaaaatacaagaattaggtgtggtggcacatgcctgcagtccca

SEQ ID NO: 619728 - DNA, 81 bp, Artificial Sequence
  ENSG00000177614_30 (sequence is synthesized)
atcaagaaaaaaaacaaggtgaaggaacaaaaatacaggctactcttttaaatacttgattttttttgttatataatctgg

SEQ ID NO: 619729 - DNA, 120 bp, Artificial Sequence
  ENSG00000177614_31 (sequence is synthesized)
actcttttaaatacttgattttttttgttatataatctggtgtgtatgatattaactgttcttggtgtctcaaaccactgagcagtttaaaaaagaaatgtttttgagtttggctaatag

SEQ ID NO: 619730 - DNA, 120 bp, Artificial Sequence
  ENSG00000177614_32 (sequence is synthesized)
aaatacctcttgatgttgcagttgtatgagtgcagttgtatttgaggtgcctgtttcattgaagacactagcaggcctgccttccggcctggtggttttccctcttttcttctagtttgt

SEQ ID NO: 619731 - DNA, 120 bp, Artificial Sequence
  ENSG00000177614_33 (sequence is synthesized)
gtcgtgtgtcattccagatgagcaggaagaggtgctgttctgacaggcagtgggtggctgcattccccagtcatgagagaataattgtaacattgtaacactctgtttctaaaatggcag

SEQ ID NO: 619732 - DNA, 120 bp, Artificial Sequence
  ENSG00000177614_34 (sequence is synthesized)
ccacctgttgtctgatacatgatgggaaaaggcagctgttgagccgggtctaggggaggcttcagtggccacttcaggtctctggaggaatgctgttgactgagaagagtttctcttctc

SEQ ID NO: 619733 - DNA, 120 bp, Artificial Sequence
  ENSG00000177614_35 (sequence is synthesized)
catccagaaggacagaatagcatgtaggacggactgacagaacctccagggacctggaccttgccttagagatgtgattcaaagtggctttttggagtgactctagttgaagtgcatctg

SEQ ID NO: 619734 - DNA, 120 bp, Artificial Sequence
  ENSG00000177614_36 (sequence is synthesized)
gttccagtatctccctgggttcaacagccctcaggttgattcttgattggctttggagtagctggccatccctggggatgaggaaagagcatcgtaagtggtcttatgacagagggagcc

SEQ ID NO: 619735 - DNA, 120 bp, Artificial Sequence
  ENSG00000177614_37 (sequence is synthesized)
agcatggccctggctgagtatatggggctggcaagcaccactgcacacatggcaagtgagagcccattccactcagatccagccactaagccaagccgatcccctgagggatgtctctgc

SEQ ID NO: 619736 - DNA, 120 bp, Artificial Sequence
  ENSG00000177614_38 (sequence is synthesized)
tgcaggctctggaaaaaaaagatggagcaatgagcttcccagccttatgcaaaacaaaacacccacaaaaacttccaagcttctccaaagagaatctgcatttccctgcaactcacaggg

SEQ ID NO: 619737 - DNA, 120 bp, Artificial Sequence
  ENSG00000177614_39 (sequence is synthesized)
aattgaacctgcactgagcttcacggagtttatgagaccttcccattactgcagttgtgttgagcgtcccgtgaggtccttcttaggcaaatttaacttcattgagtgaatgtctgtttc

SEQ ID NO: 619738 - DNA, 120 bp, Artificial Sequence
  ENSG00000177614_40 (sequence is synthesized)
agtgaatgtctgtttctgtttggtgcctacttgatcaggttccatattcgactttcattgtctttccccacactctgctccctaaagagcctcgattttggccaggtgcggtggctcaca

SEQ ID NO: 619739 - DNA, 120 bp, Artificial Sequence
  ENSG00000177614_41 (sequence is synthesized)
tccaacccccaccccgccacaaaaaaaaaaaaaaaaaaaaagcctcgagtttgaacaacgtcttcccgtggtccatgggacattatactagggacatctttcaaaagtcaggcaagtcat

SEQ ID NO: 619740 - DNA, 120 bp, Artificial Sequence
  ENSG00000177614_42 (sequence is synthesized)
atggaaaagtcttggtggctgggtcattctgagcaaacacatccagtactgactaaatcagatgaggcttggtcaccaaaattgagttaactctgctgcgtgcaagaagcaagaagattg

SEQ ID NO: 619741 - DNA, 120 bp, Artificial Sequence
  ENSG00000177614_43 (sequence is synthesized)
caggtccccaggacagagcctggaaggttctgaatccttcctgtgtggcccgtgtgtcaccatcctccccagggacccaggctcagcccccccaacagtgagggggggtcaccaagcatc

SEQ ID NO: 619742 - DNA, 120 bp, Artificial Sequence
  ENSG00000177614_44 (sequence is synthesized)
aggctgagaggaagcagggcaaacccgggagggccatggggccttgcaactacgcaagcctcacacattctcctccagtctgcattcatggcaaaaaaaaaacatttccccacttgcctg

SEQ ID NO: 619743 - DNA, 120 bp, Artificial Sequence
  ENSG00000177614_45 (sequence is synthesized)
ggattggggcgagaacaagtcaacgacactgatgggggagaaaggtgaccttgggtgtggtacctcccagatctgtctcctgcatcctcgcaggtgctgtgtttgaaaggtatgacagcg

SEQ ID NO: 619744 - DNA, 120 bp, Artificial Sequence
  ENSG00000177614_46 (sequence is synthesized)
gtggctaacaggcaggcacacttccaggcggcttggggtggcccttctgccccagagccttactcctcacagggatccctgtgggttaggcatggactgtcaccacgcccagatggagtg

SEQ ID NO: 619745 - DNA, 120 bp, Artificial Sequence
  ENSG00000177614_47 (sequence is synthesized)
gtgcaatggttcgcccaggtaagcagacccgggtttgcctgacgcaggaggccgcgtcctaactgctgtgggcactggctgtcctgattcatcacgaggacgggggattttatccctgac

SEQ ID NO: 619746 - DNA, 120 bp, Artificial Sequence
  ENSG00000177614_48 (sequence is synthesized)
ttacctgacaactttgtgggggattttctcctttccatatccaatcctctctgctgatccgaatactgaaaacaatcattatgagatccgggacatcaccctccccctgggtccttttct

SEQ ID NO: 619747 - DNA, 120 bp, Artificial Sequence
  ENSG00000177614_49 (sequence is synthesized)
tgtcctagatggagatgggtgttttggagcttaacaactactgaagctgaagttagcctggtagggagccactattctggggggcatttggacagggcaagcccttggccacaccagacc

SEQ ID NO: 619748 - DNA, 120 bp, Artificial Sequence
  ENSG00000177614_50 (sequence is synthesized)
ctgagccagaaagaaccatagcgatttcctcacccagatggccccagctcacagtatggggagagtgggatggggtgggggagtggagccagctgtggggtctcatcagagtgccctggg

SEQ ID NO: 619749 - DNA, 120 bp, Artificial Sequence
  ENSG00000177614_51 (sequence is synthesized)
atctaggccagaggcgccgtcttcacccacatgccagctttgtggttctggtccctcttccttaagcgagggcttgccaagctttggctgtggaaagccttagccttgtgtagtgggagt

SEQ ID NO: 619750 - DNA, 120 bp, Artificial Sequence
  ENSG00000177614_52 (sequence is synthesized)
tccaaacgaaagaagtccccagaagttcacaaggtagtggccagggaaagtgtccccagtgccccctccccaccggtggcctctgcagcttgctttggaaaacagttctgtctgtgaaga

SEQ ID NO: 619751 - DNA, 120 bp, Artificial Sequence
  ENSG00000177614_53 (sequence is synthesized)
aatctctcctgttacggccctgtgtcagtcaatgcgggcttggctgtctgcccaaataccttccgttcttatcaggaacatgactgaggcttctcacttttgactccatcacttaatccc

SEQ ID NO: 619752 - DNA, 120 bp, Artificial Sequence
  ENSG00000177614_54 (sequence is synthesized)
tttttctccgtggcttctgtgtgtctcatcttcgagaatatttctcagccttctttgcaggtatgttattctctcccaataagaaataaagagtatcaggtaccaaagtggcacttagag

SEQ ID NO: 619753 - DNA, 120 bp, Artificial Sequence
  ENSG00000177614_55 (sequence is synthesized)
ctgttgccataaaatagcaccagagagtaagcatgccctctggccacgcagctcgctgccatttagccatctctgtgtccctccctccctggggtgcccagtgcgcaccccagttctcca

SEQ ID NO: 619754 - DNA, 120 bp, Artificial Sequence
  ENSG00000177614_56 (sequence is synthesized)
gcagcccaggcacattctcctagctctgacccctgtctggtgggggccgggcagcctctcttgagtgtagggcggtggtgctggcgctggtggcagctctgtgtgaactgtgttccgggg

SEQ ID NO: 619755 - DNA, 120 bp, Artificial Sequence
  ENSG00000177614_57 (sequence is synthesized)
agggtggggcaccttcacccttccgtgtatacccatgtatacacggtcgtaatgaggagactcctgcgggagacttgattgtgcgctccatgtcactagctactctacaagcagatacta

SEQ ID NO: 619756 - DNA, 120 bp, Artificial Sequence
  ENSG00000177614_58 (sequence is synthesized)
ttcttcaggttttttccttagttgcctggaagcttgaccttgtgtgcatgtatttggagatgaaaacagaaagggcggggaggacatcggcttgtgtgaaagacctaggaagacgatgga

SEQ ID NO: 619757 - DNA, 120 bp, Artificial Sequence
  ENSG00000177614_59 (sequence is synthesized)
ggagtgtgtgcggcttccctcacgtgtcaagcctcctggctccctcaggtggaaggggcactttatggccaaggaaattcagtgaggagtgaagggtgaggctgagcccgccagataaat

SEQ ID NO: 619758 - DNA, 120 bp, Artificial Sequence
  ENSG00000177614_60 (sequence is synthesized)
cagcctcggccctcccctccccaagggtcagcccccggcagcgcacctctgttcttggtgcgtctcgctagtctttgattcattcttctgccgtcttcacccaagcctcgctggactaaa

SEQ ID NO: 619759 - DNA, 120 bp, Artificial Sequence
  ENSG00000177614_61 (sequence is synthesized)
gagtgacagttaatgcacatggagcatttctgttccagcaggtcacgtctccctgtatggttcctttgctgagtcctcagcattgccctgggagctgacaaccatcggtcccccttttgt

SEQ ID NO: 619760 - DNA, 120 bp, Artificial Sequence
  ENSG00000177614_62 (sequence is synthesized)
gatgggaaagtgacactctgagagccgtggtgactctacagggtgtggagccaggttgaccctcactctgtctgctccagggcttcctggttctcagccactgctgcttctgaactgcta

SEQ ID NO: 619761 - DNA, 120 bp, Artificial Sequence
  ENSG00000177614_63 (sequence is synthesized)
caggccaggcattgtgctaagaactgggcacgtgttaccccaacgtggtctgtgcccttgagggtgccatgactgaaacacgttgggggcacagagcaggctgattctccgccgaaagaa

SEQ ID NO: 619762 - DNA, 120 bp, Artificial Sequence
  ENSG00000177614_64 (sequence is synthesized)
ggctccagccagaggccgagaccccgtgtgggggaggtggcagtcaccattgctgctggactcagcaacccccagaccctccaccttgcttggcaggcatcacatgcacctggcttagca

SEQ ID NO: 619763 - DNA, 120 bp, Artificial Sequence
  ENSG00000177614_65 (sequence is synthesized)
catccctgcaaacacaagagtctgagcctcctcaagaggctgcagtcacactgcatttgaccaggacttgccaacctgcaacttgccctgagagccaggtatgcgtgtgtgtatctgggg

SEQ ID NO: 619764 - DNA, 120 bp, Artificial Sequence
  ENSG00000177614_66 (sequence is synthesized)
agcacgccccaaacatgagcagggacggtgttcccagctatccgagaggtcatgcccaagccaaaaggaaggctctagctcttaaacatgaataagtttattcctttcatttccacagtg

SEQ ID NO: 619765 - DNA, 120 bp, Artificial Sequence
  ENSG00000177614_67 (sequence is synthesized)
tcttatgcttgcttctgttttctccaaggaagtatggtgcccacctactcctccagcctgacgatccatgtgagggttccttgttcccagcccaattctcatgtcccacctttctccact

SEQ ID NO: 619766 - DNA, 120 bp, Artificial Sequence
  ENSG00000177614_68 (sequence is synthesized)
aagaaacagccaaattttggcaagagtcgtggtaggaaaaaaaaacaataattgggcagatgaggatttttcactttttgactagttctttctctagactttcctgtctttttaaaactt

SEQ ID NO: 619767 - DNA, 120 bp, Artificial Sequence
  ENSG00000177614_69 (sequence is synthesized)
ctagtttcccccttgagcgctccctcccagtgggtagaccacggaaggaatgaacaggggatggaagcaggggatgcagtccctattatttcaatagattggaaagatgggcccagaaca

SEQ ID NO: 619768 - DNA, 120 bp, Artificial Sequence
  ENSG00000177614_70 (sequence is synthesized)
attgcgtacggtgttcagtgtaaattgaagatctggagttgcaggattgttgaggcaatttttagttgctttgctccatctaaacacaaggccataggatagtgtgactttgtagcttca

SEQ ID NO: 619769 - DNA, 120 bp, Artificial Sequence
  ENSG00000177614_71 (sequence is synthesized)
tcaccgtatccacatcagaagtacaatgtccacttaatacatatatacacatatgtacgtatacacatatacacatgtgtacatatgtatgtatacacatgcacatgtgtacgtatgtat

SEQ ID NO: 619770 - DNA, 120 bp, Artificial Sequence
  ENSG00000177614_72 (sequence is synthesized)
acacatacatatatgtgtacacatatacatatgtatgtatacacatagatatatgtgtacacataaacatatgtatgtatacacataaacatgtatgtatacacatacatatatgtgtac

SEQ ID NO: 619771 - DNA, 120 bp, Artificial Sequence
  ENSG00000177614_73 (sequence is synthesized)
gtatgtatacacatacatatatgtgtacacatatacttatgtatgtatacacatacatatatgtgtacacatatacttatgtatgtatacacatacatatatgtgtacacatatacacat

SEQ ID NO: 619772 - DNA, 120 bp, Artificial Sequence
  ENSG00000177614_74 (sequence is synthesized)
atacatatatacatatatgcatacatctataatatatgtatgtgtatatatacacatacagtgtccacttaatatatatatctatcttgtgtgtatgtgtgtgtaaatatacacacacat

SEQ ID NO: 619773 - DNA, 120 bp, Artificial Sequence
  ENSG00000177614_75 (sequence is synthesized)
atacacacacatacacacacgataaaatacagagtctaccacatgatgagcctctgctaggtccttagcaatcaaaccacatgtccagtcctggcccccattctacaactaaacacatgg

SEQ ID NO: 619774 - DNA, 120 bp, Artificial Sequence
  ENSG00000177614_76 (sequence is synthesized)
gccagtttaggggtccaggagggcaagaatggtgggtccacgtagaaaccaggtgagggaggagcagtccacagggctggggtgatgggctggtgaagcagtgttccaggaggggaactg

SEQ ID NO: 619775 - DNA, 120 bp, Artificial Sequence
  ENSG00000177614_77 (sequence is synthesized)
ctgctcacagggctgtcctggtcgccctcgggatacagccagacttgatccgagtggctcccggggctgaatggggaccgccgggtgcatatcccaggaggcagccttcagctcagtggg

SEQ ID NO: 619776 - DNA, 120 bp, Artificial Sequence
  ENSG00000177614_78 (sequence is synthesized)
gaaagcagtttccaaccttagagctgcccaacactagcacagggcacctgagaaaggaggggcccctctgcctttactctgtctcccactagaggcagctggttccttcagggaactctg

SEQ ID NO: 619777 - DNA, 120 bp, Artificial Sequence
  ENSG00000177614_79 (sequence is synthesized)
gtggggggtgagggggtggctggttctcagtgggcaggggtgaccctactggggtcagtgggctggcaatgctggtcttcactaagaagagttgaaaatagccaggaagctaagccctgg

SEQ ID NO: 619778 - DNA, 120 bp, Artificial Sequence
  ENSG00000177614_80 (sequence is synthesized)
ctcctgggctcctgggcagatgcttaattaggaggaagaaggaaccaaaatcatgaacacaactggctctctcagggggaggctgtcaccctccaagctcttcttccccttcctcaaatg

SEQ ID NO: 619779 - DNA, 120 bp, Artificial Sequence
  ENSG00000177614_81 (sequence is synthesized)
gagattcacactcatccctagttcaggagagccgccattgatgatgaggaaatccgtgtcaaagaagctggaaagactgctattcattgtgagaattttgtttccactgctacattacat

SEQ ID NO: 619780 - DNA, 120 bp, Artificial Sequence
  ENSG00000177614_82 (sequence is synthesized)
tgtttcttcttgttttcccttccaatttccagttaagaatctttcacagaaaatttttaattttatcacaaactgcacagatatcacacagctgcacccccatttggtgacacaaagcat

SEQ ID NO: 619781 - DNA, 120 bp, Artificial Sequence
  ENSG00000177614_83 (sequence is synthesized)
acccttctgtgaagattttcactttacgccaaggcatgattgtcactttacgccaaggcaataaatttttacaaattttgtataacaggagctgaattctgggttctcaaatgtgaaatg

SEQ ID NO: 619782 - DNA, 84 bp, Artificial Sequence
  ENSG00000177614_84 (sequence is synthesized)
tcaagcattttgtcatgtggttcttatttcttcaaccaagtttgtttacagtcactgcctttgaaatacagtcaaatacatctg

SEQ ID NO: 619783 - DNA, 120 bp, Artificial Sequence
  ENSG00000177614_85 (sequence is synthesized)
actttttgctggcctcagctgcatcttactcatcttcaaagcccagggcttaatagttatttgttggaagaatcaagggtagagagattcgacgacatgaagtggggctgtgaaagtaaa

SEQ ID NO: 619784 - DNA, 120 bp, Artificial Sequence
  ENSG00000177614_86 (sequence is synthesized)
gggcacctgttcggtaggtcagatatgcctgactacagaactcgagctctcttcgtgcaaagtactctcggggactctgcaggacctgagctgcagttgctcagcatagtgcccggccgg

SEQ ID NO: 619785 - DNA, 120 bp, Artificial Sequence
  ENSG00000177627_0 (sequence is synthesized)
gttgtgagatggggctcaaataggaaaaagtctaggggtgaaggagtggggcaaagtgtaatttggggaaccaagcaggggcctggagctatctccatcttcagctccagagtccttggt

SEQ ID NO: 619786 - DNA, 120 bp, Artificial Sequence
  ENSG00000177627_1 (sequence is synthesized)
ttctgtctgagaacaaatggcacagcatccctgccaggatcaggaacaaaaggtagaaatgacctccaagcagcagagaagcacatccatagaagagacaatgagaccacaggaaaaaca

SEQ ID NO: 619787 - DNA, 120 bp, Artificial Sequence
  ENSG00000177627_2 (sequence is synthesized)
ggtaaccatcactgaaaccctgtgggaccaggtgctgacagtttttaaggatatacaaaaggagctgcaggaagatgctcggattcgagggatgagcaactgctccatgacacccatgac

SEQ ID NO: 619788 - DNA, 120 bp, Artificial Sequence
  ENSG00000177627_3 (sequence is synthesized)
tgaccccaaagttgagaagattgcagttcagctctggagagcagccatcaggaggccgtatccacaacctgaagacacagctcttcagtcaatcagcttactaccctggaccctaactct

SEQ ID NO: 619789 - DNA, 120 bp, Artificial Sequence
  ENSG00000177627_4 (sequence is synthesized)
acaatcaaggaagaaggacatctctgcttccgccagcacagcttcagttggggaagatattagcagacatcatcactgaacccagaagagagggtggtgcccatgagtggagatgccagg

SEQ ID NO: 619790 - DNA, 120 bp, Artificial Sequence
  ENSG00000177627_5 (sequence is synthesized)
gtctatggctgaaactgggaacttggaaatcaagtgagacccaagcaaggaaaccaactgccaaagcaaggaaaccagcttggtttggcaaacagctgatgaaataaatgtgacgtagaa

SEQ ID NO: 619791 - DNA, 120 bp, Artificial Sequence
  ENSG00000177627_6 (sequence is synthesized)
agaagatgcctaacagttcccttgaggaaatgtgataatacaaacagaaaattgtatctgctagaacttgtctcagcaagaatactctatgtggttgtatgaaatgctgataatgactaa

SEQ ID NO: 619792 - DNA, 120 bp, Artificial Sequence
  ENSG00000177627_7 (sequence is synthesized)
gagacatgtccaggcccctgtaacagaatgactcttctctgtgtccactttagggatgagcaactgctccatgacacccatgacatcagcacccaggactggaagcataaggcctccaga

SEQ ID NO: 619793 - DNA, 120 bp, Artificial Sequence
  ENSG00000177627_8 (sequence is synthesized)
tgaaaccctgtgggaccagggagacaacccacagttccaacagtcactggatccattcatggctgggtaacacagtaggtggatatttggttttataagaaactgccagccctggccctg

SEQ ID NO: 619794 - DNA, 120 bp, Artificial Sequence
  ENSG00000177627_9 (sequence is synthesized)
gatcctatagccgctgagatgttgatacctaagaagaactgggttgccatttatgaactcctttttaaggagagtcatggtggccaagaaggatgtcgacatgcctaagcacccggagct

SEQ ID NO: 619795 - DNA, 120 bp, Artificial Sequence
  ENSG00000177627_10 (sequence is synthesized)
tttctactggaaccttatgaatgagggtatccagtatctccatgattaccttcattggcccctggagtctgtgcctgtcactctatgccgcagccatccagagactggcaggcctcggcc

SEQ ID NO: 619796 - DNA, 120 bp, Artificial Sequence
  ENSG00000177627_11 (sequence is synthesized)
taaaggtctggaggattagcgatctggaagacttacaagaggggaagccaacagagatacctacagacagaatgctgtgccccctggtgccgacaagaaagccaaggctggggctgggtc

SEQ ID NO: 619797 - DNA, 120 bp, Artificial Sequence
  ENSG00000177627_12 (sequence is synthesized)
agcaactgaattccagtttagaggtggatttgttcatggatgtggtcatctacctcagtaaaattggagaggattattttgcattgaataaacttacagccaaaaaaaaaaaaaagaaag

SEQ ID NO: 619798 - DNA, 120 bp, Artificial Sequence
  ENSG00000177628_0 (sequence is synthesized)
tccccagggctgcttttctcgcggctgcgggtggtcgggctgcatcctgccttcagagtcttactgcgcggggccccagtctccagtcccgcccaggcgcctttgcaggctgcggtggga

SEQ ID NO: 619799 - DNA, 120 bp, Artificial Sequence
  ENSG00000177628_1 (sequence is synthesized)
tttcgttttgcctccggttggggctgctgtttctcttcgccgacgtggatcctctatccttcagagactctggaacccctgtggtcttctcttcatctaatgaccctgaggggatggagt

SEQ ID NO: 619800 - DNA, 120 bp, Artificial Sequence
  ENSG00000177628_2 (sequence is synthesized)
tttcaagtccttccagagaggaatgtcccaagcctttgagtagggtaagcatcatggctggcagcctcacaggattgcttctacttcaggcagtgtcgtgggcatcaggtgcccgcccct

SEQ ID NO: 619801 - DNA, 120 bp, Artificial Sequence
  ENSG00000177628_3 (sequence is synthesized)
gcatccctaaaagcttcggctacagctcggtggtgtgtgtctgcaatgccacatactgtgactcctttgaccccccgacctttcctgcccttggtaccttcagccgctatgagagtacac

SEQ ID NO: 619802 - DNA, 120 bp, Artificial Sequence
  ENSG00000177628_4 (sequence is synthesized)
gcagtgggcgacggatggagctgagtatggggcccatccaggctaatcacacgggcacaggcctgctactgaccctgcagccagaacagaagttccagaaagtgaagggatttggagggg

SEQ ID NO: 619803 - DNA, 120 bp, Artificial Sequence
  ENSG00000177628_5 (sequence is synthesized)
ccatgacagatgctgctgctctcaacatccttgccctgtcaccccctgcccaaaatttgctacttaaatcgtacttctctgaagaaggaatcggatataacatcatccgggtacccatgg

SEQ ID NO: 619804 - DNA, 120 bp, Artificial Sequence
  ENSG00000177628_6 (sequence is synthesized)
ccagctgtgacttctccatccgcacctacacctatgcagacacccctgatgatttccagttgcacaacttcagcctcccagaggaagataccaagctcaagatacccctgattcaccgag

SEQ ID NO: 619805 - DNA, 120 bp, Artificial Sequence
  ENSG00000177628_7 (sequence is synthesized)
ccctgcagttggcccagcgtcccgtttcactccttgccagcccctggacatcacccacttggctcaagaccaatggagcggtgaatgggaaggggtcactcaagggacagcccggagaca

SEQ ID NO: 619806 - DNA, 120 bp, Artificial Sequence
  ENSG00000177628_8 (sequence is synthesized)
tctaccaccagacctgggccagatactttgtgaagttcctggatgcctatgctgagcacaagttacagttctgggcagtgacagctgaaaatgagccttctgctgggctgttgagtggat

SEQ ID NO: 619807 - DNA, 120 bp, Artificial Sequence
  ENSG00000177628_9 (sequence is synthesized)
atgctggatgaccaacgcttgctgctgccccactgggcaaaggtggtactgacagacccagaagcagctaaatatgttcatggcattgctgtacattggtacctggactttctggctcca

SEQ ID NO: 619808 - DNA, 120 bp, Artificial Sequence
  ENSG00000177628_10 (sequence is synthesized)
gccaaagccaccctaggggagacacaccgcctgttccccaacaccatgctctttgcctcagaggcctgtgtgggctccaagttctgggagcagagtgtgcggctaggctcctgggatcga

SEQ ID NO: 619809 - DNA, 120 bp, Artificial Sequence
  ENSG00000177628_11 (sequence is synthesized)
gggatgcagtacagccacagcatcatcacgaacctcctgtaccatgtggtcggctggaccgactggaaccttgccctgaaccccgaaggaggacccaattgggtgcgtaactttgtcgac

SEQ ID NO: 619810 - DNA, 120 bp, Artificial Sequence
  ENSG00000177628_12 (sequence is synthesized)
agtcccatcattgtagacatcaccaaggacacgttttacaaacagcccatgttctaccaccttggccacttcagcaagttcattcctgagggctcccagagagtggggctggttgccagt

SEQ ID NO: 619811 - DNA, 120 bp, Artificial Sequence
  ENSG00000177628_13 (sequence is synthesized)
cagaagaacgacctggacgcagtggcactgatgcatcccgatggctctgctgttgtggtcgtgctaaaccgctcctctaaggatgtgcctcttaccatcaaggatcctgctgtgggcttc

SEQ ID NO: 619812 - DNA, 120 bp, Artificial Sequence
  ENSG00000177628_14 (sequence is synthesized)
ctggagacaatctcacctggctactccattcacacctacctgtggcgtcgccagtgatggagcagatactcaaggaggcactgggctcagcctgggcattaaagggacagagtcagctca

SEQ ID NO: 619813 - DNA, 120 bp, Artificial Sequence
  ENSG00000177628_15 (sequence is synthesized)
cacgctgtctgtgactaaagagggcacagcagggccagtgtgagcttacagcgacgtaagcccaggggcaatggtttgggtgactcactttcccctctaggtggtgccaggggctggagg

SEQ ID NO: 619814 - DNA, 120 bp, Artificial Sequence
  ENSG00000177628_16 (sequence is synthesized)
cccctagaaaaagatcagtaagccccagtgtccccccagcccccatgcttatgtgaacatgcgctgtgtgctgcttgctttggaaactgggcctgggtccaggcctagggtgagctcact

SEQ ID NO: 619815 - DNA, 120 bp, Artificial Sequence
  ENSG00000177628_17 (sequence is synthesized)
gtccgtacaaacacaagatcagggctgagggtaaggaaaagaagagactaggaaagctgggcccaaaactggagactgtttgtctttcctggagatgcagaactgggcccgtggagcagc

SEQ ID NO: 619816 - DNA, 120 bp, Artificial Sequence
  ENSG00000177628_18 (sequence is synthesized)
agtgtcagcatcagggcggaagccttaaagcagcagcgggtgtgcccaggcacccagatgattcctatggcaccagccaggaaaaatggcagctcttaaaggagaaaatgtttgagccca

SEQ ID NO: 619817 - DNA, 120 bp, Artificial Sequence
  ENSG00000177628_19 (sequence is synthesized)
accaccttggccacttcaggtgagtggagggcgggcacccccattccataccaggcctatcatctcctacatcggatggcttacatcactctacaccacgagggagcaggaaggtgttca

SEQ ID NO: 619818 - DNA, 120 bp, Artificial Sequence
  ENSG00000177628_20 (sequence is synthesized)
gaggcaggaagtgactaggtagcaacagaaaaccccaatgcctgaggctggactgcgatgcagaaaagcagggtcagtgcccagcagcatggctccaggcctagagagccagggcagagc

SEQ ID NO: 619819 - DNA, 120 bp, Artificial Sequence
  ENSG00000177628_21 (sequence is synthesized)
ctctgcaggagttatggggtgggtccgtgggtgggtgacttcttagatgagggtttcatgggaggtaccccgagggactctgaccatctgttcccacattcagcaagttcattcctgagg

SEQ ID NO: 619820 - DNA, 120 bp, Artificial Sequence
  ENSG00000177628_22 (sequence is synthesized)
acatgacccatccacatcgggaagccggaattacttgcagggctaacctagtgcctatagctaaggcaggtacctgcatccttgtttttgtttagtggatcctctatccttcagagactc

SEQ ID NO: 619821 - DNA, 120 bp, Artificial Sequence
  ENSG00000177628_23 (sequence is synthesized)
tgcgcggggccccagtctccagtcccgcccaggcgcctttgcaggctgcggtgggatttcgttttgcctccggttggggctgctgtttctcttcgccgacgagacggggtttcaccatgt

SEQ ID NO: 619822 - DNA, 90 bp, Artificial Sequence
  ENSG00000177628_24 (sequence is synthesized)
cgcctcggcctgccaaacagctgtaaccatcattattatttttaacgtggatcctctatccttcagagactctggaacccctgtggtctt

SEQ ID NO: 619823 - DNA, 85 bp, Artificial Sequence
  ENSG00000177628_25 (sequence is synthesized)
caggattgcttctacttcaggcagtgtcgtgggcatcagtagagacggggtttcaccatgctggcaaggcaggtctcaaactcct

SEQ ID NO: 619824 - DNA, 120 bp, Artificial Sequence
  ENSG00000177628_26 (sequence is synthesized)
gggtgcccgcccctgcatccctaaaagcttcggctacagctcggtggtgtgtgtctgcaatgccacatactgtgactcctttgaccccccgacctttcctgcccttggtaccttcagccg

SEQ ID NO: 619825 - DNA, 120 bp, Artificial Sequence
  ENSG00000177628_27 (sequence is synthesized)
ggttcctgttttaatgccctgtgaaataagatttcaccgcctatcatctgctaactgctacggactcaggctcagaaaggcctgcgcttcacccaggtgccagcctccacaggttccaac

SEQ ID NO: 619826 - DNA, 120 bp, Artificial Sequence
  ENSG00000177628_28 (sequence is synthesized)
ccaggagcccaagttccctttggccctgactcagacactattaggactggcaagtgataagcagagtcccatactctcctattgactcggactaccatatcttgatcatccttttctgta

SEQ ID NO: 619827 - DNA, 120 bp, Artificial Sequence
  ENSG00000177628_29 (sequence is synthesized)
ccacttccagatctgcctgtcctcagctcacctttctaccttctgggcctttcagccttgggcctgtcaatcttgcccactccatcaggcttcctgttctctcggtctggcccactttct

SEQ ID NO: 619828 - DNA, 120 bp, Artificial Sequence
  ENSG00000177646_0 (sequence is synthesized)
atcagacgtgtgtgtgtccctgcggcgctaagaaggggagactgaggctgaggctggggaacatcgggcagcatgagcggctgcgggctcttcctgcgcaccacggctgcggctcgtgcc

SEQ ID NO: 619829 - DNA, 120 bp, Artificial Sequence
  ENSG00000177646_1 (sequence is synthesized)
tgccggggtctggtggtctctaccgcgaaccggcggctactgcgcaccagcccgcctgtacgagctttcgccaaagagcttttcctaggcaaaatcaagaagaaagaagttttcccattt

SEQ ID NO: 619830 - DNA, 120 bp, Artificial Sequence
  ENSG00000177646_2 (sequence is synthesized)
ccagaagttagccaagatgaacttaatgaaatcaatcagttcttgggacccgtggaaaaattcttcactgaagaggtggactcccgaaaaattgaccaggaagggaaaatcccagatgaa

SEQ ID NO: 619831 - DNA, 120 bp, Artificial Sequence
  ENSG00000177646_3 (sequence is synthesized)
actttggagaaattgaagagcctagggctttttgggctgcaagtcccagaagaatatggtggcctgggcttctccaacaccatgtactcaagactaggggagatcatcagcatggatggg

SEQ ID NO: 619832 - DNA, 120 bp, Artificial Sequence
  ENSG00000177646_4 (sequence is synthesized)
tccatcactgtgaccctggcagcgcaccaggctattggcctcaaggggatcatcttggctggcactgaggagcagaaagccaaatacttgcctaaactggcgtccggggagcacattgca

SEQ ID NO: 619833 - DNA, 120 bp, Artificial Sequence
  ENSG00000177646_5 (sequence is synthesized)
gccttctgcctcacggagccagccagtgggagcgatgcagcctcaatccggagcagagccacactaagtgaagacaagaagcactacatcctcaatggctccaaggtctggattactaat

SEQ ID NO: 619834 - DNA, 120 bp, Artificial Sequence
  ENSG00000177646_6 (sequence is synthesized)
ggaggactggccaatatttttactgtgtttgcaaagactgaggtcgttgattctgatggatcagtgaaagacaaaatcacagcattcatagtagaaagagactttggtggagtcactaat

SEQ ID NO: 619835 - DNA, 120 bp, Artificial Sequence
  ENSG00000177646_7 (sequence is synthesized)
gggaaacccgaagataaattaggcattcggggctccaacacttgtgaagtccattttgaaaacaccaagatacctgtggaaaacatccttggagaggtcggagatgggtttaaggtggcc

SEQ ID NO: 619836 - DNA, 120 bp, Artificial Sequence
  ENSG00000177646_8 (sequence is synthesized)
atgaacatcctcaacagcggccggttcagcatgggcagcgtcgtggctgggctgctcaagagattgattgaaatgactgctgagtacgcctgcacaaggaaacagtttaacaagaggctc

SEQ ID NO: 619837 - DNA, 120 bp, Artificial Sequence
  ENSG00000177646_9 (sequence is synthesized)
agtgaatttggattgattcaggagaaatttgcactgatggctcagaaggcttacgtcatggagagtatgacctacctcacagcagggatgctggaccaacctggctttcccgactgctcc

SEQ ID NO: 619838 - DNA, 120 bp, Artificial Sequence
  ENSG00000177646_10 (sequence is synthesized)
cagtgtgtgagtgaggcgctgcagatcctcgggggcttgggctacacaagggactatccgtacgagcgcatactgcgtgacacccgcatcctcctcatcttcgagggaaccaatgagatt

SEQ ID NO: 619839 - DNA, 120 bp, Artificial Sequence
  ENSG00000177646_11 (sequence is synthesized)
ctccggatgtacatcgccctgacgggtctgcagcatgccggccgcatcctgactaccaggatccatgagcttaaacaggccaaagtgagcacagtcatggataccgttggccggaggctt

SEQ ID NO: 619840 - DNA, 120 bp, Artificial Sequence
  ENSG00000177646_12 (sequence is synthesized)
cgggactccctgggccgaactgtggacctggggctgacaggcaaccatggagttgtgcaccccagtcttgcggacagtgccaacaagtttgaggagaacacctactgcttcggccggacc

SEQ ID NO: 619841 - DNA, 120 bp, Artificial Sequence
  ENSG00000177646_13 (sequence is synthesized)
gtggagacactgctgctccgctttggcaagaccatcatggaggagcagctggtactgaagcgggtggccaacatcctcatcaacctgtatggcatgacggccgtgctgtcgcgggccagc

SEQ ID NO: 619842 - DNA, 120 bp, Artificial Sequence
  ENSG00000177646_14 (sequence is synthesized)
cgctccatccgcattgggctccgcaaccacgaccacgaggttctcttggccaacaccttctgcgtggaagcttacttgcagaatctcttcagcctctctcagctggacaagtatgctcca

SEQ ID NO: 619843 - DNA, 120 bp, Artificial Sequence
  ENSG00000177646_15 (sequence is synthesized)
gaaaacctagatgagcagattaagaaagtgtcccagcagatccttgagaagcgagcctatatctgtgcccaccctctggacaggacatgctgaggcaggggacagtgtcccctgctaccg

SEQ ID NO: 619844 - DNA, 120 bp, Artificial Sequence
  ENSG00000177646_16 (sequence is synthesized)
cccgcccctacccatggcccgttgctggatgactgttactcttttttcagaaggtgttgggattatcacaggttaagccttttgttccccgtctgcacctgaagggttgtcgcctggcct

SEQ ID NO: 619845 - DNA, 120 bp, Artificial Sequence
  ENSG00000177646_17 (sequence is synthesized)
gggagagcctcttccaggttttgacctgcaggcagtgctctctaacaggaccatcacagcttctgaactgagccggagagagagaatggaattgctgacccctggaactggcgggtattc

SEQ ID NO: 619846 - DNA, 120 bp, Artificial Sequence
  ENSG00000177646_18 (sequence is synthesized)
tggtcattgaggagacaccatagtggaaactggggcttatgctgctgcctccagggtgtgaggtgggtggggacctgtgtcaggtgtggatagccatttctgctcaaccacacattctct

SEQ ID NO: 619847 - DNA, 120 bp, Artificial Sequence
  ENSG00000177646_19 (sequence is synthesized)
aagaaacagcttgaaagctctgtctgggtcattcatttaaactagaagcagaggcacttaaaacatgtaccaggaaccatttaacaaagaatataaaatgtcacaatctgtgtactgtta

SEQ ID NO: 619848 - DNA, 120 bp, Artificial Sequence
  ENSG00000177646_20 (sequence is synthesized)
cccttgctgtctggctcccgcttttcaccctcagctgcaagactggtgttgaactttgtgagattccccaaacctgccagagagatacaccctgcggccgaggcgtgttaacactccgga

SEQ ID NO: 619849 - DNA, 120 bp, Artificial Sequence
  ENSG00000177646_21 (sequence is synthesized)
gtaggtgccattgtcaccgtgtgcttctcaggtcccatacctgcccagcaggggccagtccagggcagtgggaggaaagagctgccttgacctggagtgggggcatgggggtgtggcgca

SEQ ID NO: 619850 - DNA, 120 bp, Artificial Sequence
  ENSG00000177646_22 (sequence is synthesized)
gccttgtggaggggaccttcccctgtggtagtggggggcttgctgcccagggaagccctcgctgccctgcccttatggccacagcaccctacagcttcagcataaataccgtatccccca

SEQ ID NO: 619851 - DNA, 120 bp, Artificial Sequence
  ENSG00000177646_23 (sequence is synthesized)
tctggtccctcacactagaggcagctggtttttcagaacctgaagaatgagaggtgtccctttaaaggtgccaggcctcacagccaacataagccagtgtttctcttctctgcccttctt

SEQ ID NO: 619852 - DNA, 120 bp, Artificial Sequence
  ENSG00000177646_24 (sequence is synthesized)
aagaggaagaggacttggagggactggtacagcaagacctacgtttcctgtctctgccttaccccaaagaaagaactgtcagtatctttgccgctggaaggtcccagtgaagcccagagc

SEQ ID NO: 619853 - DNA, 120 bp, Artificial Sequence
  ENSG00000177646_25 (sequence is synthesized)
ctctgcccccagctcttggctggacacctagagatcagtcatggctctttgatgggtggcagcttgagatcctgaaagctgctttcggtgtcgctctgaagacctgtcacttggaatccc

SEQ ID NO: 619854 - DNA, 120 bp, Artificial Sequence
  ENSG00000177646_26 (sequence is synthesized)
ctggctgtgagccaggcctggcgggatttcttctgggctttcttctcctcttccttcaagtccaggggctccaccatggctgagaggtaatcctgtgtggaggattcacatttagtgtgg

SEQ ID NO: 619855 - DNA, 120 bp, Artificial Sequence
  ENSG00000177646_27 (sequence is synthesized)
aacagaacacctctcaacatctgagccttgtctacttcccctagctgattggctttcatctgtatagttgagatcccccactgacctccaggcaggcatggtcagaataaagaactcatg

SEQ ID NO: 619856 - DNA, 120 bp, Artificial Sequence
  ENSG00000177646_28 (sequence is synthesized)
ccaagacgggggacccttggaaatgtggtggtgacgtgttccagctaaattttgtcaggggaattcggaaaactctaggctagaaagaagttttcccatttccagaagttagccaagatg

SEQ ID NO: 619857 - DNA, 120 bp, Artificial Sequence
  ENSG00000177646_29 (sequence is synthesized)
catgagactactttttgtcaagcatcctttgggaccaggcctagaacagaaatgttgatcaccctggagggatggggtggtgaggtcaggctgactttgtcagcctggggcccacttagc

SEQ ID NO: 619858 - DNA, 120 bp, Artificial Sequence
  ENSG00000177646_30 (sequence is synthesized)
tactcggatgggtacccttgctgggtgagttttctgcagtgtttttctgtgcacctttcaggtagagaggctccctagaatcgggagggcagctccacctggggcctgaatctagggacc

SEQ ID NO: 619859 - DNA, 120 bp, Artificial Sequence
  ENSG00000177646_31 (sequence is synthesized)
tgattggtggggcccttgctgctgaaggtggcagtagcacagtaagcactggcttctggtctcagccaagcttctgggacctggtcttgccttaacccctccctgaatctagagctcaaa

SEQ ID NO: 619860 - DNA, 120 bp, Artificial Sequence
  ENSG00000177646_32 (sequence is synthesized)
tggctgggagccgttctcccacaacctgaagagaaaggtgttattgactccactttctcaaggaacacaggagactaagacaggcaaagatgcagcccagggagggaccatgtgggggac

SEQ ID NO: 619861 - DNA, 120 bp, Artificial Sequence
  ENSG00000177663_0 (sequence is synthesized)
ctgggcccgggctggaagccggaagcgagcaaagtggagccgactcgaactccaccgcggaaaagaaagcctcagaacgttcgttcgctgcgtccccagccggggccgagccctccgcga

SEQ ID NO: 619862 - DNA, 120 bp, Artificial Sequence
  ENSG00000177663_1 (sequence is synthesized)
gctgtcccggggcccctgctggggctgctcctgctgctcctgggcgtgctggccccgggtggcgcctccctgcgactcctggaccaccgggcgctggtctgctcccagccggggctaaac

SEQ ID NO: 619863 - DNA, 120 bp, Artificial Sequence
  ENSG00000177663_2 (sequence is synthesized)
ggaccaccgggcgctggtctgctcccagccggggctaaactgcacggtcaagaatagtacctgcctggatgacagctggattcaccctcgaaacctgaccccctcctccccaaaggacct

SEQ ID NO: 619864 - DNA, 120 bp, Artificial Sequence
  ENSG00000177663_3 (sequence is synthesized)
gcagatccagctgcactttgcccacacccaacaaggagacctgttccccgtggctcacatcgaatggacactgcagacagacgccagcatcctgtacctcgagggtgcagagttatctgt

SEQ ID NO: 619865 - DNA, 120 bp, Artificial Sequence
  ENSG00000177663_4 (sequence is synthesized)
cctgcagctgaacaccaatgaacgtttgtgcgtcaggtttgagtttctgtccaaactgaggcatcaccacaggcggtggcgttttaccttcagccactttgtggttgaccctgaccagga

SEQ ID NO: 619866 - DNA, 120 bp, Artificial Sequence
  ENSG00000177663_5 (sequence is synthesized)
atatgaggtgaccgttcaccacctgcccaagcccatccctgatggggacccaaaccaccagtccaagaatttccttgtgcctgactgtgagcacgccaggatgaaggtaaccacgccatg

SEQ ID NO: 619867 - DNA, 120 bp, Artificial Sequence
  ENSG00000177663_6 (sequence is synthesized)
catgagctcaggcagcctgtgggaccccaacatcaccgtggagaccctggaggcccaccagctgcgtgtgagcttcaccctgtggaacgaatctacccattaccagatcctgctgaccag

SEQ ID NO: 619868 - DNA, 120 bp, Artificial Sequence
  ENSG00000177663_7 (sequence is synthesized)
ttttccgcacatggagaaccacagttgctttgagcacatgcaccacatacctgcgcccagaccagaagagttccaccagcgatccaacgtcacactcactctacgcaaccttaaagggtg

SEQ ID NO: 619869 - DNA, 120 bp, Artificial Sequence
  ENSG00000177663_8 (sequence is synthesized)
ctgtcgccaccaagtgcagatccagcccttcttcagcagctgcctcaatgactgcctcagacactccgcgactgtttcctgcccagaaatgccagacactccagaaccaattccggacta

SEQ ID NO: 619870 - DNA, 120 bp, Artificial Sequence
  ENSG00000177663_9 (sequence is synthesized)
catgcccctgtgggtgtactggttcatcacgggcatctccatcctgctggtgggctccgtcatcctgctcatcgtctgcatgacctggaggctagctgggcctggaagtgaaaaatacag

SEQ ID NO: 619871 - DNA, 120 bp, Artificial Sequence
  ENSG00000177663_10 (sequence is synthesized)
tgatgacaccaaatacaccgatggcctgcctgcggctgacctgatccccccaccgctgaagcccaggaaggtctggatcatctactcagccgaccaccccctctacgtggacgtggtcct

SEQ ID NO: 619872 - DNA, 120 bp, Artificial Sequence
  ENSG00000177663_11 (sequence is synthesized)
gaaattcgcccagttcctgctcaccgcctgcggcacggaagtggccctggacctgctggaagagcaggccatctcggaggcaggagtcatgacctgggtgggccgtcagaagcaggagat

SEQ ID NO: 619873 - DNA, 120 bp, Artificial Sequence
  ENSG00000177663_12 (sequence is synthesized)
ggtggagagcaactctaagatcatcgtcctgtgctcccgcggcacgcgcgccaagtggcaggcgctcctgggccggggggcgcctgtgcggctgcgctgcgaccacggaaagcccgtggg

SEQ ID NO: 619874 - DNA, 120 bp, Artificial Sequence
  ENSG00000177663_13 (sequence is synthesized)
ggacctgttcactgcagccatgaacatgatcctcccggacttcaagaggccagcctgcttcggcacctacgtagtctgctacttcagcgaggtcagctgtgacggcgacgtccccgacct

SEQ ID NO: 619875 - DNA, 120 bp, Artificial Sequence
  ENSG00000177663_14 (sequence is synthesized)
gttcggcgcggcgccgcggtacccgctcatggacaggttcgaggaggtgtacttccgcatccaggacctggagatgttccagccgggccgcatgcaccgcgtaggggagctgtcggggga

SEQ ID NO: 619876 - DNA, 120 bp, Artificial Sequence
  ENSG00000177663_15 (sequence is synthesized)
caactacctgcggagcccgggcggcaggcagctccgcgccgccctggacaggttccgggactggcaggtccgctgtcccgactggttcgaatgtgagaacctctactcagcagatgacca

SEQ ID NO: 619877 - DNA, 120 bp, Artificial Sequence
  ENSG00000177663_16 (sequence is synthesized)
ggatgccccgtccctggacgaagaggtgtttgaggagccactgctgcctccgggaaccggcatcgtgaagcgggcgcccctggtgcgcgagcctggctcccaggcctgcctggccataga

SEQ ID NO: 619878 - DNA, 120 bp, Artificial Sequence
  ENSG00000177663_17 (sequence is synthesized)
cccgctggtcggggaggaaggaggagcagcagtggcaaagctggaacctcacctgcagccccggggtcagccagcgccgcagcccctccacaccctggtgctcgccgcagaggagggggc

SEQ ID NO: 619879 - DNA, 120 bp, Artificial Sequence
  ENSG00000177663_18 (sequence is synthesized)
ccgcggtggagcctgggcccctggctgacggtgccgcagtccggctggcactggcgggggagggcgaggcctgcccgctgctgggcagcccgggcgctgggcgaaatagcgtcctcttcc

SEQ ID NO: 619880 - DNA, 120 bp, Artificial Sequence
  ENSG00000177663_19 (sequence is synthesized)
cctcttcctccccgtggaccccgaggactcgccccttggcagcagcacccccatggcgtctcctgacctccttccagaggacgtgagggagcacctcgaaggcttgatgctctcgctctt

SEQ ID NO: 619881 - DNA, 120 bp, Artificial Sequence
  ENSG00000177663_20 (sequence is synthesized)
cgagcagagtctgagctgccaggcccaggggggctgcagtagacccgccatggtcctcacagacccacacacgccctacgaggaggagcagcggcagtcagtgcagtctgaccagggcta

SEQ ID NO: 619882 - DNA, 120 bp, Artificial Sequence
  ENSG00000177663_21 (sequence is synthesized)
catctccaggagctccccgcagccccccgagggactcacggaaatggaggaagaggaggaagaggagcaggacccagggaagccggccctgccactctctcccgaggacctggagagcct

SEQ ID NO: 619883 - DNA, 120 bp, Artificial Sequence
  ENSG00000177663_22 (sequence is synthesized)
gaggagcctccagcggcagctgcttttccgccagctgcagaagaactcgggctgggacacgatggggtcagagtcagaggggcccagtgcatgagggcggctccccagggaccgcccaga

SEQ ID NO: 619884 - DNA, 120 bp, Artificial Sequence
  ENSG00000177663_23 (sequence is synthesized)
tcccagctttgagagaggagtgtgtgtgcacgtattcatctgtgtgtacatgtctgcatgtgtatatgttcgtgtgtgaaatgtaggctttaaaatgtaaatgtctggattttaatccca

SEQ ID NO: 619885 - DNA, 120 bp, Artificial Sequence
  ENSG00000177663_24 (sequence is synthesized)
ggcatccctcctaacttttctttgtgcagcggtctggttatcgtctatccccaggggaatccacacagcccgctcccaggagctaatggtagagcgtccttgaggctccattattcgttc

SEQ ID NO: 619886 - DNA, 120 bp, Artificial Sequence
  ENSG00000177663_25 (sequence is synthesized)
attcagcatttattgtgcacctactatgtggcgggcatttgggataccaagataaattgcatgcggcatggccccagccatgaaggaacttaaccgctagtgccgaggacacgttaaacg

SEQ ID NO: 619887 - DNA, 63 bp, Artificial Sequence
  ENSG00000177663_26 (sequence is synthesized)
aacagaggtggatcactctgaggtcaggagtttgagccagcctggccaacatggtgaaacccc

SEQ ID NO: 619888 - DNA, 76 bp, Artificial Sequence
  ENSG00000177663_27 (sequence is synthesized)
gccattgcactgcagcctggtggtcacgcgggatgtaaacgctgaatgggccaggtgcagtggctcatgcttgtaa

SEQ ID NO: 619889 - DNA, 73 bp, Artificial Sequence
  ENSG00000177663_28 (sequence is synthesized)
gacatagtgagacctcatctctacctaaatttttttttagtcagtcatggtggcacatgcctgtagtcccagc

SEQ ID NO: 619890 - DNA, 74 bp, Artificial Sequence
  ENSG00000177663_29 (sequence is synthesized)
agtgagacctcatctctacctaaatttttttttagtcagtcagatgatcacttgagcccaggaggtagaggctg

SEQ ID NO: 619891 - DNA, 120 bp, Artificial Sequence
  ENSG00000177663_30 (sequence is synthesized)
agtgagaccctgtctcaaaaaaaataaaaaagtagaaagatggagtggaagcctgcccagggttgtgagcatgcacgggaaaggcacccaggtcaggggggatccccgaggagatgcctg

SEQ ID NO: 619892 - DNA, 120 bp, Artificial Sequence
  ENSG00000177663_31 (sequence is synthesized)
cctgagctgaaggattgtggttggggaaagcgtagtcccagcaaggaagcagtttgtgggtaagtgctgggaggtgagtggagtgagcttgtcagggagctgctggtggagcctggaggg

SEQ ID NO: 619893 - DNA, 120 bp, Artificial Sequence
  ENSG00000177663_32 (sequence is synthesized)
gaaggagggaggcagtgagagagatcggggtggggggtggggggatgtcgccagagctcaggggtggggacagccttgtgcgcatcagtcctgaggcctggggcacctttcgtctgatga

SEQ ID NO: 619894 - DNA, 120 bp, Artificial Sequence
  ENSG00000177663_33 (sequence is synthesized)
gcctctgcatggagagaggctgagggctaaacacagctggatgtcacctgagttcatttataggaagagagaaatgtcgaggtgaaacgtaaaagcatctggcaggaaggtgagtctgaa

SEQ ID NO: 619895 - DNA, 120 bp, Artificial Sequence
  ENSG00000177663_34 (sequence is synthesized)
aggaagccccagggtgcaagggcaaggaaatgaggggtggtgggtcagtgaagatctgggcagaccttgtgtggggaaggggtgctgctgtgacttcagggtctgaggtccaaagacagc

SEQ ID NO: 619896 - DNA, 120 bp, Artificial Sequence
  ENSG00000177663_35 (sequence is synthesized)
atttgaaaagaggctctgaagccagtgtttgaagaatttgttcctgaagtacctcctgggggtaggctagaggcttctggcttcagggtcctgaagaacacattgaggtgccgtctgaca

SEQ ID NO: 619897 - DNA, 120 bp, Artificial Sequence
  ENSG00000177663_36 (sequence is synthesized)
ctggaatagggtgcccttcattcctatgcctgagtccttaactatatttccaacctccagtgaggaggagaagattcggaaatgtgacaggagagcaaacaggacagtttgcatgtgtgt

SEQ ID NO: 619898 - DNA, 120 bp, Artificial Sequence
  ENSG00000177663_37 (sequence is synthesized)
gtgcgcacacatacatgtgcgtgaaagattatcaataaaagtgcataaatttgttgatctggtaagagtttctagcaggaaggtcgagccacttactgtaggtcaagaagttgctagttg

SEQ ID NO: 619899 - DNA, 120 bp, Artificial Sequence
  ENSG00000177663_38 (sequence is synthesized)
cggagttttttcttgcagttagactttacctagtggtagcagggccaccaaagctctgtgtcccagatggtgtatggcccataatccacccaacagcagcaaaggaccaggcaaaggaga

SEQ ID NO: 619900 - DNA, 120 bp, Artificial Sequence
  ENSG00000177663_39 (sequence is synthesized)
acaggagcagaagcctcccagccactagccttttgggctcagtctctccaataatcctggagaggggcttcgttgggtctggacacctaccatgcattctgtgacctttccctagcttcc

SEQ ID NO: 619901 - DNA, 120 bp, Artificial Sequence
  ENSG00000177663_40 (sequence is synthesized)
aataaataactgtttgacgcccagagtacaggataccacaatgcactcttcctgcgtagagcacatgttcccatctgctcccattcctcaggaaccttgaattctagctctgctggcctt

SEQ ID NO: 619902 - DNA, 120 bp, Artificial Sequence
  ENSG00000177663_41 (sequence is synthesized)
tgagcccatgccagtaaatgtcctgatgggcattgcctactatctccagggcagctgcctttgtcctcctaacagctttattggagtacagttcacttaccatacaatccacaattgacc

SEQ ID NO: 619903 - DNA, 120 bp, Artificial Sequence
  ENSG00000177663_42 (sequence is synthesized)
ctgcacaatttgatgccggtttagtatagtcacagttcagcagccatcagcacagtcagtcttagagtttactacccccaaaagaaatccagccccccttagtcaccaccccaacctccc

SEQ ID NO: 619904 - DNA, 120 bp, Artificial Sequence
  ENSG00000177663_43 (sequence is synthesized)
catccctaggcacccctaggctactttgatctctgtagacttgcctcttctggacatgacatagagaaaggagtcataaattctccaaggtgtctgtttcttctttaatgtcattccctg

SEQ ID NO: 619905 - DNA, 120 bp, Artificial Sequence
  ENSG00000177663_44 (sequence is synthesized)
tttctcctcacattccctccccatttcctgggcccagtctcacactggtccttgcttaccctaaatgctattaattccatcactctgagtatggtgtttgctgtccgctgaatgccaaga

SEQ ID NO: 619906 - DNA, 120 bp, Artificial Sequence
  ENSG00000177663_45 (sequence is synthesized)
gcttcaagagtgtgtgtaaataaagccacacctttatttttgtattattctgaaccatggctaataaattgtttcaccaagaaatgtctctctaagaacaggtgccctccacgctgtgcc

SEQ ID NO: 619907 - DNA, 120 bp, Artificial Sequence
  ENSG00000177663_46 (sequence is synthesized)
cctcccacctcttcagctcgtctcctgagtgtgcagaggtggttccggttgggaaagaagcagcggagcatctaaccatgcctgtgtccaggccgattatgcacgcagccaccaacaagc

SEQ ID NO: 619908 - DNA, 90 bp, Artificial Sequence
  ENSG00000177663_47 (sequence is synthesized)
cctgtgtccaggccgattatgcacgcagccaccaacaagctcccaactcccgcgtagagtttcatgactttttcctgcctactatcttga

SEQ ID NO: 619909 - DNA, 120 bp, Artificial Sequence
  ENSG00000177663_48 (sequence is synthesized)
ctgcataggaaggtccttgaaggtgtttagggtctaaaaagggtggtgttcggtctctgaaacatccattcagcagtttgagctgggatctctgaatgcaagggtatgatggatatactt

SEQ ID NO: 619910 - DNA, 120 bp, Artificial Sequence
  ENSG00000177663_49 (sequence is synthesized)
agggtatgatggatatacttctttcttgcttttgttgtgttttggttttttgtttgtttttaagtcagggtctctctgtcaccaggctgtattacagtggtgcaatcatggctcactgca

SEQ ID NO: 619911 - DNA, 120 bp, Artificial Sequence
  ENSG00000177663_50 (sequence is synthesized)
ctcaagccatctttccacctcagcctgccagtggctagaactacaggcgtgcaccactgtgcccggctaatttgtgtgtatatattttgtagaaatggggtttcaccatgttgtccaggc

SEQ ID NO: 619912 - DNA, 90 bp, Artificial Sequence
  ENSG00000177663_51 (sequence is synthesized)
caccgtgcctggcctttcctgtttatctttgaaaattaaatagggcataagagagaagaagatgtacttacaatgcagtgggtggtttta

SEQ ID NO: 619913 - DNA, 120 bp, Artificial Sequence
  ENSG00000177663_52 (sequence is synthesized)
gagagaagaagatgtacttacaatgcagtgggtggttttaactctatagcctttgggctctgtggttggtgctccccttcctaaataaatgaggtgtatgcagggccctcttctgcctta

SEQ ID NO: 619914 - DNA, 120 bp, Artificial Sequence
  ENSG00000177663_53 (sequence is synthesized)
gcgccctgccagctgggactccagcaaggcccggggcacctgaggacagagtgagatggagggccgctgctccagcagccgggcctgcatcccacaagtcaactgtgtcggacagaggat

SEQ ID NO: 619915 - DNA, 120 bp, Artificial Sequence
  ENSG00000177663_54 (sequence is synthesized)
ccttacaaagaagaggcagcagggttgggggctggccagctgctcgtccgccctaggtagcttgctcatctgtaaagtgggtggggcaggagttcccacctcatggggtcctggcaagcc

SEQ ID NO: 619916 - DNA, 120 bp, Artificial Sequence
  ENSG00000177663_55 (sequence is synthesized)
tgcagtatccccgagtggcaccagcctgcttctggggcagagcagtttgtgccccctgaggtaccactgatcctctttccctgctattaggtattgctctcttcctccggtgtttgcctt

SEQ ID NO: 619917 - DNA, 120 bp, Artificial Sequence
  ENSG00000177663_56 (sequence is synthesized)
ttcagattatagaagtaatatgtgttcccatatttggcgtctctcaggagctcaggaagtacttggctgagtgaacatgtccattgtggaaaaatggcaacaatatggattccatgggta

SEQ ID NO: 619918 - DNA, 120 bp, Artificial Sequence
  ENSG00000177663_57 (sequence is synthesized)
tattttatagaagaatatgaagaaaagcagctacccctaaacccattgcacaagctgttcatgttaattctgtacccgacgctttccccacggggcctcccctcactctgaaatggcatc

SEQ ID NO: 619919 - DNA, 120 bp, Artificial Sequence
  ENSG00000177663_58 (sequence is synthesized)
caggtccatcttgccctccacctctgcatggctctccatgccccatcgcctctcccagatcctagcactgggtccacactctcgccctgtccatttaggttgatgaaagcaggcagtcac

SEQ ID NO: 619920 - DNA, 120 bp, Artificial Sequence
  ENSG00000177663_59 (sequence is synthesized)
ccgggtgggccagtcttgcctgtgggaggaacatgcagtctcctgtctcatggtttgaagtgtgccaggaagcctggcccagcccacctccccctggagtccttcccaggaggaataacc

SEQ ID NO: 619921 - DNA, 120 bp, Artificial Sequence
  ENSG00000177663_60 (sequence is synthesized)
ccttaggtcattgactataagatgagttcgctcactggatccttcctctctgatgagacaggaagaaggtacacagtgaccaggtaggaggaggagagggagtagaaaggagggatgcgg

SEQ ID NO: 619922 - DNA, 120 bp, Artificial Sequence
  ENSG00000177663_61 (sequence is synthesized)
gtggctggtccctgcatttgcctgcttccctgcacgggtgtcccactggccgcctctgctcaccagtgtcatgggattctctcagaagatgaaaacagcccctgcttttttgctagaatg

SEQ ID NO: 619923 - DNA, 120 bp, Artificial Sequence
  ENSG00000177663_62 (sequence is synthesized)
gctgagctttcatggaaaggaagctggacccaagcaacagccgactaccgaaggttgcctggagcagtgcagatgtgggaggaagaagggccttggtgcacactggcttttcttcctgac

SEQ ID NO: 619924 - DNA, 120 bp, Artificial Sequence
  ENSG00000177663_63 (sequence is synthesized)
tgcaatgtggcattgtgccagctacctcctctttctcggcctcaggaaaatggagagaaagcagccctgaaggtggctgtgacgagggaaggggcagagggcctgacagtcaaccacgcg

SEQ ID NO: 619925 - DNA, 120 bp, Artificial Sequence
  ENSG00000177663_64 (sequence is synthesized)
ctatattttcctgttcttccttagggcaagaactgcatggccagactcaggcaaggcctaggtgtgggctgggcattgcctacacgtgaagagatcactccgcgtccctactgcacctgt

SEQ ID NO: 619926 - DNA, 120 bp, Artificial Sequence
  ENSG00000177663_65 (sequence is synthesized)
cacaaagtgccttctgatatgcctggcaaaccaaaatcggtgagcgccagcttgcttccctagaagacatttctaaatattcataacatgcttgctcaaatcaatcaccttattttacat

SEQ ID NO: 619927 - DNA, 120 bp, Artificial Sequence
  ENSG00000177663_66 (sequence is synthesized)
ccgctccagggagaaatgaagacatggtcctacgttgttctgtaattattttctatgtaaattttgttccttgttacaattatatatgtcttaggggaaaggaccatttcacatgtgtca

SEQ ID NO: 619928 - DNA, 120 bp, Artificial Sequence
  ENSG00000177663_67 (sequence is synthesized)
cctcatgtgattctcaccacagccctgtgattgctcctgttttataaataatgacatagttccagttgatggccaaagccacagctaacgagaggcagagagagctcaggctcccaggag

SEQ ID NO: 619929 - DNA, 120 bp, Artificial Sequence
  ENSG00000177663_68 (sequence is synthesized)
cttccactctcagaccttgcctcccgggctgccctgagtgaaacgcctgcttagcatttggcacagccagaagcagcaagctagggtcacaacacagagaggggctgtgtaatactggct

SEQ ID NO: 619930 - DNA, 120 bp, Artificial Sequence
  ENSG00000177663_69 (sequence is synthesized)
gcctctgtgctaagaaaaaaaaaaaatcactgtgtgtttgtttattttggtgcaggcccagtgttcttgcttagacttaatactacccttcatgttaaaataaaaccaaacaaaaaccca

SEQ ID NO: 619931 - DNA, 120 bp, Artificial Sequence
  ENSG00000177663_70 (sequence is synthesized)
acttctgacagaagtcttgccatgccactccaggttcaggctgtgagctacagccatccgcaggagggttcccggagaattgtggatgcgtgcacctgcgcttcctgtcgagaacattca

SEQ ID NO: 619932 - DNA, 120 bp, Artificial Sequence
  ENSG00000177663_71 (sequence is synthesized)
ttatgcaaaagtcaggaaaggagaaacagaactgtcatttggattgtgaaagtattctctggggagctgccctactgtatctataatataatttgatttgccacagcttgtcactgtaaa

SEQ ID NO: 619933 - DNA, 120 bp, Artificial Sequence
  ENSG00000177663_72 (sequence is synthesized)
gtgagagacatctgtgctgttgattttgttttgttttaattcaaagaggcacatattcaagtgtctgagccaattagagacccctgacatataacaataaagcagctcttactacaactg

SEQ ID NO: 619934 - DNA, 120 bp, Artificial Sequence
  ENSG00000177666_0 (sequence is synthesized)
agacgcaggcagccccaaagcctgaacaggcagggccagacccagcttcttcgcctccgccagcggggaccccgagctagagccgcagcgggacctgcccggcccccggctccagcgagc

SEQ ID NO: 619935 - DNA, 120 bp, Artificial Sequence
  ENSG00000177666_1 (sequence is synthesized)
gagcggcgagcaggcggctcacagaggcctggccgcccacggaacccggggcccggcggccgccgccgcgatgtttccccgcgagaagacgtggaacatctcgttcgcgggctgcggctt

SEQ ID NO: 619936 - DNA, 120 bp, Artificial Sequence
  ENSG00000177666_2 (sequence is synthesized)
cctcggcgtctactacgtcggcgtggcctcctgcctccgcgagcacgcgcccttcctggtggccaacgccacgcacatctacggcgcctcggccggggcgctcacggccacggcgctggt

SEQ ID NO: 619937 - DNA, 120 bp, Artificial Sequence
  ENSG00000177666_3 (sequence is synthesized)
caccggggtctgcctgggtgaggctggtgccaagttcattgaggtatctaaagaggcccggaagcggttcctgggccccctgcacccctccttcaacctggtaaagatcatccgcagttt

SEQ ID NO: 619938 - DNA, 120 bp, Artificial Sequence
  ENSG00000177666_4 (sequence is synthesized)
cctgctgaaggtcctgcctgctgatagccatgagcatgccagtgggcgcctgggcatctccctgacccgcgtgtcagacggcgagaatgtcattatatcccacttcaactccaaggacga

SEQ ID NO: 619939 - DNA, 120 bp, Artificial Sequence
  ENSG00000177666_5 (sequence is synthesized)
gctcatccaggccaatgtctgcagcggtttcatccccgtgtactgtgggctcatccctccctccctccagggggtgcgctacgtggatggtggcatttcagacaacctgccactctatga

SEQ ID NO: 619940 - DNA, 120 bp, Artificial Sequence
  ENSG00000177666_6 (sequence is synthesized)
gcttaagaacaccatcacagtgtcccccttctcgggcgagagtgacatctgtccgcaggacagctccaccaacatccacgagctgcgggtcaccaacaccagcatccagttcaacctgcg

SEQ ID NO: 619941 - DNA, 120 bp, Artificial Sequence
  ENSG00000177666_7 (sequence is synthesized)
caacctctaccgcctctccaaggccctcttcccgccggagcccctggtgctgcgagagatgtgcaagcagggataccgggatggcctgcgctttctgcagcggaacggcctcctgaaccg

SEQ ID NO: 619942 - DNA, 120 bp, Artificial Sequence
  ENSG00000177666_8 (sequence is synthesized)
gcccaaccccttgctggcgttgccccccgcccgcccccacggcccagaggacaaggaccaggcagtggagagcgcccaagcggaggattactcgcagctgcccggagaagatcacatcct

SEQ ID NO: 619943 - DNA, 120 bp, Artificial Sequence
  ENSG00000177666_9 (sequence is synthesized)
ggagcacctgcccgcccggctcaatgaggccctgctggaggcctgcgtggagcccacggacctgctgaccaccctctccaacatgctgcctgtgcgtctggccacggccatgatggtgcc

SEQ ID NO: 619944 - DNA, 120 bp, Artificial Sequence
  ENSG00000177666_10 (sequence is synthesized)
gagagcgctctgtccttcaccatccgcttgctggagtggctgcccgacgttcccgaggacatccggtggatgaaggagcagacgggcagcatctgccagtacctggtgatgcgcgccaag

SEQ ID NO: 619945 - DNA, 120 bp, Artificial Sequence
  ENSG00000177666_11 (sequence is synthesized)
aggaagctgggcaggcacctgccctccaggctgccggagcaggtggagctgcgccgcgtccagtcgctgccgtccgtgccgctgtcctgcgccgcctacagagaggcactgcccggctgg

SEQ ID NO: 619946 - DNA, 120 bp, Artificial Sequence
  ENSG00000177666_12 (sequence is synthesized)
atgcgcaacaacctctcgctgggggacgcgctggccaagtgggaggagtgccagcgccagctgctgctcggcctcttctgcaccaacgtggccttcccgcccgaagctctgcgcatgcgc

SEQ ID NO: 619947 - DNA, 120 bp, Artificial Sequence
  ENSG00000177666_13 (sequence is synthesized)
cccgcggacccagcatccccgcagcaccagctggccgggcctgcccccttgctgagcacccctgctcccgaggcccggcccgtgatcggggccctggggctgtgagaccccgaccctctc

SEQ ID NO: 619948 - DNA, 120 bp, Artificial Sequence
  ENSG00000177666_14 (sequence is synthesized)
gggctgtgagaccccgaccctctcgaggaaccctgcctgagacgcctccattaccactgcgcagtgagatgaggggactcacagttgccaagaggggtctttgccgtgggccccctcgcc

SEQ ID NO: 619949 - DNA, 120 bp, Artificial Sequence
  ENSG00000177666_15 (sequence is synthesized)
agccactcaccagctgcatgcactgagaggggaggtttccacacccctcccctgggccgctgaggccccgcgcacctgtgccttaatcttccctcccctgtgctgcccgagcacctcccc

SEQ ID NO: 619950 - DNA, 120 bp, Artificial Sequence
  ENSG00000177666_16 (sequence is synthesized)
cgcccctttactcctgagaactttgcagctgcccttccctccccgtttttcatggcctgctgaaatatgtgtgtgaagaattatttattttcgccaaagcacatgtaataaatgctgcag

SEQ ID NO: 619951 - DNA, 120 bp, Artificial Sequence
  ENSG00000177666_17 (sequence is synthesized)
cccagcctctgcccactttgtgtgtatgtgaccgcctgcttacttgcagtgagagcctggtggccagggtctggccctaccttggctgaccagcctctccacagctgcaggccaggtctc

SEQ ID NO: 619952 - DNA, 120 bp, Artificial Sequence
  ENSG00000177666_18 (sequence is synthesized)
ccagcgtcgcactcctgggcctggcatttggaacctgccaggctggcctgggaacacccccctacaggcacatatgaacgtactgcattcctgccgacccccctgtctaggatgcatcca

SEQ ID NO: 619953 - DNA, 120 bp, Artificial Sequence
  ENSG00000177666_19 (sequence is synthesized)
caccccccccaattttgcccagcagcctcctggctgacccttggccacagccttctgagggccaatggaaatatttgggaccaagattcttggtaaataaaaacgaaaatgtttgcaaaa

SEQ ID NO: 619954 - DNA, 120 bp, Artificial Sequence
  ENSG00000177666_20 (sequence is synthesized)
gcctcagtcggccccctggcttcaagatacatcaaggtccctgctacccgagccaaggacacctctcccacagtgcttccccaccctgctcccaacaagactccttctcacgggtggtct

SEQ ID NO: 619955 - DNA, 120 bp, Artificial Sequence
  ENSG00000177666_21 (sequence is synthesized)
tgcacagctggagcccatagtgcagcaggtgctggctgaagagcccctggctccacactgccccactcctgaccagggtgatgcactggaggagggcttggacctcagctcctccctcag

SEQ ID NO: 619956 - DNA, 120 bp, Artificial Sequence
  ENSG00000177666_22 (sequence is synthesized)
tgctcccgaccacttccagggactatccccaagctggccagcactcctgcgccccaagaggagtgtttggggtgcttcctcttggctgcagtgggacacaggtgtgccttcctaggaact

SEQ ID NO: 619957 - DNA, 120 bp, Artificial Sequence
  ENSG00000177666_23 (sequence is synthesized)
gggccctgactacttccagcccaacactcccgggcctgtgaactgtgacctgtgtgccgggatgggttttgtgggtctgccccatccccgcactgctggatctggccaagtgggtgaagg

SEQ ID NO: 619958 - DNA, 120 bp, Artificial Sequence
  ENSG00000177666_24 (sequence is synthesized)
ctaaggccggtcagagttgagtttctgccttgtcccctctcctgggctagatgccacaccaggcccagtgactcatagggcaggcagttgggaaataccaggcagagggcaggtcctggt

SEQ ID NO: 619959 - DNA, 120 bp, Artificial Sequence
  ENSG00000177666_25 (sequence is synthesized)
ctcagctggccagcctctgctgtctgccatcccaggggaggtggccaaagtcccaactgtgagccaggccccacattcactgggcctcctccagggtctgtatgccatggaaccctggac

SEQ ID NO: 619960 - DNA, 120 bp, Artificial Sequence
  ENSG00000177666_26 (sequence is synthesized)
acgggaggggaggaggggaggcaggagggaaagagagagaggagaggacggtgagcaggggagggaagccgagcgggtcctgggccccgctgcctccactggccgccgacctcccgccca

SEQ ID NO: 619961 - DNA, 120 bp, Artificial Sequence
  ENSG00000177666_27 (sequence is synthesized)
agggggtggtgagtattcctagccctggacaccttctatggggtgggccgtgggatgagggacagaggaggaggccgcctagagccatccttcaggcccttgctctgccaccgcctgtta

SEQ ID NO: 619962 - DNA, 120 bp, Artificial Sequence
  ENSG00000177666_28 (sequence is synthesized)
cccacttcccctgtgttactcaagaaacagctgtggcaacgcacgcttcctggccccccatcccttcctccgtccctgccctcccccgtctaccatctgctcagtgcccaggctggccca

SEQ ID NO: 619963 - DNA, 120 bp, Artificial Sequence
  ENSG00000177666_29 (sequence is synthesized)
agccactgaatggggcccttggtggccgggtggggtggctggggtgggtggccagtgcagccacaggccctcacatacggtcctgtctgtgtgtcccgtggaagcgctacgtggatggtg

SEQ ID NO: 619964 - DNA, 120 bp, Artificial Sequence
  ENSG00000177669_0 (sequence is synthesized)
actcttggaggaaggcatcagttaaggacactggaaaagacaggctcttttgttctggttcctaatggagtggctttggctgttctttctccatcctatatcgttttaccagggggctgc

SEQ ID NO: 619965 - DNA, 120 bp, Artificial Sequence
  ENSG00000177669_1 (sequence is synthesized)
atttccctttgcacttctcttcaattatctctgcatcatggattcattctccactcgtgccaggtacctctttctcctgactggaggaggtgccctggccgtggctgccatgggttccta

SEQ ID NO: 619966 - DNA, 120 bp, Artificial Sequence
  ENSG00000177669_2 (sequence is synthesized)
cgccgtgctcgtcttcacccctgctgtctgcgctgtggctctcctctgttccctggctcctcagcaagtccacaggtggaccttctgctttcagatgagctggcagaccttgtgtcacct

SEQ ID NO: 619967 - DNA, 120 bp, Artificial Sequence
  ENSG00000177669_3 (sequence is synthesized)
aggtctgcactacactgagtattatctgcatgagcctccttctgtgaggttctgcatcactctttcttctctcatgctcttgacccagagggtcacgtccctctctctggacatttgtga

SEQ ID NO: 619968 - DNA, 120 bp, Artificial Sequence
  ENSG00000177669_4 (sequence is synthesized)
ggggaaagtgaaggcagcatctggaggcttcaggagcaggagctctttgtctgagcatgtgtgtaaggcactgccctatttcagctacttgctctttttccctgctctcctgggaggctc

SEQ ID NO: 619969 - DNA, 120 bp, Artificial Sequence
  ENSG00000177669_5 (sequence is synthesized)
tctgtgctccttccagcgatttcaggctcgtgttcaagggtccagtgctttgcatcccagacactctttctgggctctgagctggaggggtctgcagattcttggactagaatgcctaaa

SEQ ID NO: 619970 - DNA, 120 bp, Artificial Sequence
  ENSG00000177669_6 (sequence is synthesized)
agctgggcttttcaagctcacctactactcccactggatcctggacgactccctcctccacgcagcgggctttgggcctgagcttggtcagagccctggagaggagggatatgtccccga

SEQ ID NO: 619971 - DNA, 120 bp, Artificial Sequence
  ENSG00000177669_7 (sequence is synthesized)
tgcagacatctggaccctggaaagaacccacaggatatctgtgttctcaagaaagtggaaccaaagcacagctcgatggctccgacggcttgtattccagcacagcagggcttggccgtt

SEQ ID NO: 619972 - DNA, 120 bp, Artificial Sequence
  ENSG00000177669_8 (sequence is synthesized)
gttgcagacatttgccttctctgcctggtggcatggactccatccaggacaggtgtttggtttcgtttgctgggccgtgatggtggaagctgactacctgattcactcctttgccaatga

SEQ ID NO: 619973 - DNA, 120 bp, Artificial Sequence
  ENSG00000177669_9 (sequence is synthesized)
gtttatcagatcctggccgatgaggctgttctatagaaccctcacctgggcccacacccagttgatcattgcctacatcatgctggctgtggaggtcaggagtctctcctctctctggtt

SEQ ID NO: 619974 - DNA, 120 bp, Artificial Sequence
  ENSG00000177669_10 (sequence is synthesized)
gctctgtaattcgtacaacagtgtctttcccatggtgtactgtattctgcttttgctattggcgaagagaaagcacaaatgtaactgacatctttccctggctttcaccttaaacaccca

SEQ ID NO: 619975 - DNA, 120 bp, Artificial Sequence
  ENSG00000177669_11 (sequence is synthesized)
ggaaacattttagaaagtgccagatgacgcatcgataatgcatacatttgaacttttccataataaaattttttctaaagttttggatggatatacccagtgacttgcagtaggaatttg

SEQ ID NO: 619976 - DNA, 120 bp, Artificial Sequence
  ENSG00000177669_12 (sequence is synthesized)
tgtatctactttagcaagctattctgctggtactgaggatacaaaaaggaaaaagatgtggtttcttcccttaaggtttacagtctagatgtggaagcaaagattaagtaaagtgataca

SEQ ID NO: 619977 - DNA, 120 bp, Artificial Sequence
  ENSG00000177673_0 (sequence is synthesized)
actccctccaaccgccacaagcagcaaagggcatagatgaccacaggagagccctagggggaggccggctccaccagcagccccatacatggcactcccagggtaccccctgggcaacgt

SEQ ID NO: 619978 - DNA, 120 bp, Artificial Sequence
  ENSG00000177673_1 (sequence is synthesized)
ggatgacagcaggtctaaggacagcccagcaggagagccccaaggtcaggtcccactcacagcagatgtcttggcagtgagcagctctgtcgcatccactgactggcaggatatagatca

SEQ ID NO: 619979 - DNA, 120 bp, Artificial Sequence
  ENSG00000177673_2 (sequence is synthesized)
ggcctccttcaagacggccacccccagggccatatcaacatctggagacaaagacaagagtgcagttgttccagaacacggccagaagacacccagaaaaatcacacctctgcttcccag

SEQ ID NO: 619980 - DNA, 120 bp, Artificial Sequence
  ENSG00000177673_3 (sequence is synthesized)
ccaaaatccaagtcccctgcaagtgtctatgagccttcagaatccagcgtgggacaggcaggttcaagacgcaaggacaagtcagagtctagtggttttcccaagtcacctcctgggtaa

SEQ ID NO: 619981 - DNA, 120 bp, Artificial Sequence
  ENSG00000177673_4 (sequence is synthesized)
agacaagatgtcacaaatggcgagtgttcctgagagagagccggagtcagccccctctgccccgagtgctgagctacagtccacccagcacatggaggctcagcccgtcgagagtgatgc

SEQ ID NO: 619982 - DNA, 120 bp, Artificial Sequence
  ENSG00000177673_5 (sequence is synthesized)
cccacaccctgaagctgaagctttaccatctgatgagtccccagtggcaatgggggcaaatgtggtggacagcttaggagacctgcagacttggttcttccctccacctccagcaggcag

SEQ ID NO: 619983 - DNA, 120 bp, Artificial Sequence
  ENSG00000177673_6 (sequence is synthesized)
tgtgtccccgtcgcctggcccccacgaggtggccctggggagaaggcccctggactccagcctgtacacggccagtgaggagaacagctacatgcgctccatgaccagcctgctggacag

SEQ ID NO: 619984 - DNA, 120 bp, Artificial Sequence
  ENSG00000177673_7 (sequence is synthesized)
gggcgagggctccatcagctccctggcagacatcctggtgtggtccgagaccaccatgggcatggccatagccacaggcttcctggattccggccacagcactgtggcagacctgctgca

SEQ ID NO: 619985 - DNA, 120 bp, Artificial Sequence
  ENSG00000177673_8 (sequence is synthesized)
cagctcggggcccagcttgcgctcggtccccagcctggtgggaagcgtcagctcggccttctcctctgggctggtgtcagggaccagctcagccctgcgcaccatcacccgtgtgctgga

SEQ ID NO: 619986 - DNA, 120 bp, Artificial Sequence
  ENSG00000177673_9 (sequence is synthesized)
gacagtggagcagaggaccgtggagggcatccgctcagccatgcgctacctgaccagccacctcaccccacgccaggcccaggctgaccccaactatgattagagccctgcacagggacc

SEQ ID NO: 619987 - DNA, 120 bp, Artificial Sequence
  ENSG00000177673_10 (sequence is synthesized)
cccgaagggctggttcagtggcctccagagatccctgggaccctcacgccctgctcccttgcccattcttgctctggacggttcccccagcccatgcaataaatcaccagtgagcattta

SEQ ID NO: 619988 - DNA, 120 bp, Artificial Sequence
  ENSG00000177674_0 (sequence is synthesized)
aagtttgttccccgagttcggagcctaggagccccccgcggctgcggcgcaggtgccctcggcctgagtcgggatggagctgcctgctgtgaacctgaaggtgattctcctaggtcactg

SEQ ID NO: 619989 - DNA, 120 bp, Artificial Sequence
  ENSG00000177674_1 (sequence is synthesized)
gctgctgacaacctggggctgcattgtattctcaggctcctatgcctgggccaacttcaccatcctggccttgggcgtgtgggctgtggctcagcgggactccatcgacgccataagcat

SEQ ID NO: 619990 - DNA, 120 bp, Artificial Sequence
  ENSG00000177674_2 (sequence is synthesized)
gtttctgggtggcttgctggccaccatcttcctggacatcgtgcacatcagcatcttctacccgcgggtcagcctcacggacacgggccgctttggcgtgggcatggccatcctcagctt

SEQ ID NO: 619991 - DNA, 120 bp, Artificial Sequence
  ENSG00000177674_3 (sequence is synthesized)
gctgctcaagccgctctcctgctgcttcgtctaccacatgtaccgggagcgcgggggtgagctcctggtccacactggtttccttgggtcttctcaggaccgtagtgcctaccagacgat

SEQ ID NO: 619992 - DNA, 120 bp, Artificial Sequence
  ENSG00000177674_4 (sequence is synthesized)
gtcaagatgcccgagggtactgaagccagccacgctgcgcccggccctgccccgggccttcctcgtgcctgggaggtcgttctagggatgctcctgacctccgtctcttggacctaagat

SEQ ID NO: 619993 - DNA, 120 bp, Artificial Sequence
  ENSG00000177674_5 (sequence is synthesized)
ggaatgtgtccccagctcagggattgcctgaaccaagaggccaggagcccccatgggccgcccagtaccatgcacactcctgtcccgaactccctgaggcctcccctcccttcagggcac

SEQ ID NO: 619994 - DNA, 120 bp, Artificial Sequence
  ENSG00000177674_6 (sequence is synthesized)
ccactggttcccaggctggaaccagggtctctctttacctcctaccccatggtggcaccacagaggccctcagccgagtcctgcctgagtgttgcaagctcaggcctttaaggactgctg

SEQ ID NO: 619995 - DNA, 120 bp, Artificial Sequence
  ENSG00000177674_7 (sequence is synthesized)
atgccccctcaggcctcccccaagtttgctgggctttggtggaagccctgagagcttcaggtcctgctcagcccgaggagcagtctggcatgggagtgaggccccgtccttctcactgcc

SEQ ID NO: 619996 - DNA, 120 bp, Artificial Sequence
  ENSG00000177674_8 (sequence is synthesized)
tggtcacatggtgcctagggatgcagggctggaggccagaggtgtcagcaacactgtgtcccaccacaacctccagcctcccttttcagagcacagcattaaagtttggggaattctgta

SEQ ID NO: 619997 - DNA, 120 bp, Artificial Sequence
  ENSG00000177674_9 (sequence is synthesized)
tgggccagacagctctgcctctccgggtcttgatttccgtctgtacaataggcataaggattgcacaccctgcaggagctgggagggagacgtggaagtgctcatcagagctccccaggg

SEQ ID NO: 619998 - DNA, 120 bp, Artificial Sequence
  ENSG00000177674_10 (sequence is synthesized)
cctgccccacagtgaggcctcagcactgcagcttgattttcacctttaccatctcttttaatctgttgagcttctggagacatttctctgccaaaccaagactggaaaccattgagctca

SEQ ID NO: 619999 - DNA, 120 bp, Artificial Sequence
  ENSG00000177674_11 (sequence is synthesized)
acttcgaagtgcagcgcacagggcaacagctgtgagtaatgtgaactgtaaccatcatgattcacgaccttgagaagcagggccaaaatacagatttcttagtcacacttccccaagatt

SEQ ID NO: 620000 - DNA, 120 bp, Artificial Sequence
  ENSG00000177674_12 (sequence is synthesized)
ctgagttggtgattctgggctgggacccaggcacctgctttcttaaaagcaaaagataagatggtttattcaaagacctattgaaccgaatggcactccacacctgccttgcacatgtct

SEQ ID NO: 620001 - DNA, 120 bp, Artificial Sequence
  ENSG00000177674_13 (sequence is synthesized)
tctgcatgttacactttagtgaatgtcctataaatctaggaagcgcccgctgcatgcaggggaaggcaaggcccagtgggtttggtaataaatgaggtagactcagtccctgtccccctg

SEQ ID NO: 620002 - DNA, 120 bp, Artificial Sequence
  ENSG00000177674_14 (sequence is synthesized)
agtcttccttgcagcacagcagggtgagcaagagcatggcctctccagccagactccaaatcccagccccactgctcagcaactgtgtgaccttgggcgagttacttaacctcattgtgt

SEQ ID NO: 620003 - DNA, 120 bp, Artificial Sequence
  ENSG00000177674_15 (sequence is synthesized)
cgctctcctgctgcttcgtctaccacatgtaccgggagcgcgggggtttccttgggtcttctcaggaccgtagtgcctaccagacgattgactcagcagaggcgcccgcagatccctttg

SEQ ID NO: 620004 - DNA, 120 bp, Artificial Sequence
  ENSG00000177674_16 (sequence is synthesized)
tcggagcctaggagccccccgcggctgcggcgcaggtgccctcggcctgagtcgggatggagctgcctgctgtgaacctgaagtgcgccagctccagtgtcccaagaaatcaccctcacg

SEQ ID NO: 620005 - DNA, 120 bp, Artificial Sequence
  ENSG00000177674_17 (sequence is synthesized)
gaagccagagaaattgccccacaggaggtcactgccttctcctgttggccagaactggaccagagctgcagtacctacagggccccacctcaggccggttctcagagtctccggaatggc

SEQ ID NO: 620006 - DNA, 120 bp, Artificial Sequence
  ENSG00000177674_18 (sequence is synthesized)
ctggaaatgccaactctcacactgtgtctctaaacgggctctggagtcagtgagccttggtttaaatcccctatgcactctgtaactggctgtgttaagagacactatctcttaacctca

SEQ ID NO: 620007 - DNA, 120 bp, Artificial Sequence
  ENSG00000177674_19 (sequence is synthesized)
ctgtgcctcagcttcctcatctgaaaatggggacaataatagtgcctgactcgggtattagtgaggactgaaaatggtgcaacatcagtgtttaataaatgttagatctcattatctgta

SEQ ID NO: 620008 - DNA, 120 bp, Artificial Sequence
  ENSG00000177675_0 (sequence is synthesized)
gattatatataagaggacccaggagttacatcaggactcaggaagagatagacccataatgatgctgcctcaaaactcgtggcatattgattttggaagatgctgctgtcatcagaacct

SEQ ID NO: 620009 - DNA, 120 bp, Artificial Sequence
  ENSG00000177675_1 (sequence is synthesized)
tttctctgctgtggtaacttgcatcctgctcctgaattcctgctttctcatcagcagttttaatggaacagatttggagttgaggctggtcaatggagacggtccctgctctgggacagt

SEQ ID NO: 620010 - DNA, 120 bp, Artificial Sequence
  ENSG00000177675_2 (sequence is synthesized)
ggaggtgaaattccagggacagtgggggactgtgtgtgatgatgggtggaacactactgcctcaactgtcgtgtgcaaacagcttggatgtccattttctttcgccatgtttcgttttgg

SEQ ID NO: 620011 - DNA, 120 bp, Artificial Sequence
  ENSG00000177675_3 (sequence is synthesized)
acaagccgtgactagacatggaaaaatttggcttgatgatgtttcctgttatggaaatgagtcagctctctgggaatgtcaacaccgggaatggggaagccataactgttatcatggaga

SEQ ID NO: 620012 - DNA, 120 bp, Artificial Sequence
  ENSG00000177675_4 (sequence is synthesized)
agatgttggtgtgaactgttatggtgaagccaatctgggtttgaggctagtggatggaaacaactcctgttcagggagagtggaggtgaaattccaagaaaggtggggaactatatgtga

SEQ ID NO: 620013 - DNA, 120 bp, Artificial Sequence
  ENSG00000177675_5 (sequence is synthesized)
tgatgggtggaacttgaatactgctgccgtggtgtgcaggcaactaggatgtccatcttcttttatttcttctggagttgttaatagccctgctgtattgcgccccatttggctggatga

SEQ ID NO: 620014 - DNA, 120 bp, Artificial Sequence
  ENSG00000177675_6 (sequence is synthesized)
cattttatgccaggggaatgagttggcactctggaattgcagacatcgtggatggggaaatcatgactgcagtcacaatgaggatgtcacattaacttgttatgatagtagtgatcttga

SEQ ID NO: 620015 - DNA, 120 bp, Artificial Sequence
  ENSG00000177675_7 (sequence is synthesized)
actaaggcttgtaggtggaactaaccgctgtatggggagagtagagctgaaaatccaaggaaggtgggggaccgtatgccaccataagtggaacaatgctgcagctgatgtcgtatgcaa

SEQ ID NO: 620016 - DNA, 120 bp, Artificial Sequence
  ENSG00000177675_8 (sequence is synthesized)
gcagttgggatgtggaaccgcacttcacttcgctggcttgcctcatttgcagtcagggtctgatgttgtatggcttgatggtgtctcctgctccggtaatgaatcttttctttgggactg

SEQ ID NO: 620017 - DNA, 120 bp, Artificial Sequence
  ENSG00000177675_9 (sequence is synthesized)
cagacattccggaaccgtcaattttgactgtcttcatcaaaacgatgtgtctgtgatctgctcagatggagcagatttggaactgcgactagcagatggaagtaacaattgttcagggag

SEQ ID NO: 620018 - DNA, 120 bp, Artificial Sequence
  ENSG00000177675_10 (sequence is synthesized)
agtagaggtgagaattcatgaacagtggtggacaatatgtgaccagaactggaagaatgaacaagcccttgtggtttgtaagcagctaggatgtccgttcagcgtctttggcagtcgtcg

SEQ ID NO: 620019 - DNA, 120 bp, Artificial Sequence
  ENSG00000177675_11 (sequence is synthesized)
tgctaaacctagtaatgaagctagagacatttggataaacagcatatcttgcactgggaatgagtcagctctctgggactgcacatatgatggaaaagcaaagcgaacatgcttccgaag

SEQ ID NO: 620020 - DNA, 120 bp, Artificial Sequence
  ENSG00000177675_12 (sequence is synthesized)
atcagatgctggagtaatttgttctgataaggcagatctggacctaaggcttgtcggggctcatagcccctgttatgggagattggaggtgaaataccaaggagagtgggggactgtgtg

SEQ ID NO: 620021 - DNA, 120 bp, Artificial Sequence
  ENSG00000177675_13 (sequence is synthesized)
tcatgacagatggagcacaaggaatgcagctgttgtttgtaaacaattgggatgtggaaagcctttgcatgtgtttggtatgacctattttaaagaagcatcaggacctatttggctgga

SEQ ID NO: 620022 - DNA, 120 bp, Artificial Sequence
  ENSG00000177675_14 (sequence is synthesized)
tgacgtttcttgcattggaaatgagtcaaatatctgggactgtgaacacagtggatggggaaagcataattgtgtacacagagaggatgtgattgtaacctgctcaggtgatgcaacatg

SEQ ID NO: 620023 - DNA, 120 bp, Artificial Sequence
  ENSG00000177675_15 (sequence is synthesized)
gggcctgaggctggtgggcggcagcaaccgctgctcgggaagactggaggtgtactttcaaggacggtggggcacagtgtgtgatgacggctggaacagtaaagctgcagctgtggtgtg

SEQ ID NO: 620024 - DNA, 120 bp, Artificial Sequence
  ENSG00000177675_16 (sequence is synthesized)
tagccagctggactgcccatcttctatcattggcatgggtctgggaaacgcttctacaggatatggaaaaatttggctcgatgatgtttcctgtgatggagatgagtcagatctctggtc

SEQ ID NO: 620025 - DNA, 120 bp, Artificial Sequence
  ENSG00000177675_17 (sequence is synthesized)
atgcaggaacagtgggtggggaaataatgactgcagtcacagtgaagatgttggagtgatctgttctgatgcatcggatatggagctgaggcttgtgggtggaagcagcaggtgtgctgg

SEQ ID NO: 620026 - DNA, 120 bp, Artificial Sequence
  ENSG00000177675_18 (sequence is synthesized)
aaaagttgaggtgaatgtccagggtgccgtgggaattctgtgtgctaatggctggggaatgaacattgctgaagttgtttgcaggcaacttgaatgtgggtctgcaatcagggtctccag

SEQ ID NO: 620027 - DNA, 120 bp, Artificial Sequence
  ENSG00000177675_19 (sequence is synthesized)
actggaggggaagcctctctctgggattgtatacgatgggagtggaaacagactgcgtgtcatttaaatatggaagcaagtttgatctgctcagcccacaggcagcccaggctggttgga

SEQ ID NO: 620028 - DNA, 120 bp, Artificial Sequence
  ENSG00000177675_20 (sequence is synthesized)
gctgatatgccctgctctggacgtgttgaagtgaaacatgcagacacatggcgctctgtctgtgattctgatttctctcttcatgctgccaatgtgctgtgcagagaattaaactgtgga

SEQ ID NO: 620029 - DNA, 120 bp, Artificial Sequence
  ENSG00000177675_21 (sequence is synthesized)
gatgccatatctctttctgtgggagatcactttggaaaagggaatggtctaacttgggccgaaaagttccagtgtgaagggagtgaaactcaccttgcattatgccccattgttcaacat

SEQ ID NO: 620030 - DNA, 120 bp, Artificial Sequence
  ENSG00000177675_22 (sequence is synthesized)
ccggaagacacttgtatccacagcagagaagttggagttgtctgttcccgatatacagatgtccgacttgtgaatggcaaatcccagtgtgacgggcaagtggagatcaacgtgcttgga

SEQ ID NO: 620031 - DNA, 120 bp, Artificial Sequence
  ENSG00000177675_23 (sequence is synthesized)
cactggggctcactgtgtgacacccactgggacccagaagatgcccgtgttctatgcagacagctcagctgtgggactgctctctcaaccacaggaggaaaatatattggagaaagaagt

SEQ ID NO: 620032 - DNA, 120 bp, Artificial Sequence
  ENSG00000177675_24 (sequence is synthesized)
gttcgtgtgtggggacacaggtttcattgcttagggaatgagtcacttctggataactgtcaaatgacagttcttggagcacctccctgtatccatggaaatactgtctctgtgatctgc

SEQ ID NO: 620033 - DNA, 120 bp, Artificial Sequence
  ENSG00000177675_25 (sequence is synthesized)
acaggaagcctgacccagccactgtttccatgcctcgcaaatgtatctgacccatatttgtctgcagttccagagggcagtgctttgatctgcttagaggacaaacggctccgcctagtg

SEQ ID NO: 620034 - DNA, 120 bp, Artificial Sequence
  ENSG00000177675_26 (sequence is synthesized)
gatggggacagccgctgtgccgggagagtagagatctatcacgacggcttctggggcaccatctgtgatgacggctgggacctgagcgatgcccacgtggtgtgtcaaaagctgggctgt

SEQ ID NO: 620035 - DNA, 120 bp, Artificial Sequence
  ENSG00000177675_27 (sequence is synthesized)
ggagtggccttcaatgccacggtctctgctcactttggggaggggtcagggcccatctggctggatgacctgaactgcacaggaatggagtcccacttgtggcagtgcccttcccgcggc

SEQ ID NO: 620036 - DNA, 120 bp, Artificial Sequence
  ENSG00000177675_28 (sequence is synthesized)
tgggggcagcacgactgcaggcacaaggaggacgcaggggtcatctgctcagaattcacagccttgaggctctacagtgaaactgaaacagagagctgtgctgggagattggaagtcttc

SEQ ID NO: 620037 - DNA, 120 bp, Artificial Sequence
  ENSG00000177675_29 (sequence is synthesized)
tataacgggacctggggcagcgtcggcaggaggaacatcaccacagccatagcaggcattgtgtgcaggcagctgggctgtggggagaatggagttgtcagcctcgcccctttatctaag

SEQ ID NO: 620038 - DNA, 120 bp, Artificial Sequence
  ENSG00000177675_30 (sequence is synthesized)
acaggctctggtttcatgtgggtggatgacattcagtgtcctaaaacgcatatctccatatggcagtgcctgtctgccccatgggagcgaagaatctccagcccagcagaagagacctgg

SEQ ID NO: 620039 - DNA, 120 bp, Artificial Sequence
  ENSG00000177675_31 (sequence is synthesized)
atcacatgtgaagatagaataagagtgcgtggaggagacaccgagtgctctgggagagtggagatctggcacgcaggctcctggggcacagtgtgtgatgactcctgggacctggccgag

SEQ ID NO: 620040 - DNA, 120 bp, Artificial Sequence
  ENSG00000177675_32 (sequence is synthesized)
gcggaagtggtgtgtcagcagctgggctgtggctctgctctggctgccctgagggacgcttcgtttggccagggaactggaaccatctggttggatgacatgcggtgcaaaggaaatgag

SEQ ID NO: 620041 - DNA, 120 bp, Artificial Sequence
  ENSG00000177675_33 (sequence is synthesized)
tcatttctatgggactgtcacgccaaaccctggggacagagtgactgtggacacaaggaagatgctggcgtgaggtgctctggacagtcgctgaaatcactgaatgcctcctcaggtcat

SEQ ID NO: 620042 - DNA, 120 bp, Artificial Sequence
  ENSG00000177675_34 (sequence is synthesized)
ttagcacttattttatccagtatctttgggctccttctcctggttctgtttattctatttctcacgtggtgccgagttcagaaacaaaaacatctgcccctcagagtttcaaccagaagg

SEQ ID NO: 620043 - DNA, 120 bp, Artificial Sequence
  ENSG00000177675_35 (sequence is synthesized)
aggggttctctcgaggagaatttattccatgagatggagacctgcctcaagagagaggacccacatgggacaagaacctcagatgacacccccaaccatggttgtgaagatgctagcgac

SEQ ID NO: 620044 - DNA, 120 bp, Artificial Sequence
  ENSG00000177675_36 (sequence is synthesized)
acatcgctgttgggagttcttcctgcctctgaagccacaaaatgactttagacttccagggctcaccagatcaacctctaaatatctttgaaggagacaacaacttttaaatgaataaag

SEQ ID NO: 620045 - DNA, 120 bp, Artificial Sequence
  ENSG00000177675_37 (sequence is synthesized)
aggaagtcaagttgccctatggaaaacttgtccaaataacatttcttgaacaataggagaacagctaaattgataaagactggtgataataaaaattgaattatgtatatcactgttaaa

SEQ ID NO: 620046 - DNA, 120 bp, Artificial Sequence
  ENSG00000177675_38 (sequence is synthesized)
taatagtcacctcttgctctattatactttcccagctgatcaaacactgcacttaacagctcttccctctgcagagaggttttctactattcaataatacagattttgcctttctttcag

SEQ ID NO: 620047 - DNA, 120 bp, Artificial Sequence
  ENSG00000177675_39 (sequence is synthesized)
acactgaaaaggaaaatgggaatttataacccagtgaggaggtctgaaaacattgggccatcatttcaacatgacaacggtgaattggagattttggaagatgctgctgtcatcagaacc

SEQ ID NO: 620048 - DNA, 120 bp, Artificial Sequence
  ENSG00000177675_40 (sequence is synthesized)
taaagaacttggtaataaaagtggaagaatatcaagggagaaaaaggaggataaattttaaaaatgtaaaaaattcactagcaggggtaggtgctgaaagagccattggattttagctca

SEQ ID NO: 620049 - DNA, 120 bp, Artificial Sequence
  ENSG00000177675_41 (sequence is synthesized)
cagtttttctgctgcaggtaagcagagagcatccctttgcactgaataggccactgagccgcattactgcttattaattcctcatcattcctgcctccttttatgttctccctaaatgac

SEQ ID NO: 620050 - DNA, 120 bp, Artificial Sequence
  ENSG00000177675_42 (sequence is synthesized)
taggtttgcggggccaggaactttatttcccacaatccctaacaggaagaatctgggctcgcttccaccagagagacttgttcatggaagatacggtttcgcaaggatctttgtacttgt

SEQ ID NO: 620051 - DNA, 120 bp, Artificial Sequence
  ENSG00000177675_43 (sequence is synthesized)
cctgaaaactgctagcctagatattacagcatggtgccctttagcagtggtttcctgggggttttaaaacttcctgatgagggttttgtaagcataattattccctgtagtaaaccactt

SEQ ID NO: 620052 - DNA, 120 bp, Artificial Sequence
  ENSG00000177679_0 (sequence is synthesized)
gtccagcatttcagcaagcggcggcagcacccgcggggaggcagagggtgcggggccgtgggggccgcggagctgccctgcccaactcagcccagactaggcggcagcccggaccggcgg

SEQ ID NO: 620053 - DNA, 120 bp, Artificial Sequence
  ENSG00000177679_1 (sequence is synthesized)
gacccgagggcctggccccagcgcccggtagatcgcggcggtcagcggtgagggccagcggcccaggccagcggctccagggccagccacgatgtcctccaccgtgaacaacggggcggc

SEQ ID NO: 620054 - DNA, 120 bp, Artificial Sequence
  ENSG00000177679_2 (sequence is synthesized)
cagcatgcagtccacacccgacgccgcgaacggcttcccgcagcccagctcctcctcggggacctggccgcgggcggaagaggagctgcgcgccgcggagccgggcctggtgaagcgcgc

SEQ ID NO: 620055 - DNA, 120 bp, Artificial Sequence
  ENSG00000177679_3 (sequence is synthesized)
gcaccgcgagatcctggaccacgagcgcaagcggcgggtggagctcaagtgcatggagctgcaggagatgatggaggagcaggggtattcggaggaggagattcggcagaaagtggggac

SEQ ID NO: 620056 - DNA, 120 bp, Artificial Sequence
  ENSG00000177679_4 (sequence is synthesized)
attccggcagatgctgatggagaaggagggagtgctcaccagggaggaccggcctgggggccacattgtggcggagaccccgcggctgaccgagggcgctgagccgggcctggagtacgc

SEQ ID NO: 620057 - DNA, 120 bp, Artificial Sequence
  ENSG00000177679_5 (sequence is synthesized)
gccctttgacgatgacgacggcccagtggactgtgactgcccggcctcctgctaccgcggccaccgcgggtacaggaccaagcattggtctagcagctcggcatcgccccctcccaagaa

SEQ ID NO: 620058 - DNA, 120 bp, Artificial Sequence
  ENSG00000177679_6 (sequence is synthesized)
aaagaagaaaaagaaaggcggccaccggagaagccgcaaaaagaggagactggagtccgaatgcagctgtgggagctcctcacccctccgcaagaagaagaagagtgtgaagaagcatcg

SEQ ID NO: 620059 - DNA, 120 bp, Artificial Sequence
  ENSG00000177679_7 (sequence is synthesized)
ccgagacaggtctgattctgggtcccggaggaagagacggcacagatctcgaagctccaagtgcaaaagaaaagagaagaacaaagagaagaagaggcctcacacagagtccccaggccg

SEQ ID NO: 620060 - DNA, 120 bp, Artificial Sequence
  ENSG00000177679_8 (sequence is synthesized)
gaggtctcatcgccatagcagtggcagctcccacagcccctccctctcctcccactacagtgattccagatctcccagcaggctgagccccaagcaccgagacgaagggcgaaagacggg

SEQ ID NO: 620061 - DNA, 120 bp, Artificial Sequence
  ENSG00000177679_9 (sequence is synthesized)
aagggcgaaagacgggcagccagcggtccagcggaagccggtcgccttccccgtcgggcggcagcggatgggggtcgccccagcggaacggcggcagcgggcagcggagcggagcgcacg

SEQ ID NO: 620062 - DNA, 120 bp, Artificial Sequence
  ENSG00000177679_10 (sequence is synthesized)
gataagcccagctcgccctcgcccagggtccgtgacaaggcggcggccgccgcacccacgccgcccgcgcgggggaaggagagcccgagcccgcgctcggcgccgtcgtcccaaggtcgc

SEQ ID NO: 620063 - DNA, 80 bp, Artificial Sequence
  ENSG00000177679_11 (sequence is synthesized)
cgcgcgcggcccgccagcacctctccgtccccgggcgcgcacggccggcgcggcggcccagaagggaagagctcgtcgcg

SEQ ID NO: 620064 - DNA, 120 bp, Artificial Sequence
  ENSG00000177679_12 (sequence is synthesized)
cagccccggcccgcacccccgctcctggagctccagccgctcgccctccaaatctcgctcgcgctctgcggagaagcggccccacagccccagccgctcgccgtcgcccaagaagcccct

SEQ ID NO: 620065 - DNA, 120 bp, Artificial Sequence
  ENSG00000177679_13 (sequence is synthesized)
gcgagggccgcgcaaggcactctgaggccgaggccacccgcgcccggcgccgctcccgcagctactcgcccatccgcaagcggcgccgggactcgccaagcttcatggagccgcggcgca

SEQ ID NO: 620066 - DNA, 120 bp, Artificial Sequence
  ENSG00000177679_14 (sequence is synthesized)
tcaccagcgcccgcaagcgtcctattccatactaccggcccagcccctcttcctcctccagctgcttgagcagcgactactcgacccggagccacagccgcagccccagccccggccaca

SEQ ID NO: 620067 - DNA, 120 bp, Artificial Sequence
  ENSG00000177679_15 (sequence is synthesized)
gccacgggagctacagcagtcgcagccatgggacccgcagccggacacgcagcccctcgaggacccccagtcccagctaccacagccggagcagctctgagagcgggggcttctgagccc

SEQ ID NO: 620068 - DNA, 120 bp, Artificial Sequence
  ENSG00000177679_16 (sequence is synthesized)
agacagactcagcttggtgcccccctggcactgggagaggcgaggggcgggccccaggaccccagtggggagggggctatatctccttgcccccaaggctacaaagaggtctcagggcca

SEQ ID NO: 620069 - DNA, 120 bp, Artificial Sequence
  ENSG00000177679_17 (sequence is synthesized)
gtgcacgggcagatgggaccggggaagactttgagggtgggcatccagtggacaaggagaagccagatgtgctgcttctacgggtgtcctctcccacctcctgtccacccactgtgcccg

SEQ ID NO: 620070 - DNA, 120 bp, Artificial Sequence
  ENSG00000177679_18 (sequence is synthesized)
gggaacaaagagccgttacgaacacaggaatctccccatcccccttcctgctgatgccaactcaccaggcttgggactgctgccggtggatggtaccagagtccatgatctgctctgtca

SEQ ID NO: 620071 - DNA, 120 bp, Artificial Sequence
  ENSG00000177679_19 (sequence is synthesized)
cttcaccttagctcagtgcagccagggacaccttgcaaggtgccagccctgggagcccctcttccgcactacacagctccctccactcctctcttatcactgggcagacgaggaggtggt

SEQ ID NO: 620072 - DNA, 120 bp, Artificial Sequence
  ENSG00000177679_20 (sequence is synthesized)
acagcacatgggtttggagctagacagaaggaagaacagcctaacccttggtgcacccccatccaagctggggagctgcatccttttgagctggctgcaggaggaccctggctgagggct

SEQ ID NO: 620073 - DNA, 120 bp, Artificial Sequence
  ENSG00000177679_21 (sequence is synthesized)
ggtggctggccccacagcctcccccaagctcctccactgacccaggagtgcccagacgggtggcccccaaaatcccagcctggggagctaggcacctcactcttggtctgacctctccag

SEQ ID NO: 620074 - DNA, 120 bp, Artificial Sequence
  ENSG00000177679_22 (sequence is synthesized)
gccaggctctcctcaccccatgccctgggccaaggtcctaccagccatgactactgcatgacaagaggtggggggtacagacctcaggtacatttgaccctgaggttaaaaggggttcag

SEQ ID NO: 620075 - DNA, 120 bp, Artificial Sequence
  ENSG00000177679_23 (sequence is synthesized)
gtcaagaggtgggagaggaaaggggtagatgggaggtggaatctgtaggaaagagaaaaagcaaagtcgttcactgactgagtagcccccagggagtggagacgggtccctggggaggga

SEQ ID NO: 620076 - DNA, 120 bp, Artificial Sequence
  ENSG00000177679_24 (sequence is synthesized)
gcagctgacaggtcagcagtgcccccagccccacccaagaggagggcagcgtgtgcctgtggtctgggacgtgggctggatggcagcccagggtcacaggcataggataacatgtgcttt

SEQ ID NO: 620077 - DNA, 120 bp, Artificial Sequence
  ENSG00000177679_25 (sequence is synthesized)
ggacctgacaagggagtaccttgggggtctgatggggtcatggccagccgagcctctgtagagatggaggctacagccctcagaagggaggggaggaaagagactgagggccctggcctg

SEQ ID NO: 620078 - DNA, 120 bp, Artificial Sequence
  ENSG00000177679_26 (sequence is synthesized)
gggcgtcgatggggaagcggtggcccccagtcctcttctgctgctcccagccccctcctcctggggccctcagggatctcatgaagtcttccttggcccaaccaggcagatgccccgggc

SEQ ID NO: 620079 - DNA, 120 bp, Artificial Sequence
  ENSG00000177679_27 (sequence is synthesized)
tccagtggggggaggggtctggggtctggtccgggttccccgctttctctatgtcccccctccctctttctccgcagtgcggataaaaattggactcgaataaaacccttggtgcccgga

SEQ ID NO: 620080 - DNA, 120 bp, Artificial Sequence
  ENSG00000177679_28 (sequence is synthesized)
gtacgtacgcttcgctttgcggagggttcccgcgccgcgggctgcgccgtgcgtggtcgggcgggtcgccagcggggcagggggcgataagtgtggcatgggggcgggggcgggggcggc

SEQ ID NO: 620081 - DNA, 120 bp, Artificial Sequence
  ENSG00000177679_29 (sequence is synthesized)
cgcttcctccctcctcggctccccgctgggcgtcctggctcgggagccgccgggagtgctaggccgttgcgcccacctggccctggtgtcagggtgaggggcgcctgcggtcttgggcca

SEQ ID NO: 620082 - DNA, 120 bp, Artificial Sequence
  ENSG00000177679_30 (sequence is synthesized)
cccttgcgcttggcaaactgaaggccagaggggggttgaccgcggggcactgagttgggtacagggctggggaggaatcagggtctcgtgccctccccaggcatattagggtgggagggg

SEQ ID NO: 620083 - DNA, 120 bp, Artificial Sequence
  ENSG00000177679_31 (sequence is synthesized)
catggacattgataggagtcccaggcaggagcaggattcgagagacaggaccccccactgggcaccacctgggccctgagtctccctcttcccaccaagccctggccccacctctgagca

SEQ ID NO: 620084 - DNA, 120 bp, Artificial Sequence
  ENSG00000177679_32 (sequence is synthesized)
cccccctccccctccctcaatcttctccccagcccctccctccctcagccccctcccccatctcagtccctctgccctctaaagtccctgctctgaggagactctgcccttttccaggca

SEQ ID NO: 620085 - DNA, 120 bp, Artificial Sequence
  ENSG00000177679_33 (sequence is synthesized)
ccgcccacacttggactggtgtctcaaacctgccggctcctcttcccacggccaccctcctgaggcacctgccagcgtgcctcagagaccccacaccaacacccccaaaactgtccccac

SEQ ID NO: 620086 - DNA, 120 bp, Artificial Sequence
  ENSG00000177679_34 (sequence is synthesized)
ccttcctccaagaggggcacagatgcccgaagacctacaggcaggtgcaatgggggagctggcagaggagagagacgtctcagcctgtccccagatggatgggctgggcctgggttgggg

SEQ ID NO: 620087 - DNA, 120 bp, Artificial Sequence
  ENSG00000177679_35 (sequence is synthesized)
cttctcccagaccccagggaaggtccacatccccttctggtctgttgattatagagtacacagttgagacccctcagagagagggggctgcagtgctggcaggggcactggggtgggtgg

SEQ ID NO: 620088 - DNA, 120 bp, Artificial Sequence
  ENSG00000177679_36 (sequence is synthesized)
gggggtggcttggggtggggagacctgcaggttccttcccagacccgcagactgccccccacccaaccccaaagcctcagctgggagtgggagagctgcccctccccagacctcaggtct

SEQ ID NO: 620089 - DNA, 120 bp, Artificial Sequence
  ENSG00000177679_37 (sequence is synthesized)
gatttttggctgtttcctttcactccctttcttttctcaaacaccctttactcccacggcctcagagaggaaagtcaagggcagctgactgaaggctcttggtctcaaggttaagtttta

SEQ ID NO: 620090 - DNA, 120 bp, Artificial Sequence
  ENSG00000177679_38 (sequence is synthesized)
ttgaaggacatttacctgtctctagactgtcccacctggaccaggcaccaggctcctgggctctgggggttttggttgggccgcgcagggaggatgacactgatgtccccggatctgtct

SEQ ID NO: 620091 - DNA, 120 bp, Artificial Sequence
  ENSG00000177679_39 (sequence is synthesized)
tgggagggggttgagggcaggcagaggtagctgagggtagcatggcagaggctggagaggattaacaacccacaagaggggcacccaccatcccccacccctgtgggcatggagtcccaa

SEQ ID NO: 620092 - DNA, 120 bp, Artificial Sequence
  ENSG00000177679_40 (sequence is synthesized)
gagcacaggacccgaaacaccttcttgccagcttctcatccacccttctggggcctcccaagagacacagagatgcgggttctctgaagtcagggctggaagtgggtcccttcgtacctc

SEQ ID NO: 620093 - DNA, 120 bp, Artificial Sequence
  ENSG00000177679_41 (sequence is synthesized)
tggtcctctctccagccctggagtcctgagcaatgatcccacctccaccccctccccaatgcagacaaaatggccacagcatctaggcatccccaggatagggcagtcggggaaggggac

SEQ ID NO: 620094 - DNA, 120 bp, Artificial Sequence
  ENSG00000177679_42 (sequence is synthesized)
ccagccaccagccttggggcgggagcttctgaagcacccacatcttgtctccctcccagcatgggactctagtttggcacagccctgggagttttcttggagacggcattttgtgactcc

SEQ ID NO: 620095 - DNA, 120 bp, Artificial Sequence
  ENSG00000177679_43 (sequence is synthesized)
tttcaccaagcatggtccccaaatcctatccctcacccttggggccctgggagatctgggacttcagagcatcccgggtctcaaacctgcattcagatccctgcctctctgccttaaaaa

SEQ ID NO: 620096 - DNA, 120 bp, Artificial Sequence
  ENSG00000177679_44 (sequence is synthesized)
gacccctgaggagtcaaaagaggctagttcttgctcatatgcagaaaagtgagatgggggatgggagaggggtcccagactttaccatgaacgaaaccgtcttcgggaaaaaatactggg

SEQ ID NO: 620097 - DNA, 120 bp, Artificial Sequence
  ENSG00000177679_45 (sequence is synthesized)
aaaaaaaagaaaagaaaaaaagagagagagaaacaaatggaaaaaaaggaaagctcaacattttttaaccccgtctatgtttttgtttgttttttagcctcccatttgaaacgtggtaat

SEQ ID NO: 620098 - DNA, 120 bp, Artificial Sequence
  ENSG00000177679_46 (sequence is synthesized)
tttagcctcccatttgaaacgtggtaatactgtgattccatttcttgtttagctggtgagggaagagggtgggcaagtttatgtaactttttctgttgttttgtttttatttccttttcc

SEQ ID NO: 620099 - DNA, 120 bp, Artificial Sequence
  ENSG00000177679_47 (sequence is synthesized)
tttctttttttttttccctattttaatgtacagaaatgcaaactatctctctgggttttttttttctatcttctatgttctagaattttctttttgtgtgtgttactgtgggaacctttc

SEQ ID NO: 620100 - DNA, 120 bp, Artificial Sequence
  ENSG00000177679_48 (sequence is synthesized)
ctcttaatgcagagatggcttttgaattttaagtgaacattaatcatatacacatctctatatacttttttttcctttgtaatctgaatttaaaagggaagataactctaaaaaaaaaaa

SEQ ID NO: 620101 - DNA, 120 bp, Artificial Sequence
  ENSG00000177679_49 (sequence is synthesized)
ctctttctgtctgggggcacctttctctcttcctgcctctctgtttctgtttgcttctgtcattgtttctgtctttctgtttctctttctccttctcttcccatttctatctctgcctga

SEQ ID NO: 620102 - DNA, 120 bp, Artificial Sequence
  ENSG00000177679_50 (sequence is synthesized)
ctttgtctgttcgtctgtctctctgtctgcctcctgtctctctctcttcctttccatccctctcccccggcatgggcctctctcccatgctgccagcccctctgtagcccaccctgtggt

SEQ ID NO: 620103 - DNA, 120 bp, Artificial Sequence
  ENSG00000177679_51 (sequence is synthesized)
gagcaaacagaaatggccgtgcaagagccccctcccatccctgggatgagacaaaagccacattggccacccatctactggctcagagggggagcacagtttagggtcactgtctttccc

SEQ ID NO: 620104 - DNA, 120 bp, Artificial Sequence
  ENSG00000177679_52 (sequence is synthesized)
ccattctgcattcccaatgcggagaccttcttttcttttttattattgcattcctgtccctgagcactgagaagaagcccagctcgccctcgcccagggtccgtgacaaggcggcggccg

SEQ ID NO: 620105 - DNA, 120 bp, Artificial Sequence
  ENSG00000177683_0 (sequence is synthesized)
agacgaggcggctttcccggcagaatgctagcgcaggcgcaggggctcgagaggcctggacctgtggcgcatcctcagtgaggagggccgccctgcatccgtcgccggccccggtctcca

SEQ ID NO: 620106 - DNA, 120 bp, Artificial Sequence
  ENSG00000177683_1 (sequence is synthesized)
ggggcctcacccgagtcatgccccgctattgcgcagcgatttgttgtaagaaccgccggggacgaaacaataaagaccggaagctgagtttttatccatttcctctacatgacaaagaaa

SEQ ID NO: 620107 - DNA, 120 bp, Artificial Sequence
  ENSG00000177683_2 (sequence is synthesized)
gactggaaaagtggttaaagaatatgaagcgagattcatgggttcccagtaaataccagtttctatgtagtgaccattttactcctgactctcttgacatcagatggggtattcgatatt

SEQ ID NO: 620108 - DNA, 120 bp, Artificial Sequence
  ENSG00000177683_3 (sequence is synthesized)
taaaacaaactgcagttccaacaatattttctttgcctgaagacaatcagggaaaagacccttctaaaaaaaaatcccagaagaaaaacttggaagatgagaaagaagtatgcccaaaag

SEQ ID NO: 620109 - DNA, 120 bp, Artificial Sequence
  ENSG00000177683_4 (sequence is synthesized)
ccaagtcagaagaatcatttgtattaaatgagacaaagaaaaatatagttaacacagatgtgccccatcaacatccagaattacttcattcatcttccttggtaaagccaccagctccca

SEQ ID NO: 620110 - DNA, 120 bp, Artificial Sequence
  ENSG00000177683_5 (sequence is synthesized)
aaacaggaagtatacaaaataacatgttaactcttaatctagttaaacaacatactgggaaaccagaatctaccttggaaacatcagttaaccaagatacaggtagaggtggttttcaca

SEQ ID NO: 620111 - DNA, 120 bp, Artificial Sequence
  ENSG00000177683_6 (sequence is synthesized)
catgttttgagaatctaaattctacaactattactttgacaacttcaaattcagaaagtattcatcaatctttggaaactcaagaagttcttgaagtaactaccagtcatcttgctaatc

SEQ ID NO: 620112 - DNA, 120 bp, Artificial Sequence
  ENSG00000177683_7 (sequence is synthesized)
caaactttacaagtaattccatggaaataaagtcagcacaggaaaatccattcttattcagcacaattaatcaaacagttgaagaattaaacacaaataaagaatctgttattgccattt

SEQ ID NO: 620113 - DNA, 120 bp, Artificial Sequence
  ENSG00000177683_8 (sequence is synthesized)
ttgtacctgctgaaaattctaaaccctcagttaattcttttatatctgcacaaaaagaaaccacggaaatggaagacacagacattgaagactccttgtataaggatgtagactatggga

SEQ ID NO: 620114 - DNA, 120 bp, Artificial Sequence
  ENSG00000177683_9 (sequence is synthesized)
cagaagttttacaaatcgaacattcttactgcagacaagatataaataaggaacatctttggcagaaagtctctaagctacattcaaagataactcttctagagttaaaagagcaacaaa

SEQ ID NO: 620115 - DNA, 120 bp, Artificial Sequence
  ENSG00000177683_10 (sequence is synthesized)
ctctaggtagattgaagtctttggaagctcttataaggcagctaaagcaggaaaactggctatctgaagaaaacgtcaagattatagaaaaccattttacaacatatgaagtcactatga

SEQ ID NO: 620116 - DNA, 120 bp, Artificial Sequence
  ENSG00000177683_11 (sequence is synthesized)
tatagaataactaggttttaaaactatggctgttaaataagctttttccagccaaaccaaactacatgtaaagtgaactgtttcctgtataaagttctcatcttaatgaacctatgagag

SEQ ID NO: 620117 - DNA, 120 bp, Artificial Sequence
  ENSG00000177683_12 (sequence is synthesized)
tgttgtaaagttatgaactgtatcctattcttgtaatacttatttaagaaaaaccagagagttgggctggagagaaaagcagttttattacttgataattttccaaattaaaatttagca

SEQ ID NO: 620118 - DNA, 120 bp, Artificial Sequence
  ENSG00000177683_13 (sequence is synthesized)
catagaaggattcagttataacatgagaaaacaaagaagtgttcaaagagcacagactagaagtcaggttcaggaatcagtcctggttctaccactggcatatgacttgggcaagttact

SEQ ID NO: 620119 - DNA, 120 bp, Artificial Sequence
  ENSG00000177683_14 (sequence is synthesized)
ttgtaaaataagcacttactggatttgtaattggttatttatagtcccttccctttttattaagataattctattagaacacattttctgtaagataatatatacgtaatactagaagtt

SEQ ID NO: 620120 - DNA, 120 bp, Artificial Sequence
  ENSG00000177683_15 (sequence is synthesized)
ggctagaatttgatgatattaaccatgtattattttcagtatttattgaattctgtggtctttgaccttttggctatagttacatattacagttatattatctgtaatagaaaggaagat

SEQ ID NO: 620121 - DNA, 79 bp, Artificial Sequence
  ENSG00000177683_16 (sequence is synthesized)
agaacttttataattttattccagttgaactaaactaaggaaccacccattagcccagttcttaggagaggtacttcaa

SEQ ID NO: 620122 - DNA, 120 bp, Artificial Sequence
  ENSG00000177683_17 (sequence is synthesized)
gaaccacccattagcccagttcttaggagaggtacttcaaacttgaaagaatatgtatttcggtaacttatatgtggctaaccatcaaatacatagtcatctaagctaaactttctgtat

SEQ ID NO: 620123 - DNA, 120 bp, Artificial Sequence
  ENSG00000177683_18 (sequence is synthesized)
ttatacagttaaacttataaaccaaaaattttaatgaggttaattttaaatatattttagaaattacagtttgtatctgtttcttagtaggtgtggcctttaaaatatgtgcttattcat

SEQ ID NO: 620124 - DNA, 120 bp, Artificial Sequence
  ENSG00000177683_19 (sequence is synthesized)
tgttaaattccagaataatagagtaatacttaatactgtacattcccacttacgtatattttattaaaatttataagcaagaaattatacataagtggtcatgatcttagggagacaaag

SEQ ID NO: 620125 - DNA, 120 bp, Artificial Sequence
  ENSG00000177683_20 (sequence is synthesized)
aatttctcttagaaaagagaagtaatggtaatgtaaataaaaatactgtttatattcacatgattttaagaaaactgtaaaagcaaagattttgtagtaatgacacaaatgtaacaaata

SEQ ID NO: 620126 - DNA, 120 bp, Artificial Sequence
  ENSG00000177683_21 (sequence is synthesized)
gatgttttcttaaaattggcagtcagtataattatgtttctgcctatgatgttgaggaagttgtatcagtctgattcttagttttttcatctgttaagtagaacgtactattacttacct

SEQ ID NO: 620127 - DNA, 120 bp, Artificial Sequence
  ENSG00000177683_22 (sequence is synthesized)
taaagagtggctttgagaattttgtaaggaacaaacatgtttttggttctggaatataggaggtgctcaataaaagttgactctgactggcaaataatattgttttgtaaatgcatgatg

SEQ ID NO: 620128 - DNA, 120 bp, Artificial Sequence
  ENSG00000177683_23 (sequence is synthesized)
attatttttggccatatttgacttagtttcattaggctaatattaattggtactatatgaaagtgagtcaactaattataaaagattagaaatgtcttaggtgacgatgggggaaaaact

SEQ ID NO: 620129 - DNA, 120 bp, Artificial Sequence
  ENSG00000177683_24 (sequence is synthesized)
taaaatttttgcataaattatggggagatgatagagttattacagtgttattaagtattcctatgttgcattttgcaaatacttaatttaatacagatgaaaataatcttgagtcacaat

SEQ ID NO: 620130 - DNA, 120 bp, Artificial Sequence
  ENSG00000177683_25 (sequence is synthesized)
aaagtaatgatatgttaagtttcaacagtgtacattgtagtaattttctgaaagttacaggttcctcagaaaaaatttaaactagctttatttctttaataaattataagtaaaagttga

SEQ ID NO: 620131 - DNA, 120 bp, Artificial Sequence
  ENSG00000177683_26 (sequence is synthesized)
caacaatattttctttgcctgaagacaatcaggtattgcagtatgggagaggggtaatgctgagcagagtggcagatttcagggtggcaggtgatcaggtgggagagtaagagggaacta

SEQ ID NO: 620132 - DNA, 120 bp, Artificial Sequence
  ENSG00000177683_27 (sequence is synthesized)
acagcttaagagaagcaagagatatacattattaagttattaacacaagttcatgagttttattttttatactttttttgtttgagacaaggtctcattctgtcaccctggctagagtgc

SEQ ID NO: 620133 - DNA, 83 bp, Artificial Sequence
  ENSG00000177683_28 (sequence is synthesized)
tggcctcccaatatactagtcttttgaatgatctgaaatgtttctgccgtatattgaatgggattaatgctttttagaaaata

SEQ ID NO: 620134 - DNA, 120 bp, Artificial Sequence
  ENSG00000177683_29 (sequence is synthesized)
ctgccgtatattgaatgggattaatgctttttagaaaatactttaaggtatatatactctgagcttttttttaactaaataaatttgcttggccagtgtactactcaatattataattaa

SEQ ID NO: 620135 - DNA, 120 bp, Artificial Sequence
  ENSG00000177683_30 (sequence is synthesized)
gtgaggccttggacctgtggcctttgggcttgggtgtctcctgtccgctctgccagtgagtcctcagctctccgtacgtggcccgtcgcccgcggcaagacggagggaaggcgctagttc

SEQ ID NO: 620136 - DNA, 120 bp, Artificial Sequence
  ENSG00000177683_31 (sequence is synthesized)
agtttagctagcaatgcccttcttgcgcgaggactgctggctggtggcgaggcccaggagcctgtttgggtgttaacagttaaaacagtaaagtttgcgcgggcttctgtggttttcagt

SEQ ID NO: 620137 - DNA, 120 bp, Artificial Sequence
  ENSG00000177683_32 (sequence is synthesized)
cttttccccacttcacgtgatctcatttcattgaacaacattaaccaccatttaagatacgtgaaacctgcgaagtggaaaggtgcacgcaaagttaatttacaccccccgcgagatttc

SEQ ID NO: 620138 - DNA, 120 bp, Artificial Sequence
  ENSG00000177683_33 (sequence is synthesized)
cccggtctccaggggcctcacccgagtcatgccccgctattgcgcagcgatttgttgtaagaaccgccggggacgaaacaataaagaccggaagctgagtttttatccatacagctaaaa

SEQ ID NO: 620139 - DNA, 120 bp, Artificial Sequence
  ENSG00000177683_34 (sequence is synthesized)
gaagttaggtatgaaaataaagaggaaaagatgatttctctgagtcacaaatgaaaaagtgacagtacacttcagagaaatagactagatggatggatggatgatgcaggtaaatgaggc

SEQ ID NO: 620140 - DNA, 120 bp, Artificial Sequence
  ENSG00000177683_35 (sequence is synthesized)
tacttgaagatctatatataatatagcactgaaattgcttaccatagtcatttctttcctctctggatactagtaatgtaaaaaacttaacatattaaagtgttattaatttccatgata

SEQ ID NO: 620141 - DNA, 120 bp, Artificial Sequence
  ENSG00000177684_0 (sequence is synthesized)
gaaagttctatagtctctatattctgttatcaagtctttcaacaacttctttctacagaatgaggatcttttactatctccattttctgtgttatgtgaccttcattctaccagccacat

SEQ ID NO: 620142 - DNA, 120 bp, Artificial Sequence
  ENSG00000177684_1 (sequence is synthesized)
agcaaatagacatatgttccttaccaagaaaaatttgctgcactgagaaattgtatgaagaagatgatatgttttgaaaagaaaggcatacctctgaacaaagaagttacatgtgcacca

SEQ ID NO: 620143 - DNA, 120 bp, Artificial Sequence
  ENSG00000177685_0 (sequence is synthesized)
gtcttctccactggcccctgagattgccatcacctccagctcctcctctcctgaagttggcagcccctcctgggttccagcctcctgagatgccagacccactggggcagtacccacagg

SEQ ID NO: 620144 - DNA, 120 bp, Artificial Sequence
  ENSG00000177685_1 (sequence is synthesized)
ccctgagcctacatcaaccaccccagtgacaccccaagcctgcagcattttccacccccagccccctggtcccaccttgccttccgcccaccttcccacctgctgcagggagggccctcg

SEQ ID NO: 620145 - DNA, 120 bp, Artificial Sequence
  ENSG00000177685_2 (sequence is synthesized)
gctgagccttcagacacacttgcaccccatccgctcccctcctgaatttcttctgaccctcccttggcttcacagcacctgaaggccaggctgaggccccctgctctcatggccagccct

SEQ ID NO: 620146 - DNA, 120 bp, Artificial Sequence
  ENSG00000177685_3 (sequence is synthesized)
ggaaagcctggggctgatgaggcccaggaggaggagggggaactcgaggggggctctgcagggccgcgggctgcaatactggagcaggctgaggagctgtttctgctgtgtgacaaggag

SEQ ID NO: 620147 - DNA, 120 bp, Artificial Sequence
  ENSG00000177685_4 (sequence is synthesized)
gctaagggcttcatcaccaagcacgacctgcagggtctccagagcgacctgcccctcacgccagagcagctggaggctgtgtttgaaagtctggaccgggctcacactggcttcctcacc

SEQ ID NO: 620148 - DNA, 120 bp, Artificial Sequence
  ENSG00000177685_5 (sequence is synthesized)
gccagggagttctgcctgggcctggggatgtttgtgggggtggcgtcagcccagggagcgaacccctgcaggactcccgaggagacctttgagtcgggcgggctcgacgtgcagggcacg

SEQ ID NO: 620149 - DNA, 120 bp, Artificial Sequence
  ENSG00000177685_6 (sequence is synthesized)
cgctctgggccaggctgcagcgcgagcgccccgagctgctgggctctttcgaggatgttctgatacgcgcgtcggcctgcctggaggaggcggcccgggagcgcgacggcctggagcagg

SEQ ID NO: 620150 - DNA, 120 bp, Artificial Sequence
  ENSG00000177685_7 (sequence is synthesized)
cgctgcggaggcgcgagagcgagcacgagagggaggtgcgcgctctgtacgaggagacggagcagcttcgggagcagagccggcgcccgccgagtcagaacttcgcccgcggggagcgga

SEQ ID NO: 620151 - DNA, 120 bp, Artificial Sequence
  ENSG00000177685_8 (sequence is synthesized)
gaagccgtctggagctggagctgcagagccgcgagcaggacctggaacgcgcgggcctgcggcagcgggagagacgtggtcgccgtctccaggaacatgcagaaagagaaagtcagcctg

SEQ ID NO: 620152 - DNA, 120 bp, Artificial Sequence
  ENSG00000177685_9 (sequence is synthesized)
ctacggcaactggagctgctcagggagctgaatacacggctgcgggatgacagggacgcctgcgaggccaggcgggcgggcagcagctgcaggaaggctctgacaacagcccgcctgcct

SEQ ID NO: 620153 - DNA, 120 bp, Artificial Sequence
  ENSG00000177685_10 (sequence is synthesized)
gggcccacctgctgctgctgctgttgctgggctcggccccccagacgcggctctggccaccttcccagtgcccggtgaccagccccgagtgactcacggaccatgagctagaagctgccc

SEQ ID NO: 620154 - DNA, 120 bp, Artificial Sequence
  ENSG00000177685_11 (sequence is synthesized)
ttgcaggaggcttgtcatgggtcgggggtgcccactcaggatgcaggctctccccagtgggccccaggctcgcctgactgaagacatgaaggacctagcctaggagtggtcagggtcccg

SEQ ID NO: 620155 - DNA, 120 bp, Artificial Sequence
  ENSG00000177685_12 (sequence is synthesized)
ggagtggccagggtcccgtgtgtgccctctgccagtcttcgctctgtccccgttcaatcaaccccatctcagttcagcagaaaaccccctcgtcaaataaaacccactgactgcactgcg

SEQ ID NO: 620156 - DNA, 120 bp, Artificial Sequence
  ENSG00000177685_13 (sequence is synthesized)
ggacctcaggtctagccggcaagccggagggcgggcgagacaacaacgtggcctggaggcaatggccctggcctctcgtgtccccttctctcacccgcccagacttgccctctttggagg

SEQ ID NO: 620157 - DNA, 120 bp, Artificial Sequence
  ENSG00000177685_14 (sequence is synthesized)
agtgttgtggggcaagggtgttaggtctcgaatctggaagtgttcctgagtggggcgtcagaggcgaagggctctgcaggctgggaccttgcccctgcactctgtgggctcagttgtggg

SEQ ID NO: 620158 - DNA, 120 bp, Artificial Sequence
  ENSG00000177685_15 (sequence is synthesized)
gagggaggggccggtgggcaggagggagaagtctgccctgcctgccagctgtcatgaggctgggccacacaggcccaggccaggggctaaggacttggtcaggactggctgagccctcac

SEQ ID NO: 620159 - DNA, 120 bp, Artificial Sequence
  ENSG00000177685_16 (sequence is synthesized)
tggaacgcgcgggcctgcggcagcgggagttagagcagcagctgcacgcccaggctgcggagcacctggaggcacaggcccagaactcccagctgtggcgggcgcacgaggcgctgcgaa

SEQ ID NO: 620160 - DNA, 120 bp, Artificial Sequence
  ENSG00000177685_17 (sequence is synthesized)
cgcagctggagggggcgcaggagcagatccgcaggctggagagcgaagcacgaggccgccaggagcaaacccaacgagacgtggtcgccgtctccaggaacatgcagaaagagaaagtca

SEQ ID NO: 620161 - DNA, 120 bp, Artificial Sequence
  ENSG00000177685_18 (sequence is synthesized)
gcaactcgcgggtaggcgaccgctggtcccgccgctgaggcccctccactgccgcccgcccggcaccccctccgggccgccgtggcccgcgccaaacctgagcgtctcggtcgggaactc

SEQ ID NO: 620162 - DNA, 120 bp, Artificial Sequence
  ENSG00000177685_19 (sequence is synthesized)
caaacctgagcgtctcggtcgggaactccggttaccccctcggggcgcaaggcggcagggctttcaggaccccaccttccttatcaccagcacctgaaggccaggctgaggccccctgct

SEQ ID NO: 620163 - DNA, 120 bp, Artificial Sequence
  ENSG00000177685_20 (sequence is synthesized)
tgcctgggcctgggtgagcctgtggcctgcctatcccccactgcccagagctggaggcctgatcaggaggcctggcacttgtggcgccctgagggctgccggtgcctctcgtcctcctcc

SEQ ID NO: 620164 - DNA, 120 bp, Artificial Sequence
  ENSG00000177685_21 (sequence is synthesized)
gggccccgcccctcccgccaggcccaatcccacctcgctggcctccctggctccgccttctctgaattaatccctccccgacggccccacctccgcgggtccaggctgccctcagcccga

SEQ ID NO: 620165 - DNA, 120 bp, Artificial Sequence
  ENSG00000177685_22 (sequence is synthesized)
ggagatcccactgggcctcacgtatcacccccgtccggtcttctccacccgaccccgctccgcccgggcccactcccagcccctggccctccgtgtacctcttttgcatggccgagcggc

SEQ ID NO: 620166 - DNA, 120 bp, Artificial Sequence
  ENSG00000177685_23 (sequence is synthesized)
ccaacggtgccgtgggacggggctgggcgggccccggtgcgtgtcccgggggcggggccgacgggcgctcaggtctgggccactttcatccccatctcaagtcccaggcccgccccgtgg

SEQ ID NO: 620167 - DNA, 120 bp, Artificial Sequence
  ENSG00000177685_24 (sequence is synthesized)
gaaggaggatcttctagggggtccgggggctccccaaggagccttcctgcagccgggtcaccacctcccatccacagagacgtggtcgccgtctccaggaacatgcagaaagagaaagtc

SEQ ID NO: 620168 - DNA, 120 bp, Artificial Sequence
  ENSG00000177685_25 (sequence is synthesized)
cggcgctggccccgctcccactgcccgctctgctgtttctctgcctgcatgctgtctgcccttgtcacccgagtgctggttctgcacagggtctctaggccgggtcaggcccagcctagc

SEQ ID NO: 620169 - DNA, 120 bp, Artificial Sequence
  ENSG00000177685_26 (sequence is synthesized)
gtcagctgcgattccctgggagggacccggcatgatttcccgcagaatttgcatttcatgaggcagcagccagggctgcagggaggaggggcagcgccgggcgcggggccacataccggc

SEQ ID NO: 620170 - DNA, 120 bp, Artificial Sequence
  ENSG00000177685_27 (sequence is synthesized)
actgcccagggtacacacacctcaccgaccacgcacgccgggcaggggcgaaagcgctcacgggagggatgccctgcacgcagcaagtgctcctgtcctgcccaggggcgaagaagtctc

SEQ ID NO: 620171 - DNA, 120 bp, Artificial Sequence
  ENSG00000177685_28 (sequence is synthesized)
ggggtatgggggccaatggagggcctcagggcagcagcagaggcggtgccagggggctgtagcgctggcaagttctcatccggggtcgcccggtcccccgaaggcgcgagagcgagcacg

SEQ ID NO: 620172 - DNA, 120 bp, Artificial Sequence
  ENSG00000177685_29 (sequence is synthesized)
agagccgcgagcaggacctggaacgcgcgggcctgcggcagcgggaggtgagcacccggcccctgccctgtccccacggtcacccgtgcactctccccctgtgccttagcgtccccgggt

SEQ ID NO: 620173 - DNA, 120 bp, Artificial Sequence
  ENSG00000177685_30 (sequence is synthesized)
cttttgtggttcagctgggtcgcacgctggatcccaggccccttccttgaaaagcagaggccttgtaccccccagggttgccgggcgggacagtgattccagcccttcagctttcaggac

SEQ ID NO: 620174 - DNA, 120 bp, Artificial Sequence
  ENSG00000177685_31 (sequence is synthesized)
gctcctagctgcggtggagtgtgtggagctgaccttcctggcccccagctcctctcctgtgctaagctccggtagggctgggagctggcctgtcacctcttgtttccaggccaataggac

SEQ ID NO: 620175 - DNA, 120 bp, Artificial Sequence
  ENSG00000177685_32 (sequence is synthesized)
cagaataaggaaggaaaacaggaaactgggccctgagagagggcaggatactcgttgggagggtgaacggggacacagccacggtggcgacccacagccctggtaatcgctcgctccatg

SEQ ID NO: 620176 - DNA, 120 bp, Artificial Sequence
  ENSG00000177688_0 (sequence is synthesized)
tgtgcacgcaccctctccctcatccaccgctgtcacctcctgctgctcttcctgctgctcgtgtactcgttaggtgcggacccgccacctcttttgtgaagcagcagctgaggagactcc

SEQ ID NO: 620177 - DNA, 120 bp, Artificial Sequence
  ENSG00000177688_1 (sequence is synthesized)
ggtgttcaccatggccaacgaaaagcccacagaagaagtcaagactgagaacaacaatcatattaatttgaaggtggcgggacaggatggttctgtggtgcagtttaagattaagaggca

SEQ ID NO: 620178 - DNA, 120 bp, Artificial Sequence
  ENSG00000177688_2 (sequence is synthesized)
gacaccacttagtaaactaatgaaagcctattgtgaaccacggggattgtcagtgaagcagatcagattccgatttggtgggcaaccaatcagtggaacagacaaacctgcacagttgga

SEQ ID NO: 620179 - DNA, 120 bp, Artificial Sequence
  ENSG00000177688_3 (sequence is synthesized)
aatggaagatgaagatacaattgatgtgtttcaacagcctacgggaggtgtctactgaaaagggaacctgcttctttactccagaacgctgttctttaaagaccaagattactgcattct

SEQ ID NO: 620180 - DNA, 120 bp, Artificial Sequence
  ENSG00000177688_4 (sequence is synthesized)
tctattcttttgtttcccccttccacattcttttattatacatgaagtaactggtatgtgtacacaagcatattgcttttttcttcaaaccaaacagccaatggtatgttttgattgaca

SEQ ID NO: 620181 - DNA, 120 bp, Artificial Sequence
  ENSG00000177688_5 (sequence is synthesized)
tcaagtggagacaggatgggaaaaaatactgattctgtgaaaataccccctttatccattagtggcatgttcattcaggtcttatctttatattctagtaagttattttgctctcactgt

SEQ ID NO: 620182 - DNA, 120 bp, Artificial Sequence
  ENSG00000177688_6 (sequence is synthesized)
tttaacaacaacaaaaaaaaattctcacataccttgttcaattggaggattttcatgtttttcatttatcattgtaaaaccaaggacaattttataacttttgtgtacatagctgttaca

SEQ ID NO: 620183 - DNA, 120 bp, Artificial Sequence
  ENSG00000177688_7 (sequence is synthesized)
tgtagggcaatctgtctttaagtagggataaattactctaaaaaaaaaagaaagaatcctagaaagtttttccttcaagtcaggcttcttatttaaataaactttttgtttaaaatgaaa

SEQ ID NO: 620184 - DNA, 77 bp, Artificial Sequence
  ENSG00000177689_0 (sequence is synthesized)
gattggtatctggtcagcagagaaaggcatccaggccccgccaggagagacggtgactcagtatagcctagaactcc

SEQ ID NO: 620185 - DNA, 120 bp, Artificial Sequence
  ENSG00000177689_1 (sequence is synthesized)
ctcaagcaatcctcccacctcagcctttcaagcagctaggagtacagttgggagccactgtacctggttactgtcacgggatcacctgcctttttggctgctgcacctgaacagagtcat

SEQ ID NO: 620186 - DNA, 120 bp, Artificial Sequence
  ENSG00000177689_2 (sequence is synthesized)
tcatcatgcctcgaggtcagaagagtaaactccgtgccagggaaaaacgccgtcaggcccgaggagggctggaagatttgatagatgctctggacattttagaagaggaggaagaatctc

SEQ ID NO: 620187 - DNA, 120 bp, Artificial Sequence
  ENSG00000177689_3 (sequence is synthesized)
ccccctctgcctctgcttgtttgaaggatgttttccagagttcacttgatggggcatccaacaatccccatggacttcgggaagcccaatccaccagcacatctgctacagctgcttcac

SEQ ID NO: 620188 - DNA, 120 bp, Artificial Sequence
  ENSG00000177689_4 (sequence is synthesized)
acacaagacatcccgaaggagtcaacgaccaaatggaagaaaggccaatatgcacacaagatctagaagccactgatagctttcccagaggccctgtagatgagaaagtaattatattgg

SEQ ID NO: 620189 - DNA, 120 bp, Artificial Sequence
  ENSG00000177689_5 (sequence is synthesized)
tgcattacttgctgtacaagtaccaaatgaaagagcccattacaaaggcagatatgctgagaaatgtaacccaaatgtccaagagccagttccctgtaatcctgagcagagcttctgagc

SEQ ID NO: 620190 - DNA, 120 bp, Artificial Sequence
  ENSG00000177689_6 (sequence is synthesized)
acctggagctgatctttggtcttgacctgaaggaagtggagcctaataagcacatctatgtccttgtcaacaaactagatctaggctgtgatgcaaagctgagtgatgaaacaggcgtgc

SEQ ID NO: 620191 - DNA, 120 bp, Artificial Sequence
  ENSG00000177689_7 (sequence is synthesized)
ccaagactggcctgctgatgactgtcctgggtattatcttcacaaatggcaattgtgtcgctgaggaggaagtctggaaagtgtttaacacgatggggttatatgacggaattgagcact

SEQ ID NO: 620192 - DNA, 120 bp, Artificial Sequence
  ENSG00000177689_8 (sequence is synthesized)
aagatttggtgaaagaaaattacctggagtaccagcaagtgcccaacagtgatcctccacgctatcaattcctatggggcccaagagcccatgctgaaaccagcaagatgaaagttcttg

SEQ ID NO: 620193 - DNA, 120 bp, Artificial Sequence
  ENSG00000177689_9 (sequence is synthesized)
agtttttggccaaggtaaatgatacagctcccagtgaattctcaaactggtatacagaggctttacaagatgaggaagagagagccagagccagagttgcagccaaggctcgcgttagtg

SEQ ID NO: 620194 - DNA, 120 bp, Artificial Sequence
  ENSG00000177689_10 (sequence is synthesized)
ccacagccggtgcacgttccaaggttaagtccagcaagtcctcccaactgcagtaaagtctgagggagattcttcatttgtgtttgaaaagaaatgcacattctgagctgtgggaggtca

SEQ ID NO: 620195 - DNA, 120 bp, Artificial Sequence
  ENSG00000177689_11 (sequence is synthesized)
gggtgggactggagacaacacagtgaataatatgtttgtgttaatgttctatgtgatggcttggaatttttgaagatgttgttcctttaatagatggttaaagtagcttcactatctaag

SEQ ID NO: 620196 - DNA, 120 bp, Artificial Sequence
  ENSG00000177689_12 (sequence is synthesized)
tttatgaatgacattgctcaaatttttctgtatgtgagattaagagtaagcgatttattgctttataagtctaattgggaaactctccatttatttagtgatcgaaacacgatagcatgg

SEQ ID NO: 620197 - DNA, 120 bp, Artificial Sequence
  ENSG00000177689_13 (sequence is synthesized)
acgatagcatggtagtaaattaggcatttcctaattcaatgtgaaataatttaggagtgtaataaatgggatcaagaaatagagcaaagagggtcgggtgcggtggctcacacctgtaat

SEQ ID NO: 620198 - DNA, 120 bp, Artificial Sequence
  ENSG00000177692_0 (sequence is synthesized)
gcagaggcgcggcaggggggcgggagccgcggaacccctaccccaggtctgcgcaggtgaggagggggcggggcaggaccgacctcccttgccatgataaccaccttcgcagccggctcc

SEQ ID NO: 620199 - DNA, 120 bp, Artificial Sequence
  ENSG00000177692_1 (sequence is synthesized)
cagaccgttggcaccgattgcctagaaaatagggggtctcaggagctccgttttagcgtttatatatcccaattccaattaagccacttccagtattttttggccattgtcagtgtacaa

SEQ ID NO: 620200 - DNA, 120 bp, Artificial Sequence
  ENSG00000177692_2 (sequence is synthesized)
gtcttcctcctcttcgagaccatgttattgcaatagcagcaaacgtgttgggaggcctcacaattcatcatggtttttctggcctctggcagatagctccttcctagcgagctgtggagc

SEQ ID NO: 620201 - DNA, 120 bp, Artificial Sequence
  ENSG00000177692_3 (sequence is synthesized)
ttaaagtcttttggacacttgattctattcaatccagtatcagaccaggtcattgctaggaagaactctgggtacaataatgaatacaatgtatgtgatgatggctcagatcttaagatc

SEQ ID NO: 620202 - DNA, 120 bp, Artificial Sequence
  ENSG00000177692_4 (sequence is synthesized)
tcacctgataaaggctacagtgattcctaatcgagtgaaaatgcttccatattttggtatcattagaaatagaatgatgtcaacccataaatccaaaaagaagatcagagaatattatag

SEQ ID NO: 620203 - DNA, 120 bp, Artificial Sequence
  ENSG00000177692_5 (sequence is synthesized)
actgctgaacgtggaggaaggatgctctgcagatgaagtcagggaatcttttcataagcttgccaagcaatatcatcctgacagtggctctaatactgctgattctgcaacatttataag

SEQ ID NO: 620204 - DNA, 120 bp, Artificial Sequence
  ENSG00000177692_6 (sequence is synthesized)
aaggtgaagaagaagaagatgtagaaaaattcaaatataaaacaccccaacaccgacattatttaagttttgaaggtattggttttgggactccaactcaacgagagaagcattataggc

SEQ ID NO: 620205 - DNA, 120 bp, Artificial Sequence
  ENSG00000177692_7 (sequence is synthesized)
aatttagggcagaccgtgctgctgaacaagtgatggaatatcaaaagcagaaactacaaagccagtattttcctgatagtgtaattgttaaaaatataagacagagcaaacagcaaaaga

SEQ ID NO: 620206 - DNA, 120 bp, Artificial Sequence
  ENSG00000177692_8 (sequence is synthesized)
taacgcaagctatagaacgtttagtggaggacctcattcaagaatccatggcaaaaggagactttgacaatctcagtgggaaaggaaaacctctgaaaaagttttctgactgttcttaca

SEQ ID NO: 620207 - DNA, 120 bp, Artificial Sequence
  ENSG00000177692_9 (sequence is synthesized)
ttgatcccatgactcacaacctgaaccgaatactgatcgataatggataccaaccagaatggatccttaagcaaaaggaaataagcgatactattgagcaactcagagaggcaattttag

SEQ ID NO: 620208 - DNA, 120 bp, Artificial Sequence
  ENSG00000177692_10 (sequence is synthesized)
tgtctaggaaaaaacttgggaatccaatgacaccaactgaaaagaaacagtggaaccatgtttgtgagcagtttcaagaaaacatcagaaaattaaacaagcgaattaatgattttaatt

SEQ ID NO: 620209 - DNA, 120 bp, Artificial Sequence
  ENSG00000177692_11 (sequence is synthesized)
taattgttcccatcctgaccaggcaaaaagtccattttgatgctcagaaagaaattgtcagagcccagaaaatatacgagacccttataaaaacaaaagaagtcacagatagaaacccaa

SEQ ID NO: 620210 - DNA, 120 bp, Artificial Sequence
  ENSG00000177692_12 (sequence is synthesized)
ataaccttgatcaaggagaaggagagaaaacacctgaaatcaagaaaggttttttaaactggatgaatctgtggaaatttattaaaatacgatcattttgatgtttactatcataaatca

SEQ ID NO: 620211 - DNA, 120 bp, Artificial Sequence
  ENSG00000177692_13 (sequence is synthesized)
agctggtggtccccggtcgggacgaaggctcccgaggtgccctgcctgggtcctccggggtaaagttcgtttggcggaagattgtccgttttcctggtaaggtcacctgtcccaatcagg

SEQ ID NO: 620212 - DNA, 120 bp, Artificial Sequence
  ENSG00000177692_14 (sequence is synthesized)
tcccgaggtgccctgcctgggtcctccggggtaaagttcgtttggcggaagattgtccgttttcctggtaaggtcacctgtcccaatcaggtacgattctgccttccgtacccccgagcc

SEQ ID NO: 620213 - DNA, 120 bp, Artificial Sequence
  ENSG00000177692_15 (sequence is synthesized)
cctcagtgtaaagtggcaaatggtctagcccggcggaggcaccagctggaggcggtgggagggacacccgcagtgaagggcggaccgcgcacgcatgcgcagaggcgcggcaggggggcg

SEQ ID NO: 620214 - DNA, 120 bp, Artificial Sequence
  ENSG00000177692_16 (sequence is synthesized)
ctgacactttacatggaaaatgagatttattgctataatacaagaatttaagaattgtgccattgtacttatcacaaaactaatcacatagccaatgatgtgtgagtgagaaacctatca

SEQ ID NO: 620215 - DNA, 85 bp, Artificial Sequence
  ENSG00000177692_17 (sequence is synthesized)
taatcacatagccaatgatgtgtgagtgagaaacctatcaggtttgtcctgaggatatagcaagaaaagaaaataactgaaactc

SEQ ID NO: 620216 - DNA, 89 bp, Artificial Sequence
  ENSG00000177692_18 (sequence is synthesized)
cactcccgaatagctgggattataggcacacaccaccatacccggctatttttgtattttgttttctttttttttgagacagagtctca

SEQ ID NO: 620217 - DNA, 120 bp, Artificial Sequence
  ENSG00000177692_19 (sequence is synthesized)
aagactccgtcttaaaaaaaaaaaaaaagtgggaattagacgtaagaggcttaactgcattacagcaacatagatgaacaaaaccattttccatattggtcaatgagaaggtaaggttac

SEQ ID NO: 620218 - DNA, 120 bp, Artificial Sequence
  ENSG00000177692_20 (sequence is synthesized)
ttccatattggtcaatgagaaggtaaggttaccagaaaatgtcagtaaatttttaatttcagcacagtgcactttatgtttgtaaatgttgtctatgttaataaagttactataataatt

SEQ ID NO: 620219 - DNA, 120 bp, Artificial Sequence
  ENSG00000177693_0 (sequence is synthesized)
tcctggaatgaatcaacgagtgaaacgaataactctatggtgactgaattcatttttctgggtctctctgattctcaggaactccagaccttcctatttatgttgttttttgtattctat

SEQ ID NO: 620220 - DNA, 120 bp, Artificial Sequence; identical to SEQ ID NO: 613630
  ENSG00000177693_1 (sequence is synthesized)

SEQ ID NO: 620221 - DNA, 120 bp, Artificial Sequence; identical to SEQ ID NO: 613631
  ENSG00000177693_2 (sequence is synthesized)

SEQ ID NO: 620222 - DNA, 120 bp, Artificial Sequence; identical to SEQ ID NO: 613632
  ENSG00000177693_3 (sequence is synthesized)

SEQ ID NO: 620223 - DNA, 120 bp, Artificial Sequence; identical to SEQ ID NO: 613633
  ENSG00000177693_4 (sequence is synthesized)

SEQ ID NO: 620224 - DNA, 120 bp, Artificial Sequence
  ENSG00000177693_5 (sequence is synthesized)
attgccctttagataagtcgtccaaagctctgtccactttgactgctcacattacagtagttcttttgttctttggaccatgtgtctttatttatgcctggccattccccatcaagtcat

SEQ ID NO: 620225 - DNA, 120 bp, Artificial Sequence
  ENSG00000177693_6 (sequence is synthesized)
tagataaattccttgctgtattttattctgtgatcacccctctcttgaacccaattatatacacactgaggaacaaagacatgaagacggcaataagacggctgagaaaatgggatgcac

SEQ ID NO: 620226 - DNA, 120 bp, Artificial Sequence; identical to SEQ ID NO: 613636
  ENSG00000177693_7 (sequence is synthesized)

SEQ ID NO: 620227 - DNA, 120 bp, Artificial Sequence
  ENSG00000177694_0 (sequence is synthesized)
agaaggtcacaaagcttgcagggtaagtgacacaacttgaaactgcttggccctctttaaaaagaaataataaaatgggagagaatgaagcaagtttacctaacacgtctttgcaaggta

SEQ ID NO: 620228 - DNA, 120 bp, Artificial Sequence
  ENSG00000177694_1 (sequence is synthesized)
aaaagatggcctatcagaaggtccatgcagatcaaagagctccaggacactcacagtacttagacaatgatgaccttcaagccactgcccttgacttagagtgggacatggagaaggaac

SEQ ID NO: 620229 - DNA, 120 bp, Artificial Sequence
  ENSG00000177694_2 (sequence is synthesized)
tagaggagtctggttttgaccaattccagctagacggtgctgagaatcagaacctagggcattcagagactatagacctcaatcttgattccattcaaccagcaacttcacccaaaggaa

SEQ ID NO: 620230 - DNA, 120 bp, Artificial Sequence
  ENSG00000177694_3 (sequence is synthesized)
ggttccagagacttcaagaagaatctgactacattacccattatacacgatctgcaccaaagagcaatcgctgcaacttttgccacgtcttaaaaatactttgcacagccaccattttat

SEQ ID NO: 620231 - DNA, 120 bp, Artificial Sequence
  ENSG00000177694_4 (sequence is synthesized)
ttatttttgggattttgataggttattatgtacatacaaattgcccttcagatgctccatcttcaggaacagttgatcctcagttatatcaagagattctcaagacaatccaggcagaag

SEQ ID NO: 620232 - DNA, 120 bp, Artificial Sequence
  ENSG00000177694_5 (sequence is synthesized)
atattaagaagtctttcagaaatttggtacaactatataaaaatgaagatgacatggaaatttcaaagaagattaagactcagtggacctctttgggcctagaagatgtacagtttgtaa

SEQ ID NO: 620233 - DNA, 120 bp, Artificial Sequence
  ENSG00000177694_6 (sequence is synthesized)
attactctgtgctgcttgatctgccaggcccttctcccagcactgtgactctgagcagcagtggtcaatgctttcatcctaatggccagccttgcagtgaagaagccagaaaagatagca

SEQ ID NO: 620234 - DNA, 120 bp, Artificial Sequence
  ENSG00000177694_7 (sequence is synthesized)
gccaagacctgctctattcatatgcagcctattctgccaaaggaactctcaaggctgaagtcatcgatgtgagttatggaatggcagatgatttaaaaaggattaggaaaataaaaaacg

SEQ ID NO: 620235 - DNA, 120 bp, Artificial Sequence
  ENSG00000177694_8 (sequence is synthesized)
taacaaatcagatcgcactcctgaaattaggaaaattgccactgctttataagctttcctcattggaaaaggctggatttggaggtgttcttctgtatatcgatccttgtgatttgccaa

SEQ ID NO: 620236 - DNA, 120 bp, Artificial Sequence
  ENSG00000177694_9 (sequence is synthesized)
agactgtgaatcctagccatgataccttcatggtgtcactgaatccaggaggagacccttctacgcctggttacccaagtgtcgatgaaagttttagacaaagccgatcaaacctcacct

SEQ ID NO: 620237 - DNA, 120 bp, Artificial Sequence
  ENSG00000177694_10 (sequence is synthesized)
ctctattagtgcagcccatctctgcacccctcgttgcaaaactgatctcttcgccaaaagctagaaccaaaaatgaagcgtgtagctctctagagcttccaaataatgaaataagagtcg

SEQ ID NO: 620238 - DNA, 120 bp, Artificial Sequence
  ENSG00000177694_11 (sequence is synthesized)
tcagcatgcaagttcagacagtcacaaaattgaaaacagttactaatgttgttggatttgtaatgggcttgacatctccagaccggtatatcatagttggcagccatcatcacactgcac

SEQ ID NO: 620239 - DNA, 120 bp, Artificial Sequence
  ENSG00000177694_12 (sequence is synthesized)
acagttataatggacaagaatgggccagtagtactgcaataatcacagcgtttatccgtgccttgatgtcaaaagttaagagagggtggagaccagaccgaactattgttttctgttctt

SEQ ID NO: 620240 - DNA, 120 bp, Artificial Sequence
  ENSG00000177694_13 (sequence is synthesized)
ggggaggaacagcttttggcaatattggctcatatgaatggggagaggatttcaagaaggttcttcagaaaaatgttgtggcttatattagcctccacagtcccataagggggaactcta

SEQ ID NO: 620241 - DNA, 120 bp, Artificial Sequence
  ENSG00000177694_14 (sequence is synthesized)
gtctgtatcctgtagcatcaccatctcttcagcaactggtagtagagaaaaataatttcaactgtaccagaagagcccagtgcccagaaaccaatatcagttctatacagatacaaggtg

SEQ ID NO: 620242 - DNA, 120 bp, Artificial Sequence
  ENSG00000177694_15 (sequence is synthesized)
atgctgattatttcatcaaccatcttggagttcccatcgtgcagtttgcttacgaggacatcaaaacattagagggtccaagttttctctccgaggcccgtttttctacacgagcaacaa

SEQ ID NO: 620243 - DNA, 120 bp, Artificial Sequence
  ENSG00000177694_16 (sequence is synthesized)
aaattgaagaaatggatccctctttcaaccttcatgaaaccattactaagctctcaggagaagtgattttgcaaattgccaacgaacctgttctgccctttaatgcacttgatatagctt

SEQ ID NO: 620244 - DNA, 120 bp, Artificial Sequence
  ENSG00000177694_17 (sequence is synthesized)
tagaagttcaaaacaaccttaaaggtgatcaacccaacactcatcaactgttagccatggcgttacgcctgcgggagagtgctgaactttttcagtctgatgagatgcgacctgctaatg

SEQ ID NO: 620245 - DNA, 120 bp, Artificial Sequence
  ENSG00000177694_18 (sequence is synthesized)
atcccaaggagagagcacccatccgcatccggatgctgaatgacattctccaagacatggagaaaagctttctggtaaagcaggcaccaccaggtttttatagaaacatcctctaccacc

SEQ ID NO: 620246 - DNA, 120 bp, Artificial Sequence
  ENSG00000177694_19 (sequence is synthesized)
ttgatgaaaagacaagccggttttcaatacttatagaggcttgggaacactgcaaaccccttgcatcaaatgagacccttcaagaagccctgtcagaggtgttgaacagcattaattcag

SEQ ID NO: 620247 - DNA, 120 bp, Artificial Sequence
  ENSG00000177694_20 (sequence is synthesized)
ctcaggtttacttcaaagcaggacttgatgtgttcaagagtgtcttggatgggaagaattgagaaaactctgagcatttttaaaagtttgtttacaattccacaagcaaaagctctaatt

SEQ ID NO: 620248 - DNA, 120 bp, Artificial Sequence
  ENSG00000177694_21 (sequence is synthesized)
taaccagattttctgacattgaaggcttattttccccaatggctttttgacaagtataaagctattattacattgtattttttaaatgtaaatatagaaagaacattttgcacatttaat

SEQ ID NO: 620249 - DNA, 120 bp, Artificial Sequence
  ENSG00000177694_22 (sequence is synthesized)
tctacatttctgaatatgtaaagcaagttattgaaataggacttaagaattacctattaaaaagaaatctgatatataaaaatatgtactattttaaggaaaaatttccaagaagttctg

SEQ ID NO: 620250 - DNA, 120 bp, Artificial Sequence
  ENSG00000177694_23 (sequence is synthesized)
caagaagttctggactatctttgttcctatggggagggcatataggaacacagtttattctctctgatagagctattaatgacttagtttctgtaaaagaaatggagagttgatatggtt

SEQ ID NO: 620251 - DNA, 120 bp, Artificial Sequence
  ENSG00000177694_24 (sequence is synthesized)
cagattaacttcactattaagtgttcaatatgaagaattcaagtattctgactgagtgattggttgacctaaaccactttgaatgtttctattttatgaaatgaagtttctcttcttaac

SEQ ID NO: 620252 - DNA, 120 bp, Artificial Sequence
  ENSG00000177694_25 (sequence is synthesized)
acaactagatgtagtaatacactggttatgaaattgtatttttttaagtattaatgaaaaaagagccataagcattccaggagaaaatctcaagggagctacatagagcaatttaaatgc

SEQ ID NO: 620253 - DNA, 120 bp, Artificial Sequence
  ENSG00000177694_26 (sequence is synthesized)
aaatttttttcctaacaacttacaaggtgactagctttgaaacccctaatttgcctcagttgattttctaagaatttcaggagtgatgtatgtcttaagagggagaaaaaaatatttctt

SEQ ID NO: 620254 - DNA, 120 bp, Artificial Sequence
  ENSG00000177694_27 (sequence is synthesized)
attactttttctcttgtttctgttggaaacactgaagcagggactctaaaatgaaagcatctcacattggttttctttcttgtatcttttctgaaactccttgctgtaaggcagctttct

SEQ ID NO: 620255 - DNA, 120 bp, Artificial Sequence
  ENSG00000177694_28 (sequence is synthesized)
cagagtactatatattttcaacagtaaagtagcagagtttctctttgaaacccaaaatgtcttctaaagaatcaaatttctatttctgcctctgacaaaaagaacttactatgaaagaaa

SEQ ID NO: 620256 - DNA, 120 bp, Artificial Sequence
  ENSG00000177694_29 (sequence is synthesized)
tagttgttttatcaataaaagccccttaatattatgaagaaacttttcatattttttcttctttatccttaattgtgactaagatggaaatctagaaaatattcatgcttctaagtttct

SEQ ID NO: 620257 - DNA, 120 bp, Artificial Sequence
  ENSG00000177694_30 (sequence is synthesized)
gcagtgttactgtaagagagtgtctcgtctacacttcagttcttctctcatgtggaaaactaagctttttatattgacattgccattgaatagctctagcaactattattattcccccaa

SEQ ID NO: 620258 - DNA, 120 bp, Artificial Sequence
  ENSG00000177694_31 (sequence is synthesized)
accctaaaattctacctattaggtgtcaggttaaagttctaatttatctttagaaatttatgtgaaaaatggttttcctatactggataaagcaattccccttaggaaacatagcctcag

SEQ ID NO: 620259 - DNA, 120 bp, Artificial Sequence
  ENSG00000177694_32 (sequence is synthesized)
agtatttcatataaattttctctatctaattcaaacatatctccccatgatacaccgccagagtgacattgcagacagtctgtgtatgtttaaattttcactttttatggatgagcataa

SEQ ID NO: 620260 - DNA, 120 bp, Artificial Sequence
  ENSG00000177694_33 (sequence is synthesized)
acctagtcttagtttaaaggcaaactaaagttgaggggaaataattaatcaatactgattaattgatttataaggttcaacactgtctaccctaaataatttttatatgctcaaggcaaa

SEQ ID NO: 620261 - DNA, 120 bp, Artificial Sequence
  ENSG00000177694_34 (sequence is synthesized)
gcagggaatagaggcaattagctagataattcaagcagaaatccattttcatcgaaattgcctgtgtgcacatatttttagatgaaaaatgaaactaccttacaatattatttttttaac

SEQ ID NO: 620262 - DNA, 120 bp, Artificial Sequence
  ENSG00000177694_35 (sequence is synthesized)
caatgtatttgtttgcaaacatttgccatgttgaagagtgtgtataggaaaggtctagaaataaataggcttgtgcatacctaggcattcatgctctttcttcctcttcagagatcatca

SEQ ID NO: 620263 - DNA, 120 bp, Artificial Sequence
  ENSG00000177694_36 (sequence is synthesized)
gaaaagaggtgggaatacacaagcaggtgcatgtaagcccaaaagctagaaagccttatatttaaccaaaggttgatgtgttcattccagttattcacttacagatgaaactaaaacaaa

SEQ ID NO: 620264 - DNA, 120 bp, Artificial Sequence
  ENSG00000177694_37 (sequence is synthesized)
taaaggcaagctattatcagtttggtagttcattattttagaacaaatttctaaattaatttattcccataacctacaatagcactgagaacagaaaacatgtttcttcttcattttgtt

SEQ ID NO: 620265 - DNA, 120 bp, Artificial Sequence
  ENSG00000177694_38 (sequence is synthesized)
taaagattgcgtacctaggtaagtcacactgtatagataaaaaccttcttctgtattcctcacctctaaattatatgttatttgctatttgaaaactgtagttaactatggttttttatt

SEQ ID NO: 620266 - DNA, 120 bp, Artificial Sequence
  ENSG00000177694_39 (sequence is synthesized)
agtctattaaaagatacgtggagatattaaattatacctaaagcagacgtccaacaaattctgtacatgctgctttacatctttgcaacaaacctcttaactagcagcattatttctata

SEQ ID NO: 620267 - DNA, 120 bp, Artificial Sequence
  ENSG00000177694_40 (sequence is synthesized)
tgagcaaattaatagcaagtgttaatgtgaattggtagtaggtttaagctgttgctgagtcgtctatatgcctggtacttctcacaatctttcatacatagaattgtgcctaggaaataa

SEQ ID NO: 620268 - DNA, 120 bp, Artificial Sequence
  ENSG00000177694_41 (sequence is synthesized)
tgaatcataaatattctctgaagaaaatgtggtaaaggtgtaacggtgaaatttatgttcaggcagggtacacatgagatactgccctttatggaaaagcataagtctcagaatcaaaag

SEQ ID NO: 620269 - DNA, 120 bp, Artificial Sequence
  ENSG00000177694_42 (sequence is synthesized)
aaagcctaataaagattctggtctaagccctgagatcttgccttcagccagagaaggcattatcaattacccccaccagatatagtaactaaacccaaagtgagtaagaaacttggacat

SEQ ID NO: 620270 - DNA, 120 bp, Artificial Sequence
  ENSG00000177694_43 (sequence is synthesized)
agtcatgtatttagttagtaacaaaagcaccactggaatttaagcttctctgctttctcatgcagtatatcttgcttctccctgaggagacagggttataaatgatcttttccagtgcat

SEQ ID NO: 620271 - DNA, 120 bp, Artificial Sequence
  ENSG00000177694_44 (sequence is synthesized)
tcgatgtaaccagccattctgtcagatgttgcatgggctggaaacactgcttttaattcaaggctagttcattctctgactgtacctgacaaacaaaactctccccgagaattcaggcaa

SEQ ID NO: 620272 - DNA, 120 bp, Artificial Sequence
  ENSG00000177694_45 (sequence is synthesized)
aggacacaaagactgggtacttgagagaaagtggggagaatccttacagaacaccagaagtcaggaagaaggacattgagcaaaatatatctgtaagagggcaagtcaggccagtgttaa

SEQ ID NO: 620273 - DNA, 120 bp, Artificial Sequence
  ENSG00000177694_46 (sequence is synthesized)
gtcaacaatctaaatcaccgtttctcaaaatgtgaaatttagaaagacagggctaggaatctacatcttcagcaagatttctggatgtctgttacacacactgaagtttaagaatttcca

SEQ ID NO: 620274 - DNA, 120 bp, Artificial Sequence
  ENSG00000177694_47 (sequence is synthesized)
atctacgttaatcgtagtttccaagaaaacactaattgacatttctaaataaattgaagagtcataataacaagaaagacgtaaagatttgttattaatggaatcattatgagaaaagaa

SEQ ID NO: 620275 - DNA, 120 bp, Artificial Sequence
  ENSG00000177694_48 (sequence is synthesized)
aagtggacccattttatctctaagaaaacaattcagttgcagcttatatttgtgcctgctacatcccaggcactggtgttttagaatttttcccatgtatcctttttttttttttttttt

SEQ ID NO: 620276 - DNA, 120 bp, Artificial Sequence
  ENSG00000177694_49 (sequence is synthesized)
ttttttaattcccacaacaacccatttcaaaatgagaaaactaggttgagtgacttgtccacagttccaaagctaataaaaatgatgaggcatatttctcttctgggcccactgtattca

SEQ ID NO: 620277 - DNA, 120 bp, Artificial Sequence
  ENSG00000177694_50 (sequence is synthesized)
gttctttgttctttacactgagtgccgaaaaaaaaaatcagactattttgattctagaaagtgagataattgaaaatgttaacatatttctccaaaactgatcagactgtggagtctgtc

SEQ ID NO: 620278 - DNA, 120 bp, Artificial Sequence
  ENSG00000177694_51 (sequence is synthesized)
acttttttggtataataaaggagtttgaagaaacaaatgacatcattcctgatgatggtagcccactccaacaaaggcgtatatatgtaggcaagtttgaagatatctataagagcatta

SEQ ID NO: 620279 - DNA, 120 bp, Artificial Sequence
  ENSG00000177694_52 (sequence is synthesized)
aaaggcaagtgcaccattgtggaatatcatgacgagtaggcttacaaacagtaaaaagagaccagaaaccacaagtcttacactttcattctctaaatgcttatataatttcactaaaaa

SEQ ID NO: 620280 - DNA, 120 bp, Artificial Sequence
  ENSG00000177694_53 (sequence is synthesized)
aagaaaagcaggtgctgtgatttagaacaacagttttatgttatttttaaaaattcagaataaccaattgactttttaaattaaataaacgtagagcatatagtaagtttccccacagga

SEQ ID NO: 620281 - DNA, 120 bp, Artificial Sequence
  ENSG00000177694_54 (sequence is synthesized)
aagacagatgttaacaaaaataaaataaatgattatttgtgaccatgttactaatgatgaatcagcatctttgcctcaaatgaaaatctataattatttgtatgataaattggtagacct

SEQ ID NO: 620282 - DNA, 120 bp, Artificial Sequence
  ENSG00000177694_55 (sequence is synthesized)
agccaaaaatgttctcatgagacattctgtgatatgtgtaattgattactccaaaaattaagctttctctgagggtaacacattgtcatctcattggtttaatgggctatttaaatgtgc

SEQ ID NO: 620283 - DNA, 120 bp, Artificial Sequence
  ENSG00000177694_56 (sequence is synthesized)
cttagccacacatttgcttaatagaaaggaattattttaaactaccaatccatatgttgagtggaaaggaagttggcccacatattccaataaatatatcagcaatataacagtttcatc

SEQ ID NO: 620284 - DNA, 120 bp, Artificial Sequence
  ENSG00000177694_57 (sequence is synthesized)
atgggaccatggatacagtgcagggaaaaaacaaacaaacaatatttgagaaaatatatatattctgcccagccacactggtgagtttttatttcttgtatgagtttaaattgccaactt

SEQ ID NO: 620285 - DNA, 120 bp, Artificial Sequence
  ENSG00000177694_58 (sequence is synthesized)
aaaaaagcctcattagaatttgctattcgaaaagaccttaaaaaccctcacagagttctaaacatcccattcattgaaaataattttcagttaagtagatttgttttgtgcacttcacaa

SEQ ID NO: 620286 - DNA, 120 bp, Artificial Sequence
  ENSG00000177694_59 (sequence is synthesized)
cttttaggtgacatgaatttgaagcgtagcaaaagaaatgtataaagatagccttttctggtcattaccatgtctactcaagtttctgttttctaggtacactctagcattgtaactttt

SEQ ID NO: 620287 - DNA, 120 bp, Artificial Sequence
  ENSG00000177694_60 (sequence is synthesized)
tccccctgagaagtaattttaagatctatcagtctcaatttaaatgatctgttaatcagccagagttttagtttcataatatcgttccattgcctgacaaagatatacacactgaagtgc

SEQ ID NO: 620288 - DNA, 120 bp, Artificial Sequence
  ENSG00000177694_61 (sequence is synthesized)
ctttagcagacctgggaccgtcaagaatcttgttaccctgattattgcaagatgacatatttcttaagccatttataatctcatattcgggttgaatctgaatttacaaataaaagggtt

SEQ ID NO: 620289 - DNA, 120 bp, Artificial Sequence
  ENSG00000177694_62 (sequence is synthesized)
aaattgaggcagtttcaagcagcatttaggaaaatgaagtggcttcaaattttagtgtttctggttacattattttgtttgaattatacaattacataattttctgtaaccaaaatggta

SEQ ID NO: 620290 - DNA, 120 bp, Artificial Sequence
  ENSG00000177694_63 (sequence is synthesized)
attttgatggattttttaaatgccaaaatccaatcatcaaggccaaagaaatgcatgattactctgatttcttatgcaccattcagtcaagacttaactcagaggcagttgattcagtgc

SEQ ID NO: 620291 - DNA, 120 bp, Artificial Sequence
  ENSG00000177694_64 (sequence is synthesized)
ttacatctagacaaagctttaatgagtgcagacccagcctaacagtatttcatctaatttctttgatggcttaagccaataagcactgaggtagcttttctcagaaggaaacagatttta

SEQ ID NO: 620292 - DNA, 120 bp, Artificial Sequence
  ENSG00000177694_65 (sequence is synthesized)
ttttccaggggctaattaatatgcaccacctaagtccccaaaggatcacacaggtgcctgtatcatgccatatgtcatgtgctatattcctgcaagctcaagagattaatatacaatcat

SEQ ID NO: 620293 - DNA, 120 bp, Artificial Sequence
  ENSG00000177694_66 (sequence is synthesized)
tattatgaattattatgttgcattgaagttaatgtcggtcttttgttctaattaaagtacaaacgtggcatctgaatagaagcttagctagagaagtggagttagagtccctattttaat

SEQ ID NO: 620294 - DNA, 120 bp, Artificial Sequence
  ENSG00000177694_67 (sequence is synthesized)
gaactacatatatttttcaatcaaaatgtgtaattatttaattatctagcctgctcagtaatcataactctccaacttcttcaaagggcctttattcaatatgttaccactcatatggtc

SEQ ID NO: 620295 - DNA, 120 bp, Artificial Sequence
  ENSG00000177694_68 (sequence is synthesized)
attacttggtaagtgttttatattttgaatttcttagatgctttcagtgtatgtgctagtgttttattaatattaaaaatttttgtttacttatatatcaagctgctgcaaatggactac

SEQ ID NO: 620296 - DNA, 120 bp, Artificial Sequence
  ENSG00000177694_69 (sequence is synthesized)
cttattttaaaagttagaataaaatgctattactctctaaacagaactttagcatatctgtttgataagaaatacacaaacaaaatatttttctatgctattgcaaattgtccgcaggaa

SEQ ID NO: 620297 - DNA, 120 bp, Artificial Sequence
  ENSG00000177694_70 (sequence is synthesized)
gcaaaatgccagatggttaagtgtagctcacataattatattccaaaggtgttataaacaattctatttagcatctgagataggtctatattaggcaatttcatgtttacatttctaaca

SEQ ID NO: 620298 - DNA, 120 bp, Artificial Sequence
  ENSG00000177694_71 (sequence is synthesized)
gaaaggtttaatggcaaatattccttatattctaacttgctacttggagaatatggatattctgaaaagaaaaaccctttctagaacactgtgcaggactaatttttttttaatagacat

SEQ ID NO: 620299 - DNA, 74 bp, Artificial Sequence
  ENSG00000177694_72 (sequence is synthesized)
ctaggcatgttggtgtgcacctttgtagtccagctactagggaggctgaggcggaagaatcatttgggcccaaa

SEQ ID NO: 620300 - DNA, 120 bp, Artificial Sequence
  ENSG00000177694_73 (sequence is synthesized)
tactagggaggctgaggcggaagaatcatttgggcccaaaagtttgaagctgcagtgagctaaaatcatgccactgtagtccagcctgtgtaacagaacctatctcaaaaaaaggaaaag

SEQ ID NO: 620301 - DNA, 120 bp, Artificial Sequence
  ENSG00000177694_74 (sequence is synthesized)
aaagtcacatgctgttgatagtagttttatatgtatttggaatgttaatatgggacacatgcatttaatactttaatcatgtattcaatgtagcagcatttagatatgtaagattttaga

SEQ ID NO: 620302 - DNA, 120 bp, Artificial Sequence
  ENSG00000177694_75 (sequence is synthesized)
agtaaaatctcagtggtataacatttaaaacacagccttaaaatgaagaatagggatgagcaggagaaaatttataaattaacccagggtaaaatttggaggaaaatttttccaaataaa

SEQ ID NO: 620303 - DNA, 120 bp, Artificial Sequence
  ENSG00000177694_76 (sequence is synthesized)
tttgctttgattaaaaacacatatctctcaagaggtgtcccaattactaaattatgttgaactgttgtggtgtttagccttgttcaaaatgatttgattatcatctggattcagaaatct

SEQ ID NO: 620304 - DNA, 120 bp, Artificial Sequence
  ENSG00000177694_77 (sequence is synthesized)
tttcattgtacagagatttcattgtcattgtcgttgttgttaactgatttttaatgatattgatttagaggcatttgtcggtagtttttaaattactatatagggttgaatgtctaattt

SEQ ID NO: 620305 - DNA, 120 bp, Artificial Sequence
  ENSG00000177694_78 (sequence is synthesized)
ctataatgtgtggatgcccatcagatatttagtgcattctatatttagcccaagtgtgatcacaatttattttataactttttatgtgttacttacatgactcaatatgcatcttactta

SEQ ID NO: 620306 - DNA, 120 bp, Artificial Sequence
  ENSG00000177694_79 (sequence is synthesized)
agaaattatgttgtgatctggagtgacacaaatggattgagataccacatccattaaaaatataagtgaatattttatatttaagttgtttaaatatttgcacattattgaaaacatagt

SEQ ID NO: 620307 - DNA, 120 bp, Artificial Sequence
  ENSG00000177694_80 (sequence is synthesized)
actaggaaatgaaggcaccatttaacaaacgtgttctgaatcataattttcatgagtttgtacgtgaaatgttaatgtttaaaacacccattttgaaattattaaatacaggtaaaaaca

SEQ ID NO: 620308 - DNA, 120 bp, Artificial Sequence
  ENSG00000177694_81 (sequence is synthesized)
ggcccggcagccgtaccgcagacgagcccgcgcccgcgccgctcaggaggctgagggaagaaaagaataatttaaatgaaatttagtttctataaagaaaacgattaaaaacaaggaaat

SEQ ID NO: 620309 - DNA, 120 bp, Artificial Sequence
  ENSG00000177694_82 (sequence is synthesized)
ttgtctccacttaagatgaaaggaattttcttctttgaccacagtgtttcacacaagatctcccagctggacgttcaaaatagcttttgatgtcttagggcgtcttttattcaaccctag

SEQ ID NO: 620310 - DNA, 120 bp, Artificial Sequence
  ENSG00000177694_83 (sequence is synthesized)
accttagttccaggtttgatgattagtcctcagtatatccacagagctcttatatgaagagaattcttcctcttctaacacacataataacctatgaagatattaaatattttgcccctt

SEQ ID NO: 620311 - DNA, 120 bp, Artificial Sequence
  ENSG00000177694_84 (sequence is synthesized)
atccggcctggcccggcagccgtaccgcagacgagcccgcgcccgcgccgctcagttttctgaaagaaaagatcagtaagatcagttatgggctatgatgaaaccattttaagtctctgt

SEQ ID NO: 620312 - DNA, 120 bp, Artificial Sequence
  ENSG00000177694_85 (sequence is synthesized)
tctttgccaagctccaaggtccatgaaatctgatggtgtaggaaatgctcatccagtatctgcagtgctgtttaaagagaaaaggcccaggtgaagcctgttactagaagactgagtgat

SEQ ID NO: 620313 - DNA, 120 bp, Artificial Sequence
  ENSG00000177694_86 (sequence is synthesized)
aggatagtgggaaagtagggaaatgaaatgaaggctgtttatttagttggctttctcagtgtcagtgaggtttgcatgtgaacatgcactggacactgacttgagggaatgcttatttgg

SEQ ID NO: 620314 - DNA, 120 bp, Artificial Sequence
  ENSG00000177694_87 (sequence is synthesized)
aattctggaagtctgcactggatttattcagtaattttagctcgattgtagaattgctgagttcttcaccctcaaaatggggatagaaatgctgatttttaaagcactttaggatcctta

SEQ ID NO: 620315 - DNA, 120 bp, Artificial Sequence
  ENSG00000177694_88 (sequence is synthesized)
aatgtagtataccactgtaagcttcaaagatagtttcttcacttggttgcagtctttgaaatgggattcaactgaagctttacaaagtagtattagaactcccaatgacagacaccagtc

SEQ ID NO: 620316 - DNA, 120 bp, Artificial Sequence
  ENSG00000177694_89 (sequence is synthesized)
ggcccggcagccgtaccgcagacgagcccgcgcccgcgccgctcagatctcccagctggacgttcaaaatagcttttgatgtcttagggcgtcttttattcaaccctaggaggctgaggg

SEQ ID NO: 620317 - DNA, 120 bp, Artificial Sequence
  ENSG00000177694_90 (sequence is synthesized)
acagaactttaatagcattttcaattaacagaagtgcaaggagctcctgttggacctgtgttccatgaggaaggctttcactagcccttcatgataggttcaaacacttgaagacctgag

SEQ ID NO: 620318 - DNA, 120 bp, Artificial Sequence
  ENSG00000177694_91 (sequence is synthesized)
gaatttcagagttgacatttagatattgaggtaacaggacatcttggagttgaaatttccagaatctttgctggaaagtctcataatctcaaaacaaaatcaagcaaatttggagcaaag

SEQ ID NO: 620319 - DNA, 120 bp, Artificial Sequence
  ENSG00000177694_92 (sequence is synthesized)
taattataattagttataggaaatgtttaaagtatgcttacaatatgtgcaactgagtattctgtttcagaaaggaaagtttattgagttgtttatcttttgggggcagttgtttactta

SEQ ID NO: 620320 - DNA, 120 bp, Artificial Sequence
  ENSG00000177694_93 (sequence is synthesized)
gataaagtgactgctatatgttctctatatttttatctattaactatggattgcttctaaaaacatgccttgaatagtaaaggattccatagtgtatgtgcattttattttattttattt

SEQ ID NO: 620321 - DNA, 120 bp, Artificial Sequence
  ENSG00000177694_94 (sequence is synthesized)
atcttctaaagctatccctgtgcattttaaacattatatgctttctttgtttttgatgagatagcagtctaaattttttcactctgctcttgtgtttaaatgcaaataagttcattcagt

SEQ ID NO: 620322 - DNA, 120 bp, Artificial Sequence
  ENSG00000177694_95 (sequence is synthesized)
tttctgttggtgctttatttgatactaccaagtttttgtttgctaatgtagcacatataaggcatcccctgtaaaaacatcccccaagctactctatggttagtgtatggctaatatatt

SEQ ID NO: 620323 - DNA, 120 bp, Artificial Sequence
  ENSG00000177694_96 (sequence is synthesized)
tttaaagagaaaaggcccagtgtaatttcggcttattttacatcaaaaatcacctccatcaaagcagagatcaatgatggttaacatgaatattctgaagtttgtatctacatctcttac

SEQ ID NO: 620324 - DNA, 120 bp, Artificial Sequence
  ENSG00000177694_97 (sequence is synthesized)
acaaatgcatttcgtttaagctttcctgtaataaagatctcccagctggacgttcaaaatagcttttgatgtcttagggcgtcttttattcaaccctagctatgcagatttccagggact

SEQ ID NO: 620325 - DNA, 120 bp, Artificial Sequence
  ENSG00000177694_98 (sequence is synthesized)
ggattcaggtgatggaggtgttttatgagcacacacaaaacaagtgatacacgtttttgtctccacttaagatgaaaggaattttcttctttgaccacagtgtttcacacaagattggta

SEQ ID NO: 620326 - DNA, 120 bp, Artificial Sequence
  ENSG00000177694_99 (sequence is synthesized)
agatccactggactcttatttcatttggaattacaaaatcctttgcagagttacttcttcctctgaagtcttgaaacactccaagtcatccttgagggttgaaatccacttcttcaaaac

SEQ ID NO: 620327 - DNA, 120 bp, Artificial Sequence
  ENSG00000177694_100 (sequence is synthesized)
tcctgttaatattggaaatgagcattgactattaggcacctggatgaagactgggtccagattgtcagtctcctgtaacctgcagaagccctccagttgcactaggaacattcaattgaa

SEQ ID NO: 620328 - DNA, 120 bp, Artificial Sequence
  ENSG00000177694_101 (sequence is synthesized)
actttttacctcagggtcattagaaagccaccacagatctaggcatctaagcaggaataggagaggaaaggcaactgtagccacattaatcacttttatcaggaagataaatgcttttcc

SEQ ID NO: 620329 - DNA, 120 bp, Artificial Sequence
  ENSG00000177694_102 (sequence is synthesized)
cgaatctttcaacaggctttcattttacattgggcatatttttgtcatatagccttccctagctgcaagggaggcttttcaaacttctttatggaattcagcaagaaagtaaagaggata

SEQ ID NO: 620330 - DNA, 120 bp, Artificial Sequence
  ENSG00000177694_103 (sequence is synthesized)
ggatccctctttcaaccttcatgaaaccattactaagtgaagaacacacatgctttcatagtcttggaatgtgtggtatgtactctatgattgctgaaataaagtgcttttgaaaatcct

SEQ ID NO: 620331 - DNA, 120 bp, Artificial Sequence
  ENSG00000177694_104 (sequence is synthesized)
actcctgaaattaggaaaattgccactgctttataaggttggtccagtgaatgttattcagtggtttggtcaatattttgccttgttttgttggaattatatgcttttgtgagtgtggag

SEQ ID NO: 620332 - DNA, 120 bp, Artificial Sequence
  ENSG00000177694_105 (sequence is synthesized)
tgtgtgtgtgcatataggtgtgtgagagagagaaggggagaggaagaaagagaggcagagagtgtcacagaaagatggcttttccacattagaacattttaatttaagatatttaagaac

SEQ ID NO: 620333 - DNA, 120 bp, Artificial Sequence
  ENSG00000177694_106 (sequence is synthesized)
aatatatttatgcccttatttctttagagagaaaataccttaagtcaggtaacactgagtttgtgggaccttaataaaattggcatactcttcataatggtacctatctggaatagtaaa

SEQ ID NO: 620334 - DNA, 120 bp, Artificial Sequence
  ENSG00000177694_107 (sequence is synthesized)
aaatgagaaccaccctgtgttcatcttatgacatatgtgaaacttctaatctattatcaaatggactaattatcatgttctctatgttagacaagtatctagatgatttacaccctttag

SEQ ID NO: 620335 - DNA, 120 bp, Artificial Sequence
  ENSG00000177694_108 (sequence is synthesized)
tgattattttgtcaactatacaactacagttactaactgtgatcaggattttaattaaaatataattgctaagagtagcagaattttgatttattttatttgaatggaagtttattaaca

SEQ ID NO: 620336 - DNA, 120 bp, Artificial Sequence
  ENSG00000177694_109 (sequence is synthesized)
ctcatccacagatacacttatgtaattaagtttctgatgatgaaccagcacaatagacagccactactgctcattcttgcttcatttcctttttctatttaaaaaaaaaaaaaaaaaaaa

SEQ ID NO: 620337 - DNA, 120 bp, Artificial Sequence
  ENSG00000177697_0 (sequence is synthesized)
attctcagcgctgggagccgccgcccccgcagctgctgccgccgccgccagggcccggactcggacgcgtgcctagagtcctggggagcttctgtccacctgtcctgcagaggagtcgtt

SEQ ID NO: 620338 - DNA, 120 bp, Artificial Sequence
  ENSG00000177697_1 (sequence is synthesized)
tccagcccggctgccccaggatgggtgagttcaacgagaagaagacaacatgtggcaccgtttgcctcaagtacctgctgtttacctacaattgctgcttctggctggctggcctggctg

SEQ ID NO: 620339 - DNA, 120 bp, Artificial Sequence
  ENSG00000177697_2 (sequence is synthesized)
tcatggcagtgggcatctggacgctggccctcaagagtgactacatcagcctgctggcctcaggcacctacctggccacagcctacatcctggtggtggcgggcactgtcgtcatggtga

SEQ ID NO: 620340 - DNA, 120 bp, Artificial Sequence
  ENSG00000177697_3 (sequence is synthesized)
ctggggtcttgggctgctgcgccaccttcaaggagcgtcggaacctgctgcgcctgtacttcatcctgctcctcatcatctttctgctggagatcatcgctggtatcctcgcctacgcct

SEQ ID NO: 620341 - DNA, 120 bp, Artificial Sequence
  ENSG00000177697_4 (sequence is synthesized)
actaccagcagctgaacacggagctcaaggagaacctgaaggacaccatgaccaagcgctaccaccagccgggccatgaggctgtgaccagcgctgtggaccagctgcagcaggagttcc

SEQ ID NO: 620342 - DNA, 120 bp, Artificial Sequence
  ENSG00000177697_5 (sequence is synthesized)
actgctgtggcagcaacaactcacaggactggcgagacagtgagtggatccgctcacaggaggccggtggccgtgtggtcccagacagctgctgcaagacggtggtggctctttgtgggc

SEQ ID NO: 620343 - DNA, 120 bp, Artificial Sequence
  ENSG00000177697_6 (sequence is synthesized)
gcattgcctgtgtgcaggtctttggcatgatcttcacgtgctgcctgtacaggagtctcaagctggagcactactgaccctgccttgggccttgctgctgctgcacccaactactgagct

SEQ ID NO: 620344 - DNA, 120 bp, Artificial Sequence
  ENSG00000177697_7 (sequence is synthesized)
gagaccactgagtaccaggggctgggctccctgatgacacccaccctgtgccatcaccataacctctggggaccccaacctcagaggcagcttcaagtgccttttgctgcgcaccaatgc

SEQ ID NO: 620345 - DNA, 120 bp, Artificial Sequence
  ENSG00000177697_8 (sequence is synthesized)
ccagcaggggaggtgaggggggctggcggggcgaagtttggggggtgttttgtggggctccccagacacactctctgcctggtggtcagatgcaggttggaaggggccttgctgagtggc

SEQ ID NO: 620346 - DNA, 120 bp, Artificial Sequence
  ENSG00000177697_9 (sequence is synthesized)
gcaaggccgagcgttcccagcagggggagaaacccttcacaccccaggcccttcaggaactggggccttgccttgcagccacatggccccatcccagttggggaagccaggtgagctctg

SEQ ID NO: 620347 - DNA, 120 bp, Artificial Sequence
  ENSG00000177697_10 (sequence is synthesized)
acccttgggcctgggcctctgcccctcccaacccagccctcgtctccctcgacagcgcccctgctgtcttccccaccgcagtcaccaccacccgaaatgccacgtggtcactgtgcactg

SEQ ID NO: 620348 - DNA, 120 bp, Artificial Sequence
  ENSG00000177697_11 (sequence is synthesized)
ccctgttcatgtgcctctgcggggcagggccttcctggttttgttcactgctgtacccagatgcctacaaccatccctgccacatacaggtgctcaataaacacttgtagagcagatgga

SEQ ID NO: 620349 - DNA, 120 bp, Artificial Sequence
  ENSG00000177697_12 (sequence is synthesized)
attctcagcgctgggagccgccgcccccgcagctgctgccgccgccgccagggcccggactcggacgcgtggtagcctagagtcctggggagcttctgtccacctgtcctgcagaggagt

SEQ ID NO: 620350 - DNA, 120 bp, Artificial Sequence
  ENSG00000177697_13 (sequence is synthesized)
acagttcactgcagtggcaacctcccaggttccagtgatcctcctgcctcagccccgagtggccgggactacaggtgtgaacactgtgcccagctaatttattaaattttgttgtagaga

SEQ ID NO: 620351 - DNA, 120 bp, Artificial Sequence
  ENSG00000177697_14 (sequence is synthesized)
tgggctgctgcgccaccttcaaggagcgtcggaacctgctgcgcctggtcaggagggcgcagggccacggggtgggggtggtgcagatgggcccaaggaggttgtcgctgcaggctttga

SEQ ID NO: 620352 - DNA, 120 bp, Artificial Sequence
  ENSG00000177697_15 (sequence is synthesized)
acctgtgccttgctgtgctcacctggggggggggtcacggtccttccacacctgcctagtcctgtgggtccccacgttcctgctggaccagctgagggaagacaccagctccgcaagaaa

SEQ ID NO: 620353 - DNA, 120 bp, Artificial Sequence
  ENSG00000177697_16 (sequence is synthesized)
gcttcagggagggtggccgcccctcagcccccacctggagcctggggagccggggtggggactctgctctgaggtgcactaggtctaggcactaggcctcagaacaagggtgcccttgtg

SEQ ID NO: 620354 - DNA, 120 bp, Artificial Sequence
  ENSG00000177697_17 (sequence is synthesized)
ccggctggtgagtgctggccagggtggggcagagcaggcggggcggcgaaagtccagacctggctgtgctgtctggaaacgtggcccagggcgctcagctgctgtctgcaccccacgccc

SEQ ID NO: 620355 - DNA, 120 bp, Artificial Sequence
  ENSG00000177697_18 (sequence is synthesized)
gctgccgccgccgccagggcccggactcggacgcgtggtagaatgaacccggcccactctggcccttgggccagacctgtaacctgtgacctgacatgtccttgcccctctagcctagag

SEQ ID NO: 620356 - DNA, 120 bp, Artificial Sequence
  ENSG00000177697_19 (sequence is synthesized)
caccaggggtctgtcctggctgtcagggctcctgagtcgctaggaagtgacacgtcctgttcccacaggggctcattcacaggcctcccaggacagtggctggctctgccccgacttctg

SEQ ID NO: 620357 - DNA, 120 bp, Artificial Sequence
  ENSG00000177697_20 (sequence is synthesized)
cggggcgtccccctcgtaggctccgggccgcgcattctcagcgctgggagccgccgcccccgcagctgctgccgccgccgccagggcccggactcggacgcgtggtaggctgtagctgcc

SEQ ID NO: 620358 - DNA, 120 bp, Artificial Sequence
  ENSG00000177697_21 (sequence is synthesized)
cggactcggacgcgtggtaggctgtagctgccgctgtttgtgggggaagggccagtgatgggtctggagcgaaggccaagagtggggcacctgggggaagcctagagtcctggggagctt

SEQ ID NO: 620359 - DNA, 120 bp, Artificial Sequence
  ENSG00000177697_22 (sequence is synthesized)
agatcatcgctggtatcctcgcctacgcctactaccagcaggtgaggggcctgggcaggccattcagagacacagacatgcacaggcggggcggacacacacacatgcacacgcgtggct

SEQ ID NO: 620360 - DNA, 120 bp, Artificial Sequence
  ENSG00000177697_23 (sequence is synthesized)
agccccaacccccacccccatggtcccagagctaaccaatgtgccactgggccctggagatggggtctaggtctctgcaggggcacatggggtcaggcaggtgtccaggggatccagaag

SEQ ID NO: 620361 - DNA, 120 bp, Artificial Sequence
  ENSG00000177697_24 (sequence is synthesized)
ctctctctgcctctgccgcacttcattgtcaccctggtgacggtcctggcaccacccaacctcccctcatgccgaggtgtgacctcagcccttccctgtggctctgagctgggccccggg

SEQ ID NO: 620362 - DNA, 120 bp, Artificial Sequence
  ENSG00000177697_25 (sequence is synthesized)
ccgccgcccccgcagctgctgccgccgccgccagggcccggactcggacgcgtgcctagagtcctggggagcttctgtccacctgtcctgcagaggagtcgtttccagcccggctggccc

SEQ ID NO: 620363 - DNA, 120 bp, Artificial Sequence
  ENSG00000177697_26 (sequence is synthesized)
ataggctcctgccagcctgtgacgtgcggccccgggaatgccgtggggagcgggcaggctggcatgagctcaccggaggtacccgctagggcttcctcccccggccgctagcagggcccc

SEQ ID NO: 620364 - DNA, 120 bp, Artificial Sequence
  ENSG00000177697_27 (sequence is synthesized)
attctccccaccccggccaggatgaaggaagggctgccctttaacagaccgtaaacaggcctggagagcttaggaaggggctgagctggggcctgtctgagcccctacccctctgctgtc

SEQ ID NO: 620365 - DNA, 87 bp, Artificial Sequence
  ENSG00000177697_28 (sequence is synthesized)
cttacaccgcacctggactcctttcctctactttctttgggttaatttgctagtctctttttattatttatttatttattttgagat

SEQ ID NO: 620366 - DNA, 73 bp, Artificial Sequence
  ENSG00000177697_29 (sequence is synthesized)
gtcccctcctatccgtctcccagtcaggggcccggtgctgtggccccgctgacccctcccctgcctcctcagc

SEQ ID NO: 620367 - DNA, 120 bp, Artificial Sequence
  ENSG00000177700_0 (sequence is synthesized)
agtctgggacgcgccgccgccatgatcatccctgtacgctgcttcacttgtggcaagatcgtcggcaacaagtgggaggcttacctggggctgctgcaggccgagtacaccgagggggat

SEQ ID NO: 620368 - DNA, 120 bp, Artificial Sequence
  ENSG00000177700_1 (sequence is synthesized)
gcgctggatgccctgggcctgaagcgctactgctgccgccggatgctgctggcccacgtggacctgatcgagaagctgctcaattatgcacccctggagaagtgaccacgctggaaccca

SEQ ID NO: 620369 - DNA, 120 bp, Artificial Sequence
  ENSG00000177700_2 (sequence is synthesized)
cccacccgctgtgctgaccatgggccctgagcgtcctgccccgaattcacgaggctgaggcatccgggagctggcgtaatgcctggccgcagtgtgtgtgtatccgataccccactctgg

SEQ ID NO: 620370 - DNA, 120 bp, Artificial Sequence
  ENSG00000177700_3 (sequence is synthesized)
aggtcccagccctcactaggatgtcaggagccaggtctaggcccagctttcacactgtggcagcccagtgaagcagactgggccatgaactctcctagccctggggccagcctgttccac

SEQ ID NO: 620371 - DNA, 120 bp, Artificial Sequence
  ENSG00000177700_4 (sequence is synthesized)
aggcacccctgcaggaggcgctgccaggagagccttccatctcggggctctttgaggttccctccttctgggtgttcttcaggctgagcagagaggctcctgtaccctctctctcggaat

SEQ ID NO: 620372 - DNA, 81 bp, Artificial Sequence
  ENSG00000177700_5 (sequence is synthesized)
aggctgagcagagaggctcctgtaccctctctctcggaatctgaagagccagatttaggccgggcaaaggggctcacccct

SEQ ID NO: 620373 - DNA, 120 bp, Artificial Sequence
  ENSG00000177700_6 (sequence is synthesized)
gagaccccatctctacaacaaaatttaataaattagctgggcacagtgttcacacctgtagtcccggccactcggggctgaggcaggaggatcactggaacctgggaggttgccactgca

SEQ ID NO: 620374 - DNA, 120 bp, Artificial Sequence
  ENSG00000177700_7 (sequence is synthesized)
catggtctcgctgcccacaaagagccaccaccgtcttgcagcagctgtctgggaccacacggccaccggcctcctgtgagcggatccactcactgtctcgccagtcctgtgagttgttgc

SEQ ID NO: 620375 - DNA, 120 bp, Artificial Sequence
  ENSG00000177700_8 (sequence is synthesized)
tgccacagcagtggaactgcatcaagaacaaggctggggttgagacctggggccagaggctcctgcagaggtccagggaggccctggggatgcacgcgccctcccagcaccacccaccca

SEQ ID NO: 620376 - DNA, 80 bp, Artificial Sequence
  ENSG00000177706_0 (sequence is synthesized)
ctccccgcgcccaccccttccgcccttcgccccccccttccccccagccccggtctcccgggcgcggcgtgagagcagag

SEQ ID NO: 620377 - DNA, 80 bp, Artificial Sequence
  ENSG00000177706_1 (sequence is synthesized)
cggcgtgagagcagagcccggcccggaggagccgccccttccccgcccgcccgcccggcgcctggagaggagcgcgctga

SEQ ID NO: 620378 - DNA, 80 bp, Artificial Sequence
  ENSG00000177706_2 (sequence is synthesized)
cgggatggacccacacgcccgatgagccccgcgccggcggctgcgagcgccgagcctccccctgctgcggccccagccgc

SEQ ID NO: 620379 - DNA, 80 bp, Artificial Sequence
  ENSG00000177706_3 (sequence is synthesized)
tccgcggaccaggacccctgggctccccggctgagggcgcggccgctccggagaggccgagcggggacgggcccgagatg

SEQ ID NO: 620380 - DNA, 120 bp, Artificial Sequence
  ENSG00000177706_4 (sequence is synthesized)
ccgggcccggggacagccccggagctggtagccgcccggcaccgatggaccttgacccgcgaggcggcgccgcgctcgtgcccagctgcagctagaggggcgcgcgggcagaacgcgctc

SEQ ID NO: 620381 - DNA, 120 bp, Artificial Sequence
  ENSG00000177706_5 (sequence is synthesized)
gctccaggcccgggccggcccgcgcggccatgaagatgatgctggtgcgccggttccgcgtgctcatcctgatggtgttcctggtggcctgcgcgctgcacatcgccctggacctgctgc

SEQ ID NO: 620382 - DNA, 80 bp, Artificial Sequence
  ENSG00000177706_6 (sequence is synthesized)
gccctggacctgctgcccaggctggagcgacgcggcgcgcggccctcgggggagcccggctgttcgtgcgcgcagcccgc

SEQ ID NO: 620383 - DNA, 120 bp, Artificial Sequence
  ENSG00000177706_7 (sequence is synthesized)
cggccgcctcctccgccgccggcgacgcgggctggcccaacaagcacacgctccgcatcctgcaggacttcagctccgacccctcctccaacctctcgtcccactcgctggagaaactgc

SEQ ID NO: 620384 - DNA, 120 bp, Artificial Sequence
  ENSG00000177706_8 (sequence is synthesized)
cgtcccactcgctggagaaactgccgcccgcggccgagccggccgagcgcgccttgcgggggcgggatcccggcgccctaagaccccacgaccccgcgcaccggccgctgctgcgagacc

SEQ ID NO: 620385 - DNA, 120 bp, Artificial Sequence
  ENSG00000177706_9 (sequence is synthesized)
cccccggccccggcggagacgcctccctcctggccaggctgttcgagcacccgctttaccgggtggcggttccgccgctcacggaggaggacgtcctgttcaatgtgaacagcgacacca

SEQ ID NO: 620386 - DNA, 120 bp, Artificial Sequence
  ENSG00000177706_10 (sequence is synthesized)
ggctcagccccaaagcggcggagaacccggactggccgcatgcgggtgctgaaggtgcagaattcctctcccccggggaggcggccgtggactcctatcccaactggctcaagttccaca

SEQ ID NO: 620387 - DNA, 120 bp, Artificial Sequence
  ENSG00000177706_11 (sequence is synthesized)
ttggtatcaaccggtacgagctgtactccagacacaacccggccatcgaggccctgctgcacgacctcagctcccagaggatcaccagcgtggccatgaagtcggggggcacgcagctga

SEQ ID NO: 620388 - DNA, 120 bp, Artificial Sequence
  ENSG00000177706_12 (sequence is synthesized)
agctcatcatgaccttccagaattacgggcaagcgctgttcaaacccatgaaacaaacgagggagcaggagacaccccctgactttttttatttctctgactacgagaggcacaatgcgg

SEQ ID NO: 620389 - DNA, 120 bp, Artificial Sequence
  ENSG00000177706_13 (sequence is synthesized)
gccggcaggatggtcaacatgaccaaggagatccgggacgtcacacgggacaagaagctctggaggaccttcttcatctctccagccaacaacatctgcttctacggcgagtgttcctac

SEQ ID NO: 620390 - DNA, 120 bp, Artificial Sequence
  ENSG00000177706_14 (sequence is synthesized)
tactgctccacggagcacgccctgtgcgggaagccagaccagatcgagggctcgctggcggccttcctgcccgacctgtccctggccaagaggaagacctggcggaacccttggcggcgt

SEQ ID NO: 620391 - DNA, 120 bp, Artificial Sequence
  ENSG00000177706_15 (sequence is synthesized)
tcctaccacaagcgcaagaaggccgagtgggaggtggaccctgactactgcgaggaggtgaagcagacaccgccctacgacagcagccaccgcatcctggacgtcatggacatgacgatc

SEQ ID NO: 620392 - DNA, 120 bp, Artificial Sequence
  ENSG00000177706_16 (sequence is synthesized)
ttcgacttcctcatgggaaacatggaccgtcaccactacgagacttttgagaagtttgggaatgaaacgttcatcatccacttagacaatggaagagggtttgggaagtattcgcacgac

SEQ ID NO: 620393 - DNA, 120 bp, Artificial Sequence
  ENSG00000177706_17 (sequence is synthesized)
gagctctccatcctggtgccgctacagcagtgctgcaggatccggaagtccacctacctgcgtctgcagctcctggccaaggaggagtacaagctgagcctgctgatggccgagtctctg

SEQ ID NO: 620394 - DNA, 120 bp, Artificial Sequence
  ENSG00000177706_18 (sequence is synthesized)
cggggggaccaggtggcacccgtgctgtaccagccgcacctggaggccctggaccggcggctccgcgtcgtgctaaaggccgtccgggactgcgtggagaggaacgggctccacagcgtg

SEQ ID NO: 620395 - DNA, 120 bp, Artificial Sequence
  ENSG00000177706_19 (sequence is synthesized)
gtggatgacgacctggacactgagcacagagccgcctcggcgaggtagtgtccgccggccgctgcgctgcccgggacggagacagaggcgccggacctcccagcaagcgcatgcgcccgt

SEQ ID NO: 620396 - DNA, 120 bp, Artificial Sequence
  ENSG00000177706_20 (sequence is synthesized)
cgtgaattcagtgaattcagaggcaggacgggatcatccggagtcgggagctgctgccacaggaggcgaggctccccaggtctcataggacacattttgtcagtgtttgaccagaaaagc

SEQ ID NO: 620397 - DNA, 120 bp, Artificial Sequence
  ENSG00000177706_21 (sequence is synthesized)
ttgggaaggaagcgctgtctgtgctcacggacagaggcggccggcgccggaggcattccatcctttctgtagggaaaggagcctttatttactattttgtatttatatttgatgaataag

SEQ ID NO: 620398 - DNA, 120 bp, Artificial Sequence
  ENSG00000177706_22 (sequence is synthesized)
tatataaacagagacgtgtacacagatgccaatcacctaccaaaccaaacacgaggaccgccctccctggttctgggggcccctcaaggccaagctcacccctcaagtgctctcacactc

SEQ ID NO: 620399 - DNA, 120 bp, Artificial Sequence
  ENSG00000177706_23 (sequence is synthesized)
gggacctaattcaagtaaaaaccctttctccttcctggggcctcggctcctggagggctggagggtctcgtctgaggacgggaggaggctctcgctggacgtctggcctgtgcgctggtg

SEQ ID NO: 620400 - DNA, 120 bp, Artificial Sequence
  ENSG00000177706_24 (sequence is synthesized)
gacggatgcctacgtggttttggaggacccgatgaccaggcgtcctgcgagtccgcccgctggcctgcagcacccacctcggacttggctgtggacggttggtgcaagtgcatcctgcag

SEQ ID NO: 620401 - DNA, 120 bp, Artificial Sequence
  ENSG00000177706_25 (sequence is synthesized)
ggctggctgtgcgcagctgtgggctgacctttgcagagttttgtggaatagtttgcaatgtcataaaagtgcaataaaggtacagcagatgtgtgtcggcctcacggggcgggtccctca

SEQ ID NO: 620402 - DNA, 120 bp, Artificial Sequence
  ENSG00000177706_26 (sequence is synthesized)
ggctcaagttccacattggtatcaaccggtacgagctgtactccagacacaacccggccatcgaggccctgctgcacgacctcagctcccagaggatcaccagcgtggcagattttactg

SEQ ID NO: 620403 - DNA, 120 bp, Artificial Sequence
  ENSG00000177706_27 (sequence is synthesized)
gcacctcctgcatgtcagaccccctttctgggtggtggggagttgaggatgagttcagcctcaacgagatctgctgcctctgtggacctgacagccccaggaagagacacacacgcacag

SEQ ID NO: 620404 - DNA, 120 bp, Artificial Sequence
  ENSG00000177706_28 (sequence is synthesized)
cactgggaggggctgaggaccttccacagggtctgtcgggcagcttaccttccaggtgggtccgtcttggcagggagaggaatgagagagccgtgcacaccagccagggcgttcgggagg

SEQ ID NO: 620405 - DNA, 120 bp, Artificial Sequence
  ENSG00000177706_29 (sequence is synthesized)
agcagcacgcaagttagaaagtccccagtgccgctgtccgtatgagcttctctccagctcattttccccatctgtccagtgggatctcgctgcgtgggaccaatgcaaggataggatgag

SEQ ID NO: 620406 - DNA, 120 bp, Artificial Sequence
  ENSG00000177706_30 (sequence is synthesized)
gcagagggcgtccttactccagtatttccatgtgcttccctgacccgggccggcctgcccaccaggtccctcgaatcggggcctctcagcgtttgagctctgctctcgccccgtccctct

SEQ ID NO: 620407 - DNA, 120 bp, Artificial Sequence
  ENSG00000177706_31 (sequence is synthesized)
cctcactcctgcgggagaaacggcccctgttctttccgccccacgttgtcctcgtgagtgtgtagtccaggtcctgtttccccacagagactctgcaaaaaacacggggcccagaggtga

SEQ ID NO: 620408 - DNA, 120 bp, Artificial Sequence
  ENSG00000177706_32 (sequence is synthesized)
aggcagctccaggtggggtcaccccgaggcagggcagagcggctccgtcccctcccacacccgtgctcccgctaatgcagcctcagcgccgcagcccgggcgggtccatctgcagacgcc

SEQ ID NO: 620409 - DNA, 120 bp, Artificial Sequence
  ENSG00000177706_33 (sequence is synthesized)
aaggtccctgccgcagtgtttctcttctgctcctcatggcacgcgccgggctccccagaatctggcctgggccccccgtctcacgctggctccccgcaggtgggaggtggaccctgacta

SEQ ID NO: 620410 - DNA, 120 bp, Artificial Sequence
  ENSG00000177706_34 (sequence is synthesized)
tgtcctcgcccctgcacacccagggaagggccggccacctcccagctacctgcagcccacctgagaccctggggacggggggagcagaccctccagtggagggatgggaatgtcgcaaag

SEQ ID NO: 620411 - DNA, 120 bp, Artificial Sequence
  ENSG00000177706_35 (sequence is synthesized)
gcccatctcagagccagatgcagagggcggccccaggccccaaccaggagggagggccgccccgggagtgggacctccgaggcacaggaatgctgcagaccaagtcccggcagagctggt

SEQ ID NO: 620412 - DNA, 120 bp, Artificial Sequence
  ENSG00000177706_36 (sequence is synthesized)
gttacctgggaaacggaggccaggagaggctgctggtaggaagagcaggaccgtgcagaatagatgggcctctgcctgcacgcggtacctggagccagccagcgggggataggcggcctc

SEQ ID NO: 620413 - DNA, 120 bp, Artificial Sequence
  ENSG00000177706_37 (sequence is synthesized)
cgtccacggcagagccaaggggtcctggaggccgtgggggagactcggaaaccagagggtgggcggtgccagggtgcacacagcaaaccggggctgagccaggcctgggacaccgagccc

SEQ ID NO: 620414 - DNA, 120 bp, Artificial Sequence
  ENSG00000177706_38 (sequence is synthesized)
agcctctcccctgcggtgtgactgtgggtcccagggtggacgtgccggggcccccagccagtgcaggagaggcctttgagcagcttacctgagaagggcccatggggagctgggacctcc

SEQ ID NO: 620415 - DNA, 120 bp, Artificial Sequence
  ENSG00000177706_39 (sequence is synthesized)
ggcctccgtcgcaagggcctgcgctgctctgagggcccgtcggcagctgggtcagggccacggggagctgggacccccggcctccgtcgcacgtgcctgcgctgctctgagggcccgtcg

SEQ ID NO: 620416 - DNA, 120 bp, Artificial Sequence
  ENSG00000177706_40 (sequence is synthesized)
gcagctgggtgcccagggtcccgaaggctcagggtggccctgaggaggctggagctccaccgcatttttcatatgaggaacccagcacgtcccgcctgcctccggcccctggaggctttc

SEQ ID NO: 620417 - DNA, 120 bp, Artificial Sequence
  ENSG00000177707_0 (sequence is synthesized)
agcctcggcagtggcgtcggcgacggcggtgtcgaggcagccgccagcgttcggccaagtgtcagccggcagcgacggcgctagagctgggagctggggacgcgcgcgccggaccttcca

SEQ ID NO: 620418 - DNA, 120 bp, Artificial Sequence
  ENSG00000177707_1 (sequence is synthesized)
cgggggagccggggggcgggcgggcgagcgggccggggggagggtgggggatggcgcggaccctgcggccgtccccgctgtgtcctggaggcggcaaagcacaactttcctccgcttctc

SEQ ID NO: 620419 - DNA, 120 bp, Artificial Sequence
  ENSG00000177707_2 (sequence is synthesized)
aggcggcaaagcacaactttcctccgcttctctcctcggagccgggctcctgctgcagcccccgacgccacctccgctgctgctgctgctcttcccgctgctgctcttctccaggctctg

SEQ ID NO: 620420 - DNA, 120 bp, Artificial Sequence
  ENSG00000177707_3 (sequence is synthesized)
tggtgccttagctggaccaattattgtggagccacatgtcacagcagtatggggaaagaatgtttcattaaagtgtttaattgaagtaaatgaaaccataacacagatttcatgggagaa

SEQ ID NO: 620421 - DNA, 120 bp, Artificial Sequence
  ENSG00000177707_4 (sequence is synthesized)
gatacatggcaaaagttcacagactgttgcagttcaccatccccaatatggattctctgttcaaggagaatatcagggaagagtcttgtttaaaaattactcacttaatgatgcaacaat

SEQ ID NO: 620422 - DNA, 120 bp, Artificial Sequence
  ENSG00000177707_5 (sequence is synthesized)
tactctgcataacataggattctctgattctggaaaatacatctgcaaagctgttacattcccgcttggaaatgcccagtcctctacaactgtaactgtgttagttgaacccactgtgag

SEQ ID NO: 620423 - DNA, 120 bp, Artificial Sequence
  ENSG00000177707_6 (sequence is synthesized)
cctgataaaagggccagattctttaattgatggaggaaatgaaacagtagcagccatttgcatcgcagccactggaaaacccgttgcacatattgactgggaaggtgatcttggtgaaat

SEQ ID NO: 620424 - DNA, 120 bp, Artificial Sequence
  ENSG00000177707_7 (sequence is synthesized)
ggaatccactacaacttcttttccaaatgaaacggcaacgattatcagccagtacaagctatttccaaccagatttgctagaggaaggcgaattacttgtgttgtaaaacatccagcctt

SEQ ID NO: 620425 - DNA, 120 bp, Artificial Sequence
  ENSG00000177707_8 (sequence is synthesized)
ggaaaaggacatccgatactctttcatattagacatacagtatgctcctgaagtttcggtaacaggatatgatggaaattggtttgtaggaagaaaaggtgttaatctcaaatgtaatgc

SEQ ID NO: 620426 - DNA, 120 bp, Artificial Sequence
  ENSG00000177707_9 (sequence is synthesized)
tgatgcaaatccaccacccttcaaatctgtgtggagcaggttggatggacaatggcctgatggtttattggcttcagacaatactcttcattttgtccatccattgactttcaattattc

SEQ ID NO: 620427 - DNA, 120 bp, Artificial Sequence
  ENSG00000177707_10 (sequence is synthesized)
tggtgtttatatctgtaaagtgaccaattcccttggtcaaagaagtgaccaaaaagtcatctacatttcagatcctcctactactaccacccttcagcctacaattcagtggcatccctc

SEQ ID NO: 620428 - DNA, 120 bp, Artificial Sequence
  ENSG00000177707_11 (sequence is synthesized)
aactgctgacatcgaggatctagcaacagaacctaaaaaattgcccttcccattgtcaactttggcaacaattaaggatgacacaattgccacgatcattgctagtgtagtgggtggggc

SEQ ID NO: 620429 - DNA, 120 bp, Artificial Sequence
  ENSG00000177707_12 (sequence is synthesized)
tctcttcatagtacttgtaagtgttttggctggaatattctgctataggagaagacggacgtttcgtggagactactttgccaagaactacattccaccatcagatatgcaaaaagaatc

SEQ ID NO: 620430 - DNA, 120 bp, Artificial Sequence
  ENSG00000177707_13 (sequence is synthesized)
acaaatagatgttcttcaacaagatgagcttgattcttacccagacagtgtaaaaaaagaaaacaaaaatccagtgaacaatctaatacgtaaagactatttagaagagcctgaaaaaac

SEQ ID NO: 620431 - DNA, 120 bp, Artificial Sequence
  ENSG00000177707_14 (sequence is synthesized)
tcagtggaacaatgtagaaaatctcaataggtttgaaagaccaatggattattatgaagatctaaaaatgggaatgaagtttgtcagtgatgaacattatgatgaaaacgaagatgactt

SEQ ID NO: 620432 - DNA, 120 bp, Artificial Sequence
  ENSG00000177707_15 (sequence is synthesized)
agtttcacatgtagatggttccgtaatttccaggagggagtggtatgtttagcaaccactgaatgtgacttaactatgtacaatgttcattcacactagttgatcattttcagattgttc

SEQ ID NO: 620433 - DNA, 120 bp, Artificial Sequence
  ENSG00000177707_16 (sequence is synthesized)
atactttttcttgaggaagaataagctttttcaagttgattttcaagcttactttttatattctaatctgacaaatgaaaatgtaaaatctgagttcagtgtatctaagctgctttacaa

SEQ ID NO: 620434 - DNA, 120 bp, Artificial Sequence
  ENSG00000177707_17 (sequence is synthesized)
ttttttttcaatgctgtactactgtctcaagatttaaattttaatgcagagtactttattggtgtgaggcacacaggtaagaagaaatgtcaacattaaatgtatgacttacttggtaca

SEQ ID NO: 620435 - DNA, 120 bp, Artificial Sequence
  ENSG00000177707_18 (sequence is synthesized)
aaaattttttaaaaagggaactaccttgacattgtgtattaaatgtttacctaagactataatctcaagtatgatgtttgtttaacatatacctctcaaaatttatcaccactcaatgac

SEQ ID NO: 620436 - DNA, 120 bp, Artificial Sequence
  ENSG00000177707_19 (sequence is synthesized)
actgcatcaaaattgactataaaactaattcaagaaatatttatatatattttttaatatacaaaaaatatttagcctgatggaatggctttccttttcaaacattattttctaagtttc

SEQ ID NO: 620437 - DNA, 120 bp, Artificial Sequence
  ENSG00000177707_20 (sequence is synthesized)
tatacaaatgaaatctttacctctgcatattaatgagccttgccataattactgtagagtggcttttcaaagatattttgttgcactaaaactgtggtagtaaactcagtgaacatgatg

SEQ ID NO: 620438 - DNA, 120 bp, Artificial Sequence
  ENSG00000177707_21 (sequence is synthesized)
caaaatacctgcaagagtaataaaatacatacctttcaaacatgataattattagtttttttttttcctttctggaacatggattttggtacattagcagtagccttattttaatgcttt

SEQ ID NO: 620439 - DNA, 120 bp, Artificial Sequence
  ENSG00000177707_22 (sequence is synthesized)
atgtcctaaacatactaatagaaatgaaaagacgcagagagagcatttcggaatactgaagtactagttttagaaatgagactttcagccaacaatctatagaaagaattttatggacca

SEQ ID NO: 620440 - DNA, 120 bp, Artificial Sequence
  ENSG00000177707_23 (sequence is synthesized)
tcttgttttagttatttaatgttgatgttgttcaaatgggtaaatgtacagaaagaaaattttagagtaaacttggaactttggatataactagaaaaaactagattatagaattagtcg

SEQ ID NO: 620441 - DNA, 120 bp, Artificial Sequence
  ENSG00000177707_24 (sequence is synthesized)
gtaacacttgctaatggacattggcattcatctcctttttcctcctaagtgtatgtatgtgttttaagatttctgtttttacgattaaaactggaaacatgaggttttttgtttttgttt

SEQ ID NO: 620442 - DNA, 120 bp, Artificial Sequence
  ENSG00000177707_25 (sequence is synthesized)
ttttacataattacatatattccttctgaatcatttatcttttgagaaagaaatgttacctaaacttcaaatgtgctttttgtttgtgaggtaattaaattgcttctacagtggaggctt

SEQ ID NO: 620443 - DNA, 120 bp, Artificial Sequence
  ENSG00000177707_26 (sequence is synthesized)
acaaaattattgtgacaactattttgaagctgaaaggatagtttttctattgctaagtcatttgaaaaagtgaccattttgccagtgaaatgaagtggaagttagtaggagaatcataaa

SEQ ID NO: 620444 - DNA, 120 bp, Artificial Sequence
  ENSG00000177707_27 (sequence is synthesized)
ttaaatatattattttgttaataaaaaggcaaagtagtaggtactttttaaaccctcccaaccagccctttctcaatattcatcaaatctaaaacatttagggggcaaaattctaacatg

SEQ ID NO: 620445 - DNA, 120 bp, Artificial Sequence
  ENSG00000177707_28 (sequence is synthesized)
ttcatggtatcttgcaaatagtgaaagctttattctgaaggattataaactagttttcttcattttaactagcactattttgtggaaattagaaacctcttttatttctcttcccaaaag

SEQ ID NO: 620446 - DNA, 120 bp, Artificial Sequence
  ENSG00000177707_29 (sequence is synthesized)
taatacttattataaggctgtagtatcaggttaaggatacagataaataaagttcacttatatcttcttacaaatgtctgggttttaatatggttaatcacttatatacaaatattacaa

SEQ ID NO: 620447 - DNA, 120 bp, Artificial Sequence
  ENSG00000177707_30 (sequence is synthesized)
ctttttagtgcaagtttttggaagaaaactttttgataaaacactgtgattgatgtgactttatttttaatttaaacgatgaggtggccagaagaaagatgggtctaaaatttctcccca

SEQ ID NO: 620448 - DNA, 120 bp, Artificial Sequence
  ENSG00000177707_31 (sequence is synthesized)
tgaaagatgtaaaactatggctttttttaaaatcaaaatttcatcttttaaaataatggtttgaaatactgtatggatctgaacagaataatcacatttaggattctatataaatctcaa

SEQ ID NO: 620449 - DNA, 120 bp, Artificial Sequence
  ENSG00000177707_32 (sequence is synthesized)
ctggagtataatctgaaggaaattagcagtgtattttaagaaatatatttcaaaaatataaatactgattatgaacttccttttacattgtggttatttgtgcgattaggtttttttgtt

SEQ ID NO: 620450 - DNA, 120 bp, Artificial Sequence
  ENSG00000177707_33 (sequence is synthesized)
tgtttcttttgtgtttgtttggcgggagagggtgacctggaaagccacaagtgagtatttgacatattctgtatccttaatccaatcatttggcaaactaaaaggtttctgtgttgtaag

SEQ ID NO: 620451 - DNA, 120 bp, Artificial Sequence
  ENSG00000177707_34 (sequence is synthesized)
aatctgatactagtgcttaagactttgggaagcattgcactgttgtttattagaactttatgtatatttactgtacatagagacttgtttgaaaacatgaatagtcattaaataaagaca

SEQ ID NO: 620452 - DNA, 120 bp, Artificial Sequence
  ENSG00000177707_35 (sequence is synthesized)
ttgttaaattagtttttgaataccagtgatattcataactacttgacaggtatatatgaaaattctactatcgtgaaaaaaaatgaatatttgtactatttttggccatatttatattta

SEQ ID NO: 620453 - DNA, 120 bp, Artificial Sequence
  ENSG00000177707_36 (sequence is synthesized)
tttctttcatatggtttgaactgttttagcattttgtaaattcacttgagagttttctttcatactggttaaaatatttcaatgatataatgaagatgaatgcaactcttatttttctgc

SEQ ID NO: 620454 - DNA, 120 bp, Artificial Sequence
  ENSG00000177707_37 (sequence is synthesized)
cattttttattaaaatacattgaaactaaagtaggctcggggttaactttaaaagtgatatttgagaagtgctttagagttgaaagatttagtattttaccacgtgcctagtagggttct

SEQ ID NO: 620455 - DNA, 120 bp, Artificial Sequence
  ENSG00000177707_38 (sequence is synthesized)
atttgctaactctaatattgaggaaactattaaggttttcagtagtaagtgttgcttctaatagccatatacaggaaagttttataagataacccacggctaaatattttgcattaagga

SEQ ID NO: 620456 - DNA, 120 bp, Artificial Sequence
  ENSG00000177707_39 (sequence is synthesized)
gctgtaggagtacagtgtataagtacagaaattgagagaaatgtagtcattttatatgtgaaaacatctgatttgagtttttgataaatactgctaaaacacagtatatgaacaagtaag

SEQ ID NO: 620457 - DNA, 120 bp, Artificial Sequence
  ENSG00000177707_40 (sequence is synthesized)
aagtttatgtatgaaagtaatcaatgtaaaatataagaaaggaataaatggtacccattttgaatttttaattctaataggagagtagattgtagattgaattgtctttcctgtttactt

SEQ ID NO: 620458 - DNA, 120 bp, Artificial Sequence
  ENSG00000177707_41 (sequence is synthesized)
gttaattagaaaatgcatccttcataaacagctcctttctcaaattttttgtatattgtgtttgtgtttgggttttagtttgtacccgcgctaagttttggttttgttgtgtttggtgtt

SEQ ID NO: 620459 - DNA, 82 bp, Artificial Sequence
  ENSG00000177707_42 (sequence is synthesized)
aaccaacctgtgtattaggtgttagccccaatagccatgcatgaaatctttaaataaaagttaaaaaagttctttagaggca

SEQ ID NO: 620460 - DNA, 120 bp, Artificial Sequence
  ENSG00000177707_43 (sequence is synthesized)
agagaatattatcatgggtatggtaatgatgaataacaagatagactgacctttgtaaggtcccatttggctctgagattctatgcctctttccattttcagcaaggcttcatcttaaga

SEQ ID NO: 620461 - DNA, 120 bp, Artificial Sequence
  ENSG00000177707_44 (sequence is synthesized)
tgaatgtttaaaagagcacagaaaagaagatctgatatgatatggaacttttaaaagcactttgactacttgataggcacttggggacataacacacgcataagacagagtcctggcttc

SEQ ID NO: 620462 - DNA, 120 bp, Artificial Sequence
  ENSG00000177707_45 (sequence is synthesized)
attttgatttgcccggaaatgggacacctaacccattagtatggcatccaggagattgtttttcttgcaagactattgactgcccaccattcattctgctaaataagttgagtagggaag

SEQ ID NO: 620463 - DNA, 120 bp, Artificial Sequence
  ENSG00000177707_46 (sequence is synthesized)
acctgttgcatttacttttttttcctccataggtgccttagctggaccaattattgtggagccacatgtcacagcagtatggggaaagaatgtttcattaaagtgtttaattgaagtaaa

SEQ ID NO: 620464 - DNA, 120 bp, Artificial Sequence
  ENSG00000177707_47 (sequence is synthesized)
cctgaacacttgcctttgcagactcagttcaaagaaagagaagttggcaatcttcagcactctacttactataatcctgggacaaaaacacattaagaggaagatggatcaatagttctc

SEQ ID NO: 620465 - DNA, 120 bp, Artificial Sequence
  ENSG00000177707_48 (sequence is synthesized)
agagacttttatagcttataaatacttatcagaagaaattagttccacagaatgacagtgaagttgtgatcacatcccaccaaattgtaattttatatccccttccttcaccaaggttaa

SEQ ID NO: 620466 - DNA, 120 bp, Artificial Sequence
  ENSG00000177707_49 (sequence is synthesized)
attctctgggaaccctcgtaggttaaggtgccgggatgcacgtttgccgctttttttcccggtgaaacttgagctgtgagcccagaaaccctagggaccggagcccgatggaatgaagcc

SEQ ID NO: 620467 - DNA, 120 bp, Artificial Sequence
  ENSG00000177707_50 (sequence is synthesized)
tccgggtccacttctcatggccttccaccctggagaaggcaccattttagcccacccagccgcagaatcccctacagctagttttcttctgtcttgtgcccactcccccggctctgccct

SEQ ID NO: 620468 - DNA, 120 bp, Artificial Sequence
  ENSG00000177707_51 (sequence is synthesized)
gacagcttctggagctctctagattgaccctcgtccctgccctccagcttgtgggacgtctctcacactgcccgtgcttattttaccaaaccgcaggaacaagatttacgtgttaaatac

SEQ ID NO: 620469 - DNA, 120 bp, Artificial Sequence
  ENSG00000177707_52 (sequence is synthesized)
ataagtgcatcttgagaataggtgatagaaagccttggctgcaggagacaagcttacaggggacgacagaggcagacaggcacagggagggagggaagaggaaagggctggagggaaaaa

SEQ ID NO: 620470 - DNA, 120 bp, Artificial Sequence
  ENSG00000177707_53 (sequence is synthesized)
aggctctgtggtaggtgaacctcggcggccggcgtgggctgagggagccgccactgagggtgcgggcgccgcggccggctctgccagccgttctctggagcagcgaggcggttggttgtg

SEQ ID NO: 620471 - DNA, 120 bp, Artificial Sequence
  ENSG00000177707_54 (sequence is synthesized)
cgagcgagtgccgaggactttggctggaaacttttcgccgcgcccggggcgaggccctggaagggccaggccagcgaatgctgagccggcggcccgctgccctcccccgcggccgcgcgg

SEQ ID NO: 620472 - DNA, 120 bp, Artificial Sequence
  ENSG00000177707_55 (sequence is synthesized)
ccatagctgtagctggagcggtaattggagctgttcttgcccttttcatcattgctatctttgtgactgtgctgctgactcctcgaaaaaaaagaccatcctatcttgacaaagtgattg

SEQ ID NO: 620473 - DNA, 120 bp, Artificial Sequence
  ENSG00000177707_56 (sequence is synthesized)
accttccacccacacataaaccacctcctctgtatgaagaacgatccccacctttgcctcagaaagacctatttcagcctgaacacttgcctttgcagactcagttcaaagaaagagaag

SEQ ID NO: 620474 - DNA, 120 bp, Artificial Sequence
  ENSG00000177707_57 (sequence is synthesized)
ttggcaatcttcagcactctaatggactaaatagcaggagttttgactatgaagatgagaatccagttggggaagatggcattcagcagatgtaccccctttacaatcaaatgtgctacc

SEQ ID NO: 620475 - DNA, 120 bp, Artificial Sequence
  ENSG00000177707_58 (sequence is synthesized)
aagaccggagccctggcaaacatcatcaaaataacgaccctaagagagtctacatcgacccacgagaacattatgtgtgatttttctctttttccaatgggcgttctaacaaatgtttat

SEQ ID NO: 620476 - DNA, 120 bp, Artificial Sequence
  ENSG00000177707_59 (sequence is synthesized)
tcttagattggggagagaagctaaggccaatagttattttactgtctctcatataagaacagtcccactctaagggtattggaagtcttaatgaatgacgtaaagccaatagcaaatttc

SEQ ID NO: 620477 - DNA, 120 bp, Artificial Sequence
  ENSG00000177707_60 (sequence is synthesized)
ttgtgacttatggaagcttagtggtatggaagcaaaattttcttcaatatggcatccaggagattgtttttcttgcaagactattgactgcccaccattcattctgctaaataagttgag

SEQ ID NO: 620478 - DNA, 120 bp, Artificial Sequence
  ENSG00000177710_0 (sequence is synthesized)
aaaaagaaagaaagaaagaaagaaaagaagcagagttggactcagcgggaaaataggcgtgctaccacctcaggagagttccagggaagaaccccacccgcactccaatgaggtcacaat

SEQ ID NO: 620479 - DNA, 120 bp, Artificial Sequence
  ENSG00000177710_1 (sequence is synthesized)
ggaagaaccccacccgcactccaatgaggtcacaatggctggagctctgaggggcccaggctccctgagccaggaggagaggagaaagtccaaggaaagatggctggcagtcacccctac

SEQ ID NO: 620480 - DNA, 120 bp, Artificial Sequence
  ENSG00000177710_2 (sequence is synthesized)
ttcaacctgcctgactccacacacccatcgccgccctccgctccacccagcctccgctggcaccagcgctgccagccctctggtgccaccaatggcctgctggtggccctgctgggtggg

SEQ ID NO: 620481 - DNA, 120 bp, Artificial Sequence
  ENSG00000177710_3 (sequence is synthesized)
ggcctgcctgctggcttcgtgggccccctttctcgtatggcttaccagggttccaacctgccctcgctggagctgctcatctgtcgatgcctcttccacctccctattgccctgctactt

SEQ ID NO: 620482 - DNA, 120 bp, Artificial Sequence
  ENSG00000177710_4 (sequence is synthesized)
aaactgcgtggcgacccccttctgggacctcctgacatccgaggctgggcctgcttctgtgccctgctcaacgtcctcagcattggatgtgcctacagtgcagttcaggtggtgcccgct

SEQ ID NO: 620483 - DNA, 120 bp, Artificial Sequence
  ENSG00000177710_5 (sequence is synthesized)
gcaacgctgccactgttcgcaaaggttcttccaccgtatgctccgctgtcctcaccctctgccttgagagccagggtctcggtggctacgagtggtgtggactgttgggcagcatcctag

SEQ ID NO: 620484 - DNA, 120 bp, Artificial Sequence
  ENSG00000177710_6 (sequence is synthesized)
gactaatcatcattctgggacctggactctggacactacaggaggggaccacaggtgtctacaccaccctgggctatgtgcaggctttcctgggaggcctggcgctgtccctggggcttc

SEQ ID NO: 620485 - DNA, 120 bp, Artificial Sequence
  ENSG00000177710_7 (sequence is synthesized)
tggtctatcgttctctgcactttccctcctgcctcccaacagtggccttcctatctggcttggtggggctgctgggctgtgtgccaggcctctttgtgctgcagacccccgtgttgccca

SEQ ID NO: 620486 - DNA, 120 bp, Artificial Sequence
  ENSG00000177710_8 (sequence is synthesized)
gtgacctcctgagttggagttgtgtgggggcagaggggatcctcgccttggtctccttcacatgtgtgggctatgcggtcaccaaggcccaccctgccctggtgtgcgctgtcctgcatt

SEQ ID NO: 620487 - DNA, 120 bp, Artificial Sequence
  ENSG00000177710_9 (sequence is synthesized)
ccgaggtggttgtggcccttatactgcagtattatatgctccatgagactgtggcactttctgacatcatgggggcaggggttgtgctgggcagcattgccatcattacagcccggaacc

SEQ ID NO: 620488 - DNA, 120 bp, Artificial Sequence
  ENSG00000177710_10 (sequence is synthesized)
tcagctgtgagaggacagggaaggtggaggagtgagatagaacttgggagcccgggggttgggagggacagggataaataaagacaaagactgaagacaaaaaaaaaataaaagaaaaaa

SEQ ID NO: 620489 - DNA, 120 bp, Artificial Sequence
  ENSG00000177721_0 (sequence is synthesized)
gggtgccccccaccatccccagcccgcagcataatcggtgaagggagcctgcggtttctccgccgcgccttcgcccgttgcgtcctgcgaagccagtggaatcggtggtcacaaggaaat

SEQ ID NO: 620490 - DNA, 120 bp, Artificial Sequence
  ENSG00000177721_1 (sequence is synthesized)
tatgacaggagcaacctgcaggggtttagatctgacagaaatattctaatggtaggcattgcatcgcttagccatatttgtaatttcttctttgtagggttggttctctgtaacttttgc

SEQ ID NO: 620491 - DNA, 120 bp, Artificial Sequence
  ENSG00000177721_2 (sequence is synthesized)
ttaccttaaaattatttttgtgtcttgctctgaggacaatgttaccgatgtgtttttcatttttacttgcatttcagactttcattattttaaattatgtattttttttttcttctaatt

SEQ ID NO: 620492 - DNA, 120 bp, Artificial Sequence
  ENSG00000177721_3 (sequence is synthesized)
ttgagcgtctcagattcgtgcttcttgactttcattctctcaggagccggggagccgagctcggtcttagcctcgctggtatcaggttccgggttctgtctggaggctccgcttcctatg

SEQ ID NO: 620493 - DNA, 120 bp, Artificial Sequence
  ENSG00000177721_4 (sequence is synthesized)
cagagctggcggttttgtatcagcacgtttgccagtggcgcccactgggcgttttctcagttgctgcacccaacgtgacatttcccgttcgcggggtccttaggttctcagtgctgtcac

SEQ ID NO: 620494 - DNA, 120 bp, Artificial Sequence
  ENSG00000177721_5 (sequence is synthesized)
tttttcgctcctacaaccgctagtatctcctaggaacttcctgaaccccgttttgccgtgcagaacggtgattgcaccgagccgctgttcgcactagtaattgtgtggtaccattagccg

SEQ ID NO: 620495 - DNA, 120 bp, Artificial Sequence
  ENSG00000177721_6 (sequence is synthesized)
gcgctttttctgtcacaacccattaaaacgggttaaaacatattaaacctatcaaacacattgaacggattaaaacacattaaatgccgcaacacatttttctggtacaacacattgaaa

SEQ ID NO: 620496 - DNA, 120 bp, Artificial Sequence
  ENSG00000177721_7 (sequence is synthesized)
cagagttggttcattcctccaaacaggttgtttaggtgtggaagcaccgctcttagttctaagagcatgctgtttctctttagcagcaccctttacggcgccaaaacggatatttgtttg

SEQ ID NO: 620497 - DNA, 120 bp, Artificial Sequence
  ENSG00000177721_8 (sequence is synthesized)
gcaataccagcgctatccgctaggtgccggcgcttgctaagttcaacgcgccagtttctcgtttgcaaggtggttagggcagagccctagcagacagttttccggtggcagcaacgctca

SEQ ID NO: 620498 - DNA, 120 bp, Artificial Sequence
  ENSG00000177721_9 (sequence is synthesized)
agatttgcttagtgtcatttcatttcggtttcttttctcgccatgtttttctgtcggaattacggttcgttttggttctatgtactctctaaaatgttatcgtttttcatttgtctacta

SEQ ID NO: 620499 - DNA, 120 bp, Artificial Sequence
  ENSG00000177721_10 (sequence is synthesized)
attttcgtgcatttgttactactgagtttcttaatatctgactggcctccgcccacgggctctgcagagcataaatactcaggctgatggtagtgcagagactctccctccttgatcagc

SEQ ID NO: 620500 - DNA, 120 bp, Artificial Sequence
  ENSG00000177721_11 (sequence is synthesized)
gcaaacgttggtctgaggcttgagggatggagcaacattttcttggctgtgtgaagcgggcttgggattccgcagaggtggcgccagagccccagcctccacctattgtgagttcagaag

SEQ ID NO: 620501 - DNA, 120 bp, Artificial Sequence
  ENSG00000177721_12 (sequence is synthesized)
atcgtgggccgtggcctcttcctttgtatccagtactaggagagtactcactggacagctgtgatttgggactgctttccagcccttgctggcggctgcccggagtctactggcaaaacg

SEQ ID NO: 620502 - DNA, 120 bp, Artificial Sequence
  ENSG00000177721_13 (sequence is synthesized)
gactctctcctggagtccagagcaccttggaaccaagtacagcgaagcccactgagttcagttggccggggacacagaagcagcaagaggcacccgtagaagaggtggggcaggcagagg

SEQ ID NO: 620503 - DNA, 120 bp, Artificial Sequence
  ENSG00000177721_14 (sequence is synthesized)
aacccgacagactcaggctccagcagcttccctggagcagtcctctccatccctgggacagacagcaggacaccgaggtctgtgacagcgggtgccttttggaacgccgccatcctcctg

SEQ ID NO: 620504 - DNA, 120 bp, Artificial Sequence
  ENSG00000177721_15 (sequence is synthesized)
ccctccagccgtggcgccacctcccgggtttctcagactgcctggagtggattcttcgcgttggttttgccgcgttctctgtactctgggcgtgctgttcacggatctgtggagctaagc

SEQ ID NO: 620505 - DNA, 120 bp, Artificial Sequence
  ENSG00000177721_16 (sequence is synthesized)
agccttagatagcagcagaaggctttttggattctcctccttgaaaagattctcagttaccaaacgtctccacctagaaaataaaaatacattaagatgtgctttcattgctggttgtca

SEQ ID NO: 620506 - DNA, 120 bp, Artificial Sequence
  ENSG00000177721_17 (sequence is synthesized)
gtttttaaattctctttttcccttatgtttctttcttgtttcgcgtcgcttattactttcagtttccttgtattttaaatatttgtatttatttcattaaatatttcattcgtatctgtt

SEQ ID NO: 620507 - DNA, 120 bp, Artificial Sequence
  ENSG00000177721_18 (sequence is synthesized)
gattgtagaattcttagagtttttggcaaatttaaaatttgtttttttccattgtattttaaaatcttattcctactatttttctaattattgctttttaaatgtattgtttgtttacat

SEQ ID NO: 620508 - DNA, 120 bp, Artificial Sequence
  ENSG00000177728_0 (sequence is synthesized)
ccccttagagttgccagtaacggacatggctgcggcccccggaggaggggacgtgaagtgaggagggggttgggaggggagaggacgcgggcgaggaagaccagccccggggccccgatg

SEQ ID NO: 620509 - DNA, 120 bp, Artificial Sequence
  ENSG00000177728_1 (sequence is synthesized)
ttgtgactgtgacagactcactggggtttgtacatgctggggaggagccttcctttcaggggtgaccacattcatctgggcatgcctgcagtactcttggcccatggacctgaaggagaa

SEQ ID NO: 620510 - DNA, 120 bp, Artificial Sequence
  ENSG00000177728_2 (sequence is synthesized)
gcacctgggcgagcctccctcagccctgggcctgtccacgcggaaggccctcagcgtcctgaaggagcagctggaggcagtgctggaaggacatctcagggagcggaagaagtgtctgac

SEQ ID NO: 620511 - DNA, 120 bp, Artificial Sequence
  ENSG00000177728_3 (sequence is synthesized)
gtggaaggaggtgtggagaagcagcttcctccaccacagtaaccgctgctcctgcttccactggccgggggcctcactcatgctactggccgtgctgctgctgctgggctgctgcggggg

SEQ ID NO: 620512 - DNA, 120 bp, Artificial Sequence
  ENSG00000177728_4 (sequence is synthesized)
acagccagccgggagccgtggggtggggctggtgaatgcctcggccttgttcctgttactgcttctcaaccttgtgctcatcgggcggcaagaccggctgaagcgtcgggaggtagagcg

SEQ ID NO: 620513 - DNA, 120 bp, Artificial Sequence
  ENSG00000177728_5 (sequence is synthesized)
gaggctgcgagggatcattgaccaaatccaagatgccctcagggatggcagggagatccagtggcccagtgccatgtatccagacctccacatgccttttgcgccatcctggtccttgca

SEQ ID NO: 620514 - DNA, 120 bp, Artificial Sequence
  ENSG00000177728_6 (sequence is synthesized)
ctgggcctacagagacggacacctggtcaacctgccagtcagcctgctggttgaaggagacatcatagctttgaggcctggccaggaatcgtttgcttctctgagggggatcaaggatga

SEQ ID NO: 620515 - DNA, 120 bp, Artificial Sequence
  ENSG00000177728_7 (sequence is synthesized)
cgagcacatcgtcctggagccgggagacctcttcccccccttctcccctccaccctcaccccggggagaagtggagagagggccacagagcccccagcagcaccggcttttccgtgtcct

SEQ ID NO: 620516 - DNA, 120 bp, Artificial Sequence
  ENSG00000177728_8 (sequence is synthesized)
tgagacccctgtgattgacaacatcagatggtgcctggacatggccctgtcccgaccagtcactgccctggacaatgagcggttcacagtgcagtcggtgatgctacactatgctgtgcc

SEQ ID NO: 620517 - DNA, 120 bp, Artificial Sequence
  ENSG00000177728_9 (sequence is synthesized)
cgtggtcctggccggcttcctcatcaccaatgccctgcgcttcatcttcagtgccccgggggtcacttcctggcagtacaccctcctccagctccaggtgaatggcgtcctgcccatcct

SEQ ID NO: 620518 - DNA, 120 bp, Artificial Sequence
  ENSG00000177728_10 (sequence is synthesized)
ccccctgctctttccagtcctctgggttctggcaactgcctgtggagaggcccgtgtcctggcccagatgagcaaggcctcacccagctccctgctggctaagttctcagaggatactct

SEQ ID NO: 620519 - DNA, 120 bp, Artificial Sequence
  ENSG00000177728_11 (sequence is synthesized)
cagcagctatacggaggctgtctcctctcaggaaatgctgcgctgcatttggggccacttcctgagggtgctcggggggacatcgccaacgctgagccacagttccagcctgctgcacag

SEQ ID NO: 620520 - DNA, 120 bp, Artificial Sequence
  ENSG00000177728_12 (sequence is synthesized)
cctgggctctgtcacggtcctgtgctgtgtggacaaacaggggatcctgtcatggccaaatcccagcccagagactgtactgttcttcagcgggaaggtggagccccctcacagcagcca

SEQ ID NO: 620521 - DNA, 120 bp, Artificial Sequence
  ENSG00000177728_13 (sequence is synthesized)
tgaggacctcaccgatggcctatccacccgctccttctgccatcccgagccccatgaacgagacgccctcctggctggctccctgaacaacaccctgcacctttccaatgagcaggagcg

SEQ ID NO: 620522 - DNA, 120 bp, Artificial Sequence
  ENSG00000177728_14 (sequence is synthesized)
tggcgactggcctggcgaggctcccaagccccccgagccctattcacaccacaaagcgcatggccgcagcaaacacccatctggctccaacgtgagcttcagcagggacaccgagggtgg

SEQ ID NO: 620523 - DNA, 120 bp, Artificial Sequence
  ENSG00000177728_15 (sequence is synthesized)
tgaagaagagcccagcaagacccagcctgggatggagagcgacccctacgaagcagaggactttgtgtgtgactaccacctggagatgctgagcctgtcccaggaccagcagaacccctc

SEQ ID NO: 620524 - DNA, 120 bp, Artificial Sequence
  ENSG00000177728_16 (sequence is synthesized)
ctgcatccagtttgatgactccaactggcagctgcacctcacctccctcaaacccctgggcctcaatgtgctgctgaacctgtgtgatgccagcgtcaccgagcgcctgtgccgattctc

SEQ ID NO: 620525 - DNA, 120 bp, Artificial Sequence
  ENSG00000177728_17 (sequence is synthesized)
cgaccacctgtgcaacatcgccctgcaagagagccacagcgccgtgctgcccgtccatgtgccctggggcctctgcgagcttgcccgcctcattggcttcactcctggggccaaggagct

SEQ ID NO: 620526 - DNA, 120 bp, Artificial Sequence
  ENSG00000177728_18 (sequence is synthesized)
tttcaagcaggagaaccatctggcgctgtaccgcctccccagtgccgagacaatgaaggagacatcgctggggcggctctcctgtgtcaccaagcggcggcctcccctcagccacatgat

SEQ ID NO: 620527 - DNA, 120 bp, Artificial Sequence
  ENSG00000177728_19 (sequence is synthesized)
cagcctcttcattaaagacaccaccaccagcacagagcagatgctgtcccatggcaccgctgatgtggtcttagaggcctgcacagacttctgggacggagctgacatctaccctctctc

SEQ ID NO: 620528 - DNA, 120 bp, Artificial Sequence
  ENSG00000177728_20 (sequence is synthesized)
gggatctgacagaaagaaagtgctggacttctaccagcgagcctgcctgtctgggtattgctctgccttcgcctacaagcccatgaactgcgccctgtcctctcagctcaatggcaagtg

SEQ ID NO: 620529 - DNA, 120 bp, Artificial Sequence
  ENSG00000177728_21 (sequence is synthesized)
catcgagctggtacaggtgcccggccaaagcagcatcttcaccatgtgcgagctgcccagcaccatccccatcaagcagaacgcccgccgcagcagctggagctctgacgaagggatcgg

SEQ ID NO: 620530 - DNA, 120 bp, Artificial Sequence
  ENSG00000177728_22 (sequence is synthesized)
gaaggaagactgcatgcaggccctgagcggccagatcttcatgggcatggtgtcctcccagtaccaggcccggctggacatcgtgcgcctcattgatgggcttgtcaacgcctgcatccg

SEQ ID NO: 620531 - DNA, 120 bp, Artificial Sequence
  ENSG00000177728_23 (sequence is synthesized)
ctttgtctacttctctttggaggatgagctcaaaagcaaggtgtttgcagaaaaaatgggcctggagacaggctggaactgccacatctccctcacacccaatggtgacatgcctggctc

SEQ ID NO: 620532 - DNA, 120 bp, Artificial Sequence
  ENSG00000177728_24 (sequence is synthesized)
cgagatccccccctccagccccagccacgcaggctccctgcatgatgacctgaatcaggtgtcccgagatgatgcagaagggctcctcctcatggaggaggagggccactcggacctcat

SEQ ID NO: 620533 - DNA, 120 bp, Artificial Sequence
  ENSG00000177728_25 (sequence is synthesized)
cagcttccagcctacggacagcgacatccccagcttcctggaggactccaaccgggccaagctgccccggggtatccaccaagtgcggccccacctgcagaacattgacaacgtgcccct

SEQ ID NO: 620534 - DNA, 120 bp, Artificial Sequence
  ENSG00000177728_26 (sequence is synthesized)
gctagtgccccttttcaccgactgcaccccagagaccatgtgtgagatgataaagatcatgcaagagtacggggaggtgacctgctgcctgggcagctctgccaacctgcggaacagctg

SEQ ID NO: 620535 - DNA, 120 bp, Artificial Sequence
  ENSG00000177728_27 (sequence is synthesized)
cctcttcctccagagcgacatcagcattgccctggatcccctgtacccatcccgttgctcctgggagacctttggctacgccaccagcatcagcatggcccaggcctcggatggcctttc

SEQ ID NO: 620536 - DNA, 120 bp, Artificial Sequence
  ENSG00000177728_28 (sequence is synthesized)
tcccctgcagctgtcagggcagctcaacagcctgccctgttccctgacctttcgccaggaggagaccatcagcatcatccggcttatcgaacaggctcggcatgccacctatggcatccg

SEQ ID NO: 620537 - DNA, 120 bp, Artificial Sequence
  ENSG00000177728_29 (sequence is synthesized)
taagtgcttcctcttcctgctgcagtgccagctgactcttgtggtcatccagttcctttcttgcctggtccagctgccgccactcctgagtaccaccgacatcctgtggctgtcctgctt

SEQ ID NO: 620538 - DNA, 120 bp, Artificial Sequence
  ENSG00000177728_30 (sequence is synthesized)
ttgctaccctctgctcagcatctctctgctggggaagcccccccatagctccatcatgtctatggcaacggggaaaaacctccagtccattcccaagaagacccagcactacttcctgct

SEQ ID NO: 620539 - DNA, 120 bp, Artificial Sequence
  ENSG00000177728_31 (sequence is synthesized)
ctgcttcctgctcaagttcagcctcaccatcagctcctgcctcatctgctttggcttcacactgcagagcttctgtgacagctcccgggaccgcaacctcaccaactgctcctccgtcat

SEQ ID NO: 620540 - DNA, 120 bp, Artificial Sequence
  ENSG00000177728_32 (sequence is synthesized)
gctgcccagcaacgacgacagggctccagcctggtttgaggactttgccaatggactgctgtcggctcagaagctcacggccgccctgattgtcctgcacactgtcttcatttccatcac

SEQ ID NO: 620541 - DNA, 120 bp, Artificial Sequence
  ENSG00000177728_33 (sequence is synthesized)
ccatgtgcatcgcaccaagcccctgtggagaaagagccccttgaccaacctctggtgggccgtgacagtgcctgtggtgctgctgggtcaggtggtccagacggctgtggacctgcagct

SEQ ID NO: 620542 - DNA, 120 bp, Artificial Sequence
  ENSG00000177728_34 (sequence is synthesized)
gtggacacacagggacagccacgtccactttggcctggaggacgtgcccctgctgacatggctcctgggctgcctgtccctggtccttgtggtggtgaccaatgagatcgtgaagctaca

SEQ ID NO: 620543 - DNA, 120 bp, Artificial Sequence
  ENSG00000177728_35 (sequence is synthesized)
tgagattcgggtccgagtccgctaccagaagcgacagaagctgcagtttgaaactaagctgggcatgaactctcccttctgagccactggctgtggtggctgtagttgcccccgtccctg

SEQ ID NO: 620544 - DNA, 120 bp, Artificial Sequence
  ENSG00000177728_36 (sequence is synthesized)
gggctaaagccagacccatttctgaacaggggagtttgtatcatgaatgtttccaggtttgctcctgcacccgtggcactggaaacccagctccccgtgtcagaccccgctgtcttcctg

SEQ ID NO: 620545 - DNA, 120 bp, Artificial Sequence
  ENSG00000177728_37 (sequence is synthesized)
agccctggggctcactgtggaggagctgacggcctgggcccttggccagtcctggctcttccctgggcctcaccagggacactcttgaatgtatggcctcaggcgctccctagaggggcc

SEQ ID NO: 620546 - DNA, 120 bp, Artificial Sequence
  ENSG00000177728_38 (sequence is synthesized)
ctaaaccccctcacctgtgagctaccccctttagggatcccttgcccccttggagatcccttgccccccagtgcctctgctcgtgggtccctggacacggccttgaagccaaccttcttt

SEQ ID NO: 620547 - DNA, 120 bp, Artificial Sequence
  ENSG00000177728_39 (sequence is synthesized)
ggaggagcaacagcagcagccttggccgacgcgtccaactcccaaggctgccgtggagggcaggggggtggtgcttgcctggatgtggccccgagtgcctcccctccctccctctgtggg

SEQ ID NO: 620548 - DNA, 120 bp, Artificial Sequence
  ENSG00000177728_40 (sequence is synthesized)
ggagtctcccgcctgaacctgaagatggagcagggcccccgcttcgccctggagcctcttcctgtgcctggctcaagctggctgcctgtcagtcttggggaatctggcccaggtctcctc

SEQ ID NO: 620549 - DNA, 120 bp, Artificial Sequence
  ENSG00000177728_41 (sequence is synthesized)
agcctctgccccagttctgggagaagtttctactggtgtatattttttactggaaatgagccttttaggaatgaatgtagactggtttgtattaaaatgtgtcaattgctaagaaatacc

SEQ ID NO: 620550 - DNA, 120 bp, Artificial Sequence
  ENSG00000177728_42 (sequence is synthesized)
tgtggctggtctgtaaggccactccagggtctgcccacccccggcggtggctggcaaagggaggcctaaaccttcctccatctacgcgggtgggtccctcaggtctggctcaggcgagac

SEQ ID NO: 620551 - DNA, 120 bp, Artificial Sequence
  ENSG00000177728_43 (sequence is synthesized)
ccctagggtcaggggtccccatgtcacagaggcaaacacacagcccagtcacgtggaatggtgttttcattggtgttagttgggggaagaggttaatggttacagagccagggcctgggc

SEQ ID NO: 620552 - DNA, 120 bp, Artificial Sequence
  ENSG00000177728_44 (sequence is synthesized)
caatggggtcaggctctccctgccctcaggtgggcagtcggggctcctgctgtggtccgaagcccctcccccattgtgtcctctcaggcagttgatagaataaattccatttaaaatata

SEQ ID NO: 620553 - DNA, 120 bp, Artificial Sequence
  ENSG00000177728_45 (sequence is synthesized)
gaattaatcagcagattgaagctctgctctgctgcgcctgattctgtgcagcacccggcttcttgctcacacactctcagctgtctccgtctcttctctcctcttctctctctctctctt

SEQ ID NO: 620554 - DNA, 120 bp, Artificial Sequence
  ENSG00000177728_46 (sequence is synthesized)
ttcaccctccccgctttgagggaggtgttggaagttcttgcagctgactgcttgtggctcagactctggcccatgctctttaagcaggcagagctatggatgccccatcagggcaaaggc

SEQ ID NO: 620555 - DNA, 120 bp, Artificial Sequence
  ENSG00000177728_47 (sequence is synthesized)
actatagccgacctcgccctggctgggaccaatgcacctgggcatggtgggagaagagggtggggtgcccagtcctgtgggagatacagctgaagtgtgtgtgtcccccaccctgagcag

SEQ ID NO: 620556 - DNA, 120 bp, Artificial Sequence
  ENSG00000177728_48 (sequence is synthesized)
tccgtctcaaaaaaaaaaaaaaagaacacctctttcccttcctgcccctgagagagctggcccttcctgcccagggaatggccgtggggccagggcagcccttcccttccctcctcccca

SEQ ID NO: 620557 - DNA, 120 bp, Artificial Sequence
  ENSG00000177728_49 (sequence is synthesized)
tctggtgggccgtgacagtgcctgtggtgtgagtattgctaggatggagggcggagtgtgggctggggaggagagggccttctgcagggctaggatcggagggcgggaccggggccagtg

SEQ ID NO: 620558 - DNA, 120 bp, Artificial Sequence
  ENSG00000177728_50 (sequence is synthesized)
taccctgcctgagctaactgttgtactgggaagagcagggaaggaagcaagcagtgtcgggttcacacggggccgccacctcctgcaggctgctgggtcaggtggtccagacggctgtgg

SEQ ID NO: 620559 - DNA, 120 bp, Artificial Sequence
  ENSG00000177728_51 (sequence is synthesized)
gtggctgtcctgcttttgctaccctctgctcagcatctctctgctggggaagcccccccatagctccatcatgtctatggcaacggggaaaaacctccagtccattcccaagaagagctt

SEQ ID NO: 620560 - DNA, 120 bp, Artificial Sequence
  ENSG00000177728_52 (sequence is synthesized)
tcttcctcctcattctgatgctgaaactactcaccagtcctaggcccactgtgtatcagcctctgcctctgtgcctctctccactgttctctgctgatgccctcagggatggcagggaga

SEQ ID NO: 620561 - DNA, 120 bp, Artificial Sequence
  ENSG00000177728_53 (sequence is synthesized)
gaagcagacaggagcccaagaaggacaggaagcggatttcaggagggagcgggtggaagagggtgagcagcagctctctcctgggaagggtgcctttcaggggcaggagccctccccagc

SEQ ID NO: 620562 - DNA, 120 bp, Artificial Sequence
  ENSG00000177728_54 (sequence is synthesized)
atggctgcggcccccggaggaggggacgtgaagtgaggagggggttgggaggggagaggacgcgggcgaggaagaccagccccggggccccgaagcgttttcaggctcctcggaagctca

SEQ ID NO: 620563 - DNA, 120 bp, Artificial Sequence
  ENSG00000177728_55 (sequence is synthesized)
ccatccatgccatcggataaagtgactcctgtggaatgccctcgttcctgtaccgcacacccctggagcccaggtctcctggttcctagcatgccacgatgcggcccctgcccgctgccc

SEQ ID NO: 620564 - DNA, 120 bp, Artificial Sequence
  ENSG00000177728_56 (sequence is synthesized)
ccagatgcaagcaaagccccgctctttcattggtgtgtcaccgcgggctaaactttggcgttgccttggtcacgtgctgctacatcccaccctctctcctgagtttttcggtggctcttg

SEQ ID NO: 620565 - DNA, 120 bp, Artificial Sequence
  ENSG00000177728_57 (sequence is synthesized)
agggaaaaaaggagggagctcgttatggaatctgttttccttctgctatgtgggtgtatgcattggagagaaggatctttttctcatgatttatccaagacgctcagctttagtgacata

SEQ ID NO: 620566 - DNA, 120 bp, Artificial Sequence
  ENSG00000177728_58 (sequence is synthesized)
cttcattaaagacaccaccaccagtgagccctggctacgttggccagcaccaggcgagaccttccagagcttggcaggggggctctgcccagccccacccattgctagggaggcctgggc

SEQ ID NO: 620567 - DNA, 120 bp, Artificial Sequence
  ENSG00000177728_59 (sequence is synthesized)
agatgaaaagtagactgcttccaagtgttccactctggcagggctggaattggggaccagggctgggatggtgttggctgcagaggccgggattgtccaaaggatgggaatatggtgtct

SEQ ID NO: 620568 - DNA, 120 bp, Artificial Sequence
  ENSG00000177728_60 (sequence is synthesized)
gcattccaagcccagtggcattgcagagccttgctgtccgtgagtcccagggagtctcctcctctggcaggggctcctcagcgcccttctccaggaggacagtgcgttgcctgtcaggtc

SEQ ID NO: 620569 - DNA, 120 bp, Artificial Sequence
  ENSG00000177728_61 (sequence is synthesized)
ctgtgctgtccatcctgccgcggcacctgggacagaccagggctcttgggggctgtcacccccaagctgctcctgggatgtaagggaacctcctcagtcccttgaatggggtcagaggcc

SEQ ID NO: 620570 - DNA, 120 bp, Artificial Sequence
  ENSG00000177728_62 (sequence is synthesized)
tagctggtgtcagggcaccagaacgggacagtctttccacaagggactggggtgggaaggggagctgtggcctgggggctgctgggtgggcgagccctcactccctgtgggtgcggcctc

SEQ ID NO: 620571 - DNA, 120 bp, Artificial Sequence
  ENSG00000177728_63 (sequence is synthesized)
tgtgtcctctttggtctggccacccctctttttagctcctgccagtgtcatgagatatattaatagtccatagaagcagacaggagcccaagaaggacaggaagcggatttcaggaggga

SEQ ID NO: 620572 - DNA, 120 bp, Artificial Sequence
  ENSG00000177728_64 (sequence is synthesized)
catggcaggggatggctggctggacccgcctcctagaagaggcccagtaccaactcctcacgggacttaatggacctggcagggtattgccagggcatggccctaagttcctgttccccg

SEQ ID NO: 620573 - DNA, 120 bp, Artificial Sequence
  ENSG00000177728_65 (sequence is synthesized)
aggccaagctgccccggggtatccaccaagtgcggccccacctgcagaacattgacaacgtgcccctgctagtgccccttttcaccgactgcaccccagagagtgagtgctgtggccatg

SEQ ID NO: 620574 - DNA, 120 bp, Artificial Sequence
  ENSG00000177728_66 (sequence is synthesized)
ggtacttgggcaacctggtcccgtcggctgagctctgcctgggcctgcgtaccccgtgggctctggagggatgtaggtttcccatgcagggagtaaaggaacctgggctgggatcagctg

SEQ ID NO: 620575 - DNA, 120 bp, Artificial Sequence
  ENSG00000177728_67 (sequence is synthesized)
gggaatcttgtgggttggagtcagaagtgccgatgttcacatgatcccgctgccgggggtgggattgtttcaaagaggggcccacctcccatcgcctcctgctctcctgtcccatgggtc

SEQ ID NO: 620576 - DNA, 120 bp, Artificial Sequence
  ENSG00000177728_68 (sequence is synthesized)
acggggcagccacaccctcggccacaggctgtcctggcctccctggccagcctggcctcacaaggtctgaaagagcaggcgtctctgccctctgtcccagcacctccaggctaggccagt

SEQ ID NO: 620577 - DNA, 120 bp, Artificial Sequence
  ENSG00000177728_69 (sequence is synthesized)
ggtccctgaggccctccccaagtctgctgcgaagtaggtggagcctccccctacccttccattcttgtaatcgcaatcactggtgtccctactggaaccttccaaatatacacagcccgg

SEQ ID NO: 620578 - DNA, 120 bp, Artificial Sequence
  ENSG00000177728_70 (sequence is synthesized)
agctccctcttagagatgttccctggccacagaagatccctcaactgtgtcctctttggtctggccacccctctttttagctcctgccagtgtcatgagatatattaatagtccatagaa

SEQ ID NO: 620579 - DNA, 120 bp, Artificial Sequence
  ENSG00000177728_71 (sequence is synthesized)
gtggaaggtgaagcttcttctcggggctaccagggcctggctgggatggcagggaagtgtgggaggccccttctcaggactctgatgtaccctgtcaccctggacagtgtgacccaactg

SEQ ID NO: 620580 - DNA, 120 bp, Artificial Sequence
  ENSG00000177728_72 (sequence is synthesized)
aggcctcatgaaatatcagaaagaagccaaggttcccctcagagtggctcctgagcctgcttgctgcaggagcccaacaggctggagcccagccgaggtcaaagagaggggaccaaggcg

SEQ ID NO: 620581 - DNA, 120 bp, Artificial Sequence
  ENSG00000177731_0 (sequence is synthesized)
gccccggcgctccctagcccggcgcggcccggcagcgagagcggcgccatggaggccaccggggtgctgccgttcgtgcgtggcgtggacctcagcggcaacgacttcaagggcggctac

SEQ ID NO: 620582 - DNA, 120 bp, Artificial Sequence
  ENSG00000177731_1 (sequence is synthesized)
ttccctgagaatgtcaaggccatgaccagcctgcggtggctgaagctgaaccgcactggcctctgctacctgcccgaggagctggccgccctgcagaagctggaacacttgtctgtgagc

SEQ ID NO: 620583 - DNA, 120 bp, Artificial Sequence
  ENSG00000177731_2 (sequence is synthesized)
cacaacaacctgaccacgcttcatggggagctgtccagcctgccatcgctgcgcgccatcgtggcccgagccaacagtctgaagaattccggagtccccgatgacatcttcaagctagat

SEQ ID NO: 620584 - DNA, 120 bp, Artificial Sequence
  ENSG00000177731_3 (sequence is synthesized)
gatctctcagtcctggacttgagccacaaccagctgacagagtgcccgcgggagctggagaacgccaagaacatgctggtgctgaacctcagccacaacagcatcgacaccatccccaac

SEQ ID NO: 620585 - DNA, 120 bp, Artificial Sequence
  ENSG00000177731_4 (sequence is synthesized)
cagctcttcatcaacctcactgacctactatacctggacctcagcgagaaccgcctggagagcctgcccccgcagatgcgccgcctggtgcacctgcagacgctcgtgctcaatggaaac

SEQ ID NO: 620586 - DNA, 120 bp, Artificial Sequence
  ENSG00000177731_5 (sequence is synthesized)
cccctgctgcatgcacagctccggcagctcccagcgatgacggccctgcagaccctgcacctgcggagcacccagcgcacccagagcaacctgcccaccagcctggagggtctgagcaac

SEQ ID NO: 620587 - DNA, 120 bp, Artificial Sequence
  ENSG00000177731_6 (sequence is synthesized)
ctcgcagacgtggatctgtcctgcaatgacctgacacgggtgcccgagtgtctgtacaccctccccagcctgcgccgcctcaacctcagcagcaaccagatcacggagctgtccctgtgc

SEQ ID NO: 620588 - DNA, 120 bp, Artificial Sequence
  ENSG00000177731_7 (sequence is synthesized)
atagaccagtgggtgcacgtggaaactctgaacctgtcccgaaatcagctcacctcactgccctcagccatttgcaagctgagcaagctgaagaagctgtacctgaattccaacaagctg

SEQ ID NO: 620589 - DNA, 120 bp, Artificial Sequence
  ENSG00000177731_8 (sequence is synthesized)
gactttgacgggctgccctcaggcattggcaagctcaccaacctggaagagttcatggctgccaacaacaacctggagctggtccctgaaagtctctgcaggtgcccaaagctgaggaaa

SEQ ID NO: 620590 - DNA, 120 bp, Artificial Sequence
  ENSG00000177731_9 (sequence is synthesized)
cttgtcctgaacaagaaccacctggtgaccctcccagaagccatccatttcctgacggagatcgaggtcctggatgtgcgggagaaccccaacctggtcatgccgcccaagcccgcagac

SEQ ID NO: 620591 - DNA, 120 bp, Artificial Sequence
  ENSG00000177731_10 (sequence is synthesized)
cgtgccgctgagtggtacaacatcgacttctcgctgcagaaccagctgcggctagcgggtgcctctcctgctaccgtggctgcagctgcagctgcagggagtgggcccaaggaccctatg

SEQ ID NO: 620592 - DNA, 120 bp, Artificial Sequence
  ENSG00000177731_11 (sequence is synthesized)
gctcgcaagatgcgactgcggaggcgcaaggattcagcccaggatgaccaggccaagcaggtgctgaagggcatgtcagatgttgcccaggagaagaacaaaaagcaggaggagagcgca

SEQ ID NO: 620593 - DNA, 120 bp, Artificial Sequence
  ENSG00000177731_12 (sequence is synthesized)
gatgcccgggcccccagcgggaaggtgcggcgttgggaccagggcctggagaagccccgccttgactactccgagttcttcacggaggacgtgggccagctgcccggactgaccatctgg

SEQ ID NO: 620594 - DNA, 120 bp, Artificial Sequence
  ENSG00000177731_13 (sequence is synthesized)
cagatagagaacttcgtgcctgtgctggtggaggaagccttccacggcaagttctacgaggctgactgctacattgtgctcaagacctttctggatgacagcggctccctcaactgggag

SEQ ID NO: 620595 - DNA, 120 bp, Artificial Sequence
  ENSG00000177731_14 (sequence is synthesized)
atctactactggattggcggggaggccacactcgacaagaaagcttgctctgccatccacgctgtcaacttgcgcaactacctgggtgctgagtgccgcactgtccgggaggagatgggc

SEQ ID NO: 620596 - DNA, 120 bp, Artificial Sequence
  ENSG00000177731_15 (sequence is synthesized)
gatgagagcgaggagttcctgcaggtgtttgacaacgacatctcctacattgagggtggaacagccagtggcttctacactgtggaagacacacactatgtcaccaggatgtatcgtgtg

SEQ ID NO: 620597 - DNA, 120 bp, Artificial Sequence
  ENSG00000177731_16 (sequence is synthesized)
tatgggaaaaagaacatcaagttggagcctgtgcccctcaaggggacctctctggacccaaggtttgttttcctgctggaccgagggctagacatctacgtatggcggggggcccaggcc

SEQ ID NO: 620598 - DNA, 120 bp, Artificial Sequence
  ENSG00000177731_17 (sequence is synthesized)
gctcccagagttctgggaggcactgggtggggagccctctgagatcaagaagcacgtgcctgaagacttctggccgccgcagcccaagctgtacaaggtgggcctgggcttgggctacct

SEQ ID NO: 620599 - DNA, 120 bp, Artificial Sequence
  ENSG00000177731_18 (sequence is synthesized)
ggagctgccacagatcaactacaagctctccgtggaacataagcagcgtcccaaggtggagctgatgccaagaatgcggctgctgcagagtctgctggacacgcgctgcgtgtacattct

SEQ ID NO: 620600 - DNA, 120 bp, Artificial Sequence
  ENSG00000177731_19 (sequence is synthesized)
ggactgttggtccgacgtgttcatctggctcggccgcaagtccccgcgcctggtgcgcgctgccgccctcaagctgggtcaggagctgtgcgggatgctgcaccggccacgccatgccac

SEQ ID NO: 620601 - DNA, 120 bp, Artificial Sequence
  ENSG00000177731_20 (sequence is synthesized)
ggtcagccgcagcctcgagggcaccgaggcgcaggtgttcaaggccaagttcaagaattgggacgatgtgttgacggtggactacacacgcaatgcggaggccgtgctgcagagcccggg

SEQ ID NO: 620602 - DNA, 120 bp, Artificial Sequence
  ENSG00000177731_21 (sequence is synthesized)
tctctccgggaaggtgaaacgcgacgccgagaagaaagaccagatgaaggctgacctcactgcgcttttcctgccgcggcagccgcccatgtcgctggccgaggcggagcagctgatgga

SEQ ID NO: 620603 - DNA, 120 bp, Artificial Sequence
  ENSG00000177731_22 (sequence is synthesized)
ggagtggaacgaagacctagacggcatggagggtttcgtgctggagggcaagaagtttgcgcggctgccggaagaggagtttggccacttctacacgcaggactgctacgtcttcctctg

SEQ ID NO: 620604 - DNA, 120 bp, Artificial Sequence
  ENSG00000177731_23 (sequence is synthesized)
caggtactgggtgcctgtggagtacgaggaggaggaaaagaaggaagacaaggaggagaaggccgagggcaaagaaggcgaggaagcaaccgctgaggcagaggagaagcagccagagga

SEQ ID NO: 620605 - DNA, 120 bp, Artificial Sequence
  ENSG00000177731_24 (sequence is synthesized)
ggacttccagtgcatcgtgtacttctggcagggccgtgaagcctccaatatgggctggctcaccttcaccttcagcctgcaaaagaagttcgagagcctcttccctgggaagctggaggt

SEQ ID NO: 620606 - DNA, 120 bp, Artificial Sequence
  ENSG00000177731_25 (sequence is synthesized)
ggtacgcatgacgcagcagcaggagaaccccaagttcctgtcccatttcaagaggaagttcatcatccaccggggcaagaggaaggcggtccagggcgcccaacagcccagcctctacca

SEQ ID NO: 620607 - DNA, 120 bp, Artificial Sequence
  ENSG00000177731_26 (sequence is synthesized)
gatccgcaccaacggcagcgccctctgcacccggtgcatccagatcaacaccgactccagcctcctcaactccgagttctgcttcatcctcaaggttccctttgagagtgaggacaacca

SEQ ID NO: 620608 - DNA, 120 bp, Artificial Sequence
  ENSG00000177731_27 (sequence is synthesized)
gggcatcgtgtatgcctgggtgggccgggcatcagaccctgacgaagccaagttggcagaagacatcctgaacaccatgtttgacacctcctacagcaagcaggttatcaacgaaggtga

SEQ ID NO: 620609 - DNA, 120 bp, Artificial Sequence
  ENSG00000177731_28 (sequence is synthesized)
ggagcctgagaacttcttctgggtgggcattggggcacagaagccctatgatgacgatgccgagtacatgaaacacacacgtctcttccggtgctccaacgagaagggctactttgcagt

SEQ ID NO: 620610 - DNA, 120 bp, Artificial Sequence
  ENSG00000177731_29 (sequence is synthesized)
gactgagaaatgctccgacttttgccaagatgacctggcagatgatgacatcatgttgctagacaatggccaagaggtctacatgtgggtggggacccagactagccaggtggagatcaa

SEQ ID NO: 620611 - DNA, 120 bp, Artificial Sequence
  ENSG00000177731_30 (sequence is synthesized)
gctgagcctgaaggcctgccaggtatatatccagcacatgcggtccaaggaacatgagcggccgcgccggctgcgcctggtccgcaagggcaatgagcagcacgcctttacccgctgctt

SEQ ID NO: 620612 - DNA, 120 bp, Artificial Sequence
  ENSG00000177731_31 (sequence is synthesized)
ccacgcctggagcgccttctgcaaggccctggcctaagacaggctggcacagccccaggcttggtgaggaagaggaaggggcctcatccactgtctgctagcaaagaatgtactcaggtg

SEQ ID NO: 620613 - DNA, 120 bp, Artificial Sequence
  ENSG00000177731_32 (sequence is synthesized)
acaccacctgctccagccacgtccagtgccacagtccccagtagcctcaagcagcaccaatggggatgaccctgacaggtgccctcaggggtctgggaaatccaactctctccacagtgt

SEQ ID NO: 620614 - DNA, 120 bp, Artificial Sequence
  ENSG00000177731_33 (sequence is synthesized)
gagtgcacgtgtgaagccccctcactcttccgctagggataaagcagatgtggatgccctttaagagatattaaatgcttttattttcaatattaaaaatcagtatttttaatattaaaa

SEQ ID NO: 620615 - DNA, 120 bp, Artificial Sequence
  ENSG00000177731_34 (sequence is synthesized)
ttgaaccctgctcttcggaccaatacccagagggaaaaggctggagttatgttacagtgacttttgcgattatgatgatgccttaacactgactttatgcctagaaaactcccccgcaac

SEQ ID NO: 620616 - DNA, 120 bp, Artificial Sequence
  ENSG00000177731_35 (sequence is synthesized)
gtggacctcagcggcaacgacttcaagatggtgagagttggttctgtggctccccaaaggctcccatgggctggaggagccatagaaggtggtgagcaggggctctgtgcttcaccttga

SEQ ID NO: 620617 - DNA, 120 bp, Artificial Sequence
  ENSG00000177731_36 (sequence is synthesized)
agaggtgtgatgttgccactagccctgcccatccaaggaggcgcccatagacttacttacaaatgggaattctcgggccaggagcaaggggctgttcccaggcacccatgcaaccgtatc

SEQ ID NO: 620618 - DNA, 120 bp, Artificial Sequence
  ENSG00000177731_37 (sequence is synthesized)
tcccctgctgcccccacaggtctacatgtgggtggggacccagactagccaggtggagatcaagctgagcctgaaggcctgccaggtatatatccagcacatgcggtccaaggaacatga

SEQ ID NO: 620619 - DNA, 120 bp, Artificial Sequence
  ENSG00000177731_38 (sequence is synthesized)
agttttgtcctggccctcctggggcccagaatccagtaggagagacaaatcttaggccaacacttttgtcacgggggggcttaaaattcccattctatgggtgaagaaattgaggcacaa

SEQ ID NO: 620620 - DNA, 120 bp, Artificial Sequence
  ENSG00000177731_39 (sequence is synthesized)
gcccagtaccttcctctaagatggctcagtccccaactccagagttttgttcagggaggccaggtgggaggtgggcaggctgcaggaggtggtccaggcacaggggcagtacaaagcccc

SEQ ID NO: 620621 - DNA, 120 bp, Artificial Sequence
  ENSG00000177731_40 (sequence is synthesized)
cagggaggtgtgcaagaagaggccgggtgagtgagggagggaagctgcaggggtagttgggccagtgtggctgaggccttcctggatggtgcagagttgtggaggcaggcagggactctg

SEQ ID NO: 620622 - DNA, 120 bp, Artificial Sequence
  ENSG00000177731_41 (sequence is synthesized)
gacaccccacccaccctgctgagcctgtgctccccattccggcccaggaacacttgtctgtgagccacaacaacctgaccacgcttcatggggagctgtccagcctgccatcgctgcgcg

SEQ ID NO: 620623 - DNA, 120 bp, Artificial Sequence
  ENSG00000177731_42 (sequence is synthesized)
tgaacctgtcccgaaatcagctcacctcactgcccgtgcgtctgaggccctcagtagggggatgggaggaaggccgtgagcctggccctgacctcccacccctgcccgttccccctccag

SEQ ID NO: 620624 - DNA, 120 bp, Artificial Sequence
  ENSG00000177731_43 (sequence is synthesized)
gcacccggtgcctggctgggggaggacgcagtggcgagcaagcgtcagggagccaggcctgaatccttgctgatgccccatcccttccacaggtgcatccagatcaacaccgactccagc

SEQ ID NO: 620625 - DNA, 120 bp, Artificial Sequence
  ENSG00000177731_44 (sequence is synthesized)
acacagaggagccagggcaggcaggggccctgggctggactggcctttcccgcaggttatcaacgaaggtgctccaacgagaagggctactttgcagtgactgagaaatgctccgacttt

SEQ ID NO: 620626 - DNA, 120 bp, Artificial Sequence
  ENSG00000177732_0 (sequence is synthesized)
ccgcggcggagccagaggctgcaggaagagcccgcgggggcccggagggtgcgattcctcggcccccgcaaaacaatgtgtgttgtgagccaggacgcaacttgccggaggcggcggggg

SEQ ID NO: 620627 - DNA, 120 bp, Artificial Sequence
  ENSG00000177732_1 (sequence is synthesized)
ggacgcaacttgccggaggcggcgggggcgcgccgagcccgcctgagaccgcgctgaccttctccccccgccgtccgttgggcccgagcgcccagctcctcgctccccagttcgcggggg

SEQ ID NO: 620628 - DNA, 80 bp, Artificial Sequence
  ENSG00000177732_2 (sequence is synthesized)
aggatgcggacggcccccggcggcgtctagcggccccgggcccaggcgcgatggtgcagcagcggggcgcgagggccaag

SEQ ID NO: 620629 - DNA, 120 bp, Artificial Sequence
  ENSG00000177732_3 (sequence is synthesized)
cgggacggcgggccgccgcccccgggacccgggccggccgaggagggggcgcgcgagcccggctggtgcaagaccccgagcggccacatcaagaggccgatgaacgcattcatggtgtgg

SEQ ID NO: 620630 - DNA, 120 bp, Artificial Sequence
  ENSG00000177732_4 (sequence is synthesized)
tcgcagcacgaacggcggaagatcatggaccagtggcccgacatgcacaacgccgagatctccaagcgcctgggccgccgctggcagctgctgcaggactcggagaagatcccgttcgtg

SEQ ID NO: 620631 - DNA, 120 bp, Artificial Sequence
  ENSG00000177732_5 (sequence is synthesized)
cgggaggcggagcggctgcggctcaagcacatggcggattacccggactacaagtaccggccgcgcaaaaagagcaagggggcgcccgccaaggcgcggccccgcccccccggtggtagc

SEQ ID NO: 620632 - DNA, 120 bp, Artificial Sequence
  ENSG00000177732_6 (sequence is synthesized)
tcaagcccgggccgcagctgcctggccgcgggggccgccgagcagcgggagggcctttggggggcggggcggcggcgcccgaggacgacgatgaagacgacgacgaggagctgctggaag

SEQ ID NO: 620633 - DNA, 120 bp, Artificial Sequence
  ENSG00000177732_7 (sequence is synthesized)
gaggagctgctggaagtgcgcctggtcgagaccccggggcgggagctgtggaggatggtcccggcgggacgggccgctcggggacaagcggagcgcgcccaagggccgtcgggcgagggg

SEQ ID NO: 620634 - DNA, 120 bp, Artificial Sequence
  ENSG00000177732_8 (sequence is synthesized)
gcggccgccgccgccgccgcctccccgacaccgtcggaggacgaggagccggaggaagaggaggaggaggcggcagcggctgaggaaggtgaagaggagacggtggcgtcgggggaggag

SEQ ID NO: 620635 - DNA, 120 bp, Artificial Sequence
  ENSG00000177732_9 (sequence is synthesized)
tcgctgggctttctgtccaggctgccccctggcccggccggcctggactgcagcgccctggatcgcgacccggacctgcagcctccctcgggcacgtcgcacttcgagttcccggactac

SEQ ID NO: 620636 - DNA, 120 bp, Artificial Sequence
  ENSG00000177732_10 (sequence is synthesized)
tgcacccccgaggttaccgagatgatcgcgggggactggcgcccgtctagcatcgcagacctggttttcacctactgagcccaccgtcagcggggcgcgcacgcccccaaaccagctgtt

SEQ ID NO: 620637 - DNA, 120 bp, Artificial Sequence
  ENSG00000177732_11 (sequence is synthesized)
tacatacaggaatcaggtattggggcccctcggaggccgaggctggcaccccatctcccgcgcagcctgccccctcctggacgtgcccatcccccctcagatccagacatgcccctcccc

SEQ ID NO: 620638 - DNA, 120 bp, Artificial Sequence
  ENSG00000177732_12 (sequence is synthesized)
cgcagacacaccccaaggcagcccaacccccaccccttccccgacacccaagcccctccccacgtcgccccctcctgcacagccaccagcagccagccccctccgatacacctcccgtcc

SEQ ID NO: 620639 - DNA, 120 bp, Artificial Sequence
  ENSG00000177732_13 (sequence is synthesized)
tctcctacagacctgcacccctccccccttttgcacacgcccctcctcgtggccggaggacccgccccctcctttgctccggaatctctcctccctcgcccggcccgccttctctgggtt

SEQ ID NO: 620640 - DNA, 120 bp, Artificial Sequence
  ENSG00000177732_14 (sequence is synthesized)
ggttaggggggcgatgcggccgggtggcaacgcacgcgcctcctgcgcccctcccttccctggggggaggggcgcaccccttttatccccggagcgctagggcccgcccctccgctgggg

SEQ ID NO: 620641 - DNA, 120 bp, Artificial Sequence
  ENSG00000177732_15 (sequence is synthesized)
cccccttcgtgcgcatgcttaatgcttctggggaggagggggctggtcccagcggagccgcactcttcgcccgctccgggcaaaagcgggggcgagtgtagagcgatcctgggaaatcct

SEQ ID NO: 620642 - DNA, 120 bp, Artificial Sequence
  ENSG00000177732_16 (sequence is synthesized)
ttgatccgggagccctaggtttcctctccagccaacggggcgtcgctgccttaatgggaggagcactcggaagggttggtttgggcctgaaactctcccaagtggcatagccccttttcc

SEQ ID NO: 620643 - DNA, 120 bp, Artificial Sequence
  ENSG00000177732_17 (sequence is synthesized)
ggtatggggtctcctacacccacgcgcaccacctctccggtcgcgtggctgcctctacagcctacctatacgtccctttttccccccaactgggaattgagaggtaaggtctttctctgg

SEQ ID NO: 620644 - DNA, 120 bp, Artificial Sequence
  ENSG00000177732_18 (sequence is synthesized)
aaatccagcagtagaggaagggaccacccaagaaaactaaaaaccaaggcaccttaccagtctgtctggggacaggatccctgctgcaccttccccaccccctcctgggaagtgccccct

SEQ ID NO: 620645 - DNA, 120 bp, Artificial Sequence
  ENSG00000177732_19 (sequence is synthesized)
tcagtactcaagctgcagtatacagcgggaaaaactgaggcactttggtgctaggggtttgggactgaggcgtggagagcagatgtgatggcaggaagactctcgcttttaaacatctgg

SEQ ID NO: 620646 - DNA, 120 bp, Artificial Sequence
  ENSG00000177732_20 (sequence is synthesized)
tttgggagagaccatcgacttggccagtgagactgagaatggattccgagtagtgatgggccgtttgcacctcggtttttccacgtgagaaatggggagaacgctgctgttaggaggaag

SEQ ID NO: 620647 - DNA, 120 bp, Artificial Sequence
  ENSG00000177732_21 (sequence is synthesized)
ttgtgtccagttcagggtgccctcgggagccctgtccctgttgctgtggcccctctcacgccgccatctctctgccccgccccgcccctccggcctccccacaccccccttgccctcact

SEQ ID NO: 620648 - DNA, 120 bp, Artificial Sequence
  ENSG00000177732_22 (sequence is synthesized)
acctgtatctcaccggcgtgtgttcaccctcccgggtggctcacacactctcattcacacacacaaatctcaggaacaaacggtcccagagtcctccggacccctgcccagggtctctgc

SEQ ID NO: 620649 - DNA, 120 bp, Artificial Sequence
  ENSG00000177732_23 (sequence is synthesized)
aggtctctgccccacgcgttcccgtcgctgacaaagccaccagctgcctcctttaagcttggtgctccggctctgggcctttcttgcgctctattttttttttttttttttttaagaaaa

SEQ ID NO: 620650 - DNA, 120 bp, Artificial Sequence
  ENSG00000177732_24 (sequence is synthesized)
acaacaacaacaaaaaaagacaatgaaaaaaaaaacgtcatgtgagtgaagagatgtcactgtctgtggtcttggagaactagtctcgtagctgaggggtggggtccctctgtctggggc

SEQ ID NO: 620651 - DNA, 120 bp, Artificial Sequence
  ENSG00000177732_25 (sequence is synthesized)
actggcacccacagcaggactccgccagtctgatgccaggactgaataaagtgtatttgccccgaccttgccctgtggttctgcatgtctgtgctcttcctcaaccctccctaaacagtt

SEQ ID NO: 620652 - DNA, 120 bp, Artificial Sequence
  ENSG00000177732_26 (sequence is synthesized)
tgccagattcaagtccgtgtgatttgggcccgagctgggtgtcccagggcaagccaccttgcctgtctaggcctctatgtcaggactccctggccttcatgaagaatagcaaactcatcc

SEQ ID NO: 620653 - DNA, 120 bp, Artificial Sequence
  ENSG00000177732_27 (sequence is synthesized)
ctgtagggaccaggcaggtaacatagacgagtgactctgggtggacagtggtgtcatgacccacttcaaggggcctacctcctgccagttgtgaccctgtgggaatgcagtccacagtgg

SEQ ID NO: 620654 - DNA, 120 bp, Artificial Sequence
  ENSG00000177732_28 (sequence is synthesized)
ccaggtggccagatttttcaagaaaagctggatggatgtttctgagtcatcttaatttcaaaatgagactcatattttaaaatttctgtgggccaaatgaaacaagtatgcaggcaggtc

SEQ ID NO: 620655 - DNA, 120 bp, Artificial Sequence
  ENSG00000177732_29 (sequence is synthesized)
tggtccgagggggctggcttggccatgcctttctgtgcctttaatgaggactaagaagcaagattgggccacactgtctggactcaaagcccagctccaccactgagcacccgtgtgact

SEQ ID NO: 620656 - DNA, 120 bp, Artificial Sequence
  ENSG00000177732_30 (sequence is synthesized)
ctttccatatgtataacgtggggataataataatagctgcttcacaggatgaaatgaagtttgaggtgagaagcattcaccatggtgcccatcgtgttactccattgtcagaggaggaaa

SEQ ID NO: 620657 - DNA, 120 bp, Artificial Sequence
  ENSG00000177732_31 (sequence is synthesized)
cggggtcaggcaggaaagcaacttaaaggagggcctgcaagcagccagggtcagagacagggcttggttctgcttcctggtgaagcatggcttcggggtgctgcctctccctccctgttt

SEQ ID NO: 620658 - DNA, 120 bp, Artificial Sequence
  ENSG00000177732_32 (sequence is synthesized)
gaatctgcagattgtgttaggcccccagctgagggcctggagtggtgggattggtcccagtgcctggcgcacattggcctgcagagtagattaactgaatgaccaaagagcaacagaagt

SEQ ID NO: 620659 - DNA, 120 bp, Artificial Sequence
  ENSG00000177732_33 (sequence is synthesized)
ctagtgattcttgtctttgaggttctgactggtgttttacaactgagtccaaggcttttccctcctttgtccctctgacacccctccccctaattctcatctgtcagatccagtgtattc

SEQ ID NO: 620660 - DNA, 120 bp, Artificial Sequence
  ENSG00000177732_34 (sequence is synthesized)
ctaagctgggacaaagcctctgttttcccagtaggagccagggctgagtgtggaaattacagtgactgcttcttctcagcttctctggttgaaagcaagctggcgaagtaagaggaggta

SEQ ID NO: 620661 - DNA, 120 bp, Artificial Sequence
  ENSG00000177732_35 (sequence is synthesized)
gagttgagaaggtgtggaagatagggacagctgcccccagaactcccttcaagggaggacttccccagctatgggaagtgccatcagggtggccgcagctgcagagagccacttcacctg

SEQ ID NO: 620662 - DNA, 120 bp, Artificial Sequence
  ENSG00000177732_36 (sequence is synthesized)
agaccacgcccttcctggggcagcctgtatctggtgtctgagtgaggcatggtataaacacctggtcatttcaatccaacatgggacggacactgacagacagtactcccagcaggccca

SEQ ID NO: 620663 - DNA, 120 bp, Artificial Sequence
  ENSG00000177732_37 (sequence is synthesized)
ggccagccagggcttcgtcaggcctgcagcacaatttgacttcctatgcccaggcctgcttcctcttcttcctcttcttttcacaggtgcttattcctaataaacatcttgcaacccaaa

SEQ ID NO: 620664 - DNA, 120 bp, Artificial Sequence
  ENSG00000177733_0 (sequence is synthesized)
ctctttgtgtggtgcccagataggggagcggaggtggcggcggcggcggtagcggtggccttggttgtcttccagtctcctcggctcgccctttagccggcaccgctccccttccctccc

SEQ ID NO: 620665 - DNA, 120 bp, Artificial Sequence
  ENSG00000177733_1 (sequence is synthesized)
ccttcctctcttccttccttccctccccttccctttttcccttccccgtcggtgagcggcgggggtggctccagcaacggctgggcccaagctgtgtagaggccttaaccaacgataacg

SEQ ID NO: 620666 - DNA, 120 bp, Artificial Sequence
  ENSG00000177733_2 (sequence is synthesized)
gcggcgacggcgaaacctcggagctcgcagggcgggggcaaggcccgggccttggagatggagaattctcagttgtgtaagctgttcatcggcggcctcaatgtgcagacgagtgagtcg

SEQ ID NO: 620667 - DNA, 120 bp, Artificial Sequence
  ENSG00000177733_3 (sequence is synthesized)
ggcctgcgcggccactttgaggcctttgggactctgacggactgcgtggtggtggtgaatccccagaccaagcgctcccgttgctttggcttcgtgacctactccaatgtggaggaggcg

SEQ ID NO: 620668 - DNA, 120 bp, Artificial Sequence
  ENSG00000177733_4 (sequence is synthesized)
gacgccgccatggccgcctcgccccatgccgtggacggcaacactgtggagctgaagcgggcggtgtcccgggaggattcggcgcggcccggtgcccacgccaaggttaagaagctcttt

SEQ ID NO: 620669 - DNA, 120 bp, Artificial Sequence
  ENSG00000177733_5 (sequence is synthesized)
gtcggaggccttaaaggagacgtggctgagggcgacctgatcgagcacttctcgcagtttggcaccgtggaaaaggccgagattattgccgacaagcagtccggcaagaagcgtggattc

SEQ ID NO: 620670 - DNA, 120 bp, Artificial Sequence
  ENSG00000177733_6 (sequence is synthesized)
ggcttcgtgtatttccagaatcacgacgcggcagacaaggccgcggtggtcaagttccatccgattcagggccatcgcgtggaggtgaagaaagcagtccccaaggaggatatctactcc

SEQ ID NO: 620671 - DNA, 120 bp, Artificial Sequence
  ENSG00000177733_7 (sequence is synthesized)
ggtgggggtggaggcggctcccgatcctcccggggcggccgaggcggccgggggcgcggcggtggtcgagaccagaacggcctttccaagggcggcggcggcggttacaacagctacggt

SEQ ID NO: 620672 - DNA, 120 bp, Artificial Sequence
  ENSG00000177733_8 (sequence is synthesized)
ggttacggcggcggcggaggcggcggctacaatgcctacggaggcggcggcggcggttcgtcctacggtgggagcgactacggtaacggcttcggcggcttcggcagctacagccagcat

SEQ ID NO: 620673 - DNA, 120 bp, Artificial Sequence
  ENSG00000177733_9 (sequence is synthesized)
cagtcctcctatgggcccatgaagagcggcggcggcggcggcggtggaggcagtagctggggcggtcgcagtaatagtggaccttacagaggcggctatggcggtgggggtggctatgga

SEQ ID NO: 620674 - DNA, 120 bp, Artificial Sequence
  ENSG00000177733_10 (sequence is synthesized)
ggcagctccttctaaaagaaaatttaaaatgcctgggagtggctataggggtagctctttccaacagcccaagtggggtcaactcctaagccccaccccctcacacacaccgccttccct

SEQ ID NO: 620675 - DNA, 120 bp, Artificial Sequence
  ENSG00000177733_11 (sequence is synthesized)
gttttgcccttgggggagccacttctaaggctgcttacccttgggggtgttcctctatttgcctgccacctctcttgtctctccctctgaagatggactcggccccacatacacattttt

SEQ ID NO: 620676 - DNA, 120 bp, Artificial Sequence
  ENSG00000177733_12 (sequence is synthesized)
gtgttacagtcattgatggactctatttttttattattacttggaccttggtcgtttttatactagcaaaatgtcttgttttaatttgtgttttttggggggagggagggagtgaacttg

SEQ ID NO: 620677 - DNA, 120 bp, Artificial Sequence
  ENSG00000177733_13 (sequence is synthesized)
ctgattctgtagcaaaacctgggtgggggttggggtggggggtagtttactttgttgtaaggacttgataacctggctacagcgttttctatgaaatctacttggatcccatgcctgaaa

SEQ ID NO: 620678 - DNA, 120 bp, Artificial Sequence
  ENSG00000177733_14 (sequence is synthesized)
tttggaagcatatgtacaaaaatcatttttacgttttatttttaataaatcattgtgtttgaccgtacatgtctaacattttttttctaggatccattccgtaccgttttttaagggata

SEQ ID NO: 620679 - DNA, 120 bp, Artificial Sequence
  ENSG00000177733_15 (sequence is synthesized)
tttgtttaagactttacgtgttaattctttattcttgatgtgtacttagagaaacttaagaggtcctgtggtttttttcccctctcctgttgccctgctagttgcgtgttgaattatatc

SEQ ID NO: 620680 - DNA, 120 bp, Artificial Sequence
  ENSG00000177733_16 (sequence is synthesized)
ccttacaggcaaaacttttgaagtggtggatgtggctttttaaactcttaagtttctgtgcatccatctcttgtactaagcgaattgtttatcatcttgacatggttggtcatttctatg

SEQ ID NO: 620681 - DNA, 120 bp, Artificial Sequence
  ENSG00000177733_17 (sequence is synthesized)
acaatttacttcaaactgtgtactgtgtagttctatatagtttgtgttaagcatgtcattcatataaactgtttaaaatttttcagatggcctagtttcatccctcttactggtttgtct

SEQ ID NO: 620682 - DNA, 120 bp, Artificial Sequence
  ENSG00000177733_18 (sequence is synthesized)
gtaatgaatggttaaaaataagggttatattttaccctcaaatgcgtttttgtactttcagagcaggtttaaacgttttttttttttttttcctatatccgaactgttggcctcatggaa

SEQ ID NO: 620683 - DNA, 120 bp, Artificial Sequence
  ENSG00000177733_19 (sequence is synthesized)
atccctttcccgatctttgtagcaccatctactggcagaatggcagagtagctgcgaaacaatttgtttaaaaacttgcttaagacaattgcatcagatttggaagttttgccatcaaaa

SEQ ID NO: 620684 - DNA, 120 bp, Artificial Sequence
  ENSG00000177733_20 (sequence is synthesized)
ttctttgcagaattggaagttaacacatttgcttgtaactgagatgggcttcacaggaatgtagttgccagttcatatcacaatagccctttctatatgaggtttgaaaatgtaaactgc

SEQ ID NO: 620685 - DNA, 120 bp, Artificial Sequence
  ENSG00000177733_21 (sequence is synthesized)
tatgcatagcttgggcaatagccctaaattgctatgacaactaatgaaccagctacgtatactggtattttaggtgcaagttgtaaagcaaaatatctgtgtattctgcttggttaacaa

SEQ ID NO: 620686 - DNA, 120 bp, Artificial Sequence
  ENSG00000177733_22 (sequence is synthesized)
atgtatatttgtagccctttcctgcaatagcattcaagttgttgtttataagagaagaacaaaagtgataataggtgaaaattgcctttctggatagaaatagagaatagcaacgtttat

SEQ ID NO: 620687 - DNA, 120 bp, Artificial Sequence
  ENSG00000177733_23 (sequence is synthesized)
ggatatcacaaataaagaattcaattctttacatgattgagtgagagtatgtataacctggtgggtgggttcagagtaccttttaatctagtatgcttaacttgatgttaatatttaact

SEQ ID NO: 620688 - DNA, 120 bp, Artificial Sequence
  ENSG00000177733_24 (sequence is synthesized)
taaatatttgacttacatgttgacgttgaaggctcaaagctatactaagaagctttctgaaagattgggctttaaaataaaataatattttaatattgaaccattttttaacttcttgtc

SEQ ID NO: 620689 - DNA, 120 bp, Artificial Sequence
  ENSG00000177733_25 (sequence is synthesized)
actgttcaattcctaaggtctagttcttgccagttttttttttttttttcctgattggcagggcttttaaagaagtaagaagaaaggttaagattattaggctaggttatagctgctcag

SEQ ID NO: 620690 - DNA, 120 bp, Artificial Sequence
  ENSG00000177733_26 (sequence is synthesized)
tagtcattttgacaaagggtagcggatggttggtacaaatagtgttatatcctctatgacaaacggggtggatgtttttacacattgaggtaatacatagtcaaatcctttgctctcaaa

SEQ ID NO: 620691 - DNA, 120 bp, Artificial Sequence
  ENSG00000177733_27 (sequence is synthesized)
tagttgtacactttccatacatttctgtcttattttttaattctagtgatacacaaattacatgtgggctacttcatttggtaatttggtccagctttttggtggctgtagagtggcctc

SEQ ID NO: 620692 - DNA, 120 bp, Artificial Sequence
  ENSG00000177733_28 (sequence is synthesized)
taggatacagaaaatgattctctgaaatttttcgttgtaattgttaaatactactctgcttgacttactcagttttggtgggaagatctgggtcaattggaatagtacacctttctcagg

SEQ ID NO: 620693 - DNA, 120 bp, Artificial Sequence
  ENSG00000177733_29 (sequence is synthesized)
gttttcagtttaataaggttgtcatattattcccaacatgggaatatagtggcttctaaagtttgcaaatgaattatgtaaaaggattttctgtgtattaggaaggcaacctgttctgtt

SEQ ID NO: 620694 - DNA, 120 bp, Artificial Sequence
  ENSG00000177733_30 (sequence is synthesized)
catggtatattaacacttcattgtcatgtgtctacccttaaaattgctatttgtagtgaagaaaaaagcatagtggtatttagtcacttctgggttcctcttgtcagtttatatgcaaac

SEQ ID NO: 620695 - DNA, 120 bp, Artificial Sequence
  ENSG00000177733_31 (sequence is synthesized)
attttggcatgtgggacttggggaggagggacaattggttgtatgttttgaccacttccacctatgaaaattatctgaacattattcagatttaagagttcatgggagcaggtggtacag

SEQ ID NO: 620696 - DNA, 120 bp, Artificial Sequence
  ENSG00000177733_32 (sequence is synthesized)
aacctagtgttgaatataatttttgtgccatgcttgaatgtattttgacggattagcaaaataaaagtgaacctcctatttttcatcttaatgtgaagatctttggcatttacattcttt

SEQ ID NO: 620697 - DNA, 120 bp, Artificial Sequence
  ENSG00000177733_33 (sequence is synthesized)
taaaagtataaattcagtagtcattagttgaaagtggtttgaaaggctgttagagatgatacaggttgagtattccttatctgaaattcttgggcccagaagtgttttgagttttagatt

SEQ ID NO: 620698 - DNA, 120 bp, Artificial Sequence
  ENSG00000177733_34 (sequence is synthesized)
tttttcaatttttgaatatttccattatgtttaccagctgagcagctctcatacaaaaatgtaaaatccaaactgcttcaatgagcatttcctttgaatgtcatgtctgcactcaaaaaa

SEQ ID NO: 620699 - DNA, 120 bp, Artificial Sequence
  ENSG00000177733_35 (sequence is synthesized)
tttcggattttggagcattttagattttttgattggaatatctgtagtgtttttcaggtcatttaaaaagctctcattggtactgatttactgtatccaaaaaaaagcctgcaagtggtt

SEQ ID NO: 620700 - DNA, 120 bp, Artificial Sequence
  ENSG00000177733_36 (sequence is synthesized)
gatttggaacgtttcatattcaaatctaattttcataatttttaagtaaacctaaaagattgaggatacttgagaaatttgcatttatgatttccttcaaaaccagaagtgatggtatca

SEQ ID NO: 620701 - DNA, 120 bp, Artificial Sequence
  ENSG00000177733_37 (sequence is synthesized)
gttattggatttgtaaacttagtttaccttttaagtgtgcttaagttttgagagtttgcattttaggttaaattttgtctgcccgcgtctgctgattgcagataggcatttggatgttgg

SEQ ID NO: 620702 - DNA, 120 bp, Artificial Sequence
  ENSG00000177733_38 (sequence is synthesized)
atttggagcagaactgcatctagactacacggattttacccaaaaagacagcacttgcacttaggctaagtgtctttctccatcgtaaccaatttattgaatcactttaagagtgatcat

SEQ ID NO: 620703 - DNA, 120 bp, Artificial Sequence
  ENSG00000177733_39 (sequence is synthesized)
tggggaaattttcctcctcagccttattttggccttttgaaacagcaacaaagactgcctagtcaaataactccttagctgtcctgcttttgagtgaacttcatatttgccttgaatgag

SEQ ID NO: 620704 - DNA, 120 bp, Artificial Sequence
  ENSG00000177733_40 (sequence is synthesized)
aatttaaatgttacaaggtaaaacatttattataaaaagatatttgaaagctgctatttaaaaaggaattccaaagtaggaagactagaagggcaattctctattttccacctatttttt

SEQ ID NO: 620705 - DNA, 120 bp, Artificial Sequence
  ENSG00000177733_41 (sequence is synthesized)
ttactttgatttgaagccagatgatttgaaccttcagagagggaaaggattcaggaagacacctttggtagttattcttaactgtttccttctctattcaggcaggctttctttgtctct

SEQ ID NO: 620706 - DNA, 120 bp, Artificial Sequence
  ENSG00000177733_42 (sequence is synthesized)
ttaattcttttaccactttgtatggtttacttaaaaaatctatctgaaatagctatcatttcctgctataaagttctcaagtgtaaacttttgccatttaaacagtgtgcttatttccca

SEQ ID NO: 620707 - DNA, 120 bp, Artificial Sequence
  ENSG00000177733_43 (sequence is synthesized)
gtgtttaccgtcaatttcattgggtgttaggcacctttgtgtaagacagttctataatgtggaggtacacagcagtgagacaaacatggttgctgtcttcatataccttgcgttctggtt

SEQ ID NO: 620708 - DNA, 120 bp, Artificial Sequence
  ENSG00000177733_44 (sequence is synthesized)
ggaattcaatttattttgaaatgggaattcaatttattttgagatgatgcatcttttcctttacagcattgtgtcacaatctcatattgttcacaccatcaaaattggagttagctccat

SEQ ID NO: 620709 - DNA, 120 bp, Artificial Sequence
  ENSG00000177733_45 (sequence is synthesized)
tgtcattgaatgtacattctctgatgaaaattaagactcttttctccttaattgattactttttagaaatcaaaggtgtattttgtctttgatgcttacgttgcaaatgtaatttgcttc

SEQ ID NO: 620710 - DNA, 120 bp, Artificial Sequence
  ENSG00000177733_46 (sequence is synthesized)
atagtgggtatctgatttaatatttcatagcccttaaggacgtaaatttgggcatccaatagaccaaattctgttcctgacacagtcactttctagcactgcgaccttggacaaactggc

SEQ ID NO: 620711 - DNA, 120 bp, Artificial Sequence
  ENSG00000177733_47 (sequence is synthesized)
ccgagcctcacttgccttatttgtaaaaaaataggctatggtaatacctgctacataggattgttgggcagattcagtgaaagaatgcatataaagaagggcttactgtagtctctggta

SEQ ID NO: 620712 - DNA, 120 bp, Artificial Sequence
  ENSG00000177733_48 (sequence is synthesized)
cacagtaattttactatatggcccctaatgaagaggtgggacagactagcaaaaggcatacttttatatcttagtacccgagatatgcatggtctttaggctttgctctttacttgctgg

SEQ ID NO: 620713 - DNA, 120 bp, Artificial Sequence
  ENSG00000177733_49 (sequence is synthesized)
gtgagcttccatgtggtagttctctaaatcactgctgcttcaactctagtaggagagagatgaattctgctagccatctgtaatgttttaagtatttgttaatattaggaaggtataaat

SEQ ID NO: 620714 - DNA, 120 bp, Artificial Sequence
  ENSG00000177733_50 (sequence is synthesized)
aatgtgagtgttgaggagaggtgacttcaggtaggaagaaggatcaagagaggcattgtggagcatataacatttaaccttaaaagataggtcttatagagaaggtgggaggagaaagag

SEQ ID NO: 620715 - DNA, 120 bp, Artificial Sequence
  ENSG00000177733_51 (sequence is synthesized)
ggcattttaggtggaggacagataggcagaaacatggagcgtatttggagaagtatgcatattggatgccaaacactaggtacatttacaaatgttctcattgcatcattcagtaacctt

SEQ ID NO: 620716 - DNA, 120 bp, Artificial Sequence
  ENSG00000177733_52 (sequence is synthesized)
cacagataaggttgctaaatctcatgccagaaaagtaactcccaaggacccccagctggtgacatggtagaactgagagttgaatccaagtttgaccaattctagttgtttcgctccttc

SEQ ID NO: 620717 - DNA, 120 bp, Artificial Sequence
  ENSG00000177733_53 (sequence is synthesized)
tactaagcttcattgacttccagctaacaaatgtctaatttgtactaagataaaagagagttgtgagaaataaattgagaaaatgaagttggaaccaggttactgaggtctttgagtagt

SEQ ID NO: 620718 - DNA, 120 bp, Artificial Sequence
  ENSG00000177733_54 (sequence is synthesized)
aggctaaggagtttggacttagggtaggcagtaaaagtcattaaaggtttttgagcaacaataatggtagtgaaactaattcacaaagattagtccagtagcactgagtaacataaatgg

SEQ ID NO: 620719 - DNA, 120 bp, Artificial Sequence
  ENSG00000177733_55 (sequence is synthesized)
cagtgggggatgtttcaaagtggcaagtttgctaagacaactgatgttaaccaggtaagagaatgagagcatgaacaaagagcaatggaaatagactgacaaagaagttgaggtaagttg

SEQ ID NO: 620720 - DNA, 120 bp, Artificial Sequence
  ENSG00000177733_56 (sequence is synthesized)
tgaaagcataattgacaaatatttggatatatgaagaatgaggaagagagagtagattaatcaaaattactgtgtgagaggatggtgatgccactggtaataggaagagaagatttagag

SEQ ID NO: 620721 - DNA, 120 bp, Artificial Sequence
  ENSG00000177733_57 (sequence is synthesized)
ggaagatttggacatagttgaagatgctggtagcacattgaagcattgtgtcttgcgcatatagctttacaaaatggccattgtgctggatattctttttgcccttcctgatctattttc

SEQ ID NO: 620722 - DNA, 120 bp, Artificial Sequence
  ENSG00000177733_58 (sequence is synthesized)
catctttatctctcttgttctgtgttcctgggaggctgacaaataaagaactgcatactctcttttctggctttattcatggtgggtttggacagtgatagaaaagtgaggctgaaatat

SEQ ID NO: 620723 - DNA, 120 bp, Artificial Sequence
  ENSG00000177733_59 (sequence is synthesized)
ttgctccttctctttctcatatacttagcaagagattgtgagtggccacagctctgctccagtggccctcttatagctctaggtcttttctggcttctcgtaactgtctcctattgctag

SEQ ID NO: 620724 - DNA, 120 bp, Artificial Sequence
  ENSG00000177733_60 (sequence is synthesized)
attctctagtcccaagaaggttcaaaccttgttgatttgccttaactgtgcccatacccttgtaaatagttccttttattaaaactcttcaataactgaatatactgtggtcatctcttc

SEQ ID NO: 620725 - DNA, 120 bp, Artificial Sequence
  ENSG00000177733_61 (sequence is synthesized)
agtgaaattaaaaaaaaaaacttctttcacattttcttatgacttgatcttcccacaccaccaaacgtgaagatctagctatttgcactaggttactatccctaaattcagtgcctccct

SEQ ID NO: 620726 - DNA, 120 bp, Artificial Sequence
  ENSG00000177733_62 (sequence is synthesized)
gtttcttagtatgtcaagttaaaatttgttactcttctgctgggtgattgtgctggaaatacagaagaaaaagacaaaaatccctgccctcaaagagcttatattttactggggagagac

SEQ ID NO: 620727 - DNA, 120 bp, Artificial Sequence
  ENSG00000177733_63 (sequence is synthesized)
aggcaataagacataatcaattatatggtatgttagaagatgagaagtatagaaaaaattagggtgaggaatggcgattgttgcaagggatgtttgtgaggatagcatactttaaaatag

SEQ ID NO: 620728 - DNA, 120 bp, Artificial Sequence
  ENSG00000177733_64 (sequence is synthesized)
gtggtatgggtaggtctctcagaaagtgacatttgagcaaagacttgaaggaaatgtgggagtgagcaatataggtatgggaagagcattctaggtagaggattaggaagagcaaaagcc

SEQ ID NO: 620729 - DNA, 120 bp, Artificial Sequence
  ENSG00000177733_65 (sequence is synthesized)
ctgaagcaggactgtgtctggcctctgaagaaatgcaaattgttcagggttgttggacctgaaggaagaggaggaaaggaataatgaggccagaggggccagatcatgtagggatttgta

SEQ ID NO: 620730 - DNA, 120 bp, Artificial Sequence
  ENSG00000177733_66 (sequence is synthesized)
ggttgttgtaaggattttggttttcactaaatgaatggtgaaccatttcagttttgagcagaggagttccatgatctgatttgaattttaaaagatgtgtttcccaaaattcctattcct

SEQ ID NO: 620731 - DNA, 120 bp, Artificial Sequence
  ENSG00000177733_67 (sequence is synthesized)
ttcatacagctgctttcaatgaaggtttataaggaaagcaatcagaactacttggataaggtataagtgatccacaatcttttcaactctaccataggtatctacatatatatgttgaga

SEQ ID NO: 620732 - DNA, 120 bp, Artificial Sequence
  ENSG00000177733_68 (sequence is synthesized)
gatgctgctttttggccaaaatgaatcttgaattgggggtgtgcagaaaaagttatatctggcctgaggctggtatcttttagagtggcctacttgcatggttggcccttatctgaacac

SEQ ID NO: 620733 - DNA, 120 bp, Artificial Sequence
  ENSG00000177733_69 (sequence is synthesized)
gtggatttaggggtattctcactgttcactaataaaggtggttcactgtacctagactgttcaaacaagatgatttatgctaaacacctgctttccttctgggagtatggaattttggta

SEQ ID NO: 620734 - DNA, 120 bp, Artificial Sequence
  ENSG00000177733_70 (sequence is synthesized)
catgccaggtaaaggatgtctatatgaccaaactcccaatgaaaaccttgcatactgagtccctaggcagaaacatccctcgtataaaaatgtgctctgtgtgaatcttcatgggaggga

SEQ ID NO: 620735 - DNA, 120 bp, Artificial Sequence
  ENSG00000177733_71 (sequence is synthesized)
gagatcctaaagaagcctgcacatggattcctccagattctgcttatgtctttttcctgtatgatccaactgtgtacacttactgtgtcactgtaataaactttagccatgagtacgata

SEQ ID NO: 620736 - DNA, 120 bp, Artificial Sequence
  ENSG00000177752_0 (sequence is synthesized)
accaatggatttgcttaaaatttctcacacaaagctacatttactggaggatctttctataaaaaataaacagaggatgtcaaacttggcacaatttgactctgatttttaccaatctaa

SEQ ID NO: 620737 - DNA, 120 bp, Artificial Sequence
  ENSG00000177752_1 (sequence is synthesized)
ttttactattgataaccaggagcagagtggtaatgactctaatgcctatggaaatctttatggatctagaaaacaacaagctggtgagcagcctcagcctgcctcctttgttccatcaga

SEQ ID NO: 620738 - DNA, 120 bp, Artificial Sequence
  ENSG00000177752_2 (sequence is synthesized)
gatgctcatgtcatcgggttacgcaggacaattttttcagccagcatccaactcagattattattcacaatctccttacattgacagttttgatgaagagcctcctttgctagaagaact

SEQ ID NO: 620739 - DNA, 120 bp, Artificial Sequence
  ENSG00000177752_3 (sequence is synthesized)
tggaatccattttgatcacatatggcaaaaaactttgacagtgttaaacccaatgaagccagtagatggcagcattatgaatgaaacggacctcactggacccattcttttttgcgtagc

SEQ ID NO: 620740 - DNA, 120 bp, Artificial Sequence
  ENSG00000177752_4 (sequence is synthesized)
tgtcgtacggctgtgtggccagcgtgctgggttactgcctgctccccatggtcatcctgtctggttgcgccatgttcttttcactgcagggcatctttggaatcatgtcatccctggtca

SEQ ID NO: 620741 - DNA, 120 bp, Artificial Sequence
  ENSG00000177752_5 (sequence is synthesized)
tcattggctggtgtagtctctcagcttccaagatcttcattgcagccttgcacatggaaggacagcagcttcttgttgcctacccttgtgccatactttatggactttttgccctcctaa

SEQ ID NO: 620742 - DNA, 120 bp, Artificial Sequence
  ENSG00000177752_6 (sequence is synthesized)
caattttctaaagaatgtttgagatggcatttcaagactctgtttgctgtccagattattttggaaatatattaacattcaaatttggtgatatgatttctgttttattgcttttgagag

SEQ ID NO: 620743 - DNA, 120 bp, Artificial Sequence
  ENSG00000177752_7 (sequence is synthesized)
agtaataagcagagagacaaagcagcacttaagggtggtgctctaatagcctgttggtttgaatgatgttttgcttttgagtttggtgcattaaaacatttcaaaatacttaaaatcaaa

SEQ ID NO: 620744 - DNA, 120 bp, Artificial Sequence
  ENSG00000177752_8 (sequence is synthesized)
agggatacagttgctgtactgatcaaccctgcttttctcaatagaggtatttctgagaaaagtaagtaaataaactcatatgtttactaaaaggaaatctctagtaagccttttgagaaa

SEQ ID NO: 620745 - DNA, 120 bp, Artificial Sequence
  ENSG00000177752_9 (sequence is synthesized)
tgcttctggtaatgtgtcacaggaagcaccagattttaatgcttgtcctttccagtgctggctttgaagcaatctgtataaatataagagaaactgtgtcaccttacatagtgaattttt

SEQ ID NO: 620746 - DNA, 120 bp, Artificial Sequence
  ENSG00000177752_10 (sequence is synthesized)
taagtgagagagaataatttaaccatagtgacaaaaatatgctaccattatgcattgcaacagctaaaaagtataaatttaaatagaatttcaaaaatcaagaagcagatcaaagcagga

SEQ ID NO: 620747 - DNA, 120 bp, Artificial Sequence
  ENSG00000177752_11 (sequence is synthesized)
cgaaggtaccccccgtaggatccggtggacaggactcaaacagatcctgtgaagcgaagacaatgaaccccggggagctctgcccaagtaccagatccggaagcaacccgaagcggcggc

SEQ ID NO: 620748 - DNA, 120 bp, Artificial Sequence
  ENSG00000177752_12 (sequence is synthesized)
gcagcttgccgacgtctgcacgccgcacgctgtcgtgacatcagcgcgtcttggcgccgggtagtggagtggtcactttgggaaagtcaggcaggaatgacttgtttctgtgatgtctgt

SEQ ID NO: 620749 - DNA, 120 bp, Artificial Sequence
  ENSG00000177752_13 (sequence is synthesized)
tcaactgggatgactcgaccagctggggacttgaaaatcgggcatctctttctctctcatcttgtagtcacagtctctccatgtggtctccccatacagcctcttcagcatcacaatctc

SEQ ID NO: 620750 - DNA, 120 bp, Artificial Sequence
  ENSG00000177752_14 (sequence is synthesized)
aggatgtcaaacttggcacaatttgactctgatttttaccaatctaattttactattgataaccaggagcagagtggtaatgactctaatgcctatggaaatctttatggatctagaaag

SEQ ID NO: 620751 - DNA, 120 bp, Artificial Sequence
  ENSG00000177791_0 (sequence is synthesized)
acagcagctcagtcctccaaagctgctggaccccagggagagctgaccactgcccgagcagccggctgaatccacctccacaatgccgctctcaggaaccccggcccctaataagaagag

SEQ ID NO: 620752 - DNA, 120 bp, Artificial Sequence
  ENSG00000177791_1 (sequence is synthesized)
gaaatccagcaagctgatcatggaactcactggaggtggacaggagagctcaggcttgaacctgggcaaaaagatcagtgtcccaagggatgtgatgttggaggaactgtcgctgcttac

SEQ ID NO: 620753 - DNA, 120 bp, Artificial Sequence
  ENSG00000177791_2 (sequence is synthesized)
caaccggggctccaagatgttcaaactgcggcagatgagggtggagaagtttatttatgagaaccaccctgatgttttctctgacagctcaatggatcacttccagaagttccttccaac

SEQ ID NO: 620754 - DNA, 120 bp, Artificial Sequence
  ENSG00000177791_3 (sequence is synthesized)
agtggggggacagctgggcacagctggtcagggattctcatacagcaagagcaacggcagaggcggcagccaggcagggggcagtggctctgccggacagtatggctctgatcagcagca

SEQ ID NO: 620755 - DNA, 120 bp, Artificial Sequence
  ENSG00000177791_4 (sequence is synthesized)
ccatctgggctctgggtctggagctgggggtacaggtggtcccgcgggccaggctggcagaggaggagctgctggcacagcaggggttggtgagacaggatcaggagaccaggcaggcgg

SEQ ID NO: 620756 - DNA, 120 bp, Artificial Sequence
  ENSG00000177791_5 (sequence is synthesized)
ctggcctatggggccaaagctgaacttcccaaatataagtccttcaacaggacggcaatgccctatggtggatatgagaaggcctccaaacgcatgaccttccagatgcccaagtttgac

SEQ ID NO: 620757 - DNA, 120 bp, Artificial Sequence
  ENSG00000177791_6 (sequence is synthesized)
ctggggcccttgctgagtgaacccctggtcctctacaaccaaaacctctccaacaggccttctttcaatcgaacccctattccctggctgagctctggggagcctgtagactacaacgtg

SEQ ID NO: 620758 - DNA, 120 bp, Artificial Sequence
  ENSG00000177791_7 (sequence is synthesized)
gatattggcatccccttggatggagaaacagaggagctgtgaggtgtttcctcctctgatttgcatcatttcccctctctggctccaatttggagagggaatgctgagcagatagccccc

SEQ ID NO: 620759 - DNA, 120 bp, Artificial Sequence
  ENSG00000177791_8 (sequence is synthesized)
attgttaatccagtatccttatgggaatggagggaaaaaggagagatctacctttccatcctttactccaagtccccactccacgcatccttcctcaccaactcagagctccccttctac

SEQ ID NO: 620760 - DNA, 120 bp, Artificial Sequence
  ENSG00000177791_9 (sequence is synthesized)
ttgctccatatggaacctgctcgtttatggaatttgctctgccaccagtaacagtcaataaacttcaaggaaaatgaactcattcttcctttgatatttgagagcagatgaaagccgagg

SEQ ID NO: 620761 - DNA, 120 bp, Artificial Sequence
  ENSG00000177807_0 (sequence is synthesized)
gctcctaactcctgcccgccccgtccgtccatctgtcccgctgccccgcggcccatccaaggggccactccacctcggacccaaggatggttttgaacttctgatctcaagtgatcctcc

SEQ ID NO: 620762 - DNA, 120 bp, Artificial Sequence
  ENSG00000177807_1 (sequence is synthesized)
tgcctcagcctcccaaagtgctgggatacagatgacgtcagttgccaaggtgtattacagtcagaccactcagacagaaagccggcccctaatgggcccagggatacgacggcggagagt

SEQ ID NO: 620763 - DNA, 120 bp, Artificial Sequence
  ENSG00000177807_2 (sequence is synthesized)
cctgacaaaagatggtcgcagcaacgtgagaatggagcacattgccgacaagcgcttcctctacctcaaggacctgtggacaaccttcattgacatgcagtggcgctacaagcttctgct

SEQ ID NO: 620764 - DNA, 120 bp, Artificial Sequence
  ENSG00000177807_3 (sequence is synthesized)
cttctctgcgacctttgcaggcacatggttcctctttggcgtggtgtggtatctggtagctgtggcacatggggacctgctggagctggaccccccggccaaccacaccccctgtgtggt

SEQ ID NO: 620765 - DNA, 120 bp, Artificial Sequence
  ENSG00000177807_4 (sequence is synthesized)
acaggtgcacacactcactggagccttcctcttctcccttgaatcccaaaccaccattggctatggcttccgctacatcagtgaggaatgtccactggccattgtgcttcttattgccca

SEQ ID NO: 620766 - DNA, 120 bp, Artificial Sequence
  ENSG00000177807_5 (sequence is synthesized)
gctggtgctcaccaccatcctggaaatcttcatcacaggtaccttcctggcgaagattgcccggcccaagaagcgggctgagaccattcgtttcagccagcatgcagttgtggcctccca

SEQ ID NO: 620767 - DNA, 120 bp, Artificial Sequence
  ENSG00000177807_6 (sequence is synthesized)
caatggcaagccctgcctcatgatccgagttgccaatatgcgcaaaagcctcctcattggctgccaggtgacaggaaaactgcttcagacccaccaaaccaaggaaggggagaacatccg

SEQ ID NO: 620768 - DNA, 120 bp, Artificial Sequence
  ENSG00000177807_7 (sequence is synthesized)
gctcaaccaggtcaatgtgactttccaagtagacacagcctctgacagccccttccttattctaccccttaccttctatcatgtggtagatgagaccagtcccttgaaagatctccctct

SEQ ID NO: 620769 - DNA, 120 bp, Artificial Sequence
  ENSG00000177807_8 (sequence is synthesized)
tcgcagtggtgagggtgactttgagctggtgctgatcctaagtgggacagtggagtccaccagtgccacctgtcaggtgcgcacttcctacctgccagaggagatcctttggggctacga

SEQ ID NO: 620770 - DNA, 120 bp, Artificial Sequence
  ENSG00000177807_9 (sequence is synthesized)
gttcacacctgccatctcactgtcagccagtggtaaatacatagctgactttagcctttttgaccaagttgtgaaagtggcctctcctagtggcctccgtgacagcactgtacgctacgg

SEQ ID NO: 620771 - DNA, 120 bp, Artificial Sequence
  ENSG00000177807_10 (sequence is synthesized)
agaccctgaaaagctcaagttggaggagtcattaagggagcaagctgagaaggagggcagtgcccttagtgtgcgcatcagcaatgtctgatgacctgttcccactcccccattcctctg

SEQ ID NO: 620772 - DNA, 120 bp, Artificial Sequence
  ENSG00000177807_11 (sequence is synthesized)
gtctcttttcctctcttccaatgccctggtaaggaatactacccgggtttactggagatcccccgaagcacccatcctccactccctcttctttaacccagtggcctgttggtagcttag

SEQ ID NO: 620773 - DNA, 120 bp, Artificial Sequence
  ENSG00000177807_12 (sequence is synthesized)
gccaactggagtccaggttcgcctcccactgtcccctttccacttccccagcttctgccccaatacacatacctcccttaagccaggatgggggaaagagtgggattaggctgaagtggc

SEQ ID NO: 620774 - DNA, 120 bp, Artificial Sequence
  ENSG00000177807_13 (sequence is synthesized)
ttagaaggcctcagccatgcttggatactcacattaggaggaccatgtggttggaaggatagactgccccctacctcccaccaccaccatgaagtttggtgacttgaggctggagctccc

SEQ ID NO: 620775 - DNA, 120 bp, Artificial Sequence
  ENSG00000177807_14 (sequence is synthesized)
tctgttacctttccatctagcaagttcccaaaggcaagactctctctgatggtcactttgtggtctgtgctttcagaaatacaggaatctgatatcaacatatcctagggtttctaccaa

SEQ ID NO: 620776 - DNA, 120 bp, Artificial Sequence
  ENSG00000177807_15 (sequence is synthesized)
tctctgttgaaagaagccagggtttgccactgtgaagcttgatttctgctggtgacttctgaccataagctagaaccatggtcgccactgttttccctctgtagtttctcaagtgaacac

SEQ ID NO: 620777 - DNA, 120 bp, Artificial Sequence
  ENSG00000177807_16 (sequence is synthesized)
tctcaggatacccagttccctcatagcctctgttctcagagaattggagttggcccaagaaacataaacatataaccacccatatctatcctggattctgaactcttcaatttggagtga

SEQ ID NO: 620778 - DNA, 120 bp, Artificial Sequence
  ENSG00000177807_17 (sequence is synthesized)
ctaacacaagttgttatctaaacctttaaacctatcttccaggcagcccagagaagatctgtttccctgtgtcctgtgaatggaaggacccaagccaatatgttcctttgaaaagagtcc

SEQ ID NO: 620779 - DNA, 120 bp, Artificial Sequence
  ENSG00000177807_18 (sequence is synthesized)
taatattccagattacactgtacctggcttctcttcttcctttcctgctcagcctagatccttcttccttaaccccaactctttgggagaagggagggaaaatgcaagggccttcctctc

SEQ ID NO: 620780 - DNA, 120 bp, Artificial Sequence
  ENSG00000177807_19 (sequence is synthesized)
ttaacacggatgctcaagtaaaactagattcacagggcacagattccccagaaagttaacacaatcccaccatgagggatgggtaaattctcagatttccaaactgctgtacagagcctc

SEQ ID NO: 620781 - DNA, 120 bp, Artificial Sequence
  ENSG00000177807_20 (sequence is synthesized)
tgagaattggtgatgctttgttaaggtttgggcaggagcagaactctgtggctggcagccactattctcagttacacctcccagtgcccttctgaaaagtgccagctatttcattaggca

SEQ ID NO: 620782 - DNA, 120 bp, Artificial Sequence
  ENSG00000177807_21 (sequence is synthesized)
atgctggaaggaaatgaaattataccttctgatcaaataaccatggcttccctcagccattcctgagacttggtataaaatgaagaaatcagtgtcatctctactctcctctgccatgag

SEQ ID NO: 620783 - DNA, 120 bp, Artificial Sequence
  ENSG00000177807_22 (sequence is synthesized)
gccattttcagacaagttaaaaagtagactttaagagatcaaactcagcctattccttgttccctggtggggtctgtggtaagggtcagggaagggcatataggcaccagagctttatcc

SEQ ID NO: 620784 - DNA, 120 bp, Artificial Sequence
  ENSG00000177807_23 (sequence is synthesized)
aaagccccaaatccctagagtgctttctggtctcactttggtaccaaggaagcctcacatagtggtactgcatagtcccactataagtcaagttgcagtttaaggtggtctcagccaatt

SEQ ID NO: 620785 - DNA, 120 bp, Artificial Sequence
  ENSG00000177807_24 (sequence is synthesized)
gttacaagctacagaatatatacatgcatctatgtacagagccttgcagagaaacacaaaattttgaggctagacccatgatcaccaccaactataattgcacaaggtcttgttatattg

SEQ ID NO: 620786 - DNA, 120 bp, Artificial Sequence
  ENSG00000177807_25 (sequence is synthesized)
atctctcctcgaactcaactaactatatcttgaaaacaaagacccttcggtgtccatctacagtaaaccccaccattaccttctagttggcataaaaacaagaaccacaaaaacttgaaa

SEQ ID NO: 620787 - DNA, 120 bp, Artificial Sequence
  ENSG00000177807_26 (sequence is synthesized)
aatctgaaacagagaacagaaggccaagagccagcttctgcgttctcaactttattcaacattagacttaccttatttctttcagtgtgtagggacaagatgtactgctgtgtgtgtgtg

SEQ ID NO: 620788 - DNA, 120 bp, Artificial Sequence
  ENSG00000177807_27 (sequence is synthesized)
tgtgtgtgtgtgtgtgtgtgtgtctataccttcctatccattgccaagttaacctccatctggtttatttggccatgctatgctttcttcccattcccctgctgtctattctaagccccc

SEQ ID NO: 620789 - DNA, 120 bp, Artificial Sequence
  ENSG00000177807_28 (sequence is synthesized)
tctattctaagcccccagactcaagcctctagactcttggatgaaacagtgagaagaaaacattttctgacttacccttttggaatctcctccattattacccaggctttgctttaagtt

SEQ ID NO: 620790 - DNA, 120 bp, Artificial Sequence
  ENSG00000177807_29 (sequence is synthesized)
gcactttaaatcacactgtcctattaatgcgatctggcatcttctcccacaagccccctacagggaacaactaccccctaccttaactctaaatggttctttagactatagtctgtctcc

SEQ ID NO: 620791 - DNA, 120 bp, Artificial Sequence
  ENSG00000177807_30 (sequence is synthesized)
tctgacctgaaatcctcttttaggcaataggccgagctttagaagcagccaggtctggtgagaaatgggcccccataccaactgtggacttggaatatcagcagagtagtaggcacagtt

SEQ ID NO: 620792 - DNA, 120 bp, Artificial Sequence
  ENSG00000177807_31 (sequence is synthesized)
gtaaaaaggggagatttcggtaggcacaggtgtaaaaaggggagatttcagaagacgggcgaaacaactgatgggggaagatacctggggtgagaagatgagaaagaaatgatgctgagg

SEQ ID NO: 620793 - DNA, 120 bp, Artificial Sequence
  ENSG00000177807_32 (sequence is synthesized)
gacctagtgaaatcaatgaaactcttgagtcttgcttaggctcgcaaacaagaagtggggaggcttgggaaattaggatatgacatatatgaaaggtttatctaagaagaaagaaacaga

SEQ ID NO: 620794 - DNA, 120 bp, Artificial Sequence
  ENSG00000177807_33 (sequence is synthesized)
gataatatatatatagaaagatgtatatagatgtatatatgcccaaatatattgaatgtacagaaaggaaatattcagagactttagcattgggggcagatatcttggcctggttatggg

SEQ ID NO: 620795 - DNA, 120 bp, Artificial Sequence
  ENSG00000177807_34 (sequence is synthesized)
gtaggacacccagattttcagacttacaatcagtggtcctggtttcaacatggaagtgagatagctgatgaaggatttcaagtctggaaatgggaaagggaggggtagaagttccttttc

SEQ ID NO: 620796 - DNA, 120 bp, Artificial Sequence
  ENSG00000177807_35 (sequence is synthesized)
agaaataaagaggcattcatgaaggcttttgttgaatcctatgctactgataggaccaggaagagaggaactcggaggacaatagggaggggaagtcttggaaaatctaccacttacact

SEQ ID NO: 620797 - DNA, 120 bp, Artificial Sequence
  ENSG00000177807_36 (sequence is synthesized)
gcatcactgtgcataagctcatttacagctccagcttggttggcttgagctacaaggaagtgactggcagaggacccggggaccttccttcccttgaccttccttgggaccagagaggct

SEQ ID NO: 620798 - DNA, 120 bp, Artificial Sequence
  ENSG00000177807_37 (sequence is synthesized)
atctgatcccagctccgggtttaagagtcctggcccggcccgtcgcacagctctgctcctaactcctgcccgccccgtccgtccatctgtcccgctgccccgcggcccatccaaggggcc

SEQ ID NO: 620799 - DNA, 120 bp, Artificial Sequence
  ENSG00000177807_38 (sequence is synthesized)
tgccactgtagcgcctttttaaaataaataaaataaaataaagcaccattttgtttccctttcatgaagtacactgtatttccgtcttccacaggggtgggagctgctattgctctagcc

SEQ ID NO: 620800 - DNA, 120 bp, Artificial Sequence
  ENSG00000177807_39 (sequence is synthesized)
cctgaaatcaaactcaggagctgaacactttggtgtatgggaggcactaatgggaagcctcaaccctggaatccaaatgccaggactaatagctgttaggctgaagatctcccaaggtca

SEQ ID NO: 620801 - DNA, 120 bp, Artificial Sequence
  ENSG00000177807_40 (sequence is synthesized)
aggcccagccttttgtgtggctgcaagcagcccaaagagaaagccatggattccagaagagttccaatcctggcatttgggcatggagggtgatgctttggttttgatgcttctgaatga

SEQ ID NO: 620802 - DNA, 120 bp, Artificial Sequence
  ENSG00000177807_41 (sequence is synthesized)
aaatgaggagtggggttaccagctgctctaggggatggtgaagttccatgagaggcttccgaaatctctgcaatgtgcttcaccccattattcccccaacccctgtcagcctaataaaat

SEQ ID NO: 620803 - DNA, 120 bp, Artificial Sequence
  ENSG00000177807_42 (sequence is synthesized)
catccagtagtttccctataaggtctgagcagagaaagaaagccagttatactattgctacaagtccaggacactgtgccctctccatggctgctgccctggtcctttattcttgctagc

SEQ ID NO: 620804 - DNA, 120 bp, Artificial Sequence
  ENSG00000177807_43 (sequence is synthesized)
taacctagttcacttgtacagtaacacactacctttgctggaaagttagcatgggtctccaggctcagtaatggccaactctactgatgcagaagtatttagggatgttttttccattca

SEQ ID NO: 620805 - DNA, 120 bp, Artificial Sequence
  ENSG00000177807_44 (sequence is synthesized)
ttgcactaaagactaaaccaggtcaaatttatctaggaaaaaaaaggtgtgtaagatttgttttgtttttgtctgttaaaaataagctactaaataaaatggatgactctttggttgtca

SEQ ID NO: 620806 - DNA, 120 bp, Artificial Sequence
  ENSG00000177807_45 (sequence is synthesized)
tttgttggcagctcaagatactggagaagatgacgggccaggaagttgaaagaaggtgagaggttgaggagagaagaggggagctggggagaagctctggccacgtgaaaaccggtagag

SEQ ID NO: 620807 - DNA, 120 bp, Artificial Sequence
  ENSG00000177807_46 (sequence is synthesized)
aacttgactcaactcttcagttgattgttccctactaacagcaccctggggttagtgttgctttggttgaaaggaagcatgaaaaagttcttctatgatttcattttttttaatccaact

SEQ ID NO: 620808 - DNA, 120 bp, Artificial Sequence
  ENSG00000177807_47 (sequence is synthesized)
ctttaatccatttagaatttattttgatataaagaatgaggtggaacattagcttaatttttctcctgaagtttagccaatgatctgaccatcttttaaatgattttaaatgccaccttg

SEQ ID NO: 620809 - DNA, 120 bp, Artificial Sequence
  ENSG00000177807_48 (sequence is synthesized)
atattatgttaaattatactaaatgctcaagtatactttggtctatgcttgtctggaagagacattccaatgttccctctctcttttagctttagtaataaactttcaaattcatctgga

SEQ ID NO: 620810 - DNA, 120 bp, Artificial Sequence
  ENSG00000177807_49 (sequence is synthesized)
cacagctctgctcctaactcctgcccgccccgtccgtccatctgtcccgctgccccgcggcccatccaaggggccactccacctcggacccaagttaacctccatctggtttatttggcc

SEQ ID NO: 620811 - DNA, 120 bp, Artificial Sequence
  ENSG00000177807_50 (sequence is synthesized)
aagcaggaatattgtatgtaactttcaggatggtcctgaataagaggggccatgctccttttcaccccttttcctcctttctgacaactgtgatgtaaataaaaagaactctggcagcca

SEQ ID NO: 620812 - DNA, 120 bp, Artificial Sequence
  ENSG00000177830_0 (sequence is synthesized)
gtgcgtttgtggccgtccggcctccctgacatgcagccctctggaccccgaggttggaccctactgtgacacacctaccatgcggacactcttcaacctcctctggcttgccctggcctg

SEQ ID NO: 620813 - DNA, 120 bp, Artificial Sequence
  ENSG00000177830_1 (sequence is synthesized)
cagccctgttcacactaccctgtcaaagtcagatgccaaaaaagccgcctcaaagacgctgctggagaagagtcagttttcagataagccggtgcaagaccggggtttggtggtgacgga

SEQ ID NO: 620814 - DNA, 120 bp, Artificial Sequence
  ENSG00000177830_2 (sequence is synthesized)
cctcaaagctgagagtgtggttcttgagcatcgcagctactgctcggcaaaggcccgggacagacactttgctggggatgtactgggctatgtcactccatggaacagccatggctacga

SEQ ID NO: 620815 - DNA, 120 bp, Artificial Sequence
  ENSG00000177830_3 (sequence is synthesized)
tgtcaccaaggtctttgggagcaagttcacacagatctcacccgtctggctgcagctgaagagacgtggccgtgagatgtttgaggtcacgggcctccacgacgtggaccaagggtggat

SEQ ID NO: 620816 - DNA, 120 bp, Artificial Sequence
  ENSG00000177830_4 (sequence is synthesized)
gcgagctgtcaggaagcatgccaagggcctgcacatagtgcctcggctcctgtttgaggactggacttacgatgatttccggaacgtcttagacagtgaggatgagatagaggagctgag

SEQ ID NO: 620817 - DNA, 120 bp, Artificial Sequence
  ENSG00000177830_5 (sequence is synthesized)
caagaccgtggtccaggtggcaaagaaccagcatttcgatggcttcgtggtggaggtctggaaccagctgctaagccagaagcgcgtgggcctcatccacatgctcacccacttggccga

SEQ ID NO: 620818 - DNA, 120 bp, Artificial Sequence
  ENSG00000177830_6 (sequence is synthesized)
ggctctgcaccaggcccggctgctggccctcctggtcatcccgcctgccatcacccccgggaccgaccagctgggcatgttcacgcacaaggagtttgagcagctggcccccgtgctgga

SEQ ID NO: 620819 - DNA, 120 bp, Artificial Sequence
  ENSG00000177830_7 (sequence is synthesized)
tggtttcagcctcatgacctacgactactctacagcgcatcagcctggccctaatgcacccctgtcctgggttcgagcctgcgtccaggtcctggacccgaagtccaagtggcgaagcaa

SEQ ID NO: 620820 - DNA, 120 bp, Artificial Sequence
  ENSG00000177830_8 (sequence is synthesized)
aatcctcctggggctcaacttctatggtatggactacgcgacctccaaggatgcccgtgagcctgttgtcggggccaggtacatccagacactgaaggaccacaggccccggatggtgtg

SEQ ID NO: 620821 - DNA, 120 bp, Artificial Sequence
  ENSG00000177830_9 (sequence is synthesized)
ggacagccaggcctcagagcacttcttcgagtacaagaagagccgcagtgggaggcacgtcgtcttctacccaaccctgaagtccctgcaggtgcggctggagctggcccgggagctggg

SEQ ID NO: 620822 - DNA, 120 bp, Artificial Sequence
  ENSG00000177830_10 (sequence is synthesized)
cgttggggtctctatctgggagctgggccagggcctggactacttctacgacctgctctaggtgggcattgcggcctccgcggtggacgtgttcttttctaagccatggagtgagtgagc

SEQ ID NO: 620823 - DNA, 120 bp, Artificial Sequence
  ENSG00000177830_11 (sequence is synthesized)
aggtgtgaaatacaggcctccactccgtttgctgtgacgggtctgctgcagtcctcagtcgggggtcctgggcaccatgtgactccccatcctcccatgaggggtccctgccctggatga

SEQ ID NO: 620824 - DNA, 120 bp, Artificial Sequence
  ENSG00000177830_12 (sequence is synthesized)
gtcctagctgggggacaccctgagagctcgagcccctcccacccgggcatccgctggctgcctcctgtcagctgggcaggcggggcccacagtacctgccccaccaggacagcctggctc

SEQ ID NO: 620825 - DNA, 120 bp, Artificial Sequence
  ENSG00000177830_13 (sequence is synthesized)
tcacatcctgggctggatgtgggtttggaagctctggaaccatcccggactcgcccactcctggattcgagggccctcgcagggacagctctgcccagcatcaccccagggcctggcagt

SEQ ID NO: 620826 - DNA, 120 bp, Artificial Sequence
  ENSG00000177830_14 (sequence is synthesized)
gatagagctgagagctccacccccacatacctgccacccacctggccagccacagcacgtgtgtcacctgcagagagccacccagacgtccccaccgagtccagcacggcaagggtgcag

SEQ ID NO: 620827 - DNA, 120 bp, Artificial Sequence
  ENSG00000177830_15 (sequence is synthesized)
gggctgccctagaaatgggctcagaggagcctggcccaccctcttgaaactggtcctggaccttggctcagctctgccgcctcaggtagcacgacccccaggccagcctggacacatcag

SEQ ID NO: 620828 - DNA, 120 bp, Artificial Sequence
  ENSG00000177830_16 (sequence is synthesized)
ggagcatggtgaggggcaacggcaggacccgtgggccatatcgggacaggcatttccagcgaggggtggggcagaggacatgtggctggcaggctacacccaccctgccatgcagcggtg

SEQ ID NO: 620829 - DNA, 120 bp, Artificial Sequence
  ENSG00000177830_17 (sequence is synthesized)
tccaggctctggggaggccctggggaatttggaggcatcatgagccaaggcctggtggccctcgttcccctgcccctcgtcaccatcctgtccttggctggccgtgaggactcccctcct

SEQ ID NO: 620830 - DNA, 120 bp, Artificial Sequence
  ENSG00000177830_18 (sequence is synthesized)
caccactgggtcccacagggctgaggtgggcagtagagggcataggtgggtacatgtcccgggcaaggtctctcggggggacagaagtgagtccagggagtgggtgggcctgggcgtccc

SEQ ID NO: 620831 - DNA, 120 bp, Artificial Sequence
  ENSG00000177830_19 (sequence is synthesized)
tcactcagaatgccgtggggtgaggacggtgaggacagggtgggcactgggttctggtttagagtcagtaatgttagggcgcagtgggcagggggtcaggacatctccagccggtggtga

SEQ ID NO: 620832 - DNA, 120 bp, Artificial Sequence
  ENSG00000177830_20 (sequence is synthesized)
ggaagcatggtggggtctcctccacaggacgggagctggggagggggtcctgggtcggacccaaggcacccacacttgagaaagcctccgcctggacgtcagggaggcctgcgagctgcc

SEQ ID NO: 620833 - DNA, 120 bp, Artificial Sequence
  ENSG00000177830_21 (sequence is synthesized)
acagtgcaggtgcagccgttcccaccgccctgctgctgcttgacacgggcataggagatacaagtggtgtgtgcggcggttcatgcctgtaatcccagtactttggaaagccgtggcggg

SEQ ID NO: 620834 - DNA, 89 bp, Artificial Sequence
  ENSG00000177830_22 (sequence is synthesized)
cgggaggaacgccctaaaaatagaaaaattagcaagacatggtggcatgtgcctgtactcctggctactcaggaggctgagatgggagg

SEQ ID NO: 620835 - DNA, 120 bp, Artificial Sequence
  ENSG00000177830_23 (sequence is synthesized)
cttgatgaggttgaggctgcagtgagctgtgaccgactgcactccaaaaaccttgtctaaaaaaacacaagctgccactggctttggggcactgaccttgtctccccagaggtgctgacg

SEQ ID NO: 620836 - DNA, 120 bp, Artificial Sequence
  ENSG00000177830_24 (sequence is synthesized)
ctaacattcaagttgttctcgggggtcctgtggcttctgttggagtgagggtgggggacacgcaggtctgggagggtggtgtgggcctggagctaggcattgccagatcagcattgggtg

SEQ ID NO: 620837 - DNA, 120 bp, Artificial Sequence
  ENSG00000177830_25 (sequence is synthesized)
gaggcaggggtggggatgccacacaggatgggatgtctagagcgggctgtgtctcccggggggatgggcagagggtggggcaggaattagctggaaatgagattgtggggtgcagtttgg

SEQ ID NO: 620838 - DNA, 120 bp, Artificial Sequence
  ENSG00000177830_26 (sequence is synthesized)
ggatcagatgccccaacctgaactgaccgtcatccctgtggccagggtccccacacaaccctcacccctggctgtgagaatcctgaggcaccttgatgcattttttttcatgccctgtga

SEQ ID NO: 620839 - DNA, 120 bp, Artificial Sequence
  ENSG00000177830_27 (sequence is synthesized)
gcgctggagcgttttccggccgtgcgtttgtggccgtccggcctccctgacatgcagatttccacccagaagacagagaaggagccagtggtcatggaatgggctggggtcaaagactgg

SEQ ID NO: 620840 - DNA, 120 bp, Artificial Sequence
  ENSG00000177830_28 (sequence is synthesized)
ctggtgtgtgtccctctcttcctgggcttccggcctctgaactagaatgtttcaaggcctaggagtgacaggacgtggtcagcaatagtggcccaggtcctgcccttgggtgacccaggc

SEQ ID NO: 620841 - DNA, 120 bp, Artificial Sequence
  ENSG00000177830_29 (sequence is synthesized)
caaggtctcctagttagaacaggacagagtcacgaggctgccactgttgggaagggccctgcctgtgctgactctgcaaatgaggagtcgcccagagccgccgcgaccccacccaggagc

SEQ ID NO: 620842 - DNA, 120 bp, Artificial Sequence
  ENSG00000177830_30 (sequence is synthesized)
ggcagccaccgtttcagcctggccagcctctcggaactgccgtggctgttcaagcactcactgcctttgcctgtggctccatgtactgggtgctgctgtgcttgccctccctctggaccc

SEQ ID NO: 620843 - DNA, 120 bp, Artificial Sequence
  ENSG00000177830_31 (sequence is synthesized)
ctgaaaggacttggtggggtggcttcttccgaggaagctcctggaagatgtttttcctgaggtttcctctaatacagggttcacacggcctggggctctggccaccccaccaggtgttgt

SEQ ID NO: 620844 - DNA, 120 bp, Artificial Sequence
  ENSG00000177830_32 (sequence is synthesized)
cccccagaccactggggacagtggctgccccgagtggccctgcccctgctgagagccacagcctttgggggtacagggtggggctgtgggggagctgggtgggctcccaaatccatatcc

SEQ ID NO: 620845 - DNA, 120 bp, Artificial Sequence
  ENSG00000177830_33 (sequence is synthesized)
gcctccctgacatgcaggtgagccccgcggcggccggcccctgctcctcctccttgcacggcctcagtttccctcccgcaaagtgggcgcgccgggcagcgaggctcggccccgggagga

SEQ ID NO: 620846 - DNA, 87 bp, Artificial Sequence
  ENSG00000177830_34 (sequence is synthesized)
tctggcttgccctggcctgcagccctgttcacactaccctgtcaaagtcagatgccaaaaaagccgcctcaaagacgctgctggaga

SEQ ID NO: 620847 - DNA, 120 bp, Artificial Sequence
  ENSG00000177830_35 (sequence is synthesized)
agacacaaacccagccccaaaggccccacagccaccaggcacctccaacaaccaggtgtgagtaatttttttttttttttgagacagggtcctatctgtcgcccaggctggagtgcagca

SEQ ID NO: 620848 - DNA, 120 bp, Artificial Sequence
  ENSG00000177830_36 (sequence is synthesized)
gtgggtgtgggtgtaaggagacagagtgatggggagggtctcggtcccctggggcttctgccccacagagtcagagataggggctgggccaggagccggtcctgcttggtgcccacccca

SEQ ID NO: 620849 - DNA, 120 bp, Artificial Sequence
  ENSG00000177830_37 (sequence is synthesized)
ggctcagggcggctcacagcataccatgactgctctacctttggagccaggacagccctagcagccggtgggtcaagtccaaggggtgctgcatgtggtgactcacgcctgtaatcatta

SEQ ID NO: 620850 - DNA, 120 bp, Artificial Sequence
  ENSG00000177830_38 (sequence is synthesized)
tcaaatattttttctgtttcttctcttctgtcttctcgtttggagaccacaaacactagatccattgaatttgtcccacagctcacgaatacaccttttaccttttggaattcttttttt

SEQ ID NO: 620851 - DNA, 120 bp, Artificial Sequence
  ENSG00000177830_39 (sequence is synthesized)
gcactggccagcctggggaagacacaaacccagccccaaaggccccacagccaccaggcacctccaacaaccagatttccacccagaagacagagaaggagccagtggtcatggaatggg

SEQ ID NO: 620852 - DNA, 120 bp, Artificial Sequence
  ENSG00000177830_40 (sequence is synthesized)
atgtcctgggctcaagtgatcagcctcccgaagtgctgggattacggcgtgagccaccactcccagccttcgagtgcttttgaggatgtctgtgagaggcatcctcaggctggggaccca

SEQ ID NO: 620853 - DNA, 120 bp, Artificial Sequence
  ENSG00000177830_41 (sequence is synthesized)
ccccccatgcccacggcagacaggcagtgggcaagcaggagggcctcagggcaggtcagacctgggcctacagggcagagcctggacctccgccagggcactccacacccaccccggccc

SEQ ID NO: 620854 - DNA, 120 bp, Artificial Sequence
  ENSG00000177839_0 (sequence is synthesized)
actgagacagatgggctgagaagaagagctgtcgagtccctgattgggaaaggaaaaattaaaaaccctagatctctggtacacataagtctgggtttgcgattgctatttgtgctgggg

SEQ ID NO: 620855 - DNA, 120 bp, Artificial Sequence
  ENSG00000177839_1 (sequence is synthesized)
cagtgtgattgagactgacattgaggaaagaagcagctatgaagaccagggggttcagctttccaagacaaaggcaagtcctgtttctttttcttttctggggagtgtccttggcaggtt

SEQ ID NO: 620856 - DNA, 120 bp, Artificial Sequence
  ENSG00000177839_2 (sequence is synthesized)
ctgggtttggacgttattcggtgactgaggaaacagagaaaggatcctttgtggtcaatctggcaaaggatctgggactagcagagggggagctggctgcaaggggaaccagggtggttt

SEQ ID NO: 620857 - DNA, 120 bp, Artificial Sequence
  ENSG00000177839_3 (sequence is synthesized)
ccgatgataacaaacaatacctgctcctggattcacataccgggaatttgctcacaaatgagaaactggaccgagagaagctgtgtggccctaaagagccctgtatgctgtatttccaaa

SEQ ID NO: 620858 - DNA, 120 bp, Artificial Sequence
  ENSG00000177839_4 (sequence is synthesized)
ttttaatggatgatccctttcagatttaccgggctgagctgagagtcagggatataaatgatcactcgccagtgtttcggcacaaagagatggtcttaaaaatatcagaaaatacagctg

SEQ ID NO: 620859 - DNA, 120 bp, Artificial Sequence
  ENSG00000177839_5 (sequence is synthesized)
aagggacagcatttagactagaaagagcacaggatccagatgaaggtcataacagtatccaaaactacacgatcagctccaactcttttttccatattaaaattagtggcagtgatgaag

SEQ ID NO: 620860 - DNA, 120 bp, Artificial Sequence
  ENSG00000177839_6 (sequence is synthesized)
gcatgatatatccagagctagtgttggacaaagcactggatcgggaggagcaggaagagctcagcttaaccctcacagcgctggatggtgggtctccatccaggtctgggacctccacta

SEQ ID NO: 620861 - DNA, 120 bp, Artificial Sequence
  ENSG00000177839_7 (sequence is synthesized)
tacgcattgtggtcttggatgtcaatgacaatgtcccacagtttgcccaggctctgtatgagacccaggctccagaaaacagtccagtagggtcccttattgttaaagtgtctgcaggag

SEQ ID NO: 620862 - DNA, 120 bp, Artificial Sequence
  ENSG00000177839_8 (sequence is synthesized)
atgcagactcaggagtcaatgcagaagtatcctattcattttttgatgcttctgaagatattttaacaacgtttcaaatcaatcctttttctggggaaatctttctcagagaattgcttg

SEQ ID NO: 620863 - DNA, 120 bp, Artificial Sequence
  ENSG00000177839_9 (sequence is synthesized)
attatgagttagtaaattcttacaaaataaatatacaggcaatggacggcggaggcctttctgcaagatgtacagttttgataaaagtattagattccaatgacaatcctcctgaactga

SEQ ID NO: 620864 - DNA, 120 bp, Artificial Sequence
  ENSG00000177839_10 (sequence is synthesized)
tcatatcatcactttccaactctgttgctgaaaactctcctgggatagtattggctgtttttaagattaaagacagagactccggagaaaatggaaagacaatttgctatgttcaagata

SEQ ID NO: 620865 - DNA, 120 bp, Artificial Sequence
  ENSG00000177839_11 (sequence is synthesized)
atctgcctttttttctgaaaccgtctgttgacaatttttacatcctaatgactgaaggtgcactggacagagagagcaaagctgagtacaacatcaccatcaccgtcactgacttgggga

SEQ ID NO: 620866 - DNA, 120 bp, Artificial Sequence
  ENSG00000177839_12 (sequence is synthesized)
atcaccatcaccgtcactgacttggggacacccaggctgaaaaccgagcacagcataaccctgcaggtctccgacgtcaatgacaacgcccccgccttcacccaaacctcctacaccctg

SEQ ID NO: 620867 - DNA, 120 bp, Artificial Sequence
  ENSG00000177839_13 (sequence is synthesized)
tgcacatcggcagtgtcagcgccacagacagagactcaggcaccaacgcccaggtcacctactcgctgctgccgccccaggacccacacctgcccctcgcctccctggtctccatcaacg

SEQ ID NO: 620868 - DNA, 120 bp, Artificial Sequence
  ENSG00000177839_14 (sequence is synthesized)
cggacaatggccacctgtttgccctcaggtcgctggactacgaggccctgcaggctttcgacttccgcgtgggcgcctcagaccgcggctccccggctttgagcagcgaggcgctggtgc

SEQ ID NO: 620869 - DNA, 87 bp, Artificial Sequence
  ENSG00000177839_15 (sequence is synthesized)
tggggacgcggccaagcacaggctggtggtgcttgtcaaggacaatggcgagcctcctcgctcggccaccgccacgctgcacgtgct

SEQ ID NO: 620870 - DNA, 85 bp, Artificial Sequence
  ENSG00000177839_16 (sequence is synthesized)
aggcggccccggcccaggcccaggccgacttgctcaccgtctacctggtggtggcgttggcctcggtgtcttcgctcttcctcct

SEQ ID NO: 620871 - DNA, 120 bp, Artificial Sequence
  ENSG00000177839_17 (sequence is synthesized)
cgagggtccttttccagggcatctggtggacgtgagcggcaccgggaccctgttccagagctaccagtacgaggtgtgtctgactggaggttcagagaccggcgagttcaagttcttgaa

SEQ ID NO: 620872 - DNA, 120 bp, Artificial Sequence
  ENSG00000177839_18 (sequence is synthesized)
gccgattaccccccacctcccgccccataggggtgggaaagaaatagaggaaaattctactctccccaatagctttggatttaattattgaaaggaacccacttaataaagacatttact

SEQ ID NO: 620873 - DNA, 120 bp, Artificial Sequence
  ENSG00000177839_19 (sequence is synthesized)
tctttaatatattcttgttggctaactaaattgtgtatgcccaccacaaagaaggtactattttttgtttgattcatcttcaactttgcgtattatgcttaacttcacaagttaactttt

SEQ ID NO: 620874 - DNA, 120 bp, Artificial Sequence
  ENSG00000177839_20 (sequence is synthesized)
tcttattttgtatcctgatgaggcatttcttactagaatcccataagtgaaatataatatttttcaaagttgatatcatttaaaaatttttggtcgttttaaatgtctttattgacttta

SEQ ID NO: 620875 - DNA, 120 bp, Artificial Sequence
  ENSG00000177839_21 (sequence is synthesized)
aattcattgcctctacattattcattagttcttcttttcctaaaactttttacttgttaaaatagtctgctgcatgtaatatgtgcttttactatttgatatttcttctatttttctttt

SEQ ID NO: 620876 - DNA, 120 bp, Artificial Sequence
  ENSG00000177839_22 (sequence is synthesized)
ttactatttgatatttcttctatttttcttttgaaaccggtgttcttattggtttgccatccttgttcattacaactgttttttgtttgtttgtttgttttttggtttgtttgttttttt

SEQ ID NO: 620877 - DNA, 120 bp, Artificial Sequence
  ENSG00000177839_23 (sequence is synthesized)
tgtattttcagtagagacgggtttcatcatggtggccaggatggtctatctcttgacctcgtgatccaccccactcagcctcccaaattgctgggatttacaggcatgagccaccgcacc

SEQ ID NO: 620878 - DNA, 120 bp, Artificial Sequence
  ENSG00000177839_24 (sequence is synthesized)
accgcacccagcctacaataattttcttaaactttaccttttattttaaagttctagtttcccggcattgatagttccctatttgaaatataatgtttctcttgtaagtgatatgataaa

SEQ ID NO: 620879 - DNA, 120 bp, Artificial Sequence
  ENSG00000177839_25 (sequence is synthesized)
taaacccctaattagccttagaagaaaaaccactgcaagatattaagcgtgtgtaaatgggctttagtctggaaaccaaaaaaaaaaaaaaaatttagtcattctataggatcatgtgaa

SEQ ID NO: 620880 - DNA, 120 bp, Artificial Sequence
  ENSG00000177839_26 (sequence is synthesized)
aatatttaatttgctccttttaattctgtataaacaaatcagaggttcctgaggttcctgttaaatttttaatggctaatagcccagtgccatccagttgaaaaaacaacagcaatcaca

SEQ ID NO: 620881 - DNA, 120 bp, Artificial Sequence
  ENSG00000177839_27 (sequence is synthesized)
aagtagaggtttatattgtgcggcttttatattcagctattagagtgttattggtagtgtctagccttttcctccacgacattccttgacttaatccatttgggcctattatagacaaaa

SEQ ID NO: 620882 - DNA, 79 bp, Artificial Sequence
  ENSG00000177839_28 (sequence is synthesized)
attccttgacttaatccatttgggcctattatagacaaaatagagcttctttctagatataaggtctttgaggcagggc

SEQ ID NO: 620883 - DNA, 63 bp, Artificial Sequence
  ENSG00000177839_29 (sequence is synthesized)
atcgcttgaacccaggaggtggaagttgcttaaataaaataaaataaaatataaaataactta

SEQ ID NO: 620884 - DNA, 120 bp, Artificial Sequence
  ENSG00000177839_30 (sequence is synthesized)
aaattctatgaaaaaagacactagaatgctgttcttaattttaatagtgttaagataggtgttagtgtggtctgttctttacctccctttatttggtgcagagaagttagatcctgctaa

SEQ ID NO: 620885 - DNA, 120 bp, Artificial Sequence
  ENSG00000177839_31 (sequence is synthesized)
atttcaattaagaggggaccttaaaataaggatcaatctcttatttaaccctgtaagttactttaaagctaatacaagaaaaacaaagacaagtgaaagtaaggaaacagaaattgcaaa

SEQ ID NO: 620886 - DNA, 120 bp, Artificial Sequence
  ENSG00000177842_0 (sequence is synthesized)
aagctttccccggtgtcggcggcaggtggaatttccacgctttatctgcgcctgcgccgcgcgggattcgcggtccgagctgaagaggttcgcggtccggtttcacttctccgaaccctg

SEQ ID NO: 620887 - DNA, 120 bp, Artificial Sequence
  ENSG00000177842_1 (sequence is synthesized)
aggcagtgtgtgaagctgggacgccagccatgttccagaccgcttggcgccaggaaccagtgacctttgaggatgtggctgtgtacttcacccagaatgaatgggccagcctggactctg

SEQ ID NO: 620888 - DNA, 120 bp, Artificial Sequence
  ENSG00000177842_2 (sequence is synthesized)
tgcagagggccctgtacagggaagtgatgctggagaattatgcaaatgtggcttccctggcattcccattcaccacgcctgttctggtctcccagctggagcaaggggaactgccatggg

SEQ ID NO: 620889 - DNA, 120 bp, Artificial Sequence
  ENSG00000177842_3 (sequence is synthesized)
gcctcgatccctgggaacctatgggcagggaggctctcagaggtatctgtccaggggatgaggccagaactgagaaggaaggattaactccaaaggatcatgtgtccaaagaaacagagt

SEQ ID NO: 620890 - DNA, 120 bp, Artificial Sequence
  ENSG00000177842_4 (sequence is synthesized)
ccttcagactgatggtggggggcctgccagggaatgtttcccagcaccttgactttgggagcagcctagagcagccacaaggtcattggataattaagacaaagtcaaagaggagacatt

SEQ ID NO: 620891 - DNA, 120 bp, Artificial Sequence
  ENSG00000177842_5 (sequence is synthesized)
tcacagatacctcagccaggcaccatgaggcctatgaggtcaagaatggagagaagtttgagaaattaggaaaaaatattagcgtcagcacacaactcactacaaatcagacaaatccta

SEQ ID NO: 620892 - DNA, 120 bp, Artificial Sequence
  ENSG00000177842_6 (sequence is synthesized)
gtggtcagatatcttatgaatgtggacaatgtggcagatatttcattcaaatggcagacttccaccgacatgagaaatgtcacactggtgaaaagtcttttgaatgcaaagaatgtggaa

SEQ ID NO: 620893 - DNA, 120 bp, Artificial Sequence
  ENSG00000177842_7 (sequence is synthesized)
aatacttcagatataactcattacttattcggcatcagataattcacactggaaagaaaccatttaaatgtaaagaatgtggaaaaggtttaagttcagacacagccttgattcagcatc

SEQ ID NO: 620894 - DNA, 120 bp, Artificial Sequence
  ENSG00000177842_8 (sequence is synthesized)
agagaatccacactggagaaaagccctatgaatgtaaggagtgcggcaaggccttcagtagcagctctgtcttcctccagcaccagaggttccacactggggagaagctctatgaatgta

SEQ ID NO: 620895 - DNA, 120 bp, Artificial Sequence
  ENSG00000177842_9 (sequence is synthesized)
acgaatgttggaaaactttcagttgcagctcaagtttcactgtccatcagcgaatgcacactggggagaaaccttatgaatgtaaagagtgtggaaaacgattaagctccaacacagcct

SEQ ID NO: 620896 - DNA, 120 bp, Artificial Sequence
  ENSG00000177842_10 (sequence is synthesized)
tgactcagcatcagcgaattcacactggggagaagccctttgaatgtaaggagtgtgggaaggcattcaatcagaaaataaccctgattcagcaccagcgagttcacactggcgagaaac

SEQ ID NO: 620897 - DNA, 120 bp, Artificial Sequence
  ENSG00000177842_11 (sequence is synthesized)
cttatgagtgtaaagtgtgtggtaaaaccttcagctggtgtggaagattcattctgcatcagaaactacacactcagaagacacctgtccaagcatagggctatccatagttaggcccac

SEQ ID NO: 620898 - DNA, 120 bp, Artificial Sequence
  ENSG00000177842_12 (sequence is synthesized)
tgtgcctctccttttttctctttattttcatgctttttatcagtgtcctcgctgtccttcctggttagacacttggctttcatcatgaactcttctttaagttttttgaacctgtttccc

SEQ ID NO: 620899 - DNA, 120 bp, Artificial Sequence
  ENSG00000177842_13 (sequence is synthesized)
cttagaaacataaaaggaaatgtaagtttccagatttaaaggacatgctgggtgcccagcaggatggattcaagggaaacctacattaaggaaaattgctgtgaattatgaaaacaccaa

SEQ ID NO: 620900 - DNA, 120 bp, Artificial Sequence
  ENSG00000177842_14 (sequence is synthesized)
aacaccaagtttgaataagaggatcatggagaaaaaatgagaccctaaaaagtttctagagagagaaaacaaaagatcagaaatgaaagcggggccaggcgcggtggctcgtgcctgtaa

SEQ ID NO: 620901 - DNA, 64 bp, Artificial Sequence
  ENSG00000177842_15 (sequence is synthesized)
cgcccaatatggtgaaaccccgtctctcctgaaaaaaaaaaacacaaaaattagccaggcatgg

SEQ ID NO: 620902 - DNA, 120 bp, Artificial Sequence
  ENSG00000177842_16 (sequence is synthesized)
gactttgtctcaaaaacagtaaaaaatgaaaatggcattagatttttcaagagcaaccttcaaagtcagatgacaatgtgtatgccttcagacttctcatggaaaatgttttcccctgca

SEQ ID NO: 620903 - DNA, 120 bp, Artificial Sequence
  ENSG00000177842_17 (sequence is synthesized)
attctatactccaaagtataagtatagaataaaggcatttcagaccctttaaatctgaaatctttatctcccatgcatcctttctcatatgtgcaacactacacaaggagtaaaccagta

SEQ ID NO: 620904 - DNA, 120 bp, Artificial Sequence
  ENSG00000177842_18 (sequence is synthesized)
aataaaaagacagatatatggattccctattgcagtccgtacgtcagaagtctcctaaattcaaaaacgggccctgtccatgtggagccaaatgcatcttggaagacattcctagtaggg

SEQ ID NO: 620905 - DNA, 120 bp, Artificial Sequence
  ENSG00000177842_19 (sequence is synthesized)
tgcaaacttccagagacctatctcaggttcagtgtccacccaccctacttattcttcagtttgtcttcactagacagttgtactctgtgcctttgcaaaagtcaggatgtatatactctt

SEQ ID NO: 620906 - DNA, 120 bp, Artificial Sequence
  ENSG00000177842_20 (sequence is synthesized)
tgagtcaggtgcaaggcaccatttgtcttaaatttattctcattgctgtttcaagtgacctcaaagcaggcagcattttcttgcaattccatctagttattttttatgatcatggaagaa

SEQ ID NO: 620907 - DNA, 120 bp, Artificial Sequence
  ENSG00000177842_21 (sequence is synthesized)
cctaccattattgctgttacctgtggaaatgagggaagatgtaaatgtgttaggttttagcatcccctctggcagccagcttgattttgcaggaagcagagagtagtgattaataataca

SEQ ID NO: 620908 - DNA, 120 bp, Artificial Sequence
  ENSG00000177842_22 (sequence is synthesized)
gagccaggcagactttggtttgagtccaggtgtttgtccttggttaagttacaaaaactgcactagtttccttatctgtaaaatgaggatgacagttaatctacctcataggtttgtgtt

SEQ ID NO: 620909 - DNA, 120 bp, Artificial Sequence
  ENSG00000177842_23 (sequence is synthesized)
taatctacctcataggtttgtgttggggattaaatgcattatttgtagaagtgtttcaaacagtgactacatataataaaagtattacctattattggccgggcacagtggctcatgcct

SEQ ID NO: 620910 - DNA, 120 bp, Artificial Sequence
  ENSG00000177842_24 (sequence is synthesized)
tcctagagaggaggggcatggaaaacgcacttccggcggagggtctcaagctttccccggtgtcggcggcaggtggaatttccacgctttatctgcgcctgcgccgcgcgggattcgcgg

SEQ ID NO: 620911 - DNA, 120 bp, Artificial Sequence
  ENSG00000177842_25 (sequence is synthesized)
gacggccggccagctaatgcttccgtcttggccaccttgcgagcgctcgggttgagtttcccgggcttccctgactcggctacctgttctggaggtcaggctttgggcccttgcagaggt

SEQ ID NO: 620912 - DNA, 120 bp, Artificial Sequence
  ENSG00000177842_26 (sequence is synthesized)
cgccgaggggcccgcgccgccgccagagcctgggcccagtccccagtcttcagagacgccctcgaccttcctgctccgaggagctggcctgatgtcctcgggtcgcgtttcacttctccg

SEQ ID NO: 620913 - DNA, 120 bp, Artificial Sequence
  ENSG00000177842_27 (sequence is synthesized)
aaccctgaggcagtgtgtgaagctgggacgccagccatgttccagaccgcttggcgccaggctgacctcaaattgggctcaagcaatcctccccgctcagcctcccaggtacctgggact

SEQ ID NO: 620914 - DNA, 120 bp, Artificial Sequence
  ENSG00000177842_28 (sequence is synthesized)
gcggtccgagctgaagaggttcgcggtccggtttcacttctccgaaccctgaggcagtgtgtgaagctgggacgccagccatgttccagaccgcttggcgccagagacaatcttactctg

SEQ ID NO: 620915 - DNA, 120 bp, Artificial Sequence
  ENSG00000177853_0 (sequence is synthesized)
ggagaccattcccagtcagcaagggcttgggaagtgcatacagttcctgctcctggtgtctactctgaagagcacagagtagacgtttgtctgccatttcaccggcagtaagatcagcag

SEQ ID NO: 620916 - DNA, 120 bp, Artificial Sequence
  ENSG00000177853_1 (sequence is synthesized)
ctgctggtgagcaaagaggtagtagtgggtcactggactggtgggcgccggggccgcgcgctagatggagaggtcagcggcgaacccagctccatggcctagtctcgtcagaccgagcgc

SEQ ID NO: 620917 - DNA, 120 bp, Artificial Sequence
  ENSG00000177853_2 (sequence is synthesized)
ggaccctgccggcctccgttctcttccgcttgtctcagatatcatctcttcttttgatcactgttcctgattgtgacattgtgcaagtgttaaattgtgtgccttttgttcctgaagaaa

SEQ ID NO: 620918 - DNA, 120 bp, Artificial Sequence
  ENSG00000177853_3 (sequence is synthesized)
gagatgtctcctactctttgtgttggataggtcctgggatctttgaaatgctaagattcttggataccacagtatcataaaattcctctaaatgcattggtgctagcaatcccctactct

SEQ ID NO: 620919 - DNA, 120 bp, Artificial Sequence
  ENSG00000177853_4 (sequence is synthesized)
gtctggcctctggatctagcttgaagttctggattcatttccttcttccttgtacctcagcctgagccttctgtcacccaaagggctccagctggtttttcactcaggcctcactttatc

SEQ ID NO: 620920 - DNA, 120 bp, Artificial Sequence
  ENSG00000177853_5 (sequence is synthesized)
ttccaagatgaggaaactgaggtccagagaagttgaagttttcccaaggtcacacagcagagctggaactagagcttgcatttcctgacttccagattagtgttatttttacttcaaact

SEQ ID NO: 620921 - DNA, 120 bp, Artificial Sequence
  ENSG00000177853_6 (sequence is synthesized)
attacttcttggtgagttattgtgggaaaaatcctgtatattgaagatgtctctacacagtatcgtttcctgtttaaattacagataacttcaagagttttcagaaaaaaagaaattggg

SEQ ID NO: 620922 - DNA, 120 bp, Artificial Sequence
  ENSG00000177853_7 (sequence is synthesized)
acttttttggttaaatcatgccatctgaacagaaacagttattttgtgatgaaaaacaaactactttaaaaaaagattatgatgtgaaaaatgagatagttgataggtcggcacctaaac

SEQ ID NO: 620923 - DNA, 120 bp, Artificial Sequence
  ENSG00000177853_8 (sequence is synthesized)
caaaaatttcaggaagtattcattatgcactaaaaaatgtgaaaattgatttgccaaaaataaatattccaaatgaagtcctattgaaacatgaagttgacaaatacagaaaattatttc

SEQ ID NO: 620924 - DNA, 120 bp, Artificial Sequence
  ENSG00000177853_9 (sequence is synthesized)
agagtaaacagcagactgcaagaaaatctatcagtataaagactgtaagctgtgtagaggagtgtacattgcttcataagtctgagagagctgaagaagagggtgtaaaaatgtctgcaa

SEQ ID NO: 620925 - DNA, 120 bp, Artificial Sequence
  ENSG00000177853_10 (sequence is synthesized)
aaatactcaatttcagctgtttaaaatgccgagacaacactcgatatagcccaaatgatttgcagaaacactttcaaatgtggcaccatggcgaattaccttcatatccttgtgaaatgt

SEQ ID NO: 620926 - DNA, 120 bp, Artificial Sequence
  ENSG00000177853_11 (sequence is synthesized)
gcaacttttcagcaaatgactttcaggtatttaaacaacacagacgaacccatagaagcactttagtaaaatgtgacatttgtaacaatgagagtgtatatactttactgaacttgacaa

SEQ ID NO: 620927 - DNA, 120 bp, Artificial Sequence
  ENSG00000177853_12 (sequence is synthesized)
agcatttcacatccacacattgtgttaatggtaattttcaatgtgaaaagtgtaagttctccacccaggatgttggcacatttgttcagcacattcatagacataatgaaattcattata

SEQ ID NO: 620928 - DNA, 120 bp, Artificial Sequence
  ENSG00000177853_13 (sequence is synthesized)
agtgtggtaaatgtcatcatgtatgttttaccaaaggagagcttcagaagcaccttcatattcattctggtacttttcccttcacttgtcaatattgtagctatggtgccaccaggagag

SEQ ID NO: 620929 - DNA, 120 bp, Artificial Sequence
  ENSG00000177853_14 (sequence is synthesized)
aacaccttgtaagacatgttataactttgcacaaagaacatttatatgcaaaagaaaaactggaaaaagacaaatatgaaaaaagaatggcaaagacttctgcaggacttaagctaatac

SEQ ID NO: 620930 - DNA, 120 bp, Artificial Sequence
  ENSG00000177853_15 (sequence is synthesized)
tgaaaagatataaaataggtgcatcaaggaagacgttctggaaacgtaagaaaattaacagtggaagtgacagaagtatagaaaagaacactcaagtgcttaagaaaatgaacaaaacac

SEQ ID NO: 620931 - DNA, 120 bp, Artificial Sequence
  ENSG00000177853_16 (sequence is synthesized)
agactaaatctgaagaccagagccatgttgttcaagagcatttaagtgaagaaaaggatgaaagactacactgtgagaataatgataaagcccctgaatcagagtcagagaagccaactc

SEQ ID NO: 620932 - DNA, 120 bp, Artificial Sequence
  ENSG00000177853_17 (sequence is synthesized)
ctctgtccactgggcaaggtaatagagctgaagagggaccaaacgctagttcaggtttcatgaagactgctgtactaggacctacactgaaaaatgtaatgatgaaaaataataaactag

SEQ ID NO: 620933 - DNA, 120 bp, Artificial Sequence
  ENSG00000177853_18 (sequence is synthesized)
cagtttcccctaactataatgctacgtttatgggcttcaagatgatggatggaaaacagcatattgtattaaaattggtgcctatcaaacaaaatgtatgttcaccaggctcacagtcag

SEQ ID NO: 620934 - DNA, 120 bp, Artificial Sequence
  ENSG00000177853_19 (sequence is synthesized)
gtgctgcaaaggacggtactgctaatttgcagccccagactttggacactaatggatttttaacaggagtaacaactgagttaaatgacacagtttatatgaaagcagctactccatttt

SEQ ID NO: 620935 - DNA, 120 bp, Artificial Sequence
  ENSG00000177853_20 (sequence is synthesized)
catgttcatcttctatactttcagggaaagcaagttcagaaaaagaaatgactttgatatctcaaaggaataatatgcttcaaacaatggattatgagaaaagtgtatcttctttgtcag

SEQ ID NO: 620936 - DNA, 120 bp, Artificial Sequence
  ENSG00000177853_21 (sequence is synthesized)
caacatcagaattggttacagcatcagtgaatttgaccacaaaatttgaaacaagagataatgttgacttctggggaaatcatctcactcagagtcaccccgaggtattaggtaccacca

SEQ ID NO: 620937 - DNA, 120 bp, Artificial Sequence
  ENSG00000177853_22 (sequence is synthesized)
ttaaaagtccagataaagtcaactgtgttgccaaaccaaatgcatacaacagtggagatatgcataattattgcattaattatggcaactgtgagttacctgttgaatcctccaaccaag

SEQ ID NO: 620938 - DNA, 120 bp, Artificial Sequence
  ENSG00000177853_23 (sequence is synthesized)
gatcattaccttttcataattactcaaaagtgaataattctaataaacgtcgtaggttttcaggaacagcagtgtatgaaaaccctcaaagagaatcttcatccagcaaaacagttgtcc

SEQ ID NO: 620939 - DNA, 120 bp, Artificial Sequence
  ENSG00000177853_24 (sequence is synthesized)
aacaaccaattagtgaatcatttttatcactagtgaggcaggagagctcaaaaccagatagcctattagcatctattagccttttaaatgataaagatggaactttaaaagcaaaatctg

SEQ ID NO: 620940 - DNA, 120 bp, Artificial Sequence
  ENSG00000177853_25 (sequence is synthesized)
aaattgaagaacagtatgttttagaaaaaggacaaaacattgatggacaaaacctgtacagtaatgaaaatcaaaatttagagtgtgcgactgaaaaatctaaatgggaagacttttcta

SEQ ID NO: 620941 - DNA, 120 bp, Artificial Sequence
  ENSG00000177853_26 (sequence is synthesized)
atgtcgattcacctatgatgcctagaatcacatctgttttctctctccagagccaacaggcatcagaatttctgccacctgaagtaaaccaattgcttcaggatgtattgaaaataaaac

SEQ ID NO: 620942 - DNA, 120 bp, Artificial Sequence
  ENSG00000177853_27 (sequence is synthesized)
ctgatgtaaaacaagactctagtaacactccaaataaaggcttgccacttcattgtgaccagtcatttcaaaaacacgagagagaaggcaaaattgttgaatcttcgaaagatttcaaag

SEQ ID NO: 620943 - DNA, 120 bp, Artificial Sequence
  ENSG00000177853_28 (sequence is synthesized)
tgcaaggcatcttcccagttccacctggcagtgtgggtattaatgtgcctacaaatgatttgaatttgaaatttggaaaagaaaaacaagtgtcatcaataccacaagatgtgagagatt

SEQ ID NO: 620944 - DNA, 120 bp, Artificial Sequence
  ENSG00000177853_29 (sequence is synthesized)
cagagaagatgcctagaatttcaggttttggcacattacttaagactcagtcagatgcgataataacacagcagcttgtaaaagacaaactacgagccaccacacaaaatttaggttctt

SEQ ID NO: 620945 - DNA, 120 bp, Artificial Sequence
  ENSG00000177853_30 (sequence is synthesized)
ccattgaacattactaacaagcctgggctaccagttattcctggaaatgcacttccattggttaattcacaaggtatccctgcttctctttttgtaaacaagaaacctgggatggtttta

SEQ ID NO: 620946 - DNA, 120 bp, Artificial Sequence
  ENSG00000177853_31 (sequence is synthesized)
acacttaataatgggaaacttgaaggtgtttccgctgtcaaaaccgagggtgccccagctcgtggaactgtgactaaggagccttgcaaaacacctattttgaaggtagaaccaaacaat

SEQ ID NO: 620947 - DNA, 120 bp, Artificial Sequence
  ENSG00000177853_32 (sequence is synthesized)
aattgtcttacacctggactttgttccagcattggcagttgtttgagcatgaaaagtagctcagaaaatactttgccattaaaaggcccttacattttgaaaccaacgagttctgtgaaa

SEQ ID NO: 620948 - DNA, 120 bp, Artificial Sequence
  ENSG00000177853_33 (sequence is synthesized)
gctgttcttattcctaacatgctatctgagcaacagagcactaagttgaatatctccgattcagtaaaacagcagaatgagatttttccaaaaccacctctttataccttcttgcctgat

SEQ ID NO: 620949 - DNA, 120 bp, Artificial Sequence
  ENSG00000177853_34 (sequence is synthesized)
ggcaaacaagctgtttttttaaagtgtgtgatgccaaataaaactgagctgcttaagcccaaattagtccaaaatagtacttatcaaaatatacagccaaagaaacctgaaggaacacca

SEQ ID NO: 620950 - DNA, 120 bp, Artificial Sequence
  ENSG00000177853_35 (sequence is synthesized)
caaagaatattgctgaaaatttttaaccctgttttaaatgtgactgctgctaataatctgtcagtaagcaactctgcatcctcattgcaaaaagacaacgtaccatctaatcagattata

SEQ ID NO: 620951 - DNA, 120 bp, Artificial Sequence
  ENSG00000177853_36 (sequence is synthesized)
ggaggagagcagaaagagccagaatctagagatgccttacccttcttactagatgacttaatgccagcaaatgaaattgtgataacttctactgcaacatgcccagaatcttctgaggaa

SEQ ID NO: 620952 - DNA, 120 bp, Artificial Sequence
  ENSG00000177853_37 (sequence is synthesized)
ccaatatgtgtcagtgactgttcagagtccagggtattaaggtgtaaaacaaattgtagaattgagaggaacttcaatagaaaaaagacttccaaaaaaattttttcaaaaacaaaaact

SEQ ID NO: 620953 - DNA, 120 bp, Artificial Sequence
  ENSG00000177853_38 (sequence is synthesized)
catggaagtaaagactctgaaactgcctttgtatctagaaacagaaactgtaaacgaaagtgtagggatagttaccaagaacctccaagaagaaaagcaacattgcatagaaagtgtaaa

SEQ ID NO: 620954 - DNA, 120 bp, Artificial Sequence
  ENSG00000177853_39 (sequence is synthesized)
gaaaaggcaaaacctgaagatgtccgtgaaacatttggatttagcagacctaggctttcaaaagattccatcagaactttgcggcttttcccttttagttctaaacagcttgtgaaatgt

SEQ ID NO: 620955 - DNA, 120 bp, Artificial Sequence
  ENSG00000177853_40 (sequence is synthesized)
cctaggagaaaccaaccagttgtagttttgaatcatcctgacgcagatgcaccagaagtagtaagtgtaatgaaaactattgctaaatttaatggacatgtacttaaggtttcattgtca

SEQ ID NO: 620956 - DNA, 120 bp, Artificial Sequence
  ENSG00000177853_41 (sequence is synthesized)
aaaagaactataaatgctttactgaaaccagtttgttataaccctcctaaaacaacttatgatgatttttccaagaggcacaaaacatttaaacctgttagttctgtgaaagaaagattt

SEQ ID NO: 620957 - DNA, 120 bp, Artificial Sequence
  ENSG00000177853_42 (sequence is synthesized)
gtgctaaaattaacactcaaaaagacaagcaaaaacaattaccagattgtgaagactacctctgaaaatattttgaaggctaaatttaactgttggttttgtggtagagtatttgacaat

SEQ ID NO: 620958 - DNA, 120 bp, Artificial Sequence
  ENSG00000177853_43 (sequence is synthesized)
caggatacttgggctggtcatgggcagagacatttaatggaagctactcgggattggaacatgttagaatagtttaccataattaccaaggaaaagaaaagtaaaattaccttagaagaa

SEQ ID NO: 620959 - DNA, 120 bp, Artificial Sequence
  ENSG00000177853_44 (sequence is synthesized)
aacaacgggttcagttaccataatgcagacattttctacttcagtatagtacctgaaatcgaacattttaaaagttgattgtatttctgtggaagagtaaaagttgtatgtatgatattt

SEQ ID NO: 620960 - DNA, 120 bp, Artificial Sequence
  ENSG00000177853_45 (sequence is synthesized)
gaaaatgctatccctgcactcaaaagttttgaaagaaactaatcacagcacagaagtaccttgatttaattttttaaacgtgttctcgggaagttagggctaaagaaaattttgataaaa

SEQ ID NO: 620961 - DNA, 120 bp, Artificial Sequence
  ENSG00000177853_46 (sequence is synthesized)
caattttcccactttagttctttagtgactcttagtagagggtaatggctgacacccccattccctctcttcttccaccagccttatgcatctaagtgtagctcctctggagatggagag

SEQ ID NO: 620962 - DNA, 120 bp, Artificial Sequence
  ENSG00000177853_47 (sequence is synthesized)
ctctttcatcgtagaactgaaggagtttctcacatttgtgaagatactttgagagaacctgggtaaagaagtcactctatatctgctaaatatagttattttgaaggatattaggctcct

SEQ ID NO: 620963 - DNA, 120 bp, Artificial Sequence
  ENSG00000177853_48 (sequence is synthesized)
tgaaagtacatttaactcactacagttacacctcatacaatgcttgaagagtttttggcaagtaaattttttttccagttgaactctgtcacttgttagagattgggaacactctcccaa

SEQ ID NO: 620964 - DNA, 120 bp, Artificial Sequence
  ENSG00000177853_49 (sequence is synthesized)
ggtgattttctttttctaagtgactgtgtcaaatgttgcagtagatgggcagcttcaagagaagaatttaaactctttgtctcattgaaagtttggttaaagaacttgaacatatttcta

SEQ ID NO: 620965 - DNA, 120 bp, Artificial Sequence
  ENSG00000177853_50 (sequence is synthesized)
aatttgattatattctctgatgatccctttgcacagaactatgcttatctcatgtttgtcctccataaacaaatggccatttttttcttcttggttcccatccctttaaaaagagtggaa

SEQ ID NO: 620966 - DNA, 120 bp, Artificial Sequence
  ENSG00000177853_51 (sequence is synthesized)
cataggagcacttccaagggagtggcttttcttgaaaattaaaattgtttaccaaaacagtattttgaagcaagatcatatttttgtctgtattcactttattatttgaacatgtccaaa

SEQ ID NO: 620967 - DNA, 120 bp, Artificial Sequence
  ENSG00000177853_52 (sequence is synthesized)
ttaggacaaagcatttctgttagctgcttctcagtgtgactgacaacccaaaacatatatacagattgttggcatttgcaaaaggaagcatcaatagtggacccagaggcagtgcataaa

SEQ ID NO: 620968 - DNA, 120 bp, Artificial Sequence
  ENSG00000177853_53 (sequence is synthesized)
accttaggatagattcctaagggacatgcccaacagagttttaaaatggatgttttcatgatgacaacagaatcatagatttagatttttcaccttgtaagtttggatcaaattttgctg

SEQ ID NO: 620969 - DNA, 120 bp, Artificial Sequence
  ENSG00000177853_54 (sequence is synthesized)
gttctttggataatggagttcttgtgttaacaaattacgtgctatatgattttttgttacattgttacaagtgttaatgacattttcattaatggatgaaaacttcagggcttcttttct

SEQ ID NO: 620970 - DNA, 120 bp, Artificial Sequence
  ENSG00000177853_55 (sequence is synthesized)
gtatataacaaattaagtctgtacatatttttgtaccttttatgtaaattttgcacagaaatttttggcataagtttattttctttcagtttagttcagtgcatgcactaataaaactgg

SEQ ID NO: 620971 - DNA, 120 bp, Artificial Sequence
  ENSG00000177853_56 (sequence is synthesized)
ttgtttaatttaaaaggaatatataagactttacccatgttattttcttggtttttatttcagatgtagattttgtttttgaggtaaattcgttcttcagggattgaacactattgttag

SEQ ID NO: 620972 - DNA, 120 bp, Artificial Sequence
  ENSG00000177853_57 (sequence is synthesized)
caagtgcctaaaaaagatgtgaaacagtttacatatgtcaactgtaacagtaggtcccaaatgggcccattcccctaatagttttatttttaaagaaagccatacatagaatgcttcaag

SEQ ID NO: 620973 - DNA, 120 bp, Artificial Sequence
  ENSG00000177853_58 (sequence is synthesized)
ctatcttgctatgcacattatacttgtactgttttgtgcagtttgtctactttcttagtgaagtattttttgtataaaatgttacaattgtgtttcttaaattgagcctaagaatggagt

SEQ ID NO: 620974 - DNA, 120 bp, Artificial Sequence
  ENSG00000177853_59 (sequence is synthesized)
taattggaaatatacagtatatattaataatgtacatggtgtttaaagaatggtaagcattgttaatttctgtaatgaacattttcaattaaatttatcttgtttgtgtttacacaataa

SEQ ID NO: 620975 - DNA, 120 bp, Artificial Sequence
  ENSG00000177853_60 (sequence is synthesized)
agattttaaagtgtatgtgttttttcaatgctagttaactctacaagatagataaaagtgtgggattttttttcttcccaaaatcatagatgatatattgtttaagaaaggtaacatata

SEQ ID NO: 620976 - DNA, 120 bp, Artificial Sequence
  ENSG00000177853_61 (sequence is synthesized)
ccataattttactatggttatgctggcaaggtgagccatagagaggcttatagtcttcagtaccctaacagcaataaaattaaaatgctctgtttgttacatatagatctgttatgagac

SEQ ID NO: 620977 - DNA, 120 bp, Artificial Sequence
  ENSG00000177853_62 (sequence is synthesized)
atcacctgctgtaaatagcaaggagagagaaggaactttcctgctaatattcgcagcactataacattacatttcagaatagccatatcaggaaaataatgtcgagatatgtacttcttg

SEQ ID NO: 620978 - DNA, 120 bp, Artificial Sequence
  ENSG00000177853_63 (sequence is synthesized)
cctttaagttttaacagccatttaaagtaagctttgtgctccagatattctagttggaactttttctgattttgttaacttaagttattctgagggaggcagacctgcttagagtttcat

SEQ ID NO: 620979 - DNA, 120 bp, Artificial Sequence
  ENSG00000177853_64 (sequence is synthesized)
tattgccattgcagaaaatccaaaacaaaagcctgtatcctttattttttgtgtgtggctttccaaagagggctttccaaaatatgattttcagtagttcgaggttcttattacaattga

SEQ ID NO: 620980 - DNA, 120 bp, Artificial Sequence
  ENSG00000177853_65 (sequence is synthesized)
agagttagttttagttttgcagttgaatttctgtgtgaggaatttgttttattttttctagtttgtccatctccactgaaatgggtttcttactatttggcaagtacttaaaaaacataa

SEQ ID NO: 620981 - DNA, 120 bp, Artificial Sequence
  ENSG00000177853_66 (sequence is synthesized)
ttcagttttcaaagaatttatcttgctaagtattcagtaacacaaattgaaatgtaatagtttttttaatggaaaatattttcattggggggttagcaaattttttcaataaagggtcag

SEQ ID NO: 620982 - DNA, 120 bp, Artificial Sequence
  ENSG00000177853_67 (sequence is synthesized)
ataaataagcttcgtaggccttctagtttctgtcctaactactcaattctcataatgcagaaaaaaaccatagacaatatgtaaatgaattagtgtggctatgttttaataaaacaattt

SEQ ID NO: 620983 - DNA, 120 bp, Artificial Sequence
  ENSG00000177853_68 (sequence is synthesized)
ggtcattgggggccatttcttgcagagatgccctgctccctgacgcgctcgctcttctccagagttggccaaaggtgctcttccccgcagaccctaaccacacccagtggcagttggatt

SEQ ID NO: 620984 - DNA, 120 bp, Artificial Sequence
  ENSG00000177853_69 (sequence is synthesized)
ggtatggtaaagattgaaatactggagtatatagtctattaagtagtaagttggtatgttttaatattggactaaataaagtaaaatataggttaagtatcccaaatccaaaaatccaga

SEQ ID NO: 620985 - DNA, 120 bp, Artificial Sequence
  ENSG00000177853_70 (sequence is synthesized)
atgcaaaattttttgagtgctgacatgatggtcaaaggaaatgctctttggaacattttggattttgaatttttggatttgagatgctcaactggtataatgcaaatactctaaaatcct

SEQ ID NO: 620986 - DNA, 120 bp, Artificial Sequence
  ENSG00000177853_71 (sequence is synthesized)
ggagaagatgccaggataacgcagctggaagcgacagtgctgtgttagaacccaggcctatcagactctaggatccagcctcgaccactccctgatacactacatggcttcgttgtactt

SEQ ID NO: 620987 - DNA, 120 bp, Artificial Sequence
  ENSG00000177853_72 (sequence is synthesized)
acttggcagaggtatgggtttttggtggatttgtctgcaagaaagaatttcagataattaaaggacaaagcacaatatgagtaagtttgactttttgtttacactgatgatgctgtgaac

SEQ ID NO: 620988 - DNA, 120 bp, Artificial Sequence
  ENSG00000177853_73 (sequence is synthesized)
aggcacatcacaaataaatcaatacaaatggccaataaaatgtatctaaagataaaagagccaccaaaaccttaaagataagtaagactcttccttttagttttgaaaaaggaggaaatc

SEQ ID NO: 620989 - DNA, 120 bp, Artificial Sequence
  ENSG00000177853_74 (sequence is synthesized)
ttgactaaagtattgtattttagtcaagttcaataattaacccaattagtaggtctctgcaactctacacagttattttaaagttgctcaacaccttttaacacgtaactgcaaaacaat

SEQ ID NO: 620990 - DNA, 120 bp, Artificial Sequence
  ENSG00000177853_75 (sequence is synthesized)
gtgtcactgtgcagtgaaacaatgcacatgttaattcctgcagcaacaagaggaaactgatctttaaaggaaaggattcttacttctgggcaggaggaaacactggtgactgcacagctt

SEQ ID NO: 620991 - DNA, 120 bp, Artificial Sequence
  ENSG00000177853_76 (sequence is synthesized)
cttgtctgtgacttgaccctcggtggcgttcagcaggtataggtttttctggatcaggaaaattatcatattaggattagagtgaaatgtctgtcctcatcccaaaacccagcaacatca

SEQ ID NO: 620992 - DNA, 120 bp, Artificial Sequence
  ENSG00000177853_77 (sequence is synthesized)
gctgagaagaaccaaatttgatcagaagtcttcccgggaacatgtcttagttactgagatgtcatggatctgtgcacttgccagtctgttgatgtggttgtgctatgaggaccaggactc

SEQ ID NO: 620993 - DNA, 120 bp, Artificial Sequence
  ENSG00000177853_78 (sequence is synthesized)
cctcccagcagtgttacaggtacatcctaccacctctgcattcatccactggcaatgtacatagagactgaacccacgggccctgaaactttaagtgtgtgagtataggtggaagccaga

SEQ ID NO: 620994 - DNA, 120 bp, Artificial Sequence
  ENSG00000177853_79 (sequence is synthesized)
agatgagaacattttagccaccctctaaacaactcaccctctacttgccatgtggcctccacacaggtggagacaacaccctggtgggtcttgattagtcataagacgtggtataagcag

SEQ ID NO: 620995 - DNA, 120 bp, Artificial Sequence
  ENSG00000177853_80 (sequence is synthesized)
tgtgttactgataagaggcacactactgagttcataaatgatctctttttgcaaaattaattggatcaaattcaaggttatccctataataatgtaaatctcacttgcatttcagtgttt

SEQ ID NO: 620996 - DNA, 120 bp, Artificial Sequence
  ENSG00000177853_81 (sequence is synthesized)
tcctgagcagaagaggaaagggtgggaaatgagcataaacctgaagtgtaagaaatttatgttgaagcccatagtgaactctactgctgaaccattaataaatgtgatcacacattattt

SEQ ID NO: 620997 - DNA, 120 bp, Artificial Sequence
  ENSG00000177853_82 (sequence is synthesized)
cagaggttgagacttgtctaaagtaacatgaccagtaagtgcttgaattaatgcaggtaggtagtgatgggtatgttctaatctgccaagggcttttccttgctgtcatctggcttgagt

SEQ ID NO: 620998 - DNA, 120 bp, Artificial Sequence
  ENSG00000177853_83 (sequence is synthesized)
tctgaggatataaattcatatagccaaaatggtagggaaccagaaaggtaatgagtagatggactttaggactacactagggaaatggtgctgctgttctttttaatttcttcctttttg

SEQ ID NO: 620999 - DNA, 120 bp, Artificial Sequence
  ENSG00000177853_84 (sequence is synthesized)
ttctttttgtttggtttctaacttgttagtaatgataagcagataccgtctttggttgtttccgttagatgaatgaagcttttgttttaattgtagattatccctgaggaactaaggaaa

SEQ ID NO: 621000 - DNA, 120 bp, Artificial Sequence
  ENSG00000177853_85 (sequence is synthesized)
tagaaaatctggagagaagtctgttgggattctcacagggaatagctattagatcaactaagcaaatgaaaaagttaatagtatatggataaaccacatgtgtgtaattggaacttctta

SEQ ID NO: 621001 - DNA, 120 bp, Artificial Sequence
  ENSG00000177854_0 (sequence is synthesized)
accggcgctgctcggatcctcccttttcggagatttgaatttcccccagcgaggcgagtgaggcgaaatacccgtatggtgatagctggccttttcgcgccaatactgaaaaaggcagaa

SEQ ID NO: 621002 - DNA, 120 bp, Artificial Sequence
  ENSG00000177854_1 (sequence is synthesized)
cgttcctccgctggcgccagccaatcagcaggactcctgccttccttcggggcaaggtcgcagcatctgcctcggaaatcacgaaatcacggggcttctttctgctggctcagccgggag

SEQ ID NO: 621003 - DNA, 120 bp, Artificial Sequence
  ENSG00000177854_2 (sequence is synthesized)
gcccagagtgttctgcagaggctgcgtattgaaggctgctctctgaagctccctgccccaggtcacgccgccggttccagatgaatccagagtgggggcaggccttcgtgcacgtggccg

SEQ ID NO: 621004 - DNA, 120 bp, Artificial Sequence
  ENSG00000177854_3 (sequence is synthesized)
tggccggtggcctctgtgccgtggctgtgttcacgggcattttcgacagtgtttccgtgcaagtgggctatgagcactacgccgaggcgcccgtggccggcctccctgccttcctggcca

SEQ ID NO: 621005 - DNA, 120 bp, Artificial Sequence
  ENSG00000177854_4 (sequence is synthesized)
tgccgttcaactcactcgtgaacatggcctacacgctgctggggctgtcgtggctgcacaggggcggcgcgatggggctgggtccccgctacctgaaggacgtgttcgcagccatggccc

SEQ ID NO: 621006 - DNA, 120 bp, Artificial Sequence
  ENSG00000177854_5 (sequence is synthesized)
tgctctatggccccgtgcagtggctgcgcctgtggacgcagtggcgccgtgccgcggtgctggaccagtggctcacactgcccatctttgcatggcccgtggcctggtgcctctacctag

SEQ ID NO: 621007 - DNA, 120 bp, Artificial Sequence
  ENSG00000177854_6 (sequence is synthesized)
ggccctggctgttcctctctcttgagtgcgtctccctggccagttatggcctcgctctgctgcatccccagggcttcgaggtcgcactgggtgctcacgtggtggccgctgtggggcagg

SEQ ID NO: 621008 - DNA, 120 bp, Artificial Sequence
  ENSG00000177854_7 (sequence is synthesized)
cgctgcgcacccacaggcactatggcagcaccacctcggctacctacttagctttgggggtgctctcttgcctgggctttgtggtcctcaagctgtgtgaccatcagctcgcacggtggc

SEQ ID NO: 621009 - DNA, 120 bp, Artificial Sequence
  ENSG00000177854_8 (sequence is synthesized)
gtctcttccagtgcctcacaggccacttctggtccaaggtctgtgacgtgctccagttccactttgcgtttttgtttctgacgcatttcaacactcacccaagattccatccctctggcg

SEQ ID NO: 621010 - DNA, 120 bp, Artificial Sequence
  ENSG00000177854_9 (sequence is synthesized)
ggaagacgcgttgaacccagggaagaacctgctgaaaaccgatgacccccagcattgaaatggactctgagatggcagcgtggtgccagtgtcagacatcctgtgtgtgatgatatgcac

SEQ ID NO: 621011 - DNA, 120 bp, Artificial Sequence
  ENSG00000177854_10 (sequence is synthesized)
tgatcacacaagactgccctttcctgagaagctgcgggcttcggtgtggaggggtggagtgctgtgatctcgacaacttactttcaaagacataaagcacagatctccgcacaggggatg

SEQ ID NO: 621012 - DNA, 120 bp, Artificial Sequence
  ENSG00000177854_11 (sequence is synthesized)
tgtgtgttcctgatgtaatttgcataacttttctgtagtttgaaatgtttccaaataaatattggcaaggggagtggaaatgacaccaagaagcccctcatgctcatggttggacagaga

SEQ ID NO: 621013 - DNA, 80 bp, Artificial Sequence
  ENSG00000177868_0 (sequence is synthesized)
ccggcgcgcggccccgcccaggacgaggggcggtgggcaggcagcgctgggtccagtggtcgggggaaggcgaggattac

SEQ ID NO: 621014 - DNA, 120 bp, Artificial Sequence
  ENSG00000177868_1 (sequence is synthesized)
tggtcgggggaaggcgaggattaccctcccggaggcgttgtctgcgactcggcggaggctccaacttccagtggcccggtcgggaaagatcagagcctcctaagaaatatccagaagtca

SEQ ID NO: 621015 - DNA, 120 bp, Artificial Sequence
  ENSG00000177868_2 (sequence is synthesized)
agccatggatccacctgcacgtaaagaaaaaaccaaagttaaagaatctgtcagcagagttgagaaggccaaacagaaatcagcccagcaggagctgaagcagagacaaagagcagagat

SEQ ID NO: 621016 - DNA, 120 bp, Artificial Sequence
  ENSG00000177868_3 (sequence is synthesized)
ccccaggttcaaaccagatgggatcctgagagctttgagagggtgttgccagttttaagctgagatggcccatttggagccttacagaactagaccagaagacatttgtggataaatctg

SEQ ID NO: 621017 - DNA, 120 bp, Artificial Sequence
  ENSG00000177868_4 (sequence is synthesized)
aactcacttcctgtgtgtaacttctaacttcactggttcctcccatctgaattggccacatgcttgctgaagagacttgttttcttcttctaagacagtggttttgttttttgggttttt

SEQ ID NO: 621018 - DNA, 88 bp, Artificial Sequence
  ENSG00000177868_5 (sequence is synthesized)
gggttttttctttttctattgtttgagaaaaatcagtgtttctcatgaaactctatatcttctccaaaaatacaaataaaatactaat

SEQ ID NO: 621019 - DNA, 120 bp, Artificial Sequence
  ENSG00000177868_6 (sequence is synthesized)
agaagctacagataagaaaaccattgatcagagaaatggtgatatagccaagggagctctcactggaggaacagagctatctatacttccgtgtacaacaaatgctctgggaaatggaga

SEQ ID NO: 621020 - DNA, 120 bp, Artificial Sequence
  ENSG00000177868_7 (sequence is synthesized)
accagttgccagcccatatgtggttacctcacaccaatcaaaagtgactgtggagagcacccccaatttggaaaaccaaatgaaaatggagtatctctgttcagaatgaaaattttgaag

SEQ ID NO: 621021 - DNA, 120 bp, Artificial Sequence
  ENSG00000177868_8 (sequence is synthesized)
aaattataaatttacccattggatcgaaaccatccagattagatgtcactaacagtaagagcccagaagttcctttgaatccagttttggcctttgatgatgaaggaacgcttgggcccc

SEQ ID NO: 621022 - DNA, 120 bp, Artificial Sequence
  ENSG00000177873_0 (sequence is synthesized)
agagaggctgtagggaccgacggccggccagctaatgcttccgtcttggccaccttgcgagcgctcgggttgagtttcccgggcttccctgactcggctacctgttctggaggtcaggct

SEQ ID NO: 621023 - DNA, 120 bp, Artificial Sequence
  ENSG00000177873_1 (sequence is synthesized)
ttgggcccttgcagaggtcgccgaggggcccgcgccgccgccagagcctgggcccagtccccagtcttcagagacgccctcgaccttcctgctccgaggagctggcctgatgtcctcggg

SEQ ID NO: 621024 - DNA, 120 bp, Artificial Sequence
  ENSG00000177873_2 (sequence is synthesized)
tcgcgctccgcaggttcttactttttcaaacctagagggcagtgcatgaagccaggggtcatcagccatgctccagacagtgtggttccagggcttgggcaggaacctgttgtttcagga

SEQ ID NO: 621025 - DNA, 120 bp, Artificial Sequence
  ENSG00000177873_3 (sequence is synthesized)
gccagtaacctttgaggatgtggctgtgtacttcacccagaatgaatgggccagcctgcaccctacgcagagggccctatacagggaggtgatgctggagaattatgcaaatgtgacttc

SEQ ID NO: 621026 - DNA, 120 bp, Artificial Sequence
  ENSG00000177873_4 (sequence is synthesized)
cttgtacccaactgcagggggctttcctctggatacagagagaactgagaaggttcctggtgcactgtcttcattccttccatcttccagttccctggagctgatcttggccctattgcc

SEQ ID NO: 621027 - DNA, 120 bp, Artificial Sequence
  ENSG00000177873_5 (sequence is synthesized)
tatgtcagcatttccattccccaaaccagatctgatattccagctggagcaaggagaagcagcatggggcccagatccctggacacttgctgggggagaggccctgagaggcatgtgcac

SEQ ID NO: 621028 - DNA, 120 bp, Artificial Sequence
  ENSG00000177873_6 (sequence is synthesized)
aggtggtaaaaccaagactgagaatgaggaaaaaactgcacagctaaacatttctaaagaatcagagtcccacagactgatagtggagggactgctgatggacgttccccagcaccctga

SEQ ID NO: 621029 - DNA, 120 bp, Artificial Sequence
  ENSG00000177873_7 (sequence is synthesized)
cttcaaggacaggttagagaagtcacagctacatgatacagggaataaaacaaagataggggattgcacagatttgacagtccaggatcatgaatcttccaccactgaaagggaggagat

SEQ ID NO: 621030 - DNA, 120 bp, Artificial Sequence
  ENSG00000177873_8 (sequence is synthesized)
agccaggaaattggaagaaagtagtgtcagcacacatctcattacaaagcagggttttgccaaagaacaggtgttttataaatgtggtgagtgtggcagttactacaacccacattcaga

SEQ ID NO: 621031 - DNA, 120 bp, Artificial Sequence
  ENSG00000177873_9 (sequence is synthesized)
ctttcacctgcatcagagagttcacactaatgagaagccctacacatgcaaagaatgtgggaaaaccttcagatataactcaaaactgtcacggcatcagaaaatccacactggagagaa

SEQ ID NO: 621032 - DNA, 120 bp, Artificial Sequence
  ENSG00000177873_10 (sequence is synthesized)
accatactcatgtgaggaatgtggacaagccttcagtcaaaattcccaccttcttcagcatcagaagctccatggtggacagaggccctatgaatgtactgactgtggtaaaaccttcag

SEQ ID NO: 621033 - DNA, 120 bp, Artificial Sequence
  ENSG00000177873_11 (sequence is synthesized)
ttataattcaaaactgattcggcatcagagaatccatactggggagaagccctttaaatgtaaggaatgtgggaaagccttcagttgtagctatgactgcatcatccatgaacgaattca

SEQ ID NO: 621034 - DNA, 120 bp, Artificial Sequence
  ENSG00000177873_12 (sequence is synthesized)
caatggggagaagccctatgaatgtaaggagtgtgggaagagtttgagttctaattcagttctgattcagcatcagagaatccacactggggagaaaccttatgaatgtaaagagtgtgg

SEQ ID NO: 621035 - DNA, 120 bp, Artificial Sequence
  ENSG00000177873_13 (sequence is synthesized)
caaggccttccaccgcagttcggtatttcttcagcaccagaggttccacactggggaacaactctacaaatgtaatgaatgttggaaaactttcagctgtagctcccgcttcatagtgca

SEQ ID NO: 621036 - DNA, 120 bp, Artificial Sequence
  ENSG00000177873_14 (sequence is synthesized)
tcagagaatccacaatggggagaaaccctatgaatgccaggaatgtgggaagacattcagtcaaaagatcactctggttcagcatcagcgagttcacactggggagaaaccttatgagtg

SEQ ID NO: 621037 - DNA, 120 bp, Artificial Sequence
  ENSG00000177873_15 (sequence is synthesized)
taaggagtgcgggaaagccttcagatggaatgcaagtttcatccagcatcagaagtggcatactaggaagaaactcatcaatggaacagggctatccgcagttaagccctactgtccctg

SEQ ID NO: 621038 - DNA, 120 bp, Artificial Sequence
  ENSG00000177873_16 (sequence is synthesized)
cgccatcctctctcctctgcctccccaacatacctgctctgccctagccccaccagggcctcccttatcttcttcacatgcagtggtacttcctccctctgtgcctttcttcctgctgct

SEQ ID NO: 621039 - DNA, 120 bp, Artificial Sequence
  ENSG00000177873_17 (sequence is synthesized)
aagtcatcccttcagagcccgaatcctttgtctcactccctgtaagccccgtcacgttctcaaaatcctttgcacctcaagttagggattccactggtctcctgattgtgtctattgata

SEQ ID NO: 621040 - DNA, 120 bp, Artificial Sequence
  ENSG00000177873_18 (sequence is synthesized)
ttcctctggtcttgtcttgtataagttgttactgttttcctaacttcattttaaattctcacgcttaaggaccatgtttgattagtttcttttatcccccggtaggaaatggcagtactt

SEQ ID NO: 621041 - DNA, 120 bp, Artificial Sequence
  ENSG00000177873_19 (sequence is synthesized)
attctttatcgtgtccacatttgggctgtattatcagtctgcatctctcttctggggctactggagttggaagagtttgcagaacattttggggtttagggcatatggcattatgattat

SEQ ID NO: 621042 - DNA, 120 bp, Artificial Sequence
  ENSG00000177873_20 (sequence is synthesized)
gatgagatggggcattataattagagactaggagaaatgcaaagcctatgggagaacataatcagataaagtgtccaatgattgctttcaagagcttttttttttttagggggtgggggg

SEQ ID NO: 621043 - DNA, 75 bp, Artificial Sequence
  ENSG00000177873_21 (sequence is synthesized)
attgctttcaagagcttttttttttttagggggtggggggtggtgccggagtttcactcttgtcacccaggctgt

SEQ ID NO: 621044 - DNA, 120 bp, Artificial Sequence
  ENSG00000177873_22 (sequence is synthesized)
acaggcatgagccactgcatctggcctgctttcaggagttaaggagggccatttggtggaccaggggcaaggctcactgaaagaatgtaagacttggaattttttattaccttgatagta

SEQ ID NO: 621045 - DNA, 120 bp, Artificial Sequence
  ENSG00000177873_23 (sequence is synthesized)
tattaccttgatagtataaaaaattatgagggtccttttatgcaaaaagaaaatgaagtgatgagttggcattgatagcaataatgtaaaattatgtctttgagctttattggaagggga

SEQ ID NO: 621046 - DNA, 120 bp, Artificial Sequence
  ENSG00000177873_24 (sequence is synthesized)
tatggtttttcaatttgggttccttctctattttcattttccttttttttttgagacaggttcttgttctgtcatccaggctggattgcagtagtgcgatcatggatcactgcagtgtgt

SEQ ID NO: 621047 - DNA, 89 bp, Artificial Sequence
  ENSG00000177873_25 (sequence is synthesized)
agcaatcctcccacctcagcttcccaagaagctgggaggtagtgcagcctcccagtttctcagaggggcatacaccaccacacccagct

SEQ ID NO: 621048 - DNA, 120 bp, Artificial Sequence
  ENSG00000177873_26 (sequence is synthesized)
gggattacaggcttgagccaccatgtccagcctctattccttttcatatctgttgaatttcagtacccactcatatatgtaggtacaaaaagtgacttggacttgtaccctttagggtag

SEQ ID NO: 621049 - DNA, 120 bp, Artificial Sequence
  ENSG00000177873_27 (sequence is synthesized)
atgcctgagtatagtaatctctaaagctgtacatggatggaacttgttggcatcacactggtgagcaccagaggcaaagaagagaaacctgaccatgacttgctgtagtttctcagaagt

SEQ ID NO: 621050 - DNA, 120 bp, Artificial Sequence
  ENSG00000177873_28 (sequence is synthesized)
gagtccattcctgatgagttactatgcaggcccttggatatgtcctcacacctactccagatttccctatgattaaatctgaattttattggtggcacttttaaattagttttataaaga

SEQ ID NO: 621051 - DNA, 120 bp, Artificial Sequence
  ENSG00000177873_29 (sequence is synthesized)
actgttttgatgacaccaagaaatgttttcagtgtgcagattgctattgtttgaatatccccagcaaaattcttgttgaaacttaatccccattgtaacagtactgggtggggggtcttt

SEQ ID NO: 621052 - DNA, 120 bp, Artificial Sequence
  ENSG00000177873_30 (sequence is synthesized)
aagaggtgatcaggattagccaagttcatcagggtggagcctccatgatgggactggtggctttatgaggagaggaagagcaactggaactgggacacatgcttgctctgtcttgccttt

SEQ ID NO: 621053 - DNA, 120 bp, Artificial Sequence
  ENSG00000177873_31 (sequence is synthesized)
tgatgcctcctgccatgtcatgatgcagcaagtaagcccttaccagatgcctgcacctttatattggacttcttagccttcagaactgtgaactaaataaacctctattctgtataaatt

SEQ ID NO: 621054 - DNA, 120 bp, Artificial Sequence
  ENSG00000177873_32 (sequence is synthesized)
atgtagaagtggctttggaactgagtaatgggtagaggcttgaaaaatctggaagatcaggtcagacaaagcctgtattatctaatggagcattaagggtgattttggccaaggcttaga

SEQ ID NO: 621055 - DNA, 120 bp, Artificial Sequence
  ENSG00000177873_33 (sequence is synthesized)
agagaagactagggaaagtctgaaccttcttagagattacaggaggtccttgaacaacttgggtttcaactgtgtgggtccacttatggactttcttctgcctctgtcacccctgagatg

SEQ ID NO: 621056 - DNA, 120 bp, Artificial Sequence
  ENSG00000177873_34 (sequence is synthesized)
gcaagaccagtctccctcctctccccttctcagcctgcttaacaaaatgacaaggatacagacctttatgatgatccatataatatagtgaattatatttactaaatataatttctctta

SEQ ID NO: 621057 - DNA, 120 bp, Artificial Sequence
  ENSG00000177873_35 (sequence is synthesized)
tgattttcttaatattttctctagctttattataagaatatagtgtctaatatgtataacataaaaaatatgtgttaatcgactgtttcagtaaggctctggtcaacagtagactattag

SEQ ID NO: 621058 - DNA, 120 bp, Artificial Sequence
  ENSG00000177873_36 (sequence is synthesized)
tagttacatttttggggagttaaaagttatacatggcatgggggttggtgcccatatgatgggactgatggctttataagaagaggaagggagacctgagctgacatgcatgctcttgcc

SEQ ID NO: 621059 - DNA, 120 bp, Artificial Sequence
  ENSG00000177873_37 (sequence is synthesized)
atcttgccatgtgatgctttccatcatgttatgacacagcaagaaggccagatacggcccctccacagttcccagccctcggaaccatgagctaaataaacttcttttctttataaatta

SEQ ID NO: 621060 - DNA, 120 bp, Artificial Sequence
  ENSG00000177873_38 (sequence is synthesized)
ttgcaacatcccatgaatcagtggagagggtgaatgacagcagctagtgtgccaagaatatctgcaatgctagtggcaggagacagaggggaagaggcggcaagtgtaggagacgagaca

SEQ ID NO: 621061 - DNA, 120 bp, Artificial Sequence
  ENSG00000177875_0 (sequence is synthesized)
accccagctgctgctgccacactcgcgggcgctgcccggtaatggcctgggggagtcccgagtccgacgcgccgctggcctcagcctggacgcggacccctccgcgagcgcgtctgtgac

SEQ ID NO: 621062 - DNA, 120 bp, Artificial Sequence
  ENSG00000177875_1 (sequence is synthesized)
ccacggaaccggcaggcgctctctgcttgtggcgcccagagggcggcgctgacacgggcgcgatccgggaggcgaggcagggcagggcactttcgtcccggggcgatcccaagagacgcc

SEQ ID NO: 621063 - DNA, 120 bp, Artificial Sequence
  ENSG00000177875_2 (sequence is synthesized)
ggctctgggaccctcgccgggtcctcgtcccgcagcctcttctcggcctcccgcgatcctgcctgcgccctctgcccaggactcgtctctcacgtcggctccccgccagtctcgggagcc

SEQ ID NO: 621064 - DNA, 120 bp, Artificial Sequence
  ENSG00000177875_3 (sequence is synthesized)
tccgcttccctcggctcccgctagcccctcccgggacctctccccctccaccccctcccccaccccggaggccgggctggacgcgacccagagcctccgccacccgcttctgccactcaa

SEQ ID NO: 621065 - DNA, 120 bp, Artificial Sequence
  ENSG00000177875_4 (sequence is synthesized)
tggaggacggtctgctggagatcatgaccaaggacggcggcgacatgccggcgcccctggaggtgtccaccgtgccggcagtgggggacgtgatctccggggagtacaacggcggcatga

SEQ ID NO: 621066 - DNA, 120 bp, Artificial Sequence
  ENSG00000177875_5 (sequence is synthesized)
aggaactgatggagcacctgaaagcccagctgcaagccctgtttgaggacgtgagggccatgaggggggccctggacgagcaggcctcgcacatccaggtgctctcggacgacgtgtgcg

SEQ ID NO: 621067 - DNA, 120 bp, Artificial Sequence
  ENSG00000177875_6 (sequence is synthesized)
ccaaccagcgagccatcgtctccatgtgccagattatgaccactgcgccccgccagggcggcttgggcgtggtcggcggcaaggggagcttccagagcgacccccaagagccggagactc

SEQ ID NO: 621068 - DNA, 120 bp, Artificial Sequence
  ENSG00000177875_7 (sequence is synthesized)
cttcgcctgggatcggggacagcggcttgctgggtcgcgatcccgaggacgaggaggaagaggaagaagagaaggagatgcccagccccgccacaccctccagtcactgtgagcgccccg

SEQ ID NO: 621069 - DNA, 120 bp, Artificial Sequence
  ENSG00000177875_8 (sequence is synthesized)
aaagcccctgtgctggtctccttgggggggacgggccacttgtggagcccctcgacatgcccgacattaccctgctgcaactggagggcgaggcctccctgtgaggggactccgtggggc

SEQ ID NO: 621070 - DNA, 120 bp, Artificial Sequence
  ENSG00000177875_9 (sequence is synthesized)
accttcccgggctgtctttgggtttccgagtgcatgacgcgagggggactgaacggcgcggtgcggcatgcttcacttggacagctgctcttgtgggtcaggcagagagagactccctcg

SEQ ID NO: 621071 - DNA, 120 bp, Artificial Sequence
  ENSG00000177875_10 (sequence is synthesized)
aggaaggatttgtagggtgaaggactttgggagcatcgagaattctttctgcccaactaagcgaattatagcgaactgcggaaaggtgaggctccgggagaggaagcgcccatctctgga

SEQ ID NO: 621072 - DNA, 120 bp, Artificial Sequence
  ENSG00000177875_11 (sequence is synthesized)
ctcccatccatccctatcctgtcctttcccccttcccagacaacaggagaacccgtgaattgtgtaaataaaattctgctttttctattctgaaaaaggacttacctaggaccatggcaa

SEQ ID NO: 621073 - DNA, 120 bp, Artificial Sequence
  ENSG00000177875_12 (sequence is synthesized)
ataatctctaacaatttacctggaaattaaggaattgggggtattttgttctggcaacaggaaatttacccttctgctgaaatccaagatattcagtgctctgcagaagcctctccccct

SEQ ID NO: 621074 - DNA, 120 bp, Artificial Sequence
  ENSG00000177875_13 (sequence is synthesized)
cacagatctctgcggctgctgattggtaaaggaagcttgaggagggaactgcagccctaggaatctgggtgaatggggttccaagggcccctgggctgggaggagctggctatgaatgtg

SEQ ID NO: 621075 - DNA, 120 bp, Artificial Sequence
  ENSG00000177875_14 (sequence is synthesized)
catgaagacataatagctcaacctctaggattttgcatgcagagcggatcctgccttgtcactgacttcatctgggattgcttttccactccctggggcttagagaacaaagagcccggt

SEQ ID NO: 621076 - DNA, 120 bp, Artificial Sequence
  ENSG00000177875_15 (sequence is synthesized)
tcacaggcagagactcgggggtgctcagcagcagcccagatttaggggacatttgagggactcttggggccgcagccaaaaactgtctctcctggctacacctgcttaacttcagttcct

SEQ ID NO: 621077 - DNA, 120 bp, Artificial Sequence
  ENSG00000177875_16 (sequence is synthesized)
ttttctgtcaatatgtccttgcccactgcctctcggtgttgccttcataatgtcttgtgtgtgttatgtgtgtctacttgtgtagtagtgtgtgagccctcaggggcagggcttgtggct

SEQ ID NO: 621078 - DNA, 120 bp, Artificial Sequence
  ENSG00000177875_17 (sequence is synthesized)
ctggtgttaggttcaggggcttcagacccttctacgagctccaagctatcaatggcgcttttctctccctcttcccccaaccagggcatggagcatgtggctgtcctgaggttcttttac

SEQ ID NO: 621079 - DNA, 120 bp, Artificial Sequence
  ENSG00000177875_18 (sequence is synthesized)
tgatgtgccgcccttccacctcctcaagtggtgactttgtgtgccctccccctcctttgtgtattccttctcaatgctttccttggtgttaaccttaataaaaaggcgtcatctcccctc

SEQ ID NO: 621080 - DNA, 120 bp, Artificial Sequence
  ENSG00000177879_0 (sequence is synthesized)
agggggcgggtggggaaggatcgcaggcgagattacgaggcgaggctcgcgcgcccgcccccgccctggcccccagtgcccacccggtcggcccggcacagccatgatcaaggcgatcct

SEQ ID NO: 621081 - DNA, 120 bp, Artificial Sequence
  ENSG00000177879_1 (sequence is synthesized)
aatcttcaacaaccacgggaagccgcggctctccaagttctaccagccctacagtgaagatacacaacagcaaatcatcagggagactttccatttggtatctaagagagatgaaaatgt

SEQ ID NO: 621082 - DNA, 120 bp, Artificial Sequence
  ENSG00000177879_2 (sequence is synthesized)
ttgtaatttcctagaaggaggattattaattggaggatctgacaacaaactgatttatagacattatgcaacgttatattttgtcttctgtgtggattcttcagaaagtgaacttggcat

SEQ ID NO: 621083 - DNA, 120 bp, Artificial Sequence
  ENSG00000177879_3 (sequence is synthesized)
tttagatctaattcaagtatttgtggaaacattagacaaatgttttgaaaatgtctgtgagctggatttgattttccatgtagacaaggttcacaatattcttgcagaaatggtgatggg

SEQ ID NO: 621084 - DNA, 120 bp, Artificial Sequence
  ENSG00000177879_4 (sequence is synthesized)
gggaatggtattggagacaaatatgaatgagattgttacacaaattgatgcacaaaataagctggaaaaatctgaggctggcttagcaggagctccagcccgtgctgtatcagctgtaaa

SEQ ID NO: 621085 - DNA, 120 bp, Artificial Sequence
  ENSG00000177879_5 (sequence is synthesized)
tttaaataaaaatgtaaaaaggccactcccaggtaaaatccagggggaagagtcatctaagtttaccatgcagttgtttaccaaaaatagaggaggagagtcttaacttttgctcttgga

SEQ ID NO: 621086 - DNA, 120 bp, Artificial Sequence
  ENSG00000177879_6 (sequence is synthesized)
tttaagtcaaggtactgtatagaagttgtgtaaaatcagtatgaaagttcaatgttgctgttcttgctcagtgattttaaagaaattgagtagttcctatgtgatttttttttttctttt

SEQ ID NO: 621087 - DNA, 120 bp, Artificial Sequence
  ENSG00000177879_7 (sequence is synthesized)
ctaaactgcattcctgtgcccacctacggcatgcctctatgtattggctactacagtgttttaaaaagtgtttcagatatttctctaattatgtacaacctaaaatgttggtgttttgta

SEQ ID NO: 621088 - DNA, 120 bp, Artificial Sequence
  ENSG00000177879_8 (sequence is synthesized)
tggatcacaagtgcagcattccttaattccttctgctatatgtcacacagttgttatttggagaaccaagtatgtattgcatgaaaacattatgacttttttctcttagtttaaataaac

SEQ ID NO: 621089 - DNA, 120 bp, Artificial Sequence
  ENSG00000177879_9 (sequence is synthesized)
tccaaggtaactggacttctaaagcacctttctgtttgcctgatatctactttagcaataattttttttacaaccctctgactcaacaaagtaaataaaagtatattttatcactattaa

SEQ ID NO: 621090 - DNA, 120 bp, Artificial Sequence
  ENSG00000177879_10 (sequence is synthesized)
gccctggcccccagtgcccacccggtcggcccggcacagccatgatcaaggcgatcctaatcttcaacaaccacgggaagccgcggctctccaagttctaccagccctacggtatataac

SEQ ID NO: 621091 - DNA, 120 bp, Artificial Sequence
  ENSG00000177879_11 (sequence is synthesized)
tagaaggaggattgtatttgtggaaacattagacaaatgttttgaaaatgtctgtgagctggatttgattttccatgtagacaagtgtaaaggaaggagcatccagaccttcttaacagc

SEQ ID NO: 621092 - DNA, 120 bp, Artificial Sequence
  ENSG00000177879_12 (sequence is synthesized)
ttgcccagatatggggcagaagaggaatggggactagtagaacttgaaggctgtgagcagacacacatcaaaaatggagtcagaccctttatcacatacagctaaggttcacaatattct

SEQ ID NO: 621093 - DNA, 120 bp, Artificial Sequence
  ENSG00000177879_13 (sequence is synthesized)
tgcagaaatggtgatggggggaatggtattggagacaaatatgaatgagattgttacacaaattgatgcacaaaataagctggaaaaatctgaggtaagaatggaaaatgctgtagttaa

SEQ ID NO: 621094 - DNA, 120 bp, Artificial Sequence
  ENSG00000177879_14 (sequence is synthesized)
gaaggttctaagcatgatgacagattacgcatgatttgtagttttcactgtttgtccttcagtatcaccctttaggttcagccgttatgcttattcagtttttaaaaaatggaatataca

SEQ ID NO: 621095 - DNA, 120 bp, Artificial Sequence
  ENSG00000177879_15 (sequence is synthesized)
tgcctaaaagaattatctgaataatggaatctaatatttgctttgtaaaacttcagtcggtaattatcaaggaaatcttagaactaatattttaaagatatataaattttgtgttacaaa

SEQ ID NO: 621096 - DNA, 120 bp, Artificial Sequence
  ENSG00000177879_16 (sequence is synthesized)
actacttctggaaagggaaaggacaggaaatggaattcttacagggaagtaagtaatgtttcaagttattaataaatgcaaaataaatattttgaatgtttgagttcacattcaaaaaag

SEQ ID NO: 621097 - DNA, 120 bp, Artificial Sequence
  ENSG00000177879_17 (sequence is synthesized)
aaattcaataccttaatcttttaattctaaatctttccctaagatttcactgacaagttagttaagtcacatattttagacattagtacatatatatccatggtctttattgcattctat

SEQ ID NO: 621098 - DNA, 120 bp, Artificial Sequence
  ENSG00000177879_18 (sequence is synthesized)
aagatcggtttgttatacttagctaactttctgctgttagattcaaccttagatgggataaatgaggaacagccagcactttagcattgtataaaaccctacttcagaattgtagtgact

SEQ ID NO: 621099 - DNA, 120 bp, Artificial Sequence
  ENSG00000177879_19 (sequence is synthesized)
cttccctcaagcactagtctgaatatcagtagcaggtgctgtagctgagccacctgggttcacattattttggttgtttattaccctagcagaggtttagaaagatcagtagttttatca

SEQ ID NO: 621100 - DNA, 120 bp, Artificial Sequence
  ENSG00000177879_20 (sequence is synthesized)
cgcgtgcagtgggcgtgcttttctccagggagcgtcgcaaaggaggcgccggagtagggggacgcaattacacagtgaaacttggtgttcccggctagtcattcaaatcgaagctgtcgc

SEQ ID NO: 621101 - DNA, 120 bp, Artificial Sequence
  ENSG00000177879_21 (sequence is synthesized)
gccgcccgcggctgcagttagcccgggaggaggaagacggcgtggaactcgttcttctcgcccccctccgccgactcccatcctttccagagtgaagatacacaacagcaaatcatcagg

SEQ ID NO: 621102 - DNA, 120 bp, Artificial Sequence
  ENSG00000177879_22 (sequence is synthesized)
tgtatcagtcaagatttttctcaggctggcttagcaggagctccagcccgtgctgtatcagctgtaaagaatatgaatcttcctgagatcccaagaaatattaacattggtgacatcagt

SEQ ID NO: 621103 - DNA, 120 bp, Artificial Sequence
  ENSG00000177879_23 (sequence is synthesized)
gtatttgtggaaacattagacaaatgttttgaaaatgtctgtgagctggatttgattttccatgtagacaaggctggcttagcaggagctccagcccgtgctgtatcagctgtaaagaat

SEQ ID NO: 621104 - DNA, 120 bp, Artificial Sequence
  ENSG00000177885_0 (sequence is synthesized)
agccaggaggtattgctgcttcggcgaccgggcggcggcagcggcggcggcggctgtggcagagtctgtgcctgtggcggtgacggcggcgggagcaagcgctgccctcgcagagcagcc

SEQ ID NO: 621105 - DNA, 120 bp, Artificial Sequence
  ENSG00000177885_1 (sequence is synthesized)
ttggggtcgccggccgctcgcagcgttgtggaggggcgggccggacgctgagcggagcagctgcgccacgggtggcattgtgtgtcccagagtgccggagcgagtcccagaagagaggcg

SEQ ID NO: 621106 - DNA, 120 bp, Artificial Sequence
  ENSG00000177885_2 (sequence is synthesized)
aggctaagcccagagcgctgggttgcttcagcagggaagactcccttccccctgcttcaggctgctgagcactgagcagcgctcagaatggaagccatcgccaaatatgacttcaaagct

SEQ ID NO: 621107 - DNA, 120 bp, Artificial Sequence
  ENSG00000177885_3 (sequence is synthesized)
actgcagacgacgagctgagcttcaaaaggggggacatcctcaaggttttgaacgaagaatgtgatcagaactggtacaaggcagagcttaatggaaaagacggcttcattcccaagaac

SEQ ID NO: 621108 - DNA, 120 bp, Artificial Sequence
  ENSG00000177885_4 (sequence is synthesized)
tacatagaaatgaaaccacatccgtggttttttggcaaaatccccagagccaaggcagaagaaatgcttagcaaacagcggcacgatggggcctttcttatccgagagagtgagagcgct

SEQ ID NO: 621109 - DNA, 120 bp, Artificial Sequence
  ENSG00000177885_5 (sequence is synthesized)
cctggggacttctccctctctgtcaagtttggaaacgatgtgcagcacttcaaggtgctccgagatggagccgggaagtacttcctctgggtggtgaagttcaattctttgaatgagctg

SEQ ID NO: 621110 - DNA, 120 bp, Artificial Sequence
  ENSG00000177885_6 (sequence is synthesized)
gtggattatcacagatctacatctgtctccagaaaccagcagatattcctgcgggacatagaacaggtgccacagcagccgacatacgtccaggccctctttgactttgatccccaggag

SEQ ID NO: 621111 - DNA, 120 bp, Artificial Sequence
  ENSG00000177885_7 (sequence is synthesized)
gatggagagctgggcttccgccggggagattttatccatgtcatggataactcagaccccaactggtggaaaggagcttgccacgggcagaccggcatgtttccccgcaattatgtcacc

SEQ ID NO: 621112 - DNA, 120 bp, Artificial Sequence
  ENSG00000177885_8 (sequence is synthesized)
cccgtgaaccggaacgtctaagagtcaagaagcaattatttaaagaaagtgaaaaatgtaaaacacatacaaaagaattaaacccacaagctgcctctgacagcagcctgtgagggagtg

SEQ ID NO: 621113 - DNA, 120 bp, Artificial Sequence
  ENSG00000177885_9 (sequence is synthesized)
cagaacacctggccgggtcaccctgtgaccctctcactttggttggaactttagggggtgggagggggcgttggatttaaaaatgccaaaacttacctataaattaagaagagtttttat

SEQ ID NO: 621114 - DNA, 120 bp, Artificial Sequence
  ENSG00000177885_10 (sequence is synthesized)
tacaaattttcactgctgctcctctttcccctcctttgtcttttttttcatccttttttctcttctgtccatcagtgcatgacgtttaaggccacgtatagtcctagctgacgccaataa

SEQ ID NO: 621115 - DNA, 120 bp, Artificial Sequence
  ENSG00000177885_11 (sequence is synthesized)
taaaaaacaagaaaccaagtgggctggtattctctctatgcaaaatgtctgttttagttggaatgactgaaagaagaacagctgttcctgtgttcttcgtatatacacacaaaaaggagc

SEQ ID NO: 621116 - DNA, 120 bp, Artificial Sequence
  ENSG00000177885_12 (sequence is synthesized)
gggcagggccgctcgatgcctttgctgtttagcttcctccagaggaggggacttgtaggaatctgccttccagcccagacccccagtgtattttgtccaagttcacagtagagtagggta

SEQ ID NO: 621117 - DNA, 120 bp, Artificial Sequence
  ENSG00000177885_13 (sequence is synthesized)
gattccgtctcaaaaaaaaaaaaaaaaagcccacctgaaagcctgtctctttccactttgttggcccttccagtgggattatcgagcatgttgttttttcatagtgcctttttccttatt

SEQ ID NO: 621118 - DNA, 120 bp, Artificial Sequence
  ENSG00000177885_14 (sequence is synthesized)
ctttccactttgttggcccttccagtgggattatcgagcatgttgttttttcatagtgcctttttccttatttcaagggttgcttctgagtggtgttttttttttttttttaatttgttt

SEQ ID NO: 621119 - DNA, 120 bp, Artificial Sequence
  ENSG00000177885_15 (sequence is synthesized)
ttttcagccaatttgtctcctactctgtgtaaatatttttccctccgggcaggggagccagggtagagcaaaggagacaaagcaggagtggaaggtgaggcgttctcctgcttgtactaa

SEQ ID NO: 621120 - DNA, 120 bp, Artificial Sequence
  ENSG00000177885_16 (sequence is synthesized)
gccaggaggctttaagctccagctttaagggttgtgagccccttgggggttcagggaactgcttgcccagggtgcagtgtgagtgtgatgggccaccggggcaagagggaaggtgaccgc

SEQ ID NO: 621121 - DNA, 120 bp, Artificial Sequence
  ENSG00000177885_17 (sequence is synthesized)
ccagctctcccacatcccactggatctggcttacaggggggtcggaagcctgtcctcaccgtctcgggggttgtggcccccgccccctccctatatgcacccctggaaccagcaagtccc

SEQ ID NO: 621122 - DNA, 120 bp, Artificial Sequence
  ENSG00000177885_18 (sequence is synthesized)
agacaaggagagcggaggaggaagtcatgggaacgcagcctccagttgtagcaggtttcactattcctatgctggggtacacagtgagagtactcacttttcacttgtcttgctcttaga

SEQ ID NO: 621123 - DNA, 120 bp, Artificial Sequence
  ENSG00000177885_19 (sequence is synthesized)
ttgggccatggctttcatcctgtgtcccctgacctgtccaggtgagtgtgagggcagcactgggaagctggagtgctgcttgtgcctcccttcccagtgggctgtgttgactgctgctcc

SEQ ID NO: 621124 - DNA, 120 bp, Artificial Sequence
  ENSG00000177885_20 (sequence is synthesized)
ccacccctaccgatggtcccaggaagcagggagagttggggaaggcaagattggaaagacaggaagaccaaggcctcggcagaactctctgtcttctctccacttctggtcccctgtggt

SEQ ID NO: 621125 - DNA, 120 bp, Artificial Sequence
  ENSG00000177885_21 (sequence is synthesized)
gatgtgcctgtaatctttttctccacccaaaccccttcccacgacaaaaacaagactgcctccctctcttccgggagctggtgacagccttgggcctttcagtcccaaagcggccgatgg

SEQ ID NO: 621126 - DNA, 120 bp, Artificial Sequence
  ENSG00000177885_22 (sequence is synthesized)
gagtctccctccgactccagatatgaacagggcccaggcctggagcgtttgctgtgccaggaggcggcagctcttctgggcagagcctgtccccgccttccctcactcttcctcatcctg

SEQ ID NO: 621127 - DNA, 120 bp, Artificial Sequence
  ENSG00000177885_23 (sequence is synthesized)
cttctcttttcctcgcagatgataaaaggaatctggcattctacacctggaccatttgattgttttattttggaattggtgtatatcatgaagccttgctgaactaagttttgtgtgtat

SEQ ID NO: 621128 - DNA, 120 bp, Artificial Sequence
  ENSG00000177885_24 (sequence is synthesized)
atatttaaaaaaaaaatcagtgtttaaataaagacctatgtacttaatcctttaactctgcggatagcatttggtaggtagtgattaactgtgaataataaatacacaatgaattcttca

SEQ ID NO: 621129 - DNA, 120 bp, Artificial Sequence
  ENSG00000177885_25 (sequence is synthesized)
gagtacgggaggctgcgctcggcgcctctctcgtgccttttcctcttggctctacagcgggagtgggccccgggggaaccgggaccggccccggggttcgcgtcggggcggcgaggcttg

SEQ ID NO: 621130 - DNA, 120 bp, Artificial Sequence
  ENSG00000177885_26 (sequence is synthesized)
ggacgtggagcgcaatccccggggctccggactctacgtttccccttttggggcgcttccttcctggggaccgtcctcctccggctcttggctctgggcagtccgggggaagaggtcggg

SEQ ID NO: 621131 - DNA, 120 bp, Artificial Sequence
  ENSG00000177885_27 (sequence is synthesized)
gttctctggcgaggtcccctgccttcatcgggagggtttgcacggaaggggcccgggaagcccaggcgggccgaacgccgaccgagtcagtctacccgagcctggcggcgggggactggt

SEQ ID NO: 621132 - DNA, 120 bp, Artificial Sequence
  ENSG00000177885_28 (sequence is synthesized)
gtgggctgcagctgtggtgattgatgtgccttcgacctgcacggcaaccacgtcaccatctcctggcgtctttgggcttaattttgtgcgggaatccactttggggtggaacgtttgctg

SEQ ID NO: 621133 - DNA, 120 bp, Artificial Sequence
  ENSG00000177885_29 (sequence is synthesized)
ctggagccgggggagatacctttattctgacacttaaaaaaaaaaactatttgaaaaatatttgtcaagaaaaattcagcagtagcaggttggactgcaccgaggaaggattgcggcgag

SEQ ID NO: 621134 - DNA, 120 bp, Artificial Sequence
  ENSG00000177885_30 (sequence is synthesized)
gagccagggggcgtgggggctgggacagcaggccgattggcagggcggggttgccttcaatcctggccactgctcttaatcgtccctctcctgcttcagggtggcattgtgtgtcccaga

SEQ ID NO: 621135 - DNA, 120 bp, Artificial Sequence
  ENSG00000177885_31 (sequence is synthesized)
gagatcgctctccctgtgctcacccaccttctttcgccctgattacacacaaagaagctgtgtttttcattgtacacttttaacatttaccatcatatttgttctggagagctttagatg

SEQ ID NO: 621136 - DNA, 120 bp, Artificial Sequence
  ENSG00000177885_32 (sequence is synthesized)
tttgtcatgagtcagtagggagtccagtgggctttggcctggggggcccattttcaaatgtctccctctatagaaagagtgacccacggttagtgccttggtggttttttggcaaaatcc

SEQ ID NO: 621137 - DNA, 120 bp, Artificial Sequence
  ENSG00000177885_33 (sequence is synthesized)
tcaattctttgaatgagctggtggattatcacagatctacatctgtctccagaaaccagcagatattcctgcgggacatagaacaggtgccacagattgggccatggctttcatcctgtg

SEQ ID NO: 621138 - DNA, 120 bp, Artificial Sequence
  ENSG00000177885_34 (sequence is synthesized)
agtgcacacccagcgggaaggaagaggaagtgtgttcaggaatagctcaggcagctgtgccattggccggcaggcctgtcagtcgcctgggggccgaggctgaaaagaggaagaaggtgg

SEQ ID NO: 621139 - DNA, 61 bp, Artificial Sequence
  ENSG00000177885_35 (sequence is synthesized)
caacctccacctcctgagttcaagtgatcgtcctgtctcagcctcccgagtagatggtttt

SEQ ID NO: 621140 - DNA, 120 bp, Artificial Sequence
  ENSG00000177888_0 (sequence is synthesized)
atctagttttcctttataaatcacttaagacacttatgaagtttcttgttctgaaattgctgtactgcaatgaagaagaggagaaaggttacttcaaatcttgagaagatccatctaggc

SEQ ID NO: 621141 - DNA, 120 bp, Artificial Sequence
  ENSG00000177888_1 (sequence is synthesized)
tatcataaagattcttcagaaggaaatgttgcagtggagtgtgaccaagtgacctatactcattctgcaggaagaccaactcctgaagctcttcactgttaccaggaacttcctccctct

SEQ ID NO: 621142 - DNA, 120 bp, Artificial Sequence
  ENSG00000177888_2 (sequence is synthesized)
ccagatcagagaaagcttttaagttctttgcagtataataagaatttgctaaaatatttaaatgatgataggcagaagcaaccatctttttgtgatttacttatcatagtggaaggaaaa

SEQ ID NO: 621143 - DNA, 120 bp, Artificial Sequence
  ENSG00000177888_3 (sequence is synthesized)
gaatttagtgcacataaagtagtcgttgctgtcggcagtagttattttcatgcgtgtttgagcaaaaatccaagcactgatgttgtcaccctggatcacgtaacacattcagtttttcag

SEQ ID NO: 621144 - DNA, 120 bp, Artificial Sequence
  ENSG00000177888_4 (sequence is synthesized)
catttgcttgaatttctttacacatcagaattttttgtgtacaaatatgaaatacctcttgttttagaggctgcaaaatttttggacattatagatgcagtgaagttgttaaataacgaa

SEQ ID NO: 621145 - DNA, 120 bp, Artificial Sequence
  ENSG00000177888_5 (sequence is synthesized)
aatgttgccccttttcattcagagctaactgaaaagtcatcaccagaagaaacactaaatgaattaactggaagactatcaaataatcatcagtgcaaattctgtagtagacatttttgt

SEQ ID NO: 621146 - DNA, 120 bp, Artificial Sequence
  ENSG00000177888_6 (sequence is synthesized)
tataaaaagtctttagagaatcatttggctaaaacccataggtcccttttattagggaaaaaacatgggttaaaaatgctggagagaagtttctccgcaagaagatcaaaaaggaatcgg

SEQ ID NO: 621147 - DNA, 120 bp, Artificial Sequence
  ENSG00000177888_7 (sequence is synthesized)
aagtgccctgttaagtttgatgacaccagcgatgatgaacaggaaagtggtgatgggtcagacaatttgaatcaagaaaattttgataaggaaaagtcagatagaaatgattctgaggac

SEQ ID NO: 621148 - DNA, 120 bp, Artificial Sequence
  ENSG00000177888_8 (sequence is synthesized)
cctggaagtgaatataatgctgaagaagatgagctagaggaggagatgtcagatgagtactctgacattgaagaacaaagtgaaaaggatcataatgatgcagaagaagaacctgaggct

SEQ ID NO: 621149 - DNA, 120 bp, Artificial Sequence
  ENSG00000177888_9 (sequence is synthesized)
ggtgattctgtaggaaatgttcatgaggggttaactccagtggtcattcagaacagcaacaaaaaaatattgcagtgtcctaaatgtgataaaacatttgaccgaataggaaaatatgag

SEQ ID NO: 621150 - DNA, 120 bp, Artificial Sequence
  ENSG00000177888_10 (sequence is synthesized)
agccacacccgtgttcacacaggtgagaagccctttgagtgtgatatttgtcaccagcgctattcaacaaagtctaacctaactgttcacagaaagaagcacagtaatgaaacagaattt

SEQ ID NO: 621151 - DNA, 120 bp, Artificial Sequence
  ENSG00000177888_11 (sequence is synthesized)
cataagaaggagcacaagtgcccttattgtaataaacttcatgcaagcaagaagactttagccaagcatgttaagagatttcatcctgaaaatgcacaagaatttatttccattaagaag

SEQ ID NO: 621152 - DNA, 120 bp, Artificial Sequence
  ENSG00000177888_12 (sequence is synthesized)
actaagagtgaaagttggaaatgtgatatttgtaagaaatcttttactcgaagaccacacttggaggaacatatgattctacattctcaagataaaccttttaagtgtacctattgtgaa

SEQ ID NO: 621153 - DNA, 120 bp, Artificial Sequence
  ENSG00000177888_13 (sequence is synthesized)
gaacattttaaatcacggtttgctcggttaaagcatcaagaaaagttccatctgggtccttttccatgtgatatatgtggtcgccagtttaacgacactggaaatttgaaacgtcatata

SEQ ID NO: 621154 - DNA, 120 bp, Artificial Sequence
  ENSG00000177888_14 (sequence is synthesized)
gaatgtactcatggtggaaagagaaaatggacttgctttatctgtggaaaatcagtacgagaaagaactactttgaaagaacatttgagaatccacagtggagaaaagcctcacctttgt

SEQ ID NO: 621155 - DNA, 120 bp, Artificial Sequence
  ENSG00000177888_15 (sequence is synthesized)
agtatttgtgggcaaagttttcgtcatggaagttcgtatagacttcacttacgagtacatcatgatgataaaagatatgagtgcgatgaatgtggaaaaacatttatccgtcatgatcac

SEQ ID NO: 621156 - DNA, 120 bp, Artificial Sequence
  ENSG00000177888_16 (sequence is synthesized)
cttacaaagcacaaaaaaatacattcaggtgaaaaagctcatcagtgtgaagaatgtggaaaatgttttggtcgtagggatcatctcactgttcattacaaaagcgtacaccttggagag

SEQ ID NO: 621157 - DNA, 120 bp, Artificial Sequence
  ENSG00000177888_17 (sequence is synthesized)
aaagtgtggcaaaaatataaagcaacatttcatcaatgtgatgtttgtaagaaaatttttaaaggcaaatcaagtctggaaatgcattttcgaacgcattcaggtgaaaaaccatacaag

SEQ ID NO: 621158 - DNA, 120 bp, Artificial Sequence
  ENSG00000177888_18 (sequence is synthesized)
tgtcaaatttgcaatcagtcttttagaattaagaaaacattaacaaaacacctggttattcattctgatgcccgacctttcaactgtcagcactgtaatgcaacatttaagcggaaagac

SEQ ID NO: 621159 - DNA, 120 bp, Artificial Sequence
  ENSG00000177888_19 (sequence is synthesized)
aagctgaaataccacattgaccatgttcatgaaataaaatctcctgatgatcctctcagtacttctgaggaaaaacttgtatccttgccagttgagtactcatctgatgacaaaatcttt

SEQ ID NO: 621160 - DNA, 120 bp, Artificial Sequence
  ENSG00000177888_20 (sequence is synthesized)
caaacagaaacaaaacaatatatggaccagcccaaagtttatcagtcggaagccaagacgatgttacagaatgtatctgctgaagtatgtgttccagtaactctggttccagttcagatg

SEQ ID NO: 621161 - DNA, 120 bp, Artificial Sequence
  ENSG00000177888_21 (sequence is synthesized)
cctgacactccgagtgacctagtgcgtcatactaccacactcccaccatcttctcatgagattctgtcaccacagccacagtcaactgattatccacgagcagcggatttagcttttctg

SEQ ID NO: 621162 - DNA, 120 bp, Artificial Sequence
  ENSG00000177888_22 (sequence is synthesized)
gaaaaatatactcttactcctcaacctgcaaatatagttcacccagttcgacctgaacaaatgctagatcctagagaacaatcttatcttggaacattactgggccttgatagcactact

SEQ ID NO: 621163 - DNA, 120 bp, Artificial Sequence
  ENSG00000177888_23 (sequence is synthesized)
ggtgttcaaaatatttctacgaatgagcatcattcatgagtaaatctaaacattccacagatttttggatggttatatgctaatggtagagatgatagcttttaaatttgtggggctgct

SEQ ID NO: 621164 - DNA, 120 bp, Artificial Sequence
  ENSG00000177888_24 (sequence is synthesized)
attttcttgttttctctagtttctcaagtcctcagaacagtttcaaatcaagaaaactatgtgtctctgtttactgaacatgaatatttggacaaaatttctggcataatatttgaagtg

SEQ ID NO: 621165 - DNA, 120 bp, Artificial Sequence
  ENSG00000177888_25 (sequence is synthesized)
cacatttttgtgatttttaaagattatttagtgctaacttttaatggtttcttaaattttttgcaattattagctgctgatattatggaagtattttttttaatcatcagtggaaatttt

SEQ ID NO: 621166 - DNA, 120 bp, Artificial Sequence
  ENSG00000177888_26 (sequence is synthesized)
tattcttctttagtctcattcctctccttcttcttcctagcccttcttacaaacaagtttgaggaccatgtagcctttaagaaggaattaagagtacactgataattgcaactgtttctt

SEQ ID NO: 621167 - DNA, 120 bp, Artificial Sequence
  ENSG00000177888_27 (sequence is synthesized)
atcctaagattcaatattacgttatacaaatttttaaaattgaaattaggaatttgaatttacaagaatgccttggatatttctgtgttgtctttccattcatacataattttaggttat

SEQ ID NO: 621168 - DNA, 120 bp, Artificial Sequence
  ENSG00000177888_28 (sequence is synthesized)
cattatcctttggacttttgatatactcaaagccagaaagcttaactaatgtaagattagctattatttgtaggactgaaataataatccagataattggtttttgcctatacttcaatt

SEQ ID NO: 621169 - DNA, 120 bp, Artificial Sequence
  ENSG00000177888_29 (sequence is synthesized)
gttatgaataagaaaggcaaacataggtctgggcattaaattatacaaactgaaaatgtgttacaagaaaaatatgagagttttaactagatgtttttcaaggtaagttcaccttttgta

SEQ ID NO: 621170 - DNA, 120 bp, Artificial Sequence
  ENSG00000177888_30 (sequence is synthesized)
ctttactatttatttcagaaatgttgacaatacaacatagcatatgtcttcatctcactaagaaaagagcagttgtaactcaatgaaatttaattaaacatgctacttttgatttcattt

SEQ ID NO: 621171 - DNA, 120 bp, Artificial Sequence
  ENSG00000177888_31 (sequence is synthesized)
acttggctgatagaaactctgggaaacagaacctagatattttgtgttcaattgttagaaaaggtgccaaacagattatgaaatttgtgcctaatttaacttaacattgtttaattaaat

SEQ ID NO: 621172 - DNA, 120 bp, Artificial Sequence
  ENSG00000177888_32 (sequence is synthesized)
ggaaccactacttatatacagatttacatgcaatccagatctttaattttgccttcacaaaagcctaatgtctgtaattaacctttaatttttatttctgtatgagacaaaagttgagga

SEQ ID NO: 621173 - DNA, 120 bp, Artificial Sequence
  ENSG00000177888_33 (sequence is synthesized)
cttggtgaaaggaaatagcagttacagcaaaacctcagtgattacaattgaggaaaaagtcaaaattataaaatacctttaaagacatgcactttccatattttcaagtcaattttaact

SEQ ID NO: 621174 - DNA, 120 bp, Artificial Sequence
  ENSG00000177888_34 (sequence is synthesized)
aaaaactaagataatgtttcctagtagagttgcttgaagattagactagacagggttgatttattattagcatgtcatttgtacataaactagtagaaaatagcagttttaaaagttttc

SEQ ID NO: 621175 - DNA, 120 bp, Artificial Sequence
  ENSG00000177888_35 (sequence is synthesized)
ttgtgaaaaaaaaaatcacaaataaaacagtgaagttttaatgaataaagtttaatcaattagtaatggcggaaactgtcgctgaagcacttaagaaataaaggtactttacagcaacat

SEQ ID NO: 621176 - DNA, 120 bp, Artificial Sequence
  ENSG00000177888_36 (sequence is synthesized)
tcgccatactagcggaggtaaaacaaaagaaatattgaaaactgaggcagttaaccaaagtagctcatataaataataaaaccaatctgagtttagcctcatttgtcaaggtttggttgt

SEQ ID NO: 621177 - DNA, 120 bp, Artificial Sequence
  ENSG00000177888_37 (sequence is synthesized)
aattgtcttaagactagtggacatacttactatgttctcctttttaaagtattcttatttctttgtgtggaaatgttatatctggggtacttacatgattgaggttgactatatgaggta

SEQ ID NO: 621178 - DNA, 120 bp, Artificial Sequence
  ENSG00000177888_38 (sequence is synthesized)
ggtactgttagtctgttagtctttcaaattgacttttaaaaatacatatctttatgattttcatcataaagactggcaatattataactaaaaatcttactataatgaaagaaatcatac

SEQ ID NO: 621179 - DNA, 120 bp, Artificial Sequence
  ENSG00000177888_39 (sequence is synthesized)
aaatgtagcctgccttacatataagctaatgtagaaaagtttagacttataaaaaggcagatagtatatatatatttatatacatgtatgtatatggtatattatacatttggtggcaga

SEQ ID NO: 621180 - DNA, 120 bp, Artificial Sequence
  ENSG00000177888_40 (sequence is synthesized)
aaaagaagatactgcattttcacattgaaaagaatactttgatttttgaaggtatttactttagggttcttttaataataatgtccgtcctaatgctttaaatatatgatttaattgtag

SEQ ID NO: 621181 - DNA, 120 bp, Artificial Sequence
  ENSG00000177888_41 (sequence is synthesized)
gaattggtttacacagaacttttttggaatacatctcttagtaaagtgaaatataataatataattgtatttagttactattgtagataacttaaacttgagtagtgatttactgtttta

SEQ ID NO: 621182 - DNA, 120 bp, Artificial Sequence
  ENSG00000177888_42 (sequence is synthesized)
taaaatgctttcatatatgttatctcatttgaacctcataaccagccctgaaatagtaaaaacaagctatattcccactttataaagaatttgaggttaagataaaaggactcatttaag

SEQ ID NO: 621183 - DNA, 120 bp, Artificial Sequence
  ENSG00000177888_43 (sequence is synthesized)
ctcacatggtcagtaggtggcagagctactagtagggaaagaagaaagctagcattaatgaatgcttactatgtgccaggtactacatcctgtcatttaatcttaacctagtctgggaga

SEQ ID NO: 621184 - DNA, 120 bp, Artificial Sequence
  ENSG00000177888_44 (sequence is synthesized)
tgcgtaatataattctggtgaagtaatagtttcagtggatgattgaaaacaacaacaacaaaaacaaaatgaaactaatctgctgcctctaatttccaaaaatgtaagaaattttacaat

SEQ ID NO: 621185 - DNA, 120 bp, Artificial Sequence
  ENSG00000177888_45 (sequence is synthesized)
tgtgaaaacctcatggatttgggcaaactgaatgtatataggcttttgacaaaagttggcacaaaaagtataaaaggaggcctattcttttcagttgaccttttgtaatatttgatttag

SEQ ID NO: 621186 - DNA, 120 bp, Artificial Sequence
  ENSG00000177888_46 (sequence is synthesized)
agtattttggacaaatgctctataactctaatccatttattttgtaactgtacttaaaattttgaatcttgcaactaagtttagcctcattcagaatttttttattttgtgagcataatt

SEQ ID NO: 621187 - DNA, 120 bp, Artificial Sequence
  ENSG00000177888_47 (sequence is synthesized)
tattgttttaaattaattttttagcagatagcagttagcacttaatctgtaaattgaataatttatcaagtgcaggaatgtgttaatctaatgggttttgacttaaatgcaccaaagatt

SEQ ID NO: 621188 - DNA, 120 bp, Artificial Sequence
  ENSG00000177888_48 (sequence is synthesized)
tttagtaggtattaaatagtttaaaagactttaaattctttcttgcttgaataactatttgtccaaagaagcacagttgaagtcctagaataatggatttttttaaaaaaaaaaagttgt

SEQ ID NO: 621189 - DNA, 120 bp, Artificial Sequence
  ENSG00000177888_49 (sequence is synthesized)
tagtttgaatactgagattgattattgtgtttatatgtataaaaataggagcaaaagaaaatactctgggaatagtcatactgacaaaccaattataagtgagaatactgttttccttag

SEQ ID NO: 621190 - DNA, 120 bp, Artificial Sequence
  ENSG00000177888_50 (sequence is synthesized)
tttaattaatacaatgttatgttttttagagaacactactaaatgctaaataagcctattttttacactacactatcaaaataatttttgccttcgaatttttttaagtcaagttgaggt

SEQ ID NO: 621191 - DNA, 120 bp, Artificial Sequence
  ENSG00000177888_51 (sequence is synthesized)
tatttttgtaagaaacccaacctattttttttgcagcctaaaatcccatttaaggttaggggttggtccttatgccagcaagatttaaccaactgtaaagatagtagtctttgcatacat

SEQ ID NO: 621192 - DNA, 120 bp, Artificial Sequence
  ENSG00000177888_52 (sequence is synthesized)
ttaagtaattaaggcatttattgctgggagaataggagtagcaaaaatatggttttaaattggtgctttattaggtgacttccttttaggcgatggcaggtcatgaaataggtacactaa

SEQ ID NO: 621193 - DNA, 120 bp, Artificial Sequence
  ENSG00000177888_53 (sequence is synthesized)
taattttctatcaaccttaaaaagtgtcaaagcatctttgtagggtgactctaaactgctaattaagggttaataagtaattatcattggttgcttttcaatataattgcaaacaaatta

SEQ ID NO: 621194 - DNA, 120 bp, Artificial Sequence
  ENSG00000177888_54 (sequence is synthesized)
aaaacacagttaaactaatatgtttataagcttgagttttcttcctaccatatcactctcatatatcagtgatgaaatgtcagattttgagcagtagctctttgacagtgtccttttata

SEQ ID NO: 621195 - DNA, 120 bp, Artificial Sequence
  ENSG00000177888_55 (sequence is synthesized)
cccagtcttttctgcattgaatgctttgtgccttttcgatgtgttgtagttgcttagagttgattctgctggctagattgtactgattaatagatttttatttttatttttttttggtta

SEQ ID NO: 621196 - DNA, 120 bp, Artificial Sequence
  ENSG00000177888_56 (sequence is synthesized)
tgggtgttatgattgtgttgcctgctggttgggcaactttttttttttaggttgctttatgtttatataggcaaattggcactaagtgttagtgtgaatatttgtttttatgatttatat

SEQ ID NO: 621197 - DNA, 120 bp, Artificial Sequence
  ENSG00000177888_57 (sequence is synthesized)
atcattttaaaaatctctgttgtggcctttatagttactgtgaagccactcttgggcctgtctctatatgcttattagaggaatctgacaagtaaaataaaatgagtagtgtgtctgcat

SEQ ID NO: 621198 - DNA, 120 bp, Artificial Sequence
  ENSG00000177888_58 (sequence is synthesized)
ctgtgtctctgtttctctgtcttttaaataaccagtaaccataactacacagccctgcactgaatgaccttatttcagtttgcctaaaactgaacaagaggtgatggtttgagatgagtt

SEQ ID NO: 621199 - DNA, 120 bp, Artificial Sequence
  ENSG00000177888_59 (sequence is synthesized)
tctcattaggagcagcaacatcccaaccaatatataatgagttgatcaactcaggaaaaattaggactttaaagaaggttgtatttggatattctaagattcagtgccaaatttaaaatg

SEQ ID NO: 621200 - DNA, 120 bp, Artificial Sequence
  ENSG00000177888_60 (sequence is synthesized)
cctagaaatgtattctacaagtagcatttctaaaactttaagtagtgttatagtaaatgctacttgctgttagagtgaataatggataatgtgagaataattttctaaacgacttctaga

SEQ ID NO: 621201 - DNA, 120 bp, Artificial Sequence
  ENSG00000177888_61 (sequence is synthesized)
aactagacagttcttccttatatcctacccttttccacatttctctaatgtggggttttttgtttgtttgtttgttttgagggtagagggaatcccctccttatttcctctaaaattgtt

SEQ ID NO: 621202 - DNA, 120 bp, Artificial Sequence
  ENSG00000177888_62 (sequence is synthesized)
tttacttaagataccttttccctataatcttagcatgctttctgctctttctctttggaagtagcattaataagatagatgtaataggattaagatgtgtggaagatgagaaaaagaagg

SEQ ID NO: 621203 - DNA, 120 bp, Artificial Sequence
  ENSG00000177888_63 (sequence is synthesized)
tttttgtagagagagtgcttatgttttgtttactcatgtttcaacttgctgtgtatgatcataaatctatgatcttgagaaaaatcctaaaacaatttaaatttagcctatgcagccaat

SEQ ID NO: 621204 - DNA, 120 bp, Artificial Sequence
  ENSG00000177888_64 (sequence is synthesized)
tacataaagagaaattaaggattatattcagaggagaaattaaggattatatttagagcacagaggttatacaaagaatataaccttgtttggtcaaattcttaggtaaagaaaagtaat

SEQ ID NO: 621205 - DNA, 120 bp, Artificial Sequence
  ENSG00000177888_65 (sequence is synthesized)
caatgcttgcattgctgttggagattctaaaagatgtattgaatgaagaggatgtacacatctcattgttactgcgtatttttttgcttggtattcctgcttgcattaaagctggacaat

SEQ ID NO: 621206 - DNA, 120 bp, Artificial Sequence
  ENSG00000177888_66 (sequence is synthesized)
gtactgtgatgtaattacaaaatttttattccttctaacgattgaactcttcttatccctattgataaaactgtattacaattgatgagtgtggctgccagaaaataatacaaaactggg

SEQ ID NO: 621207 - DNA, 120 bp, Artificial Sequence
  ENSG00000177888_67 (sequence is synthesized)
catttagctgttccacattgtgtagtaaatgttttgattatggggatttacagtgtatattaaagtagaaatgcttttgcacttgttttcagtctcaaataataatttttgtttttaatt

SEQ ID NO: 621208 - DNA, 120 bp, Artificial Sequence
  ENSG00000177888_68 (sequence is synthesized)
aaggatactttaaaagcaatgacagaaaaatctaaaatatcagaattaattattgtgaactgtgtgtaaaatatcttgtgagttttatacatactttggttgtctgatgtttcctaagta

SEQ ID NO: 621209 - DNA, 120 bp, Artificial Sequence
  ENSG00000177888_69 (sequence is synthesized)
taaatgtctttatagaaaatttcagttctctgtgaagagtaggaagtgtactgtatattgaactagttctttgtgttactttgatatttaaaataaatataaagttctttggtcctaata

SEQ ID NO: 621210 - DNA, 120 bp, Artificial Sequence
  ENSG00000177889_0 (sequence is synthesized)
actcgtgcgtgaggcgagaggagccggagacgagaccagaggccgaactcgggttctgacaagatggccgggctgccccgcaggatcatcaaggaaacccagcgtttgctggcagaacca

SEQ ID NO: 621211 - DNA, 120 bp, Artificial Sequence
  ENSG00000177889_1 (sequence is synthesized)
gttcctggcatcaaagccgaaccagatgagagcaacgcccgttattttcatgtggtcattgctggccctcaggattccccctttgagggagggacttttaaacttgaactattccttcca

SEQ ID NO: 621212 - DNA, 120 bp, Artificial Sequence
  ENSG00000177889_2 (sequence is synthesized)
gaagaatacccaatggcagcccctaaagtacgtttcatgaccaaaatttatcatcctaatgtagacaagttgggaagaatatgtttagatattttgaaagataagtggtccccagcactg

SEQ ID NO: 621213 - DNA, 120 bp, Artificial Sequence
  ENSG00000177889_3 (sequence is synthesized)
cagatccgcacagttctgctatcgatccaggccttgttaagtgctcccaatccagatgatccattagcaaatgatgtagcggagcagtggaagaccaacgaagcccaagccatagaaaca

SEQ ID NO: 621214 - DNA, 120 bp, Artificial Sequence
  ENSG00000177889_4 (sequence is synthesized)
gctagagcatggactaggctatatgccatgaataatatttaaattgatacgatcatcaagtgtgcatcacttctcctgttctgccaagacttcctcctctttgtttgcatttaatggaca

SEQ ID NO: 621215 - DNA, 120 bp, Artificial Sequence
  ENSG00000177889_5 (sequence is synthesized)
cagtcttagaaacattacagaataaaaaagcccagacatcttcagtcctttggtgattaaatgcacattagcaaatctatgtcttgtcctgattcactgtcataaagcatgagcagaggc

SEQ ID NO: 621216 - DNA, 120 bp, Artificial Sequence
  ENSG00000177889_6 (sequence is synthesized)
tagaagtatcatctggattgttgtgaaacgtttaaaagcagtggcccctccctgcttttattcatttcccccatcctggtttaagtataaagcactgtgaatgaaggtagttgtcaggtt

SEQ ID NO: 621217 - DNA, 120 bp, Artificial Sequence
  ENSG00000177889_7 (sequence is synthesized)
attttattttattttattttatttttgaggggggaggtagtttaattttatgggctcctttcccccttttttggtgatctaattgcattggttaaaagcagctaaccaggtctttagaat

SEQ ID NO: 621218 - DNA, 120 bp, Artificial Sequence
  ENSG00000177889_8 (sequence is synthesized)
agcagctaaccaggtctttagaatatgctctagccaagtctaactttatttagacgctgtagatggacaagcttgattgttggaaccaaaatgggaacattaaacaaacatcacagccct

SEQ ID NO: 621219 - DNA, 120 bp, Artificial Sequence
  ENSG00000177889_9 (sequence is synthesized)
cactaataacattgctgtcaagtgtagattccccccttcaaaaaaagcttgtgaccattttgtatggcttgtctggaaacttctgtaaatcttatgttttagtaaaatattttttgttat

SEQ ID NO: 621220 - DNA, 120 bp, Artificial Sequence
  ENSG00000177889_10 (sequence is synthesized)
tctactttgcctttgtacagtttattttactgtgtttatttcattttcccaatttgacaatcgtattttaaaattgaaactgatggaacattctttcttggtcttcaccatctgacaaat

SEQ ID NO: 621221 - DNA, 120 bp, Artificial Sequence
  ENSG00000177889_11 (sequence is synthesized)
tgaatggcaagaggtggattttgccagtttcttttcactgatgcagatttgtgttaagatagtactgaatggagtatttataaactggccctgagcatgcataaagcatcagtatctgac

SEQ ID NO: 621222 - DNA, 120 bp, Artificial Sequence
  ENSG00000177889_12 (sequence is synthesized)
ctttttttaaccttctaggaatttgaaataaatgtgtttgtgttgtctgattagatgatcattggtgtcttgccacaatgtttaaaaattactgtacaggaaagtcacagcaaagatagc

SEQ ID NO: 621223 - DNA, 120 bp, Artificial Sequence
  ENSG00000177889_13 (sequence is synthesized)
agttgtgactgacatgtaggactttcacagttgtgccacatttttgcctaaaatttgggttatgacatttttcttggttcttatctgaaaatttcatctgtaacctttcatgtgtgttaa

SEQ ID NO: 621224 - DNA, 120 bp, Artificial Sequence
  ENSG00000177889_14 (sequence is synthesized)
gaaacactgatctgatcatttgggatttgctgaggcatttgtgagtcttccttataaacctgatgagcagatctcaactatctagcttgtgtgtcatcagaaaggtttatccctttgaga

SEQ ID NO: 621225 - DNA, 120 bp, Artificial Sequence
  ENSG00000177889_15 (sequence is synthesized)
gtatcaagtcctcagttaatgattcttgctttcatccctccagtatttgctgtgggagctcgttttattctttaatttggaattcagtaatttttcttctttattgacgaattcctcccc

SEQ ID NO: 621226 - DNA, 120 bp, Artificial Sequence
  ENSG00000177889_16 (sequence is synthesized)
tcacaaaactgttctttcccacctctctccatatctaattcctgattcttgttatttttaagtcataaatgtagccagtcataaatacataaatgttaaccttcgggttgcaaccttgtc

SEQ ID NO: 621227 - DNA, 120 bp, Artificial Sequence
  ENSG00000177889_17 (sequence is synthesized)
tcttgcagtttaaggtaatggatattgtagcccatttgaattttcttcactcttattctcgtaattctggagtttcttcagattgtggtgtattttattgtgctcctatgtaagatgaag

SEQ ID NO: 621228 - DNA, 120 bp, Artificial Sequence
  ENSG00000177889_18 (sequence is synthesized)
aattaactattaaaattacattttcaacatacaaaagcttttgatgactggtaactggtatccttccaaataaatgcattgcttggtaacaaatgttagcttaattcagaatgaaatagt

SEQ ID NO: 621229 - DNA, 120 bp, Artificial Sequence
  ENSG00000177889_19 (sequence is synthesized)
taacaaccctaatattgtaaaatttgaaaactgatagcagctgtcatttataacaattcttgggctgtttaaagggtacatttgactatagctaaggaaattgaatctcactttaaaaat

SEQ ID NO: 621230 - DNA, 120 bp, Artificial Sequence
  ENSG00000177889_20 (sequence is synthesized)
atcacatagtgatttacaaaccatgaaattccagatttaaatctgttgcactacaaaaatgtctaaatgatgtctgctaaatttgtgagttatagaagtacagaaataagtcattttcat

SEQ ID NO: 621231 - DNA, 120 bp, Artificial Sequence
  ENSG00000177889_21 (sequence is synthesized)
ttcaaatgcagtgaatttctaatttcatggtatcatatttttttcctttgcagttttggtaagactcccccattactttgctaagacttgctttctcaaccagtgggatgaaacgagtgc

SEQ ID NO: 621232 - DNA, 120 bp, Artificial Sequence
  ENSG00000177889_22 (sequence is synthesized)
cagtgtgttgactgagccttcttaggacttaaggggctctgggagaggccaaggcagcagttgaaaactgcagcttcacctggcctttgggcctgttttccctggcccacacagtgtggc

SEQ ID NO: 621233 - DNA, 120 bp, Artificial Sequence
  ENSG00000177889_23 (sequence is synthesized)
tggttaaaacattctgaatttgatgccaacatttttaaaaattgggagatttgcatgaaaatccagaattcgggtaacttttgaatgatctgaagatctggcaacagtagacctgaccca

SEQ ID NO: 621234 - DNA, 120 bp, Artificial Sequence
  ENSG00000177889_24 (sequence is synthesized)
cctttgtgcacgggacttaactgagaggatctgagtagcagacaccctaagagcatgtcattgtcttctcaccagttactctccagttggctagagtcccctccgagcacacctgctagt

SEQ ID NO: 621235 - DNA, 120 bp, Artificial Sequence
  ENSG00000177889_25 (sequence is synthesized)
ccttcccccttgtaagcctttgactttgtaatccctgggctaaaggaaacacattattcaacaaaagtgtttcatgtttgcccactagttgttggggatgattaggtggtgagtgaatgg

SEQ ID NO: 621236 - DNA, 120 bp, Artificial Sequence
  ENSG00000177889_26 (sequence is synthesized)
catggggctttcctttggggaccatatactctaatggggaagggggacagacaaatagttgtaactctgtcatggaaaagagaagtaacttggacagacttttggattcaggccagatga

SEQ ID NO: 621237 - DNA, 120 bp, Artificial Sequence
  ENSG00000177889_27 (sequence is synthesized)
acatctccaggcagagggaacagcagcatctgcaaagtcctgggagagaagaaaagaatctgaacattaagtggcttcctgaaaatcgactgcccaggccgggcacagtggctcatgcct

SEQ ID NO: 621238 - DNA, 120 bp, Artificial Sequence
  ENSG00000177889_28 (sequence is synthesized)
aggatcacttgagtccaggagtttgtgaccagcctggctaacatagtgggacccagtctttatttaaaagaaaattgcccgttaagaggcttttctaaaatcttgaggtgttgataggag

SEQ ID NO: 621239 - DNA, 120 bp, Artificial Sequence
  ENSG00000177889_29 (sequence is synthesized)
gcttttctaaaatcttgaggtgttgataggagctttatgttttttgacttgattgttgtagtctacttcgctgcgatttgcttctgctctagttatccttcatcctctcaaaggctgtct

SEQ ID NO: 621240 - DNA, 120 bp, Artificial Sequence
  ENSG00000177889_30 (sequence is synthesized)
agcaagatcttaggtctaaagtaaagtcatctcttggtatttgtcgggaactggttctaggacttcctttggatatccaaattcgcagatgctcaagtctctggaataaaatgatgttgt

SEQ ID NO: 621241 - DNA, 120 bp, Artificial Sequence
  ENSG00000177889_31 (sequence is synthesized)
atatgcatacaatctacacaaatcctcccgcttatgttaatatttagattacttataatacctattataatgtaagtgctatgtaaatagttacactattgtttaaggaataatgacaaa

SEQ ID NO: 621242 - DNA, 120 bp, Artificial Sequence
  ENSG00000177889_32 (sequence is synthesized)
aatatacatgttgactacagacacaatgttttttggaatattttgtctggttgtttgaatccacggaagtggaacccatggatatggagggccaactatatagaaccttactctagacca

SEQ ID NO: 621243 - DNA, 120 bp, Artificial Sequence
  ENSG00000177889_33 (sequence is synthesized)
agaatgtacttgtaaaacaatttcaaagaagcacttaaaaataagattaaatacaaaccaacagataaaagtcacaggtgctatggttgtttgatggagaatggggaaggaaatctgtcc

SEQ ID NO: 621244 - DNA, 120 bp, Artificial Sequence
  ENSG00000177889_34 (sequence is synthesized)
taaaagacattataaacacagtgacctaagtggaactaaattggatcgaggaaatgataggaataggcctcatttttctgttgaatggttcaggaacctttttttttttttttttttttt

SEQ ID NO: 621245 - DNA, 120 bp, Artificial Sequence
  ENSG00000177889_35 (sequence is synthesized)
ttttttttttttttttttttggctgctctagccactttctagctctgtagtttaggctggagtgctgtggcatgatcttggctcactgcaggttctgcctcccgcgttcaagcgattctc

SEQ ID NO: 621246 - DNA, 120 bp, Artificial Sequence
  ENSG00000177889_36 (sequence is synthesized)
gcgtgagccaccgtgcccagccctgccacatcttttttgttagttgcagtagcaatacaaccttatctagaaaagctggccaaaaaagaaaataccatgataatagggtacctaatttat

SEQ ID NO: 621247 - DNA, 120 bp, Artificial Sequence
  ENSG00000177889_37 (sequence is synthesized)
aaagaaaataccatgataatagggtacctaatttattgctttatttaagaaaaatgtaatatttcattcgaataagtacttttgggctgggatgatatttcatttagctacttggcatgc

SEQ ID NO: 621248 - DNA, 120 bp, Artificial Sequence
  ENSG00000177889_38 (sequence is synthesized)
cacccatcttagggaattatatgagggtttatactttaaataacataaaaagcaaaacatgctgaatgtaataatttgagagaagtgtaaataataaaaatctgtcatctaccacctgga

SEQ ID NO: 621249 - DNA, 120 bp, Artificial Sequence
  ENSG00000177889_39 (sequence is synthesized)
tgctattattaagctttctcctttttctcttaagcattccatgtttagaatgtaaacattatacaaagatcagagaggtctgtgggagggaagtgaagcagttctgggcctgtttttttc

SEQ ID NO: 621250 - DNA, 120 bp, Artificial Sequence
  ENSG00000177889_40 (sequence is synthesized)
tttctaaagctcttggcaaggaaaagaaatagaaaaaagtataataagtgagatcctgcttatagtatgtaaatacgtcttaacaaaatggcttgctatgggaccccccaaatataaaga

SEQ ID NO: 621251 - DNA, 120 bp, Artificial Sequence
  ENSG00000177889_41 (sequence is synthesized)
caacctgtaattgaaagatcttggagtctcttgtaactacacctggtttaacaaatactgagtgcataccatttatctagttatatgtaaagaatactggaaaacttgaactgtttttgt

SEQ ID NO: 621252 - DNA, 120 bp, Artificial Sequence
  ENSG00000177889_42 (sequence is synthesized)
aacccatttgattaaagtattcagctgtttatggctacggaatttggagtcaagaagcttctgctacagattttaagaaaattagtggggagaattgtgtatctagaaatggacaacttg

SEQ ID NO: 621253 - DNA, 120 bp, Artificial Sequence
  ENSG00000177889_43 (sequence is synthesized)
attcatcctcttgaattttctagaacttcttaattttattgtagtgttttggtaattggacatttacaaaatctttcagccctgatccaatttatagaaaaaggcgtgaatttaacagat

SEQ ID NO: 621254 - DNA, 120 bp, Artificial Sequence
  ENSG00000177889_44 (sequence is synthesized)
gctgcctgggtcccgggacgtgggggccccgcgccccgctgcccttgcttccgcgatctctctcttctgaatacgtttccgctcgtttatctctgcgaagtgattttactctgttcaact

SEQ ID NO: 621255 - DNA, 120 bp, Artificial Sequence
  ENSG00000177889_45 (sequence is synthesized)
gctctgcttccatctgttcttgtcttgccttacctattatggagtcctcaggcattaaattttgttgtgattgctgcatttgaaaccagaagtaacctgaagaaaaagggtcgagaaacc

SEQ ID NO: 621256 - DNA, 120 bp, Artificial Sequence
  ENSG00000177917_0 (sequence is synthesized)
cggtgctcgaggcggaggggaggaggcggggaaggcgaaaggaggggttcggaggagagggttcgatctccgtacgcaccaggtggagagcgcgcgcctggggaaggaggcgtgtcgagt

SEQ ID NO: 621257 - DNA, 120 bp, Artificial Sequence
  ENSG00000177917_1 (sequence is synthesized)
agcgggagggaagttgtagtacgggtggggagaaccacactaaagggagatgggggtgagcagttaaggaaccgcgagagcgccaggtagagaggtgcccttaatgggggaacctggaga

SEQ ID NO: 621258 - DNA, 120 bp, Artificial Sequence
  ENSG00000177917_2 (sequence is synthesized)
agagtgtgagcgtagtggggaagaagggagaagacaaataggttcgggaatgtgtctccgagggcgcgagcgggcgctaggacccggcgtcgaaaagatgaggctttggggctgtcgggg

SEQ ID NO: 621259 - DNA, 120 bp, Artificial Sequence
  ENSG00000177917_3 (sequence is synthesized)
cgcgcgctcccgttggtgacgcgggggtggcggaggtctccggccgggacgaagccccgcagggagtggatactcgacagccttcggcctccgctcgcttctccctgcgcgctttcctgc

SEQ ID NO: 621260 - DNA, 120 bp, Artificial Sequence
  ENSG00000177917_4 (sequence is synthesized)
tcccctttccggctacagccctggggtcgagctctggtcgaagcgcattccgcctctcctttggccctgcggcttcctttgcaacccgccgcccacccttgctctccgtggtttacccct

SEQ ID NO: 621261 - DNA, 120 bp, Artificial Sequence
  ENSG00000177917_5 (sequence is synthesized)
gggctctgaggcctggtggtagcggccactgccgcggattggctgttgcggacccggggcggggcaggtgggagaggctcgttctccgcgggtttcgttgtgtttcgcgccatgtcgttt

SEQ ID NO: 621262 - DNA, 120 bp, Artificial Sequence
  ENSG00000177917_6 (sequence is synthesized)
gctgagagcgggtggcggtcggctctgcggcgccgcggtcccggcaccccgggccctgtggctcggccatcgtattcctcctttactcagggggacagctggggtgaaggcgaagtcgac

SEQ ID NO: 621263 - DNA, 120 bp, Artificial Sequence
  ENSG00000177917_7 (sequence is synthesized)
gaggaggagggatgcgaccaagtggcccgcgacctgcgggcggagttctcggctggggcgtggtcagagcccagaaagcgctcggtgctcccgccggacgggaacgggtcgcccgttctg

SEQ ID NO: 621264 - DNA, 120 bp, Artificial Sequence
  ENSG00000177917_8 (sequence is synthesized)
cccgataagcgcaatggtatctttcccgcggccgcgggcagcagagcccagcctcggcggtggccggtccaggtcctctctattctctgctcgctgctcttcgccattcttctcgccttc

SEQ ID NO: 621265 - DNA, 120 bp, Artificial Sequence
  ENSG00000177917_9 (sequence is synthesized)
ctcctcgccatcgcctacttgatcgttaaagagttgcatgctgagaatttgaaaaatgaagatgatgtagacactggactattaggattctggactctacttataatatccctaactgct

SEQ ID NO: 621266 - DNA, 120 bp, Artificial Sequence
  ENSG00000177917_10 (sequence is synthesized)
ggattctcctgttgcagcttttcttggacagtgacttactttgattcttttgaaccaggaatgtttcctcctactcctctttcacctgccaggttcaagaaactgactggacattctttc

SEQ ID NO: 621267 - DNA, 120 bp, Artificial Sequence
  ENSG00000177917_11 (sequence is synthesized)
cttactgtagcatggtgcctcatgtaaacccacactggagcgatattgttggcaaaacttaatcatgattgttttgtaataacaagaaggagcatcactgtctactcagaagactgagaa

SEQ ID NO: 621268 - DNA, 120 bp, Artificial Sequence
  ENSG00000177917_12 (sequence is synthesized)
acctgctgttcattatgtagttcagatatttatcacaatcatcctcattatggaagaccttttaaagcattgttttagaatgtctgagtattaagatacagattaattgggaatatctga

SEQ ID NO: 621269 - DNA, 120 bp, Artificial Sequence
  ENSG00000177917_13 (sequence is synthesized)
gtattaagtactttcttcagagtataagatgtttacctcatctttttacttttgtgtgtgtagttctttcaagttgtaggaaacattttaatggaatttaaactcaaaaacttgaataca

SEQ ID NO: 621270 - DNA, 120 bp, Artificial Sequence
  ENSG00000177917_14 (sequence is synthesized)
ggacaatgcttgccttttcatgtatgtactacattttttgctaagaaatactgatatttctgtttagttgagctagaaatacttcttatttatacatttaggaaagcaaataatgcctac

SEQ ID NO: 621271 - DNA, 120 bp, Artificial Sequence
  ENSG00000177917_15 (sequence is synthesized)
tactccgacttttatagaagctacttttaaatcagaatatttaatttttgatattcatataattaatagaagttgcatttatattttttatggggcatagttccttatgtgtttttttaa

SEQ ID NO: 621272 - DNA, 120 bp, Artificial Sequence
  ENSG00000177917_16 (sequence is synthesized)
tgtattttcatactacatactgaatttgtatgtttttaaaattgttacatctagacaactgtaaacattatttttttagctagtgcaaacctagtacctgccatttttactaatttttgt

SEQ ID NO: 621273 - DNA, 120 bp, Artificial Sequence
  ENSG00000177917_17 (sequence is synthesized)
ctttaaaaaaagcaaaaaagcacattgacctaagttgaaaattaagtaagtttatttttaacaaaaaatgcctgaaaaaagctaaattatttaagtcattaagatattgagaaaaaattt

SEQ ID NO: 621274 - DNA, 120 bp, Artificial Sequence
  ENSG00000177917_18 (sequence is synthesized)
tttttactatttctgtttccacaattccaaatatttatcttggtgtatatattgttactttaacagaacttgcattattttgtttttaataaatataaacatgaaatttttgtatgtgag

SEQ ID NO: 621275 - DNA, 120 bp, Artificial Sequence
  ENSG00000177917_19 (sequence is synthesized)
aaacatgaaatttttgtatgtgagaatgattgaactagtttgttcttaatctcaaaaatttagttaccaaagtagaaaaggtattttgatactagatattaaaaactacatatagttaat

SEQ ID NO: 621276 - DNA, 120 bp, Artificial Sequence
  ENSG00000177917_20 (sequence is synthesized)
attaaatgtgctcctgtaattgtgatattttgttttctaagtaattaagccttaatttttcccctatgttactaaagacttttaatgtttagaaagttacctcagttttagaaagatgga

SEQ ID NO: 621277 - DNA, 120 bp, Artificial Sequence
  ENSG00000177917_21 (sequence is synthesized)
ctacttacaaagctgttttccctggccataggaaaacttacaataagaaaccattaagtagtcaaactgcttattcaggctaagtgggaaatgaatttgtgcagtgtgttcccttaatta

SEQ ID NO: 621278 - DNA, 120 bp, Artificial Sequence
  ENSG00000177917_22 (sequence is synthesized)
tctactgaatgttgttaccgactaaacaaggtttctaaaagtctcgcatttcttttactattcaaaactctttggttggaaatgactaatactgctccaatttaaattatctgaaatgtg

SEQ ID NO: 621279 - DNA, 120 bp, Artificial Sequence
  ENSG00000177917_23 (sequence is synthesized)
ctgggaccgaatgcgcgcgcgcggtgctcgaggcggaggggaggaggcggggaaggcgaaaggaggggttcggaggagagggttcgatctccgtacgcaccagagttgcatgctgagaat

SEQ ID NO: 621280 - DNA, 120 bp, Artificial Sequence
  ENSG00000177917_24 (sequence is synthesized)
tctgctcgctgctcttcgccattcttctcgccttcctcctcgccatcgcctacttgatcgttaaagcgtttagtgggctacagatggcatggcatctaaaaccttacaatgcttgatttt

SEQ ID NO: 621281 - DNA, 120 bp, Artificial Sequence
  ENSG00000177917_25 (sequence is synthesized)
tatcataaagtcacaaaaccatgataagtggaattccattgcagaagacattgaactgtgcttatttggaagaatagagaaaggaactgaactccacctagtatgccctttagtgtttac

SEQ ID NO: 621282 - DNA, 120 bp, Artificial Sequence
  ENSG00000177917_26 (sequence is synthesized)
cactaccttagggaataaacagtactctcatcctatgtacggtatatagctgttggctcccttagtggtcaacacattaatttgcttgctgaaggtcacatagctggtaaattgaatcag

SEQ ID NO: 621283 - DNA, 120 bp, Artificial Sequence
  ENSG00000177917_27 (sequence is synthesized)
aatttgaacccagttctttgtgactccagagcactttccacagctccacaatgccttcacagcccttgagttacttttcaaattatagtattgctttcctacctaagtccctctttgtat

SEQ ID NO: 621284 - DNA, 120 bp, Artificial Sequence
  ENSG00000177932_0 (sequence is synthesized)
agttctcccgcggttggcggggtttcggggacagctcgcggcctttcgggggttctcctggcttgggccatccaggcttggctaggattgccggcctggggttgaggcgctcgcagtggt

SEQ ID NO: 621285 - DNA, 120 bp, Artificial Sequence
  ENSG00000177932_1 (sequence is synthesized)
ctcttccgggccggggtggatccgggcctctccagcgagtgggcggcgtgcagcctcgtctgggcttctgggaccagccctacgcggctcgggccccttggccactgggtcccggggcgc

SEQ ID NO: 621286 - DNA, 120 bp, Artificial Sequence
  ENSG00000177932_2 (sequence is synthesized)
cgtccgcgagcggcctggactgccggagacccgcgggagggagcgcctcgccagacccaccgtgtccacactctgctctccctgggcaggaagactgaggaggaagggatggctgtggat

SEQ ID NO: 621287 - DNA, 120 bp, Artificial Sequence
  ENSG00000177932_3 (sequence is synthesized)
ctgctgtctgctcaggagcctgtgacattcagggatgtggccgtgttcttcagccaggacgagtggttgcacctggactctgcccagagggccttgtaccgggaggtgatgctggagaac

SEQ ID NO: 621288 - DNA, 120 bp, Artificial Sequence
  ENSG00000177932_4 (sequence is synthesized)
tacagcagcctggtctcactggggattccattttcaatgccaaagttgattcatcagttgcagcaaggagaagatccctgcatggtggaaagagaagtcccttcagatacccgtctaggt

SEQ ID NO: 621289 - DNA, 120 bp, Artificial Sequence
  ENSG00000177932_5 (sequence is synthesized)
ttcaagacttggcttgaaacagaagcattgcctcatagacaggacatttttatagaagaaacatctcagggaatggtaaagaaagaatccattaaggatggtcactgggacattaacttt

SEQ ID NO: 621290 - DNA, 120 bp, Artificial Sequence
  ENSG00000177932_6 (sequence is synthesized)
gaagaagctgtggaatttgagagcgagatagaagaagagcaagagaagaaacctcttagacaaatgatagattcgcatgagaaaaccatcagtgaagatggaaaccatacaagtcttgaa

SEQ ID NO: 621291 - DNA, 120 bp, Artificial Sequence
  ENSG00000177932_7 (sequence is synthesized)
ttggggaaaagcttatttacaaatacagctcttgtcacacaacagagtgttcctatagaaaggatacccaatatgtattatacatttgggaaagattttaaacagaattttgatctcatg

SEQ ID NO: 621292 - DNA, 120 bp, Artificial Sequence
  ENSG00000177932_8 (sequence is synthesized)
aaatgcttccagatttacccaggaggaaaacctcacatctgtaatgaatgtgggaagagcttcaagcagaatctgcatcttattgaacatcagagaattcatacaggtgagaaaccctac

SEQ ID NO: 621293 - DNA, 120 bp, Artificial Sequence
  ENSG00000177932_9 (sequence is synthesized)
tattgaacatcagagaattcatacaggtgagaaaccctacaaatgtaatgagtgtgaaaaaaccttcagccacagatcatcccttctttctcatcagagaattcatactggagagaaacc

SEQ ID NO: 621294 - DNA, 120 bp, Artificial Sequence
  ENSG00000177932_10 (sequence is synthesized)
tcaacccttatcaaacatctgagagtgcatactggagagaaaccgtatcgatgtagggaatgtggtaaagcctttagccagtgttcaaccctcactgtacatcagagaattcatactgga

SEQ ID NO: 621295 - DNA, 120 bp, Artificial Sequence
  ENSG00000177932_11 (sequence is synthesized)
gagaaactctataaatgcggcgaatgtgagaaggccttcaactgtagagcaaaacttcacaggcatcaaagaatccatacaggtgagaaaccctataaatgtagtgagtgtgggaaggga

SEQ ID NO: 621296 - DNA, 120 bp, Artificial Sequence
  ENSG00000177932_12 (sequence is synthesized)
tacagccagtttacatctctagctgaacatcagaggtttcatactggagaacaactgtatacatgcttggaatgtgggagaaccttcacacgtattgtaacccttatcgaacatcagcga

SEQ ID NO: 621297 - DNA, 120 bp, Artificial Sequence
  ENSG00000177932_13 (sequence is synthesized)
attcacactggacaaaaaccttatcagtgcaacgaatgtgagaaagccttcaaccagtattcatcctttaatgaacatcggaaaattcatactggggaaaaactttatacatgtgaggaa

SEQ ID NO: 621298 - DNA, 120 bp, Artificial Sequence
  ENSG00000177932_14 (sequence is synthesized)
tgtgggaaagcctttggttgcaaatctaacctttataggcatcagagaattcatactggagagaaaccgtatcagtgtaatcagtgtggaaaggccttcagccagtattcatttttaacc

SEQ ID NO: 621299 - DNA, 120 bp, Artificial Sequence
  ENSG00000177932_15 (sequence is synthesized)
gaacatgagaggatccacactggagagaaactgtataaatgtatggaatgtgggaaagcctacagttacagatcaaacctttgtagacacaaaaaagttcacacgaaagagaaactctat

SEQ ID NO: 621300 - DNA, 120 bp, Artificial Sequence
  ENSG00000177932_16 (sequence is synthesized)
aagtggaaggaatatgggaaacctttcatctgcagctcctcacttacccagtatcagagattttttaaaggagataaagcctatgaggtttagttcatctctcaaataatccaagacttc

SEQ ID NO: 621301 - DNA, 120 bp, Artificial Sequence
  ENSG00000177932_17 (sequence is synthesized)
tcactggggaataagggaataataaatagggtacaaactcctaatagatttgtcttttttacttctcctgaaggaaatatgttagttgccactaagtcatgataaaattgatcagtgaga

SEQ ID NO: 621302 - DNA, 120 bp, Artificial Sequence
  ENSG00000177932_18 (sequence is synthesized)
ctatgaagagcactgacttgttaaattttaaaagaaccataaattctaaggtatctaaaaacctatgagtatttaattcatagaaaaaatgtaaaaggtctttttaaaaatcatgaaaaa

SEQ ID NO: 621303 - DNA, 120 bp, Artificial Sequence
  ENSG00000177932_19 (sequence is synthesized)
tagttgaatatacattttgtttctctcataagaccatattccctttaaaagagtaagcttcaatatgtgaattttcttttaaaaacagtcactgagttaataatgtaaataagtgtgtgg

SEQ ID NO: 621304 - DNA, 120 bp, Artificial Sequence
  ENSG00000177932_20 (sequence is synthesized)
ccttctttaaaatagctggctaacataggaggcacttcttttcataaagagaagctaaacataaaaaggaattttaaatttaactcttcacatggaaataataaagctctttatatgagc

SEQ ID NO: 621305 - DNA, 120 bp, Artificial Sequence
  ENSG00000177932_21 (sequence is synthesized)
tgtcccaccagcaacttatatatgtaaacatacatatatacacatatgcatgtgtgtgtgtaaacataaaagtcctttattattaaaaaatgtagttttattgatttagaatttagttct

SEQ ID NO: 621306 - DNA, 120 bp, Artificial Sequence
  ENSG00000177932_22 (sequence is synthesized)
taaaatcttgcccaaaggtagactctctttcttttactttcttccattatttcttaaattgatgtggttttatataactgaacagagtactattacagtaccgtagaaggcggattaact

SEQ ID NO: 621307 - DNA, 120 bp, Artificial Sequence
  ENSG00000177932_23 (sequence is synthesized)
gaagcagctggaaagactgtcaagcacatactttgttatctgttgcagaagggatgtatttggcagaatctcaggctgcatgtctggtagctcattagagccaggagagattttagttta

SEQ ID NO: 621308 - DNA, 120 bp, Artificial Sequence
  ENSG00000177932_24 (sequence is synthesized)
attgtactaacgaaggatttgaacttagtgaacagagtcaagactagaatctaggtctttggttctggtgttttgtgatcattataggctcgtttccaacctgaggtcccaagagtacta

SEQ ID NO: 621309 - DNA, 120 bp, Artificial Sequence
  ENSG00000177932_25 (sequence is synthesized)
tttgttttgtagcctggttagacatagttgcagtaatttaaagttactgtgttatctttaagggcttcctctcaccttaatcttaataattgactcacaactatattcttttttcttatg

SEQ ID NO: 621310 - DNA, 120 bp, Artificial Sequence
  ENSG00000177932_26 (sequence is synthesized)
agtccctaattatgcctgcttttgttataattgtacttaaatccttaaagctagctgaggtccagatagtgtaattgcttttggaggcttcacatataaggttgccttcttattacacat

SEQ ID NO: 621311 - DNA, 120 bp, Artificial Sequence
  ENSG00000177932_27 (sequence is synthesized)
attttaggaattaattattttatggaaagttatatatgaagagtttattattaagcattcctttcatcagtttaaatgtttaattcctcccaggcgtttttcctccaattttatatttga

SEQ ID NO: 621312 - DNA, 120 bp, Artificial Sequence
  ENSG00000177932_28 (sequence is synthesized)
tttttcattcaattcacagttggtatcattaaaaaaaattctaatacaattagctagaccttctgagaaaaatgttagaattaaactcaagcagtcagtatagtatatttcttaaccgac

SEQ ID NO: 621313 - DNA, 120 bp, Artificial Sequence
  ENSG00000177932_29 (sequence is synthesized)
tggttttagcttatcagaaagtaattattttatgtatttaaatacatttacaaagaaaatgaggcttttaaacagacctcactatttaacattgtacccagtagtggtgagcatgcttag

SEQ ID NO: 621314 - DNA, 120 bp, Artificial Sequence
  ENSG00000177932_30 (sequence is synthesized)
tacccaaattttggtttctaaatgccattccccactaaaaggaaccagggttccttggagaaatggctgattccatgtttggagcaggggaagtgggtggtgtggctaaaatacttttta

SEQ ID NO: 621315 - DNA, 120 bp, Artificial Sequence
  ENSG00000177932_31 (sequence is synthesized)
ttaagaaaataaaataaaaagcaagatagtatttgaagactaatggggtaatgtcagaagggaacaggcgccaagttgaaggtattctcactggccaaatttaggacaacttagaataat

SEQ ID NO: 621316 - DNA, 120 bp, Artificial Sequence
  ENSG00000177932_32 (sequence is synthesized)
cactcttactggtgataatactaagaaggaaaagaagttcataatgatgaaagtagagaaaaaagaaaactctatacaattatttgaagaatgtcttcttttaaatgtacatggaatgat

SEQ ID NO: 621317 - DNA, 120 bp, Artificial Sequence
  ENSG00000177932_33 (sequence is synthesized)
agatttggaaaaattaccattttacaacccttaatgtaattaaatctggcaaaaatcgatggtaaaacccattaagtggaaaaaattttaaggaactttgtttacaaggtgtcagaacat

SEQ ID NO: 621318 - DNA, 120 bp, Artificial Sequence
  ENSG00000177932_34 (sequence is synthesized)
cacagatatctattgcaaaagaattgcctttacagtgagatttggctatcaaactgcatttcactacttctggaataagccagcattatgtggctcttgatgggatgcggtatgaagcat

SEQ ID NO: 621319 - DNA, 120 bp, Artificial Sequence
  ENSG00000177932_35 (sequence is synthesized)
gtgtgatcatccttgatgtactgccgaaaatgtttacctcaaatttaattaaatcttttgtctagacttatcttcctgtttaaagaaatacaggaatagaggaacaagttgaattacaca

SEQ ID NO: 621320 - DNA, 120 bp, Artificial Sequence
  ENSG00000177932_36 (sequence is synthesized)
gtatggaaataaatagacaagtccagagttggtataggacaactggacttttttttatatatttattttaaaatggttttcttaaatttatttttttaaacataacacgaggaagctgtt

SEQ ID NO: 621321 - DNA, 120 bp, Artificial Sequence
  ENSG00000177932_37 (sequence is synthesized)
aaaactggtgtaatagctcaaaagaactaagtattccagatttcgggagggatgaagagggagatattcagaaaccttcaccagattcctcccaacttgatcatagtggattaatgacgt

SEQ ID NO: 621322 - DNA, 120 bp, Artificial Sequence
  ENSG00000177932_38 (sequence is synthesized)
gctttgtggatgtggttagtcaatgacaccagcttgacggatctttctttctgcaccaaaccccattgagttatctggtccccttggctgacgaagagccattaggcgaggatcactggc

SEQ ID NO: 621323 - DNA, 120 bp, Artificial Sequence
  ENSG00000177932_39 (sequence is synthesized)
atcatccagggtgatgttcttcaagcgactgaccaaccgatcaggtcgaggagctgcaacagccttggggccctcacagactcgccaaacattccaggcactgcacttgccagtgcgctg

SEQ ID NO: 621324 - DNA, 120 bp, Artificial Sequence
  ENSG00000177932_40 (sequence is synthesized)
atgaagaatcacggagaactccacctcatctcctgcctggagctcaaggccatcctcaacttctttcatatggaaaaagagcttcttgctatcccctacttcatagttaatgaagccaaa

SEQ ID NO: 621325 - DNA, 120 bp, Artificial Sequence
  ENSG00000177932_41 (sequence is synthesized)
ctgatcttgcacacattccactggccctacgcaggggtgtgatgttgtaagccatagtttgtgcattttggccctggtctggacttttcaaaaagcaaatgtagtaaaacaaaaagtggt

SEQ ID NO: 621326 - DNA, 120 bp, Artificial Sequence
  ENSG00000177932_42 (sequence is synthesized)
ctctgctagattaagacaagagacataaccaaatggaaagtgtgatcctttattagcttctgattcataaaaaaacctataagagacatttggggggatatttggggaaataggaagatg

SEQ ID NO: 621327 - DNA, 120 bp, Artificial Sequence
  ENSG00000177932_43 (sequence is synthesized)
gaatgggtagtagataatgtggtatatttgatttttctagaagtgataattgagttacgtaggataatgttctaattcttaggagatgcatgcagaagttttttttttaagttttgaaaa

SEQ ID NO: 621328 - DNA, 120 bp, Artificial Sequence
  ENSG00000177932_44 (sequence is synthesized)
gtcatgatgttgacagcatattttcaaataaatatgtacaaaatcagtcaattgttttttgtggtggatctatatgtggtggatgttcattggtcatttaaaacatttttctatgtgtgt

SEQ ID NO: 621329 - DNA, 120 bp, Artificial Sequence
  ENSG00000177932_45 (sequence is synthesized)
caatttttaataaaaatgcaaaaagtgattggataaagaagtgatgaatattaatctttcaatcagaattctccatttatattcttaggaagttcctgtttgagagtttatcctccaggg

SEQ ID NO: 621330 - DNA, 120 bp, Artificial Sequence
  ENSG00000177932_46 (sequence is synthesized)
atgtaatcattggcaataaagtaactaggtggtaccagttctcctttaaatggaatgagcatgttccactttatctctcatgctaaatgtaactaaggcatggagcagctgtctggggac

SEQ ID NO: 621331 - DNA, 120 bp, Artificial Sequence
  ENSG00000177932_47 (sequence is synthesized)
cctcaaaagtaatgattgataacaacaggcagatttgggaaggaaactagaatttgaaacaagatcattgtggcgctcctgggcattcctgtggtgaggacagagatggctgagcaggca

SEQ ID NO: 621332 - DNA, 120 bp, Artificial Sequence
  ENSG00000177932_48 (sequence is synthesized)
tctaaacctcagagttaggaacccttcactctgggcagaggatttgtgagccaaaaagggttaggagactccccattgcttttcttccctatctatcttcctgctacttggacctggagg

SEQ ID NO: 621333 - DNA, 120 bp, Artificial Sequence
  ENSG00000177938_0 (sequence is synthesized)
agaccttgccagactgcctgctttcatggatagacataaaaaccttcagcttgaatgttaacaccttgatgggaaaggtggctcatggaatgttttcttatcctttgaacactcctcatt

SEQ ID NO: 621334 - DNA, 120 bp, Artificial Sequence
  ENSG00000177938_1 (sequence is synthesized)
tcagaagctttgcttctgttgcaaccaaacatgacacttagcgtgctgagcaggaaggacaaggaaagagtaattcgcagactgttattacaggcccctccaggggaatttgtaaatgcc

SEQ ID NO: 621335 - DNA, 120 bp, Artificial Sequence
  ENSG00000177938_2 (sequence is synthesized)
tttgatgatctctgtctgcttatccgtgatgaaaaacttatgcaccaccaaggtgagtgtgcaggccaccaacactgccaaaaatattctgtaccactctgcatcgatggaaatccagta

SEQ ID NO: 621336 - DNA, 120 bp, Artificial Sequence
  ENSG00000177938_3 (sequence is synthesized)
ctcttgtctcaccacaatgtaatgggcgactaccgattttttgaccatcaaagcaaactttctttcaaatatgacctgcttcaaaatcagctgaaagacatccaaagtcatggtatcatt

SEQ ID NO: 621337 - DNA, 120 bp, Artificial Sequence
  ENSG00000177938_4 (sequence is synthesized)
taaggagtacttgatagcttgcattgaagatcacaactatgaaacaggagagtgctggaacggactttggaaatctaaatggattttccaagttaacccatttctaacccaagtaacggg

SEQ ID NO: 621338 - DNA, 120 bp, Artificial Sequence
  ENSG00000177938_5 (sequence is synthesized)
aagaatatttgtgcaagctcacttcttcaggtgtgtcaaccttcatattgaaatatccaaggacctgaaagaaagcttggaaatagttaaccaagctcaactggctctaagttttgcaag

SEQ ID NO: 621339 - DNA, 120 bp, Artificial Sequence
  ENSG00000177938_6 (sequence is synthesized)
gcttgtggaagagcaagagaacaaatttcaagctgcagtcttggaagaattacaggagttatccaatgaagccctgagaaaaattctacgaagggatcttccagtgacccgcactcttat

SEQ ID NO: 621340 - DNA, 120 bp, Artificial Sequence
  ENSG00000177938_7 (sequence is synthesized)
tgactggcacaggatactctctgacttgaatctggtgatgtatcctaaattaggatatgtcatttattcaagaagtgtgttgtgcaactggataatataaagaattgctcctggtaacta

SEQ ID NO: 621341 - DNA, 120 bp, Artificial Sequence
  ENSG00000177943_0 (sequence is synthesized)
agcgcaggctgataaccgcacggaacttcccaggcaccctgtgtggccgcactgctccctctggcccaaccatgcctctgtccagccacctgctgcccgccttggtcctgttcctggcag

SEQ ID NO: 621342 - DNA, 120 bp, Artificial Sequence
  ENSG00000177943_1 (sequence is synthesized)
ggtcctcaggctgggcctgggtccccaaccactgcaggagccctggccaggccgtgtgcaacttcgtgtgtgactgcagggactgctcagatgaggcccagtgtggttaccacggggcct

SEQ ID NO: 621343 - DNA, 120 bp, Artificial Sequence
  ENSG00000177943_2 (sequence is synthesized)
cgcccaccctgggcgcccccttcgcctgtgacttcgagcaggacccctgcggctggcgggacattagtacctcaggctacagctggctccgagacagggcaggggccgcactggagggtc

SEQ ID NO: 621344 - DNA, 120 bp, Artificial Sequence
  ENSG00000177943_3 (sequence is synthesized)
ctgggcctcactcagaccacacactgggcaccgacttgggctggtacatggccgttggaacccaccgagggaaagaggcatccaccgcagccctgcgctcgccaaccctgcgagaggcag

SEQ ID NO: 621345 - DNA, 120 bp, Artificial Sequence
  ENSG00000177943_4 (sequence is synthesized)
cctcctcttgcaagctgaggctctggtaccacgcggcctctggagatgtggctgaactgcgggtggagctgacccatggcgcagagaccctgaccctgtggcagagcacagggccctggg

SEQ ID NO: 621346 - DNA, 120 bp, Artificial Sequence
  ENSG00000177943_5 (sequence is synthesized)
gccctggctggcaggagttggcagtgaccacaggccgcatccggggtgacttccgagtgaccttctctgccacccgaaatgccacccacaggggcgctgtggctctagatgacctagagt

SEQ ID NO: 621347 - DNA, 120 bp, Artificial Sequence
  ENSG00000177943_6 (sequence is synthesized)
tctgggactgtggtctgcccaccccccaggccaactgtcccccgggacaccaccactgccagaacaaggtctgcgtggagccccagcagctgtgcgacggggaagacaactgcggggacc

SEQ ID NO: 621348 - DNA, 120 bp, Artificial Sequence
  ENSG00000177943_7 (sequence is synthesized)
tgtctgatgagaacccactcacctgtggccgccacatagccaccgactttgagacaggcctgggcccatggaaccgctcggaaggctggtcccggaaccaccgcgctggtggtcctgagc

SEQ ID NO: 621349 - DNA, 120 bp, Artificial Sequence
  ENSG00000177943_8 (sequence is synthesized)
gcccctcctggccacgccgtgaccacagccggaacagtgcacagggctccttcctggtctccgtggccgagcctggcacccctgctatactctccagccccgaattccaagcctcaggca

SEQ ID NO: 621350 - DNA, 120 bp, Artificial Sequence
  ENSG00000177943_9 (sequence is synthesized)
cctccaactgctcgctggtcttctatcagtacctgagtgggtctgaggctggctgcctccagctgttcctgcagactctggggcccggcgccccccgggcccccgtcctgctgcggaggc

SEQ ID NO: 621351 - DNA, 120 bp, Artificial Sequence
  ENSG00000177943_10 (sequence is synthesized)
gccgaggggagctggggaccgcctgggtccgagaccgtgttgacatccagagcgcctaccccttccagatcctcctggccgggcagacaggcccggggggcgtcgtgggtctggacgacc

SEQ ID NO: 621352 - DNA, 120 bp, Artificial Sequence
  ENSG00000177943_11 (sequence is synthesized)
tcatcctgtctgaccactgcagaccagtctcggaggtgtccaccctgcagccgctgcctcctgggccccgggccccagccccccagcccctgccgcccagctcgcggctccaggattcct

SEQ ID NO: 621353 - DNA, 120 bp, Artificial Sequence
  ENSG00000177943_12 (sequence is synthesized)
gcaagcaggggcatcttgcctgcggggacctgtgtgtgcccccggaacaactgtgtgacttcgaggagcagtgcgcagggggcgaggacgagcaggcctgtggcaccacagactttgagt

SEQ ID NO: 621354 - DNA, 120 bp, Artificial Sequence
  ENSG00000177943_13 (sequence is synthesized)
cccccgaggctgggggctgggaggacgccagcgtggggcggctgcagtggcggcgtgtctcagcccaggagagccaggggtccagtgcagctgctgctgggcacttcctgtctctgcagc

SEQ ID NO: 621355 - DNA, 120 bp, Artificial Sequence
  ENSG00000177943_14 (sequence is synthesized)
gggcctgggggcagctaggcgctgaggcccgggtcctcacacccctccttggcccttctggccccagctgtgaactccacctggcttattatttacagagccagccccgagaggtctcct

SEQ ID NO: 621356 - DNA, 120 bp, Artificial Sequence
  ENSG00000177943_15 (sequence is synthesized)
ctgaccacgaccacaccacaggccaaggccactttgtgctcctggaccccacagaccccctggcctggggccacagtgcccacctgctctccaggccccaggtgccagcagcacccacgg

SEQ ID NO: 621357 - DNA, 120 bp, Artificial Sequence
  ENSG00000177943_16 (sequence is synthesized)
agtgtctcagcttctggtaccacctccatgggccccagattgggactctgcgcctagccatgagacgggaaggggaggagacacacctgtggtcgcggtcaggcacccagggcaaccgct

SEQ ID NO: 621358 - DNA, 120 bp, Artificial Sequence
  ENSG00000177943_17 (sequence is synthesized)
ggcacgaggcctgggccaccctttcccaccagcctggctcccatgcccagtaccagctgctgttcgagggcctccgggacggataccacggcaccatggcgctggacgatgtggccgtgc

SEQ ID NO: 621359 - DNA, 120 bp, Artificial Sequence
  ENSG00000177943_18 (sequence is synthesized)
ggccgggcccctgctgggcccctaattactgctcctttgaggactcagactgcggcttctcccctggaggccaaggtctctggaggcggcaggccaatgcctcgggccatgctgcctggg

SEQ ID NO: 621360 - DNA, 120 bp, Artificial Sequence
  ENSG00000177943_19 (sequence is synthesized)
gccccccaacagaccataccactgagacagcccaagggcactacatggtggtggacacaagcccagacgcactaccccggggccagacggcctccctgacctccaaggagcacaggcccc

SEQ ID NO: 621361 - DNA, 120 bp, Artificial Sequence
  ENSG00000177943_20 (sequence is synthesized)
tggcccagcctgcttgtctgaccttctggtaccacgggagcctccgcagcccaggcaccctgcgggtctacctggaggagcgcgggaggcaccaggtgctcagcctcagtgcccacggcg

SEQ ID NO: 621362 - DNA, 120 bp, Artificial Sequence
  ENSG00000177943_21 (sequence is synthesized)
ggcttgcctggcgcctgggcagcatggacgtgcaggccgagcgagcctggagggtggtgtttgaggcagtggccgcaggcgtggcacactcctacgtggctctggatgatctgctcctcc

SEQ ID NO: 621363 - DNA, 120 bp, Artificial Sequence
  ENSG00000177943_22 (sequence is synthesized)
aggacgggccctgccctcagccaggttcctgtgattttgagtctggcctgtgtggctggagccacctggcctggcccggcctgggcggatacagctgggactggggcgggggagccaccc

SEQ ID NO: 621364 - DNA, 120 bp, Artificial Sequence
  ENSG00000177943_23 (sequence is synthesized)
cctctcgttacccccagccccctgtggaccacaccctgggcacagaggcaggccactttgccttctttgaaactggcgtgctgggccccgggggccgggccgcctggctgcgcagcgagc

SEQ ID NO: 621365 - DNA, 120 bp, Artificial Sequence
  ENSG00000177943_24 (sequence is synthesized)
ctctgccggccaccccagcctcctgcctccgcttctggtaccacatgggttttcctgagcacttctacaagggggagctgaaggtactgctgcacagtgctcagggccagctggctgtgt

SEQ ID NO: 621366 - DNA, 120 bp, Artificial Sequence
  ENSG00000177943_25 (sequence is synthesized)
ggggcgcaggcgggcatcggcggcaccagtggctggaggcccaggtggaggtagccagtgccaaggagttccagatcgtgtttgaagccactctgggcggccagccagccctggggccca

SEQ ID NO: 621367 - DNA, 120 bp, Artificial Sequence
  ENSG00000177943_26 (sequence is synthesized)
ttgccctggatgacgtggagtatctggctgggcagcattgccagcagcctgcccccagcccggggaacacagccgcacccgggtctgtgccagctgtggttggcagtgccctcctattgc

SEQ ID NO: 621368 - DNA, 120 bp, Artificial Sequence
  ENSG00000177943_27 (sequence is synthesized)
tcatgctcctggtgctgctgggacttgggggacggcgctggctgcagaagaaggggagctgccccttccagagcaacacagaggccacagcccctggctttgacaacatccttttcaatg

SEQ ID NO: 621369 - DNA, 120 bp, Artificial Sequence
  ENSG00000177943_28 (sequence is synthesized)
cggatggtgtcaccctcccggcatctgtcaccagtgatccgtagaccaccccagacaaggccccgcttcctcacgtgacatccagcacttggtcagaccctagccagggaccggacacct

SEQ ID NO: 621370 - DNA, 120 bp, Artificial Sequence
  ENSG00000177943_29 (sequence is synthesized)
gccccgcccaggctgggacaggctgcaggtctcaggatatgctgaggcctgggcgttccctgccctgtgctgactctgttgctctgtgaataaacaccctggcccatgagggcagcccaa

SEQ ID NO: 621371 - DNA, 120 bp, Artificial Sequence
  ENSG00000177943_30 (sequence is synthesized)
gctcccgggagctggcatggcaggccctgagcagcagtgcaggcatctggaaggtggacaaggtccttctaggggcccgccgccggcccttccggctggagtttgtcggtttggtggact

SEQ ID NO: 621372 - DNA, 120 bp, Artificial Sequence
  ENSG00000177943_31 (sequence is synthesized)
tagccccacagtgaccaccgagagagacagagaggtctcctgtaactttgagcgggacacatgcagctggtacccaggccacctctcagacacacactggcgctgggtggagagccgcgg

SEQ ID NO: 621373 - DNA, 120 bp, Artificial Sequence
  ENSG00000177943_32 (sequence is synthesized)
gcggcagcctctggtgacgtgctgtccaccaggccttggagacaggctagcctggccacagaattaaacgtgttgccacacctgccggcttctgaactctgtccttggcttcctgcaccc

SEQ ID NO: 621374 - DNA, 120 bp, Artificial Sequence
  ENSG00000177943_33 (sequence is synthesized)
tgcgtcaccacctccgggggcccccagaccctaactaaagcagggaccctgtatctggcaccggacagcacctggctgctcaggacgaatgaatgacggcgtgatcctccacagcctgac

SEQ ID NO: 621375 - DNA, 120 bp, Artificial Sequence
  ENSG00000177943_34 (sequence is synthesized)
ttaaaggcaccctgtgtggccgcactgctccctctggcccaaccatgcctctgtccagccacctgctgcccgccttggtcctgttcctgggagccctggccaggccgtgtgcaacttcgt

SEQ ID NO: 621376 - DNA, 120 bp, Artificial Sequence
  ENSG00000177943_35 (sequence is synthesized)
gtttgtcggtttggtggacttggatggccctgaccagcagggagctggggtggacaacgtgaccctgagggactgtagccccacagtgaccaccgagagagacagaggttcctgctgccc

SEQ ID NO: 621377 - DNA, 120 bp, Artificial Sequence
  ENSG00000177943_36 (sequence is synthesized)
atcctcactcccacctgggtgctccccttacactcctccagggaccccggagcttccaccttctcagggctctggagggggaggggagaaggtgtgtgacgccacctggccccaccccca

SEQ ID NO: 621378 - DNA, 120 bp, Artificial Sequence
  ENSG00000177943_37 (sequence is synthesized)
gcctggcgcctgggcagcatggacgtgcaggccgagcgagcctggagggtgagtgcagggtggggtgcccctccccctccccctcccccgagggctgcctggacccgctgaggctgccct

SEQ ID NO: 621379 - DNA, 120 bp, Artificial Sequence
  ENSG00000177943_38 (sequence is synthesized)
gccctgcacccgccaggtggtgtttgaggcagtggccgcaggcgtggcacactcctacgtggctctggatgatctgctcctccaggacgggccctgccctcagccaggtgggagccctgc

SEQ ID NO: 621380 - DNA, 120 bp, Artificial Sequence
  ENSG00000177943_39 (sequence is synthesized)
cgtggcctcggccctgctctggggtgcctgcctagccctttcccttcgtagtcgtggtgcccagggcttgggccgtggggcagcaccactcacccacccatgtcctgcaggttcctgtga

SEQ ID NO: 621381 - DNA, 120 bp, Artificial Sequence
  ENSG00000177943_40 (sequence is synthesized)
caggagcagaggtggggaggtggcctccccagcccgcccctggttaggcgtgcaggagccccaggaccccaggcctgacacgccctggccctgctctcagacaagggggagctgaaggta

SEQ ID NO: 621382 - DNA, 120 bp, Artificial Sequence
  ENSG00000177943_41 (sequence is synthesized)
gcacggaggagggcccaaggggccagcctggctcggggtttgccaggcttaccagtgtgtggtcccaggagctgcgagcatgctgcacccagacaggacaagagagctgccaggcccagg

SEQ ID NO: 621383 - DNA, 120 bp, Artificial Sequence
  ENSG00000177943_42 (sequence is synthesized)
ccctgtgccctcctcactctgccctgctcacccctggggccgctgcctgggctgggctgtccctggggtgcagcctctggggcctgccctgcctggctgtggcctctgtgctccctgtgc

SEQ ID NO: 621384 - DNA, 120 bp, Artificial Sequence
  ENSG00000177943_43 (sequence is synthesized)
ccacacccagggcaaggtccatcctggaggaaccgccagccgggtcagggcagccactgactgctctcacttggtgagggaaagaatctcgcctggggccatgagccccaccaagtctgc

SEQ ID NO: 621385 - DNA, 120 bp, Artificial Sequence
  ENSG00000177943_44 (sequence is synthesized)
agacagcagctgcctgtctgccaggccccatccttgtggtagcagaaccaataccctctgcctttgaaataggggtgaaccccaggagccagcagaggctgagggaccatgcagccccag

SEQ ID NO: 621386 - DNA, 120 bp, Artificial Sequence
  ENSG00000177943_45 (sequence is synthesized)
gcttcctccttagccccagatgtgggggctgctttggagggctcacatgtccctatggcccacagggaacacagccgcacccgggtctgtgccagctgtggttggcagtgccctcctatt

SEQ ID NO: 621387 - DNA, 120 bp, Artificial Sequence
  ENSG00000177946_0 (sequence is synthesized)
atggcgtcacgcggcgtccagagcagaccagccgcccggcaccggcggagagcgcctccccgctcacctgtcgggccttgcccagggccctcgcgctggtcttggccgtcctgccgcctc

SEQ ID NO: 621388 - DNA, 120 bp, Artificial Sequence
  ENSG00000177946_1 (sequence is synthesized)
ctgggccaccacatcgccacagcaaggccagcggcctggccaccgctctactgccggccgccgccagcagccggtaccacatccccagacccagatcccgcgccgcccgggcgcgcgcat

SEQ ID NO: 621389 - DNA, 120 bp, Artificial Sequence
  ENSG00000177946_2 (sequence is synthesized)
gcgcaatgggagagcggtcctagggccccgcgagcgcagggaggactcgcgcaggcgcggcaggggcgcggcgccggctggggccccgtcttgggtgtccacgccgtcgcctgaccgttc

SEQ ID NO: 621390 - DNA, 120 bp, Artificial Sequence
  ENSG00000177946_3 (sequence is synthesized)
gagggtttgatcgccagcgcagcctcgccctgcccagacagctgggccctaaggggatagccagcgcctttagacttatcttaaatcgggcatcggcatcaacacttatttctggggtcc

SEQ ID NO: 621391 - DNA, 120 bp, Artificial Sequence
  ENSG00000177946_4 (sequence is synthesized)
tccatggaaagcagctcccgaaacaacacccgcccggtccgccctccgctgcactggaaaaccgcccctggacgtttctgccgcagtgtccccctcacggagttccgtttgtctgcttgg

SEQ ID NO: 621392 - DNA, 120 bp, Artificial Sequence
  ENSG00000177946_5 (sequence is synthesized)
tcggttgttctctggagccccaggacccaggccgcttgtatgtgcctgcggccgcacggccccaacacgcggacttcgagcggtaccgggagacccgcgcggcctcctcggagtggacag

SEQ ID NO: 621393 - DNA, 120 bp, Artificial Sequence
  ENSG00000177946_6 (sequence is synthesized)
tgaagcagcagctgggctaggcagtggggctgggcctgcccatggggacccgtccacgtctccaggacatcagcctgagcctcttcgcagcctcgttttctgttgaccgagttctgcaag

SEQ ID NO: 621394 - DNA, 120 bp, Artificial Sequence
  ENSG00000177946_7 (sequence is synthesized)
gggacgtagaggaaccacagcgttcttgcgcttgagaccgctgtgattttctgacattttggaggcagaaatgcctggggaaaggcccacagatgcaactgtcatccctagtgccaaaag

SEQ ID NO: 621395 - DNA, 120 bp, Artificial Sequence
  ENSG00000177946_8 (sequence is synthesized)
ggaacggaaagcgattacccttgacctcaaattggaagtgttacgacgatttgaagcgggtgagaagctcagtcagatcgcaaaggccttagatcttgctatctctacagtggcgaccat

SEQ ID NO: 621396 - DNA, 120 bp, Artificial Sequence
  ENSG00000177946_9 (sequence is synthesized)
tcgagatagtaaagaaaaaatcaaagcgagttcacaaatagctactcctctgagagcctctcggttgactcgccatcgaagtgcagtgatggagagcatggagcagctgctgagcttgtg

SEQ ID NO: 621397 - DNA, 120 bp, Artificial Sequence
  ENSG00000177946_10 (sequence is synthesized)
gctggaagaccagagccagccaaatgcgaccttgagcgccgccatcgttcaggagaaggctgagtttgatgacttacagcgtgaacatggcgaaggttctcaaacggagaggtttcatgc

SEQ ID NO: 621398 - DNA, 120 bp, Artificial Sequence
  ENSG00000177946_11 (sequence is synthesized)
aagtcaagggtggcttgtgagattcaaggagtgccactgtttgccccacttcaagatgaacagcgcagctcccagcaacaaggacatgtacacagaaatgctgaaaagcatcatcgaaga

SEQ ID NO: 621399 - DNA, 120 bp, Artificial Sequence
  ENSG00000177946_12 (sequence is synthesized)
atgcccaaaggaacgtttatttccgaggaagagaatgctgagccagggtttaagtcatccaaagatcgcttgatgctgctgcttggtggcagtgcagctggggactttaagttgaagccc

SEQ ID NO: 621400 - DNA, 120 bp, Artificial Sequence
  ENSG00000177946_13 (sequence is synthesized)
ttactggtgtaccgctcagaaacccgcaaggctctgaagggttcttgaagcccagtttgcccgtgatttggcgctccaacagaaaggcttgggtgaccaggagcatctttcatgaatggt

SEQ ID NO: 621401 - DNA, 120 bp, Artificial Sequence
  ENSG00000177946_14 (sequence is synthesized)
tcacttactttttttgccgttgaaaaatacagtgcccaaaataatctcaccaacaaagcactgctcatactagacagtgcgtcatgccactctgtaaatttgagcgacctttctgataac

SEQ ID NO: 621402 - DNA, 90 bp, Artificial Sequence
  ENSG00000177946_15 (sequence is synthesized)
ggagtgaaactccgtctcgagtataataccttcatgacagtacagctgactcaatccggaccacgtgtcaaggtgtaatctcgaccttga

SEQ ID NO: 621403 - DNA, 120 bp, Artificial Sequence
  ENSG00000177946_16 (sequence is synthesized)
tcaatccggaccacgtgtcaaggtgtaatctcgaccttgaaagctcattatctgagaaggacttttcagcacatcctagaagcagcggatggtgaggacacagctatgatcagggaattt

SEQ ID NO: 621404 - DNA, 120 bp, Artificial Sequence
  ENSG00000177946_17 (sequence is synthesized)
tggagaaactacagcatcatggatgctgtggacatggccatcgcatgggaggagctcaaaccagcactaatgaacagcatgtggaagaagatttggcctgagtgtgttcaggcccagcgt

SEQ ID NO: 621405 - DNA, 120 bp, Artificial Sequence
  ENSG00000177946_18 (sequence is synthesized)
ttttcccaggcagataacattgcacagcttcaaaaaaacattgtgacccttgccagaaatgtggcctttgaagaggttgctgaggctgctgtggaccagttgctgcagtcccatgaagaa

SEQ ID NO: 621406 - DNA, 120 bp, Artificial Sequence
  ENSG00000177946_19 (sequence is synthesized)
gatctctcaaatgaggaactgatgcggctggaacaggagctggcagtgggggaggaggagagggaagatggtccctgggcactgtggcagctaaccacaggaagactgtcggcagccctc

SEQ ID NO: 621407 - DNA, 120 bp, Artificial Sequence
  ENSG00000177946_20 (sequence is synthesized)
tcacattttgaggctggcttgtaggtccttgctagtaacagccctaatgatgactggaaactgagaggttccagagaaatcagtgttgcagtaaactgctagcaggagctgtacaatgag

SEQ ID NO: 621408 - DNA, 120 bp, Artificial Sequence
  ENSG00000177946_21 (sequence is synthesized)
aaaaagcgccactcaaaacaactctcttaggtcatttttcaatgtgtgtaaccaaaagttaatcagaataaagcggaagcaccatgatgacctcaacagtggaggcccagccaggcctcc

SEQ ID NO: 621409 - DNA, 120 bp, Artificial Sequence
  ENSG00000177946_22 (sequence is synthesized)
ctgctctgtggtgttggacatccctggaaaccttgctgttggtatttccattttgatacttgagagcatcaaattttgtcattaaaatgttatttaaatatatgcttttaaaagctcata

SEQ ID NO: 621410 - DNA, 120 bp, Artificial Sequence
  ENSG00000177947_0 (sequence is synthesized)
attctagagtttagagtgggggacctctccccaattctgtaagcccatgaggagagaggaaggcctttctctccatgctccttttgcgggaactccctggcaccaaggccaggggggaaa

SEQ ID NO: 621411 - DNA, 120 bp, Artificial Sequence
  ENSG00000177947_1 (sequence is synthesized)
ggacagtctctgatgaggatgggtctctaggctgctctgagtgctgtccctgcactgaagaagttatagttccctcccaggcggccccctccctgcccctcagctcagcctcaatcaaga

SEQ ID NO: 621412 - DNA, 120 bp, Artificial Sequence
  ENSG00000177947_2 (sequence is synthesized)
agttccccatctttgaccactccaagtaggagaaaccggcccagggctcccttagagccgagaacagtgagctggccatgacggaggaggtatggatgggtacctggaggccccatcgcc

SEQ ID NO: 621413 - DNA, 120 bp, Artificial Sequence
  ENSG00000177947_3 (sequence is synthesized)
cccggggacccatcatggccctctacagcagccctggacccaagtacctgattccaccaacaacaggcttcatgaagcacacgcccaccaagctgcgtgcaccggcctacagcttccgtg

SEQ ID NO: 621414 - DNA, 120 bp, Artificial Sequence
  ENSG00000177947_4 (sequence is synthesized)
gggcccccatgctcctggcagagaactgctccccagggccccgttacaatgtaaaccccaagatactgaggactggcaaggaccttggccctgcctactccatcctggggcgctaccaaa

SEQ ID NO: 621415 - DNA, 120 bp, Artificial Sequence
  ENSG00000177947_5 (sequence is synthesized)
ttccgagtggacagcaccccaggccccgctgcgtacatgctgcccatggtaatggggcccaataccgtcggcaaggcctcccagccctccttttccatcaagggccgcagcaagctgggc

SEQ ID NO: 621416 - DNA, 120 bp, Artificial Sequence
  ENSG00000177947_6 (sequence is synthesized)
ggcttcagcgacgacctacacaagaccccaggtcccgcagcctaccgccaaactgatgtgcgggtgaccaagttcaaggctccgcagtacaccatggctgcccgtgtggagcccccaggg

SEQ ID NO: 621417 - DNA, 120 bp, Artificial Sequence
  ENSG00000177947_7 (sequence is synthesized)
gacaagaccctcaagccaggaccaggcgcccacagccctgagaaggtgaccctgaccaagccctgcgccccagttgtcaccttcggcatcaaacactctgattacatgactcccctgctg

SEQ ID NO: 621418 - DNA, 120 bp, Artificial Sequence
  ENSG00000177947_8 (sequence is synthesized)
gttgatgtggaataacgccagccctgctgtgccccatcacacccggcatctacacaagatccgccgggccacagagctcgaggctgtcttcaccagctgggctgggccagcctggccctg

SEQ ID NO: 621419 - DNA, 120 bp, Artificial Sequence
  ENSG00000177947_9 (sequence is synthesized)
cagggcagagcacgcttgtttgggcaattgtaatcagttactttttttctatgctattttaccattttttaatcttgttttctgctgtgcccaaattattaataaatcagattgcattaa

SEQ ID NO: 621420 - DNA, 120 bp, Artificial Sequence
  ENSG00000177947_10 (sequence is synthesized)
ccgagaacagtggtgagttaagggccagcatggacagcaactctgggttacagttaagctggtgaggagctcacagacccatgcagaaagctcctactgtccctgactcctggctcccag

SEQ ID NO: 621421 - DNA, 120 bp, Artificial Sequence
  ENSG00000177947_11 (sequence is synthesized)
ctggagatccccactgatgctgcagcaggttccgcaggtcttacccttcagtgtcagcaagagcagggtcggggacatcaggggccggcatgggacagggccgggcctcccagcacctgg

SEQ ID NO: 621422 - DNA, 120 bp, Artificial Sequence
  ENSG00000177947_12 (sequence is synthesized)
tcctggacaccccctgacccgacttggtcaccacctgtgttggagcccagaggccccacgcctagaatgttggggagtcctccttgagcccccaaactgggctgcatacccacctgcttg

SEQ ID NO: 621423 - DNA, 120 bp, Artificial Sequence
  ENSG00000177947_13 (sequence is synthesized)
tcccagcagcccccttggctccttgtccaggtgactactttccagagaaatccaccaagtacgtgttcgactcagcacccagccactccatctctgcccggacaaaggcattccgagtgg

SEQ ID NO: 621424 - DNA, 120 bp, Artificial Sequence
  ENSG00000177947_14 (sequence is synthesized)
acagcaccccaggtccgcagcagccccaaccatcctcagccaaatggacctggggatcctgggtggggtgtgtgacatggggcagcccgacggctgatctccagagttgggggagagccc

SEQ ID NO: 621425 - DNA, 120 bp, Artificial Sequence
  ENSG00000177947_15 (sequence is synthesized)
ccttcaccctctgggcacctgccacgtgctggggttacactgcagtggtgaggaggggcaggcaacaggccagaagggagacgccctggccccagcatggaccgtgctgaggacaagaga

SEQ ID NO: 621426 - DNA, 120 bp, Artificial Sequence
  ENSG00000177947_16 (sequence is synthesized)
tggggtttaggaagcactgtctggagagagagaggcaatcttagatagggtagcatggaaagaagaggaggaggaaaaaataaaccatgagctatttgggggaggagggtcctggtttca

SEQ ID NO: 621427 - DNA, 120 bp, Artificial Sequence
  ENSG00000177947_17 (sequence is synthesized)
gaaacagccagtgcaaagcccctgggtggcacatgcctgagagcttgaggggcctgagatggggaagcagcatcatggcacccaacagccctcgtccatgttgattttgccagccccagg

SEQ ID NO: 621428 - DNA, 120 bp, Artificial Sequence
  ENSG00000177947_18 (sequence is synthesized)
ccctcaggtccaacagggcagcaacagcctctctcacacacgctcagcgatgttcccaggactggcacacactggggatgccattgccagcgtgaggctgaaatggaggaagtgaccccc

SEQ ID NO: 621429 - DNA, 120 bp, Artificial Sequence
  ENSG00000177947_19 (sequence is synthesized)
acatgaggtaccccacaagcagtggggtgtgatctccacagtgtgacagaagacagaaggggaccttgatgcacgggcaccaacttgtagctgaccctgttgactcagagcctgagtttg

SEQ ID NO: 621430 - DNA, 120 bp, Artificial Sequence
  ENSG00000177947_20 (sequence is synthesized)
gtggggcagggtcctggcccagagggatgtgtaggaaagagcagggaggggggctgggacacagacgaggggaaacagggtcaggctatggaaggacacagccaagaaggggtggagggg

SEQ ID NO: 621431 - DNA, 120 bp, Artificial Sequence
  ENSG00000177947_21 (sequence is synthesized)
tggggtggggatgggaggcacctgcaccctgaggaccctgtacatttccagcactaggcccacaggtaacccttcagggacatggaagcagagaccctgcccttttccctagacactgtg

SEQ ID NO: 621432 - DNA, 120 bp, Artificial Sequence
  ENSG00000177947_22 (sequence is synthesized)
acagctactactgctgagtgctctgtgttcaaacctgggagcatagcttctggccaccttggccccaggttcaggaaggacagcagcccagccccagccagggcagagacctgcaggtgg

SEQ ID NO: 621433 - DNA, 120 bp, Artificial Sequence
  ENSG00000177951_0 (sequence is synthesized)
atcgctagctgggggcggggccggaagctctttccccgcgactgcgccacgtctgaggcggctgtggccgcgtcggtgtccgcgtcgaggagccggggcagggcacgatggcggactggg

SEQ ID NO: 621434 - DNA, 120 bp, Artificial Sequence
  ENSG00000177951_1 (sequence is synthesized)
ctcgggctcagagcccgggcgctgtggaagagattctagaccgggagaacaagcgaatggctgacagcctggcctccaaagtcaccaggctcaaatcgctcgccctggacatcgataggg

SEQ ID NO: 621435 - DNA, 120 bp, Artificial Sequence
  ENSG00000177951_2 (sequence is synthesized)
atgcagaggatcagaaccggtacctggatggcatggactcggatttcacaagcatgaccagcctgcttacagggagcgtgaagcgcttttccacaatggcaaggtccggacaagacaacc

SEQ ID NO: 621436 - DNA, 120 bp, Artificial Sequence
  ENSG00000177951_3 (sequence is synthesized)
ggaagcttctatgtggcatggccgtgggtctaattgtggccttcttcatcctctcctacttcttgtccagggcaaggacgtgagccagtgggagctggtgtctgtgggtgccaagggcag

SEQ ID NO: 621437 - DNA, 120 bp, Artificial Sequence
  ENSG00000177951_4 (sequence is synthesized)
ccagggtcttccctgcctggtgttttgggctccagaggacttacctacaaaatactcctttgcaatgataattgtgggtcaggaatcttcttcctgtgtggcaggaggctgcggctgcct

SEQ ID NO: 621438 - DNA, 120 bp, Artificial Sequence
  ENSG00000177951_5 (sequence is synthesized)
gtgacctgatgagctcatgttggctggtcccatgtgtgaaagggactctctcggggaaaccaaggcccagcccctcccccctcccccaggtgctagagagccaggcagagctggggccac

SEQ ID NO: 621439 - DNA, 120 bp, Artificial Sequence
  ENSG00000177951_6 (sequence is synthesized)
agcgtgtctggagaagccaggtctgagcagagcagctggtgaatcccagacgtggccacctgtggcttgcagcccttctccccgcgcttgggactctgacatcttaaggctgcacggtcg

SEQ ID NO: 621440 - DNA, 120 bp, Artificial Sequence
  ENSG00000177951_7 (sequence is synthesized)
tgtccttgtctgggtgaggccatgtctgtgatccaaggttcctggaactgacacaggaaggggctgtgaaccctaagtgggtgtcatctcctccgaccgaggcttctcaccctggagatg

SEQ ID NO: 621441 - DNA, 120 bp, Artificial Sequence
  ENSG00000177951_8 (sequence is synthesized)
gcagttactcctggccatggttgctgagcatgggcagaccagtggaggccaccctactgtgttatctgcgccttcgatgaagtgagacccttggggagaacgggctgtggatgaaggagt

SEQ ID NO: 621442 - DNA, 120 bp, Artificial Sequence
  ENSG00000177951_9 (sequence is synthesized)
ggactgcagccttggcctagccactgggctgggatcttctgggtcatgtgactgtgtatccaggagcagaaacttgtattctcaggattcaggatctacccagcaccaaagatgtatttt

SEQ ID NO: 621443 - DNA, 120 bp, Artificial Sequence
  ENSG00000177951_10 (sequence is synthesized)
caggagaacagacctagaaatgggcctgtctggcatttcagagtcaggcaaagcaggcagggccagggagcttctgtgggtctacacaagaaggttcctgtgagggctatcagttgttgc

SEQ ID NO: 621444 - DNA, 120 bp, Artificial Sequence
  ENSG00000177951_11 (sequence is synthesized)
tgatggcattctgtgccatcctccttgtccccagcctctgcaggatgccctccctacccacctctccctgggccttccctgtccactgggctggattcatgttcaaaccactggactggc

SEQ ID NO: 621445 - DNA, 120 bp, Artificial Sequence
  ENSG00000177951_12 (sequence is synthesized)
agggcaacgacttcttcccacctcaagatgaggtcctcgcccccttgtcttggcataaaaacacctttaaagcatgagccatgtgcttctttgcccttctctgtcctgttccaatcttct

SEQ ID NO: 621446 - DNA, 120 bp, Artificial Sequence
  ENSG00000177951_13 (sequence is synthesized)
gcctcccagtcactccctggggactatgggatcactgtccccccacctgtgtggccacaccatatgtcctgtcaatccagaactgcctctgagctccaggctgaccacagatcagccaca

SEQ ID NO: 621447 - DNA, 120 bp, Artificial Sequence
  ENSG00000177951_14 (sequence is synthesized)
gcctgatgcctgcagccccactttgctcacccttcccctcccctcctccttccttccacacagcaagcctacctttctccatccatgctcaccatagcccccttccttgtgacctggacc

SEQ ID NO: 621448 - DNA, 120 bp, Artificial Sequence
  ENSG00000177951_15 (sequence is synthesized)
ctccattgtacctggctgagactgtcagcctcctggaggagtggggtccaccttcttcttgccctatgcagtgcaagctcacttctcacccagcaaggttgactcatctgcctccatgtc

SEQ ID NO: 621449 - DNA, 120 bp, Artificial Sequence
  ENSG00000177951_16 (sequence is synthesized)
tctggggctttgctgttgccctgaaacctagctgggctggtcttgctcccagcttgcttccccctcctcggatgtccctttgcaggcccctgtcgttcctccggcaccagtgtccttggc

SEQ ID NO: 621450 - DNA, 120 bp, Artificial Sequence
  ENSG00000177951_17 (sequence is synthesized)
tgccatggcaagctcatcaggggcttgtaccctggtcaccaagcatggtagcagctgcctgcattgtatctccatctggtcactgcaggtgccaacccttcatcccccatgttttcctgg

SEQ ID NO: 621451 - DNA, 120 bp, Artificial Sequence
  ENSG00000177951_18 (sequence is synthesized)
gccatggagggctgacctccgtttctggggaatgtggctgagctgtggtaaccagctacaccccaggtgctctttccatggtggtgcctgctcatcttgctgatgcaaactaggaagtta

SEQ ID NO: 621452 - DNA, 120 bp, Artificial Sequence
  ENSG00000177951_19 (sequence is synthesized)
ggctgcatctcggagtggctttcgctggagaggtgctttgctgtctctcagactcagtcactgtgttccctccccgcctctcttatctccatggctgtttgcagctctcccaggtacttt

SEQ ID NO: 621453 - DNA, 120 bp, Artificial Sequence
  ENSG00000177951_20 (sequence is synthesized)
ggggtctgagctggaattcctttgtggtttgctcttctgcttctcactcttgtattaagaaggattccacaaagggagagtggcatccctgctgctgctgtgccagaccagagtttcctg

SEQ ID NO: 621454 - DNA, 120 bp, Artificial Sequence
  ENSG00000177951_21 (sequence is synthesized)
aggggccctgaccctaaccctccagctcagccctgtacacctgaccctgtaaatgagtggggtttgctgactgtaatccctgacaccagtaaaaccaaaaggactcttgggggctcagtg

SEQ ID NO: 621455 - DNA, 120 bp, Artificial Sequence
  ENSG00000177951_22 (sequence is synthesized)
tgagagccagggttacctactctgccaagtgaggacaaactgctaggctgtatcccataatttcaggatgagaaacattaacaataaaaatttgtagtaaacataacctcatgaagaact

SEQ ID NO: 621456 - DNA, 120 bp, Artificial Sequence
  ENSG00000177951_23 (sequence is synthesized)
cggtgtgcgtgtatcagtgccctgccctagcactacctgctgcagagcctgcagtgtctccttcagcactggtgcgggtgggtggtcaaatcaccacttctgtgtgatcttgctgggatt

SEQ ID NO: 621457 - DNA, 120 bp, Artificial Sequence
  ENSG00000177951_24 (sequence is synthesized)
gagcaagagcgtctgtgctgaaccatggcgccaccagagggcgcgcgatcccgccccaaccaacttcccgctgaagtgccagaagcagcgaggagcttcaacttcctcagggcagcacgg

SEQ ID NO: 621458 - DNA, 67 bp, Artificial Sequence
  ENSG00000177951_25 (sequence is synthesized)
agaagcagcgaggagcttcaacttcctcagggcagcacgggggtcgtgttaatttggtgttcttcat

SEQ ID NO: 621459 - DNA, 120 bp, Artificial Sequence
  ENSG00000177951_26 (sequence is synthesized)
ctttctgtctgctgcagccccactgtgtctggcagagttgttggcagggtttatctggtctggggagggtgagtgctgtattatgtgtctgctctggcccaaccctgccctctctgtctg

SEQ ID NO: 621460 - DNA, 120 bp, Artificial Sequence
  ENSG00000177951_27 (sequence is synthesized)
ctctggcccagctggggtgacctcggccgagaggaccctgtcaggggggcggattcggatccttccgggtccgagcagggccgggtttcggccggcactgccgttaggaccgaaggcgcg

SEQ ID NO: 621461 - DNA, 120 bp, Artificial Sequence
  ENSG00000177954_0 (sequence is synthesized)
cctttccggcggtgacgacctacgcacacgagaacatgcctctcgcaaaggatctccttcatccctctccagaagaggagaagaggaaacacaagaagaaacgcctggtgcagagcccca

SEQ ID NO: 621462 - DNA, 120 bp, Artificial Sequence
  ENSG00000177954_1 (sequence is synthesized)
tacaggaggaaaagcaaggcttacagaaggatgttccttcaggaggaagcagcactaaaagcactctgagtcaagatgagtgggaaaccatctcaataaacacattttggataaatcctg

SEQ ID NO: 621463 - DNA, 120 bp, Artificial Sequence
  ENSG00000177954_2 (sequence is synthesized)
ctttccggcggtgacgacctacgcacacgagaacatgcctgacattaactccagggaccgcagcggcccacgggccacccgcatagacgggagcggagaggagataagatggcggcccag

SEQ ID NO: 621464 - DNA, 120 bp, Artificial Sequence
  ENSG00000177954_3 (sequence is synthesized)
attcctacttcatggatgtgaaatgcccaggtgaggagacggcttgctgtagtggggaaagcactggacctcaacagttggaaaatgttgtagtgttagctgtctcgtatccttgaagct

SEQ ID NO: 621465 - DNA, 120 bp, Artificial Sequence
  ENSG00000177954_4 (sequence is synthesized)
tgtggaaaatattttccctgatactcttaaaatttgaatgtatgagactggcaaagttttgcatcttaggaggagtgattcatttcaccgtgatctctcatcacatttcacatacaaccc

SEQ ID NO: 621466 - DNA, 120 bp, Artificial Sequence
  ENSG00000177954_5 (sequence is synthesized)
ctacgtttttttgtgttgggaaacaatgtaatggatgatgagttgggcataagtgcaggaaagacgggtgtaatagaggaaaaaaatgttatctgcttttctttcaggatgctataaaat

SEQ ID NO: 621467 - DNA, 76 bp, Artificial Sequence
  ENSG00000177954_6 (sequence is synthesized)
aaaaaatgttatctgcttttctttcaggatgctataaaatcaccacggtctttagccatgcacaaacggggaggaa

SEQ ID NO: 621468 - DNA, 120 bp, Artificial Sequence
  ENSG00000177954_7 (sequence is synthesized)
actccagggaccgcagcggcccacgggccacccgcatagacgggagcggagaggagataagatggcggcccagctgcgcagacaccaggggcggcgaggggcgagctctccccggtgtgt

SEQ ID NO: 621469 - DNA, 120 bp, Artificial Sequence
  ENSG00000177954_8 (sequence is synthesized)
ctttccggcggtgacgacctacgcacacgagaacatgcctgtgagtgctttggtccaggtttcggcggagatctcgctgttctgtccgaactctcccctcacgctgatttcggatcgtag

SEQ ID NO: 621470 - DNA, 120 bp, Artificial Sequence
  ENSG00000177963_0 (sequence is synthesized)
gggtggggaactgccgggcgcggaagcgatgggcatatctgtggcttattttcagcactgtcgcgcagacagtggcgcgatctcagctcactgcagcccccgcctgccgggctcccaagg

SEQ ID NO: 621471 - DNA, 120 bp, Artificial Sequence
  ENSG00000177963_1 (sequence is synthesized)
tgctgggattacagcagcaccgcggatgtgacgtttggtgttcctgtgaacgtggggcggggcggggccgtttgcttgctcagtgcctagacgatggtggtggaaagacgcttctgtggg

SEQ ID NO: 621472 - DNA, 120 bp, Artificial Sequence
  ENSG00000177963_2 (sequence is synthesized)
ttaggtcctaacggttaggaaggattcacaggcgggtcatgaggaaggagcagacccctcgggcagaagcccgcgaggagcactgggtgtggtgggggcaggggtgcctcctctgtcaag

SEQ ID NO: 621473 - DNA, 120 bp, Artificial Sequence
  ENSG00000177963_3 (sequence is synthesized)
tggagatcggcgcctcgctcgtgcctgcgagtgcgcgccgcgtcgaatacagccgtacagaacgcactacaggaaagtgaagccgggagagagactgggaggcggcgcggggactggggg

SEQ ID NO: 621474 - DNA, 120 bp, Artificial Sequence
  ENSG00000177963_4 (sequence is synthesized)
ccgtagacgcctttgctcccgggcacttgttagaagagcgagtggatcgcgcttcctgtgcgtcactgaatcctcatgacggccactgaaacggacacgcaggatctttgcttttcaaga

SEQ ID NO: 621475 - DNA, 120 bp, Artificial Sequence
  ENSG00000177963_5 (sequence is synthesized)
gggaactgagtccaggccagactgggttgctcccctttctctcggcccctccacctttgcaagtgctgctccttctgcctggagtggctcctccagtcttttcccggctcacttcccacc

SEQ ID NO: 621476 - DNA, 120 bp, Artificial Sequence
  ENSG00000177963_6 (sequence is synthesized)
gtccggtgtcagcaaaaacagcacttcctcacagcccgttgcagcccagcagtcgccttttgcttcttttgaagcacagccctgtgaccgcctcgtgtccttttgtttttccttgtcccc

SEQ ID NO: 621477 - DNA, 120 bp, Artificial Sequence
  ENSG00000177963_7 (sequence is synthesized)
cttcccctctggaacataagctccacaaaggcagggacctgggaatcccgttcgcctgcattccccagcaaacgcctaacgaacccaatggcccaggactgaaaattcctttccacttcg

SEQ ID NO: 621478 - DNA, 120 bp, Artificial Sequence
  ENSG00000177963_8 (sequence is synthesized)
gctttcccctctacatcccatcggttctgtggagctcgaggggcgtcactgtgtgtgtggcagggcacggtgggggctgagatcgtttcctgttggaacttctggcccaagaagcgcggg

SEQ ID NO: 621479 - DNA, 120 bp, Artificial Sequence
  ENSG00000177963_9 (sequence is synthesized)
tcacaaggagaggggtcagttcggttcagagcgactcagcccctcgactcgggtcttaaaacctccgagccgccagttctgcctcaggccgcgcccccttaaagcgccaccagacgctgc

SEQ ID NO: 621480 - DNA, 120 bp, Artificial Sequence
  ENSG00000177963_10 (sequence is synthesized)
ccttaaagcgccaccagacgctgcgccccgttaaagcgccaccagacgccgcgccccgtcccggcctcccccgcgcgctggcgcggggctttctgggccagggcggggccggcgaactgc

SEQ ID NO: 621481 - DNA, 120 bp, Artificial Sequence
  ENSG00000177963_11 (sequence is synthesized)
ccgtcccgccttccccggcgcgccatggagccccgggcggttgcagaagccgtggagacgggtgaggaggatgtgattatggaagctctgcggtcatacaaccaggagcactcccagagc

SEQ ID NO: 621482 - DNA, 120 bp, Artificial Sequence
  ENSG00000177963_12 (sequence is synthesized)
ttcacgtttgatgatgcccaacaggaggaccggaagagactggcggagctgctggtctccgtcctggaacagggcttgccaccctcccaccgtgtcatctggctgcagagtgtccgaatc

SEQ ID NO: 621483 - DNA, 120 bp, Artificial Sequence
  ENSG00000177963_13 (sequence is synthesized)
ctgtcccgggaccgcaactgcctggacccgttcaccagccgccagagcctgcaggcactagcctgctatgctgacatctctgtctctgaggggtccgtcccagagtccgcagacatggat

SEQ ID NO: 621484 - DNA, 120 bp, Artificial Sequence
  ENSG00000177963_14 (sequence is synthesized)
gttgtactggagtccctcaagtgcctgtgcaacctcgtgctcagcagccctgtggcacagatgctggcagcagaggcccgcctagtggtgaagctcacagagcgtgtggggctgtaccgt

SEQ ID NO: 621485 - DNA, 120 bp, Artificial Sequence
  ENSG00000177963_15 (sequence is synthesized)
aaggagtgcgcctgctaactgacacactggagctgacgctgggggtgactcctgaagggaaccccccacccacgctccttccttcccaagagactgagcgggccatggagatcctcaaag

SEQ ID NO: 621486 - DNA, 120 bp, Artificial Sequence
  ENSG00000177963_16 (sequence is synthesized)
tgctcttcaacatcaccctggactccatcaagggggaggtggacgaggaagacgctgccctttaccgacacctggggacccttctccggcactgtgtgatgatcgctactgctggagacc

SEQ ID NO: 621487 - DNA, 120 bp, Artificial Sequence
  ENSG00000177963_17 (sequence is synthesized)
gcacagaggagttccacggccacgcagtgaacctcctggggaacttgcccctcaagtgtctggatgttctcctcaccctggagccacatggagactccacggagttcatgggagtgaata

SEQ ID NO: 621488 - DNA, 120 bp, Artificial Sequence
  ENSG00000177963_18 (sequence is synthesized)
tggatgtgattcgtgccctcctcatcttcctagagaagcgtttgcacaagacacacaggctgaaggagagtgtagctcccgtgctgagcgtgctgactgaatgtgcccggatgcaccgcc

SEQ ID NO: 621489 - DNA, 120 bp, Artificial Sequence
  ENSG00000177963_19 (sequence is synthesized)
cagccaggaagttcctgaaggcccaggtgctgccccctctgcgggatgtgaggacacggcctgaggttggggagatgctgcggaacaagcttgtccgcctcatgacacacctggacacag

SEQ ID NO: 621490 - DNA, 120 bp, Artificial Sequence
  ENSG00000177963_20 (sequence is synthesized)
atgtgaagagggtggctgccgagttcttgtttgtcctgtgctctgagagtgtgccccgattcatcaagtacacaggctatgggaatgctgctggccttctggctgccaggggcctcatgg

SEQ ID NO: 621491 - DNA, 120 bp, Artificial Sequence
  ENSG00000177963_21 (sequence is synthesized)
caggaggccggcccgagggccagtactcagaggatgaggacacagacacagatgagtacaaggaagccaaagccagcataaaccctgtgaccgggagggtggaggagaagccgcctaacc

SEQ ID NO: 621492 - DNA, 120 bp, Artificial Sequence
  ENSG00000177963_22 (sequence is synthesized)
ctatggagggcatgacagaggagcagaaggagcacgaggccatgaagctggtgaccatgtttgacaagctctccaggaacagagtcatccagccaatggggatgagtccccggggtcatc

SEQ ID NO: 621493 - DNA, 120 bp, Artificial Sequence
  ENSG00000177963_23 (sequence is synthesized)
ttacgtccctgcaggatgccatgtgcgagactatggagcagcagctctcctcggaccctgactcggaccctgactgaggatggcagctcttctgctcccccatcaggactggtgctgctt

SEQ ID NO: 621494 - DNA, 120 bp, Artificial Sequence
  ENSG00000177963_24 (sequence is synthesized)
ccagagacttccttggggttgcaacctggggaagccacatcccactggatccacacccgcccccacttctccatcttagaaaccccttctcttgactcccgttctgttcatgatttgcct

SEQ ID NO: 621495 - DNA, 120 bp, Artificial Sequence
  ENSG00000177963_25 (sequence is synthesized)
ctggtccagtttctcatctctggactgcaacggtcttcttgtgctagaactcaggctcagcctcgaattccacagacgaagtactttcttttgtctgcgccaagaggaatgtgttcagaa

SEQ ID NO: 621496 - DNA, 120 bp, Artificial Sequence
  ENSG00000177963_26 (sequence is synthesized)
gctgctgcctgagggcagggcctacctgggcacacagaagagcatatgggagggcaggggtttgggtgtgggtgcacacaaagcaagcaccatctgggattggcacactggcagagccag

SEQ ID NO: 621497 - DNA, 120 bp, Artificial Sequence
  ENSG00000177963_27 (sequence is synthesized)
tgtgttggggtatgtgctgcacttcccagggagaaaacctgtcagaactttccatacgagtatatcagaacacacccttccaaggtatgtatgctctgttgttcctgtcctgtcttcact

SEQ ID NO: 621498 - DNA, 120 bp, Artificial Sequence
  ENSG00000177963_28 (sequence is synthesized)
gagcgcagggctggaggcctcttagacattctccttggtcctcgttcagctgcccactgtagtatccacagtgcccgagttctcgctggttttggcaattaaacctccttcctactggtt

SEQ ID NO: 621499 - DNA, 120 bp, Artificial Sequence
  ENSG00000177963_29 (sequence is synthesized)
tagactacacttacaacaaggaaaatgcccctcgtgtgaccatagattgagatttataccacataccacacatagccacagaaacatcatcttgaaataaagaagagttttggacaaaaa

SEQ ID NO: 621500 - DNA, 120 bp, Artificial Sequence
  ENSG00000177963_30 (sequence is synthesized)
tttgatgatgcccaacaggaggaccggaaggtgggtgctggcccaaggggtaaaggggcagggacgggtggccccaggaagaagggcctggtggagccgctcttctccctgcccacagag

SEQ ID NO: 621501 - DNA, 120 bp, Artificial Sequence
  ENSG00000177963_31 (sequence is synthesized)
ttccccggcgcgccatggagccccgggcggttgcagaagccgtggagacgggtgaggaggatgtgattatggaagctctgcggtcatacaaccaggagttctctctgcagcactcccaga

SEQ ID NO: 621502 - DNA, 120 bp, Artificial Sequence
  ENSG00000177963_32 (sequence is synthesized)
ttccacacccatgtggacccctgtagggtgggacaggatgacaaatgggcaagagcttccagaatcaagcacctgttcctaagtgctatctgggataccagaaggtggcagatggcagga

SEQ ID NO: 621503 - DNA, 120 bp, Artificial Sequence
  ENSG00000177963_33 (sequence is synthesized)
gctggttacctgtgccgcttctggagggaggcctcttcctgcagttgccttgcccacctcaccccactgggaaaataggtggcttgcctcctgtcctggagagtcactaatgcattcccc

SEQ ID NO: 621504 - DNA, 120 bp, Artificial Sequence
  ENSG00000177963_34 (sequence is synthesized)
gatgcagtgttgcggggagagtgggggtgcacccgttgggtggcaggcgtgtagggatgggggcgagtgccgaccctgccatccgttctgagcagtggctgctgcctgagttagaggcca

SEQ ID NO: 621505 - DNA, 120 bp, Artificial Sequence
  ENSG00000177963_35 (sequence is synthesized)
tggagtttttaggaagacagcagtggtcatcttttgcccccagcactacccagagtcacctaggaagaccccaggggaccaggtatgcagtacaggaggtgcacagtcattgccacacag

SEQ ID NO: 621506 - DNA, 120 bp, Artificial Sequence
  ENSG00000177963_36 (sequence is synthesized)
tcctggagtgcaacagacagtggagcctcagcaggcagcagtgggatgagtggggctcctcacaggaacccttctttctttggtcaggaagacgctgccctttaccgacacctggggacc

SEQ ID NO: 621507 - DNA, 120 bp, Artificial Sequence
  ENSG00000177963_37 (sequence is synthesized)
cttctccggcactgtgtgatgatcgctactgctggagaccgcacagaggagttccacgggtgagaatggggctttttctgggagggaagtgtgcccacatgtctagatggtcgtcctcaa

SEQ ID NO: 621508 - DNA, 120 bp, Artificial Sequence
  ENSG00000177963_38 (sequence is synthesized)
ccccggctctgaaccagaaccacctgagagcccaggccccaccctagagagtctgacgttgtctgggtgagtgagactggacatagccatgaatttgggggcaggaatgtgccaactggg

SEQ ID NO: 621509 - DNA, 120 bp, Artificial Sequence
  ENSG00000177963_39 (sequence is synthesized)
ccttgggtagtggcaacagtatggtacttactagggcacattggttccttgtccccgtttttggtctacctgcccctaggctggtctgggtttccagagatggtctggcgctttggctca

SEQ ID NO: 621510 - DNA, 120 bp, Artificial Sequence
  ENSG00000177963_40 (sequence is synthesized)
gacagggtcggggaggcagtgtgtctcagtgcccccacttccccaggggaccccactgtacagctgagtggcagtgcctctcagatcagtccctgcccttggctttggtccctagcgctg

SEQ ID NO: 621511 - DNA, 120 bp, Artificial Sequence
  ENSG00000177963_41 (sequence is synthesized)
cccctttgggactcagatgccagctcatgtaatgtgtggttcagcggagtcacaaagattgcacctgtgctcagggattagccctgttgaaacccctacctccatctgtccccagccacg

SEQ ID NO: 621512 - DNA, 120 bp, Artificial Sequence
  ENSG00000177963_42 (sequence is synthesized)
tcttcctagagaagcgtttgcacaaggtaggctggggatggctgtgcaggctcccccagtggctctggcactggttctcctgcacagatgtggtcagtgcttccacactgtccacactgg

SEQ ID NO: 621513 - DNA, 120 bp, Artificial Sequence
  ENSG00000177963_43 (sequence is synthesized)
tacgtggagattgtcttggtggtgtgatatgggcgactcttccggttgttctgtggtccagcctggcaagaagccagacccttcctccatgagaagcatgtggacaccttccacacactt

SEQ ID NO: 621514 - DNA, 120 bp, Artificial Sequence
  ENSG00000177963_44 (sequence is synthesized)
gaaggtttcacttcttaaatctttggggatctttactgagtggtccagagaagccccccagtccctacttttaagtcttaaacacaggcagcccttgattacaagcatagttgtccctca

SEQ ID NO: 621515 - DNA, 120 bp, Artificial Sequence
  ENSG00000177963_45 (sequence is synthesized)
gcatcctgaggagacccataggaacctcagatcaaagcttccttctgattgctgtgactgcactacagggcatctggacagctggggctctaaccatcttccaggagcttgcagaaagca

SEQ ID NO: 621516 - DNA, 120 bp, Artificial Sequence
  ENSG00000177963_46 (sequence is synthesized)
ggctggagtacaataaaccgagatttagtagacctcctgggaatctacctgcctaagcaagggacacacaaggtgcctgcgagccagtcaggatagggagctggcactggacacacagct

SEQ ID NO: 621517 - DNA, 120 bp, Artificial Sequence
  ENSG00000177963_47 (sequence is synthesized)
agggggttgtctgtgcccgtcgctgccactgctggtgctggggtccaggcacattatgctaggagggtcaagaactccctgctctgtccacgaagtacacagagcggggattcggttctc

SEQ ID NO: 621518 - DNA, 120 bp, Artificial Sequence
  ENSG00000177963_48 (sequence is synthesized)
tgctttgtgttttcttcccagctctggtttatagttgaagtaattagacttaaagcagttatttctcccaagtcacaaagcttacgagtacctctgagttacgctctatccctgtccttt

SEQ ID NO: 621519 - DNA, 120 bp, Artificial Sequence
  ENSG00000177963_49 (sequence is synthesized)
tcaaaagtgacacagacacccaccacccactcttggccttctgctgactaactgcagaggggcctcttcccaaacctctgccgccaggaccagctgttgtgtatgttggtgggaaggggt

SEQ ID NO: 621520 - DNA, 120 bp, Artificial Sequence
  ENSG00000177963_50 (sequence is synthesized)
ggtggggaggtgtaactctgtgccagtcacaagttaggcaggggcatagccccagtgacagagaatcctctacagacacacaggctgaaggagagtgtagctcccgtgctgagcgtgctg

SEQ ID NO: 621521 - DNA, 120 bp, Artificial Sequence
  ENSG00000177963_51 (sequence is synthesized)
gtgtggcatgaggaggaggggcctgcagctgggagaagggagagctgacccacatcctgtcttgtgagccccaggaggtaggatcagaggagagcttaggatcctggtattaggttgcat

SEQ ID NO: 621522 - DNA, 120 bp, Artificial Sequence
  ENSG00000177963_52 (sequence is synthesized)
tgctcacgtttgaaatcacttgccctggaggaaatcccccaggggatgggtatattgagatcagtattgtgccccttttacagatgataactgaggcccagagaaattaagagactgtct

SEQ ID NO: 621523 - DNA, 70 bp, Artificial Sequence
  ENSG00000177963_53 (sequence is synthesized)
cagatgataactgaggcccagagaaattaagagactgtctaaggccgggagatcacaaggtcaggagatc

SEQ ID NO: 621524 - DNA, 120 bp, Artificial Sequence
  ENSG00000177963_54 (sequence is synthesized)
ccctggactccatcaagggggaggtggacgagacgctgccctttaccgacacctggggacccttctccggcactgtgtgatgatcgctactgctggagaccgcacagaggagttccacgg

SEQ ID NO: 621525 - DNA, 120 bp, Artificial Sequence
  ENSG00000177971_0 (sequence is synthesized)
aaaatagaagagactcactctgaaaccaccattccagaaacccgggcagggctcggctgtccctctggctcccagattcttttggcggctctcgctttgggaggctctcacattcctctg

SEQ ID NO: 621526 - DNA, 120 bp, Artificial Sequence
  ENSG00000177971_1 (sequence is synthesized)
cagatctgccccttcctccttcctcctcttgctcctgggccactgggttttcaaaaatccggaaaatccaagaggggcaaggagaaaagcagcagccgcctgaatcgagtccaagggtgg

SEQ ID NO: 621527 - DNA, 120 bp, Artificial Sequence
  ENSG00000177971_2 (sequence is synthesized)
atgtgtccggcttcacaacgagccaggccgggaaaacaaggactgaggcttacacaacaggccgccaactcttcgaccccggctgcgcagccggagcccccgccggctcgggcgccctct

SEQ ID NO: 621528 - DNA, 120 bp, Artificial Sequence
  ENSG00000177971_3 (sequence is synthesized)
ccccgccccagaagtggccagccccaaccccggaggaaggagggggcgcgacgaggctgtcgggcgacttctagccactcgctgagtggtctcttttgtttgcctaattcctcagcagtt

SEQ ID NO: 621529 - DNA, 120 bp, Artificial Sequence
  ENSG00000177971_4 (sequence is synthesized)
tctgagcctgacgctgaccctgctctgaatcccaggaaccccgtccaaaggtaaccccagcagaaaccggttcctcacccgggacttacgacccccgatcaccaccctcgcgtgcacgca

SEQ ID NO: 621530 - DNA, 120 bp, Artificial Sequence
  ENSG00000177971_5 (sequence is synthesized)
cacactcaacagtttggagtttggagagtgagctccggcgagcagatggcgcggccagccgtctgtccgtccgtcctcctctccgccctgcggggcccggccagtggggggcgggctgcg

SEQ ID NO: 621531 - DNA, 120 bp, Artificial Sequence
  ENSG00000177971_6 (sequence is synthesized)
cccccagcctgccttccccggcgctcgcagaccctccgctccgccagcgagaaggcagctccaaaacaaaaaggcgattccgggaggtggcgtcctgaggaaggaggggatcgccaaagg

SEQ ID NO: 621532 - DNA, 120 bp, Artificial Sequence
  ENSG00000177971_7 (sequence is synthesized)
ggagggtcccaggccgtccaggtcttggggcgccgcggcggaaatcgcgcggatgccagaacgcgctctcagcttcgggtcctgcggctgcggctgccgccatcatggtgcggaagctta

SEQ ID NO: 621533 - DNA, 120 bp, Artificial Sequence
  ENSG00000177971_8 (sequence is synthesized)
gggaggactacacgcgctacaaccagctgagccgtgccgtgcgtgagctggcgcggcgcctgcgcgacctgcccgaacgcgaccagttccgcgtgcgcgcttcggccgcgctgctggaca

SEQ ID NO: 621534 - DNA, 120 bp, Artificial Sequence
  ENSG00000177971_9 (sequence is synthesized)
agctgtatgctctcggcttggtgcccacgcgcggttcgctggagctctgcgacttcgtcacggcctcgtccttctgccgccgccgcctccccaccgtgctcctcaagctgcgcatggcgc

SEQ ID NO: 621535 - DNA, 120 bp, Artificial Sequence
  ENSG00000177971_10 (sequence is synthesized)
agcaccttcaggctgccgtggcctttgtggagcaagggcacgtacgcgtgggccctgacgtggttaccgaccccgccttccttgtcacgcgcagcatggaggactttgtcacttgggtgg

SEQ ID NO: 621536 - DNA, 120 bp, Artificial Sequence
  ENSG00000177971_11 (sequence is synthesized)
actcgtccaagatcaagcggcacgtgctagagtacaatgaggagcgcgatgacttcgatctggaagcctagcggatctcccactttgcatggctgtcttttacagatgggaaaactgagg

SEQ ID NO: 621537 - DNA, 120 bp, Artificial Sequence
  ENSG00000177971_12 (sequence is synthesized)
cctgatgctggagattctatgagggtgctctcctcaagggtatcagacggtcgtaggttcttaagaatttgattcatcagtggcaggccatgcatagagccacgggaggtgcgtccttgt

SEQ ID NO: 621538 - DNA, 120 bp, Artificial Sequence
  ENSG00000177971_13 (sequence is synthesized)
tttccagggaatgttcttagaacttggactactgattattaattgactgtgccttgggaaacagtgggaagtaacttggtgcagcactggggtattgttggcttcttgtgttggaaactt

SEQ ID NO: 621539 - DNA, 120 bp, Artificial Sequence
  ENSG00000177971_14 (sequence is synthesized)
tgtaatgtaaaaggaaaaactggaaatccccacgccctgtttccctttatcgtcttgtggttggactggttcaattcgtttaactcgaattcttgctcctggccgtggttaagctgtgta

SEQ ID NO: 621540 - DNA, 120 bp, Artificial Sequence
  ENSG00000177971_15 (sequence is synthesized)
cagatgatggagagtttggcctcaagtttttataaactgagcgagactagtgttcaggatctcctcccttgtttaaatgtcaataaatgccccaactgctttgtaagtgcaactttttaa

SEQ ID NO: 621541 - DNA, 120 bp, Artificial Sequence
  ENSG00000177971_16 (sequence is synthesized)
ttgtttgcctaattcctcagcagtttctgagcctgacgctgaccctgctctgaatcccaggaaccccgtccaaagggacgggtcgtggcgcagctcagagattgttttccggaggaacag

SEQ ID NO: 621542 - DNA, 120 bp, Artificial Sequence
  ENSG00000177971_17 (sequence is synthesized)
aaacggcctgcgcgttccaggcgtctgacctaagataccgagagctgcgggtgcagcaccctagccagacagggcgaccctgccctgggcgactagcttggaaggagggaaagacactac

SEQ ID NO: 621543 - DNA, 120 bp, Artificial Sequence
  ENSG00000177971_18 (sequence is synthesized)
gttgcttagtacagcagcggggactggatgttctgtgctagccagcggcagcaaggagagaagtggtcaggtagagaatcttcgagaagaggttggtcttgaactcctggcctcaaatga

SEQ ID NO: 621544 - DNA, 120 bp, Artificial Sequence
  ENSG00000177971_19 (sequence is synthesized)
gggattacaggcatgtgccaccgcgcccaaccctcaaatattgtattgtaaaagacaatgaaaagcatacaaaacaaaaatgatcagtgagaagctaggtggcgtcaaatgcccgggcaa

SEQ ID NO: 621545 - DNA, 120 bp, Artificial Sequence
  ENSG00000177981_0 (sequence is synthesized)
gcttccgggtcacgccttgacagcggctttcaacccccacctcagcccagcaattcggcagtttggagcatgtgaacaccttgagccttgatgagttccagtatgtggtatattatgcag

SEQ ID NO: 621546 - DNA, 120 bp, Artificial Sequence
  ENSG00000177981_1 (sequence is synthesized)
agcattcagagcaaatactctctctccgagcgcttaatccgaacaattgctgccatccgttccttcccacatgataatgtagaggacctcatcagagggggagcagatgtgaactgcact

SEQ ID NO: 621547 - DNA, 120 bp, Artificial Sequence
  ENSG00000177981_2 (sequence is synthesized)
catggcacactgaagcccttgcactgtgcctgtatggtgtcagatgctgactgtgtggagttacttctggaaaaaggagccgaggtgaatgccctggatgggtataaccgaacagccctc

SEQ ID NO: 621548 - DNA, 120 bp, Artificial Sequence
  ENSG00000177981_3 (sequence is synthesized)
cactatgcagcagagaaagatgaggcttgtgtggaggtcctattggagtatggtgcaaaccccaatgctttggatggcaacagagataccccacttcactgggcagcctttaagaacaat

SEQ ID NO: 621549 - DNA, 120 bp, Artificial Sequence
  ENSG00000177981_4 (sequence is synthesized)
gctgagtgtgtgcgggctctcctagagagcggggcctctgtcaatgccctggattacaacaatgatacaccgctcagctgggctgccatgaagggaaatcttgagagtgtcagcatcctt

SEQ ID NO: 621550 - DNA, 120 bp, Artificial Sequence
  ENSG00000177981_5 (sequence is synthesized)
ctggattatggcgcagaggtcagagtcatcaacctaataggccagacacccatctcccgcctggtggctctgctagtcaggggacttggaacagagaaagaggactcttgctttgagctc

SEQ ID NO: 621551 - DNA, 120 bp, Artificial Sequence
  ENSG00000177981_6 (sequence is synthesized)
ctccacagagctgttggacactttgaattgaggaaaaatggcaccatgccacgagaggtggccagagacccgcagctatgtgaaaaactgactgttctgtgctcagctccaggaactcta

SEQ ID NO: 621552 - DNA, 120 bp, Artificial Sequence
  ENSG00000177981_7 (sequence is synthesized)
aaaacactcgctcgctatgccgtgcgccgtagcctgggactccagtatctccccgatgcagtgaagggccttccactgccagcttctttgaaggaatacctgttacttttagaatagccg

SEQ ID NO: 621553 - DNA, 120 bp, Artificial Sequence
  ENSG00000177981_8 (sequence is synthesized)
gagaagatgtttgcaccatcgtgcaggcagctctgggtgaggttgtccctgcagtactccttgtcacagaaaacagaaaaacagttgttcctgttgtgtggtttatagatttcgaagcaa

SEQ ID NO: 621554 - DNA, 120 bp, Artificial Sequence
  ENSG00000177981_9 (sequence is synthesized)
catgtcacaacaataacctccatagcacctccccttcccaaaccaaacaacccaacaaaaaaaatccctcacttttgttttctgtttattgcttacctggctttttatattgcattttgc

SEQ ID NO: 621555 - DNA, 120 bp, Artificial Sequence
  ENSG00000177981_10 (sequence is synthesized)
ccctcaatcctcccctttagggaaggagtcaacagtgtaactaaatttctctaggaagatggaaagtacttaaataatgtgtgtgtggttttcctttggggacgtggttaacggtccaga

SEQ ID NO: 621556 - DNA, 86 bp, Artificial Sequence
  ENSG00000177981_11 (sequence is synthesized)
gtgtgtggttttcctttggggacgtggttaacggtccagaagaatcccttctagaaagcattttaggccagccatggtggctcacg

SEQ ID NO: 621557 - DNA, 68 bp, Artificial Sequence
  ENSG00000177981_12 (sequence is synthesized)
ctggtaattgatctgtgaaaaaacttaagaaaatcacaatttcagctaacagcaattgtgtcccaaag

SEQ ID NO: 621558 - DNA, 120 bp, Artificial Sequence
  ENSG00000177981_13 (sequence is synthesized)
gaaaatcacaatttcagctaacagcaattgtgtcccaaagatgaagatactataacctcaaatggtgcagatccagaactgggctggatgacatccctactgtgccatgtcctggggcat

SEQ ID NO: 621559 - DNA, 120 bp, Artificial Sequence
  ENSG00000177981_14 (sequence is synthesized)
ttggaagggactggacctctttcccctcatcaaaggaaacagcagtctttgcctctttctgttggttgtgcccaagggctacagtagctctgaaataacaagagctctgtaataacagta

SEQ ID NO: 621560 - DNA, 120 bp, Artificial Sequence
  ENSG00000177981_15 (sequence is synthesized)
ataaatagctctgaaataacagtcctaagaactcctaaagtcctgagaacttttcttgtaatgcagctttttctcttcctgagaaacagtgtgttctaatgggattcccaggcagttcct

SEQ ID NO: 621561 - DNA, 120 bp, Artificial Sequence
  ENSG00000177981_16 (sequence is synthesized)
acacctacggtgtgtgttccagcagggaggagttatgggctgggctgccttttcccatgggtcttcattcccaatggaaagttcactctgcttagtttggaattatttttctttcagttg

SEQ ID NO: 621562 - DNA, 120 bp, Artificial Sequence
  ENSG00000177981_17 (sequence is synthesized)
ttctggaacctttgctttttattgatttatacaatacaattggtgggagggtggacttgggatgggagtgggaaaagcatgtaagagctccttttgtgatggtccatctacccaaaagag

SEQ ID NO: 621563 - DNA, 120 bp, Artificial Sequence
  ENSG00000177981_18 (sequence is synthesized)
atctgctttagtgaacgatactctttcatttttctaaattagatcaagttgttattgattttagatgacttgtatgcaaatttgaaaaacttttttttttaaagctgattgggaactaca

SEQ ID NO: 621564 - DNA, 120 bp, Artificial Sequence
  ENSG00000177981_19 (sequence is synthesized)
aacaatgaatggaatctactgacacagctaattggaaaacagatgtcttcttctgtcctattgatgctggtgtttaaaaaacatcacttaaaaaaaaagaataaatagttctaaaagcaa

SEQ ID NO: 621565 - DNA, 120 bp, Artificial Sequence
  ENSG00000177981_20 (sequence is synthesized)
tatattgcaaggcccagtgttataaataacttaatggtggtgctgatcataaaaaccacaaaaattcaaagaaggaaaataatgttttttgacctcttcagccttttaaaaatcctattc

SEQ ID NO: 621566 - DNA, 120 bp, Artificial Sequence
  ENSG00000177981_21 (sequence is synthesized)
cttgcctagtcgtttgtaaaccacacagagctccacgggggtcttagtacctcttggggaaatctcgtgctagactaggttagagtagaacatttgtgtccaggtttatccaactcccta

SEQ ID NO: 621567 - DNA, 120 bp, Artificial Sequence
  ENSG00000177981_22 (sequence is synthesized)
gaaattattggagaagcacaaaaggccatgggaaacatgtgcagagatcaagcagtttggctggtccagtcaagttccaggtcaaacatttgagagccaagggaccaagacccgaaccct

SEQ ID NO: 621568 - DNA, 120 bp, Artificial Sequence
  ENSG00000177981_23 (sequence is synthesized)
gcggctgtggccgagaacgctgcactgagcctgcgcgcaaagcctctgagtaaaaggagaaagtaaccccctaactaggcctctggagggcgaaagctgctgcacaagtctgcgcaggcg

SEQ ID NO: 621569 - DNA, 120 bp, Artificial Sequence
  ENSG00000177981_24 (sequence is synthesized)
gagcttcatgttttcttagaatttctccccatcactcctccatctcttccctcctccagtctgaacttctaactcaaggtaatgttggcatagccaatattaaggaaaatgtaatggtaa

SEQ ID NO: 621570 - DNA, 120 bp, Artificial Sequence
  ENSG00000177981_25 (sequence is synthesized)
atatataaaatgatctaaggatttcattcttttacctttctgtccccaccctgcttgcccccattgtatggtgctgatactctgcctttctttcttctccttaacttaagctgtcactgg

SEQ ID NO: 621571 - DNA, 120 bp, Artificial Sequence
  ENSG00000177981_26 (sequence is synthesized)
ctgcttccgggtcacgccttgacagcggctttcaacccccacctcagcccagcaattcgtaccggacctaccgggattgctgcgatctgtttagagcccgtgcagaaagtgacaccgcac

SEQ ID NO: 621572 - DNA, 120 bp, Artificial Sequence
  ENSG00000177981_27 (sequence is synthesized)
gtccttgcgtttcgtgcccttgccccccgccccctagcctcagcgagacagctgccgcgggccctcccgcagcaggcagtttggagcatgtgaacaccttgagccttgatgagttccagt

SEQ ID NO: 621573 - DNA, 120 bp, Artificial Sequence
  ENSG00000177984_0 (sequence is synthesized)
agcaccaggggctggagggcaggggaggggatgatgtcattcctgctcggcgcaatcctgaccctgctctgggcgcccacggctcaggctgaggttctgctgcagcctgacttcaatgct

SEQ ID NO: 621574 - DNA, 120 bp, Artificial Sequence
  ENSG00000177984_1 (sequence is synthesized)
gaaaagttctcaggcctctggtacgtggtctccatggcatctgactgcagggtcttcctgggcaagaaggaccacctgtccatgtccaccagggccatcaggcccacagaggagggcggc

SEQ ID NO: 621575 - DNA, 120 bp, Artificial Sequence
  ENSG00000177984_2 (sequence is synthesized)
ctccacgtccacatggagttcccgggggcggacggctgtaaccaggtggatgccgagtacctgaaggtgggctccgagggacacttcagagtcccggccttgggctacctggacgtgcgc

SEQ ID NO: 621576 - DNA, 120 bp, Artificial Sequence
  ENSG00000177984_3 (sequence is synthesized)
ggagctggagggggccctcagcaccatggtgcagctctacagccggacccaggatgtgagtccccaggctctgaagtccttccaggacttctacccgaccctggggctccccaaggacat

SEQ ID NO: 621577 - DNA, 120 bp, Artificial Sequence
  ENSG00000177984_4 (sequence is synthesized)
gatggtcatgctgccccagtcagatgcatgcaaccctgagagcaaggaggcgccctgacacctccggagccccacccccgcccttcccaggtggagccaaagcagcaggcgcctttgccc

SEQ ID NO: 621578 - DNA, 120 bp, Artificial Sequence
  ENSG00000177984_5 (sequence is synthesized)
ctggagtcaagacccacagccctcggggaccacctggagtctctccatcctccaccccccgcctgtgggatgccttgtgggacgtctctttctattcaataaacagatgctgcagcctca

SEQ ID NO: 621579 - DNA, 120 bp, Artificial Sequence
  ENSG00000177984_6 (sequence is synthesized)
gcggacggctgtaaccaggtggatgccgagtacctgaagtctctccatcctccaccccccgcctgtgggatgccttgtgggacgtctctttctattcaataaacagatgctgcagcctca

SEQ ID NO: 621580 - DNA, 120 bp, Artificial Sequence
  ENSG00000177984_7 (sequence is synthesized)
ggggcgtggctgggaactggaacctcctgaagaccagtggaggccacaagcagaagccctcggctccttcccttccccgatgctgggggccaagggtctttctctgaccctgtccccctc

SEQ ID NO: 621581 - DNA, 120 bp, Artificial Sequence
  ENSG00000177984_8 (sequence is synthesized)
gcactctttacagggtgggagcgggctgagcaagcagctcaagggccccggttacagaattttctagtgtttcaatatcctctagcggtttaccattggttacttggtgtatgccctatg

SEQ ID NO: 621582 - DNA, 77 bp, Artificial Sequence
  ENSG00000177984_9 (sequence is synthesized)
gtatgccctatgtaaatgaagaggatgaagtcaaagtcattttctcggctgagcatacttatcacctgaggtcggga

SEQ ID NO: 621583 - DNA, 80 bp, Artificial Sequence
  ENSG00000177984_10 (sequence is synthesized)
atagtcaggaggctgaggcaggaaaatcgcttaaacccgggaggcagaggctgcagagagccaaggagtgcaccactgca

SEQ ID NO: 621584 - DNA, 67 bp, Artificial Sequence
  ENSG00000177984_11 (sequence is synthesized)
atagtcaggaggctgaggcaggaaaatcgcttaaacccgggaggcagaggctgcagagagccaagga

SEQ ID NO: 621585 - DNA, 120 bp, Artificial Sequence
  ENSG00000177984_12 (sequence is synthesized)
tacgtaaacggagaggatggagtgaaggtacaaagccattcacattcccgtcatcgttagtgtttccagttgatttggttctaggacgcccttgggctccctgcgtccaggccctcttct

SEQ ID NO: 621586 - DNA, 120 bp, Artificial Sequence
  ENSG00000177984_13 (sequence is synthesized)
cctgcctcactctcactccagaggactggcagtgctggcctccctggcaggactcccgcccctgaccagaggggtctgggcgtgctccgaggccacctgctgctccttgcccagtgtccc

SEQ ID NO: 621587 - DNA, 120 bp, Artificial Sequence
  ENSG00000177984_14 (sequence is synthesized)
tgggtgctctgtggggacacagagaggtcacttgggaggttcctgcctctgccagactgcggcgccttcctggcgtcattgccccctgcacgcttatacaaccagtgataaggcggtatc

SEQ ID NO: 621588 - DNA, 120 bp, Artificial Sequence
  ENSG00000177984_15 (sequence is synthesized)
caatgccgtaatcctccccagggccagcccagccctgtccggtcccgtccggtccctggcctgcttgctggaagcccagctgggggctgcatcgggggtggtgggggtctggagtgaggg

SEQ ID NO: 621589 - DNA, 120 bp, Artificial Sequence
  ENSG00000177984_16 (sequence is synthesized)
gtgcccaggcctctctcacagtgtgggggcacaagctctgccctggacactctgccagtgtgaccctaccccccatgttgggggtgagagaagggggctttctgggtggccagatcccag

SEQ ID NO: 621590 - DNA, 120 bp, Artificial Sequence
  ENSG00000177984_17 (sequence is synthesized)
gagagggggcctagccagaccaaccccagcccagctctctgcagctgtaccccaaaggccctggcccagcccagccagacagagtgtggacagaggggcttgggtgcgagtccaggcaag

SEQ ID NO: 621591 - DNA, 120 bp, Artificial Sequence
  ENSG00000177984_18 (sequence is synthesized)
acaagtctctgctgtggcttggcagtggccccgtgactggtgacatagtctggcaggcctaggggacaaatcctcagcccgggtgcatcaggccagagcctggctgtctggagccctcca

SEQ ID NO: 621592 - DNA, 120 bp, Artificial Sequence
  ENSG00000177984_19 (sequence is synthesized)
ggaaatgaccccctgggctgggggacatccgagtgattgtgccaaacaatggacaagggggccggagtctcagagccgaagtgccttccgcttccatctgctccgcccaggagcaggtgc

SEQ ID NO: 621593 - DNA, 120 bp, Artificial Sequence
  ENSG00000177984_20 (sequence is synthesized)
ataattgtgacaactgcctttcctggggcgcttgctctgtgcccggccaggcacgtgctatagacccactctgcgcttaatcctaaaccaacctgtgaatggatcattactgcacccact

SEQ ID NO: 621594 - DNA, 120 bp, Artificial Sequence
  ENSG00000177984_21 (sequence is synthesized)
tcacagctgggaactgaggctcacagttgcactgtgacctacccaagatgagttcctgtccacctgggctcagctcacacccaagacatggccactccgagaccccttgctgtgtgactt

SEQ ID NO: 621595 - DNA, 120 bp, Artificial Sequence
  ENSG00000177989_0 (sequence is synthesized)
gaagcgggaaagggccacaatggggtctgggaggtgggcggggcggagcggggatgtccagccacgtcgctttgttttcccacgctaggagctaccacaacaggtgctgcgagccgtaag

SEQ ID NO: 621596 - DNA, 120 bp, Artificial Sequence
  ENSG00000177989_1 (sequence is synthesized)
taagcgccccccacccgcgctatgggctcggacgcctgggtgggcctttggcggccacaccggccccgcggccccatcgcggcgcactacggaggccccgggcccaaatacaagctgccg

SEQ ID NO: 621597 - DNA, 120 bp, Artificial Sequence
  ENSG00000177989_2 (sequence is synthesized)
cccaacaccggctacgccctgcatgacccgtcgcggccgcgcgcccccgccttcaccttcggcgcgcgcttccccacgcagcagacgacgtgcggccccgggccaggccacctggtgccc

SEQ ID NO: 621598 - DNA, 120 bp, Artificial Sequence
  ENSG00000177989_3 (sequence is synthesized)
gcatgaccgtgcgcggcaccgacggcgcccccgcctactccatctacggccgcccacgccgctcagcgcccttcctcactccgggacctggcaggtacttcccggagcgagcggggaacg

SEQ ID NO: 621599 - DNA, 120 bp, Artificial Sequence
  ENSG00000177989_4 (sequence is synthesized)
cagtgcgcctcggcacaccattgctccccgaaactggggtgtccaggcggaacagcagagcccaggtcccgcggcctatacggtgccctcgctcttgggtccgcgcgtcatcggcaaagt

SEQ ID NO: 621600 - DNA, 120 bp, Artificial Sequence
  ENSG00000177989_5 (sequence is synthesized)
ctccgccccaacttgctccatctacggccgcagagcggctggcagtttcttcgaggacctcagcaagaccccgggcccctgcgcctatcaggtcgtgagtccaggggtctacaagtcccg

SEQ ID NO: 621601 - DNA, 120 bp, Artificial Sequence
  ENSG00000177989_6 (sequence is synthesized)
ggccccccagttcacgattctggcgcggacttcgctcccccaagacaacactcggaagccagggcccgcggcctacaacgtggatcagcaccggaagccccgcggctggagtttcgggat

SEQ ID NO: 621602 - DNA, 120 bp, Artificial Sequence
  ENSG00000177989_7 (sequence is synthesized)
ccggcactcggactacctggccccgctggtgaccgacgcggacaactgacccgccaggcgggagcggccccacacgtgtttgcttaaagtctgcgagtccgcatcgtgtccgcctctctc

SEQ ID NO: 621603 - DNA, 120 bp, Artificial Sequence
  ENSG00000177989_8 (sequence is synthesized)
actccgggacctggtcaggacccccgggcccctggccaccccaacgccgaactgcctccagggaggcccacctgggaacccccgacctgaaccccgagtccccctcggataccctaacac

SEQ ID NO: 621604 - DNA, 120 bp, Artificial Sequence
  ENSG00000177989_9 (sequence is synthesized)
cgcatattcggtacccccatatccggatctcaaatcccaaaccccgaaccccacggggctttgataaatcgtggctcagactccccactagtcccaggaccccatctcgggtacccacca

SEQ ID NO: 621605 - DNA, 120 bp, Artificial Sequence
  ENSG00000177989_10 (sequence is synthesized)
cgaggccgggaccccagcgctgcgccgcgtccgaacgtcgagaccccaccgagggcgggagggggactctcgggagccacagacgcccgagacccacgccgggcgggaccggccagggat

SEQ ID NO: 621606 - DNA, 80 bp, Artificial Sequence
  ENSG00000177989_11 (sequence is synthesized)
tccgcgtgtccgggggcaccgggggattggccggggcgcggcgtgcaaggcttcccgggggcggcgactgccgagctccg

SEQ ID NO: 621607 - DNA, 120 bp, Artificial Sequence
  ENSG00000177989_12 (sequence is synthesized)
gccgtcctggggcgccgccgccccgccgccggcagtggaccgctgtgcgcgaaccctgaaccctacggtcccgacccgcgggcgaggccgggtacctgggctgggatccggagcaagcgg

SEQ ID NO: 621608 - DNA, 120 bp, Artificial Sequence
  ENSG00000177989_13 (sequence is synthesized)
tgggctgggatccggagcaagcgggcgagggcagcgccctaagcaggtacgggcggggctcaagtcgcgaggcggggaagcgggaggcagacacggacgagggcgacacagacacgggac

SEQ ID NO: 621609 - DNA, 120 bp, Artificial Sequence
  ENSG00000177989_14 (sequence is synthesized)
cgaggggcggacaccggagagacacgggaaaggggtcgggacaggagcacgtggctcagacaccgacgccgggaggccgcagaccccggacgtgtcaggcatccccgcaggcccggagcg

SEQ ID NO: 621610 - DNA, 120 bp, Artificial Sequence
  ENSG00000177989_15 (sequence is synthesized)
aggtcggagtgatgggatcagagtccccgggggtccaggggtcccggcgcggagaggatgccggccccgcgaggtcagcggtgtctccgggcccgcagcaccggaagccccgcggctgga

SEQ ID NO: 621611 - DNA, 120 bp, Artificial Sequence
  ENSG00000177990_0 (sequence is synthesized)
agtccgttgaggctgccaggcgagtcaggtctctctggacctcgcctgactcggctgggctgtgcctgaaattgacccagctccaccatactccttgattatgagaaaacaaggagtaag

SEQ ID NO: 621612 - DNA, 120 bp, Artificial Sequence
  ENSG00000177990_1 (sequence is synthesized)
ctcaaagcggctgcaatcttccggccgcagccagtctaaggggcggcgcggggcctccctcgcccgggagccggaggtagaggaggagatggaaaagtcggccctaggcggcgggaaact

SEQ ID NO: 621613 - DNA, 120 bp, Artificial Sequence
  ENSG00000177990_2 (sequence is synthesized)
gccaaggggctcctggaggtcctccccggggaggatccaaagtctgaaagagcgaaaaggcttggagctagaggtggtggccaagacctttcttctcggccccttccagttcgtccgtaa

SEQ ID NO: 621614 - DNA, 120 bp, Artificial Sequence
  ENSG00000177990_3 (sequence is synthesized)
ttccctggcgcagctccgggaaaaggtgcaggaactgcaggcgcggcggttctccagcagaaccactctcggcatcgctgtctttgtggcaattttacattggttacatttagtaacact

SEQ ID NO: 621615 - DNA, 120 bp, Artificial Sequence
  ENSG00000177990_4 (sequence is synthesized)
ttttgaaaatgatcgtcatttctctcacctctcatctttggaacgggagatgacttttcgcactgaaatgggactttattattcatacttcaagaccattattgaagcaccttcgttttt

SEQ ID NO: 621616 - DNA, 120 bp, Artificial Sequence
  ENSG00000177990_5 (sequence is synthesized)
ggaaggactgtggatgattatgaatgacaggcttactgaatatcctcttataattaatgcaataaaacgcttccatctttatccagaggtaatcatagcctcctggtattgcacattcat

SEQ ID NO: 621617 - DNA, 120 bp, Artificial Sequence
  ENSG00000177990_6 (sequence is synthesized)
gggaataatgaatttatttggactagaaactaagacctgctggaatgtcaccagaatagaacctcttaatgaagttcaaagctgtgaaggattgggagatcctgcttgcttttatgttgg

SEQ ID NO: 621618 - DNA, 120 bp, Artificial Sequence
  ENSG00000177990_7 (sequence is synthesized)
tgtaatctttattttaaatggactaatgatgggattgttcttcatgtatggagcatacctgagtgggactcaactgggaggtcttattacagtactgtgcttctttttcaaccatggaga

SEQ ID NO: 621619 - DNA, 120 bp, Artificial Sequence
  ENSG00000177990_8 (sequence is synthesized)
ggccacccgtgtgatgtggacaccacctctccgtgaaagtttttcctatcctttccttgtacttcagatgtgtattttaactttgattctcaggacctcaagcaatgatagaaggccctt

SEQ ID NO: 621620 - DNA, 120 bp, Artificial Sequence
  ENSG00000177990_9 (sequence is synthesized)
cattgcactctgtctttccaatgttgcttttatgcttccctggcaatttgctcagtttatactttttacacagatagcatcattatttcccatgtatgttgtgggatacattgaaccaag

SEQ ID NO: 621621 - DNA, 120 bp, Artificial Sequence
  ENSG00000177990_10 (sequence is synthesized)
caaatttcagaagatcatttatatgaacatgatttcagttacccttagtttcattttgatgtttggaaattcaatgtacttatcttcttattattcttcatctttgttaatgacgtgggc

SEQ ID NO: 621622 - DNA, 120 bp, Artificial Sequence
  ENSG00000177990_11 (sequence is synthesized)
aataattctaaagagaaatgaaattcaaaaactgggagtatctaaactcaacttttggctaattcaaggtagtgcctggtggtgtggaacaatcattttgaaatttctgacatctaaaat

SEQ ID NO: 621623 - DNA, 120 bp, Artificial Sequence
  ENSG00000177990_12 (sequence is synthesized)
cttaggcgtttcagaccacattcgcctgagtgatcttatagcagccagaatcttaaggtatacagattttgatactttaatatatacctgtgctcccgaatttgacttcatggaaaaagc

SEQ ID NO: 621624 - DNA, 120 bp, Artificial Sequence
  ENSG00000177990_13 (sequence is synthesized)
gactccgctgagatacacaaagacattattgcttccagttgttatggtgattacatgttttatctttaaaaagactgttcgtgatatttcatatgttttagctacaaacatttatctaag

SEQ ID NO: 621625 - DNA, 120 bp, Artificial Sequence
  ENSG00000177990_14 (sequence is synthesized)
aaaacagctccttgaacacagtgagctggcttttcacacattgcagttgttagtgtttactgcccttgccattttaattatgaggctaaagatgtttttgacaccgcacatgtgtgttat

SEQ ID NO: 621626 - DNA, 120 bp, Artificial Sequence
  ENSG00000177990_15 (sequence is synthesized)
ggcttccttgatatgctctcgacagctctttggctggctttttcgcagagttcgttttgagaaggttatctttggcattttaacagtgatgtcaatacaaggttatgcaaacctccgtaa

SEQ ID NO: 621627 - DNA, 120 bp, Artificial Sequence
  ENSG00000177990_16 (sequence is synthesized)
ggagaatttaataatttgcctcaggaagaacttttacagtggatcaaatacagtaccacatcagatgctgtctttgcaggtgccatgcctacaatggcaagcatcaagctgtctacactt

SEQ ID NO: 621628 - DNA, 120 bp, Artificial Sequence
  ENSG00000177990_17 (sequence is synthesized)
catcccattgtgaatcatccacattacgaagatgcagacttgagggctcggacaaaaatagtttattctacatatagtcgaaaatctgccaaagaagtaagagataaattgttggagtta

SEQ ID NO: 621629 - DNA, 120 bp, Artificial Sequence
  ENSG00000177990_18 (sequence is synthesized)
catgtgaattattatgttttagaagaggcatggtgtgttgtgagaactaagcctggttgcagtatgcttgaaatctgggatgtggaagacccttccaatgcagctaaccctcccttatgt

SEQ ID NO: 621630 - DNA, 120 bp, Artificial Sequence
  ENSG00000177990_19 (sequence is synthesized)
agcgtcctgctcgaagacgccaggccttacttcaccacagtatttcagaatagtgtgtacagagtattaaaggttaactgagaaggatactacccattttactatggcacaatgccgtgt

SEQ ID NO: 621631 - DNA, 120 bp, Artificial Sequence
  ENSG00000177990_20 (sequence is synthesized)
gtcaaaaacaatcaccctttggcttattcacattaataaaaatcacaagctttaataacagacacttaaaaataagataaaaatggattggaaatttttctgattactaaaaggtaaatt

SEQ ID NO: 621632 - DNA, 120 bp, Artificial Sequence
  ENSG00000177990_21 (sequence is synthesized)
acttttctgttcattgaatgtcagccttattaagcttgtcatataagttattaaatcattcatgtcatactgcataaacaaatgttcatttcagaattttaaagagaaatgtatataaaa

SEQ ID NO: 621633 - DNA, 120 bp, Artificial Sequence
  ENSG00000177990_22 (sequence is synthesized)
gaacaatgaattttaataaatcaggggtatgtaagtcctttttcatccaactaggtgaattgcttcagattttctctagtaccagagggtacctcctcaaactctttgaaccacttaagg

SEQ ID NO: 621634 - DNA, 120 bp, Artificial Sequence
  ENSG00000177990_23 (sequence is synthesized)
cagaagaatgcaagctctgaaatgacatccttaaaatgctgatactggtcacagcctctttacctctgtgaggaaattgtaacagtgtgtcttttaaggtgtttttattttaccagccct

SEQ ID NO: 621635 - DNA, 120 bp, Artificial Sequence
  ENSG00000177990_24 (sequence is synthesized)
taagaaagatctctaataccttttaatacttttttttaataatttcaagttgaagtgtttttaaaaacactttgttttgtaatgttttgaatctcttgagatgtgtttaccccactagat

SEQ ID NO: 621636 - DNA, 120 bp, Artificial Sequence
  ENSG00000177990_25 (sequence is synthesized)
acatatttgccactggttagttctccatctaagctcaagaggttattcatctctctttagattccagtggcttttcttttaacatccaggtaaaacagaaactgctatggtatacaacca

SEQ ID NO: 621637 - DNA, 120 bp, Artificial Sequence
  ENSG00000177990_26 (sequence is synthesized)
agttttggggttaaacataatcagaaaagaaaatccagttaaatttatgaagtgagattttcagatcctagatcttgaataaaggaaaggtcttttcatcttgatggccccaaagcttgt

SEQ ID NO: 621638 - DNA, 120 bp, Artificial Sequence
  ENSG00000177990_27 (sequence is synthesized)
tggtcatggtctttatttctggccactatcttcttaaataatatatttttaagccctcatttatttttggttttgggtgaggaaagtcatgttttctaagtcctctcccctaataaaacc

SEQ ID NO: 621639 - DNA, 120 bp, Artificial Sequence
  ENSG00000177990_28 (sequence is synthesized)
tacccaacaatagtgctttgaaaagtggtagttatcttgaagatactcttgccaaatgcaaagataaacattctttttgtctgctttataaatatgaaatatgccagatctatagtattt

SEQ ID NO: 621640 - DNA, 120 bp, Artificial Sequence
  ENSG00000177990_29 (sequence is synthesized)
taatgtgcatctactttaaatgagtcatcttggggtttttataattcccttatgttcttgcccctctacacttgaaataacaaaatgccttaattttatggattagttctcttatagtag

SEQ ID NO: 621641 - DNA, 120 bp, Artificial Sequence
  ENSG00000177990_30 (sequence is synthesized)
acaggcagctatatgcagcaaaaccaataaagttatttttcaactttcatagttgtaaaatatcttataacagaatacaaaacagctaagaaaacatgccacattttattttagcatttt

SEQ ID NO: 621642 - DNA, 120 bp, Artificial Sequence
  ENSG00000177990_31 (sequence is synthesized)
caaataatttgtttttggtgtaagcacaggataaaaaaggagagcgtcaaagaaaagagacataacacctaacattcataaaaattaacaaagtatattttggatgatgtttttacagga

SEQ ID NO: 621643 - DNA, 120 bp, Artificial Sequence
  ENSG00000177990_32 (sequence is synthesized)
tggatgatgtttttacaggaaatattttaaataagttggtagaacttttaaaatggtactgtattagctaataaaatattcagtacaaatatatgtttggatttatgcattaaaaaacta

SEQ ID NO: 621644 - DNA, 120 bp, Artificial Sequence
  ENSG00000177990_33 (sequence is synthesized)
tcatgtatatcggtgttccatccagtgagtattgagatttcaatttgctagtaagatttttttagtctattctattatcatttattttaaaatcttttaaattattgtttaaatttaaag

SEQ ID NO: 621645 - DNA, 120 bp, Artificial Sequence
  ENSG00000177990_34 (sequence is synthesized)
aactacataactagtaacaagaaactgaactggggaagcagagagtaaatggagaattttgatgacatttcatgatactaagattttccatcagagctccttcctacataacaaatgctg

SEQ ID NO: 621646 - DNA, 120 bp, Artificial Sequence
  ENSG00000177990_35 (sequence is synthesized)
atgataataataatattctatattggaagtgagaaattctgccaagaagtctcatgctgccaatagcctacaaagaatgaaattataaccccagctcaattggtgctgcatgtttaaagt

SEQ ID NO: 621647 - DNA, 120 bp, Artificial Sequence
  ENSG00000177990_36 (sequence is synthesized)
cccaatgaagcgcgtgaagggcaagcggtgatgggttctgcgccagtggggctgggagcccgtccggggctgtacatggggctgcgcgcaagtcgccatgacgaccgggaggtccgcaac

SEQ ID NO: 621648 - DNA, 120 bp, Artificial Sequence
  ENSG00000177990_37 (sequence is synthesized)
tacactgtatatataggttgaatagaaggtcatcctattcatttattaatgagaggtacaatctctagggatctgtaaaatctattttgtcttaaccaaagaacaaatttttgacatatc

SEQ ID NO: 621649 - DNA, 120 bp, Artificial Sequence
  ENSG00000177990_38 (sequence is synthesized)
gcagagctgtgcgcactgggggtgctgcaggcgctggggagagtgtggagaggctgcgtggagctgcgcgctcggggtgggggctgcactcccaatgaagcgcgtgaagggcaagcggtg

SEQ ID NO: 621650 - DNA, 120 bp, Artificial Sequence
  ENSG00000177990_39 (sequence is synthesized)
gggacgtttcaggtttattaattgtgtgtatccttatagttgagtagaatatcataagttcctctcttaaaatttaaagaccccagaaactgttctctcatgaactcgaagaatgaacct

SEQ ID NO: 621651 - DNA, 120 bp, Artificial Sequence
  ENSG00000177990_40 (sequence is synthesized)
tagtgtgtaaataatggccagggtaatagacaagccaaatggaaaagagagtcatgggagccaaaaagttctaaatagggatgggcttttggctttggacacctcgtgggtgagcatgat

SEQ ID NO: 621652 - DNA, 120 bp, Artificial Sequence
  ENSG00000177990_41 (sequence is synthesized)
gaccacgtgaagggacagtaagagtgatgagcttgaatagtgatcttggagttaagttagtaaagtaagatttatttagtcacacagccagaaatctattactattttccaacacttagc

SEQ ID NO: 621653 - DNA, 120 bp, Artificial Sequence
  ENSG00000177992_0 (sequence is synthesized)
agttgcttgaaggcgatgggaaatctcgtcatccctctagggaagggcagggcaggcagggttgagagtgggcagaggattccacccccagctcccagaccatctgtggagtgcacagga

SEQ ID NO: 621654 - DNA, 120 bp, Artificial Sequence
  ENSG00000177992_1 (sequence is synthesized)
gacgacattgcacttcagatggagaaaatgctctttcctctgaagagccctagtgccacatggctgagccctagctccactccctggatgatggatttcatcctcaccagtgtgtgtggc

SEQ ID NO: 621655 - DNA, 120 bp, Artificial Sequence
  ENSG00000177992_2 (sequence is synthesized)
ctagtgctcctcttcctattgctcctctacgtccacagtgacccaccctcacccccgcccgggaggaagaggagcagcagggagcctcaaagggagagaagcgggaggtccaggagcagg

SEQ ID NO: 621656 - DNA, 120 bp, Artificial Sequence
  ENSG00000177992_3 (sequence is synthesized)
aagatctcagctctgaaagcttgcagaatcctcctgagggagctggaggagactcgggacctgaactaccttctggaaagccacctgaggaagctcgctggcgaaggcagctcccacctg

SEQ ID NO: 621657 - DNA, 120 bp, Artificial Sequence
  ENSG00000177992_4 (sequence is synthesized)
cccttaggtggagaccccctgggggacgtgtgtaaaccagtgcctgctaaggcccaccagccgcatgggaaatgcatgcaagatccgtctcctgccagcttgtccccaccagctccccca

SEQ ID NO: 621658 - DNA, 120 bp, Artificial Sequence
  ENSG00000177992_5 (sequence is synthesized)
gctcctctggcctccaccctgtcaccaggcccgatgaccttctcagagccttttggaccacactcaaccctgagtgcctccgggccaccagagcccttgcttcccctaaaatgccctgca

SEQ ID NO: 621659 - DNA, 120 bp, Artificial Sequence
  ENSG00000177992_6 (sequence is synthesized)
acccagccacatgtggtttttcctccttcaccacagccgcatggtcccctggcctcctctccacctccacccgactccagcctggctggacttcagtgtggctccacaacatgccccgtc

SEQ ID NO: 621660 - DNA, 120 bp, Artificial Sequence
  ENSG00000177992_7 (sequence is synthesized)
ccccagagctcccctctacacaaccaggtgctgcctcctccaaccagggtgatctctggcctggggtgctccagcgatcccatctgggacctctattgctggagggaggctgccaccacc

SEQ ID NO: 621661 - DNA, 120 bp, Artificial Sequence
  ENSG00000177992_8 (sequence is synthesized)
tggggcctctccacctactcacatggcaaatcccagccacggcatcttcccgaccacacctcagaggcttccttctggggagaccccacacccaagcacatggaggtaggtggctgcaca

SEQ ID NO: 621662 - DNA, 120 bp, Artificial Sequence
  ENSG00000177992_9 (sequence is synthesized)
ttcatccaccctgacgtgcagaagctgctggagaccctcatcgccaagagagcactgatgaagatgtggcaggagaaagaaagaaaacgggccgaccacccgcacatgacatcactgggg

SEQ ID NO: 621663 - DNA, 120 bp, Artificial Sequence
  ENSG00000177992_10 (sequence is synthesized)
aaggagtgggacatcacgaccctaaatcccttctggaacgtgtcaacccagccacagcagctgccccgtcctcagcaagtctctgatgccacaaccgtggggaaccacttacagcagaaa

SEQ ID NO: 621664 - DNA, 120 bp, Artificial Sequence
  ENSG00000177992_11 (sequence is synthesized)
cgcagccagcttttctgggacctcccctctctcaatagcgagtccctggcgaccacagtctgggtttctaggaacccttcctcacagaatgcacactctgtaccactggataaagcctcc

SEQ ID NO: 621665 - DNA, 120 bp, Artificial Sequence
  ENSG00000177992_12 (sequence is synthesized)
acttctcttccaggtgaacctgaggttgaggcatcctcacagctttcccaggcaccgccccagccccaccacatggcccagccccaacatttcactccagcctggccccagtcccagccc

SEQ ID NO: 621666 - DNA, 120 bp, Artificial Sequence
  ENSG00000177992_13 (sequence is synthesized)
ccacctttggctgagatccagacccaggcccacctctcaccccctgtcccaagcctggggtgctcttctccaccccagattaggggctgtggggcatcttaccctacatcccaggagagg

SEQ ID NO: 621667 - DNA, 120 bp, Artificial Sequence
  ENSG00000177992_14 (sequence is synthesized)
acacagtctgtcatccccactggaaaggagtatcttgaatggcccttgaagaagcgaccaaagtggaagagggttttgccctctctcctcaaaaagtctcaggctgttctgagccagccc

SEQ ID NO: 621668 - DNA, 120 bp, Artificial Sequence
  ENSG00000177992_15 (sequence is synthesized)
actgcccaccttccccaagagaggccggcctcctggagccccaagtcagcccccatccttcccggggttgtcaccagccctgagctcccagagcactggtggcaaggaaggaatgccatc

SEQ ID NO: 621669 - DNA, 120 bp, Artificial Sequence
  ENSG00000177992_16 (sequence is synthesized)
caccaggagcagtcctgtggccctcccagcagattgcaggcatctggggacctgctacagcctgatggggaattcccagggaggccccagagtcaggcagaagacacgcagcaggccctc

SEQ ID NO: 621670 - DNA, 120 bp, Artificial Sequence
  ENSG00000177992_17 (sequence is synthesized)
ttgccctcccagccttctgactttgcagggaagggcaggaaggatgtgcagaagaccgggttcaggagctccggaaggttctctgacaaggggtgcttagggtccaaactagggccggac

SEQ ID NO: 621671 - DNA, 120 bp, Artificial Sequence
  ENSG00000177992_18 (sequence is synthesized)
cccagggacccagacaaggagcatctggaaaacaagctgcaaatccatctggccaggaaggtaggggagatcaaagagggctggatccccatgcctgtgcgtcgctcctggctcatggcc

SEQ ID NO: 621672 - DNA, 120 bp, Artificial Sequence
  ENSG00000177992_19 (sequence is synthesized)
aaatgtgctgttcccaagtctgacacccacaggaaacctgggaagctggcatcctggaggggtgggaaagcccacgtgaacacctcccaggagctttccttcctccatccctgcacccag

SEQ ID NO: 621673 - DNA, 120 bp, Artificial Sequence
  ENSG00000177992_20 (sequence is synthesized)
cagatactggaagtacatcttgtaaggttctgtgtgaggcacagctggggtacagacctccagtccctggagcccataaatgtctggtcaggtgaggctcaggccccgcccttcccacaa

SEQ ID NO: 621674 - DNA, 120 bp, Artificial Sequence
  ENSG00000177992_21 (sequence is synthesized)
tccacctttaccccctgggcctcctgggtatctcgggttgaatctgtacccaaggttcccattttcctgggaaaacgtcctcagaatggtccaggagacaacagaacaacaagcaagtca

SEQ ID NO: 621675 - DNA, 120 bp, Artificial Sequence
  ENSG00000177992_22 (sequence is synthesized)
gtcccgaccgtgagtggccctctcgctgccccaccgcctgagcaggagggagtccagaggcccccgagagggtcccagtcagctgatacccatgggcgatcagaggcctttccgactgga

SEQ ID NO: 621676 - DNA, 120 bp, Artificial Sequence
  ENSG00000177992_23 (sequence is synthesized)
cacaagggcagggggtgttctcagcccccaacatgcagccttgtgggcagaacctggcagagcaggactgtcctggaatccgggaaacccaaacccagactagaggggagtatgggttca

SEQ ID NO: 621677 - DNA, 120 bp, Artificial Sequence
  ENSG00000177992_24 (sequence is synthesized)
gaaatggctgggaacgaggcatggcttgagagtgagagcatgtccccaggagacccctgtagtagcagagccctgcaagtgctcagcatagggtcccagtgggcaagggctgaagatgcc

SEQ ID NO: 621678 - DNA, 120 bp, Artificial Sequence
  ENSG00000177992_25 (sequence is synthesized)
ctgcaggcactgaaagtgggggagaagcccccaacttgggaagtcaccttgggagccagtgtgagggcaagttcgggaagtgttcaggaggatctgaggagcacaggggctctggggacc

SEQ ID NO: 621679 - DNA, 120 bp, Artificial Sequence
  ENSG00000177992_26 (sequence is synthesized)
actggtaacccctcagcgtcttcagtctgtgttgctcaggatccagagcagctgcacctgaaagcgcaggtggtcagtgagattgcgctcatagtgcaggtggactcagaggagcagctg

SEQ ID NO: 621680 - DNA, 120 bp, Artificial Sequence
  ENSG00000177992_27 (sequence is synthesized)
ccaggccgtgccccgggcatcctcctccaggacggcgccacaggcctgtgccttccaggccgccacatggacatgctcactgccgcagacaggctgcccactcaagcccctctgtccacc

SEQ ID NO: 621681 - DNA, 120 bp, Artificial Sequence
  ENSG00000177992_28 (sequence is synthesized)
tcccagagtgtgtctggtaagaacatgacagcttcccaggggccatgtgccctcctatggaagggaggggacagtccagggcagcaggagcctgggagcccaaaagcaaaggccccacag

SEQ ID NO: 621682 - DNA, 120 bp, Artificial Sequence
  ENSG00000177992_29 (sequence is synthesized)
aagagtcagaagacgctgggctgtgcggacaagggcgaggcccacaggaggcccagaacaggggagcagggacacaggtccaagggacccaggacctctgaagccagtgggaggagccac

SEQ ID NO: 621683 - DNA, 120 bp, Artificial Sequence
  ENSG00000177992_30 (sequence is synthesized)
cctgcccaagccagggaaataggagacaaacaagaaaggaaatacaaccagcttcagctggagaagggacagacaccaccagaaagccacttccagagaaagatcagtcaccatccacag

SEQ ID NO: 621684 - DNA, 120 bp, Artificial Sequence
  ENSG00000177992_31 (sequence is synthesized)
ggtctacaccccaggaaaggaggcacacggtgggaagatgtcctgcagaaaggcaagcctggggcagatgctttccagagctgggggtctggcccaccaaggcagtttatggactgcatg

SEQ ID NO: 621685 - DNA, 120 bp, Artificial Sequence
  ENSG00000177992_32 (sequence is synthesized)
gctgacaaagcctggaccatcagcagagttgtgggacaaatcctggtggacaaactggggcttcagtggggacgaggtccctcagaggtcaatcgccacaaaggtgacttccgcgcccag

SEQ ID NO: 621686 - DNA, 120 bp, Artificial Sequence
  ENSG00000177992_33 (sequence is synthesized)
gagaatgtgccttcctgctgccacaggggtcactgccaccaagaacgtagcagagagatgagagctctggcctgcagccctaaagccacccccaagggccaccactgtcctgtcaaaaac

SEQ ID NO: 621687 - DNA, 120 bp, Artificial Sequence
  ENSG00000177992_34 (sequence is synthesized)
aggggcatcagagacagagacagcagttgggccccacctcccagggagcctgtgtccccagctggtccccaccaccacaggccaagaatggcaagcacctcgggcggcccccatccacag

SEQ ID NO: 621688 - DNA, 120 bp, Artificial Sequence
  ENSG00000177992_35 (sequence is synthesized)
ctgcaggaactgatgtctgcacagaggtgtcttgcctcctgaactagaccagtcttcttgcatgtctcctgggggagacagggggttctactcaaataaaactgatgcctacacaataaa

SEQ ID NO: 621689 - DNA, 120 bp, Artificial Sequence
  ENSG00000177994_0 (sequence is synthesized)
acagtcgccgcgctttgcgcacccttttcctggcagggctgcgtccctgttcttcccaggaggctcctcgctgcctggtgccgtagaggcccatggaggaaaaggaagataagcatcaac

SEQ ID NO: 621690 - DNA, 120 bp, Artificial Sequence
  ENSG00000177994_1 (sequence is synthesized)
agcataaaatagaggatgctgctataacatatgtaagtgaaaatgaagaaattaaacacgaagaaaaacctggaaaaagcatacatcattcaaaatcacatgttggaagaggacgtatat

SEQ ID NO: 621691 - DNA, 120 bp, Artificial Sequence
  ENSG00000177994_2 (sequence is synthesized)
attatgctaaattcattaacacaaatgcaagaacatacaatgaaccatttccctacatagatcccaaaaaagggccagaaatacagggtgactggtggtcacatggtaaagcactggaac

SEQ ID NO: 621692 - DNA, 120 bp, Artificial Sequence
  ENSG00000177994_3 (sequence is synthesized)
ctgtcttcctaccaccttacgactctaagagcacccagaggagtgacttccaaaaaccatcgtgtccactggttttgccagtcaaacacagcaagatgcaaaagccttcttgtggaatag

SEQ ID NO: 621693 - DNA, 120 bp, Artificial Sequence
  ENSG00000177994_4 (sequence is synthesized)
taccacttgcctctcctggtacatcagcagaacttcaaaacaattttatagaatacatctcttttatacatcaatatgatgccagaaaaactccgaatgagcctctccagggaaagagac

SEQ ID NO: 621694 - DNA, 120 bp, Artificial Sequence
  ENSG00000177994_5 (sequence is synthesized)
acggagcttttgtacagagagagataaaaccaggcagtaggccaacagttcctaaaggagcagaggtattactgaacactccagggtcacgttcatcagaacagtccaaaaaaacagaga

SEQ ID NO: 621695 - DNA, 120 bp, Artificial Sequence
  ENSG00000177994_6 (sequence is synthesized)
aaggaaactcagcggaaagcagaatgatctcaccaggtctctgccaacaaaattctcaggagctgttagagcctaaaactcacttatcagaaacagacgtcagacaggcagccaaggcat

SEQ ID NO: 621696 - DNA, 120 bp, Artificial Sequence
  ENSG00000177994_7 (sequence is synthesized)
gccccagcactcctgagagcagagaaaagacctcaggcgccactcaaacaactgtaggagatgctcttttcactaggcacaagcctttaaatccaccaattaaaaaatcagaataaatta

SEQ ID NO: 621697 - DNA, 120 bp, Artificial Sequence
  ENSG00000177994_8 (sequence is synthesized)
tcttggccctcacatttacttttctgttatcagtaacttcagaacatacaatttatgtaaatggaaaaagagaaaaaagacaattaaaatacaaccaaatgttattaataagagtggtct

SEQ ID NO: 621698 - DNA, 120 bp, Artificial Sequence
  ENSG00000177994_9 (sequence is synthesized)
ccaataagtggagtgagacattatttctatgtcacattctttatgaacacaactttgttttgcacaacacatgatcgtaattaacaaatataatacttttagaagagaggccctgttaga

SEQ ID NO: 621699 - DNA, 120 bp, Artificial Sequence
  ENSG00000177994_10 (sequence is synthesized)
catgagtggacagctttggaatcaaacaaactagagttggaatgttggcttcacttcattccttgagctgtgtgaccttgggtaagtaacttaacctctctagacttcagttttctcaac

SEQ ID NO: 621700 - DNA, 120 bp, Artificial Sequence
  ENSG00000177994_11 (sequence is synthesized)
tgtaaaattaggaaaatagcaacttcgtaagattattgaggatgtgattatgcacattgatcagtaagtggtcaatgtaatcatatcatcactgctactataattcaattttcaatttaa

SEQ ID NO: 621701 - DNA, 120 bp, Artificial Sequence
  ENSG00000177994_12 (sequence is synthesized)
ggataatgttctcttatatatttaatttttcctcattattctaaaacttagaactcctccatatataattaaaagtgtgaaaatctaaaaatacttctgccagtacaagatgcacagaca

SEQ ID NO: 621702 - DNA, 120 bp, Artificial Sequence
  ENSG00000177994_13 (sequence is synthesized)
catacacacttaattcaaagacatatgggtacttagaatattgaagtattttctaaattgttttctattttactcagatcatttctagcaccaactcaacctttgctttttggatgagtt

SEQ ID NO: 621703 - DNA, 120 bp, Artificial Sequence
  ENSG00000177994_14 (sequence is synthesized)
tggtaaggattaattctacttccaatttggtgtgtttggtgtgccaaaatgtatctattataagatatgttatattgcatacaagtggaagtaggtggagtattcctctgttataaagag

SEQ ID NO: 621704 - DNA, 120 bp, Artificial Sequence
  ENSG00000177994_15 (sequence is synthesized)
tatttacaaatttccattgggaaatatcagctgctcactattatctgcagtattgataagactacagctatatctttatccatttattctccattaaagaaattgtgataaactgcaaaa

SEQ ID NO: 621705 - DNA, 120 bp, Artificial Sequence
  ENSG00000177994_16 (sequence is synthesized)
ggacttttctttttccgttatccagggaaatgcgtgagttactatgacagatgccaaagacttttggctctggtagtggaaattgggaggcaatggtgaaatgaagtaagaaattccagg

SEQ ID NO: 621706 - DNA, 120 bp, Artificial Sequence
  ENSG00000177994_17 (sequence is synthesized)
acagtgcaggaagaaaaggaacagagagatcacgggcatgtttttttaggtggtttcatgccatcttattttctccttgaaatacattcacaatgaggtgactggctctgtgggaagcct

SEQ ID NO: 621707 - DNA, 120 bp, Artificial Sequence
  ENSG00000177994_18 (sequence is synthesized)
atggccatgttgtaatgacactcaatcagcccagtggagagggccacatggcaaggaactaaggcctcccaccaacagccagcaaagaactgagaccttctgcctacagtcatgagtcct

SEQ ID NO: 621708 - DNA, 120 bp, Artificial Sequence
  ENSG00000177994_19 (sequence is synthesized)
ggaagataagcatcaagacacggagcttttgtacagagagagataaaaccaggcagtaggccaacagttcctaaaggagcagagaagagaggccctgttagacatgagtggacagctttg

SEQ ID NO: 621709 - DNA, 120 bp, Artificial Sequence
  ENSG00000177994_20 (sequence is synthesized)
tgagtcatttggaggagtgctaccctagaaagccacccctatcatgttaaaccacaaatttgggacttgtttgctatagtagatagtgctaattctatgtaatatactctcgtttttact

SEQ ID NO: 621710 - DNA, 120 bp, Artificial Sequence
  ENSG00000177994_21 (sequence is synthesized)
tctcatagcatttattgttctctaccataaataattattcgcgtaaatatattttttcattttagtctattagttgctttaaaaaaaaaaaaactacattgccatggtttgactgtgtcc

SEQ ID NO: 621711 - DNA, 120 bp, Artificial Sequence
  ENSG00000178015_0 (sequence is synthesized)
aggacaatcgacaaaaacaactaagcgcaaagccgcccgaatccatctccctctctgtgcgtgtgccttttcaactaactttgggaactcgtatagacccagcgtcgctccccgcgccgc

SEQ ID NO: 621712 - DNA, 120 bp, Artificial Sequence
  ENSG00000178015_1 (sequence is synthesized)
ctcgcctccactttggtttcccgcgtcctgcccgccctcttcggtgcctcctcttcctccgggacaaggatggaggatctctttagcccctcaattctgccgccggcgcccaacatttcc

SEQ ID NO: 621713 - DNA, 120 bp, Artificial Sequence
  ENSG00000178015_2 (sequence is synthesized)
gtgcccatcttgctgggctggggtctcaacctgaccttggggcaaggagcccctgcctctgggccgcccagccgccgcgtccgcctggtgttcctgggggtcatcctggtggtggcggtg

SEQ ID NO: 621714 - DNA, 120 bp, Artificial Sequence
  ENSG00000178015_3 (sequence is synthesized)
gcaggcaacaccacagtgctgtgccgcctgtgcggcggcggcgggccctgggcgggccccaagcgtcgcaagatggacttcctgctggtgcagctggccctggcggacctgtacgcgtgc

SEQ ID NO: 621715 - DNA, 120 bp, Artificial Sequence
  ENSG00000178015_4 (sequence is synthesized)
ctgtacgcgtgcgggggcacggcgctgtcacagctggcctgggaactgctgggcgagccccgcgcggccacgggggacctggcgtgccgcttcctgcagctgctgcaggcatccgggcgg

SEQ ID NO: 621716 - DNA, 80 bp, Artificial Sequence
  ENSG00000178015_5 (sequence is synthesized)
cacctcgtggtgctcatcgccctcgagcgccggcgcgcggtgcgtcttccgcacggccggccgctgcccgcgcgtgccct

SEQ ID NO: 621717 - DNA, 80 bp, Artificial Sequence
  ENSG00000178015_6 (sequence is synthesized)
gctgcccccggccttcgtggtgcgcggggactccccctcgccgctgccgccgccgccgccgccaacgtccctgcagccag

SEQ ID NO: 621718 - DNA, 120 bp, Artificial Sequence
  ENSG00000178015_7 (sequence is synthesized)
cacgggatcttcgcgcccctgccgcgctggcacctgcaggtctacgcgttctacgaggccgtcgcgggcttcgtcgcgcctgttacggtcctgggcgtcgcttgcggccacctactctcc

SEQ ID NO: 621719 - DNA, 120 bp, Artificial Sequence
  ENSG00000178015_8 (sequence is synthesized)
gcaggcccccgcggctgcagcgccctggtcggcgagcccaggtcgagcccctgcgcccagcgcgctgccccgcgccaaggtgcagagcctgaagatgagcctgctgctggcgctgctgtt

SEQ ID NO: 621720 - DNA, 120 bp, Artificial Sequence
  ENSG00000178015_9 (sequence is synthesized)
tgttcgtgggctgcgagctgccctactttgccgcccggctggcggccgcgtggtcgtccgggcccgcgggagactgggagggagagggcctgtcggcggcgctgcgcgtggtggcgatgg

SEQ ID NO: 621721 - DNA, 120 bp, Artificial Sequence
  ENSG00000178015_10 (sequence is synthesized)
ccaacagcgctctcaatcccttcgtctacctcttcttccaggcgggcgactgccggctccggcgacagctgcggaagcggctgggctctctgtgctgcgcgccgcagggaggcgcggagg

SEQ ID NO: 621722 - DNA, 120 bp, Artificial Sequence
  ENSG00000178015_11 (sequence is synthesized)
acgaggaggggccccggggccaccaggcgctctaccgccaacgctggccccaccctcattatcaccatgctcggcgggaaccgctggacgagggcggcttgcgcccaccccctccgcgcc

SEQ ID NO: 621723 - DNA, 120 bp, Artificial Sequence
  ENSG00000178015_12 (sequence is synthesized)
ccagacccctgccttgctcctgcgaaagtgccttctaggtgcttggtggtcagagacgggtcatctgtcgctaaggcgcaacctccagggaactcgaggcctgccagggtctgtccagat

SEQ ID NO: 621724 - DNA, 120 bp, Artificial Sequence
  ENSG00000178015_13 (sequence is synthesized)
cacaaggggcaggagagtctgtgagagagtgacactgaagttgtccccttcctccactctcctattcccttctcatgtttacatttccctatgctcttccagtttctcttcttccctaca

SEQ ID NO: 621725 - DNA, 120 bp, Artificial Sequence
  ENSG00000178015_14 (sequence is synthesized)
gttcctctcatatctccccatttggagacagtgagccactggaaagttgtaaaaacaaaaacagttatttttgcagttttctttcacgcatttatagtgctctggataatgccatttatt

SEQ ID NO: 621726 - DNA, 120 bp, Artificial Sequence
  ENSG00000178015_15 (sequence is synthesized)
tttgctgattacccaactttcagtatttgctgtgttatcatctgtatttacttattttgaatcgtgcttaaatcaaatgtaccttcagcacctgcaagtttgccttttctttccaggagg

SEQ ID NO: 621727 - DNA, 120 bp, Artificial Sequence
  ENSG00000178015_16 (sequence is synthesized)
aaaatccccacgttgctctccctggggagtctgagaattataccagtgctgtcagaaatgtaatcatgctgtcatttcagagccacagagtatttataaaataaaaacctttcccacgga

SEQ ID NO: 621728 - DNA, 120 bp, Artificial Sequence
  ENSG00000178021_0 (sequence is synthesized)
gccattttgtgtgaggaacgttgacgctacctacctctggcctggcctctacccactgctgccctggccgctaccaacatgagcctcccggagagtcctcacagccccgctactctcgac

SEQ ID NO: 621729 - DNA, 120 bp, Artificial Sequence
  ENSG00000178021_1 (sequence is synthesized)
tatgctctggaagacccgcaccagggccagaggtcccgagaaaagagcaaggcgacagaggtaatggcagatatgtttgatggccgcttggagccaatcgtgttcccaccgccccggctt

SEQ ID NO: 621730 - DNA, 120 bp, Artificial Sequence
  ENSG00000178021_2 (sequence is synthesized)
ccagaggagggggtcgcgccccaggatcccgcagatggtggccatactttccacatcttggtcgatgcgggtcgcagtcatggagccatcaaagcggggcaggaagtgactccaccaccc

SEQ ID NO: 621731 - DNA, 120 bp, Artificial Sequence
  ENSG00000178021_3 (sequence is synthesized)
gcggagggcctagaagcggcctctgcctcgctgacaactgacggcagcctcaaaaatggctttccgggtgaagagacgcacggcctaggtggggagaaggctctagaaacctgtggggca

SEQ ID NO: 621732 - DNA, 120 bp, Artificial Sequence
  ENSG00000178021_4 (sequence is synthesized)
gggaggtcggagtctgaagtgattgcagaggggaaggccgaggacgtgaagcctgaggagtgtgccatgttctcagccccagtggatgagaagccaggaggcgaagaaatggacgtggcg

SEQ ID NO: 621733 - DNA, 120 bp, Artificial Sequence
  ENSG00000178021_5 (sequence is synthesized)
gaagaaaacagagcaatagatgaggtaaacagggaggcagggcctgggcccgggcccgggcccctgaacgtgggtctccacctgaaccccctggagtccatccagctggaactggactcc

SEQ ID NO: 621734 - DNA, 120 bp, Artificial Sequence
  ENSG00000178021_6 (sequence is synthesized)
gtgaatgcagaggctgacagggcgctcctgcaggtggagcgcaggtttgggcagattcatgaatactacctggagcagaggaatgacatcattcgcaatatcccgggcttctgggtcact

SEQ ID NO: 621735 - DNA, 120 bp, Artificial Sequence
  ENSG00000178021_7 (sequence is synthesized)
gctttccgccaccacccacagctgtctgccatgattagaggccaagatgccgagatgttaagctacttaaccaatttggaagtgaaggagctcagacaccctaggacaggctgcaagttt

SEQ ID NO: 621736 - DNA, 120 bp, Artificial Sequence
  ENSG00000178021_8 (sequence is synthesized)
aagttcttctttcaaagaaacccttacttcagaaacaagctgattgtaaaggtgtatgaggtcagatccttcggccaagtggtgtctttttccactctaatcatgtggcgccggggccat

SEQ ID NO: 621737 - DNA, 120 bp, Artificial Sequence
  ENSG00000178021_9 (sequence is synthesized)
ggaccccagtccttcattcataggaaccgacatgtcatctgcagcttcttcacctggttttcagaccacagccttccagagtccgacaggattgctcagattattaaagaggacctctgg

SEQ ID NO: 621738 - DNA, 120 bp, Artificial Sequence
  ENSG00000178021_10 (sequence is synthesized)
tcaaatccactgcagtactacctgttgggtgaagacgcccatagagctagacgtcgcctggtaagggagccagtggagatccccaggccctttgggttccagtgtggttaacctttgcct

SEQ ID NO: 621739 - DNA, 120 bp, Artificial Sequence
  ENSG00000178021_11 (sequence is synthesized)
ttggaattactcctgcagaaggttgcctgccaccaccagctggacctgagcttgggcaacagcattaggtatgccctttactttttttgttctgactttcctgtaccctctgtttaaact

SEQ ID NO: 621740 - DNA, 120 bp, Artificial Sequence
  ENSG00000178021_12 (sequence is synthesized)
ttcacctggtcgtcttgctattctgcattaacatcacatgctcccagccgatgggtcacatccttctaagcgaagcgaatgatgctgtaggttacactgtatttacctttgtttggactc

SEQ ID NO: 621741 - DNA, 120 bp, Artificial Sequence
  ENSG00000178021_13 (sequence is synthesized)
ggtttgttcccaggacctctggtctggctcctcctacttggatttctagctgtgtctaagaacctattcagctcaccctgctctgcatctgacagtacaggtgcatggcctgtggacaat

SEQ ID NO: 621742 - DNA, 120 bp, Artificial Sequence
  ENSG00000178021_14 (sequence is synthesized)
tgctgggcattaatgaagtcaagggagaacagcagggggcaagttggtctgtgtgaattatgggaccccattacttttcctgagactggtcacctattgctgcctgctactggctattcc

SEQ ID NO: 621743 - DNA, 120 bp, Artificial Sequence
  ENSG00000178021_15 (sequence is synthesized)
caagtactgctacttgggcagctccctgctgagtgaacatatcccagaccattgccagctccactctctggtttctaataaacagggatctccagaacactggtggtggacacagctttc

SEQ ID NO: 621744 - DNA, 120 bp, Artificial Sequence
  ENSG00000178021_16 (sequence is synthesized)
ctgtcagcacacaaaagacctgttcctcttccaaaagacctctctttaccaccaccaccctcatcactcagaaaccctactgtttgttagacaggtggttgaggggacatgtcagaccct

SEQ ID NO: 621745 - DNA, 120 bp, Artificial Sequence
  ENSG00000178021_17 (sequence is synthesized)
atcctcatggcaaggttaatatgttggtgttcttgacaagtaccaggctttctcagccacaaccagtggattcattcaaaatctaggtacctttatttgcctcccttcctgaacctaatg

SEQ ID NO: 621746 - DNA, 120 bp, Artificial Sequence
  ENSG00000178021_18 (sequence is synthesized)
aagtgccagagtgagtgtacactttcttttctctcatctctcataaatctcttctgtcttcctttaaaaaaaacaaaagtagtagttcagaaacatccgcagaagcaggctttttagttt

SEQ ID NO: 621747 - DNA, 120 bp, Artificial Sequence
  ENSG00000178021_19 (sequence is synthesized)
cttggctctctttgtcatgtccagaggcaggctgttctgtaaaatagactgccagacctcttattgcccattctcctttcttctcagcccctcacccctctttagcaattcctagagggt

SEQ ID NO: 621748 - DNA, 120 bp, Artificial Sequence
  ENSG00000178021_20 (sequence is synthesized)
ttaaaggactacagagctgtatggaatgaaaggtgatttctagttcagagtggatagaagaactaaagagattgtgatgggtgctctaggcagggaaaactgaacaaaaaggcagaaatg

SEQ ID NO: 621749 - DNA, 120 bp, Artificial Sequence
  ENSG00000178021_21 (sequence is synthesized)
attcaggggaaaatcgggcctagaatttacactgggttgactagttatgatgggaagagaagtacttttttttagtatgcacgtagaagaatagaagatggttggagtgttaaatatgtt

SEQ ID NO: 621750 - DNA, 120 bp, Artificial Sequence
  ENSG00000178021_22 (sequence is synthesized)
ccctagagaagggttctttgaagaaacactgcaattttgggtgttctctttcttgtttgcatatggccttacttatgtggaagattaatactgtgttataatattttctctttctgttta

SEQ ID NO: 621751 - DNA, 120 bp, Artificial Sequence
  ENSG00000178021_23 (sequence is synthesized)
ctgggaagattcagctgtacagattttcttttactttcaaatagaaatatttggaataatatcagtctttcttttttgtacattatgtggatatggatattcatggcagttttcagcctg

SEQ ID NO: 621752 - DNA, 120 bp, Artificial Sequence
  ENSG00000178021_24 (sequence is synthesized)
ttcttgtttctgttaaaaccgtatctttaacattttaatttgaataacttggtcttatctgatgcggaagactggaaactattgtgttcatgggtaaataaactacaaaatatttatggc

SEQ ID NO: 621753 - DNA, 80 bp, Artificial Sequence
  ENSG00000178026_0 (sequence is synthesized)
ctcctgtgggttcggcgaccatcgcgcggcggccatgggggcgcggctgggccggcgggccgggcccgaggctggctctg

SEQ ID NO: 621754 - DNA, 120 bp, Artificial Sequence
  ENSG00000178026_1 (sequence is synthesized)
gcgccgggtgcggtggctccgcgagatccagtccacgctccgcgagcggcggccggagcgcgcccggcagctgctgcgcctcctgcgccaggacctgggccttgagaggaccctccttcc

SEQ ID NO: 621755 - DNA, 120 bp, Artificial Sequence
  ENSG00000178026_2 (sequence is synthesized)
tgatatcctctacagagatgtggccttcctcaacccggtcgaccccatctcccatgacctgcttgtgaacctggcccgggacctgcagtgccccaagaaggactatgagctctggaagtc

SEQ ID NO: 621756 - DNA, 120 bp, Artificial Sequence
  ENSG00000178026_3 (sequence is synthesized)
ctcggacaagatctgccgacagctcatctaccacctcacccctcactcgaagcagcagcaagggtccagcctgcgccagaggaagacccagagctgcctcaagagcagcctccagaagac

SEQ ID NO: 621757 - DNA, 120 bp, Artificial Sequence
  ENSG00000178026_4 (sequence is synthesized)
tctgctggcaggggagactgtggacctctcaggcatcccgctgtcgacacaggacgtgcaacacatcacacgctacctgagcagccatggtgctgtgctggcggtgctggacctgagctt

SEQ ID NO: 621758 - DNA, 120 bp, Artificial Sequence
  ENSG00000178026_5 (sequence is synthesized)
gctgcccagcctgtgggcgctgccccgcctcacccagctcctgctcaacggcaaccgactgacgcgggccactgcccgcaagctcactgatgccatcaaggacaccaccaagttccctgc

SEQ ID NO: 621759 - DNA, 120 bp, Artificial Sequence
  ENSG00000178026_6 (sequence is synthesized)
tttggcttgggtggacctgggcaacaacgtggatgtggcttccctgccccagcccctgctggtcggcctgcgccggcggctgagccagcgcacctcactccccaccatctacgagggcct

SEQ ID NO: 621760 - DNA, 120 bp, Artificial Sequence
  ENSG00000178026_7 (sequence is synthesized)
ggaccttgagcctgagggcagtgcggccggggccaccacccctgcctccacctgggactccacagctgctgggctgggacccgagccccaggcctgctgtgccaggtgacccaccaccca

SEQ ID NO: 621761 - DNA, 120 bp, Artificial Sequence
  ENSG00000178026_8 (sequence is synthesized)
cctggctcattgctactgacttgtgatgctctcaagcacatgatagtgggcgatgaaggtcaaggaggactcacaggcccccagaaatccagtgtaaatgctcagcctgagattaagggg

SEQ ID NO: 621762 - DNA, 120 bp, Artificial Sequence
  ENSG00000178026_9 (sequence is synthesized)
acagaagaatggactcataggtggccaggtggccagccctggctagaggctcagccttccctcagtgggaggggccccagcacccacagtgtggaccccgcaataaagagtgacacccgc

SEQ ID NO: 621763 - DNA, 120 bp, Artificial Sequence
  ENSG00000178026_10 (sequence is synthesized)
tggcggccagggagggtctgggggtctgggggtctgggaggcgcggggctatgggttgtgggcctgtatccgccgggaggcgaggcggagctggtctctggcgcgcgcaggcgggttccg

SEQ ID NO: 621764 - DNA, 120 bp, Artificial Sequence
  ENSG00000178026_11 (sequence is synthesized)
agggcgcgacaggctgcagcacgcggggtcttgcgtgggcgagagggcgaccgcctggagtgagggctgggtgaggtcggcggaccgtgtggaggagggggctgctgagtgtgtccgggt

SEQ ID NO: 621765 - DNA, 120 bp, Artificial Sequence
  ENSG00000178026_12 (sequence is synthesized)
ctttggggtttgagaggggttgtgtgtgttgagggtggcccggtagcctggacctaagagcccaaattcaggccctggcaagatgggaggggcccgggaggagtggcaagtgaggtcaaa

SEQ ID NO: 621766 - DNA, 120 bp, Artificial Sequence
  ENSG00000178026_13 (sequence is synthesized)
tcatcttgtattgagagacaatggaagagggtaacttccccctcctccaggatccgggagacagtggaccctggagagaggacccagggctggtctagggatgcagcctcaccccaagac

SEQ ID NO: 621767 - DNA, 120 bp, Artificial Sequence
  ENSG00000178026_14 (sequence is synthesized)
accatggcagcccacagagagccatccatgcatcaccagttctccaacaggcggctcatgcccttagagtacacatccccagcatctgtgcatcacaacactcggtccggtggtggctct

SEQ ID NO: 621768 - DNA, 120 bp, Artificial Sequence
  ENSG00000178026_15 (sequence is synthesized)
gtggagtttgccacctgcagcctccaccccacagctgcccagaaccccatgctgacagcacctgcagatgtcctgccatgagcatcgacacagccccaggatgtgtggctgtgaccagcc

SEQ ID NO: 621769 - DNA, 120 bp, Artificial Sequence
  ENSG00000178026_16 (sequence is synthesized)
accggacccagactcctagtcacagtgagtccccaaccaaaaccagggtatccgctctgggccctgccagctctgaatgcccaggtctctgcacagtcggcccctaggactctgcgccta

SEQ ID NO: 621770 - DNA, 120 bp, Artificial Sequence
  ENSG00000178026_17 (sequence is synthesized)
gcccacggccatcacaggaacagccagggcttgcagctgctgtgtgtgctgcctgctcctggggctgctcacagagggactggataaaggatgcagtggagcatgctcagtgccagcttt

SEQ ID NO: 621771 - DNA, 120 bp, Artificial Sequence
  ENSG00000178026_18 (sequence is synthesized)
gagagagccaggtggtggtgctgtaaaacattacatcccccagccctgtcagcccagacccagaccccgcaggcgcagtctcgcttggagagtgagaggaagaagaacacgctgacctgg

SEQ ID NO: 621772 - DNA, 120 bp, Artificial Sequence
  ENSG00000178026_19 (sequence is synthesized)
cttgttcctactccctgggattggcgtcagtggagcacggctccctcgaggggcctggtctggcctcctccccctgtggcaagtccccgaagggtgctgagggtgggcaggcagccggct

SEQ ID NO: 621773 - DNA, 120 bp, Artificial Sequence
  ENSG00000178026_20 (sequence is synthesized)
gatagcccgagacgctggccctgggcccgaggacagggaacaagggctcattgtctgggcttcctcccgccgggcactgcgggactggaccagcctgtccagctcccagagggcagcctc

SEQ ID NO: 621774 - DNA, 120 bp, Artificial Sequence
  ENSG00000178026_21 (sequence is synthesized)
ccctggctctgtgccaggccacagccgggttggggggtaggagggggaggccctggtgggcaactcggtgatgcatggtgcatgactgtgctcacacacacacttggctgcctgggtccc

SEQ ID NO: 621775 - DNA, 120 bp, Artificial Sequence
  ENSG00000178026_22 (sequence is synthesized)
agctagagcaagtgtgagctgtgctttgcaggaccctcagagtcctgggcagacccattttctgtgtggcagcactgtgcaccaggcctgggggcccagaccaggaagactatagctggg

SEQ ID NO: 621776 - DNA, 120 bp, Artificial Sequence
  ENSG00000178026_23 (sequence is synthesized)
cagaagtcatatggggaccctgcgggtcacagactgttctgagaaatccaccaacggaaacaaactcctagcctctgaattcctgggccagaagagagccgctctcggctagagcccccg

SEQ ID NO: 621777 - DNA, 120 bp, Artificial Sequence
  ENSG00000178028_0 (sequence is synthesized)
acgggggagtggtagtgggggctgcagctgccggacccaggcactgacccttgacctccggtggctcccccatctctcaggcgcgatggctacgggcgcggatgtacgggacattctaga

SEQ ID NO: 621778 - DNA, 120 bp, Artificial Sequence
  ENSG00000178028_1 (sequence is synthesized)
actcgggggtccagaaggggatgcagcctctgggaccatcagcaagaaggacattatcaacccggacaagaaaaaatccaagaagtcctctgagacactgactttcaagaggcccgaggg

SEQ ID NO: 621779 - DNA, 120 bp, Artificial Sequence
  ENSG00000178028_2 (sequence is synthesized)
catgcaccgggaagtctatgccttgctctactctgacaagaaggatgcacccccactgctacccagtgacactggccagggataccgtacagtgaaggccaagttgggctccaagaaggt

SEQ ID NO: 621780 - DNA, 120 bp, Artificial Sequence
  ENSG00000178028_3 (sequence is synthesized)
gcggccttggaagtggatgccattcaccaacccggcccgcaaggacggagcaatgttcttccactggcgacgtgcagcggaggagggcaaggactacccctttgccaggttcaataagac

SEQ ID NO: 621781 - DNA, 120 bp, Artificial Sequence
  ENSG00000178028_4 (sequence is synthesized)
tgtgcaggtgcctgtgtactcggagcaggagtaccagctttatctccacgatgatgcttggactaaggcagaaactgaccacctctttgacctcagccgccgctttgacctgcgttttgt

SEQ ID NO: 621782 - DNA, 120 bp, Artificial Sequence
  ENSG00000178028_5 (sequence is synthesized)
tgttatccatgaccggtatgaccaccagcagttcaagaagcgttctgtggaagacctgaaggagcggtactaccacatctgtgctaagcttgccaacgtgcgggctgtgccaggcacaga

SEQ ID NO: 621783 - DNA, 120 bp, Artificial Sequence
  ENSG00000178028_6 (sequence is synthesized)
gagctgcgcaagattgaggcccggaagaaggagcgggagaaacgcagccaggacctgcagaagctgatcacagcggcagacaccactgcagagcagcggcgcacggaacgcaaggccccc

SEQ ID NO: 621784 - DNA, 120 bp, Artificial Sequence
  ENSG00000178028_7 (sequence is synthesized)
aaaaagaagctaccccagaaaaaggaggctgagaagccggctgttcctgagactgcaggcatcaagtttccagacttcaagtctgcaggtgtcacgctgcggagccaacggatgaagctg

SEQ ID NO: 621785 - DNA, 120 bp, Artificial Sequence
  ENSG00000178028_8 (sequence is synthesized)
ccaagctctgtgggacagaagaagatcaaggccctggaacagatgctgctggagcttggtgtggagctgagcccgacacctacggaggagctggtgcacatgttcaatgagctgcgaagc

SEQ ID NO: 621786 - DNA, 120 bp, Artificial Sequence
  ENSG00000178028_9 (sequence is synthesized)
gacctggtgctgctctacgagctcaagcaggcctgtgccaactgcgagtatgagctgcagatgctgcggcaccgtcatgaggcactggcccgggctggtgtgctagggggccctgccaca

SEQ ID NO: 621787 - DNA, 120 bp, Artificial Sequence
  ENSG00000178028_10 (sequence is synthesized)
ccagcatcaggcccaggcccggcctctgctgagccggcagtgactgaacccggacttggtcctgaccccaaggacaccatcattgatgtggtgggcgcacccctcacgcccaattcgaga

SEQ ID NO: 621788 - DNA, 120 bp, Artificial Sequence
  ENSG00000178028_11 (sequence is synthesized)
aagcgacgggagtcggcctccagctcatcttccgtgaagaaagccaagaagccgtgagaggccccacggggtgtgggcgacgctgttatgtaaatagagctgctgagttggaccaggctg

SEQ ID NO: 621789 - DNA, 120 bp, Artificial Sequence
  ENSG00000178028_12 (sequence is synthesized)
gccgcggctttgcggggacgggggagtggtagtgggggctgcagctgccggacccaggtgcggaagtgcgagggcccaggtggctgaaggggccgttaggaacatccaagcggtggggca

SEQ ID NO: 621790 - DNA, 120 bp, Artificial Sequence
  ENSG00000178028_13 (sequence is synthesized)
caggcagatccccgacctgacctggaccacccttctcctcttggcccgccccttcaactcgcctccgcttaggtctggattggccccgccccctgacctgagcctggtccttcttcaggc

SEQ ID NO: 621791 - DNA, 120 bp, Artificial Sequence
  ENSG00000178028_14 (sequence is synthesized)
aggagtgtgtgtcccatgactgaggctctggagctggagacagtgaagttgatcctggaataaatcagaggcaggctacagtcccaaaccctgctaggacctctagtcaagcagacaagt

SEQ ID NO: 621792 - DNA, 120 bp, Artificial Sequence
  ENSG00000178028_15 (sequence is synthesized)
tctttcctcactccatgctgcaggggcacaggcccagggtctggcaacaaacaggagcagctgtggtcactggggcctggagcctgctggacatgacatcatgcgggcatgcccctactg

SEQ ID NO: 621793 - DNA, 120 bp, Artificial Sequence
  ENSG00000178028_16 (sequence is synthesized)
ccggaagtttctgccgcggctttgcggggacgggggagtggtagtgggggctgcagctgccggacccaggtctggattggccccgccccctgacctgagcctggtccttcttcaggcact

SEQ ID NO: 621794 - DNA, 120 bp, Artificial Sequence
  ENSG00000178028_17 (sequence is synthesized)
ctgggaggcacgcctgggccctgcgagtgagcacatgcacatgggtgtaggggctcctctccctctagtgcctgcagcaggaacgatcatcacttctgtgcgagtctgagactgaggaga

SEQ ID NO: 621795 - DNA, 120 bp, Artificial Sequence
  ENSG00000178028_18 (sequence is synthesized)
atgttcttccactggcgacgtgcagcggaggagggcaaggactacccctttgccaggttcaataaggtaagctaccttcattcggacacaggccaagattgccctcccactttgagccat

SEQ ID NO: 621796 - DNA, 120 bp, Artificial Sequence
  ENSG00000178028_19 (sequence is synthesized)
ttgtgcgagctctccagtctcctagggttggttctgggggcacgcttatgcccaactgtgattacccactcaatcctcgtggcaaatgcatgcagagtaggactctgtgggtcttttctg

SEQ ID NO: 621797 - DNA, 120 bp, Artificial Sequence
  ENSG00000178028_20 (sequence is synthesized)
cccaagggatcctgttctttcccggacctgctctggtttttcatggcttttcttggtctttcaaatgttgctgttcctcagagctgtatcctaggtgctctagtcttcttgttctctact

SEQ ID NO: 621798 - DNA, 120 bp, Artificial Sequence
  ENSG00000178028_21 (sequence is synthesized)
ttcttagtatgaaccctgtggcttcagttaccctctctacaagtcaccaatccagagcagtgcttccttcgcatccagtcatttactaatatctctttctcaatgccccacaggtacctt

SEQ ID NO: 621799 - DNA, 120 bp, Artificial Sequence
  ENSG00000178028_22 (sequence is synthesized)
acatcaggtaggtaccctgaacagagctcatcatcttccctctgtcagtcccaaatctgttccccatctcagtgaatggcactatcttccacccagttgcccaaaccagaaacttggggg

SEQ ID NO: 621800 - DNA, 120 bp, Artificial Sequence
  ENSG00000178028_23 (sequence is synthesized)
atcgtccttgacttagtcttctcccttagtcctcacagtatttaaatcaacaacagaacaaagaaggtaggggaaaacaaacaacaaacatgtaaggaaataaattggagtctttcaaat

SEQ ID NO: 621801 - DNA, 120 bp, Artificial Sequence
  ENSG00000178028_24 (sequence is synthesized)
aagagccgtcagtaacacgaaaccaggatttgaatggatatgaaatgagataaagagtgaacttgtaggtgtaggggagtcctaccttaggttggtcagggagggtctgagaacgtggca

SEQ ID NO: 621802 - DNA, 120 bp, Artificial Sequence
  ENSG00000178028_25 (sequence is synthesized)
tttgagctggatgccagtgatacatctatttattgagtcctgttgattctttttccataataaatcacatctctgactatattcttcatcactatgccagccccctagtccaagctgagt

SEQ ID NO: 621803 - DNA, 120 bp, Artificial Sequence
  ENSG00000178028_26 (sequence is synthesized)
tacctgtgtagctcagcacagcacggccttcccagactcacccattcagtgagaggcagagctagattgggctaggtttcctagtccattacttaagtcattgtacagtgtggcctcaca

SEQ ID NO: 621804 - DNA, 120 bp, Artificial Sequence
  ENSG00000178028_27 (sequence is synthesized)
gctgctgcggcctggaatagcctagacttagatcctaaaagcctcatttacctcttctctaaccaatctttgtccctgggctggagtgtcacttgttataccctatgtatcaaacttccc

SEQ ID NO: 621805 - DNA, 120 bp, Artificial Sequence
  ENSG00000178028_28 (sequence is synthesized)
acacggtaccaaaattgttttttcagctgcagtatgagctttgagaggctaggatccctgcctgtcatatgcagcactgtgtctccagcataggtattgcagccccatggtaaatatttg

SEQ ID NO: 621806 - DNA, 120 bp, Artificial Sequence
  ENSG00000178028_29 (sequence is synthesized)
ttgaatgaatgaaaaaatgtcttcctcacttgactatgagctacttgagaggactggctgcacagttcctgaggattttttttttttccttctttgagacagggtctctttctgtctgcc

SEQ ID NO: 621807 - DNA, 77 bp, Artificial Sequence
  ENSG00000178028_30 (sequence is synthesized)
tccacctctaggcaccggcatgcaccaacatgcctggctaatttttgtgtttttttaagagactgggtttcaccatg

SEQ ID NO: 621808 - DNA, 84 bp, Artificial Sequence
  ENSG00000178028_31 (sequence is synthesized)
ctgagtagctgggaccaccggcatgcaccaacatgcctggctaatttttgtgtttttttaagagactttaggctcaagtgatct

SEQ ID NO: 621809 - DNA, 120 bp, Artificial Sequence
  ENSG00000178028_32 (sequence is synthesized)
agccaccgcacatggccctgagttgttggtttgtttgttttttagttaaattgaattaaaatgcataggagaaatatgtaaccaaacctgggaaaccagagagacttcccagaggagatg

SEQ ID NO: 621810 - DNA, 120 bp, Artificial Sequence
  ENSG00000178028_33 (sequence is synthesized)
atgcctgagagctcgaaaggttgagaaagttacctaggtagaaggaatgtggaagtggaaggcatttcaggcaagagcagaggtcaagggggaagtctgctatgttctagaaactgctag

SEQ ID NO: 621811 - DNA, 120 bp, Artificial Sequence
  ENSG00000178028_34 (sequence is synthesized)
tcatttggctgcagtttagggttcatgagggacagtggctgcaggaggaggccaggtcatttatttgtatgttcattaattgatttggtagacactgatacatacagtgtgctgagtcct

SEQ ID NO: 621812 - DNA, 120 bp, Artificial Sequence
  ENSG00000178028_35 (sequence is synthesized)
aaaggtgcgagatgaactggacaacccttgctcttcaggagtttgtgaattatctagaagatgctttatcttagatggagagcttctgaggagtttaataagggatagttgggggtaatg

SEQ ID NO: 621813 - DNA, 120 bp, Artificial Sequence
  ENSG00000178028_36 (sequence is synthesized)
ataaagacaaaatacaagtccatgtttcttcatattagattcaacagcatacaattgctgtaaaattgttacgtaagtttttcagtgtgtactctcagtttccattctcatcatagacca

SEQ ID NO: 621814 - DNA, 120 bp, Artificial Sequence
  ENSG00000178028_37 (sequence is synthesized)
ggggtaagtgtaaacagcactggtttgcagactatcctttaagtagcactgttcaaagagatcacgtcttagctgcagatggagaattgattggaagcggattgaatgtgggcagagatc

SEQ ID NO: 621815 - DNA, 120 bp, Artificial Sequence
  ENSG00000178028_38 (sequence is synthesized)
agtagcgaggctatttctctgatccaggcatgtgacagtgggtaggccgacggagaagtggcaatggagacagaaattttggaggtaaaagccacagatttggtgaaggggaggagtcaa

SEQ ID NO: 621816 - DNA, 120 bp, Artificial Sequence
  ENSG00000178028_39 (sequence is synthesized)
ggggaaagataggaattaagatgcctcccaggtttctggcttgagcagctgggttgggtgatggtgatattgactgaaatctggactggagaagataatgtttgagagagggccatgagt

SEQ ID NO: 621817 - DNA, 120 bp, Artificial Sequence
  ENSG00000178028_40 (sequence is synthesized)
tcagtactgagctaagtttgaggttccttggggcctccagtaggagatgtccaaaaggcgaccagttttggagctggttgtggtctttaactgagaagagagacttccctgatgtagtct

SEQ ID NO: 621818 - DNA, 120 bp, Artificial Sequence
  ENSG00000178028_41 (sequence is synthesized)
agcactgactccttccttgggtctctgacagactcagctcgtggtagtgctatttgtctctgggggaggtctgtggaagaagggaggaaggggcattggcagggctgcgtatgttggtag

SEQ ID NO: 621819 - DNA, 120 bp, Artificial Sequence
  ENSG00000178028_42 (sequence is synthesized)
taggattcaggcccagcttctgtagagatgcctgaccttggcaaactctgggggagtggcaagtcccactgtgcccactgggtggcagtagtgcttcagatgagttgtatggactagggg

SEQ ID NO: 621820 - DNA, 120 bp, Artificial Sequence
  ENSG00000178028_43 (sequence is synthesized)
tcacctgccatgcccctaactcctagttttctctaacaattttctcctccccagcaagggctcctgcttgcttagcaggatgcaggaggacctgaagtcttttgctccaggacatgactt

SEQ ID NO: 621821 - DNA, 120 bp, Artificial Sequence
  ENSG00000178028_44 (sequence is synthesized)
tcttgctatagggtagggtagatcagctccctgggacaaaaagctctttaacacaccttctgattctaacctcgcatctccctaaacctccctgccagggatgcacccccactgctaccc

SEQ ID NO: 621822 - DNA, 120 bp, Artificial Sequence
  ENSG00000178031_0 (sequence is synthesized)
agtactggatgtgacagcaggcagaggagcacttagcagcttattcagtgtccgattctgattccggcaaggatccaagcatggaatgctgccgtcgggcaactcctggcacactgctcc

SEQ ID NO: 621823 - DNA, 120 bp, Artificial Sequence
  ENSG00000178031_1 (sequence is synthesized)
tctttctggctttcctgctcctgagttccaggaccgcacgctccgaggaggaccgggacggcctatgggatgcctggggcccatggagtgaatgctcacgcacctgcgggggtggggcct

SEQ ID NO: 621824 - DNA, 120 bp, Artificial Sequence
  ENSG00000178031_2 (sequence is synthesized)
cctactctctgaggcgctgcctgagcagcaagagctgtgaaggaagaaatatccgatacagaacatgcagtaatgtggactgcccaccagaagcaggtgatttccgagctcagcaatgct

SEQ ID NO: 621825 - DNA, 120 bp, Artificial Sequence
  ENSG00000178031_3 (sequence is synthesized)
cagctcataatgatgtcaagcaccatggccagttttatgaatggcttcctgtgtctaatgaccctgacaacccatgttcactcaagtgccaagccaaaggaacaaccctggttgttgaac

SEQ ID NO: 621826 - DNA, 120 bp, Artificial Sequence
  ENSG00000178031_4 (sequence is synthesized)
tagcacctaaggtcttagatggtacgcgttgctatacagaatctttggatatgtgcatcagtggtttatgccaaattgttggctgcgatcaccagctgggaagcaccgtcaaggaagata

SEQ ID NO: 621827 - DNA, 120 bp, Artificial Sequence
  ENSG00000178031_5 (sequence is synthesized)
actgtggggtctgcaacggagatgggtccacctgccggctggtccgagggcagtataaatcccagctctccgcaaccaaatcggatgatactgtggttgcaattccctatggaagtagac

SEQ ID NO: 621828 - DNA, 120 bp, Artificial Sequence
  ENSG00000178031_6 (sequence is synthesized)
atattcgccttgtcttaaaaggtcctgatcacttatatctggaaaccaaaaccctccaggggactaaaggtgaaaacagtctcagctccacaggaactttccttgtggacaattctagtg

SEQ ID NO: 621829 - DNA, 120 bp, Artificial Sequence
  ENSG00000178031_7 (sequence is synthesized)
tggacttccagaaatttccagacaaagagatactgagaatggctggaccactcacagcagatttcattgtcaagattcgtaactcgggctccgctgacagtacagtccagttcatcttct

SEQ ID NO: 621830 - DNA, 120 bp, Artificial Sequence
  ENSG00000178031_8 (sequence is synthesized)
atcaacccatcatccaccgatggagggagacggatttctttccttgctcagcaacctgtggaggaggttatcagctgacatcggctgagtgctacgatctgaggagcaaccgtgtggttg

SEQ ID NO: 621831 - DNA, 120 bp, Artificial Sequence
  ENSG00000178031_9 (sequence is synthesized)
ctgaccaatactgtcactattacccagagaacatcaaacccaaacccaagcttcaggagtgcaacttggatccttgtccagccagtgacggatacaagcagatcatgccttatgacctct

SEQ ID NO: 621832 - DNA, 120 bp, Artificial Sequence
  ENSG00000178031_10 (sequence is synthesized)
accatccccttcctcggtgggaggccaccccatggaccgcgtgctcctcctcgtgtggggggggcatccagagccgggcagtttcctgtgtggaggaggacatccaggggcatgtcactt

SEQ ID NO: 621833 - DNA, 120 bp, Artificial Sequence
  ENSG00000178031_11 (sequence is synthesized)
cagtggaagagtggaaatgcatgtacacccctaagatgcccatcgcgcagccctgcaacatttttgactgccctaaatggctggcacaggagtggtctccgtgcacagtgacatgtggcc

SEQ ID NO: 621834 - DNA, 120 bp, Artificial Sequence
  ENSG00000178031_12 (sequence is synthesized)
agggcctcagataccgtgtggtcctctgcatcgaccatcgaggaatgcacacaggaggctgtagcccaaaaacaaagccccacataaaagaggaatgcatcgtacccactccctgctata

SEQ ID NO: 621835 - DNA, 120 bp, Artificial Sequence
  ENSG00000178031_13 (sequence is synthesized)
aacccaaagagaaacttccagtcgaggccaagttgccatggttcaaacaagctcaagagctagaagaaggagctgctgtgtcagaggagccctcgttcatcccagaggcctggtcggcct

SEQ ID NO: 621836 - DNA, 120 bp, Artificial Sequence
  ENSG00000178031_14 (sequence is synthesized)
gcacagtcacctgtggtgtggggacccaggtgcgaatagtcaggtgccaggtgctcctgtctttctctcagtccgtggctgacctgcctattgacgagtgtgaagggcccaagccagcat

SEQ ID NO: 621837 - DNA, 120 bp, Artificial Sequence
  ENSG00000178031_15 (sequence is synthesized)
cccagcgtgcctgttatgcaggcccatgcagcggggaaattcctgagttcaacccagacgagacagatgggctctttggtggcctgcaggatttcgacgagctgtatgactgggagtatg

SEQ ID NO: 621838 - DNA, 120 bp, Artificial Sequence
  ENSG00000178031_16 (sequence is synthesized)
aggggttcaccaagtgctccgagtcctgtggaggaggtgtccaggaggctgtggtgagctgcttgaacaaacagactcgggagcctgctgaggagaacctgtgcgtgaccagccgccggc

SEQ ID NO: 621839 - DNA, 120 bp, Artificial Sequence
  ENSG00000178031_17 (sequence is synthesized)
ccccacagctcctgaagtcctgcaatttggatccctgcccagcaaggtgggaaattggcaagtggagtccatgtagtctcacatgtggggtcggcctacagaccagagacgtcttctgca

SEQ ID NO: 621840 - DNA, 120 bp, Artificial Sequence
  ENSG00000178031_18 (sequence is synthesized)
gccacctgctttccagagagatgaatgaaacagtcatcctggctgatgagctgtgtcgccagcccaagcccagcacggtgcaagcttgtaaccgctttaattgccccccagcctggtacc

SEQ ID NO: 621841 - DNA, 120 bp, Artificial Sequence
  ENSG00000178031_19 (sequence is synthesized)
ctgcacagtggcagccgtgttccagaacgtgtggcgggggtgttcagaaacgtgaggttctttgcaagcagcgcatggctgatggcagcttcctggagcttcctgagaccttctgttcag

SEQ ID NO: 621842 - DNA, 120 bp, Artificial Sequence
  ENSG00000178031_20 (sequence is synthesized)
cttcaaaacctgcctgccagcaagcatgcaagaaagatgactgtcccagcgagtggcttctctcagactggacagagtgttccacaagctgcggggaaggcacccagactcgaagcgcca

SEQ ID NO: 621843 - DNA, 120 bp, Artificial Sequence
  ENSG00000178031_21 (sequence is synthesized)
tttgccgaaagatgctgaaaaccggcctctcaacggttgtcaattccaccctgtgcccgcccctgcctttctcttcctccatcaggccctgtatgctggcaacctgtgcaaggcccgggc

SEQ ID NO: 621844 - DNA, 120 bp, Artificial Sequence
  ENSG00000178031_22 (sequence is synthesized)
ggccatccacgaagcacagcccgcacatcgcggccgccaggaaggtctacatacagactcgcaggcagaggaagctgcacttcgtggtggggggcttcgcctacctgctccccaagacgg

SEQ ID NO: 621845 - DNA, 120 bp, Artificial Sequence
  ENSG00000178031_23 (sequence is synthesized)
cggtggtgctgcgctgcccggcgcgcagggtccgcaagcccctcatcacctgggagaaggacggccagcacctcatcagctcgacgcacgtcacggtggcccccttcggctatctcaaga

SEQ ID NO: 621846 - DNA, 120 bp, Artificial Sequence
  ENSG00000178031_24 (sequence is synthesized)
tccaccgcctcaagccctcggatgcaggcgtctacacctgctcagcgggcccggcccgggagcactttgtgattaagctcatcggaggcaaccgcaagctcgtggcccggcccttgagcc

SEQ ID NO: 621847 - DNA, 120 bp, Artificial Sequence
  ENSG00000178031_25 (sequence is synthesized)
cgagaagtgaggaagaggtgcttgcggggaggaagggcggcccgaaggaggccctgcagacccacaaacaccagaacgggatcttctccaacggcagcaaggcggagaagcggggcctgg

SEQ ID NO: 621848 - DNA, 120 bp, Artificial Sequence
  ENSG00000178031_26 (sequence is synthesized)
ccgccaacccggggagccgctacgacgacctcgtctcccggctgctggagcagggcggctggcccggagagctgctggcctcgtgggaggcgcaggactctgcggaaaggaacacgacct

SEQ ID NO: 621849 - DNA, 120 bp, Artificial Sequence
  ENSG00000178031_27 (sequence is synthesized)
cggaggaggacccgggtgcagagcaagtgctcctgcacctgcccttcaccatggtgaccgagcagcggcgcctggacgacatcctggggaacctctcccagcagcccgaggagctgcgcg

SEQ ID NO: 621850 - DNA, 120 bp, Artificial Sequence
  ENSG00000178031_28 (sequence is synthesized)
acctctacagcaagcacctggtggcccagctggcccaggagatcttccgcagccacctggagcaccaggacacgctcctgaagccctcggagcgcaggacttccccagtgactctctcgc

SEQ ID NO: 621851 - DNA, 120 bp, Artificial Sequence
  ENSG00000178031_29 (sequence is synthesized)
ctcataaacacgtgtctggcttcagcagctccctgcggacctcctccaccggggacgccgggggaggctctcgaaggccacaccgcaagcccaccatcctgcgcaagatctcagcggccc

SEQ ID NO: 621852 - DNA, 120 bp, Artificial Sequence
  ENSG00000178031_30 (sequence is synthesized)
agcagctctcagcctcggaggtggtcacccacctggggcagacggtggccctggccagcgggacactgagtgttcttctgcactgtgaggccatcggccacccaaggcctaccatcagct

SEQ ID NO: 621853 - DNA, 120 bp, Artificial Sequence
  ENSG00000178031_31 (sequence is synthesized)
gggccaggaatggagaagaagttcagttcagtgacaggattcttctacagccagatgattccttacagatcttggcaccagtggaagcagatgtgggtttctacacttgcaatgccacca

SEQ ID NO: 621854 - DNA, 120 bp, Artificial Sequence
  ENSG00000178031_32 (sequence is synthesized)
gaagcctgcagtcacagtcgatataggaagcaccatcaaaacagtgcagggagtgaatgtgacaatcaactgccaggttgcaggagtgcctgaagctgaagtcacttggttcaggaataa

SEQ ID NO: 621855 - DNA, 120 bp, Artificial Sequence
  ENSG00000178031_33 (sequence is synthesized)
aagcaaactgggctccccgcaccatctgcacgaaggctccttgctgctcacaaacgtgtcctcctcggatcagggcctgtactcctgcagggcggccaatcttcatggagagctgactga

SEQ ID NO: 621856 - DNA, 120 bp, Artificial Sequence
  ENSG00000178031_34 (sequence is synthesized)
gagcacccagctgctgatcctagatcccccccaagtccccacacagttggaagacatcagggccttgctcgctgccactggaccgaaccttccttcagtgctgacgtctcctctgggaac

SEQ ID NO: 621857 - DNA, 120 bp, Artificial Sequence
  ENSG00000178031_35 (sequence is synthesized)
acagctggtcctggatcctgggaattctgctctccttggctgccccatcaaaggtcaccctgtccctaatatcacctggtttcatggtggtcagccaattgtcactgccacaggactgac

SEQ ID NO: 621858 - DNA, 120 bp, Artificial Sequence
  ENSG00000178031_36 (sequence is synthesized)
gcatcacatcttggcagctggacagatccttcaagttgcaaaccttagcggtgggtctcaaggggaattcagctgccttgctcagaatgaggcaggggtgctcatgcagaaggcatcttt

SEQ ID NO: 621859 - DNA, 120 bp, Artificial Sequence
  ENSG00000178031_37 (sequence is synthesized)
agtgatccaagattactggtggtctgtggacagactggcaacctgctcagcctcctgtggtaaccggggggttcagcagccccgcttgaggtgcctgctgaacagcacggaggtcaaccc

SEQ ID NO: 621860 - DNA, 120 bp, Artificial Sequence
  ENSG00000178031_38 (sequence is synthesized)
tgcccactgcgcagggaaggttcgccctgcggtgcagcccatcgcgtgcaaccggagagactgcccttctcggtggatggtgacctcctggtctgcctgtacccggagctgtgggggagg

SEQ ID NO: 621861 - DNA, 120 bp, Artificial Sequence
  ENSG00000178031_39 (sequence is synthesized)
tgtccagacccgcagggtgacctgtcaaaagctgaaagcctctgggatctccacccctgtgtccaatgacatgtgcacccaggtcgccaagcggcctgtggacacccaggcctgtaacca

SEQ ID NO: 621862 - DNA, 120 bp, Artificial Sequence
  ENSG00000178031_40 (sequence is synthesized)
gcagctgtgtgtggagtgggccttctccagctggggccagtgcaatgggccttgcatcgggcctcacctagctgtgcaacacagacaagtcttctgccagacacgggatggcatcacctt

SEQ ID NO: 621863 - DNA, 120 bp, Artificial Sequence
  ENSG00000178031_41 (sequence is synthesized)
accatcagagcagtgcagtgctcttccgaggcctgtgagcacccagaactgctggtcagaggcctgcagtgtacactggagagtcagcctgtggaccctgtgcacagctacctgtggcaa

SEQ ID NO: 621864 - DNA, 120 bp, Artificial Sequence
  ENSG00000178031_42 (sequence is synthesized)
ctacggcttccagtcccggcgtgtggagtgtgtgcatgcccgcaccaacaaggcagtgcctgagcacctgtgctcctgggggccccggcctgccaactggcagcgctgcaacatcacccc

SEQ ID NO: 621865 - DNA, 120 bp, Artificial Sequence
  ENSG00000178031_43 (sequence is synthesized)
atgtgaaaacatggagtgcagagacaccaccaggtactgcgagaaggtgaaacagctgaaactctgccaactcagccagtttaaatctcgctgctgtggaacttgtggcaaagcgtgaag

SEQ ID NO: 621866 - DNA, 120 bp, Artificial Sequence
  ENSG00000178031_44 (sequence is synthesized)
atagggtgtggggaaaaactctaccctggccacacgaaggactcacgcaaccacctcggacagaacctaagctttcttcattttatttatttatttccccctccccactccacacacacc

SEQ ID NO: 621867 - DNA, 120 bp, Artificial Sequence
  ENSG00000178031_45 (sequence is synthesized)
cttccaacctcctccacctccaccttcaagcataaggacgtccgcgtgttttctctttcagttagctggaggacaggatgttgggaaaggaaaggacagatgtctaaaggaggttgcaga

SEQ ID NO: 621868 - DNA, 120 bp, Artificial Sequence
  ENSG00000178031_46 (sequence is synthesized)
gcaggccaggcagacagtgggggctcccttgaagagcttcctccctcccaaacctgggtctcaaagacctagaaagaggcaggcacagcccctgcggacagcagggagccagaaggtttg

SEQ ID NO: 621869 - DNA, 120 bp, Artificial Sequence
  ENSG00000178031_47 (sequence is synthesized)
tagcctattggtgcaaacattggacaaattcctgtgtctttcctagaagcgcactatcacaaacacaggagtgttttgctcctttgtctcctcttccccatctatgtccctttagtcaca

SEQ ID NO: 621870 - DNA, 120 bp, Artificial Sequence
  ENSG00000178031_48 (sequence is synthesized)
gttaggacaaatggggaggggacaccatgctgaggcagaaactagcccagaactcactcagttcttctagtgggtgagtgcagagagagaagaactcagatcaccagtagggagaggtaa

SEQ ID NO: 621871 - DNA, 120 bp, Artificial Sequence
  ENSG00000178031_49 (sequence is synthesized)
aaaagcaaacaaagcaggctctaaggcacacaacattgcagaaaatgaggaagggaggggagggaagggacagaagcaaaaaggagcctgtggtgttccccagtggggcagggtgagcag

SEQ ID NO: 621872 - DNA, 120 bp, Artificial Sequence
  ENSG00000178031_50 (sequence is synthesized)
gggcttccaggctgcatgaggctcatggaccagctctgatcccatgcatgtgcgcatgctcagagccctgctgcccacaacagagcactgcgctgcgtgggagtccccacttcccaagct

SEQ ID NO: 621873 - DNA, 120 bp, Artificial Sequence
  ENSG00000178031_51 (sequence is synthesized)
atcagagtcaacgtcctgcctgtgcagctgcagcaaagccagtgagaggtgggtctcgccatgcagtaaggccaccctggcacctctttatctaaatccgaagtcccctagccccgcact

SEQ ID NO: 621874 - DNA, 120 bp, Artificial Sequence
  ENSG00000178031_52 (sequence is synthesized)
aactaactgctgctgtgggccagggccattttgagcatgaatggcccaggttttttgccttctaggacctttgctgctccaccgaagggccagggactatggttaacttatcaacatcaa

SEQ ID NO: 621875 - DNA, 120 bp, Artificial Sequence
  ENSG00000178031_53 (sequence is synthesized)
cccattaactagtcactgtgccagagagtatctgtcaggctgtcaggttgtagcaacctcttcattccagagctggcccagggaccggggtgggacaatgggtttatgcgtgtccacagt

SEQ ID NO: 621876 - DNA, 120 bp, Artificial Sequence
  ENSG00000178031_54 (sequence is synthesized)
acaccctccctctcccagcctccaccccagggtctgcaggtcctccggcatgtagtatttatctagcaaggcggggtggtggaggcagcaccctggcaaagcagctcacacactgcagcc

SEQ ID NO: 621877 - DNA, 120 bp, Artificial Sequence
  ENSG00000178031_55 (sequence is synthesized)
acactcatcagctgtggtgaggcggctggagcaaagtcaaagtcatgcagcaaaatgaaaactctgggactcttcggcaaaatcctcattaagccgagcagctttggccaagtaattttt

SEQ ID NO: 621878 - DNA, 120 bp, Artificial Sequence
  ENSG00000178031_56 (sequence is synthesized)
gcctccttccctcgcgtggcctgagtttaggagcaagggtggccagagtcccttacccacagataagcctcccctcatgaaatgccactcaccccgggctaccattgacatcagggctgc

SEQ ID NO: 621879 - DNA, 120 bp, Artificial Sequence
  ENSG00000178031_57 (sequence is synthesized)
atttccagccagcctggaagtaaaatttgagaggaagacaatattaatctgtgtccccacctagtgagctgtggacaggtttaagttgggtctccttcttcttcaccacaaaaacaggct

SEQ ID NO: 621880 - DNA, 120 bp, Artificial Sequence
  ENSG00000178031_58 (sequence is synthesized)
ctaagaaatcatgttactaaaaaatcagtgtaaagtctgtttaaaataaaaaagaatgttttctatgtctgtatatcttttgtgaatatttattaggatttcttattaaaaaagtgcaat

SEQ ID NO: 621881 - DNA, 120 bp, Artificial Sequence
  ENSG00000178031_59 (sequence is synthesized)
attaataattgtacattgtcatccagaaacaaaactattggggggactttattaactaacttcctgcagttgtgttcctgtaaactcagtagtgattattatatttttcctatttttaat

SEQ ID NO: 621882 - DNA, 120 bp, Artificial Sequence
  ENSG00000178031_60 (sequence is synthesized)
agaacctggtgtttaactctggatccattcactgtacaggatgtgttgtaaaaactaacatgggatgctgaggcagtaagagggaattcatttgtggcataatagttatgcatggaatga

SEQ ID NO: 621883 - DNA, 120 bp, Artificial Sequence
  ENSG00000178031_61 (sequence is synthesized)
taaagacagacaaattccatactactactaatgtggttaattatttctagttcgatagtgattgaaaatcagtggtcactatttacatttcctaaagagcaagcatcctccagctccatg

SEQ ID NO: 621884 - DNA, 120 bp, Artificial Sequence
  ENSG00000178031_62 (sequence is synthesized)
ttgggttggagcagttggcagtgggtctcagtgagctggcagaacctaggtttgggtgggaagcagaatgctcgttgcatgaaatgaatgtacatttaatgtttgttctgtgaattgcaa

SEQ ID NO: 621885 - DNA, 120 bp, Artificial Sequence
  ENSG00000178031_63 (sequence is synthesized)
ctcagcagcaccacaagacaatgaaggctgctggctaatgtggaaggaggcactttctcctctaaaacacaaaactgtatttgtattttttgtacagataatacagcttatttatttaaa

SEQ ID NO: 621886 - DNA, 120 bp, Artificial Sequence
  ENSG00000178031_64 (sequence is synthesized)
atatctttcatatgattaatctgagaggagcttgacgttctcttactggttctacactaccattagccatttgctggcagaatgcccacagaccacaggaaatctaaccatcccataaag

SEQ ID NO: 621887 - DNA, 120 bp, Artificial Sequence
  ENSG00000178031_65 (sequence is synthesized)
aaaacgtatcagtgagtgtcttttagttagcccaaagaggggaaagatgaatggtctgagagcctccaacaagacctacacaaggatcgtgcatgccatgcagcccaagcacggcggcct

SEQ ID NO: 621888 - DNA, 120 bp, Artificial Sequence
  ENSG00000178031_66 (sequence is synthesized)
cagcttccccagggattgtgagctggtggtggagttgagcatttcagtggggtgcatgggtgtatgcagagaggtgtatataagcatgacagggtatgccccaagggcttccatgatctc

SEQ ID NO: 621889 - DNA, 120 bp, Artificial Sequence
  ENSG00000178031_67 (sequence is synthesized)
catcctggccctgagagagccaggtgctattggcccagtgctggaggaaatcagcctccagttcccctgcagtcagtctggctggtgcccacagggtctgactcatcaacaactctcagg

SEQ ID NO: 621890 - DNA, 120 bp, Artificial Sequence
  ENSG00000178031_68 (sequence is synthesized)
ggccaggctactaaacagaaaatgctgttaactctaaaggagcacagagtgcctcctgctcagccaaccagatctgcgcccatcacacctctgcttctcacccaacaaggaccagctgac

SEQ ID NO: 621891 - DNA, 120 bp, Artificial Sequence
  ENSG00000178031_69 (sequence is synthesized)
cccctccctcccaaccccacaggcatcccctggaactgtccaggaccccccagccttggaatttgatactcacttcactccttcctcgtcatcccaataccatcatttgtattccagttg

SEQ ID NO: 621892 - DNA, 120 bp, Artificial Sequence
  ENSG00000178031_70 (sequence is synthesized)
ggaaggagtttatttttttcttcctctgaacccaaatcagaggtacttacccatgagaaaggtggcaaagcttgaggcaaagagtaggaagtaaaaaccaaatgtagctgtgcagttttc

SEQ ID NO: 621893 - DNA, 120 bp, Artificial Sequence
  ENSG00000178031_71 (sequence is synthesized)
tccccaactgggcctcactgagcaataaattcccaacactaaggcagacgccatgtaggcaaatagcccacttctttttacacgctgggggatggatgatctttgtactcgggtagtgtt

SEQ ID NO: 621894 - DNA, 120 bp, Artificial Sequence
  ENSG00000178031_72 (sequence is synthesized)
aacccatgtttgtgtcagtggctcaccatgctcagagagcgccaatattcaacgcacatagttaaaacttaccaaaccaagtcagcacaatatttaagaccatctagtctgtgccaacac

SEQ ID NO: 621895 - DNA, 120 bp, Artificial Sequence
  ENSG00000178031_73 (sequence is synthesized)
tgaactagaacgtcctggtgctgtgtttaaggcatgatgggtagaaggaagagagactggagggcacatgaaaataaagcttaacagagaaagtaggcccaagtgcctggggatgggggc

SEQ ID NO: 621896 - DNA, 120 bp, Artificial Sequence
  ENSG00000178031_74 (sequence is synthesized)
acccgacgcaagtctcacttcacactcctgcaaagtcggggaggatgcagtgctgggaaccatcttgaggaggagagtcatttacttaaaataccaaaacccacgggaaaaggcaggttt

SEQ ID NO: 621897 - DNA, 120 bp, Artificial Sequence
  ENSG00000178031_75 (sequence is synthesized)
gcctagggggagaggtgatcacctaggagatgaggtaatcccaagaagatagagaaaacaggcaccttcaggaagtagagggagctgcagaaaacaagcagacagcccagggaggggccc

SEQ ID NO: 621898 - DNA, 120 bp, Artificial Sequence
  ENSG00000178031_76 (sequence is synthesized)
catcattcagccagacagctgcaggctggtgccacccctgctgttggcagccttggggagcaagtggctgagctctgtcaaagttaggctggagagcggtggccaaggcagaccccagga

SEQ ID NO: 621899 - DNA, 120 bp, Artificial Sequence
  ENSG00000178031_77 (sequence is synthesized)
tgtaccccagtggctgaaacccccggctgcacctcacacaggctgcgttcattagtctctgtttcacatctcttttctgtctcctctcccgaccccgtcctcctttcccagtggagtgca

SEQ ID NO: 621900 - DNA, 120 bp, Artificial Sequence
  ENSG00000178031_78 (sequence is synthesized)
ggattatgttgtcatactgtactccagtcacacatgctacccccttgcatatctgtttagcaacagtattcctgcccccatgacttcaggctgatctgggaagggacccttagcaggcgg

SEQ ID NO: 621901 - DNA, 120 bp, Artificial Sequence
  ENSG00000178031_79 (sequence is synthesized)
ctttgcggggaagatcaaagtcaacaatgaagaaggcaatttaaggagccctgggccggattaaagactgatattattaatgcctattttttgtgaataaaacatttgcttttcttctaa

SEQ ID NO: 621902 - DNA, 120 bp, Artificial Sequence
  ENSG00000178031_80 (sequence is synthesized)
cagagatgggcgacctttggacttgttgacttatcctctcctggcttaggtctggccccactaaacagccagggaacaacacctccaccaaaacgataatgaacctgaaaatgtagaagg

SEQ ID NO: 621903 - DNA, 120 bp, Artificial Sequence
  ENSG00000178031_81 (sequence is synthesized)
cttcatgctctggcatgtgaattagcttaggtgggacaagtcaggttaccagctgcagtcccaaagaggaagcctgtccttctgaggcacatcaggagtgaaccagacatggggctacaa

SEQ ID NO: 621904 - DNA, 120 bp, Artificial Sequence
  ENSG00000178031_82 (sequence is synthesized)
tgccttctttctttgttcattaggagagtaagtccactcttccctctcatcatcatggccccaccgggtaccctgagcagctccacactcttcttgaggtgtctagaagcctaccagctt

SEQ ID NO: 621905 - DNA, 120 bp, Artificial Sequence
  ENSG00000178031_83 (sequence is synthesized)
agctcctggagtaggaatgccccaaatccagcatgaccaaaagtaaatgatgtttttttaaagtgtctttcttcaagtttcttcaagaagcctctattgttccccagataatgttccctc

SEQ ID NO: 621906 - DNA, 120 bp, Artificial Sequence
  ENSG00000178031_84 (sequence is synthesized)
aaatagcacggggaagcaactgcctttcaagggtaattgaggctgaatgaatgatcccgaatctgtaaaagctgctttgatgatagagctcagtagaccagaagtttgatttcattttgt

SEQ ID NO: 621907 - DNA, 120 bp, Artificial Sequence
  ENSG00000178031_85 (sequence is synthesized)
atgtattatgctttgtatccgaaagggtctaagtggattaatattaaaactatgtatattaatcattggagaagggggaagaggaaatgaaaatagcacaaaaattaaaattggaacgaa

SEQ ID NO: 621908 - DNA, 120 bp, Artificial Sequence
  ENSG00000178031_86 (sequence is synthesized)
gtaagataattaaaacaaaaaacttatagatgttaggaaacctgctgtaattaaacataaaatgtcattcagggtttcctgactgctaatgcagaaaggaaaatcgtaaaggaaacagaa

SEQ ID NO: 621909 - DNA, 120 bp, Artificial Sequence
  ENSG00000178031_87 (sequence is synthesized)
agatgaaataagccattgtgccctccgcctcagaaatgacaaaagactcttcactgagccctgtggcttcatggcagcagatcagagctgtgacattttctacatctagacatgctacca

SEQ ID NO: 621910 - DNA, 120 bp, Artificial Sequence
  ENSG00000178031_88 (sequence is synthesized)
gacatggggaaccattagaggtgcaatctacattgggcatctggtcattcaatctgtttttttaaatgttatttttgcctttcaatgtaatcaattggattaacaatgctgcaatataat

SEQ ID NO: 621911 - DNA, 120 bp, Artificial Sequence
  ENSG00000178031_89 (sequence is synthesized)
ttagctataatcgtagtttaaattttttgatatccatgtaggggtatttcccatatttttggaagtagcggtcattagcaaagtaactaaataaaatacagtgctggtagtcaaaattaa

SEQ ID NO: 621912 - DNA, 120 bp, Artificial Sequence
  ENSG00000178031_90 (sequence is synthesized)
ctgttttgtttaaagaaagcagtgtctcactggttgtagctttcatgggttctgaactaagtgtaatcatctcaccaaagctttttggctctcaaattaaagattgattagtttcaaaaa

SEQ ID NO: 621913 - DNA, 120 bp, Artificial Sequence
  ENSG00000178031_91 (sequence is synthesized)
gccaaagcctggtagaagatgtccctgtagagcagccccagggaagggggattcaagaagctataaatgcctctgggctcacctgaatgtgtttgactgatgagtggggttttttgtttt

SEQ ID NO: 621914 - DNA, 120 bp, Artificial Sequence
  ENSG00000178031_92 (sequence is synthesized)
tggcttctcatcctgctgtcaccaactagctctgtggcctagggcgaggtgtctgccctttatgtttccacatctgcaaagtgaactggttgtacctgatgatctgagatcccatgactt

SEQ ID NO: 621915 - DNA, 120 bp, Artificial Sequence
  ENSG00000178031_93 (sequence is synthesized)
gctcacatgtcccatgattctttattttgtaggcagaagcattaaacagctactcctgctgctgtgtgctaatcattcctgtaatttctgttctgcttatttgccattatttgaaaaaca

SEQ ID NO: 621916 - DNA, 120 bp, Artificial Sequence
  ENSG00000178031_94 (sequence is synthesized)
tgcaaaagggtctttctaaccacattcctgtgttgtaacaacacccaaatgctgaggcagtgccgaggagtcagtgcctgggacttgcttaaaactgctgggactcgtggtccctaaacc

SEQ ID NO: 621917 - DNA, 120 bp, Artificial Sequence
  ENSG00000178031_95 (sequence is synthesized)
cttctttgagcaccaaaacgaataggacatgagatgttacttctcattctcaaagtactaactatgtttaagttacaaaaggttaggttatcctgtgacccttttgttgactcacagaca

SEQ ID NO: 621918 - DNA, 120 bp, Artificial Sequence
  ENSG00000178031_96 (sequence is synthesized)
agaacagttgttgagcttaatgttgtcgcatttgctccagataaactcaattctctgatttcccaccagccagctgtcaagccaacaggcaagacctctcactgggcacagccaggagtt

SEQ ID NO: 621919 - DNA, 120 bp, Artificial Sequence
  ENSG00000178031_97 (sequence is synthesized)
tcttgggtcgaccatacacatttaaacatttgtagaaggttgctaattgcaacaataaaggggaccaaagtataatggcctaatctcatccaagagtcaaaacagattttccccctaaaa

SEQ ID NO: 621920 - DNA, 120 bp, Artificial Sequence
  ENSG00000178031_98 (sequence is synthesized)
atgataattgtatagaggtgcctttcctgtggaatatctcactctgatgtcagagaaaaatctctccttcccttctcctggtgttcaatgtatacagaaaataaaatgtgtttggtagga

SEQ ID NO: 621921 - DNA, 120 bp, Artificial Sequence
  ENSG00000178031_99 (sequence is synthesized)
cgaaccatctcgagccaagacaagcagcacattcacaaataacgcccccacccccagcgcacgcgctcccattcaaagcagacccgctccgcggccgcactgaagctccaaagccgcgcc

SEQ ID NO: 621922 - DNA, 120 bp, Artificial Sequence
  ENSG00000178031_100 (sequence is synthesized)
gcctgccccagcgcagctctgtctcgtggggcgcacgcccgagcccgcctgccggccgccgccgcggagccaccgcaatcagcgcaggaggcggccacctcttcgagggaggggtctcgc

SEQ ID NO: 621923 - DNA, 120 bp, Artificial Sequence
  ENSG00000178031_101 (sequence is synthesized)
cagtgccccgggttcctggcccgcctcctcggtggcacctggtgcctgctctgtatcgccggacaggtatgcggagaccaaagccaaggggctgttttcctgcgggaatttacactgatt

SEQ ID NO: 621924 - DNA, 120 bp, Artificial Sequence
  ENSG00000178031_102 (sequence is synthesized)
gacagctctgggcactggaggcaggtgggatgcagcccctcacagcccccatggcttcctgcctggggcttctcatcctgtcctcttgtttgcttgccgactgcaggttcatcccagagg

SEQ ID NO: 621925 - DNA, 120 bp, Artificial Sequence
  ENSG00000178031_103 (sequence is synthesized)
ttcaacttgtccagagggtttcaatgtctttgtgtaaatggtttacatagtctcactctctgaatcactcatctttacactttttagagtttgtaaatggtgaaagatttgaaaattaag

SEQ ID NO: 621926 - DNA, 120 bp, Artificial Sequence
  ENSG00000178031_104 (sequence is synthesized)
gtatgatttcagtgaaaagtaccaagtgttgtattgtgcgaaggaaaagtagactagagttatttttctttccttgagtgtcacttgaatataaaagaataaaaatttttgaatagtgtt

SEQ ID NO: 621927 - DNA, 120 bp, Artificial Sequence
  ENSG00000178031_105 (sequence is synthesized)
tcgctgagtcataaggagcagctgaaaccaggagagattcgatgaaatatgaaacatgctcattaatatcagcagtttgacttgctgacgggaaggtttccacaggaatgattaatgtcc

SEQ ID NO: 621928 - DNA, 120 bp, Artificial Sequence
  ENSG00000178031_106 (sequence is synthesized)
ttttatacccttcctgaactgtaacatagcctggcccgctcctttctcaaaccccccccaccccagctcctgaaaaattgctgaaacgtatatttggaaataaaagttgatggaaatgca

SEQ ID NO: 621929 - DNA, 120 bp, Artificial Sequence
  ENSG00000178033_0 (sequence is synthesized)
gccacagctgctctgccaataacaaaggcacagcattttccctctgtgcatctccaacatggatgcttttcagggcattttaaaattcttccttaatcagaaaactgttattggctacag

SEQ ID NO: 621930 - DNA, 120 bp, Artificial Sequence
  ENSG00000178033_1 (sequence is synthesized)
cttcatggctctgctgaccgtgggaagtgagcgtctcttttctgttgtggcttttaagtgcccctgcagcactgagaatatgacctatgggctggttttcctctttgctcctgcctgggt

SEQ ID NO: 621931 - DNA, 120 bp, Artificial Sequence
  ENSG00000178033_2 (sequence is synthesized)
gttactgatcctgggattctttctgaacaataggtcgtggagactcttcacaggctgctgtgtgaatcccaggaaaatctttcccagaggccacagctgccgtttcttctacgtcctcgg

SEQ ID NO: 621932 - DNA, 120 bp, Artificial Sequence
  ENSG00000178033_3 (sequence is synthesized)
ccagatcactctgagctcattggtggctccagtgatgtggctttctgtggctctgctcaatggaactttctatgaatgtgccatgagcgggacgagaagttcaggactcctggaactgat

SEQ ID NO: 621933 - DNA, 120 bp, Artificial Sequence
  ENSG00000178033_4 (sequence is synthesized)
ttgcaagggtaagcccaaagagtgctgggaagaacttcacaaagtatcttgtggcaaaactagcatgctacctaccgtcaatgaagaactgaaactctcccttcaggcccagtctcagat

SEQ ID NO: 621934 - DNA, 120 bp, Artificial Sequence
  ENSG00000178033_5 (sequence is synthesized)
tctaggatggtgcctgatttgttcagcgtctttcttctctctgctcaccacatgttatgctcgctgccgatctaaagttagctaccttcagctgagtttttggaagacatatgcacaaaa

SEQ ID NO: 621935 - DNA, 120 bp, Artificial Sequence
  ENSG00000178033_6 (sequence is synthesized)
ggagaaggagcagttggaaaatacatttctggactatgccaacaagctgagcgagaggaacctgaaatgtttttttgaaaacaagaggccagatccttttcccatgcctacgtttgctgc

SEQ ID NO: 621936 - DNA, 120 bp, Artificial Sequence
  ENSG00000178033_7 (sequence is synthesized)
ctgggaggctgcttcagagctgcattctttccaccaaagccagcaacactatagcaccctccacagagtggtggacaatggtctgcaacttagccctgaggatgatgagacgacaatggt

SEQ ID NO: 621937 - DNA, 120 bp, Artificial Sequence
  ENSG00000178033_8 (sequence is synthesized)
ccttgtgggtactgcccacaatatgtagctcatccaccatcaatgactcatggtgttgagtggcatgctcattctgtgatcctcctaacgtatcaccagcaacctgtgtgtctctgtatt

SEQ ID NO: 621938 - DNA, 120 bp, Artificial Sequence
  ENSG00000178033_9 (sequence is synthesized)
ttcttacatttggagtatgtttacaagacaataacacaaaggaaactgctttgaagctctcaagtggaacatcaggatgtgctcaaattgatgctgaggggtgacaaaggtgctcttgca

SEQ ID NO: 621939 - DNA, 120 bp, Artificial Sequence
  ENSG00000178033_10 (sequence is synthesized)
ttggtggagaggggctcagtaggcctaaatgttgctccaagatctaagattttatcattcaacagacagactcatgtgagagggctcatcagtctctgtaaatattggttgcagaattta

SEQ ID NO: 621940 - DNA, 120 bp, Artificial Sequence
  ENSG00000178033_11 (sequence is synthesized)
ggggcagaagcaatggcttgtgagtgagcaagttactcttaacataggttgccctacacagtggctcctgcagtgtgatcagcaggagtctctgtcctacaaatctacacttttaaggat

SEQ ID NO: 621941 - DNA, 120 bp, Artificial Sequence
  ENSG00000178033_12 (sequence is synthesized)
gtatgaaattgtggaattcattccctcaggatctgaagatctcagttctcaaaaatcacaagttgcaagaatatgatacctaaaattgaaagtttttcacatgttttcactgtatactga

SEQ ID NO: 621942 - DNA, 120 bp, Artificial Sequence
  ENSG00000178033_13 (sequence is synthesized)
aaatactcccctggaagcagggctgcatcataatttttgtgggctttatgtacttttgcctttgcgaaccatttcctacattcaaaatagtagtaacaaatatatatatatatatatata

SEQ ID NO: 621943 - DNA, 120 bp, Artificial Sequence
  ENSG00000178033_14 (sequence is synthesized)
tatacacacacacagaaatatatatttataactgcattgataaaaggtgaatatattagcattttcttcaacctaaaagtttatgtattttcttctgattttaaaagaaattaaaaacat

SEQ ID NO: 621944 - DNA, 120 bp, Artificial Sequence
  ENSG00000178033_15 (sequence is synthesized)
gattttaaaagaaattaaaaacattttagtgggcccttacaagtattatggtccttaggcacagtgcttactaggccgtgggtatgtcttagtgcgtttgggctactataacaaaatatc

SEQ ID NO: 621945 - DNA, 120 bp, Artificial Sequence
  ENSG00000178033_16 (sequence is synthesized)
ctcacagttctggaggctgggaagtccgaggtcaggctgccagcatgctcaggttctggtgagagcaattttccaggttgcaaactgcttgctgacttctcagtgtccttccatggtgga

SEQ ID NO: 621946 - DNA, 120 bp, Artificial Sequence
  ENSG00000178033_17 (sequence is synthesized)
ctgcttgctgacttctcagtgtccttccatggtggaaagtgcaaataagctcccttgagcatttttataaggcactaatcccattcctggaggctccaccttcatgacccaattacttct

SEQ ID NO: 621947 - DNA, 120 bp, Artificial Sequence
  ENSG00000178033_18 (sequence is synthesized)
caaggctctgcttcttagtactatcagcttgggggttaagatttcaacatatgaaattgggggagacacaaacattcagactatagtagggtaaattgaccttggctaaaggtctgggga

SEQ ID NO: 621948 - DNA, 120 bp, Artificial Sequence
  ENSG00000178033_19 (sequence is synthesized)
cactgtccaaagcagtactggcataaaactgcattgcagtcttacatttatcagaaataatgcaaatcttgcattctacaatgtactatatccatgttagtatgtacatatatatgtgta

SEQ ID NO: 621949 - DNA, 120 bp, Artificial Sequence
  ENSG00000178033_20 (sequence is synthesized)
tgtatatatgtacataaattctccttaaatctctgagaagaattgtgctttaaaaaagaactatgttttgtgctgtggctcataccttacagtggtagtctatgtctcttagtttgagaa

SEQ ID NO: 621950 - DNA, 120 bp, Artificial Sequence
  ENSG00000178033_21 (sequence is synthesized)
agctgaatattaacttcttattaacatgaaacatgatggcaaactgaatcctacaagtataggacccagaacatatctatgttattgtcatttacaagaagaaatatgtatttggtcttt

SEQ ID NO: 621951 - DNA, 120 bp, Artificial Sequence
  ENSG00000178033_22 (sequence is synthesized)
cttcctattcctggtgcagagctcctaaaacctttgggacctcccaagtgatgtgtctggtagtacgcgaatgagatgactgatagttaggggcttctgaatggcctcagaatagggtct

SEQ ID NO: 621952 - DNA, 120 bp, Artificial Sequence
  ENSG00000178033_23 (sequence is synthesized)
ggttgccacgggaaccaaccatgtgtttagagggttggaactttcagccccactcccagaccttggggaaggaagaggggctgaaggttgagtcgatcacaaatggataatgatttaatc

SEQ ID NO: 621953 - DNA, 120 bp, Artificial Sequence
  ENSG00000178033_24 (sequence is synthesized)
aatcatgcctaagaataaagcttcccataaaaatctaaaggacaaggttcagagagcttctgcattgctcaatacatgaggagtggtgagcccaaaggggccgtggaagctccgtgcccc

SEQ ID NO: 621954 - DNA, 120 bp, Artificial Sequence
  ENSG00000178033_25 (sequence is synthesized)
ttcccccaaacctgttcctgtgcctccatctggctgtttctgagttatattattttataatagactgatgatagtaaataaagccctttcctgagttctgtgagctactctagcaaatgg

SEQ ID NO: 621955 - DNA, 120 bp, Artificial Sequence
  ENSG00000178033_26 (sequence is synthesized)
tgaaatctgagaaggaaatcatgggaacctctgctttgtagccacgtcagatagaagatgtgagtaactttggaacctactgcttgtgactggtgtctgaagttgggggagatcttatgg

SEQ ID NO: 621956 - DNA, 120 bp, Artificial Sequence
  ENSG00000178033_27 (sequence is synthesized)
gactgagctcttaacctgctggggatctgcacttaatgccgattaatgccagaattgaattgtatgatatccagttggtattggagaattggccagtgtgggagaaaacccacacagttg

SEQ ID NO: 621957 - DNA, 120 bp, Artificial Sequence
  ENSG00000178033_28 (sequence is synthesized)
gtggcaaggagtgttcagtgttgagtgtgaatgtcaataaaaaaaggtttgttttttctacgtacaatatctttgggaacttggaggtgcagggtcagacgtctgtgtgtgtatgtggca

SEQ ID NO: 621958 - DNA, 120 bp, Artificial Sequence
  ENSG00000178033_29 (sequence is synthesized)
gggacagaacagggattagggatgtgagggggtagagttttcagaataaagggagagaaaattcagcaaagagttctccttcttaatctttcttgacttaaagtttgtctgcccttaagt

SEQ ID NO: 621959 - DNA, 120 bp, Artificial Sequence
  ENSG00000178033_30 (sequence is synthesized)
gtcttctgagctggaaaaagacatataggaactggccgatgccgatgcctcttttgcagtgtgtgagaggctgaaacagaagttctacagaagtaggttagctgtaaggagctgaggatt

SEQ ID NO: 621960 - DNA, 120 bp, Artificial Sequence
  ENSG00000178033_31 (sequence is synthesized)
gaggagtcatatctgggggatattcctgccaccctcaagtccagggactttctgcactcaaaaaacttacgctcatgacaatgactgcctcattcaagaaaacccaagctgactggcaag

SEQ ID NO: 621961 - DNA, 120 bp, Artificial Sequence
  ENSG00000178033_32 (sequence is synthesized)
aagccagcagcctgggtacttgttgctgcagcttagtaagtagcagaagagctcatcctcctcctctggaagaagccacttaacaggttctcatcctgactcctaaattccttaacagtc

SEQ ID NO: 621962 - DNA, 120 bp, Artificial Sequence
  ENSG00000178033_33 (sequence is synthesized)
ctttactcaggaataaaacaagtccaagaaaacttatctgtcccacaaatagtcctggaggcagtggagtaagatagggagagcaaattggtgtctgctcttgagtatcttgagggaatg

SEQ ID NO: 621963 - DNA, 120 bp, Artificial Sequence
  ENSG00000178033_34 (sequence is synthesized)
ggtatctagaggcagcaggatgaactggctttgatagcagagactttaaaatgtgtggaccattagttgtctttggatgtgctccctagaggctgcgcctgacacagggagctgtgtata

SEQ ID NO: 621964 - DNA, 120 bp, Artificial Sequence
  ENSG00000178033_35 (sequence is synthesized)
catgatttattaaaaggaaatcctcttaggagaaacatattagcaggataaacacaagaaagaatgcagttacaagtggagtctcaatcaatcccagaggaaattctgggacttcagcct

SEQ ID NO: 621965 - DNA, 120 bp, Artificial Sequence
  ENSG00000178033_36 (sequence is synthesized)
cagcttgacctatgggggggctctggaatgtcagatttctcctgatcccaagtgtgctctggggcttccattgcagccaagagagagcattccccagaaaactccaggtgaggagtctcc

SEQ ID NO: 621966 - DNA, 120 bp, Artificial Sequence
  ENSG00000178033_37 (sequence is synthesized)
agtggcccaagggtgatcctccagaggaggttacactgccgaactgggacattggcaccctggatttgaatatctagagagggcacccaatggtcatactaatgtttgccataacagtct

SEQ ID NO: 621967 - DNA, 120 bp, Artificial Sequence
  ENSG00000178033_38 (sequence is synthesized)
cttctaggtctagacttgaagcatatggaagggtccttgggctagagccaacccaagcccaggctgactcccttttaatacttctaattttccctgaagatctggtcttctccctaccac

SEQ ID NO: 621968 - DNA, 120 bp, Artificial Sequence
  ENSG00000178033_39 (sequence is synthesized)
cactaccctattacataagagaaaaggattggagaatgctcttgaaaagaatgtgatgctttcccatacaaggaatatactcaaggaaaaatttcatggcacaaaatgctgattctgtcc

SEQ ID NO: 621969 - DNA, 120 bp, Artificial Sequence
  ENSG00000178033_40 (sequence is synthesized)
ttccttttttcaggctcaaccacttaattcagctttaggatacattcagcttattcatatcaaatataaagtgggagaaaaaaaggtatgtaacaaagattacaaaaataaggcatggca

SEQ ID NO: 621970 - DNA, 120 bp, Artificial Sequence
  ENSG00000178033_41 (sequence is synthesized)
gacaaatcactacataattctatgcattataccttaaagtaatgtattgtaaaatatatgtgtccaaagcaacttttaaaatttttgtatggttttctacttgagacctttaaagcatca

SEQ ID NO: 621971 - DNA, 120 bp, Artificial Sequence
  ENSG00000178033_42 (sequence is synthesized)
ctaaaaatgtatacatttaatgagaaaacgatgacattattgattcaaattagttgtttcaaagcctgatgatccactgatttactctaaaaactggttaaagcaatccagaagtcactg

SEQ ID NO: 621972 - DNA, 120 bp, Artificial Sequence
  ENSG00000178033_43 (sequence is synthesized)
ggtagcagaaaactgctaccgcttctcacatgatatatttcaagtacttcaactattaactatattattctatttagactttggtggttccgaattctctaaggtaattatcttaatttt

SEQ ID NO: 621973 - DNA, 120 bp, Artificial Sequence
  ENSG00000178033_44 (sequence is synthesized)
ctaatatttccctctcatttttctctcttattttaaatatcccctgttgtacaagccagaggatattaatttcctttgtgggtagtgcttggacttctctgattttagatcccaaaatca

SEQ ID NO: 621974 - DNA, 120 bp, Artificial Sequence
  ENSG00000178033_45 (sequence is synthesized)
ttaagaaaaagctaagaggttggcatgagaggttggatggaaagcatctatctgtgtttgtcagtagctctcgatgttggctgcaaattggaatcacctgggggcctttgacaatcacaa

SEQ ID NO: 621975 - DNA, 120 bp, Artificial Sequence
  ENSG00000178033_46 (sequence is synthesized)
tgtctggacccatttcctgagaacctgatgtaacttttctgggttagggcctgaacattgagatttcttttaaaagctttctaagtgattataatgtgcagtcatggtgaagaactactg

SEQ ID NO: 621976 - DNA, 120 bp, Artificial Sequence
  ENSG00000178033_47 (sequence is synthesized)
attttatatggggagtcagtgaaggtggtgaggggctgtgaggttgaaatattggaaatgttatctggatttcaaacagtagagtatgataaaaatttaaaaactggctctccaggaaaa

SEQ ID NO: 621977 - DNA, 120 bp, Artificial Sequence
  ENSG00000178033_48 (sequence is synthesized)
aagagacatcctaatatgatgtatttgccaatataccatgggttttcttgggctgggatgaactttcagaagttttacagtgagcatttttttttttatgaatttaaattggttctagct

SEQ ID NO: 621978 - DNA, 120 bp, Artificial Sequence
  ENSG00000178033_49 (sequence is synthesized)
tttttatgaatttaaattggttctagctaagcaattttggagtatctttgatgtacctgggtctctcattttaataaacataacagtggtatgttagtcagggttctccagagaaacaga

SEQ ID NO: 621979 - DNA, 120 bp, Artificial Sequence
  ENSG00000178033_50 (sequence is synthesized)
catacatatatatgtgtgtgcatgtgtgtgtgtgtatgcgtgtatatatatatatgctacatatatgaaaggggatttcttgtgggaatatatattatatataacaaaacatgacaaata

SEQ ID NO: 621980 - DNA, 120 bp, Artificial Sequence
  ENSG00000178033_51 (sequence is synthesized)
tataacaaaatatatgtgctatatatattgtgtgtgtatatatatatgaaagaggatttattgtggaaattggctcatgtgattatgaaggctgagaaggcccatgacgtgccacctgta

SEQ ID NO: 621981 - DNA, 120 bp, Artificial Sequence
  ENSG00000178033_52 (sequence is synthesized)
agctggagaatcagggaaatgtgtagggtggctcaagtcccagtctgagggcctgagaaccaggggagttgatggtacaaatcccagagccaaaggcaaaggaacctgaagtttttattt

SEQ ID NO: 621982 - DNA, 120 bp, Artificial Sequence
  ENSG00000178033_53 (sequence is synthesized)
ccaagggccaatagataaggagaatattggtgacccaactccaggagacagagaaaagattggtgacccaactcgagtggagagagagggagagagagagagacagagagcaaatttgcc

SEQ ID NO: 621983 - DNA, 120 bp, Artificial Sequence
  ENSG00000178033_54 (sequence is synthesized)
catcctctccctttttgtcctacccaggccctcaatggattgtatggtgcctgcccaggttaggtgagggcagattttccttactcagtccactgattcaaatgccaatcttttttggaa

SEQ ID NO: 621984 - DNA, 120 bp, Artificial Sequence
  ENSG00000178033_55 (sequence is synthesized)
acacccctacatacatacccagaaataatgctttaataactatctggctaccccttaatccaatcaagttgacatctaaaattaaccagcacatgtgataaattaaatatggttcaatgg

SEQ ID NO: 621985 - DNA, 120 bp, Artificial Sequence
  ENSG00000178033_56 (sequence is synthesized)
ctccttctggcagatgtagtcgtgttatcctcactttgaatctgaccttatgaaccaataaaatatggcagacatgaggtagattgttaagcagtatcacagtttatgccttggtctctt

SEQ ID NO: 621986 - DNA, 120 bp, Artificial Sequence
  ENSG00000178033_57 (sequence is synthesized)
acaatgttgcaatgctcaacagtctggtaaaagccactatgtaagaactgcaattactcagggactaccaagctctgaagaggcccaagctagccagtgggaggagagagagagagataa

SEQ ID NO: 621987 - DNA, 120 bp, Artificial Sequence
  ENSG00000178033_58 (sequence is synthesized)
aaagagagagagagagagatcccaatggctccaattgtctcagatattctagcttaggggtcaggcatgtgaatgaaggagccattttaaacattcaggccccagtgtacacgacatgga

SEQ ID NO: 621988 - DNA, 120 bp, Artificial Sequence
  ENSG00000178033_59 (sequence is synthesized)
gaagaaccaggaagtccaaccaacagtgagaataaaaggccccagatctatggccctaatcaaatcattgcagccatctccaaacatttgacccactccagtggaggctgcaggctttgt

SEQ ID NO: 621989 - DNA, 120 bp, Artificial Sequence
  ENSG00000178033_60 (sequence is synthesized)
agagaagtccttgccatgtcctatccaactccatgaccccaaaaatcatgagcttaaataaatgtttgtggctttaagccactgaattttggggcaatatgaagcgacagaacctgaaca

SEQ ID NO: 621990 - DNA, 120 bp, Artificial Sequence
  ENSG00000178033_61 (sequence is synthesized)
ctaacatgaaaatcagaatttataaaaagacaaaaattacaggcaaattgtatttatacatttatacattctccctatgcatagagagcattttcttcaatcatgttttctttttcttta

SEQ ID NO: 621991 - DNA, 120 bp, Artificial Sequence
  ENSG00000178033_62 (sequence is synthesized)
ggttccagttagcagtatagcatctacagcatgatttgatagatgctgataagtaggtctctaaaatctctccaccaaagctggagattcactttcaattatttttggttaatttttgtt

SEQ ID NO: 621992 - DNA, 120 bp, Artificial Sequence
  ENSG00000178033_63 (sequence is synthesized)
tgaaaggaatacaaacatattattgggaggagtaacacattaaactattatttgtcattaatatctacgaaaaaatagcaagtgagggtttcagactaggctggccttcagtaagctgga

SEQ ID NO: 621993 - DNA, 120 bp, Artificial Sequence
  ENSG00000178033_64 (sequence is synthesized)
aagagattgttcttctagtcgtctctcaaaatgttatcttcagactgtcaacatcagtatcacgatgaagcttgttagaaatgcagaatcagacagtatctaaaacctgttgagtcaagc

SEQ ID NO: 621994 - DNA, 120 bp, Artificial Sequence
  ENSG00000178033_65 (sequence is synthesized)
ctgcagtttaacgtgatcctagctgattccagttcaagctaaatttgataacactaaggcagtggttctcaaactttagtccatataaaaatcatctggagggcttattaaaatgtggat

SEQ ID NO: 621995 - DNA, 120 bp, Artificial Sequence
  ENSG00000178033_66 (sequence is synthesized)
tgctgaactccacccccagggtgtctgattcagtaggtctggggtgaggcaagataatctgcatttctaacaggttctcaggtgatactgatgctgctggtctagggactacatcttgaa

SEQ ID NO: 621996 - DNA, 120 bp, Artificial Sequence
  ENSG00000178033_67 (sequence is synthesized)
aataactgctctacagcacagagcaggctattctggggaaggcaggctgtaagaaactcagaatcctggcctgcactccagatctactgaatcggtcatcagcccgtccaagattttggg

SEQ ID NO: 621997 - DNA, 120 bp, Artificial Sequence
  ENSG00000178033_68 (sequence is synthesized)
gtgcctttccattcattcaaggatacctttctattcattcaaggatatattttgtcctttaggaatattttaaagtttacttcacataagttttacatgtttcttgtaaactctatttgt

SEQ ID NO: 621998 - DNA, 120 bp, Artificial Sequence
  ENSG00000178033_69 (sequence is synthesized)
aggtgttttctttgttcctgttgtaaatggtttcttttttccactatatctttctaagtgattgttgtctgagtacgtgaaaagctattgtcttatgcttattaattttatctctctact

SEQ ID NO: 621999 - DNA, 120 bp, Artificial Sequence
  ENSG00000178033_70 (sequence is synthesized)
aattcttttattgtttgtagggcttttcagaatttgaaagtaaacattttgcaacctttgatgacaaaatggatctagacaataaataatgaattctaaactattaggtgaaagcagaat

SEQ ID NO: 622000 - DNA, 120 bp, Artificial Sequence
  ENSG00000178033_71 (sequence is synthesized)
ggggtcagacctatgcaatttgaagccactcatctatattagcatcactaaaaatcaaagcagatgctacgtgccttatgatgcaaggcaagaataagtacatagtatcacatgtgaaat

SEQ ID NO: 622001 - DNA, 120 bp, Artificial Sequence
  ENSG00000178033_72 (sequence is synthesized)
attgtttcctaagaagctaaacctaatcaagtatttagacattactgctagtttataggaaacataagcaacaaaaaacaaggcaattagcaccacaaaaaaacaaccaggtacatctag

SEQ ID NO: 622002 - DNA, 120 bp, Artificial Sequence
  ENSG00000178033_73 (sequence is synthesized)
atctaacagaacattccattttacagatgactcagtctccccacagattaacagtattaagaaaggagaataaaggagatataagtgacttaataaccagatatgctatatagaccttat

SEQ ID NO: 622003 - DNA, 120 bp, Artificial Sequence
  ENSG00000178033_74 (sequence is synthesized)
ttgtatcctgtttccaacaaccaactgtaacaagatatctttgagatatttaggaaaatatgaatgaatattagatgatttttagagaattattaattttgctatgtgtggtaatggtgt

SEQ ID NO: 622004 - DNA, 120 bp, Artificial Sequence
  ENSG00000178033_75 (sequence is synthesized)
gccgatttatgttttttaaaaagttcttcagttagagatgtatatttaaatatttatgtgtgaactgccatgatgtctagaagtttctttaaaatactctagaaaaaagagtttagggag

SEQ ID NO: 622005 - DNA, 120 bp, Artificial Sequence
  ENSG00000178033_76 (sequence is synthesized)
aaagctgaaagatgaaataagattggcaaaatatggaaactattgaagctggatggtaggtacacggaattcattacattattctctttacatttgtatatgtttgaaaaatttcataag

SEQ ID NO: 622006 - DNA, 120 bp, Artificial Sequence
  ENSG00000178033_77 (sequence is synthesized)
gtacacaacaaaataaatgacatggtcacctcagttattttgctgaagttttgtcaatcaccccctgcttagctggagtttaccttctagtatcattctcagcaaaggctcacaggaatg

SEQ ID NO: 622007 - DNA, 120 bp, Artificial Sequence
  ENSG00000178033_78 (sequence is synthesized)
ctattctctgaattcttacatattcagcctgttggcctgttctcgaattgaaggacagcttgtctggttcatactttctctacatgagtgtattgtaagcattacttcattgtcttttgt

SEQ ID NO: 622008 - DNA, 120 bp, Artificial Sequence
  ENSG00000178033_79 (sequence is synthesized)
cattgaatattgctgaggtggccacagcctgatttctgatgccatctctatttctttctttattactaacaagatgttttatcctatattctcattggtttctttatctttcatgtccaa

SEQ ID NO: 622009 - DNA, 120 bp, Artificial Sequence
  ENSG00000178033_80 (sequence is synthesized)
aaatgttaaataggccttcaggtaggtctttttggaacgatttttcctgctacaagtttactctttcattgtggagaatcattttcttatatttcaataaaaaagttggaaaattttcaa

SEQ ID NO: 622010 - DNA, 120 bp, Artificial Sequence
  ENSG00000178035_0 (sequence is synthesized)
ctctgcggcgcggtcctcggagacacgcggcggtgtcctgtgttggccatggccgactacctgattagtgggggcacgtcctacgtgccagacgacggactcacagcacagcagctcttc

SEQ ID NO: 622011 - DNA, 120 bp, Artificial Sequence
  ENSG00000178035_1 (sequence is synthesized)
aactgcggagacggcctcacctacaatgactttctcattctccctgggtacatcgacttcactgcagaccaggtggacctgacttctgctctgaccaagaaaatcactcttaagacccca

SEQ ID NO: 622012 - DNA, 120 bp, Artificial Sequence
  ENSG00000178035_2 (sequence is synthesized)
ctggtttcctctcccatggacacagtcacagaggctgggatggccatagcaatggcgcttacaggcggtattggcttcatccaccacaactgtacacctgaattccaggccaatgaagtt

SEQ ID NO: 622013 - DNA, 120 bp, Artificial Sequence
  ENSG00000178035_3 (sequence is synthesized)
cggaaagtgaagaaatatgaacagggattcatcacagaccctgtggtcctcagccccaaggatcgcgtgcgggatgtttttgaggccaaggcccggcatggtttctgcggtatcccaatc

SEQ ID NO: 622014 - DNA, 120 bp, Artificial Sequence
  ENSG00000178035_4 (sequence is synthesized)
acagacacaggccggatggggagccgcttggtgggcatcatctcctccagggacattgattttctcaaagaggaggaacatgactgtttcttggaagagataatgacaaagagggaagac

SEQ ID NO: 622015 - DNA, 120 bp, Artificial Sequence
  ENSG00000178035_5 (sequence is synthesized)
ttggtggtagcccctgcaggcatcacactgaaggaggcaaatgaaattctgcagcgcagcaagaagggaaagttgcccattgtaaatgaagatgatgagcttgtggccatcattgcccgg

SEQ ID NO: 622016 - DNA, 120 bp, Artificial Sequence
  ENSG00000178035_6 (sequence is synthesized)
atgacaagtataggctggacttgctcgcccaggctggtgtggatgtagtggttttggactcttcccagggaaattccatcttccagatcaatatgatcaagtacatcaaagacaaatacc

SEQ ID NO: 622017 - DNA, 120 bp, Artificial Sequence
  ENSG00000178035_7 (sequence is synthesized)
ctaatctccaagtcattggaggcaatgtggtcactgctgcccaggccaagaacctcattgatgcaggtgtggatgccctgcgggtgggcatgggaagtggctccatctgcattacgcagg

SEQ ID NO: 622018 - DNA, 120 bp, Artificial Sequence
  ENSG00000178035_8 (sequence is synthesized)
aagtgctggcctgtgggcggccccaagcaacagcagtgtacaaggtgtcagagtatgcacggcgctttggtgttccggtcattgctgatggaggaatccaaaatgtgggtcatattgcga

SEQ ID NO: 622019 - DNA, 120 bp, Artificial Sequence
  ENSG00000178035_9 (sequence is synthesized)
aagccttggcccttggggcctccacagtcatgatgggctctctcctggctgccaccactgaggcccctggtgaatacttcttttccgatgggatccggctaaagaaatatcgcggtatgg

SEQ ID NO: 622020 - DNA, 120 bp, Artificial Sequence
  ENSG00000178035_10 (sequence is synthesized)
gttctctcgatgccatggacaagcacctcagcagccagaacagatatttcagtgaagctgacaaaatcaaagtggcccagggagtgtctggtgctgtgcaggacaaagggtcaatccaca

SEQ ID NO: 622021 - DNA, 120 bp, Artificial Sequence
  ENSG00000178035_11 (sequence is synthesized)
aatttgtcccttacctgattgctggcatccaacactcatgccaggacattggtgccaagagcttgacccaagtccgagccatgatgtactctggggagcttaagtttgagaagagaacgt

SEQ ID NO: 622022 - DNA, 120 bp, Artificial Sequence
  ENSG00000178035_12 (sequence is synthesized)
cctcagcccaggtggaaggtggcgtccatagcctccattcgtatgagaagcggcttttctgaaaagggatccagcacacctcctcggtttttttttcaataaaagtttagaaagaaaaaa

SEQ ID NO: 622023 - DNA, 120 bp, Artificial Sequence
  ENSG00000178035_13 (sequence is synthesized)
ggtgccaagagcttgacccaagtccggtgagcttggggagctgggacatgggtagaggggctggtccagggccagctacccacatttgacctctgcccttcttcagagccatgatgtact

SEQ ID NO: 622024 - DNA, 120 bp, Artificial Sequence
  ENSG00000178035_14 (sequence is synthesized)
tctcctgccctcacctcacaggtggtccttctgcctgcaggtatgagaagcggcttttctgaaaagggatccagcacacctcctcggtttttttttcaataaaagtttagaaagaaaaaa

SEQ ID NO: 622025 - DNA, 120 bp, Artificial Sequence
  ENSG00000178035_15 (sequence is synthesized)
attagcaagcgctcctgggaattgcactgaggtggggtggggtgggagtaggggtttattctaatttagtattctttcttcccaccatggggttcagttactgagaagaccctgagattc

SEQ ID NO: 622026 - DNA, 120 bp, Artificial Sequence
  ENSG00000178035_16 (sequence is synthesized)
tgtttcttaaagcagcagcaatagaccaggtgtacagtgcctccagcctacccatgtctctaagatgtgttggtgtgatttggtcttgtggcactgccaaagggatcgataagcagagac

SEQ ID NO: 622027 - DNA, 120 bp, Artificial Sequence
  ENSG00000178035_17 (sequence is synthesized)
agccatcccagacacgtctgttcctcagccaagctgcagtcctgatgcagatgtagccaaaagctcctgggtcctaaatatggccacagggtccactgcccgtccccattaaccctatcc

SEQ ID NO: 622028 - DNA, 120 bp, Artificial Sequence
  ENSG00000178035_18 (sequence is synthesized)
attctgcagcgcagcaagaagggtaagtcctagagctgggaaagggcctggaactaatgcctagggtcctgattcatgtcctgccctgaccacaggaaagttgcccattgtaaatgaaga

SEQ ID NO: 622029 - DNA, 120 bp, Artificial Sequence
  ENSG00000178035_19 (sequence is synthesized)
ggtgctactatcacctggtctctgggctaactcaccagattgggcttgggggtggattttataggatcatgttgcttgttagcatgcaggtcatacaaaagtgcctttttgtgggggact

SEQ ID NO: 622030 - DNA, 120 bp, Artificial Sequence
  ENSG00000178038_0 (sequence is synthesized)
acaggcagtcccggcgcggggcaaccacagcgctcaggaggccctgagtccggcacctggccatgtgcaaccctgaggaggcagctctgctgcggctggaggaggtcttctcagccaccc

SEQ ID NO: 622031 - DNA, 120 bp, Artificial Sequence
  ENSG00000178038_1 (sequence is synthesized)
tcgcccatgtcaacagccttgtcctccagcccctgctcccagccgccccagatccctcggatccctggggcagagagtgcctgcggctcttgcaacagctgcacaagagctcccagcaac

SEQ ID NO: 622032 - DNA, 120 bp, Artificial Sequence
  ENSG00000178038_2 (sequence is synthesized)
tctgggaggtgacggaggaaagcctgcactcactgcaggagaggctgcgttacccggactccaccggtctggagtccctgctgctgctgcgaggtgctgaccgtgtactgcaggcccaca

SEQ ID NO: 622033 - DNA, 120 bp, Artificial Sequence
  ENSG00000178038_3 (sequence is synthesized)
tagagtacattgagtcctacacaagctgcatggtggtgcaggccttccagaaggcagcaaagaggagaagcgagtactggcggggccagcggaaggcgctgcggcagctgctttcaggtg

SEQ ID NO: 622034 - DNA, 120 bp, Artificial Sequence
  ENSG00000178038_4 (sequence is synthesized)
tgagctcagagggctcggtgggcgcatcgctgggccaggccctccaccagccactcgcccatcacgtgcaacagtacgtgctcctcctgctgagcctcggggacaccattggggagcatc

SEQ ID NO: 622035 - DNA, 120 bp, Artificial Sequence
  ENSG00000178038_5 (sequence is synthesized)
acccaacccgggagctggtggtgaacgcagtcaccctctttgggaacctgcagtccttcatgaagcaggagttggaccaggctgtggccacacaggctctctggcacaccctgagaggcc

SEQ ID NO: 622036 - DNA, 120 bp, Artificial Sequence
  ENSG00000178038_6 (sequence is synthesized)
ggctgagggatgtgctctgcacccctgctcacagactccttcaggacagccaggacgtacccgtgacggtcgcaccgttgcgggctgagcgtgtgctgctctttgatgatgccctcgtcc

SEQ ID NO: 622037 - DNA, 120 bp, Artificial Sequence
  ENSG00000178038_7 (sequence is synthesized)
tgctgcagggccacaatgtccacacctttgatctgaagctggtgtgggtggatcctgggcaggacgggtgcacgtttcacctcctcacgcccgaagaagagttctccttttgtgccaagg

SEQ ID NO: 622038 - DNA, 120 bp, Artificial Sequence
  ENSG00000178038_8 (sequence is synthesized)
actcccagggccaggcagtctggcagtggaaggtgacctgggctgttcaccaggccctgcatgggaagaaggacttccccgtgctgggggctggcctggagccctcccagcctcccgact

SEQ ID NO: 622039 - DNA, 120 bp, Artificial Sequence
  ENSG00000178038_9 (sequence is synthesized)
gccgctgcgcagaatataccttccaggcagagggccggctctgccaggccacctacgagggcgagtggtgcaggggccggccccacggcaagggaaccctgaaatggccggatgggcgga

SEQ ID NO: 622040 - DNA, 120 bp, Artificial Sequence
  ENSG00000178038_10 (sequence is synthesized)
atcacgtggggaatttctgccagggcctggagcatggcttcggcatccgcctgctgccccaggcctctgaggacaagttcgactgttacaagtgtcactggcgagaaggcagcatgtgtg

SEQ ID NO: 622041 - DNA, 120 bp, Artificial Sequence
  ENSG00000178038_11 (sequence is synthesized)
gctacggcatctgtgagtacagcaccgacgaggtgtacaagggctacttccaggagggcctgcggcacggatttggggtccttgagagtggtccgcaggccccccagcccttcaggtaca

SEQ ID NO: 622042 - DNA, 120 bp, Artificial Sequence
  ENSG00000178038_12 (sequence is synthesized)
cgggccactgggagaggggccagaggagcggctatggcattgaggaggatggtgacagaggtgagcgctacattggcatgtggcaggctggtcagcgccacggcccaggggtcatggtca

SEQ ID NO: 622043 - DNA, 120 bp, Artificial Sequence
  ENSG00000178038_13 (sequence is synthesized)
cccaggcaggtgtctgctaccagggcaccttccaggcggacaagacggtgggcccgggcatcctcctctctgaagacgactccctgtatgagggcaccttcaccagggacctgaccctca

SEQ ID NO: 622044 - DNA, 120 bp, Artificial Sequence
  ENSG00000178038_14 (sequence is synthesized)
tggggaagggcaaggtcaccttccccaatggcttcaccctggagggctcgttcggcagtggggcagggagaggactgcacacacagggtgtgctggacacggctgccctcccaccagacc

SEQ ID NO: 622045 - DNA, 120 bp, Artificial Sequence
  ENSG00000178038_15 (sequence is synthesized)
cgagcagtacctgcaagaggcagctgggcgtgggtgccttccccgtggaaagccgctggcagggagtctacagccccttccgggactttgtgtgtgctggctgccccagggacctgcagg

SEQ ID NO: 622046 - DNA, 120 bp, Artificial Sequence
  ENSG00000178038_16 (sequence is synthesized)
aggccctgctgggcttcgacgtgcagagctccagggagctgcgtaggtctcaggattacctgtcctgcgagaggacccaccctgaggacagtgtgggcagtatggaagacatcctggagg

SEQ ID NO: 622047 - DNA, 120 bp, Artificial Sequence
  ENSG00000178038_17 (sequence is synthesized)
agctgctgcagcaccgggagcccaaggccctgcagctgtacctcaggaaggctctgagcaactcactgcaccccctgggaaagctgctccggacactgatgctgaccttccaggctacct

SEQ ID NO: 622048 - DNA, 120 bp, Artificial Sequence
  ENSG00000178038_18 (sequence is synthesized)
acgcaggtgtcggggccaacaagcacctgcaggagctggcccaggaggaggtgaagcagcatgcccaggaactctgggctgcctacaggggtctgctgcgagttgccttagagcgcaagg

SEQ ID NO: 622049 - DNA, 120 bp, Artificial Sequence
  ENSG00000178038_19 (sequence is synthesized)
gccaggccctggaggaggatgaagacacagagacaagggacctccaggtgcatggattggtgctgcccctcatgctgcccagcttctactcagagctcttcacgctctacctgctgcttc

SEQ ID NO: 622050 - DNA, 120 bp, Artificial Sequence
  ENSG00000178038_20 (sequence is synthesized)
ctcacgctgacgagcaatcagaggtactccctggtcagggacaagtgtttcctgtcagccaccgagtgcctgcagaagatcatgaccacggtggacccacgggagaagctggaggtgctg

SEQ ID NO: 622051 - DNA, 120 bp, Artificial Sequence
  ENSG00000178038_21 (sequence is synthesized)
gagaggacatacggggaaattgagggcacggtgtcgagggtattgggccgggagtacaagctgcccatggacgacctgctgccacttctcatctacgtggtgtcgcgcgcccgaattcag

SEQ ID NO: 622052 - DNA, 120 bp, Artificial Sequence
  ENSG00000178038_22 (sequence is synthesized)
cacctgggagccgagatccacctgatccgtgacatgatggaccccaaccacacaggaggcctgtatgacttcctgctcacagccctggagtcctgttacgagcacatccagaaagaagac

SEQ ID NO: 622053 - DNA, 120 bp, Artificial Sequence
  ENSG00000178038_23 (sequence is synthesized)
atgaggctgcaccgcttacctggccactggcactccagggagctctggtagcctggcctttcctggacagactgaagagctgagcagggcactgccagcctgtccctcattacccaaggc

SEQ ID NO: 622054 - DNA, 120 bp, Artificial Sequence
  ENSG00000178038_24 (sequence is synthesized)
aaggggcaggacaggccctcagaagcagctcttggaggagatgagcattttgttttgcacaggaagatgctgctgctgccctgactgggatgagggtgaggggtgacgggtgtggccctg

SEQ ID NO: 622055 - DNA, 120 bp, Artificial Sequence
  ENSG00000178038_25 (sequence is synthesized)
gatgtggtggttttcccttggccactagcccatcttcaatgaccccttaatctgcagcagctcacaggctgggggtgaggagtccctggcttctcttagcctgagcctttctcccaagtt

SEQ ID NO: 622056 - DNA, 120 bp, Artificial Sequence
  ENSG00000178038_26 (sequence is synthesized)
ccagagcctctccgggcctcagtgctgccatctgtacaatggtggagtgagtacgctgtaaaggaccttccattcattttgctgaattccagagtccttttggaaaactgactttagtct

SEQ ID NO: 622057 - DNA, 120 bp, Artificial Sequence
  ENSG00000178038_27 (sequence is synthesized)
gctgggctgtattgacctctggcaggctcgaagcctcactgggtatgcagtcaacaggatgggcctggagatccgtgaactgcaggccacgtacccatgacgtaaacggcggcactggag

SEQ ID NO: 622058 - DNA, 120 bp, Artificial Sequence
  ENSG00000178038_28 (sequence is synthesized)
caagctggggcggggggtgggtaaaccctcactgccagcaggccccaagtggcttgtaaatcattctcctgtgatgtctgtgggcctgcgtggggacaacaggggcacatgacatctgcc

SEQ ID NO: 622059 - DNA, 120 bp, Artificial Sequence
  ENSG00000178038_29 (sequence is synthesized)
tgggccctgaccaataaaccctcagacccaggacccaggaccctgctgtagttggggagcaggagtacctttgggaggggaggactttatttaaacagtggttctagtgtgggaccaaga

SEQ ID NO: 622060 - DNA, 120 bp, Artificial Sequence
  ENSG00000178038_30 (sequence is synthesized)
gaggcaggagctgggtcttggggcagctttattcctgttgggcctcagtttctcttccccacacagtttatcttccgtcacattgtgccgggtgacgtgcacggtctccctctgccctag

SEQ ID NO: 622061 - DNA, 120 bp, Artificial Sequence
  ENSG00000178038_31 (sequence is synthesized)
ccggagatgcatgatgacaggcagtgtgatgtgttctgaaagtgtccagggcaaagcgtagggagagggtggatttgtgcagggtgcagctctggagaagaagctggatcactcttggtc

SEQ ID NO: 622062 - DNA, 120 bp, Artificial Sequence
  ENSG00000178038_32 (sequence is synthesized)
ccattccctaggccctgagcaagtcaggctcctggctctgggtgtggctcccccaaacgaagtactgacttcagcctgtgaggggagggttgagggaggctctggaaagcccagccacac

SEQ ID NO: 622063 - DNA, 120 bp, Artificial Sequence
  ENSG00000178038_33 (sequence is synthesized)
ctgagtccctggcagtagccttggggcagagggcacccgcagagtcccagagatgatgtgggcagtgggcagagagagccttggcgcctctgtttgccaccacttccccaggaaggaggg

SEQ ID NO: 622064 - DNA, 120 bp, Artificial Sequence
  ENSG00000178038_34 (sequence is synthesized)
acagcatttctctggctggttccactaaatgtgccagcccaaatgcagggcatgggctctggttctgccaggagcctgtgacacccccaggaagggggtggaactgaggaagagcgagga

SEQ ID NO: 622065 - DNA, 120 bp, Artificial Sequence
  ENSG00000178038_35 (sequence is synthesized)
tatgcaggcactcatgcttaccgggactggggcagctcactaggattctatcctttccaatcggcatcagccagctcttgtcccctgataagtgaggacagcctgaccctggcctcaaat

SEQ ID NO: 622066 - DNA, 120 bp, Artificial Sequence
  ENSG00000178038_36 (sequence is synthesized)
gcagccatccctgagttcatgcgatgctgacgggaccccagcacacttccctgcctcctttgagatctgcgagcccttgctgcagttcagattcaacaaggccctctgcccaccctctca

SEQ ID NO: 622067 - DNA, 120 bp, Artificial Sequence
  ENSG00000178038_37 (sequence is synthesized)
ctaggcctcacccaacaccagtggaactggagcctctggctgggcacagtggctcactttgggaggctgaggcaggaaggctgctggaaactgagagttcaagaccagcctgggcaacat

SEQ ID NO: 622068 - DNA, 69 bp, Artificial Sequence
  ENSG00000178038_38 (sequence is synthesized)
gctgggtgtgcctgagcctggagggtcgaggttgcagtgagcggagatcgcacctctgcactcaatcct

SEQ ID NO: 622069 - DNA, 120 bp, Artificial Sequence
  ENSG00000178038_39 (sequence is synthesized)
gggaagatccctgagcctggagggtcgaggttgcagtgagcggagatcgcacctctgcactcaatcctgggtgacaaaatgaaaccctgcctcaaaaataaaaataaaaataaaaataaa

SEQ ID NO: 622070 - DNA, 120 bp, Artificial Sequence
  ENSG00000178038_40 (sequence is synthesized)
acagcgctcaggtaagggcgcgacgaagggcgcgcgtctgcggacgggtgtctgcgctccacgcttagctcgtccaggtgggggctcccgcctcctcggctgctgcggtccccgcccagc

SEQ ID NO: 622071 - DNA, 120 bp, Artificial Sequence
  ENSG00000178038_41 (sequence is synthesized)
cggctatggcattgaggaggatggtgacaggtgagcgccctgcagccaccactcccaggacggaggggtggaccgggccctcacagaccagattgttgcaggacacaggctcctgtttgt

SEQ ID NO: 622072 - DNA, 120 bp, Artificial Sequence
  ENSG00000178038_42 (sequence is synthesized)
cccccactgtgtctctcttaagcccctcacttcccctccagtccctcggttgctgcggaggctcaggctgagcgaatcttggtcacgctgactgcagggtcgcccccgcccctcacccct

SEQ ID NO: 622073 - DNA, 120 bp, Artificial Sequence
  ENSG00000178038_43 (sequence is synthesized)
cctcatggtgttggagaggcatttctgaccccctgctctgtcacgtctaaaaactgcagcccttgctggctctctgggctgtgtgataaagccctggatccttggcctggcaatcacagc

SEQ ID NO: 622074 - DNA, 120 bp, Artificial Sequence
  ENSG00000178038_44 (sequence is synthesized)
ctcgcctgcttctctgacctcaccccagctgcgtctcctgggcacccctccagcctttctggaccactgaagtccccacgtatccatcacatgctcctacctccatggctttgcacacac

SEQ ID NO: 622075 - DNA, 120 bp, Artificial Sequence
  ENSG00000178038_45 (sequence is synthesized)
tcctattccccctgtccttcctgccacctccacggagaagcctcccagatgcccttcccaggctgcctccctccctcctccattctctattcctcttgggggtcctgacctctctggcac

SEQ ID NO: 622076 - DNA, 120 bp, Artificial Sequence
  ENSG00000178038_46 (sequence is synthesized)
tgtgtctgttgagtggattcaggtgatgtcactgccccttatctgcactccctgccgccccgtgccagcagagtgcccaggaggtacatgggaatgagtctgatccaactctggccacat

SEQ ID NO: 622077 - DNA, 120 bp, Artificial Sequence
  ENSG00000178038_47 (sequence is synthesized)
tcctctccttccagaggtgagcgctacattggcatgtggcaggctggtcagcgccacggcccaggggtcatggtcacccaggcaggtgtctgctaccagggcaccttccaggcggacaag

SEQ ID NO: 622078 - DNA, 120 bp, Artificial Sequence
  ENSG00000178038_48 (sequence is synthesized)
acggtggtgagtggagtgtatcctgggctatccctctctttgcaccccactcccgctgggggcactgaggctgagctgaggcctttcagggagggatgggaaagggggctgtgttcctgg

SEQ ID NO: 622079 - DNA, 120 bp, Artificial Sequence
  ENSG00000178038_49 (sequence is synthesized)
gtgctggagggagccagaacctgggcaggaagccagctctaccacccacctcccctggccctggccaatccctgctctgcctgaccttggtttccccatcagcaactcaggttaagaata

SEQ ID NO: 622080 - DNA, 120 bp, Artificial Sequence
  ENSG00000178038_50 (sequence is synthesized)
cttaccatagactcaatgaactaacaagaatggagcacttgctcatgatgatgcattagctgacattcacagagtcctaacttgacacctggctctgggctaagctcccaccctgatctt

SEQ ID NO: 622081 - DNA, 120 bp, Artificial Sequence
  ENSG00000178038_51 (sequence is synthesized)
gtgggatcttcccaagagccctgcaggttgatgtcattattatccctagtgtgtccctagtgaatgacaaatgagaggttcagagggatcagaggacctgctccatgtcaccttcactga

SEQ ID NO: 622082 - DNA, 120 bp, Artificial Sequence
  ENSG00000178038_52 (sequence is synthesized)
gtggcagagctgacactcacaccctggtctgctgagcctggccgccgagcctgggactcccatgtttgcctcacccatacccttccaggtgcctggggaatgtggggctctggcctgatg

SEQ ID NO: 622083 - DNA, 120 bp, Artificial Sequence
  ENSG00000178038_53 (sequence is synthesized)
gctgttcctgttattatggtctgttggtttgtttatgctctacttcattctcgaaaggattgaaggaggccttcaaggaaagaggaagacaaggggaagaataagtacacaaaatagatt

SEQ ID NO: 622084 - DNA, 120 bp, Artificial Sequence
  ENSG00000178038_54 (sequence is synthesized)
tggaaataagccgaacactaattgtaaccctttcggctctgagcttcccggcagcccatggggcaagggagcctggtcagctctgccgttcccagggccagtgacaagcagggaagcagg

SEQ ID NO: 622085 - DNA, 120 bp, Artificial Sequence
  ENSG00000178038_55 (sequence is synthesized)
gatgtttcagagaaagccccacatttcttgagctcccaagggcttcctgaagaagccgctggggtgaggagccagggcggagggtgtcatttggggaaatccagggatggggtcctcggg

SEQ ID NO: 622086 - DNA, 120 bp, Artificial Sequence
  ENSG00000178038_56 (sequence is synthesized)
atgtgtcagggcacatctcccttctttggccatctctctccaccctgagtttcctggcccttcctcacccaccctttctaccctccctggcttcctctccccaagggcccgggcatcctc

SEQ ID NO: 622087 - DNA, 120 bp, Artificial Sequence
  ENSG00000178038_57 (sequence is synthesized)
caggaactctgggctgcctacaggtgggctcggtggcaaacgggacagctactgccctgtgacactagtgtgccctttccaggcatcagttctgccttgcatttgggaggaatgccaagt

SEQ ID NO: 622088 - DNA, 120 bp, Artificial Sequence
  ENSG00000178038_58 (sequence is synthesized)
gtctgattcaacaatgaaccagaggcttggtcagtgtgcagctgctgagcaaaagggttagagggtggggaggtgagagcaaaggcccagctgcagccctcagctagagtccaagaccca

SEQ ID NO: 622089 - DNA, 120 bp, Artificial Sequence
  ENSG00000178038_59 (sequence is synthesized)
accaggcgctgggctgactctgaccgcaggtgcactctcaccccactgtaggctgagcttggccctggactcggaacacacctgcagtcccaggctgggctgtgaccccatgaaacactg

SEQ ID NO: 622090 - DNA, 120 bp, Artificial Sequence
  ENSG00000178038_60 (sequence is synthesized)
caaatagaagccttagatgctatagttccttctgctgctggattctcaggctaacatcctggagctccaaccttctaacttctgtggtttgagaggatgaaccctgcaggccatgtccac

SEQ ID NO: 622091 - DNA, 120 bp, Artificial Sequence
  ENSG00000178038_61 (sequence is synthesized)
agttctgagaggccacctgcttttgcctttgttgactggtggtagaactccagttctgtggcaaggggcagccacaccatttctctctcattgactcacaggggtctgctgcgagttgcc

SEQ ID NO: 622092 - DNA, 120 bp, Artificial Sequence
  ENSG00000178038_62 (sequence is synthesized)
ttagagcgcaagggccaggccctggaggaggatgaagacacagagacaaggtgactggcgcaggtctccttggggcctgccgtgtccagggaggcctcatgcgtctgctcctaggacctc

SEQ ID NO: 622093 - DNA, 120 bp, Artificial Sequence
  ENSG00000178038_63 (sequence is synthesized)
ccttggggaaagaggtgcttctggggaagtgctgggcattcactctattgaccaaacattgtgcattgatcgtttgtggattagaatgacccatgacctctgttctgtgaggaaccaggg

SEQ ID NO: 622094 - DNA, 120 bp, Artificial Sequence
  ENSG00000178038_64 (sequence is synthesized)
agggggcactgctacaatgcattgaatgcatctttgttctaaatgtatgatcccaatctcatctttcgcatgcagaaggtgagtagctccccgaggcaccctcctctccctgcacacaga

SEQ ID NO: 622095 - DNA, 120 bp, Artificial Sequence
  ENSG00000178038_65 (sequence is synthesized)
tggggaaaccgagggctggtagggatgagcctgaggttatacaggagttaggtgggcatgaaatttgtttcccccagtccctggagcaaaccttacaatttgcctttagattctagacct

SEQ ID NO: 622096 - DNA, 120 bp, Artificial Sequence
  ENSG00000178038_66 (sequence is synthesized)
gaaagtgttcctgatcagagaggccttcctgtcactgccttgcaggaggcaagggaaatggggttagacattagggaggattccccgcccggagtcctagcacagcaaaccaggaggtgg

SEQ ID NO: 622097 - DNA, 120 bp, Artificial Sequence
  ENSG00000178038_67 (sequence is synthesized)
aactgaatcagcctggaatggctgctgagagctcagctgcaagttgctggtccatctggggccctggttttgctttcagtcaaatggggatccaactcctgccccacctgccatcttggt

SEQ ID NO: 622098 - DNA, 120 bp, Artificial Sequence
  ENSG00000178038_68 (sequence is synthesized)
tgtcaaagtcaaaggagggaatgaagttatgaattgaattgggcaaatgatgactgagaacaggcttggaaaaggttttctggggaggaggaggctggaggccaggacactgtttgttgt

SEQ ID NO: 622099 - DNA, 120 bp, Artificial Sequence
  ENSG00000178038_69 (sequence is synthesized)
ggaactaggagctctttgagacgagactccaagtagtaatcccagaccccaccttgctcatcccaacctgttccggtctccccatcagggacctccaggtgcatggattggtgctgcccc

SEQ ID NO: 622100 - DNA, 120 bp, Artificial Sequence
  ENSG00000178038_70 (sequence is synthesized)
aggaaggaaccagctgtaagggagggcagagggggatgtcttggaggggaatcccagactttggacactggtctctcttggaccaagaccccctctctggcttggcctccagatctgccc

SEQ ID NO: 622101 - DNA, 120 bp, Artificial Sequence
  ENSG00000178038_71 (sequence is synthesized)
acctttctgtctccgtctttccaggattccatatgcttctgtctgtcttctcgtcgcagggtagattctctgtccctttctctgctgctcttcctcctggagccgtggaggcagctgggc

SEQ ID NO: 622102 - DNA, 120 bp, Artificial Sequence
  ENSG00000178038_72 (sequence is synthesized)
ggtgctggggtgctagaggtagagtgaggaccacaccccaggtgtccagccatccaggccagcgctccttccccagctgcctgtccgcgacaggcctcttctccttgtctccctcgctct

SEQ ID NO: 622103 - DNA, 120 bp, Artificial Sequence
  ENSG00000178038_73 (sequence is synthesized)
gccggctgtgtgagcatgcacaggttagggtgggctggggagggcttcctggggggagggggctgggccgaggtgtgggtgagggatgctgtgtgtggtgcccaggacccaccctgagga

SEQ ID NO: 622104 - DNA, 120 bp, Artificial Sequence
  ENSG00000178053_0 (sequence is synthesized)
gagtgaggcgtcgtccgtactggaggctagctcttgtcgcggccgcggcgagttaacatcgtttttccaatctgtccgcggctgccgccacccaagacagagccagaatgttcaggatgc

SEQ ID NO: 622105 - DNA, 120 bp, Artificial Sequence
  ENSG00000178053_1 (sequence is synthesized)
tgaacagcagttttgaggatgaccccttcttctctgagtccattcttgcacaccgagaaaatatgcgacagatgataagaagtttttctgaaccctttggaagagacttgctcagtatct

SEQ ID NO: 622106 - DNA, 120 bp, Artificial Sequence
  ENSG00000178053_2 (sequence is synthesized)
ctgatggtagagggagagctcataatcgtagaggacataatgatggtgaagattctttgactcatacagatgtcagctctttccagacaatggaccaaatggtgtcaaatatgagaaact

SEQ ID NO: 622107 - DNA, 120 bp, Artificial Sequence
  ENSG00000178053_3 (sequence is synthesized)
atatgcagaaattagaaagaaacttcggtcaactttcagtggatccaaatggacattcattttgttcttcctcagttatgacttattccaaaataggagatgaaccgccaaaggtttttc

SEQ ID NO: 622108 - DNA, 120 bp, Artificial Sequence
  ENSG00000178053_4 (sequence is synthesized)
aggcctcaactcaaactcgtcgagctccaggaggaataaaggaaaccaggaaagcaatgagagattctgacagtggactagaaaaaatggctattggtcatcatatccatgaccgagctc

SEQ ID NO: 622109 - DNA, 120 bp, Artificial Sequence
  ENSG00000178053_5 (sequence is synthesized)
atgtcattaaaaagtcaaagaacaagaagactggagatgaagaggtcaaccaggagttcatcaatatgaatgaaagtgatgctcatgcttttgatgaggagtggcaaagtgaggttttga

SEQ ID NO: 622110 - DNA, 120 bp, Artificial Sequence
  ENSG00000178053_6 (sequence is synthesized)
agtacaaaccaggacgacacaatctaggaaacactagaatgagaagtgttggccatgagaatcctggctcccgagaacttaaaagaagggagaaacctcaacaaagtccagccattgaac

SEQ ID NO: 622111 - DNA, 120 bp, Artificial Sequence
  ENSG00000178053_7 (sequence is synthesized)
atggaaggagatcaaatgttttgggggacaaactccacatcaaaggctcatctgtgaaaagcaacaaaaaataaatagccatgcatttgatttgtttagttttgattgttttaacagtta

SEQ ID NO: 622112 - DNA, 120 bp, Artificial Sequence
  ENSG00000178053_8 (sequence is synthesized)
gtaatggtgctgggtaataagcataagaccaatctcttgctgttaaatcagttctgtccttggcaactttcttctgatatctgaatgttcatgaaggtcctagctttatattgtccctct

SEQ ID NO: 622113 - DNA, 120 bp, Artificial Sequence
  ENSG00000178053_9 (sequence is synthesized)
taaaattttgattttcaacaatgtgagtaaattgagtctatttaatgtaaaactctttaaaacatactaattttttaaagcttatatgcttatttcgcttccccagttgtttttgtgttg

SEQ ID NO: 622114 - DNA, 120 bp, Artificial Sequence
  ENSG00000178053_10 (sequence is synthesized)
gctaaatattcttttatatttatcaagattgattgcagagcagttctatcacttataattagttataagaaattataatgttaaaaaagtctcagtttttactaacactgtactagggtg

SEQ ID NO: 622115 - DNA, 120 bp, Artificial Sequence
  ENSG00000178053_11 (sequence is synthesized)
ggtgatattaataaaggtttaaataatttatctctaattttataatgtgttgtaaagccaactagcttaaaactttaaaaataataaagcaaaactacactagtactcttttatgagaaa

SEQ ID NO: 622116 - DNA, 120 bp, Artificial Sequence
  ENSG00000178053_12 (sequence is synthesized)
ttactattttgataaagggcaaggataatcaaatagttcattttcagagaaaaatattttaaattgctaatgtacatgattgttttggttataatttatttatagaatgtatcttttcta

SEQ ID NO: 622117 - DNA, 120 bp, Artificial Sequence
  ENSG00000178053_13 (sequence is synthesized)
tattacattcttaatattcaccagatattatattgaccattctctttaacttcttaatgtggcatatttctactctcctttcccacaaacagcttcatctgtctccaaggttaacattct

SEQ ID NO: 622118 - DNA, 120 bp, Artificial Sequence
  ENSG00000178053_14 (sequence is synthesized)
gaagctggagagtccttggagaaactctgctcagcttttttgtgacatttagaaaaatgcatttggtattctccaaaccagaatgatacattgtctcaaaatctgttagacagctgatgg

SEQ ID NO: 622119 - DNA, 120 bp, Artificial Sequence
  ENSG00000178053_15 (sequence is synthesized)
gtgtttttgagcaacgtcttaataattcagttgtttctgttttaattataccattaaaaatcagctttagctttttaattctagaatttaagcatcagtctgttcttataaaagttaggt

SEQ ID NO: 622120 - DNA, 120 bp, Artificial Sequence
  ENSG00000178053_16 (sequence is synthesized)
ttgaagtttataagaatataaaatcttaactcacatttgttgtttaatatttctgtcaaggaaaaaagcccccaaaaattgctatcactctataatcctaagtatttttcttttcaattt

SEQ ID NO: 622121 - DNA, 120 bp, Artificial Sequence
  ENSG00000178053_17 (sequence is synthesized)
tgaacagcagttttgaggatgaccccttcttctcgtgagttacgggagccaggagtccggggtcgcgcgggaattaagacatacaggtggtcttactctgcagcagctgaaactgaagca

SEQ ID NO: 622122 - DNA, 120 bp, Artificial Sequence
  ENSG00000178053_18 (sequence is synthesized)
agttttgaggatgaccccttcttctcagctaaccttgtttgtgaagggactccgctttctgtcaaaactagaaataggacagggaagctgatggggcggggcggggggaggggggcggga

SEQ ID NO: 622123 - DNA, 120 bp, Artificial Sequence
  ENSG00000178053_19 (sequence is synthesized)
caatctgtccgcggctgccgccacccaagacagagccagaatgttcaggatgctgaacagcagttttgaggatgaccccttcttctcacatacaggtggtcttactctgcagcagctgaa

SEQ ID NO: 622124 - DNA, 120 bp, Artificial Sequence
  ENSG00000178053_20 (sequence is synthesized)
atgttaaaagaagttcttcagagagaaggaaaatcatacaagtcagaaactctgatgtacattaaaaaagcaagagcatcagagaataagttaagtgagtccattcttgcacaccgagaa

SEQ ID NO: 622125 - DNA, 120 bp, Artificial Sequence
  ENSG00000178053_21 (sequence is synthesized)
tgttgagaggaaaaaaacccactgacctagaattctgtatcctgcaaaattatcctttaaaagtcaagaagaaatagactgtctcagacaaacaaaaatttggtgaatttgttgacagta

SEQ ID NO: 622126 - DNA, 120 bp, Artificial Sequence
  ENSG00000178053_22 (sequence is synthesized)
gtttttccaatctgtccgcggctgccgccacccaagacagagccagaatgttcaggatgctgaacagcagttttgaggatgaccccttcttctcagaccatgcaagcaagaagagaatgg

SEQ ID NO: 622127 - DNA, 120 bp, Artificial Sequence
  ENSG00000178053_23 (sequence is synthesized)
cgtagaggacataatgatggtgaagattctttgactgcaacgagttgttctcttgtgccttttggcgattttggtggtatgcatacagatgtcagctctttccagacaatggaccaaatg

SEQ ID NO: 622128 - DNA, 120 bp, Artificial Sequence
  ENSG00000178053_24 (sequence is synthesized)
accccttcttctcagttggcctttgcagcttcaagggctttgcaggtgacataactaccatctcggtgaaacttatgcatacagatgtcagctctttccagacaatggaccaaatggtgt

SEQ ID NO: 622129 - DNA, 120 bp, Artificial Sequence
  ENSG00000178053_25 (sequence is synthesized)
tgttttatgcctttagtcattaaaataaaatgcaaatgtgttaattcattgttgaaattgagcatgtattagttaaaaatttccttttaggcatactttagtatactcctaacataccat

SEQ ID NO: 622130 - DNA, 120 bp, Artificial Sequence
  ENSG00000178053_26 (sequence is synthesized)
aacacattgggaaattgtcataaggcacacattttaaataacatcttgatataaattaacctgatagagcaaagtcttaataaagtacatacttgattttccttttgcctaaatcattac

SEQ ID NO: 622131 - DNA, 120 bp, Artificial Sequence
  ENSG00000178053_27 (sequence is synthesized)
actgatgataacttgaatcattgtagtcaaatctaaaaacaccctttaataaataattgtgtttaacagtataattcctgtacatcagattgcagttagagattgtggtgaggcagaatt

SEQ ID NO: 622132 - DNA, 120 bp, Artificial Sequence
  ENSG00000178053_28 (sequence is synthesized)
tgagatggtagtaccgagaaaagttctgtttctttcttaaaagtcaactctatctttgcaccataaaaacataactatcgatatctataccccagaataatatttgtttgcaacaacttc

SEQ ID NO: 622133 - DNA, 120 bp, Artificial Sequence
  ENSG00000178053_29 (sequence is synthesized)
ctataccccagaataatatttgtttgcaacaacttcttatgatgggtgtttaatactgttagtctgtaaattgaaactatttaaaactatatacatgccgggcgcagtggctcatgcctg

SEQ ID NO: 622134 - DNA, 61 bp, Artificial Sequence
  ENSG00000178053_30 (sequence is synthesized)
taatcccagcactttgggaggctgcggcaagtggattgcttgaggtcacagcgggtgtggt

SEQ ID NO: 622135 - DNA, 120 bp, Artificial Sequence
  ENSG00000178053_31 (sequence is synthesized)
tgaacagcagttttgaggatgaccccttcttctcgtggtcttactctgcagcagctgaaactgaagcacaagaagcccttggaactatcatcaggacattgagtccattcttgcacaccg

SEQ ID NO: 622136 - DNA, 120 bp, Artificial Sequence
  ENSG00000178057_0 (sequence is synthesized)
gacttcgccgcgcgttggtcagccatggccaccgctctcgcgctacgtagcttgtaccgagcgcgaccctcgctgcgctgtccgcccgttgagcttccctgggccccgcggcgagggcat

SEQ ID NO: 622137 - DNA, 120 bp, Artificial Sequence
  ENSG00000178057_1 (sequence is synthesized)
cggctctcgccggcggatgacgagctgtatcagcggacgcgcatctctctgctgcaacgcgaggccgctcaggcaatgtacatcgacagctacaacagccgcggcttcatgataaacgga

SEQ ID NO: 622138 - DNA, 120 bp, Artificial Sequence
  ENSG00000178057_2 (sequence is synthesized)
aaccgcgtgctcggcccctgcgctctgctcccgcactcggtggtgcagtggaacgtgggatcccaccaggacatcaccgaagacagcttttccctcttctggttgctggagccccggata

SEQ ID NO: 622139 - DNA, 120 bp, Artificial Sequence
  ENSG00000178057_3 (sequence is synthesized)
catgaggcagcggggcattgctgtggaagtgcaggacacgcccaatgcctgtgccaccttcaacttcctgtgtcatgaaggccgagtaactggagctgctctcatccctccaccaggagg

SEQ ID NO: 622140 - DNA, 120 bp, Artificial Sequence
  ENSG00000178057_4 (sequence is synthesized)
gacttcacttacatctttgggccaagctgctcaatgaaccgccaggaactgacctgctgactgcactctgccaggcttcccaatgctttcactcttatctaccctttggcacttatcttg

SEQ ID NO: 622141 - DNA, 120 bp, Artificial Sequence
  ENSG00000178057_5 (sequence is synthesized)
cttatcaacataataatttatacacttctcccattttgtatcaggtgtgttgctggccaggagctgatggctcactgggctcttggaggggaatgtgaagaaaccaaggagtcacttttt

SEQ ID NO: 622142 - DNA, 120 bp, Artificial Sequence
  ENSG00000178057_6 (sequence is synthesized)
catctagattacttaggattccttgacttttcagaagtcgggaagcagtatgtttgcctgttgtagacctacttgctcacatgcagatttgagaggacctcaacggcttttctcacaaaa

SEQ ID NO: 622143 - DNA, 120 bp, Artificial Sequence
  ENSG00000178057_7 (sequence is synthesized)
gcgcgctgcggagaggccaacggtcgcgcgggtgacggttagggcggggcgtgcttccgcgtctagccggagaaacttgagccggctgccccgcccacggtgcccgaagccccaaaggct

SEQ ID NO: 622144 - DNA, 120 bp, Artificial Sequence
  ENSG00000178057_8 (sequence is synthesized)
cgacccccactgcagcctctcaacagaactgtagactagccacacccacccttccctagagatcgtggtggtggggactggagaccggaccgagaggctgcagtcccaggtgcttcaagc

SEQ ID NO: 622145 - DNA, 120 bp, Artificial Sequence
  ENSG00000178057_9 (sequence is synthesized)
catgaggcagcggggcattgctgtggaagtgcaggacacggtgagtcccgggactggggcatgctgcggggagcacaggcctggcgctagacaggctgatgctggccttttctttgcagc

SEQ ID NO: 622146 - DNA, 120 bp, Artificial Sequence
  ENSG00000178057_10 (sequence is synthesized)
ccggtgacgacttcgccgcgcgttggtcagccatggccaccgctctcgcgctacgtagcttgtaccgagcgcgaccctcgctgcgctgtccgcccgttgagcttccctggtgagcttgga

SEQ ID NO: 622147 - DNA, 120 bp, Artificial Sequence
  ENSG00000178057_11 (sequence is synthesized)
ggtgagcttggaccccgcgccctcgaccatccagccccctagggccggcgactgccagcccagcaccttccggcctctcgggctgcccggcccggccccgcgcccctgaccctttccctc

SEQ ID NO: 622148 - DNA, 120 bp, Artificial Sequence
  ENSG00000178057_12 (sequence is synthesized)
caccaccaggctcccactgtgccgagcttcccgctcgcccggccccgcgggtagcgaaagcgacaatgttcccctgaggccacgacagagccggcgtgccgagatgcccaaaccccgcgc

SEQ ID NO: 622149 - DNA, 120 bp, Artificial Sequence
  ENSG00000178057_13 (sequence is synthesized)
ctccccagggttccagagatggccaccagcctcggctctcccacgtctacacccatcacctccagcctgagggcgcaactgagaggaactgagacccaagcagctcagtaaaggccccgc

SEQ ID NO: 622150 - DNA, 120 bp, Artificial Sequence
  ENSG00000178074_0 (sequence is synthesized)
ctctgacgtcgtcgcctcagcgccggctcccggccgggccgcggccgccgaccgttgagccgccggctgagccgcctgctgaagtccctccctcaggaacccctccgccaccctccacct

SEQ ID NO: 622151 - DNA, 120 bp, Artificial Sequence
  ENSG00000178074_1 (sequence is synthesized)
ccgaaccgctctcgcggcggcgacccatgtgggggttcaggctcctgcggtcgccgccgttgctgctcctgctgccgcagctcggaatcggaaacgcctcgtcctgctctcaggccagaa

SEQ ID NO: 622152 - DNA, 120 bp, Artificial Sequence
  ENSG00000178074_2 (sequence is synthesized)
ccatgaacccgggcggcagcggcggcgcgcgatgctccctctcggccgaggtgcgccgccgtcagtgcctgcagctttccaccgtgcctggagccgatccgcagcgcagcaacgaattgc

SEQ ID NO: 622153 - DNA, 120 bp, Artificial Sequence
  ENSG00000178074_3 (sequence is synthesized)
tcctgttggcggcggccggggagggactggagcggcaggacctccccggggacccagcgaaggaggagccgcagccgccgccccagcatcacgtcctctatttccctggggatgtgcaga

SEQ ID NO: 622154 - DNA, 120 bp, Artificial Sequence
  ENSG00000178074_4 (sequence is synthesized)
attaccatgaaattatgactcgtcatcctgagaattatcaatgggaaaactggagtctagaaaatgttgctaccattttagcccaccggttccccaatagttatatttgggtgataaaat

SEQ ID NO: 622155 - DNA, 120 bp, Artificial Sequence
  ENSG00000178074_5 (sequence is synthesized)
gttcccgaatgcatttgcacaaattcagctgctatgacaattttgtgaaaagtaacatgtttggtgccccagaacacaatactgactttggagcttttaagcacctttatatgttattag

SEQ ID NO: 622156 - DNA, 120 bp, Artificial Sequence
  ENSG00000178074_6 (sequence is synthesized)
ttaatgcttttaatttaagtcagaatagtttatcaaagaaaagtttgaatgtttggaataaggactccatagcatctaactgtagatccagtccttctcatactacgaatggttgccagg

SEQ ID NO: 622157 - DNA, 120 bp, Artificial Sequence
  ENSG00000178074_7 (sequence is synthesized)
gagaaaaagtgaggacctgtgaaaaatctgatgagtctgccatgagtttttatccaccatcactaaatgacgcatcttttactttgattggattcagtaaaggttgtgttgttttgaatc

SEQ ID NO: 622158 - DNA, 120 bp, Artificial Sequence
  ENSG00000178074_8 (sequence is synthesized)
agttgctttttgaattgaaagaagccaagaaagacaagaacatagatgcttttatcaaaagcataagaacaatgtattggctggatggtggtcattctggaggaagcaatacttgggtta

SEQ ID NO: 622159 - DNA, 120 bp, Artificial Sequence
  ENSG00000178074_9 (sequence is synthesized)
cttatccagaagtcttgaaagaatttgcacaaacaggaattatcgttcacactcatgtaacaccttaccaagtacgtgatccaatgagatcttggattggaaaggagcacaagaaatttg

SEQ ID NO: 622160 - DNA, 120 bp, Artificial Sequence
  ENSG00000178074_10 (sequence is synthesized)
ttcagatacttggggatcttggtatgcaggtgactagccaaattcattttacaaaggaagctccttccatagagaatcacttcagggttcatgaagtattttgagattacaggtatatta

SEQ ID NO: 622161 - DNA, 120 bp, Artificial Sequence
  ENSG00000178074_11 (sequence is synthesized)
atgaacttgttcagtggaagaacataagcacttttgagtgttataaattcagataatgggatgtaattcatagctgcattgtcagttttggggtatggggggaagcacacattcctaaaa

SEQ ID NO: 622162 - DNA, 120 bp, Artificial Sequence
  ENSG00000178074_12 (sequence is synthesized)
tgtgagtgtaatgtgcaatagtattttttgcttgtgaatgtgagcagttattaatttggattgagttagaattagttaatttgaaatctaacaaggtggtttgtaataatgctgaggaga

SEQ ID NO: 622163 - DNA, 120 bp, Artificial Sequence
  ENSG00000178074_13 (sequence is synthesized)
tataagacccttaaaatgaaagttacaacattgttcttataaaaggtaactaaaattgttactgttggaaataactgattttctgagtaatgttttaaactaatttggtgacattttaac

SEQ ID NO: 622164 - DNA, 120 bp, Artificial Sequence
  ENSG00000178074_14 (sequence is synthesized)
agtaattagctattttgagtggaaatattttcatttctcttcaaacaaaagcaaaggtacgatgctgttttctatcattttggaataactgcaccctgccttttgtgtttttgtaaactc

SEQ ID NO: 622165 - DNA, 89 bp, Artificial Sequence
  ENSG00000178074_15 (sequence is synthesized)
atatatttgtttccaaatgtccacaagtgtacaatagtgtaaaggtggtttttaaaaacatagccaggtgtggtggcacgtgcctttag

SEQ ID NO: 622166 - DNA, 120 bp, Artificial Sequence
  ENSG00000178074_16 (sequence is synthesized)
ttgtgactagctactgcactccaacctgggcaacatagtgggacttcatctctaaaacaaaacaaaacaaaattacacttaagcactattgtttaatttttaattgtcagtttatcatta

SEQ ID NO: 622167 - DNA, 120 bp, Artificial Sequence
  ENSG00000178074_17 (sequence is synthesized)
ttttgggtaagacattctggggtttcttgaatcttgtccaaaaaccagttgttttggaaaattgctttaaattgagcatatttatgtatattggataaaaatgtactacagagcaaattt

SEQ ID NO: 622168 - DNA, 120 bp, Artificial Sequence
  ENSG00000178074_18 (sequence is synthesized)
caaatttttcattatatcagtctttttgaaaggatcaacttggataaaataaatatataatgctctatttgttagagctctattaaaaaggaaacagattccatagatctaagtcaatgt

SEQ ID NO: 622169 - DNA, 120 bp, Artificial Sequence
  ENSG00000178074_19 (sequence is synthesized)
ttctccagaagcatgattttgtctgccaaaagaaaatagctctctttggccaaaatgcaaaattacattgctataagaaaagttacaagggaaagtttgaagacacaaatgatttaattt

SEQ ID NO: 622170 - DNA, 120 bp, Artificial Sequence
  ENSG00000178074_20 (sequence is synthesized)
tggctcaaaaactgaatttgcttaacactgctacataatttgggtgaagtttccttctgcccgtttttcttgacctagataaatacactttgagaaatccagatctaataaatgtcaacc

SEQ ID NO: 622171 - DNA, 120 bp, Artificial Sequence
  ENSG00000178074_21 (sequence is synthesized)
aacattgacattgtaattgggtgattacaataaaaggtgagcagtttgttgtttattaataattagcttttgcaggtaatgaaatagcagggaagtaacatgctgctttaggactaaaaa

SEQ ID NO: 622172 - DNA, 120 bp, Artificial Sequence
  ENSG00000178074_22 (sequence is synthesized)
aaaaaaaaaaaaaaagacactgaagcttaataccttaatgacccagaagacctagatttataaagccatatagaataaaaatgttaatttcttggtttcttcccagaattatattttaat

SEQ ID NO: 622173 - DNA, 120 bp, Artificial Sequence
  ENSG00000178074_23 (sequence is synthesized)
gactccataaatacattccaaatattcagagattcatgagaaaggattcttaacaaatgtttaaaaataacatttctttttggtgttttaacacttaattttataaactgcagaacagca

SEQ ID NO: 622174 - DNA, 120 bp, Artificial Sequence
  ENSG00000178074_24 (sequence is synthesized)
tctctaaatggctttttttttttttttaaagacaaagtagtattatgttgcttcagtttctttaaatacctcgtttcttttgagaccaaaaattcccatcaaggaaataaatcagcctga

SEQ ID NO: 622175 - DNA, 120 bp, Artificial Sequence
  ENSG00000178074_25 (sequence is synthesized)
ttttaacattttacatattacattgcctttaagcactatgattggatggctttttttctatttgtttaataatccttggctaaattcacatgtatctaaaggaaaatagctgagttactg

SEQ ID NO: 622176 - DNA, 120 bp, Artificial Sequence
  ENSG00000178074_26 (sequence is synthesized)
aattctataaggggaagaaaaagcatttattttcacatgattaactgaaatggaaaagtaagacatttagcagaataattcatttaaaaataattttaaaaaatcagacatatttaaaaa

SEQ ID NO: 622177 - DNA, 120 bp, Artificial Sequence
  ENSG00000178074_27 (sequence is synthesized)
tctaggttgtctatccagtatgtgaatgcttaattataattgttacatgttgaatgggtattaagagtaagtcaccaggtacacaaaactgccatcatagcaaaatgagacagtgttgaa

SEQ ID NO: 622178 - DNA, 120 bp, Artificial Sequence
  ENSG00000178074_28 (sequence is synthesized)
aagacaaaatattttctggaatgaaaatatattcaagttgatccatattcagatgttttctgtttaatacttcagattggtcctttgtccacatttgtttaaaacttattgtaatgttaa

SEQ ID NO: 622179 - DNA, 120 bp, Artificial Sequence
  ENSG00000178074_29 (sequence is synthesized)
tttacacttttggattgtgcctttgtcatgagttgagaaaagtagtcctacaaataatgtgaaagttgttaccaccacagcatgaatgtataattgtattaaaattgatcatccacagaa

SEQ ID NO: 622180 - DNA, 120 bp, Artificial Sequence
  ENSG00000178074_30 (sequence is synthesized)
gtgctgcccggccatggttgctcacgcctgccctcttccaggtcttcggaacttcggctctaaagcgttcctcagcgccatccgcccggaaacacgagcgacagagaaaaggtccgcgag

SEQ ID NO: 622181 - DNA, 120 bp, Artificial Sequence
  ENSG00000178074_31 (sequence is synthesized)
gccggcagactccagagtggctgggtccgagcgcggggcgggttgccgaagggcctcggcctgggctgcgtgctggagagcggggacggggccgactcaccagaggctgcagcaacaggt

SEQ ID NO: 622182 - DNA, 120 bp, Artificial Sequence
  ENSG00000178074_32 (sequence is synthesized)
ccactttgctctccagtctctttctccgacaccgctgaggcggtttcccaccgacttcctttccatacagcaccggcaggcaccggtgtgaagggtcataaaaatggcgctggccgctcg

SEQ ID NO: 622183 - DNA, 120 bp, Artificial Sequence
  ENSG00000178074_33 (sequence is synthesized)
tttgctaccccagttcctgcactctcggtcgctgccctgcggggccgtccgactccggactcctgctgtggccgaggtgaggctgccgtcggccacactttgctacttctgccgctgtcg

SEQ ID NO: 622184 - DNA, 80 bp, Artificial Sequence
  ENSG00000178075_0 (sequence is synthesized)
actcggagggccggcggaggaggcgcgcggagcctgtaactcgcagcgcgcgctggaggtgggcgcggggcggtgcggtg

SEQ ID NO: 622185 - DNA, 120 bp, Artificial Sequence
  ENSG00000178075_1 (sequence is synthesized)
cgatggagggcgctccgactgtccgtcaggtgatgaatgaaggggattcaagccttgccaccgacttacaggaagatgtagaggaaaatcctagtccaactgtggaagagaataatgtgg

SEQ ID NO: 622186 - DNA, 120 bp, Artificial Sequence
  ENSG00000178075_2 (sequence is synthesized)
tagttaaaaaacaggggccaaatttacataattggagtggtgactggagcttttggatttcaagttccacctataaagacaggaatgaggaatacagaagacagttcacacatctacctg

SEQ ID NO: 622187 - DNA, 120 bp, Artificial Sequence
  ENSG00000178075_3 (sequence is synthesized)
atacagagaggctgatagcagattatgcttgtgctcttcagagggacattttgcttcagggacgactatacctttcagaaaactggctatgtttctatagcaacatcttcagatgggaaa

SEQ ID NO: 622188 - DNA, 120 bp, Artificial Sequence
  ENSG00000178075_4 (sequence is synthesized)
ctacaatttctattgctttaaagaatataaccttcatgaccaaggaaaaaactgctcgactcatcccaaacgctatccagatagttacagaaagtgaaaagtttttcttcacatcttttg

SEQ ID NO: 622189 - DNA, 120 bp, Artificial Sequence
  ENSG00000178075_5 (sequence is synthesized)
gtgccagggatagaagttacctcagtatctttaggttgtggcagaatgtattattagataagagcctgactagacaggaattctggcaactgctccagcagaactatggcactgagctag

SEQ ID NO: 622190 - DNA, 120 bp, Artificial Sequence
  ENSG00000178075_6 (sequence is synthesized)
gtttaaatgctgaggagatggaaaacttgtcactgtcgattgaggatgtgcagccaagaagtccaggaagaagcagcttggatgactctggggagagagatgaaaaattatccaagtcaa

SEQ ID NO: 622191 - DNA, 120 bp, Artificial Sequence
  ENSG00000178075_7 (sequence is synthesized)
tcagttttaccagtgaatcaattagtcgggtttcagaaacagagtcattcgatggaaattcatcaaaaggaggattaggcaaagaggagtcccaaaatgagaaacagaccaaaaagagtc

SEQ ID NO: 622192 - DNA, 120 bp, Artificial Sequence
  ENSG00000178075_8 (sequence is synthesized)
tcttaccaactttggaaaagaagttaactagagtgccatcaaagtcactggacttgaataaaaatgaatatctttctctggacaaaagcagcacttcagattctgttgatgaagaaaatg

SEQ ID NO: 622193 - DNA, 120 bp, Artificial Sequence
  ENSG00000178075_9 (sequence is synthesized)
ttcctgagaaagatcttcatggaagactttttatcaaccgtatttttcatatcagtgctgacagaatgtttgaattgctctttaccagttcacgctttatgcagaaatttgccagttcta

SEQ ID NO: 622194 - DNA, 120 bp, Artificial Sequence
  ENSG00000178075_10 (sequence is synthesized)
gaaatataatagatgtagtatctaccccttggactgcagaacttggaggtgatcagctgagaacgatgacctacactatagtccttaatagtccacttactggaaaatgcactgctgcca

SEQ ID NO: 622195 - DNA, 120 bp, Artificial Sequence
  ENSG00000178075_11 (sequence is synthesized)
ctgaaaagcagacactgtataaagaaagtcgggaagcacgattttatttggtagattcagaagtactgacacatgatgtcccctaccatgattacttctataccgtgaacagatactgta

SEQ ID NO: 622196 - DNA, 120 bp, Artificial Sequence
  ENSG00000178075_12 (sequence is synthesized)
tcatccgatcttcaaaacagaaatgcaggctaagagtttccacagatttgaaatacagaaaacagccatggggccttgtcaaatctttaattgaaaagaattcctggagttctttggagg

SEQ ID NO: 622197 - DNA, 120 bp, Artificial Sequence
  ENSG00000178075_13 (sequence is synthesized)
actatttcaaacagcttgaatcagatttgttaattgaagaatctgtattaaatcaggccattgaagaccctggaaaacttactggcctacgaaggagaaggcgaaccttcaaccgaacag

SEQ ID NO: 622198 - DNA, 120 bp, Artificial Sequence
  ENSG00000178075_14 (sequence is synthesized)
cagaaacagttcctaaactttcctctcagcattcctctggagatgtgggcttaggtgccaaaggggatattacaggaaagaaaaaggaaatggaaaactataacgtcactcttattgtgg

SEQ ID NO: 622199 - DNA, 120 bp, Artificial Sequence
  ENSG00000178075_15 (sequence is synthesized)
tttaccgtctccgcctccaagaagagaaatctttaaatttagcctctgatatggtgtcaagagcagaaactattcagaagaataaagatcaggcccatcgtttaaagggagtgctccgag

SEQ ID NO: 622200 - DNA, 120 bp, Artificial Sequence
  ENSG00000178075_16 (sequence is synthesized)
actccatagtgatgcttgaacagctgaagagctcactcattatgcttcagaaaacgtttgatctactaaataagaataagactggcatggctgttgaaagctagtgatctgaaggactaa

SEQ ID NO: 622201 - DNA, 120 bp, Artificial Sequence
  ENSG00000178075_17 (sequence is synthesized)
aaccgcagagatacttggaacttaaagaaaatacctggaagaaaaccagacgaatgaaggattttggcatagaacatttctatgttttttcattattgagatttctaatatgaacatttc

SEQ ID NO: 622202 - DNA, 120 bp, Artificial Sequence
  ENSG00000178075_18 (sequence is synthesized)
tttcagtaacatttatttgataattagtttctgctggccttaataatccatcctttcacttcttatagatatttttaagctgtgaatttcttcagtgaaccatgaaatatattatagaac

SEQ ID NO: 622203 - DNA, 120 bp, Artificial Sequence
  ENSG00000178075_19 (sequence is synthesized)
tgaatttctctgatacaaaaagaaaatgacacaccctgaattgagtggtatggtctcatttctacagtgaagtctgatgctttgttagcacagaatccgtacatgtccaataggtcgctt

SEQ ID NO: 622204 - DNA, 120 bp, Artificial Sequence
  ENSG00000178075_20 (sequence is synthesized)
ttgtaactgagataagaccaagaggataaacaggacaatataagaagaaacctctatgtcattactgattttaaaggttctgttttcaggcatataacatttccaggtttgtgtactgta

SEQ ID NO: 622205 - DNA, 120 bp, Artificial Sequence
  ENSG00000178075_21 (sequence is synthesized)
aagattataatgtcttcatttatttagcatgcaaatttaatagtcaaactttttgaatctgcatgttgatgatgattatcagaaagggtcttctgccatgctgtatctttatgaaagaaa

SEQ ID NO: 622206 - DNA, 120 bp, Artificial Sequence
  ENSG00000178075_22 (sequence is synthesized)
tagttgttttttcttaaggtaactatcagaggtgggattatcttgcctcctcacttagaataccaacagtcaaaaggaagaaccatcctctgagttttaaaaaccagaaggttatgttaa

SEQ ID NO: 622207 - DNA, 120 bp, Artificial Sequence
  ENSG00000178075_23 (sequence is synthesized)
aatctgggcatttagtgacagatcaaatgcatacttgaactaagattggcttcagcttagcagtctttcatggtggaagtgacacatctggttgaaaataatttgtgtattttcagtaac

SEQ ID NO: 622208 - DNA, 120 bp, Artificial Sequence
  ENSG00000178075_24 (sequence is synthesized)
catgtatggcttccttctttatgtatgtgtgtgacttgttttgattggtaagttataagccagacatagattttagctctttaataaaaacttcaggggcacgtatgtcccagtacaagt

SEQ ID NO: 622209 - DNA, 120 bp, Artificial Sequence
  ENSG00000178075_25 (sequence is synthesized)
gtactgactatcaagttttaactcagatgcaagctttggctctttcataaaaagtttttatgcatatgtgtctccatacaagtggctcattaaaataagaactttgtaaactgacttaaa

SEQ ID NO: 622210 - DNA, 120 bp, Artificial Sequence
  ENSG00000178075_26 (sequence is synthesized)
atcagatattttttcaagagttagggaaagttgaagtgttttactgttttgtctcttgagccctttctctggggaaaaaatacatatccatctatctatctatatataaactgtgtatac

SEQ ID NO: 622211 - DNA, 120 bp, Artificial Sequence
  ENSG00000178075_27 (sequence is synthesized)
attcttactgtttgaacaactattgcctttaattaaatgtttcatttttctccagagtccccaaagccacatggcattattatagtcatttttgagatgcctgtagagaatgaaagtatt

SEQ ID NO: 622212 - DNA, 120 bp, Artificial Sequence
  ENSG00000178075_28 (sequence is synthesized)
gactccgttagagggaaaatgggtttctctgggtgaattccaacgaagcatacctaggggtaacagtgaacctacctgggtttgttttgttttggtaaggatttatgtagtgtctggctg

SEQ ID NO: 622213 - DNA, 120 bp, Artificial Sequence
  ENSG00000178075_29 (sequence is synthesized)
taagcaagaatgagtggattataaacttgaagatttctctgttaaagtcacaaaaatgatcgacaaacaatatttttgtgatgtttatttaaacgttgtattttataacatacttcaagg

SEQ ID NO: 622214 - DNA, 120 bp, Artificial Sequence
  ENSG00000178075_30 (sequence is synthesized)
aagagtatcgaagtaagttgctttataaattaagactaaattcgtatggatgcagaattcaattaataaaatttgagcctgttacgtaaattgaatattaataaaattgaaaatttctga

SEQ ID NO: 622215 - DNA, 120 bp, Artificial Sequence
  ENSG00000178075_31 (sequence is synthesized)
aattctgcattctgacctgcaaccttggaaagagtgctggtactacaaccaggaagtgacagataatgtgctttaaactacattagaaaagcttctcatagcaaaactgagagattgaag

SEQ ID NO: 622216 - DNA, 120 bp, Artificial Sequence
  ENSG00000178075_32 (sequence is synthesized)
cagtgattatttttacatagttgtcattaaatatttggagctctgctgtgcatagagatggcaacatacttagaatacacagctttctgggccagaaattgatcttctgacttttgagcc

SEQ ID NO: 622217 - DNA, 120 bp, Artificial Sequence
  ENSG00000178075_33 (sequence is synthesized)
gaaatggaattaatctgcttcagtttccttgtgtgaaaactacaccacagaagtggattccacttacactgtagctcactgtattgtcaagagactaatgttatatagaaaccatatttc

SEQ ID NO: 622218 - DNA, 120 bp, Artificial Sequence
  ENSG00000178075_34 (sequence is synthesized)
aagaattgttaaatttgaggaaatacaaagtactcattcaacagatgtttttattttttagctaatctgattaatttctatcatcataggtttttatgggaagttccataaatttaaagg

SEQ ID NO: 622219 - DNA, 120 bp, Artificial Sequence
  ENSG00000178075_35 (sequence is synthesized)
gaatatttatatatacatgctggggaagtgccaataatactattttactctatttgattggacaaatggttcttacgtaactctgctgtgcctaagaatcacttggggtgcttgctaaaa

SEQ ID NO: 622220 - DNA, 120 bp, Artificial Sequence
  ENSG00000178075_36 (sequence is synthesized)
tgcagatttcttgacccctgtctcagagattgattcagtaattcttgagtaggcatcaggaatcagtatttttaaacatacaccccaggttattctgatgcaagtgatatgagcattaca

SEQ ID NO: 622221 - DNA, 120 bp, Artificial Sequence
  ENSG00000178075_37 (sequence is synthesized)
tggtgaaaaatactgggacaatgtctgaatcccagggtattctataggaatccactcagccagtcatatttagaacactaatatctatatgcctctatatgaatcttgaggcactatgtt

SEQ ID NO: 622222 - DNA, 120 bp, Artificial Sequence
  ENSG00000178075_38 (sequence is synthesized)
agatttaattgaattggttctgacttagtgatatattgaaggtgataatttttggattggagcttcaatattagcttttttttgtctaattatagatttcagaacatagaagatgtttgt

SEQ ID NO: 622223 - DNA, 120 bp, Artificial Sequence
  ENSG00000178075_39 (sequence is synthesized)
tgttcctttgggctttatggaagatttttatgttctgcttaaatcagttttctacgacagttctgaatagcaaatattatcagtgttcttttgcattactttacagaaaatgtttactca

SEQ ID NO: 622224 - DNA, 120 bp, Artificial Sequence
  ENSG00000178075_40 (sequence is synthesized)
aaagttggaatattaatctgtataccatttcaatgccataataacttcaaagattggattttcttgctactatcttaagtttttaaaaataaatcttcttgatgggtaaaagtgaataag

SEQ ID NO: 622225 - DNA, 120 bp, Artificial Sequence
  ENSG00000178075_41 (sequence is synthesized)
ggcaagttaatattttaatagaaaaagtagacagatatgatgccacctgtatatttgcatatatatatatatggtatgtaaccattcacttgaaaggctgctgtgaaaaccaatacatta

SEQ ID NO: 622226 - DNA, 120 bp, Artificial Sequence
  ENSG00000178075_42 (sequence is synthesized)
agttcatttagcatgtaacattttatatatgacaccattaatgtatatttgggacttgatacttcctttgtgcaagatgaactagaataatttttgctgaatggtaattttttttttttt

SEQ ID NO: 622227 - DNA, 120 bp, Artificial Sequence
  ENSG00000178075_43 (sequence is synthesized)
ctgacttccactgggagtaagaggtacatcatgctctacctgagatcagctacatattgatcttcatttccttttctgaaaggcagcattatgagcgtataattgcctaagccaaaggca

SEQ ID NO: 622228 - DNA, 120 bp, Artificial Sequence
  ENSG00000178075_44 (sequence is synthesized)
cccaaaaatagatcctaaaagcttatctggtagatttcaaagctggtggtctcacatcaacactgactagtattcctagcagaggggagagatgtcacagataccccaaacctgtgagtt

SEQ ID NO: 622229 - DNA, 120 bp, Artificial Sequence
  ENSG00000178075_45 (sequence is synthesized)
cggattattcaaggacttgtattgtcactctaattaccttccatcttttcctcaacctccacttaatacttacaagtaattatttcatataataaaatagggataattgatttaaataat

SEQ ID NO: 622230 - DNA, 120 bp, Artificial Sequence
  ENSG00000178075_46 (sequence is synthesized)
aacaacaatgaaaaacagtgtagacaatacacatttttgaagcttttgcatgtatattctgcattagcaatgctttaggtctggaaaagtgtggattaacatataatttgctctgcctag

SEQ ID NO: 622231 - DNA, 120 bp, Artificial Sequence
  ENSG00000178075_47 (sequence is synthesized)
tttccccctgacctgtattcaccatattatttcagtaattcttcagttgcagaaaacttaatttcagtttcagagactgtggtctgctaactatcctgtagccataaacagcctgttttt

SEQ ID NO: 622232 - DNA, 120 bp, Artificial Sequence
  ENSG00000178075_48 (sequence is synthesized)
actgccatgcaatgaggactgaagcagctctgtgaagatgtccatatggagaggaattgaggtcccaaaccaatagccagtaccaggtgcccggccatgtgatgaatgaaggggattcaa

SEQ ID NO: 622233 - DNA, 120 bp, Artificial Sequence
  ENSG00000178075_49 (sequence is synthesized)
attctagcaaggcaccagcgacatcgcagactatgcttggttatatactgtattgaatgtccttccaatgtcacatttgtgcttatcacacacatgtgagttgggatatgtccttataaa

SEQ ID NO: 622234 - DNA, 120 bp, Artificial Sequence
  ENSG00000178075_50 (sequence is synthesized)
aacaaatatctccagggaagtgataaagttcaggtttacagatgagccaagggagaaactaagttcttcactttaatgaagaagaaagctctctgaagtgagaagaagaaagggaattcc

SEQ ID NO: 622235 - DNA, 120 bp, Artificial Sequence
  ENSG00000178075_51 (sequence is synthesized)
agaatactggaggccacccaccatagccaagaaacactgcatttactggctggaagtaaaatttacccttctttgaaaagatcctgatattatctgtgtttctgatgtatacacacggag

SEQ ID NO: 622236 - DNA, 120 bp, Artificial Sequence
  ENSG00000178075_52 (sequence is synthesized)
tgtttatcaaactctgatttcctttaagataactaatatataagtataaaggagcagttgcaaaatggcaagcatataaccaatatattttatttggcccatgtgtcattttaagaattg

SEQ ID NO: 622237 - DNA, 120 bp, Artificial Sequence
  ENSG00000178075_53 (sequence is synthesized)
gacattaaactttttttaaaattttatttattttttctagatagggtctcgttctgttgcccatgctgtaagtggcacaatcatggctcagtgtaacctcgggctcctgggctcaagtga

SEQ ID NO: 622238 - DNA, 120 bp, Artificial Sequence
  ENSG00000178075_54 (sequence is synthesized)
catagagatatatacagttcttccaaaaactctactttagatgattccaaagtaaatttatatatatttgtgcatctaaattagtgtgcatgtaaatacaaacgtgttgtatatataagt

SEQ ID NO: 622239 - DNA, 120 bp, Artificial Sequence
  ENSG00000178075_55 (sequence is synthesized)
gtataatatatttttctgatttaatacattgagctccagtatagttagagaaagatattttaattgaaaaaaagcttgaacatatatcttaatggctgccaaaaccatgtcttaagtgac

SEQ ID NO: 622240 - DNA, 120 bp, Artificial Sequence
  ENSG00000178075_56 (sequence is synthesized)
aacttgttgagtgctcagaatccgtgaggtgcattctctcattctagcaaggcaccagcgacatcgcagactatgcttggttatatactgtattgaatgtccttccaatgtcacatttgt

SEQ ID NO: 622241 - DNA, 120 bp, Artificial Sequence
  ENSG00000178078_0 (sequence is synthesized)
ctcagcttcccggcccagctggggcacccactggaaggagaggccaggcggaagaccctggctccgtcatggcctctgccctgaggccaccccgtgtccccaagcctaagggtgtcctgc

SEQ ID NO: 622242 - DNA, 120 bp, Artificial Sequence
  ENSG00000178078_1 (sequence is synthesized)
cttcacactactatgagagctttctagagaagaaggggccctgtgaccgggattacaagaagttctgggcaggcctgcagggtctcaccatttatttctacaatagcaatcgggacttcc

SEQ ID NO: 622243 - DNA, 120 bp, Artificial Sequence
  ENSG00000178078_2 (sequence is synthesized)
agcacgtggagaagctcaacttgggagcatttgagaaactcacagatgagattccctggggaagctcacgtgaccctggcacccacttcagcctgattctccgggatcaggagatcaagt

SEQ ID NO: 622244 - DNA, 120 bp, Artificial Sequence
  ENSG00000178078_3 (sequence is synthesized)
tcaaggtagagaccttggagtgtcgggaaatgtggaaaggcttcatcttaacggtggtggagctccgtgtcccgaccgacttgaccctgcttcctgggcacctatacatgatgtctgaag

SEQ ID NO: 622245 - DNA, 120 bp, Artificial Sequence
  ENSG00000178078_4 (sequence is synthesized)
tcttggccaaagaggaggcgcgccgtgcactggagacaccctcgtgcttcctgaaggtgagccggctggaggcacaactgctcctggagcgctaccccgagtgcgggaacctgctgctgc

SEQ ID NO: 622246 - DNA, 120 bp, Artificial Sequence
  ENSG00000178078_5 (sequence is synthesized)
ggcccagcggggacggcgccgacggcgtgtcggtcaccacgcggcagatgcacaacgggacgcacgtggtccggcattacaaggtgaagcgggagggccccaagtacgtgatcgatgtgg

SEQ ID NO: 622247 - DNA, 120 bp, Artificial Sequence
  ENSG00000178078_6 (sequence is synthesized)
ctggtgccattcctgttagacgaggactacgagaaggtgctaggctacgtggaagccgataaggagaatggcgagaatgtgtgggtggcgccctccgctccgggcccaggtcctgcaccc

SEQ ID NO: 622248 - DNA, 120 bp, Artificial Sequence
  ENSG00000178078_7 (sequence is synthesized)
tgcacaggtggccccaagccgctgtcacctgcgtctagccaggacaagctgcccccactgcccccactaccgaaccaggaagagaactacgtgacccccattggagatggcccagctgtt

SEQ ID NO: 622249 - DNA, 120 bp, Artificial Sequence
  ENSG00000178078_8 (sequence is synthesized)
gactatgagaaccaagatgtggcttcctctagttggccagtcatcctgaagccaaagaagttgccaaagcctcctgccaagcttccaaagccacccgttggacccaagccagtagagaag

SEQ ID NO: 622250 - DNA, 120 bp, Artificial Sequence
  ENSG00000178078_9 (sequence is synthesized)
tctcttccagagcccaaagtctttaatggtggcttgggcaggaagctgccagtcagttcagcccagcctctcttccccacagccgggctggcagacatgacggcagagctacagaagaag

SEQ ID NO: 622251 - DNA, 120 bp, Artificial Sequence
  ENSG00000178078_10 (sequence is synthesized)
ctggagaagaggcgggcactggagcactgattcggacacaccagggaccagcgggctagtcccagggcatggcccagcggccagattctttttcccaggattaaaactctgaccccagga

SEQ ID NO: 622252 - DNA, 120 bp, Artificial Sequence
  ENSG00000178078_11 (sequence is synthesized)
gcattacaaggtgaagcgggagggccccaagtacgtgatcgatgtggaacagccggtgagcgttgggccagagtccctagaagtgactttgtggggtccgcgtcccttctccagcagcct

SEQ ID NO: 622253 - DNA, 63 bp, Artificial Sequence
  ENSG00000178078_12 (sequence is synthesized)
ggttggggtcccccccatatcccaccctcacctgatggcaggccagcctcagccctcatctga

SEQ ID NO: 622254 - DNA, 120 bp, Artificial Sequence
  ENSG00000178078_13 (sequence is synthesized)
agccgagtccggccctccatacccttgggcggagcaggaggcagggccgggctcgttgcgcgcctgatcagtgcagccccggcctttgtcccctaccctgtttctgcaactacatccccg

SEQ ID NO: 622255 - DNA, 120 bp, Artificial Sequence
  ENSG00000178078_14 (sequence is synthesized)
accctgtcctgggaccttcgtcccggagcccaggctctgggatttccctcagtccctggcagggttgaaagtccgggatggggacttcctaaagctccgggacgccgtgggatgggctca

SEQ ID NO: 622256 - DNA, 120 bp, Artificial Sequence
  ENSG00000178078_15 (sequence is synthesized)
agtgcgggtggctttgcccagaccgcagtcgggaagtgggaactggacagtaggggtgcgggggaggctctccagggtgctcgggaatgttctcaggaagaagacttgacatagagcaag

SEQ ID NO: 622257 - DNA, 120 bp, Artificial Sequence
  ENSG00000178078_16 (sequence is synthesized)
agctggttccacaccggagaggcggggatttccctaggatcactggacctgctgggatcagcctctgcccagccctggcaggggagggagttgacgggctgacacaggaaactcccctga

SEQ ID NO: 622258 - DNA, 120 bp, Artificial Sequence
  ENSG00000178078_17 (sequence is synthesized)
aaaactaggagcctggaaggccggactgggtctccgtgggaggggcctgggtctggagagcagggcagggtctcctgggcctaggggatggggatggggctgggtctcagaggaggcagg

SEQ ID NO: 622259 - DNA, 120 bp, Artificial Sequence
  ENSG00000178084_0 (sequence is synthesized)
tggtgaatccccagagaagagtccagaaagaagaatggaaggagggtggcctgcaaggcagagtgccctcctctgcctcactgtcagtcttctgcttcaaggaagaggcgacgcttttac

SEQ ID NO: 622260 - DNA, 120 bp, Artificial Sequence
  ENSG00000178084_1 (sequence is synthesized)
catcaattgctcaggctttgaccagcatggggttgaccctgctgtcttccaagcagtgtttgacagaaaggccttccgtccattcaccaactacagcatccctacccgtgtcaacatctc

SEQ ID NO: 622261 - DNA, 120 bp, Artificial Sequence
  ENSG00000178084_2 (sequence is synthesized)
cttcaccctgtctgccatcctgggagtggatgcacagctccagctgctgacatcattcctgtggatggatttggtatgggacaatcctttcattaattggaacccaaaagagtgtgttgg

SEQ ID NO: 622262 - DNA, 120 bp, Artificial Sequence
  ENSG00000178084_3 (sequence is synthesized)
catcaataaactcacagtattagctgaaaacctgtggctcccagacatcttcatcgtggaatccatggatgtggatcagacgccttccggtctcactgcctatatcagcagtgaaggtcg

SEQ ID NO: 622263 - DNA, 120 bp, Artificial Sequence
  ENSG00000178084_4 (sequence is synthesized)
aattaagtatgataagccaatgagggtgaccagcatctgtaacctggacatcttctacttcccttttgaccaacagaactgtaccttcaccttcagttctttcctctacacagtggacag

SEQ ID NO: 622264 - DNA, 120 bp, Artificial Sequence
  ENSG00000178084_5 (sequence is synthesized)
catgctgctgggcatggacaaggaggtgtgggagatcacagacacgtctcgcaaagtcatccaaacccagggggagtgggagctcttgggcatcaacaaggccaccccaaagatgtccat

SEQ ID NO: 622265 - DNA, 120 bp, Artificial Sequence
  ENSG00000178084_6 (sequence is synthesized)
gggcaacaacctatatgaccagatcatgttttatgtggccatcaggcgcaggccaagcctctacatcataaacctgctggtgcccagtagctttctggttgccattgatgccctcagctt

SEQ ID NO: 622266 - DNA, 120 bp, Artificial Sequence
  ENSG00000178084_7 (sequence is synthesized)
gagaatcgtgccccattcaagataacacttctgctgggctacaacgtcttcctgctcatgatgaatgacttgctccctgccagtggcacccccctcatcagtgtctacttcgccctgtgc

SEQ ID NO: 622267 - DNA, 120 bp, Artificial Sequence
  ENSG00000178084_8 (sequence is synthesized)
ctgtccctgatggtggtcagcctgctggagaccgtcttcattacctacctgctgcacgtggccaccacccagcccccacccatgcctaggtggcttcactccctgctgctccactgcacc

SEQ ID NO: 622268 - DNA, 120 bp, Artificial Sequence
  ENSG00000178084_9 (sequence is synthesized)
agcccagggagatgctgtcccactgcgccccagaagggaaataagggcctgggtctcaccctcacccacctgcctggcccaaaggagccgggggagttagcagggaagaagctgggaccc

SEQ ID NO: 622269 - DNA, 120 bp, Artificial Sequence
  ENSG00000178084_10 (sequence is synthesized)
agagagaccgagccagatgggggctcaggatggacaaagacccagctaatggagctgtgggtgcagttcagccacgcgatggacaccctgctcttccgcctctacctgctcttcatggcc

SEQ ID NO: 622270 - DNA, 120 bp, Artificial Sequence
  ENSG00000178084_11 (sequence is synthesized)
tcctccatccttactgtcattgtcctctggaacacctaggcagacatcccccctctctggcaaacaacagcttggagtttctgctggtcttgggccagccggactcattttcctaatctt

SEQ ID NO: 622271 - DNA, 120 bp, Artificial Sequence
  ENSG00000178084_12 (sequence is synthesized)
agccacttatccccagtgactaccatgtccccttctaaattccaaagactccaacgcagcactagcaagcaggttcgggacagccctggacgatttcccgaccgctgctcaggctgctca

SEQ ID NO: 622272 - DNA, 120 bp, Artificial Sequence
  ENSG00000178084_13 (sequence is synthesized)
ttcctgctcaccctcagtctccctgagctaccacctaactcctcactccctgatcaatggaagtccaggtcagtggagtctctccttgattgatcaccccaataaacaactttccaggaa

SEQ ID NO: 622273 - DNA, 120 bp, Artificial Sequence
  ENSG00000178093_0 (sequence is synthesized)
agtgggcacatgggggtgcgggggtgtaggtgccaagcgccatggcttagacccgagattggagtccggccgccccccgacagcagccgcctcctgccccccgtgcgccctaggcgccac

SEQ ID NO: 622274 - DNA, 120 bp, Artificial Sequence
  ENSG00000178093_1 (sequence is synthesized)
catgtcgggagacaaacttctgagcgaactcggttataagctgggccgcacaattggagagggcagctactccaaggtgaaggtggccacatccaagaagtacaagggtaccgtggccat

SEQ ID NO: 622275 - DNA, 120 bp, Artificial Sequence
  ENSG00000178093_2 (sequence is synthesized)
caaggtggtggaccggcggcgagcgcccccggacttcgtcaacaagttcctgccgcgagagctgtccatcctgcggggcgtgcgacacccgcacatcgtgcacgtcttcgagttcatcga

SEQ ID NO: 622276 - DNA, 120 bp, Artificial Sequence
  ENSG00000178093_3 (sequence is synthesized)
ggtgtgcaacgggaaactgtacatcgtgatggaagcggccgccaccgacctgctgcaagccgtgcagcgcaacgggcgcatccccggagttcaggcgcgcgacctctttgcgcagatcgc

SEQ ID NO: 622277 - DNA, 120 bp, Artificial Sequence
  ENSG00000178093_4 (sequence is synthesized)
cggcgccgtgcgctacctgcacgatcatcacctggtgcaccgcgacctcaagtgcgaaaacgtgctgctgagcccggacgagcgccgcgtcaagctcaccgacttcggcttcggccgcca

SEQ ID NO: 622278 - DNA, 120 bp, Artificial Sequence
  ENSG00000178093_5 (sequence is synthesized)
tacccagacctgagcaccacctactgcggctcagccgcctacgcgtcacccgaggtgctcctgggcatcccctacgaccccaagaagtacgatgtgtggagcatgggcgtcgtgctctac

SEQ ID NO: 622279 - DNA, 120 bp, Artificial Sequence
  ENSG00000178093_6 (sequence is synthesized)
gtcatggtcaccgggtgcatgcccttcgacgactcggacatcgccggcctgccccggcgccagaaacgcggcgtgctctatcccgaaggcctcgagctgtccgagcgctgcaaggccctg

SEQ ID NO: 622280 - DNA, 120 bp, Artificial Sequence
  ENSG00000178093_7 (sequence is synthesized)
atcgccgagctgctgcagttcagcccgtccgccaggccctccgcgggccaggtagcgcgcaactgctggctgcgcgccggggactccggctagaagccgggtggttccagccattcctgc

SEQ ID NO: 622281 - DNA, 120 bp, Artificial Sequence
  ENSG00000178093_8 (sequence is synthesized)
agccaagggcactgggccagggcggcgcacgcgcaagaggcgcgcttcgagggaatatgcgaagctgccgcgtgctgctgcacatgcgctttttcccttccgcttccctccctttcttcc

SEQ ID NO: 622282 - DNA, 120 bp, Artificial Sequence
  ENSG00000178093_9 (sequence is synthesized)
cacgggggagtccgcagttgcccttgttcggaatccacgttccccgcgatcccgggagctggaggcgcatgcgcatccgcgattccctgcgaccaggccccgagagggcgagaccagagg

SEQ ID NO: 622283 - DNA, 120 bp, Artificial Sequence
  ENSG00000178093_10 (sequence is synthesized)
ggacggaagcattgcgcctgcgcggaactctcagcctctgcgcggagggcgtcccttcccaaccagccgtgggtgccaggttcccggttggaacctgcaataaactcgctgttcctcgca

SEQ ID NO: 622284 - DNA, 120 bp, Artificial Sequence
  ENSG00000178093_11 (sequence is synthesized)
catttcttgagcacctactgtctgccaggccccagagctcatggcgaagagacttgggcccatccctgccgaaaacgagacaattgaaaagtcaagtaaaataaaagaatgacatggaaa

SEQ ID NO: 622285 - DNA, 120 bp, Artificial Sequence
  ENSG00000178093_12 (sequence is synthesized)
agcgatcgctccatccggggaaggcaggcgcggtcatgcatttcttgagcacctactgtctgccaggccccagagctcatggcgaagagacttgggcccatccctgccgaaaacgagaca

SEQ ID NO: 622286 - DNA, 120 bp, Artificial Sequence
  ENSG00000178096_0 (sequence is synthesized)
agtcctggccctgagcgggaatcgcagtggccgaggctgagcggcaggtagaaggggcgtctccggggcttcacagggaacacaggggcttcggcccaaccacaactggaggtcgaattc

SEQ ID NO: 622287 - DNA, 120 bp, Artificial Sequence
  ENSG00000178096_1 (sequence is synthesized)
accacgtcacgtagagaaaaggggcggtgtctcgggtctccccgtgtggcatcaaggcgggctccctataggagctggtgtggacgtccgggcgtggggttagggcggatgcggggatcg

SEQ ID NO: 622288 - DNA, 120 bp, Artificial Sequence
  ENSG00000178096_2 (sequence is synthesized)
cggggcgggtgttgacattgtgctctcaccaggcggatcgccccgaccctcactcctggcgtctgagtctctggcgtagcccatgctgagtgggcggctggtcctgggtctggtctccat

SEQ ID NO: 622289 - DNA, 120 bp, Artificial Sequence
  ENSG00000178096_3 (sequence is synthesized)
ctgagccccgaggtgctagagcttcgcaacgagagcggtggccacgcggtcccgcctggcagtgagactcacttccgcgtggctgtggtgagctctcgtttcgagggactgagcccccta

SEQ ID NO: 622290 - DNA, 120 bp, Artificial Sequence
  ENSG00000178096_4 (sequence is synthesized)
caacgacaccggctggtccacgcagcgctggccgaggagctgggaggtccggtccatgcgctggccatccaggcacggacccccgcccagtggagagagaactctcagctggacactagc

SEQ ID NO: 622291 - DNA, 120 bp, Artificial Sequence
  ENSG00000178096_5 (sequence is synthesized)
cccccatgcctgggtgggaacaagaaaactctaggaaccccctgaaccccaagagagggaggaccaggatccgaatgggctgggtgagcacgaattaccgaggccttccctttgatacag

SEQ ID NO: 622292 - DNA, 120 bp, Artificial Sequence
  ENSG00000178096_6 (sequence is synthesized)
atttcccagcgtgcctcaggaagggcgccaggactgcattttgctccggagcgtccagagtcctggccctgagcgggaatcgcagtggccgaggctgagcggcaggcggatcgccccgac

SEQ ID NO: 622293 - DNA, 120 bp, Artificial Sequence
  ENSG00000178096_7 (sequence is synthesized)
tttgtaagggatgaagacccctgggccccattctgttggggtccatacatactctccgaagatagcaacttgcttcaggtcaaagtgaacccgagaaaagagaagaatcactcactactg

SEQ ID NO: 622294 - DNA, 120 bp, Artificial Sequence
  ENSG00000178096_8 (sequence is synthesized)
ctcttgccctggactattcaggaagggcagcccggatgttccatgttaaatcgtgacagaattgcaccagacctgatgagttggaaacaatcctatacattaaaagaaattacactatga

SEQ ID NO: 622295 - DNA, 120 bp, Artificial Sequence
  ENSG00000178096_9 (sequence is synthesized)
gcctccctgctttccgcgtcctgacattacggctaaaattgcagttacagcttcttttacaaggagaagaatgtggaaagaataaccaatttgatgtaatttataagagctaccgggagg

SEQ ID NO: 622296 - DNA, 120 bp, Artificial Sequence
  ENSG00000178096_10 (sequence is synthesized)
ggtgaagggaagtcgtttgattggctaaaagcggagccgtatctaacagccaatagaaaagcagaaagccgcctcttggtttgcgtcctgcactgaaaggaaatgacggattttactttc

SEQ ID NO: 622297 - DNA, 120 bp, Artificial Sequence
  ENSG00000178096_11 (sequence is synthesized)
tgaccaccttaccagtggggagaatccgagactacagttcccatgagccctcagggcaccacgtggtgcctgcccgtgctaccaacgcgcagcgaggactccatttcccagcgtgcctca

SEQ ID NO: 622298 - DNA, 120 bp, Artificial Sequence
  ENSG00000178096_12 (sequence is synthesized)
ttttgctccggagcgtccagagtcctggccctgagcgggaatcgcagtggccgaggctgagcggcagggcagcgcgggatccggggccatcggtccggtggaggccgccattcgcacgaa

SEQ ID NO: 622299 - DNA, 120 bp, Artificial Sequence
  ENSG00000178104_0 (sequence is synthesized)
acaccacttgtgtctgagttcacgcagcatgttcctctgtcagggattccgcaaatatctccctgaggtaaaaaaggaaagtgtgctgcgctccagcacccagagcagtgagcccagtcc

SEQ ID NO: 622300 - DNA, 120 bp, Artificial Sequence
  ENSG00000178104_1 (sequence is synthesized)
cgagtcccggagagagctccagcaataggggccatgtcgccgtagccccagcctctcggtccgcagcctcagcagcgtcccagccggctggcttcatgctgcggtgcagctgcaccatgt

SEQ ID NO: 622301 - DNA, 120 bp, Artificial Sequence
  ENSG00000178104_2 (sequence is synthesized)
tcctgggttgagggggcaatcgggcacgctcctccccatgggttgcccatcatgtctaatggatatcgcactctgtcccagcacctcaatgacctgaagaaggagaacttcagcctcaag

SEQ ID NO: 622302 - DNA, 120 bp, Artificial Sequence
  ENSG00000178104_3 (sequence is synthesized)
ctgcgcatctacttcctggaggagcgcatgcaacagaagtatgaggccagccgggaggacatctacaagcggaacattgagctgaaggttgaagtggagagcttgaaacgagaactccag

SEQ ID NO: 622303 - DNA, 120 bp, Artificial Sequence
  ENSG00000178104_4 (sequence is synthesized)
gacaagaaacagcatctggataaaacatgggctgatgtggagaatctcaacagtcagaatgaagctgagctccgacgccagtttgaggagcgacagcaggagacggagcatgtttatgag

SEQ ID NO: 622304 - DNA, 120 bp, Artificial Sequence
  ENSG00000178104_5 (sequence is synthesized)
ctcttggagaataagatccagcttctgcaggaggaatccaggctagcaaagaatgaagctgcgcggatggcagctctggtggaagcagagaaggagtgtaacctggagctctcagagaaa

SEQ ID NO: 622305 - DNA, 120 bp, Artificial Sequence
  ENSG00000178104_6 (sequence is synthesized)
ctgaagggagtcaccaaaaactgggaagatgtaccaggagaccaggtcaagcccgaccaatacactgaggccctggcccagagggacaagagaattgaagaactgaatcagagcctggct

SEQ ID NO: 622306 - DNA, 120 bp, Artificial Sequence
  ENSG00000178104_7 (sequence is synthesized)
gcccaggagaggcttgtagaacagctatctcgggagaaacaacaactgctacatctgttggaggagccaactagcatggaagtgcagcccatgactgaagagttgctgaaacaacaaaag

SEQ ID NO: 622307 - DNA, 120 bp, Artificial Sequence
  ENSG00000178104_8 (sequence is synthesized)
ctgaattcacatgagaccactataactcagcagtctgtatctgattcccacttggcagaactccaggaaaaaatccagcaaacagaggccaccaacaagattcttcaagagaaacttaat

SEQ ID NO: 622308 - DNA, 120 bp, Artificial Sequence
  ENSG00000178104_9 (sequence is synthesized)
gaaatgagctatgaactaaagtgtgctcaggagtcgtctcaaaagcaagatggtacaattcagaacctcaaggaaactctgaaaagcagggaacgtgagactgaggagttgtaccaggta

SEQ ID NO: 622309 - DNA, 120 bp, Artificial Sequence
  ENSG00000178104_10 (sequence is synthesized)
attgaaggtcaaaatgacacaatggcaaagcttcgagaaatgctgcaccaaagccagcttggacaacttcacagctcagagggtacttctccagctcagcaacaggtagctctgcttgat

SEQ ID NO: 622310 - DNA, 120 bp, Artificial Sequence
  ENSG00000178104_11 (sequence is synthesized)
cttcagagtgctttattctgcagccaacttgaaatacagaagctccagagggtggtacgacagaaagagcgccaactggctgatgccaaacaatgtgtgcaatttgtagaggctgcagca

SEQ ID NO: 622311 - DNA, 120 bp, Artificial Sequence
  ENSG00000178104_12 (sequence is synthesized)
cacgagagtgaacagcagaaagaggcttcttggaaacataaccaggaattgcgaaaagccttgcagcagctacaagaagaattgcagaataagagccaacagcttcgtgcctgggaggct

SEQ ID NO: 622312 - DNA, 120 bp, Artificial Sequence
  ENSG00000178104_13 (sequence is synthesized)
gaaaaatacaatgagattcgaacccaggaacaaaacatccagcacctaaaccatagtctgagtcacaaggagcagttgcttcaggaatttcgggagctcctacagtatcgagataactca

SEQ ID NO: 622313 - DNA, 120 bp, Artificial Sequence
  ENSG00000178104_14 (sequence is synthesized)
gacaaaacccttgaagcaaatgaaatgttgcttgagaaacttcgccagcgaatacatgataaagctgttgctctggagcgggctatagatgaaaaattctctgctctagaagagaaagaa

SEQ ID NO: 622314 - DNA, 120 bp, Artificial Sequence
  ENSG00000178104_15 (sequence is synthesized)
aaagaactgcgccagcttcgtcttgctgtgagagagcgagatcatgacttagagagactgcgcgatgtcctctcctccaatgaagctactatgcaaagtatggagagtctcctgagggcc

SEQ ID NO: 622315 - DNA, 120 bp, Artificial Sequence
  ENSG00000178104_16 (sequence is synthesized)
aaaggcctggaagtggaacagttatctactacctgtcaaaacctccagtggctgaaagaagaaatggaaaccaaatttagccgttggcagaaggaacaagagagtatcattcagcagtta

SEQ ID NO: 622316 - DNA, 120 bp, Artificial Sequence
  ENSG00000178104_17 (sequence is synthesized)
cagacgtctcttcatgataggaacaaagaagtggaggatcttagtgcaacactgctctgcaaacttggaccagggcagagtgagatagcagaggagctgtgccagcgtctacagcgaaag

SEQ ID NO: 622317 - DNA, 120 bp, Artificial Sequence
  ENSG00000178104_18 (sequence is synthesized)
gaaaggatgctgcaggaccttctaagtgatcgaaataaacaagtgctggaacatgaaatggagattcaaggcctgcttcagtctgtgagcaccagggagcaggaaagccaagctgctgca

SEQ ID NO: 622318 - DNA, 120 bp, Artificial Sequence
  ENSG00000178104_19 (sequence is synthesized)
gagaagttggtgcaagccttaatggaaagaaattcagaattacaggccctgcgccaatatttaggagggagagactccctgatgtcccaagcacccatctctaaccaacaagctgaagtt

SEQ ID NO: 622319 - DNA, 120 bp, Artificial Sequence
  ENSG00000178104_20 (sequence is synthesized)
acccccactggccgtcttggaaaacagactgatcaaggttcaatgcagataccttccagagatgatagcacttcattgactgccaaagaggatgtcagcatacccagatccacattagga

SEQ ID NO: 622320 - DNA, 120 bp, Artificial Sequence
  ENSG00000178104_21 (sequence is synthesized)
gacttggacacagttgcagggctggaaaaagaactgagtaatgccaaagaggaacttgaactcatggctaaaaaagaaagagaaagtcagatggaactttctgctctacagtccatgatg

SEQ ID NO: 622321 - DNA, 120 bp, Artificial Sequence
  ENSG00000178104_22 (sequence is synthesized)
gctgtgcaggaagaagagctgcaggtgcaggctgctgatatggagtctctgaccaggaacatacagattaaagaagatctcataaaggacctgcaaatgcaactggttgatcctgaagac

SEQ ID NO: 622322 - DNA, 120 bp, Artificial Sequence
  ENSG00000178104_23 (sequence is synthesized)
ataccagctatggaacgcctgacccaggaagtcttacttcttcgggaaaaagttgcttcagtagaatcccagggtcaagaaatttcaggaaaccgaagacaacagttgctgctgatgcta

SEQ ID NO: 622323 - DNA, 120 bp, Artificial Sequence
  ENSG00000178104_24 (sequence is synthesized)
gaaggactagtagatgaacggagtcggctcaatgaggccttacaagcagagagacagctctatagcagtctggtgaagttccatgcccatccagagagctctgagagagaccgaactctg

SEQ ID NO: 622324 - DNA, 120 bp, Artificial Sequence
  ENSG00000178104_25 (sequence is synthesized)
caggtggaactggaaggggctcaggtgttacgcagtcggctagaagaagttcttggaagaagcttggagcgcttaaacaggctggagaccctggccgccattggaggtgcagctgcaggg

SEQ ID NO: 622325 - DNA, 120 bp, Artificial Sequence
  ENSG00000178104_26 (sequence is synthesized)
gatgacaccgaagatacaagcactgagttcactgacagtattgaggaggaggctgcacaccatagtcaccagcaacttgtcaaggtggctttggagaaaagtctggcaactgtggagacc

SEQ ID NO: 622326 - DNA, 120 bp, Artificial Sequence
  ENSG00000178104_27 (sequence is synthesized)
cagaacccatctttttcccctccttctccgatgggaggggacagtaacaggtgtcttcaggaagaaatgctccacctgagggctgagttccaccagcacttagaagagaagaggaaagct

SEQ ID NO: 622327 - DNA, 120 bp, Artificial Sequence
  ENSG00000178104_28 (sequence is synthesized)
gaggaggaactgaaggagctaaaggctcaaattgaggaagcaggattctcctcagtgtcccacatcaggaacaccatgctgagcctttgccttgagaatgcggagctgaaagagcagatg

SEQ ID NO: 622328 - DNA, 120 bp, Artificial Sequence
  ENSG00000178104_29 (sequence is synthesized)
ggagaagcaatgtctgatggatgggagatcgaggaagacaaggagaagggcgaggtgatggttgagactgtggtaaccaaagagggtctgagtgagagtagccttcaggctgagttcaga

SEQ ID NO: 622329 - DNA, 120 bp, Artificial Sequence
  ENSG00000178104_30 (sequence is synthesized)
aagctccagggaaaactgaagaatgcccacaatatcatcaacctcctcaaagaacaacttgtgctgagtagcaaggaagggaatagtaaacttactccagagctccttgtgcatctgacc

SEQ ID NO: 622330 - DNA, 120 bp, Artificial Sequence
  ENSG00000178104_31 (sequence is synthesized)
agcaccattgaaagaataaacacagaactggttggttcccctgggaagcaccaacaccaagaggaggggaatgtgactgtgaggcctttccccagaccccagagccttgaccttggggct

SEQ ID NO: 622331 - DNA, 120 bp, Artificial Sequence
  ENSG00000178104_32 (sequence is synthesized)
accttcacagtggatgcccaccaattggataaccagtcccagcctcgtgaccctgggcctcagtcagcgtttagcctaccagggtccacccagcacctgcgctcccagctgtcacaatgc

SEQ ID NO: 622332 - DNA, 120 bp, Artificial Sequence
  ENSG00000178104_33 (sequence is synthesized)
aaacaacgctatcaagatctccaggagaagctgctgctatcagaagccactgtctttgctcaggctaacgagctggagaaatacagagttatgcttacaggtgaatccttggtgaagcag

SEQ ID NO: 622333 - DNA, 120 bp, Artificial Sequence
  ENSG00000178104_34 (sequence is synthesized)
caggacctgggctatgagacttgtggccgaagcgagaatgaggctgaacgggaggaaaccaccagtcctgagtgtgaggagcacaacagcctcaaggaaatggtcctgatggaggggctg

SEQ ID NO: 622334 - DNA, 120 bp, Artificial Sequence
  ENSG00000178104_35 (sequence is synthesized)
tgctctgagcagggacgccggggctcaacactggctagttcctctgagaggaagcccttggagaaccagctagggaagcaggaagagttccgggtatatggaaagtcagaaaacatcttg

SEQ ID NO: 622335 - DNA, 120 bp, Artificial Sequence
  ENSG00000178104_36 (sequence is synthesized)
gtcctacgaaaggacatcaaagatctgaaggcccagctgcagaatgccaacaaggtcattcaaaacctcaagagccgggtccggtccctctcagttacaagtgattattcgtctagtctg

SEQ ID NO: 622336 - DNA, 120 bp, Artificial Sequence
  ENSG00000178104_37 (sequence is synthesized)
gaaagaccccggaagctgagagctgttggcaccttggaggggtcttcacctcatagtgtccctgatgaggatgaggggtggctgtctgatggcactggggctttctactctccagggctt

SEQ ID NO: 622337 - DNA, 120 bp, Artificial Sequence
  ENSG00000178104_38 (sequence is synthesized)
caggccaaaaaggacctggagagtctcatccagagagtatcccagctggaggcccagctcccaaaaaatggactagaagagaagctggctgaggagctgagatcagcctcgtggcctggg

SEQ ID NO: 622338 - DNA, 120 bp, Artificial Sequence
  ENSG00000178104_39 (sequence is synthesized)
aaatatgattccctgattcaggatcaggcccgggaactgtcttacctacggcaaaaaatacgagaagggagaggtatttgttatcttatcacccggcatgcaaaagatacagtaaaatct

SEQ ID NO: 622339 - DNA, 120 bp, Artificial Sequence
  ENSG00000178104_40 (sequence is synthesized)
tttgaggatctcctaaggagcaatgacattgactactacctgggacagagcttccgggagcaactcgcccagggaagccagctgacagagaggctcaccagcaaactcagcaccaaggat

SEQ ID NO: 622340 - DNA, 120 bp, Artificial Sequence
  ENSG00000178104_41 (sequence is synthesized)
cataaaagtgagaaagatcaagctggacttgagccactggccctcaggctcagcagggagctgcaggagaaggagaaagtgattgaagtcctgcaggccaagctggatgctcggtccctc

SEQ ID NO: 622341 - DNA, 120 bp, Artificial Sequence
  ENSG00000178104_42 (sequence is synthesized)
acaccctccagcagccatgccttgtctgactcccaccgctctcccagcagcacctctttcctgtctgatgaactggaagcctgctctgacatggacatagtcagcgagtacacacactat

SEQ ID NO: 622342 - DNA, 120 bp, Artificial Sequence
  ENSG00000178104_43 (sequence is synthesized)
gaagagaagaaagcttctcccagtcactcagattccatccatcattcgagtcattctgctgtgttgtcttctaaaccatcatcaaccagtgcatctcagggggctaaggccgaatccaac

SEQ ID NO: 622343 - DNA, 120 bp, Artificial Sequence
  ENSG00000178104_44 (sequence is synthesized)
agcaaccccatcagcttgccaactccccagaatacccccaaggaggccaaccaggcccattcaggctttcattttcactccatacccaagctggctagccttcctcaggcaccattgccc

SEQ ID NO: 622344 - DNA, 120 bp, Artificial Sequence
  ENSG00000178104_45 (sequence is synthesized)
tcagctccatccagcttcctgcctttcagccccactggccctctcctccttggctgctgtgagacaccagtggtctccttggctgaggctcagcaggagctacagatgctgcagaagcag

SEQ ID NO: 622345 - DNA, 120 bp, Artificial Sequence
  ENSG00000178104_46 (sequence is synthesized)
ttgggagaaagtgccagcactgttcctcctgcttccacagctacattgctgagcaacgacttggaagccgactcttcctactacctcaactctgcccagcctcactctcctccaaggggc

SEQ ID NO: 622346 - DNA, 120 bp, Artificial Sequence
  ENSG00000178104_47 (sequence is synthesized)
accatagaactgggaagaatcctagagcctgggtacctgggcagcagtggcaagtgggatgtgatgaggcctcagaaagggagtgtatctggggacctatcctcaggctcctctgtgtac

SEQ ID NO: 622347 - DNA, 120 bp, Artificial Sequence
  ENSG00000178104_48 (sequence is synthesized)
cagcttaactccaaacccacaggggctgacctgctggaagagcatcttggtgaaatccggaacctgcgccagcgcctggaggaatccatctgcatcaatgaccgcctacgggagcaactg

SEQ ID NO: 622348 - DNA, 120 bp, Artificial Sequence
  ENSG00000178104_49 (sequence is synthesized)
gaacaccggctgacctctactgctcgtggaaggggatccacttctaacttctacagtcagggcctggagtccatacctcagctctgcaatgagaacagagtcctcagggaagacaatcga

SEQ ID NO: 622349 - DNA, 120 bp, Artificial Sequence
  ENSG00000178104_50 (sequence is synthesized)
agacttcaggctcaactgagtcatgtttccagagagcactcccaggaaacagaaagcctgagggaggctctgctgtcctctcgatcccaccttcaagagctggaaaaggagctggagcac

SEQ ID NO: 622350 - DNA, 120 bp, Artificial Sequence
  ENSG00000178104_51 (sequence is synthesized)
cagaaggtggaaaggcagcagcttttggaagacttgagggagaagcagcaagaggtcttgcatttcagggaggaacgtctttccctccaggaaaacgactccagactgcagcacaagctg

SEQ ID NO: 622351 - DNA, 120 bp, Artificial Sequence
  ENSG00000178104_52 (sequence is synthesized)
gttctcctgcagcaacagtgtgaagagaaacagcagctctttgagtccctccagtcagagctacaaatctacgaggcactttatggcaattccaagaaggggctgaaagcttacagcctg

SEQ ID NO: 622352 - DNA, 120 bp, Artificial Sequence
  ENSG00000178104_53 (sequence is synthesized)
gatgcctgtcaccaaatccctttgagcagtgacctgagccacctggtggcagaggtacgagctctgagagggcagctggagcagagcattcaggggaacaattgtctgcgactgcagctg

SEQ ID NO: 622353 - DNA, 120 bp, Artificial Sequence
  ENSG00000178104_54 (sequence is synthesized)
caacagcagctggagagcggtgctggcaaagccagcctcagcccctcctccattaaccagaacttcccagccagcactgaccctggaaacaagcagctgctcctccaagattcagctgtg

SEQ ID NO: 622354 - DNA, 120 bp, Artificial Sequence
  ENSG00000178104_55 (sequence is synthesized)
tcccctccagtccgggatgttggtatgaattccccagctctggtcttccccagctctgcttcctctactcctggctcagaaacgcccataatcaacagagcaaatggcttgggtttggat

SEQ ID NO: 622355 - DNA, 120 bp, Artificial Sequence
  ENSG00000178104_56 (sequence is synthesized)
acttctccagtaatgaagacccctcccaagctagagggtgatgctactgatggctcctttgccaataagcatggccgccatgtcattggccacattgatgactacagtgccctaagacag

SEQ ID NO: 622356 - DNA, 120 bp, Artificial Sequence
  ENSG00000178104_57 (sequence is synthesized)
cagattgcggagggcaagctgctggtcaaaaagatagtgtctcttgtgagatcagcgtgcagcttccctggccttgaagcccaaggcacagaggtgctaggcagcaaaggtattcatgag

SEQ ID NO: 622357 - DNA, 120 bp, Artificial Sequence
  ENSG00000178104_58 (sequence is synthesized)
cttcggagcagcaccagtgccctgcaccatgccctagaggagtcagcttccctcctcaccatgttctggagagcggccctgccaagcacccacatccctgtgctgcctggcaaagtggga

SEQ ID NO: 622358 - DNA, 120 bp, Artificial Sequence
  ENSG00000178104_59 (sequence is synthesized)
gaatcaacagaaagggaacttctggaactgagaaccaaagtatccaaacaggagcgactccttcagagcacaactgagcatctgaagaacgccaaccagcagaaggagagcatggagcag

SEQ ID NO: 622359 - DNA, 120 bp, Artificial Sequence
  ENSG00000178104_60 (sequence is synthesized)
ttcatcgtcagccagctaaccagaacacatgatgttttaaagaaggcaaggactaacttagaggaaccatgcaagaagcgcagccaccagaagtccttaaaacagcaggaaaggtgggcc

SEQ ID NO: 622360 - DNA, 120 bp, Artificial Sequence
  ENSG00000178104_61 (sequence is synthesized)
tgtcccccttttgtgcagctacctatctgctgaggagcatctgggcctcattcctccaagtccacgggagggtccagaagagggagtcagagatgtatcctggtggagctgggagaaagg

SEQ ID NO: 622361 - DNA, 120 bp, Artificial Sequence
  ENSG00000178104_62 (sequence is synthesized)
cagaaagcctttctgacggctatggaatacgattagccaaggtccacttggcccagcactaagaaaaagatgcgtagtttgcacagaaggttttgtgatcctgcctctcaacagccccag

SEQ ID NO: 622362 - DNA, 120 bp, Artificial Sequence
  ENSG00000178104_63 (sequence is synthesized)
cagcttgggaactagcaagagcacatttcttgcctcatcagctgtcctgagatggaaaactcagtgaatataggaccctgattccgatgaaaggggcacgtggtcccaatgctggagctc

SEQ ID NO: 622363 - DNA, 120 bp, Artificial Sequence
  ENSG00000178104_64 (sequence is synthesized)
ctctggcaggttctaaaagcacactactgagcagcggtgccctgccggacactgctggcgggggctcagtgagcactactcacagatccacacctgaccctgttgggtcgagtcaggctg

SEQ ID NO: 622364 - DNA, 120 bp, Artificial Sequence
  ENSG00000178104_65 (sequence is synthesized)
ggccttggtctgcactgtagcacctgtgttctttgagttcacatcatgaatgtggtgacttcccagataccatctcaggcttaacctagcacatcctatttcttttcttctatgatatcc

SEQ ID NO: 622365 - DNA, 120 bp, Artificial Sequence
  ENSG00000178104_66 (sequence is synthesized)
aaattggactgacctcacttcaaagttgctgtcccattttgtcaccctatcttatctcggggaaattgcagactgatggccagaccaactctgttgaaattcttgcatagagcaaacctg

SEQ ID NO: 622366 - DNA, 120 bp, Artificial Sequence
  ENSG00000178104_67 (sequence is synthesized)
tgctcatttttaagtggcatgggagaggccccaagcctagtaaagcctagtctgtgtcttcacagtgctggtagaatgtgtttgtgtgtataaatatatgatatagatttatatatgttg

SEQ ID NO: 622367 - DNA, 120 bp, Artificial Sequence
  ENSG00000178104_68 (sequence is synthesized)
ctaacgccatatattgaaggccaacataactggtggacagggtgggtgacagaaaatgaaagtctttttggtgattgttaaagcaaaatgtgtataaagaaataaatagtttttctttca

SEQ ID NO: 622368 - DNA, 120 bp, Artificial Sequence
  ENSG00000178104_69 (sequence is synthesized)
cttagaggtgaaatccctaagggctctgccatgtactccagccttgtgacccttgccttccaggaaccatgcaagaagcgcagccaccagaagtccttaaaacagcaggaaaggtgggcc

SEQ ID NO: 622369 - DNA, 120 bp, Artificial Sequence
  ENSG00000178104_70 (sequence is synthesized)
gctcgcggttgacagctcagctggtgccgagcaactcgtgccagccagtcgtgtctcagcctggagagtgcgcgcaccgcggcccgggcagccgctggctccagctcacgaaacagcccc

SEQ ID NO: 622370 - DNA, 120 bp, Artificial Sequence
  ENSG00000178104_71 (sequence is synthesized)
gggcgccgcgccgctctgagtccagcctcctactgagaacagtccctcccttgtgcgggtcgcacggctagccgcaggttcggccacgtcaaatccattttctaaaaaagcagggagcag

SEQ ID NO: 622371 - DNA, 120 bp, Artificial Sequence
  ENSG00000178104_72 (sequence is synthesized)
agctctctcttcgccgccgacgcagaaaggagctggggaggaaaaagctgctgccttttgcgctggagattcgtgggcaaggcttctcattttcccaggctgcttcccctcccgggtgag

SEQ ID NO: 622372 - DNA, 120 bp, Artificial Sequence
  ENSG00000178104_73 (sequence is synthesized)
gagcgtcctgagactaaggaaagagcctggaaaatggagcagacctggacgagagattattttgcagaggatgatggggagatggtacccagaacgagtcacacagcagcttttcttagt

SEQ ID NO: 622373 - DNA, 120 bp, Artificial Sequence
  ENSG00000178104_74 (sequence is synthesized)
gacactaaagatcgaggccctccagtgcagtcacagatctggagaagtggtgaaaaggtcccgtttgtgcagacatattccttgagagcatttgagaaaccccctcaggtacagacccag

SEQ ID NO: 622374 - DNA, 120 bp, Artificial Sequence
  ENSG00000178104_75 (sequence is synthesized)
atggagaaggaaagagatcagggcaccacactgctcaggctttattgaggccaggcaacagttggcttttaggtcagattttggagatggcctgtgaaactgcgttttcttccagtcctt

SEQ ID NO: 622375 - DNA, 120 bp, Artificial Sequence
  ENSG00000178104_76 (sequence is synthesized)
gcgggagaattgaagaactgaatcagagcctggctgcccaggagaggcttgtagaacagctatctcgggagaaacaacaactgctacatctgttggaggagccaactagcatggaagtgc

SEQ ID NO: 622376 - DNA, 120 bp, Artificial Sequence
  ENSG00000178104_77 (sequence is synthesized)
accccattttgagaaggtcagcctacactggaatgaactttttacattagggcatttgtatttccctcacaatacttgccacattacttggcataggagagatgcttagtgtaattataa

SEQ ID NO: 622377 - DNA, 120 bp, Artificial Sequence
  ENSG00000178104_78 (sequence is synthesized)
gttaacaagcctttggatcagggcttgactcatgatagacaaagtatatgcctgctggatggaagaatctcttgggcgagcaccatttttctttccatcacctttccttgaaaatatatc

SEQ ID NO: 622378 - DNA, 120 bp, Artificial Sequence
  ENSG00000178104_79 (sequence is synthesized)
ttcagctttgggtaggaggaatcttggtgtatgaaatcattgcaaatttacttcatcttttctggagtttgaagttgtgactctcctgctaccaattaaataaagcttactttgccataa

SEQ ID NO: 622379 - DNA, 120 bp, Artificial Sequence
  ENSG00000178104_80 (sequence is synthesized)
tggccaggcccaggaaatccatgaagggcacagacagcgggtcctgctgccgccgccgatgcgactttggctgctgctgtcgcgcgtcccgccgggctcactacacgccttaccggtccg

SEQ ID NO: 622380 - DNA, 120 bp, Artificial Sequence
  ENSG00000178104_81 (sequence is synthesized)
gggacgcgacgcgaacccctcagtccccacggcagaccccgagccgggaaagacggcgcccggagccagccgggagctgggcagcagcggccgaggaggaagaagcagctgcggcggcca

SEQ ID NO: 622381 - DNA, 120 bp, Artificial Sequence
  ENSG00000178104_82 (sequence is synthesized)
atgagcagtgaccaggggggcttggggatgttgggagttgagactgatttgatgtccccaaacctcctgtaccaggagcaattgtggctgcagagggaggggaggacagggggtggatag

SEQ ID NO: 622382 - DNA, 120 bp, Artificial Sequence
  ENSG00000178104_83 (sequence is synthesized)
aaggagactccaagctgaatagccagaaagaaataaatgctttagaattctcatgctaagcaagtagggttaatttctgctggtggtttctactctgtggtgctcttttgttgtttcagt

SEQ ID NO: 622383 - DNA, 120 bp, Artificial Sequence
  ENSG00000178104_84 (sequence is synthesized)
acagttggcagaaggctagtgatatttacaggtcttgctgcaggtcccctagccgagccccacccccatcagtaaccaggattctccatctcccacctctcttcatgtcctggtggtttg

SEQ ID NO: 622384 - DNA, 120 bp, Artificial Sequence
  ENSG00000178104_85 (sequence is synthesized)
taattctgtaagaggagagtcctgccaccttaggtctcagtggggacagctaggtgtgcatgtgcttcatgtgcagtgtgttccagggctcctgaaaactgtggttgcctttacccccta

SEQ ID NO: 622385 - DNA, 120 bp, Artificial Sequence
  ENSG00000178104_86 (sequence is synthesized)
gtactatggaatagtgatgcctgataaaaatatgacccatggattggtccggattatggatggtattatcattatggtgtctctttcaagagcatgtcccaataaacatatgctctgtca

SEQ ID NO: 622386 - DNA, 120 bp, Artificial Sequence
  ENSG00000178104_87 (sequence is synthesized)
ctcatctggccaaccatcttcagctgccaatggacaagtgtcttcctggtactgcacatgaagatgtcccgctctcccctgctcaaggagagagtgcctgacctgagctgggcccatcag

SEQ ID NO: 622387 - DNA, 120 bp, Artificial Sequence
  ENSG00000178104_88 (sequence is synthesized)
atccagtacttacctggaataggaaaacgatggggagggtgaccaaagattgcaaaaatctttgaagcttatctacttgagagagagtccctgaagatactggcctctcattcctgctat

SEQ ID NO: 622388 - DNA, 120 bp, Artificial Sequence
  ENSG00000178104_89 (sequence is synthesized)
gtatatccaatgtgactgaactctgaataaaatatacaagttataacaatgtagcaattgacccagcaaatgaggacacaaacgtgttggagggtgtctacggagaaataaacaagtgat

SEQ ID NO: 622389 - DNA, 120 bp, Artificial Sequence
  ENSG00000178104_90 (sequence is synthesized)
gtgtcagtctggtccctgcagttgtatttgtaataatacacattggagcaatttcatggccatcagttagagaatgtttgaggaatgatccattcatatcaagaaggacatttcaaagat

SEQ ID NO: 622390 - DNA, 120 bp, Artificial Sequence
  ENSG00000178104_91 (sequence is synthesized)
caaagcctgatggaaatgctggagaccatggagctgataggagctcatgcgtgttgaccaattactacgtgacaggcattggctccacgcttttcctgcactgctcatttaaacactgga

SEQ ID NO: 622391 - DNA, 120 bp, Artificial Sequence
  ENSG00000178104_92 (sequence is synthesized)
caacctaagtgttctgatttagcccattggacagatagaaatggaggcacagaagattcatgtgtttaacttcaaaccctggcagattaggtttttcatccagagcctgtggcttcacca

SEQ ID NO: 622392 - DNA, 120 bp, Artificial Sequence
  ENSG00000178104_93 (sequence is synthesized)
acagttgggcctgggaggctccaggagggtgacagcagagtcctggcttggagtcgggttacaccacttgtgtctgagttcacgcagcatgttcctctgtcagggattccgcaaatatct

SEQ ID NO: 622393 - DNA, 120 bp, Artificial Sequence
  ENSG00000178104_94 (sequence is synthesized)
aggactgacagtaggagcttcactatttctaagactttatgggcccacaaccgaagacattcttttcagggttgaattttcagtggtatccattatgaaaactcacttcatggattcagt

SEQ ID NO: 622394 - DNA, 120 bp, Artificial Sequence
  ENSG00000178104_95 (sequence is synthesized)
gggcaaatagcggcaagcaagagacatagattcacttattcagcaaacatttactgggcatgccacatgccagataccgggctaagtatctggcatgtgttacagaaacaaaagacctaa

SEQ ID NO: 622395 - DNA, 120 bp, Artificial Sequence
  ENSG00000178104_96 (sequence is synthesized)
ttcttgtcaccaagaaacatgttacatgattttaataagttccctgatagaagagcatggggtgctctggggaaatattggagggtcatccattccacattaaaagagcaagttgtctgc

SEQ ID NO: 622396 - DNA, 120 bp, Artificial Sequence
  ENSG00000178104_97 (sequence is synthesized)
gtcaccagcaagtaagtcagtgtcagggtctgggacttccagggtggacagcacacagcccttctgaggtctgatagtctcctgcagcccttgcggacttagtgagaagatatcttttta

SEQ ID NO: 622397 - DNA, 120 bp, Artificial Sequence
  ENSG00000178104_98 (sequence is synthesized)
cataaactacttctcagtcatcttcctgttctccttgaacttcccagctgcctttccaacccatatcttcactccatttttctctccaatccaccctttggtttgtattgtatctctttc

SEQ ID NO: 622398 - DNA, 120 bp, Artificial Sequence
  ENSG00000178104_99 (sequence is synthesized)
ttctgcttccttccccctcctacccacctttgcccctatttattctctgtagctatagcttcagaagcatttttacttgcaagacgatggacacattccccttgggctttttgtaactga

SEQ ID NO: 622399 - DNA, 120 bp, Artificial Sequence
  ENSG00000178104_100 (sequence is synthesized)
aacgcaccacagaagacagggagtcatcgaagggctgctcggggaggtggcagggcggaggacctgcttgggaagaaactccaagaagattggaatgcttccaaagcaagaatctttctc

SEQ ID NO: 622400 - DNA, 120 bp, Artificial Sequence
  ENSG00000178104_101 (sequence is synthesized)
agtgaaatctcattatacaaagagaaccttatgcaacctgacaaaccactgaggtcatggtgactcagtgatcagcagatggtacttcaacagcaatcccctgtcaaacctcagaacttg

SEQ ID NO: 622401 - DNA, 120 bp, Artificial Sequence
  ENSG00000178104_102 (sequence is synthesized)
aggctgaaacattgcttccacccaccatcagtgaagatgtaactagcatgttacaagagtgaataatctggacttcagagattaagtcaccaatagtgatctcacaagcactcaccggaa

SEQ ID NO: 622402 - DNA, 120 bp, Artificial Sequence
  ENSG00000178104_103 (sequence is synthesized)
ctcctataatgtctccactttgtccatgccatttagcaatctcatctcctaaatggactgtgcctatgattcttaaggagaaagtgaatcattggtagatatcctgcacaagcagctgga

SEQ ID NO: 622403 - DNA, 120 bp, Artificial Sequence
  ENSG00000178104_104 (sequence is synthesized)
ctttccagtaatagctttcttggggctattaggaaaattaaacaagaaatgaggctttctgggtctgcctgtatgtcttctgcataagacaaagaagagacatcgaatcaaccaataaga

SEQ ID NO: 622404 - DNA, 120 bp, Artificial Sequence
  ENSG00000178104_105 (sequence is synthesized)
agagcccaaataagcatcctcaaatcttttgggatttggcacttggggacatgagtagttgtctgggatacgtcatattctcaacagtttctttgtagtagtaggatcaccttcttataa

SEQ ID NO: 622405 - DNA, 120 bp, Artificial Sequence
  ENSG00000178104_106 (sequence is synthesized)
taggatcaccttcttgttgctatagctgtacccgaccttcccttctcccttgagtgcttgcatgagctccacttttccttttgcttgaacagcttctcctgagtcctccttaccgatggt

SEQ ID NO: 622406 - DNA, 120 bp, Artificial Sequence
  ENSG00000178104_107 (sequence is synthesized)
tgtgactttaattatatacatctctgtccctccagacagatccctctgtcctcactctctgatttcattgaggatcttgggtgagagagagggacctgcaggatgaacaaatgtctactc

SEQ ID NO: 622407 - DNA, 120 bp, Artificial Sequence
  ENSG00000178104_108 (sequence is synthesized)
taagacagctagattgggaggttggctggtcactgatggttataatgactgtgggacaggattaacttcagaataaatgaacaggagacacagatatgaagaaagtttctgattgatatg

SEQ ID NO: 622408 - DNA, 120 bp, Artificial Sequence
  ENSG00000178104_109 (sequence is synthesized)
gtctgaagtactcctggtattgcaagtcatttgctctaattctcaattgtaggcaaactgatttgtaaatttgcttcttcagccttctttcctgtagcctagcatggagaatctgaccag

SEQ ID NO: 622409 - DNA, 120 bp, Artificial Sequence
  ENSG00000178104_110 (sequence is synthesized)
agacgcgaagccgctggcgccatcttgaaatctgatcctccatccccgaggctttgcgtctgcgcggccggccgctgctgctccgggagcccagtctgctaaaaggggaggacgttgagg

SEQ ID NO: 622410 - DNA, 120 bp, Artificial Sequence
  ENSG00000178104_111 (sequence is synthesized)
acgcggcggctggcgggagagacagctggggagagacatggcagggtcggagcgcggcctgcgcctctgtcactcagcatcctcttaggcgtttccacgcccgccccctgcccgaggggc

SEQ ID NO: 622411 - DNA, 120 bp, Artificial Sequence
  ENSG00000178104_112 (sequence is synthesized)
ggggctgacggctctggtacccggagtcggcgcgcggggcaggggcgcgcccctgcagagtggggaccccactgggctgtgccatgctgaccggagaccaccgaggcgggagacagagcg

SEQ ID NO: 622412 - DNA, 120 bp, Artificial Sequence
  ENSG00000178104_113 (sequence is synthesized)
cggcgaagagccattgagtggtcacccagtagccgccgccgccgccgcctcgggaagcttgccacccgctaggagggaagatgaaggagatttgcaggatctgtgcccgagagctgtgtg

SEQ ID NO: 622413 - DNA, 120 bp, Artificial Sequence
  ENSG00000178104_114 (sequence is synthesized)
gaaaccagcggcgctggatcttccacacggcgtccaagctcaatctccaggttctgctttcgcacgtcttgggcaaggatgtcccccgcgatggcaaagccgagttcgcttgcagcaagt

SEQ ID NO: 622414 - DNA, 120 bp, Artificial Sequence
  ENSG00000178104_115 (sequence is synthesized)
gtgctttcatgcttgatcgaatctatcgattcgacacagttattgcccggattgaagcgctttctattgagcgcttgcaaaagctgctactggagaaggatcgcctcaagttctgcattg

SEQ ID NO: 622415 - DNA, 120 bp, Artificial Sequence
  ENSG00000178104_116 (sequence is synthesized)
ccagtatgtatcggaagaataacgatgactctggcgcggagatcaaggcggggaatgggacggttgacatgtccgtcttacccgatgcgagatactctgcactgctccaggaggacttcg

SEQ ID NO: 622416 - DNA, 120 bp, Artificial Sequence
  ENSG00000178104_117 (sequence is synthesized)
cctattcagggtttgagtgctgggtggagaatgaggatcagatccaggagccacacagctgccatggttcagaaggccctggaaaccgacccaggagatgccgtggttgtgccgctttgc

SEQ ID NO: 622417 - DNA, 120 bp, Artificial Sequence
  ENSG00000178104_118 (sequence is synthesized)
gggttgctgattctgactatgaagccatttgtaaggtacctcgaaaggtggccagaagtatctcctgcggcccttctagcaggtggtcgaccagcatttgcactgaagaaccagcgttgt

SEQ ID NO: 622418 - DNA, 120 bp, Artificial Sequence
  ENSG00000178104_119 (sequence is synthesized)
ctgaggttgggccacccgacttagcaagcacaaaggtacccccagatggagaaagcatggaggaagagacgcctggttcctctgtggaatctttggatgcaagcgtccaggctagccctc

SEQ ID NO: 622419 - DNA, 120 bp, Artificial Sequence
  ENSG00000178104_120 (sequence is synthesized)
cacaacagaaagatgaggagactgagagaagtgcaaaggaacttggaaagtgtgactgttgttcagatgatcaggctccgcagcatgggtgtaatcacaagctggaattagctcttagca

SEQ ID NO: 622420 - DNA, 120 bp, Artificial Sequence
  ENSG00000178104_121 (sequence is synthesized)
tgattaaaggtcttgattataagcccatccagagcccccgagggagcaggcttccgattccagtgaaatccagcctacctggagccaagcctggccctagcatgacagatggagttagtt

SEQ ID NO: 622421 - DNA, 120 bp, Artificial Sequence
  ENSG00000178104_122 (sequence is synthesized)
ccggtttccttaacaggtctttgaaacccctttacaagacacctgtgagttatcccttggagctttcagacctgcaggagctgtgggatgatctctgtgaagattatttgccgctccggg

SEQ ID NO: 622422 - DNA, 120 bp, Artificial Sequence
  ENSG00000178104_123 (sequence is synthesized)
aaccagaaagatccttgtctgattttggcagaattaaacggtgacttactaatgatagaactggtacaagtagcatcaactacaaagtgaaactcactttagcctacatggatctcactg

SEQ ID NO: 622423 - DNA, 120 bp, Artificial Sequence
  ENSG00000178104_124 (sequence is synthesized)
tacatacatatcaatccctaaattgaatggtggaggttgcaaagtgtatttgcacattttaaatcattctgttttagtttttccacttttattcattcttatccctagccccttctcgtt

SEQ ID NO: 622424 - DNA, 120 bp, Artificial Sequence
  ENSG00000178104_125 (sequence is synthesized)
ccctcatcccttctgtgggccaataaagtttattcttccccaactttcacaatccatttcatatgttccatatcatatcataaatgcatgtgtgtgtattatttttgccattcagtcaac

SEQ ID NO: 622425 - DNA, 120 bp, Artificial Sequence
  ENSG00000178104_126 (sequence is synthesized)
tcctctttgagtgagagcattttttaaatcaaaagcatgcaagttttaagatgagagagcgggaaagagattgagagtctataagaatgactttgcaaaagtgatataatccttatcaga

SEQ ID NO: 622426 - DNA, 120 bp, Artificial Sequence
  ENSG00000178104_127 (sequence is synthesized)
aaagaacagaggcaagaactatgaaagtgatcatagtcaacttttatctccaatactgtctcagagttgactgttgtacacaagtgaaattagattaggtacagattaaattctacttaa

SEQ ID NO: 622427 - DNA, 120 bp, Artificial Sequence
  ENSG00000178104_128 (sequence is synthesized)
aatttgttctttattgattcctttaggtttctttaaaccaagctcatgctatttagtcagaacatgacttctagaatggtcttccagagtcagaattctctgtttacaaagataatttca

SEQ ID NO: 622428 - DNA, 120 bp, Artificial Sequence
  ENSG00000178104_129 (sequence is synthesized)
aatgtagtatccctctttacattcagtgtttcaccaaataactcattatagccagaagagggtattgcttctttcatttgtggcactagatagggtcctatgtttttcactatttagtat

SEQ ID NO: 622429 - DNA, 120 bp, Artificial Sequence
  ENSG00000178104_130 (sequence is synthesized)
gtatacatttctccatataacagtaataggcttcaggctttgaagtgctagaatagtttagaaagaaatgttacagatgtatgtttatagttttaatcattgcctcagtgctttcttgtg

SEQ ID NO: 622430 - DNA, 120 bp, Artificial Sequence
  ENSG00000178104_131 (sequence is synthesized)
gcagcgtgacaggtataaggagaggggcactggagattgtatttctgatgtcttgaatgtcaagtgtgaaaagtaaccaagattgctttgcagctttgtgagatcaacatcatgaatttg

SEQ ID NO: 622431 - DNA, 120 bp, Artificial Sequence
  ENSG00000178104_132 (sequence is synthesized)
ttttcatttcctctggttggaagtttcctaggttagaagctgaggtttcagttactttaaatatggaatttgggaacagggattgaggctttctagcacagtaaatgtgactgaataccc

SEQ ID NO: 622432 - DNA, 120 bp, Artificial Sequence
  ENSG00000178104_133 (sequence is synthesized)
tttctaaactaagtggggcacaatgattttttttccttccattttttttttacatgacactttatttctttcacatgttgacatggcttgtattacattctaaatttcatctgtttctgt

SEQ ID NO: 622433 - DNA, 120 bp, Artificial Sequence
  ENSG00000178104_134 (sequence is synthesized)
aactttagctgtgtctataacagatagagcatcagtcaaactagagtggacagggagaaaatgctctactggggaagcactctggaatcttctgattaagtcatttgcaaaagattaata

SEQ ID NO: 622434 - DNA, 120 bp, Artificial Sequence
  ENSG00000178104_135 (sequence is synthesized)
gccataagccttactcttaatggatctgccatttcagtttcaatggcttttgaggaaaaaggagtcatttaaggaaggagataggaagtgtaggccgatccatccacttttcttagtctc

SEQ ID NO: 622435 - DNA, 120 bp, Artificial Sequence
  ENSG00000178104_136 (sequence is synthesized)
ccaattttaagagaccctttcttgcacaaaattttttgtaactttccataagtaaagaggaaggtaatggagccgtagaaatgtcaacccatcaaagactagtttgtcgtgtcattacaa

SEQ ID NO: 622436 - DNA, 120 bp, Artificial Sequence
  ENSG00000178104_137 (sequence is synthesized)
caaggcatttagggaacatctttccttaattttactaatagaccaaccaaggaagccttctgaatcgctagtaagattcagctctgggtgattcttcatttctaatggctcatagtgatt

SEQ ID NO: 622437 - DNA, 120 bp, Artificial Sequence
  ENSG00000178104_138 (sequence is synthesized)
acagtttatgttaataatcactcctacttctgtcaacctccagcaagagtaaattgatagcaggataaattaaaagtctgatcttaatgtcataaatgtgactagaatatggtactaact

SEQ ID NO: 622438 - DNA, 120 bp, Artificial Sequence
  ENSG00000178104_139 (sequence is synthesized)
ttttcgggtctagatagctggaatgaggcttgcaaacagtgttatctggagagagcttgctggtctaacaactttgtgtgataatttggcatctgattagagagcatgagtctgataaat

SEQ ID NO: 622439 - DNA, 120 bp, Artificial Sequence
  ENSG00000178104_140 (sequence is synthesized)
tttataatccacacagagatcatgctgtggttggacacatcatttaataatatttagcatgatataatattccattttctctacaggagcacagactctttctcatactggattatttta

SEQ ID NO: 622440 - DNA, 120 bp, Artificial Sequence
  ENSG00000178104_141 (sequence is synthesized)
cctttgacagtcatttttcaatgacagtaattttaaataaagcatcgtgtgcttatagaacctgtgcttgagtaaaaatagtcttcaaataaaaataatgaagtaaatttttacttaggc

SEQ ID NO: 622441 - DNA, 120 bp, Artificial Sequence
  ENSG00000178104_142 (sequence is synthesized)
catgcttaattggaagcatagaacttaaattgagaaaaaaatccatatgatagattttgtttttctcatgcttcccttttgaataatagcaaataatgcagagtaatggttctaagagtt

SEQ ID NO: 622442 - DNA, 120 bp, Artificial Sequence
  ENSG00000178104_143 (sequence is synthesized)
cagggtagatgaagtctgtaggttttagaagtatagagttgaaaagaacctccaagaggacttatttaatgagtgaaataaatgtccttagatagatattgtccctaaactcttttctat

SEQ ID NO: 622443 - DNA, 120 bp, Artificial Sequence
  ENSG00000178104_144 (sequence is synthesized)
tgaaagtttatagtattgaaaatttgatgattattagtacctagtataaatcaacattcatctgatgttctctttttagatagccaagttataacttttttgaaaagacattattggact

SEQ ID NO: 622444 - DNA, 120 bp, Artificial Sequence
  ENSG00000178104_145 (sequence is synthesized)
aagttagtaggtcagccttttcctttgatagtgtgtactcttatctgtcacccaaccttctccacaccctcttctcttcattcagttgtggacagcagtaattttttcaggacctttgct

SEQ ID NO: 622445 - DNA, 120 bp, Artificial Sequence
  ENSG00000178104_146 (sequence is synthesized)
tcttagaggaaatacatttttccttatttatatttttaaaagatgtttctattacattatatatagcaagagatctattaaggatccagaaaatcttaacctgtagaggatatgagttcc

SEQ ID NO: 622446 - DNA, 120 bp, Artificial Sequence
  ENSG00000178104_147 (sequence is synthesized)
tcatcataagaattagtttccttgagggttctttagtatattctatttacacagtttatgcataagtaaactctgtggccgatgtacataaaaaaacctatcacttttatgctcattcat

SEQ ID NO: 622447 - DNA, 120 bp, Artificial Sequence
  ENSG00000178104_148 (sequence is synthesized)
cctcctaattcagtgtctgggtcatgagatgtttggttcatagcttcaaaaactgttcaagaagactgatttcagttctctctatgttgatcttccagttgaatctggagtcttctgatt

SEQ ID NO: 622448 - DNA, 120 bp, Artificial Sequence
  ENSG00000178104_149 (sequence is synthesized)
gtggaaaggagtagcagatcacattatactgaaaattgtccttttcattgagaaataaaggttgactgagctacctaaagtcactttcctttggactgtaagccttagagagaacaataa

SEQ ID NO: 622449 - DNA, 120 bp, Artificial Sequence
  ENSG00000178104_150 (sequence is synthesized)
tacctttgcttttcttgaggtagtattagaaaactctagttcccattgataggataaacttgttttctcgtttcatggtctttttatagaaaacagtcacaaaatcttgacatttggcat

SEQ ID NO: 622450 - DNA, 120 bp, Artificial Sequence
  ENSG00000178104_151 (sequence is synthesized)
ccctgaaaagctcaagtggccttttcaagtagggtatcatgtagtattctgcaggtttacagtcagtatcctgcaaggaaaggtgacaaacttcctgtgaagttaggaagaaatattagt

SEQ ID NO: 622451 - DNA, 120 bp, Artificial Sequence
  ENSG00000178104_152 (sequence is synthesized)
aacccacacacttgaagtgagttttccattttaccttgtagaaattgtactagagatagaacaaatgaaattagttttcttttccaggtatatcctgtgagataccagcacagagtattt

SEQ ID NO: 622452 - DNA, 120 bp, Artificial Sequence
  ENSG00000178104_153 (sequence is synthesized)
tctctgagttctctcagggttaaagctcagtgagcttttcttttctctttggtagtgtggaaccatttgtaccgtagaaagaatagctggaaatatggaactccaatgtggcaatacagt

SEQ ID NO: 622453 - DNA, 120 bp, Artificial Sequence
  ENSG00000178104_154 (sequence is synthesized)
aataaacagaaggaatgagtcagtaggataatatattcgagtgatttctgtatatttcagttataatgttttttatatagtgtatatttcagttatttcagttataatgtgttttagaat

SEQ ID NO: 622454 - DNA, 120 bp, Artificial Sequence
  ENSG00000178104_155 (sequence is synthesized)
gtggatttaagccaccttctcaccctttgcaccagtagctttgttaaaacattttattatgatcaaataacaagcctgttgcttttaagtaatctaagtattaacagaaggtaagtcttc

SEQ ID NO: 622455 - DNA, 120 bp, Artificial Sequence
  ENSG00000178104_156 (sequence is synthesized)
aacttctccctgttctcacctgggccaagatcaattttctaaataaaaaatagctttgtaatttgtctccaacaaagaatgggaaatggaagggaacacaaaactgtggtcctgacaata

SEQ ID NO: 622456 - DNA, 120 bp, Artificial Sequence
  ENSG00000178104_157 (sequence is synthesized)
ctaattctacccgttttcaaataagaataattaaacttataaagtgatatactgattatttttgtgttactctcccttttttttgtttaaagtcaaattccagaagtaaaaatctttatc

SEQ ID NO: 622457 - DNA, 120 bp, Artificial Sequence
  ENSG00000178104_158 (sequence is synthesized)
atactgttttcctcttactaaaactggaagggtaaaatagaaagttcagcaacatcagaaaatgttgtatttaaaataatatggagaataggggttttaagtacataaaccatattggct

SEQ ID NO: 622458 - DNA, 120 bp, Artificial Sequence
  ENSG00000178104_159 (sequence is synthesized)
tccttgtaggtttacttttagtatataacatgaatatgtagtgcttctttttacaataatcaaagtcatagctccaagatattgacctctttctcaatctataacctttgtaggcatgca

SEQ ID NO: 622459 - DNA, 120 bp, Artificial Sequence
  ENSG00000178104_160 (sequence is synthesized)
tttataccagcatgttttataaattatgagtttctatctgtgtccatgaagtcttactagttttcacttaaacttttgtgggttgttaagaagaattaaagtgattcataacttcacgct

SEQ ID NO: 622460 - DNA, 74 bp, Artificial Sequence
  ENSG00000178104_161 (sequence is synthesized)
taaataaataaagtggttcataacatcagatgaagaaggaggtgagtgatatgttaaatgatcagaaacttggc

SEQ ID NO: 622461 - DNA, 120 bp, Artificial Sequence
  ENSG00000178104_162 (sequence is synthesized)
gaaggaggtgagtgatatgttaaatgatcagaaacttggcattacattatttccaggaccatttccctaccaaagctgtgtatttttcatttcttcatggcactgtgctgttaatttctg

SEQ ID NO: 622462 - DNA, 120 bp, Artificial Sequence
  ENSG00000178104_163 (sequence is synthesized)
ttaacatttgtgctaaaatggagtgtaatttttacatataagtgttagaattttagctatcttagttgaaacacaaaaagttgttactgatccaataaaattatcaaaggccaacagaaa

SEQ ID NO: 622463 - DNA, 120 bp, Artificial Sequence
  ENSG00000178104_164 (sequence is synthesized)
ggatccttgagggcactggtgcgactttcaggtgaggtcttagcagatgaaagcggctggctgtggcccgcgccagtagtgctttctgctccgcactcgccgtgagccaggtgtgcaacc

SEQ ID NO: 622464 - DNA, 120 bp, Artificial Sequence
  ENSG00000178104_165 (sequence is synthesized)
ttggaggagccaactagcatggaagtgcaggtaaggtttggtcagtacatccagaagcacttgcttcatgctttcataagccctgctttttaatatctaagtgtatttgttatctattgt

SEQ ID NO: 622465 - DNA, 120 bp, Artificial Sequence
  ENSG00000178104_166 (sequence is synthesized)
tgtgtaacagattactacaaacttagcagtttaaaacaccttatttttgttatctcacagtttctgtgagtcaagagtccagatatggcttagctgagatctgtttggagtctcataagt

SEQ ID NO: 622466 - DNA, 120 bp, Artificial Sequence
  ENSG00000178104_167 (sequence is synthesized)
gtgaaatcaagatgtagactgggctcttttctcatctggaggcatacctagggaaggatcggcttctaagctcctcaggctgttggaaggatttattgctgtgtagctgtagaagttatg

SEQ ID NO: 622467 - DNA, 120 bp, Artificial Sequence
  ENSG00000178104_168 (sequence is synthesized)
gcagcttccttcttcatagccagcagcagaaagagtctgttacttttctcacttctagactttcttttaaggggctcattagggcaggcccaccagcataatatcccttttcgttaactt

SEQ ID NO: 622468 - DNA, 120 bp, Artificial Sequence
  ENSG00000178104_169 (sequence is synthesized)
aaaatcaactgattagcagccctaattacatctatatgacctctttacttttttcatataacatagcataactatgcagtgacatttcatgacctttgccatattggttagaagttacag

SEQ ID NO: 622469 - DNA, 120 bp, Artificial Sequence
  ENSG00000178104_170 (sequence is synthesized)
acaggcagtcttcccgatgccccacttgtgctgcagatgagcagtgaccaggggggcttggggatgttgggagttgagactgatttgatgtccccaaacctcctgtaccaggagcaattg

SEQ ID NO: 622470 - DNA, 120 bp, Artificial Sequence
  ENSG00000178104_171 (sequence is synthesized)
gccatccctggaatccctcactgattcagctggagtatggaggagcttaagttctaaagacctattcacttcctttaattccacctatacttcacaactgagaataccacaaacagttgg

SEQ ID NO: 622471 - DNA, 120 bp, Artificial Sequence
  ENSG00000178104_172 (sequence is synthesized)
gccctagaagaaagaagagctcacagatcttgcacttctaggtctgaattgtccaagtgaagaacgctaatttactccacatcccacagataactatctctcaagtgatcccagtatgaa

SEQ ID NO: 622472 - DNA, 120 bp, Artificial Sequence
  ENSG00000178104_173 (sequence is synthesized)
agtctggagtatgagtataatatactcactgtaatatctgagtacaggaagttcacttcagagtcttcattctctcaaataagacagacacttttgataaagattattttatttaattga

SEQ ID NO: 622473 - DNA, 120 bp, Artificial Sequence
  ENSG00000178104_174 (sequence is synthesized)
atgctctataggtgcatgtgtgtaacttaagccgcagggaagtttcagactggatgtgtgccagctcagtgccatccccaggccacacacagaaatggtgacatctccatcacagatggg

SEQ ID NO: 622474 - DNA, 120 bp, Artificial Sequence
  ENSG00000178104_175 (sequence is synthesized)
ttgcatgagactcagatgatagtggggtccttggcagaaaagaatgtcacagaggagggttctgacaagtgcttggaaatacttgggtcaatgttaccagactccttctctctcagctta

SEQ ID NO: 622475 - DNA, 120 bp, Artificial Sequence
  ENSG00000178104_176 (sequence is synthesized)
agaacccaggcggggcggggccgggaaaggtgaggctgctggcgggaagcgggggcggcgcgcagcggtacctagcggcgctgccccgctggcagccggaggacgtggcactgtccgaga

SEQ ID NO: 622476 - DNA, 120 bp, Artificial Sequence
  ENSG00000178104_177 (sequence is synthesized)
atgcagggaggggattcgtctttctcctccccgcgaggaggagcctcgacatcctgcagaggcgggaggatccttgagggcactggtgcgactttcagcccatgactgaagagttgctga

SEQ ID NO: 622477 - DNA, 120 bp, Artificial Sequence
  ENSG00000178104_178 (sequence is synthesized)
tgcctacccaaaccctaggcccagccgactttggaggtctccagttgaaccttcaccttttactggaatggagcagtctctgcaagaggggttggtggaagtaggaagcaaaaaaattga

SEQ ID NO: 622478 - DNA, 120 bp, Artificial Sequence
  ENSG00000178104_179 (sequence is synthesized)
gaaaagaaacagtaagaagaggaagttcttgcagggagaattgtttttcaagagagctatatttttattttgaacagcatccatttgtttgataaatatatcattatcttctgtgtgtgg

SEQ ID NO: 622479 - DNA, 120 bp, Artificial Sequence
  ENSG00000178104_180 (sequence is synthesized)
caactgagtcatgtttccagagcgagaagatttgagaggaaaggtcactgctgggggacgataacaaaagttaacagataagaaagagggcagaactactgagctaccattgcatgcttg

SEQ ID NO: 622480 - DNA, 120 bp, Artificial Sequence
  ENSG00000178104_181 (sequence is synthesized)
cctaaatgttccctctgctattcctgatttttgtgtgtcagtggggtggggggaggggcgctttgagcagaagaaaggacttctctgggaatgccttgtcactcccaagttgagagagta

SEQ ID NO: 622481 - DNA, 120 bp, Artificial Sequence
  ENSG00000178104_182 (sequence is synthesized)
aaactctgttatagaagtcttcagtatatcagagacatgaaaaagaagggttcccatgcttccaattagatataggacattagtctcaccatcacctaggaagcttctatactggctgtg

SEQ ID NO: 622482 - DNA, 120 bp, Artificial Sequence
  ENSG00000178104_183 (sequence is synthesized)
atgcttggtcccagcataagccctgtaactgcttgtcagaatgcaaagagcactgtaggaacagtaaggagactgtgctggtgtgtctgttctgctctgaactaatgtaggtaatggtgt

SEQ ID NO: 622483 - DNA, 120 bp, Artificial Sequence
  ENSG00000178104_184 (sequence is synthesized)
gttttcaagcaaagttacttgacctccctcagcctccatttccatatctgcgaaataaaagtgatagtcttcatgaccccctgagttgacatctggggctcagatgtaaccctaactgta

SEQ ID NO: 622484 - DNA, 120 bp, Artificial Sequence
  ENSG00000178104_185 (sequence is synthesized)
tcccctcaccccatgagctttttgcccttgcataggatgctagtgaggtctttcctttgggagttgtggagatcatgggaagctacagagttctgttgcagaaacccccacccgagcctg

SEQ ID NO: 622485 - DNA, 120 bp, Artificial Sequence
  ENSG00000178104_186 (sequence is synthesized)
gggctcccagtaggagctctcaaacacaaagcccaacgggacaggttggtggcacgagcaagatccggcctgatcattcctaattactttaagaaaatctagacattcctatcaatgtct

SEQ ID NO: 622486 - DNA, 120 bp, Artificial Sequence
  ENSG00000178104_187 (sequence is synthesized)
agattgtaacatttttgaaagcaaaagaactgtcctaatgatatcatcatttgaaaaggcctttaatattgtcggtgatacatactgacaacccattcagcccaatgcagcaggcagtcc

SEQ ID NO: 622487 - DNA, 120 bp, Artificial Sequence
  ENSG00000178104_188 (sequence is synthesized)
gctcccaccctgaccctttccctagtgacatctggcgctcagcttattgccctctcatgtaattttcataaatcctgatttagtttcctgattttctaaagagaaggtgaactggaattt

SEQ ID NO: 622488 - DNA, 120 bp, Artificial Sequence
  ENSG00000178104_189 (sequence is synthesized)
gaagaaatacaggggcttaccaggctgggcgaatagcttaagtacaaagtcatggtgagtgttgagtcagtggggaccagcctgcccacaggagaaaattaaaagacacaaaaacaaaaa

SEQ ID NO: 622489 - DNA, 120 bp, Artificial Sequence
  ENSG00000178104_190 (sequence is synthesized)
cattgcagttacggcatgtgatgatgcacgcaaagaatccactgagaagaggcacacagaaaacatgtacccagccccccacgcttcattcagggccaggccttcagtccttggggtttt

SEQ ID NO: 622490 - DNA, 120 bp, Artificial Sequence
  ENSG00000178104_191 (sequence is synthesized)
ctgctgggttggggcagtatctttgagagataacgaatgggaaacttttgaaagtttctgttacccaaatgtctactttctgggacaggatccacttctaacttctacagtcagggcctg

SEQ ID NO: 622491 - DNA, 120 bp, Artificial Sequence
  ENSG00000178104_192 (sequence is synthesized)
taatggaagaagactgtgagctagcttaaaaaagagagaatgaaggggaagaaacaaaacccctgtgtggcagagtgtcgagatgagatgagcatttatttgtctccgtcgaattcctta

SEQ ID NO: 622492 - DNA, 120 bp, Artificial Sequence
  ENSG00000178104_193 (sequence is synthesized)
gagagcaatagatttggaaccaaattccttaacctatctgtggcatttgaatcctgtatctgattcaggaactgaaacaatagattttcatatgctgtgtttcccttgggctctttctct

SEQ ID NO: 622493 - DNA, 120 bp, Artificial Sequence
  ENSG00000178104_194 (sequence is synthesized)
attactaggtcagatggaccttgtcataagttggtaaatccaccagacctaagactgcaaacttcctatcagtcagcaatcaactaaattgaaacagtgaatgtttccacttttagtaga

SEQ ID NO: 622494 - DNA, 120 bp, Artificial Sequence
  ENSG00000178104_195 (sequence is synthesized)
gacaaatgcaaataagctttatcaaaaagtatcagtcagcctataataacatcaagagctgagataacatttggggaaaatgggcactctcatacactaccagtgagtgtaaattgtgac

SEQ ID NO: 622495 - DNA, 120 bp, Artificial Sequence
  ENSG00000178104_196 (sequence is synthesized)
aacatttttagtatgggatgctacctattataataaaaaaggaggatttcctttgatcaaacaatcccgagaaggaatctgtttcttataaataaaagcgttagtgtgaaaggataaatg

SEQ ID NO: 622496 - DNA, 120 bp, Artificial Sequence
  ENSG00000178104_197 (sequence is synthesized)
tataaggatgtttattgcatcattagttgtaatggcaaaaaactagaaacaattatccatcaatagggcattgattgaataaattttggtattactacactgtggactattatgcagtta

SEQ ID NO: 622497 - DNA, 120 bp, Artificial Sequence
  ENSG00000178104_198 (sequence is synthesized)
ttgaagaatgagttagctctatattattgtcctagtgggaattccttgattaaagtaagggggaaaagttgctgagtgatatttatagtatactgaggaagagtgagatcacagtccgtg

SEQ ID NO: 622498 - DNA, 120 bp, Artificial Sequence
  ENSG00000178104_199 (sequence is synthesized)
cgtgatagggagaagacttgatatttttctttatatacatttatattgctaaaatggttacttttataatttacagttttttaaaagcttagtgttaaatgacaagtattactaaaatta

SEQ ID NO: 622499 - DNA, 120 bp, Artificial Sequence
  ENSG00000178104_200 (sequence is synthesized)
aaatgacaagtattactaaaattattaaaaatattttcagacttcaataaagtttcagaatacaaaaattaatgtacaaaaatcagtagcatttcaccaggcatggtggctcacgcctgt

SEQ ID NO: 622500 - DNA, 63 bp, Artificial Sequence
  ENSG00000178104_201 (sequence is synthesized)
agcatttctatctgctaaaaaaaaaaaaaaataccttggaatacatctaaccaaggaggtgaa

SEQ ID NO: 622501 - DNA, 120 bp, Artificial Sequence
  ENSG00000178104_202 (sequence is synthesized)
ttcaaactatactacaaggctacagttgccaaaacagcatgttgctggaaaaaaaaaaagacacatagaccaatggaagcaaatagagaacccaaaaataaagctacacacctacagcaa

SEQ ID NO: 622502 - DNA, 120 bp, Artificial Sequence
  ENSG00000178104_203 (sequence is synthesized)
tacacacctacagcaatctgatcttcgacaaaatcaacaaaaataagcagtggggaaagcactcccctattcgatggtggtgggatagataactggctagccatatgcaaaagaatgaaa

SEQ ID NO: 622503 - DNA, 120 bp, Artificial Sequence
  ENSG00000178104_204 (sequence is synthesized)
tgggatagataactggctagccatatgcaaaagaatgaaactgggcccctacctttcagcacatataaaaattaactcaagatggagtaaagatgtaaatgtaagacctcaaactataag

SEQ ID NO: 622504 - DNA, 73 bp, Artificial Sequence
  ENSG00000178104_205 (sequence is synthesized)
tggacattggcctcagagacaagtcggatttatttaaactaaagagttttgcacagcaaaagaaactatcaac

SEQ ID NO: 622505 - DNA, 120 bp, Artificial Sequence
  ENSG00000178104_206 (sequence is synthesized)
cagacaacctgtagaatctaaaaaaatttgcaactagcatctgaaaagggtctaatatccagaatccataaggaatttaacaattgaacaatgaaaaacaaataaccccattaaaaaaat

SEQ ID NO: 622506 - DNA, 120 bp, Artificial Sequence
  ENSG00000178104_207 (sequence is synthesized)
aaatgagcaaaaggcatgatcaaacacttttcaaaagaagacatacaaatgcccaccaaatatatgaaaaattgctccacatcactaatcatcagagaaatataaatcaaaaccacaatg

SEQ ID NO: 622507 - DNA, 120 bp, Artificial Sequence
  ENSG00000178104_208 (sequence is synthesized)
acaccagtcagaatggctactattaaaacgtctaaaaacaacagatgccggtgaggctgcatagaaatgggaatgcttacacgctgttggtggaaatataaaccagttcagtcactgcag

SEQ ID NO: 622508 - DNA, 120 bp, Artificial Sequence
  ENSG00000178104_209 (sequence is synthesized)
cactgcagaaagcagtttggagatttatcaaagaacaaccttaatggttccacttgctaaactgtatgtctggctctgattggctaatgctctgtggttttagggctgatgtggagaatc

SEQ ID NO: 622509 - DNA, 120 bp, Artificial Sequence
  ENSG00000178104_210 (sequence is synthesized)
ttccttaaggagatgtcctgttctttctttcccaccagaactgccctggcccagaccccatttctgtctggtgaccaggacagtcccctcaccagtctcccaggttggggagggcagatt

SEQ ID NO: 622510 - DNA, 120 bp, Artificial Sequence
  ENSG00000178104_211 (sequence is synthesized)
aaacttatctgaggttggaaataaagagaaggtgacattggagcggatagaaaggaagaaacggcgtgggatctgggaatgaggcagtgggtggagagagaatggggagacgacagagga

SEQ ID NO: 622511 - DNA, 120 bp, Artificial Sequence
  ENSG00000178104_212 (sequence is synthesized)
tgaagggcagctgagtgtgtctgcgggagaaggaccaaagcaatctgggcggagcaggtggcagaggcagccgcggaggaggcccagggaactgacggggatgctcagccaggcccagag

SEQ ID NO: 622512 - DNA, 120 bp, Artificial Sequence
  ENSG00000178104_213 (sequence is synthesized)
ggagagtttgcatggtaatcaagaggcttttgaagactaaacctccgaacagctgtgtggtgctggtgggggaagcaaggatgctaacaccccaaccccctcctttttttgttttttttt

SEQ ID NO: 622513 - DNA, 120 bp, Artificial Sequence
  ENSG00000178104_214 (sequence is synthesized)
tttcaccttttggatctgctgtgatgcagaaagggcaagcagagctgcagagctcctcaaaactgtgtggggtgctctccaaaggccagccagcctgcatgttccttttcattgagagat

SEQ ID NO: 622514 - DNA, 120 bp, Artificial Sequence
  ENSG00000178104_215 (sequence is synthesized)
gactggaaatatagaagtgaggggtgtcacctccattgaaagaatgggtggcagatataaggcccaaagtccttttcttttagagtttagatctaatatgacagattagtccttatttct

SEQ ID NO: 622515 - DNA, 120 bp, Artificial Sequence
  ENSG00000178104_216 (sequence is synthesized)
cgatgctgggaaacactgacagaaaccaagctaagacgcagggaaaaggccaataagagatagtttaaatctctctctgctatgtgtcaaataaaaagtaaataaagaggctacaaccca

SEQ ID NO: 622516 - DNA, 120 bp, Artificial Sequence
  ENSG00000178105_0 (sequence is synthesized)
gcgtttgtcccatgctggttccgtgagtctggccttaggtgtctcgtgtctggggttgatccgagctgtcgccgccgccgccgcaatgggcaaaacggccaactctccgggttcgggagc

SEQ ID NO: 622517 - DNA, 120 bp, Artificial Sequence
  ENSG00000178105_1 (sequence is synthesized)
ccgacccgacccggtgcggagcttcaatcgctggaagaaaaaacacagccataggcagaacaaaaagaagcagttgaggaagcaactgaagaaacccgaatggcaggtcgagcgcgagag

SEQ ID NO: 622518 - DNA, 120 bp, Artificial Sequence
  ENSG00000178105_2 (sequence is synthesized)
tatcagccgcctcatgcagaactatgaaaagataaatgtaaatgaaatcacaagattttcagattttcccttgtccaaaaaaacattgaaaggtttgcaagaagctcagtaccgtttggt

SEQ ID NO: 622519 - DNA, 120 bp, Artificial Sequence
  ENSG00000178105_3 (sequence is synthesized)
gactgagatacagaagcagaccattggattggctttgcaaggtaaagatgtacttggagcggccaaaactggatctggcaagactctggcttttcttgttccagtgctggaagccttata

SEQ ID NO: 622520 - DNA, 120 bp, Artificial Sequence
  ENSG00000178105_4 (sequence is synthesized)
tcgtctgcaatggacttcaacagatgggctgggggttctcataatatcacctacgagagaactggcctatcagacctttgaggttctccgaaaagtaggaaagaatcatgacttctcagc

SEQ ID NO: 622521 - DNA, 120 bp, Artificial Sequence
  ENSG00000178105_5 (sequence is synthesized)
tggtctcatcattggtggaaaggatctaaaacacgaagctgagaggatcaacaacataaatatactcgtgtgcacaccaggtcggcttcttcaacacatggatgaaacagtatcttttca

SEQ ID NO: 622522 - DNA, 120 bp, Artificial Sequence
  ENSG00000178105_6 (sequence is synthesized)
tgctaccgacctccaaatgttagttcttgatgaagcagatagaatcttggatatgggctttgctgataccatgaatgctgttattgaaaatctccccaagaaacgtcagactttactttt

SEQ ID NO: 622523 - DNA, 120 bp, Artificial Sequence
  ENSG00000178105_7 (sequence is synthesized)
ctcagcaacacaaactaaatctgtaaaggaccttgcacgcttgagtttgaaaaaccctgagtatgtctgggttcatgaaaaagcaaaatatagcacccctgccactttggaacagaacta

SEQ ID NO: 622524 - DNA, 120 bp, Artificial Sequence
  ENSG00000178105_8 (sequence is synthesized)
catagtctgtgagctgcagcaaaaaataagtgtgctgtattcctttttgagaagccatctgaagaagaagagcattgtatttttttccagttgcaaagaggtccagtatctgtaccgagt

SEQ ID NO: 622525 - DNA, 120 bp, Artificial Sequence
  ENSG00000178105_9 (sequence is synthesized)
gttttgccggctacgtcctggtgtttctatccttgcactccatggtcgacagcagcaaatgagaagaatggaagtctataatgagtttgtccgtaagagagctgcagtactctttgctac

SEQ ID NO: 622526 - DNA, 120 bp, Artificial Sequence
  ENSG00000178105_10 (sequence is synthesized)
tgatattgcagccaggggtctggatttcccggccgtgaattgggttcttcagtttgattgtcctgaggatgccaacacatatattcacagagcaggtagaactgccaggtacaaagagga

SEQ ID NO: 622527 - DNA, 120 bp, Artificial Sequence
  ENSG00000178105_11 (sequence is synthesized)
tggtgaagctttgctaattttgctaccctcagaaaaagctatggtgcagcagcttcttcagaagaaagtacctgtgaaggaaatcaaaatcaatccagaaaaacttatagatgtccagaa

SEQ ID NO: 622528 - DNA, 120 bp, Artificial Sequence
  ENSG00000178105_12 (sequence is synthesized)
aaaattggaatctattttagctcaagatcaagatttaaaagaaagagctcaaaggtgtttcgtctcctatgtacgatctgtatatctgatgaaggataaagaagtatttgatgtgagcaa

SEQ ID NO: 622529 - DNA, 120 bp, Artificial Sequence
  ENSG00000178105_13 (sequence is synthesized)
gtaaggagccaagccgataaagtaattgagccaagggctccctccctcaccaatgacgaagtggaagaatttagagcctacttcaatgagaaaatgtccatccttcaaaaaggtggaaaa

SEQ ID NO: 622530 - DNA, 120 bp, Artificial Sequence
  ENSG00000178105_14 (sequence is synthesized)
agactcgaagggacagagcacagacaggataatgatactggtaatgaagaacaggaagaagaagaagacgatgaagaagaaatggaagagaaactggcaaaagcaaaaggatctcaagcc

SEQ ID NO: 622531 - DNA, 120 bp, Artificial Sequence
  ENSG00000178105_15 (sequence is synthesized)
ccatctcttcctaacaccagtgaggcacagaagatcaaggaagttcctacacagttcttggacagagatgaggaggaagaagatgctgatttcttgaaggtgaagcggcataatgtgttt

SEQ ID NO: 622532 - DNA, 120 bp, Artificial Sequence
  ENSG00000178105_16 (sequence is synthesized)
ggattggaccttaaagacgagaaaacattacagaagaaagaaccttctaaatccagcatcaagaaaaaaatgaccaaagttgcagaagcaaaaaaagtaatgaagagaaattttaaagtg

SEQ ID NO: 622533 - DNA, 120 bp, Artificial Sequence
  ENSG00000178105_17 (sequence is synthesized)
aataagaagataacatttactgatgaaggggagttggttcagcagtggccacaaatgcagaaatctgccatcaaggatgctgaggaagatgatgacacaggtggtatcaacttacataaa

SEQ ID NO: 622534 - DNA, 120 bp, Artificial Sequence
  ENSG00000178105_18 (sequence is synthesized)
gcaaaggaaagacttcaggaagaggacaaatttgacaaagaagaatataggaaaaaaattaaggcaaagcatcgggagaaaagactgaaagaaagggaagccagaagagaagccaacaag

SEQ ID NO: 622535 - DNA, 120 bp, Artificial Sequence
  ENSG00000178105_19 (sequence is synthesized)
agacaagcaaaggccaaagatgaagaggaagcctttctggattggagtgatgatgatgatgatgatgatgatggatttgatccaagcacactcccagatccagataaatacagaagctct

SEQ ID NO: 622536 - DNA, 120 bp, Artificial Sequence
  ENSG00000178105_20 (sequence is synthesized)
gaagattcagatagtgaagatatggaaaataaaataagtgataccaagaagaagcaggggatgaagaagaggagcaacagtgaagtggaagacgtgggaccaacaagtcataacagaaag

SEQ ID NO: 622537 - DNA, 120 bp, Artificial Sequence
  ENSG00000178105_21 (sequence is synthesized)
aaggccaggtgggacactttagagcctttggataccggcctgtctttagcagaggatgaagagctggtgttacatctgctaagaagtcaaagctaaatacttcctgcgcctgccttctcc

SEQ ID NO: 622538 - DNA, 120 bp, Artificial Sequence
  ENSG00000178105_22 (sequence is synthesized)
ttgaaaccttggttatgactgcgtaggcaagaagttgaaaaacagttgatttgggggcacttaggtaccatatgccccattcccaaagggcacatttctggatagaagcgatcgtatctc

SEQ ID NO: 622539 - DNA, 120 bp, Artificial Sequence
  ENSG00000178105_23 (sequence is synthesized)
caagtccctctcacaggacatgctttgtgccatcactgagcatactcagatcgagggtggatgataccatttcctgaccccgttttccagcatgtgttctgttagatttttatccatggg

SEQ ID NO: 622540 - DNA, 120 bp, Artificial Sequence
  ENSG00000178105_24 (sequence is synthesized)
ttcctacgccttgtcattggaaacactgcctttgtcttactggcaagttctggagctcttgtgtcattgttagaaatccctgtcttgcttactgtacagaagtttctgttgctgttaaaa

SEQ ID NO: 622541 - DNA, 120 bp, Artificial Sequence
  ENSG00000178105_25 (sequence is synthesized)
ttgctcatgatttcgacgtatttaatattttcaaagagactatgatggaccagccctgagaaagaatgagtatttttgaattgagatgatcaataataaacatatttcctataaaagaaa

SEQ ID NO: 622542 - DNA, 120 bp, Artificial Sequence
  ENSG00000178105_26 (sequence is synthesized)
ctctcacatcagtcttttaatgaatccaaaagacattactaagagttctactccaagagatgtttgttgcttttttttgatacctttacttagattcctggaaatcctgctgctgttttt

SEQ ID NO: 622543 - DNA, 120 bp, Artificial Sequence
  ENSG00000178105_27 (sequence is synthesized)
ttactcattttgctgcagattgttctggtcatgttagggcctttttgattatttctataatccctattaatagatatgagtatgatatatgagttgtgtttttcctttctctattctttt

SEQ ID NO: 622544 - DNA, 120 bp, Artificial Sequence
  ENSG00000178105_28 (sequence is synthesized)
tttttttttcttatctttctctgagtcctttatgcctaagtatttgatgcactaaaatctgttctctgcaaacagagttagggttttattttttttcattgtcagagaactctattaaag

SEQ ID NO: 622545 - DNA, 120 bp, Artificial Sequence
  ENSG00000178105_29 (sequence is synthesized)
atactgctaaaaattgtccttgaattttaaaacgtggacattattcttccacattcttttatatggaattaaataacaaaatactggtggggctgggcgctgtggctcatgcctgtaatc

SEQ ID NO: 622546 - DNA, 120 bp, Artificial Sequence
  ENSG00000178105_30 (sequence is synthesized)
gaagccaggagtttgagaccagcctgatcaacaaagtgagaccccaaatctacaaaaacaaatttttttttaataaataaaataatggaacacttgtacagaaacaactcttgacaaatt

SEQ ID NO: 622547 - DNA, 120 bp, Artificial Sequence
  ENSG00000178105_31 (sequence is synthesized)
atggaacacttgtacagaaacaactcttgacaaattccttcactttaaagtctatttgctattatttatttgctaccattggcagaaacaaatgaaacgtgatgaataataatatgactt

SEQ ID NO: 622548 - DNA, 120 bp, Artificial Sequence
  ENSG00000178105_32 (sequence is synthesized)
tttacagaagggaggtactaataacagatagagttagtatgattgaagggaagaggaagcctgatggaacccttgaagtgctagcacagggtgtttgcagttggagaagtaggccataga

SEQ ID NO: 622549 - DNA, 120 bp, Artificial Sequence
  ENSG00000178105_33 (sequence is synthesized)
gagctataatttgttttaaacaagaacattatgaaaaggtcttaaagattttcttaggacaaaatgctgtagagagacagagttactcttcatttgaatcttatgcatatttaaacatga

SEQ ID NO: 622550 - DNA, 120 bp, Artificial Sequence
  ENSG00000178105_34 (sequence is synthesized)
attattttttaataggaaaattcacttatccaaattcagttttctgaggtgatgccagaaacttccatttgctgttggacaactaggtggttgaacatatgagctttatatagtatgtgt

SEQ ID NO: 622551 - DNA, 120 bp, Artificial Sequence
  ENSG00000178105_35 (sequence is synthesized)
aggctctaggtagtggacatcattgttttactaccacaagaggcaccacagataaaaataatttgattaggatttagaaaaatatacaaatgtttgtgccataaggattaaataatttag

SEQ ID NO: 622552 - DNA, 120 bp, Artificial Sequence
  ENSG00000178105_36 (sequence is synthesized)
gttctgggcatattcctaatctttaaaaattgacctctaagagtaaatatacatgctctgagttccttggtgtatggtctgagacctagatgaaccccagtggggtcaggtttgcttccc

SEQ ID NO: 622553 - DNA, 120 bp, Artificial Sequence
  ENSG00000178105_37 (sequence is synthesized)
cttgtgttcctatataaatgcacctcttttagaatggtttatggggtctgtattttggtagatgtgatttaatgtaacatacatgactttcagtcattgtcttccaagtgtttccatgta

SEQ ID NO: 622554 - DNA, 120 bp, Artificial Sequence
  ENSG00000178105_38 (sequence is synthesized)
acttgactccctggaagcaacattaattggttcttgcatttctgcagccatattttgcatatctatctaatatacctttaaaaaatagtcaacctttgaaacctttggcaggatgtcagc

SEQ ID NO: 622555 - DNA, 120 bp, Artificial Sequence
  ENSG00000178105_39 (sequence is synthesized)
agtccttctgcatttgatttatatggattttttccctaacattttagatagtttctgggtcatctttcatctgtgtacagcaggcatttcatttaattcttctgccatttcttgccctta

SEQ ID NO: 622556 - DNA, 120 bp, Artificial Sequence
  ENSG00000178105_40 (sequence is synthesized)
tagtgacatttccatgctaccacctagttaatagaacttgttctctagtagctcatgtgtttcatcctgttaattggctgtaaatgttttgtacctagaaattgtccttacatttttttt

SEQ ID NO: 622557 - DNA, 120 bp, Artificial Sequence
  ENSG00000178105_41 (sequence is synthesized)
ttggtaccaacacttaactgctctagcctcaattcccacccctaatattaatgtcatggcacagagaatgccttgacatatttgaattgattaattgattgatgaaggagatttacaggg

SEQ ID NO: 622558 - DNA, 120 bp, Artificial Sequence
  ENSG00000178105_42 (sequence is synthesized)
ttaaaaaagaaatgtaattataagagactatatcattggtcctaatattaataggttaaatgatacaagagatgacagaatatagatggagagttggaagaagccaagttcatacagtgt

SEQ ID NO: 622559 - DNA, 120 bp, Artificial Sequence
  ENSG00000178105_43 (sequence is synthesized)
aatggtgatgaacaagaaggtaggagtactgtgagagatgacaaagcatcttaacttaaagacaagggttcagatggaaagtatttaagcattatatgaaaattaaaacagttttaattt

SEQ ID NO: 622560 - DNA, 120 bp, Artificial Sequence
  ENSG00000178105_44 (sequence is synthesized)
catgcacagctaacaagtcagcattagtggagactgggattggtcaacttgttttaagctgacagaaattgtcttttgttgaagaggaggatatcaacaagggcttgatcactgatgagg

SEQ ID NO: 622561 - DNA, 120 bp, Artificial Sequence
  ENSG00000178105_45 (sequence is synthesized)
gattttattcctgtagcgtatataagggcttcctagcaggttttttgttttggcctgtgaacacagagattgtctaatcttatagcctccttctagatgaaaaaaccaaggctttaaagg

SEQ ID NO: 622562 - DNA, 120 bp, Artificial Sequence
  ENSG00000178105_46 (sequence is synthesized)
ctaaaataacttgtctgtgatcacaataaaagttagggacagatcagtgtgatctttgtaaattaaactaactccctagttctagaatctcagttaggttgtatagaattaccctggtgt

SEQ ID NO: 622563 - DNA, 120 bp, Artificial Sequence
  ENSG00000178105_47 (sequence is synthesized)
tgagagaggtagctcaggataatgtcatttgactaaacacctggatccatggactaaccataagatagacatggtttcccaccctcagcattattgatattccggcccagatagtttttt

SEQ ID NO: 622564 - DNA, 120 bp, Artificial Sequence
  ENSG00000178105_48 (sequence is synthesized)
gtttgagaaagggtataagctgcttaacatcatccttggcctctaccactagcatttgggacaactaaaaatgtcttcagacatggcaggtatctctgaggaagcaaaattgcccacagt

SEQ ID NO: 622565 - DNA, 120 bp, Artificial Sequence
  ENSG00000178105_49 (sequence is synthesized)
tgagaacaactggattagaccccagatggcagatacatattactggtgcttaatttcccctgtccttcagtcagagtaggttttttctctattcacttccatttggcctaagcagtcctc

SEQ ID NO: 622566 - DNA, 120 bp, Artificial Sequence
  ENSG00000178105_50 (sequence is synthesized)
agcacagtctctgtcaatcaattggaactggtacggaaggtaaaacctatttgccattcctggactagcaggcaggatttggagtaaattataagtagtagcctacatctgtaatttcta

SEQ ID NO: 622567 - DNA, 120 bp, Artificial Sequence
  ENSG00000178105_51 (sequence is synthesized)
tttatactttaatttccatttttctcccttttctgtggtttatttgcctcaatggcaatgaatcaagatgtatgtaaactaaaaccaaaattgttttagataaagaaaatgtatttggaa

SEQ ID NO: 622568 - DNA, 120 bp, Artificial Sequence
  ENSG00000178105_52 (sequence is synthesized)
gattgtatatactagaattttgacagtggtaattgctgttgctgctagcatttgcatagtagcgccagtaaagtttttctgtattcttccagtttggctacacactggaagcatacagct

SEQ ID NO: 622569 - DNA, 120 bp, Artificial Sequence
  ENSG00000178105_53 (sequence is synthesized)
tccatctgcttatgcttctcataagctgtatgattacgtgctaagatcttatgatgtcagctttagtgagtcctcttgacatgttcacaggttttacttgctgtgctgtctctagccctc

SEQ ID NO: 622570 - DNA, 120 bp, Artificial Sequence
  ENSG00000178105_54 (sequence is synthesized)
tactcagtaattgaggcaatggctagtactccagcctcttggacatcatcacatctctcagtaggttattctctggctatacacttagcattttcagagacgaattcactcttatgggac

SEQ ID NO: 622571 - DNA, 79 bp, Artificial Sequence
  ENSG00000178105_55 (sequence is synthesized)
acacttagcattttcagagacgaattcactcttatgggactagatagaccaattggaaagtagctattagtccaggagg

SEQ ID NO: 622572 - DNA, 120 bp, Artificial Sequence
  ENSG00000178105_56 (sequence is synthesized)
tcattctacccatgtgtctatcctgattgtgatactgacttcatagaaggtgatgagtataggaaacagttgctagtctagtccatacagtggcaactcattagaaaggagtgagccagc

SEQ ID NO: 622573 - DNA, 120 bp, Artificial Sequence
  ENSG00000178105_57 (sequence is synthesized)
tttcatgttcctctgggaccaaacaataaaaccctgtctcctttccaattccaataaaggtattcaggcatcgtagacttgataacatgtgcctactcagtgtgaagacaaccaggatga

SEQ ID NO: 622574 - DNA, 120 bp, Artificial Sequence
  ENSG00000178105_58 (sequence is synthesized)
tgtcacccagattggagtgcaatggtgtcatcatggctcgctgcagcctcgaccttatgggctgaagtgatcttgaattgctggactcaaaccatcctcctgcctcagcctcccaaagtt

SEQ ID NO: 622575 - DNA, 82 bp, Artificial Sequence
  ENSG00000178105_59 (sequence is synthesized)
gctggagtgcagtggtgcgacctcagcttactgcaacctccgcctcccagactgaagtgattcttgtgccttttgcccagct

SEQ ID NO: 622576 - DNA, 120 bp, Artificial Sequence
  ENSG00000178105_60 (sequence is synthesized)
gacctcaagtgatctgcccaccttggcctatcaaagtactgggattgcaggcatcagccactgtgcccggccgccactatttcttaaaaggaagggaaggctccatttcctccatatctt

SEQ ID NO: 622577 - DNA, 120 bp, Artificial Sequence
  ENSG00000178105_61 (sequence is synthesized)
tcttaaaggagaaaaaaagccagtgggaaaaggaaataacagagatggaacacagaaaaagaacagacgccaaagatgaagaggaagcctttctggattggagtgatgatgatgatgatg

SEQ ID NO: 622578 - DNA, 120 bp, Artificial Sequence
  ENSG00000178115_0 (sequence is synthesized)
atggcagaagaaactcaacacaacaaattggctgcagccaagaaaaagttaaaagaatattggcagaaaaacagacctagagttccagcaggagtgaacagaaacaggaaaacaaatggc

SEQ ID NO: 622579 - DNA, 120 bp, Artificial Sequence
  ENSG00000178115_1 (sequence is synthesized)
agtatccctgagacagccacttccggtggttgccagccacctggggattcagcaacaggtttccacagggaaggccctacatcatctgctaccctgaaagatctggagagcccgtgccaa

SEQ ID NO: 622580 - DNA, 120 bp, Artificial Sequence
  ENSG00000178115_2 (sequence is synthesized)
aaagatctggagagcccgtgccaagaacgagcagtagtcctggattcaacgtccgtaaaaatcagtcgactgaagaacaccatcaaatctttgaaacaacagaagaaacaagtggaacat

SEQ ID NO: 622581 - DNA, 120 bp, Artificial Sequence
  ENSG00000178115_3 (sequence is synthesized)
aacaacgagagacagaaagccgaaagggagctagaggttcaaatccagacattgatcatacagaaagaggaactaaatacggacctgtaccacatggaacgttctctcagatactttgaa

SEQ ID NO: 622582 - DNA, 120 bp, Artificial Sequence
  ENSG00000178115_4 (sequence is synthesized)
gaagagtccaaggacctggctgtccgcctgcaacattcattgcagtgtaaaggagagttagagagggctctgtctgctgtcatcgccacagagaagaagaaggcaaaccagttgtccagc

SEQ ID NO: 622583 - DNA, 120 bp, Artificial Sequence
  ENSG00000178115_5 (sequence is synthesized)
tgcagcaaagcacatacagagtgggagttagagcagtccctacaggaccaggcactgctgaaagcgcagctgacacagttgaaggagtcatttcaacaactccaattagaaagagatgag

SEQ ID NO: 622584 - DNA, 120 bp, Artificial Sequence
  ENSG00000178115_6 (sequence is synthesized)
tgtgctgaacatatagaaggagagagggcccggtggcatcagaggatgagtaaaatgttgcaggagatttgcacattaaagaaagagaagcagcaagatatgcgtcgggtagaggagctg

SEQ ID NO: 622585 - DNA, 120 bp, Artificial Sequence
  ENSG00000178115_7 (sequence is synthesized)
tagagagagtggcaggagagctccagtcccaggtcaaaaacaatcagcacataagtctcctgaaccggcgacaagaagagaggattcgggaacaggaagagaggcttcggaagcaggagg

SEQ ID NO: 622586 - DNA, 120 bp, Artificial Sequence
  ENSG00000178115_8 (sequence is synthesized)
gaggcttcggaagcaggaggagaggcttcaggagcagcacgagaagcttcggcagctggccaagccacagagcgtcttcgaggagctgaacaatgagaacaagagcacactgcagttgga

SEQ ID NO: 622587 - DNA, 120 bp, Artificial Sequence
  ENSG00000178115_9 (sequence is synthesized)
ctacaggagaagcttggcgaggagcacctggaagcggccagccagcagaaccagcagctaacggcccagctgaacctcatggctctccctggggaaggacacggaggagaacatctggac

SEQ ID NO: 622588 - DNA, 120 bp, Artificial Sequence
  ENSG00000178115_10 (sequence is synthesized)
agtgagggggaggaggcacctcagcccatgccgagtgtcccagaggacctggagagcagggaggccatgagcagctttatggaccacctgaaggagaaggcagacctgagtgagctggtg

SEQ ID NO: 622589 - DNA, 120 bp, Artificial Sequence
  ENSG00000178115_11 (sequence is synthesized)
aaaaaacaagaacttcgcttcattcaatactggcaagagagatgccatcagaaaatccatcaccttttatcagaaccagggggccgtgccaaagatgcagcactgggaggaggacaccat

SEQ ID NO: 622590 - DNA, 120 bp, Artificial Sequence
  ENSG00000178115_12 (sequence is synthesized)
gcccacaactctgctgatgagcccggtccaggagccccagccccccaggagcttggggctgcagacaagcatggtgatcttcgtgaggtgaccctcacctcctctgcccaaggagaggcc

SEQ ID NO: 622591 - DNA, 120 bp, Artificial Sequence
  ENSG00000178115_13 (sequence is synthesized)
aggtgaaggagacggaaacctccaccccatccaagaagggctgggaggcgggcagcagcctcttgggaggggaggtgccaggtcagaggcagcttccagcctgggggctggtgaccacag

SEQ ID NO: 622592 - DNA, 120 bp, Artificial Sequence
  ENSG00000178115_14 (sequence is synthesized)
gggctggtgaccacagcaccccgcagggcagtcctgcgactgtttctcgcttcctgcctctgacttttaaaggtgggtagccctgggctcctctcaggtctggacatcatcatcccagct

SEQ ID NO: 622593 - DNA, 120 bp, Artificial Sequence
  ENSG00000178125_0 (sequence is synthesized)
gggacccggcgccgatgaaaccgaccaaactggagttagctaccggactgtcccgcgagcgaaagttggaaataatacctaaacctacttcttgacatggtgtcaaaacagagcttttgc

SEQ ID NO: 622594 - DNA, 120 bp, Artificial Sequence
  ENSG00000178125_1 (sequence is synthesized)
tgagagtttgatttataaagaaattatggttcgactgaccttggatctaattgccagaaacagcaatcttaaaccccgaaaagaagaaaccatttcacagtgcctgaagaaaataactca

SEQ ID NO: 622595 - DNA, 120 bp, Artificial Sequence
  ENSG00000178125_2 (sequence is synthesized)
tataaatttttcagacaaaaatatagatgcaattgaagacctctctctttgcaaaaatcttagtgttttatatttatatgataattgtattagtcaaatcactaacctgaattatgccac

SEQ ID NO: 622596 - DNA, 120 bp, Artificial Sequence
  ENSG00000178125_3 (sequence is synthesized)
aaatctgacccacttgtacctacaaaacaattgtatttcatgtatagagaacctcaggtcattaaagaaactggaaaaactgtatctgggaggcaattacattgctgtcatagaaggttt

SEQ ID NO: 622597 - DNA, 120 bp, Artificial Sequence
  ENSG00000178125_4 (sequence is synthesized)
ggattaggagaactaagagagcttcatgttgagaatcagaggcttccccttggggaaaagcttctgtttgatccaagaactcttcattctctggcaaaatccctctgtatattgaatatc

SEQ ID NO: 622598 - DNA, 120 bp, Artificial Sequence
  ENSG00000178125_5 (sequence is synthesized)
agcaataataatattgatgacattacagacttagaactactagagaatcttaatcagctcatagccgttgacaaccaacttctgcatgtgaaggatttggagtttttactgaacaagttg

SEQ ID NO: 622599 - DNA, 120 bp, Artificial Sequence
  ENSG00000178125_6 (sequence is synthesized)
atgaagctgtggaaaattgatctaaatggaaatcctgtttgtctcaaaccaaaatacagggacagactgatattggtgtccaaatcactgggtacatatttatattaatataatttttaa

SEQ ID NO: 622600 - DNA, 120 bp, Artificial Sequence
  ENSG00000178125_7 (sequence is synthesized)
gagaatgacacctagttaactttttggttattttaccagcaagctttcagaaatataaatctgacatctggatctgtgaaaattgtcaactttaaattcaatattttgaataagagcaaa

SEQ ID NO: 622601 - DNA, 120 bp, Artificial Sequence
  ENSG00000178125_8 (sequence is synthesized)
agttaaaattgacaaataaagcatgaaaaacatctgctgttcagaagtaattaaagcacctgatacttattccttaaggaggatattttgctattaccaataaaaatggttagtcataaa

SEQ ID NO: 622602 - DNA, 120 bp, Artificial Sequence
  ENSG00000178125_9 (sequence is synthesized)
ggctgtactttgcattttgaagagtctaagaatacattccatatcttcaaatattttattgtgggcaatttataataacatagcctgggtaatgccaatgtaaagttggaaataatacct

SEQ ID NO: 622603 - DNA, 120 bp, Artificial Sequence
  ENSG00000178125_10 (sequence is synthesized)
agatgccaagaaaatcagcaaaaaaaggagcagtaaaaatgaggatgcaagcaattcactcataagtaacttcaaaacaatgcatcatatagttcctgtttattacccacaggtgggtaa

SEQ ID NO: 622604 - DNA, 120 bp, Artificial Sequence
  ENSG00000178125_11 (sequence is synthesized)
gccaaaattagcctttttctctgaaatacagagataccctgtaaatgcaaatgcatctccagaaagttcctgagaagattacactaaaattatttaagagatggggaatctctctttgaa

SEQ ID NO: 622605 - DNA, 120 bp, Artificial Sequence
  ENSG00000178125_12 (sequence is synthesized)
gcaatctgaaagcttgctgacaaaaaatgatgtgcatgaacctcacctcttccataacccagaagaaaaagaaaatttgtttgtggaaaatgagtaaattcagcctcaagtgacaggaaa

SEQ ID NO: 622606 - DNA, 68 bp, Artificial Sequence
  ENSG00000178125_13 (sequence is synthesized)
tgccgaaatcgcaccactgaactccaacctgagcaacagaccaagactccatctcaggaaaaaaaaaa

SEQ ID NO: 622607 - DNA, 120 bp, Artificial Sequence
  ENSG00000178125_14 (sequence is synthesized)
accaacttctgcatgtgaaggtagtgtaaagagaaattaatttttaagatatttacatgaaattatgattgaaaaatgttttgtaatagctataaaataaatatatcacattaaaaacta

SEQ ID NO: 622608 - DNA, 120 bp, Artificial Sequence
  ENSG00000178125_15 (sequence is synthesized)
ggctacaaacctcctgatgaaggaccttctgagtaccagactattccacttaataaaatagaagattttggtgtacactgcaaacaatattatgccttagaagtctcatatttcaaatcc

SEQ ID NO: 622609 - DNA, 120 bp, Artificial Sequence
  ENSG00000178125_16 (sequence is synthesized)
tctttggatcgcaaattgcttgagctgttgtggaataaatactgggtgaatacgttgagttcttctagcttgcttactaaagttggaaataatacctaaacctacttcttgacatggtgt

SEQ ID NO: 622610 - DNA, 120 bp, Artificial Sequence
  ENSG00000178127_0 (sequence is synthesized)
attctcgcctggcgcggctggggaaggtgaacagtgtggcccgccatgttcttctccgcggcgctccgggcccgggcggctggcctcaccgcccactggggaagacatgtaaggaatttg

SEQ ID NO: 622611 - DNA, 120 bp, Artificial Sequence
  ENSG00000178127_1 (sequence is synthesized)
cataagacagttatgcaaaatggagctggaggagctttatttgtgcacagagatactcctgagaataaccctgatactccatttgatttcacaccagaaaactataagaggatagaggca

SEQ ID NO: 622612 - DNA, 120 bp, Artificial Sequence
  ENSG00000178127_2 (sequence is synthesized)
attgtaaaaaactatccagaaggccataaagcagcagctgttcttccagtcctggatttagcccaaaggcagaatgggtggttgcccatctctgctatgaacaaggttgcagaagtttta

SEQ ID NO: 622613 - DNA, 120 bp, Artificial Sequence
  ENSG00000178127_3 (sequence is synthesized)
agtatatgaagtagcaactttttatacaatgtataatcgaaagccagttggaaagtatcacattcaggtctgcactactacaccctgcatgcttcgaaactctgacagcatactggaggc

SEQ ID NO: 622614 - DNA, 120 bp, Artificial Sequence
  ENSG00000178127_4 (sequence is synthesized)
cattcagaaaaagcttggaataaaggttggggagactacacctgacaaacttttcactcttatagaagtggaatgtttaggggcctgtgtgaacgcaccaatggttcaaataaatgacaa

SEQ ID NO: 622615 - DNA, 120 bp, Artificial Sequence
  ENSG00000178127_5 (sequence is synthesized)
ttactatgaggatttgacagctaaggatattgaagaaattattgatgagctcaaggctggcaaaatcccaaaaccagggccaaggagtggacgcttctcttgtgagccagctggaggtct

SEQ ID NO: 622616 - DNA, 120 bp, Artificial Sequence
  ENSG00000178127_6 (sequence is synthesized)
tacctctttgactgaaccacccaagggacctggatttggtgtacaagcaggcctttaatttatattgaactgtaaatatgtcactagagaaataaaatatggacttccaatctacgtaaa

SEQ ID NO: 622617 - DNA, 120 bp, Artificial Sequence
  ENSG00000178127_7 (sequence is synthesized)
aaaggaaggaggatacagttgactcatttgtacagagtatatgactcatttgtacagaatgaaaacatgtttatgaaggttcacactaagtgaaagctggcatccaagttgattcagaca

SEQ ID NO: 622618 - DNA, 120 bp, Artificial Sequence
  ENSG00000178127_8 (sequence is synthesized)
aaagtgaaagtcaagaagttaatagtacattaattctccaaatgcatgccagcagagcgtggcaggaaggtacacaagtcagcagatctgggttgtcctggttctcctattgactcgtgt

SEQ ID NO: 622619 - DNA, 120 bp, Artificial Sequence
  ENSG00000178127_9 (sequence is synthesized)
aatctccatttgtaaaataactctcctgaaatagagatggatagggtagaataccatatttcttaagatcttttataagttgattccattgttgtaaattatgaatcctaaagtatttct

SEQ ID NO: 622620 - DNA, 120 bp, Artificial Sequence
  ENSG00000178127_10 (sequence is synthesized)
gcggcaaggacactgcggccttagccctcttagggaggccgctgcagccccaccggaagacatgtaaggaatttgcataagacagttatgcaaaatggagctggaggagctttatttgtg

SEQ ID NO: 622621 - DNA, 120 bp, Artificial Sequence
  ENSG00000178127_11 (sequence is synthesized)
cgggattctcgcctggcgcggctggggaaggtgaacagtgtggcccgccatgttcttctccgcggcgctccgggcccgggcggctggcctcaccgcccactggcgcagaatctaggcctg

SEQ ID NO: 622622 - DNA, 120 bp, Artificial Sequence
  ENSG00000178127_12 (sequence is synthesized)
ctctggccagatcagtttcgaagaccgtcgctccgaaggaggcacctctcgtttcaagcctagtgacctcgatgcttttaggttgcagcatactggagagctctggcttgcttcgtgaag

SEQ ID NO: 622623 - DNA, 120 bp, Artificial Sequence
  ENSG00000178127_13 (sequence is synthesized)
gcttagggagaacttcattagggctggaaaagggtggccaatgtttgatttactgcagttgtgctttgcatatcggaaatgctggctaaataaacggtatcaaactaactctgaaagaac

SEQ ID NO: 622624 - DNA, 120 bp, Artificial Sequence
  ENSG00000178127_14 (sequence is synthesized)
agaaccacaggattttagagattaaatgatctttttgagatccaagtacatctcatggtaggcaaggaaattgaattgcagagaagttgaaacactccttcacgttaatctaaaaatgca

SEQ ID NO: 622625 - DNA, 120 bp, Artificial Sequence
  ENSG00000178127_15 (sequence is synthesized)
gatttccagaaatgtcgattataacaacagggcctgttacacaagtaatactggaaagaagccttagttttgtttgttttctaagagtgaaataggttaagtcagttctcagcaagaggg

SEQ ID NO: 622626 - DNA, 120 bp, Artificial Sequence
  ENSG00000178127_16 (sequence is synthesized)
agctagtgtatattcattgagaatgaattcagggctttagagttagactcgagtttggatgttagcttaactgccttttgtggctctatgactttgtgctgttaatcttcctcagtttct

SEQ ID NO: 622627 - DNA, 120 bp, Artificial Sequence
  ENSG00000178127_17 (sequence is synthesized)
tcagttgtaaaatgggaatattcctttttgcagagttcagtctttcaataaacatttgaagtcttactgtacgtcatgcactgctgagctctagttaacagtgtggataataatgatagt

SEQ ID NO: 622628 - DNA, 120 bp, Artificial Sequence
  ENSG00000178127_18 (sequence is synthesized)
taatagtacattaattctccaaatgcatgccagcagagcgtggcaggaaggtacacaagtcagcagatctgggttgtcctggttctcctattgactcgtgtgtgtgatgttagggaagac

SEQ ID NO: 622629 - DNA, 120 bp, Artificial Sequence
  ENSG00000178127_19 (sequence is synthesized)
gcgtgccgtccgggtcgcctaggcctggggtcgggagcgcgcacgctgtgcgccctgggcgcgctcgggattctcgcctggcgcggctggggaaggtgaacagtgtggcccgccatgttc

SEQ ID NO: 622630 - DNA, 120 bp, Artificial Sequence
  ENSG00000178127_20 (sequence is synthesized)
ttctccgcggcgctccgggcccgggcggctggcctcaccgcccactgggtaaggaggctcaagctgagcccggcgctgccgccgcccttctcttgctctccgtgtctcccttagttttgg

SEQ ID NO: 622631 - DNA, 120 bp, Artificial Sequence
  ENSG00000178127_21 (sequence is synthesized)
caaggtgcataagatttttcctgaaggtaatactaacagattgggcatggggtccgagggtattctaggtggaaaggacaacttaaagtcttgttggcaagaaaaagatcggtatgtatg

SEQ ID NO: 622632 - DNA, 120 bp, Artificial Sequence
  ENSG00000178149_0 (sequence is synthesized)
attgtcgctttcgctacccgcggggccgggcgagcgggaagctcggcacagtgggagcctggtggtgggtctcctggggccggtcgcaatgggtttccgggggtcccgcggctgctctgt

SEQ ID NO: 622633 - DNA, 120 bp, Artificial Sequence
  ENSG00000178149_1 (sequence is synthesized)
ggaccccttcggcccctggtgctccgggcgctggcagcgtcaccggacaaaggccaccgagcgcgggggtgtccccgaggtggacgcgcgggtttacttcctctccggccccacgggcgc

SEQ ID NO: 622634 - DNA, 120 bp, Artificial Sequence
  ENSG00000178149_2 (sequence is synthesized)
gcttccctcctgacggattccgaagcccgccccaccaccgtcaccgcaccagtggcccaggcttcgtgggaccaacagggctaatcctgccccacggatctaatccggatcgggacccgg

SEQ ID NO: 622635 - DNA, 120 bp, Artificial Sequence
  ENSG00000178149_3 (sequence is synthesized)
tcccaggggaggcccccacctccccttctattgttctgtggcccaggttccggagcatttgctccatgccctcgcctgcctgcagggccccggtgtggccccggtgctgcgctgcgcgcc

SEQ ID NO: 622636 - DNA, 120 bp, Artificial Sequence
  ENSG00000178149_4 (sequence is synthesized)
gacccccgcgggtctgtctctccaactgcagcggtccgccgtcttcgagcgcgtcctcagcgccgtggccgcctatgccacgcccgcctcgcctgcctcgctgggccagcgcgtcttact

SEQ ID NO: 622637 - DNA, 120 bp, Artificial Sequence
  ENSG00000178149_5 (sequence is synthesized)
acactgcccagcactgcgcagctccccctgcgcactccgcttgagccagctgcgtacggtgctcgtggccgatcacctggcgcgagccctgcgcgctcacggggtgtgcgtgcgcctagt

SEQ ID NO: 622638 - DNA, 120 bp, Artificial Sequence
  ENSG00000178149_6 (sequence is synthesized)
gccagctgtgcgggatccgcacatgctgaccttcctgcagcaactgcgggtggactggcccgctgcctcggagagagcttcctcccacaccctgaggagccacgcccttgaagaacttac

SEQ ID NO: 622639 - DNA, 120 bp, Artificial Sequence
  ENSG00000178149_7 (sequence is synthesized)
ctctgctaatgacgggaggacactgtcccctggcatcctaggcagactgtgtctgaaggagctggtggaagaacagggccgcacagctggctatgaccccaacctggacaactgtctggt

SEQ ID NO: 622640 - DNA, 120 bp, Artificial Sequence
  ENSG00000178149_8 (sequence is synthesized)
gcattggcccgaggacagccacccaggcctggctggggcctcagatactggtacaggcggctgcctggttgtacatgttgttagctgtgaggaggagttccagcaacagaagttggacct

SEQ ID NO: 622641 - DNA, 120 bp, Artificial Sequence
  ENSG00000178149_9 (sequence is synthesized)
gctttggcagaagttggttgacaaggctccactcagacagaagcacctcatctgtggccctgtgaaagtagctggtgcacctggcactctgatgactgcccctgagtactacgagttccg

SEQ ID NO: 622642 - DNA, 120 bp, Artificial Sequence
  ENSG00000178149_10 (sequence is synthesized)
gcatacccaggtgtgcaaggcctcagcactgaagcatggtggggatctggcacaagacccagcctggacagagatctttggtgttctctctgtggccaccatcaagtttgagatgctgag

SEQ ID NO: 622643 - DNA, 120 bp, Artificial Sequence
  ENSG00000178149_11 (sequence is synthesized)
cacagccccacagagtcagctcttcctggctctggctgacagcagtatctccacgaagggcacaaagagtggcacctttgtcatgtataattgtgcccgtcttgccacactctttgagag

SEQ ID NO: 622644 - DNA, 120 bp, Artificial Sequence
  ENSG00000178149_12 (sequence is synthesized)
ttacaagtgtagtatggaacaaggtctgtaccccacttttcctcctgtgagcagtctggacttctcactgctacatgatgagggtgagtggttgttgctcttcaacagtatcctcccctt

SEQ ID NO: 622645 - DNA, 120 bp, Artificial Sequence
  ENSG00000178149_13 (sequence is synthesized)
tccggatctgctgagccggacagcagtgctggactgcacagccccggggctccacattgctgtacgcacagagatgatatgcaagttcctggtacagctcagcatggatttcagctccta

SEQ ID NO: 622646 - DNA, 120 bp, Artificial Sequence
  ENSG00000178149_14 (sequence is synthesized)
ctacaaccgggtacacatcctgggggagcctcgaccacacctctttggtcagatgttcgtccgcctgcagcttctgagagctgtgcgtgaggtgctccatactggcctggctatgctggg

SEQ ID NO: 622647 - DNA, 120 bp, Artificial Sequence
  ENSG00000178149_15 (sequence is synthesized)
tctccctccactgagccacatttaaggccacagaggctccaatacctgggaatgttcacaaagtcatcaactggaaaaaaagcaaaaacccacggccaaaataaattggtactgtttgtt

SEQ ID NO: 622648 - DNA, 120 bp, Artificial Sequence
  ENSG00000178149_16 (sequence is synthesized)
actccttccggtcaccatggcgaccaggcgccttggggtcggggagacgctgggggccctcaacgcggccctggggccaggcggtccggtgtggatcaaggagacgcgcacccgccacct

SEQ ID NO: 622649 - DNA, 120 bp, Artificial Sequence
  ENSG00000178149_17 (sequence is synthesized)
tcccgagactttctggcaccgcaccgcgcgctgcaggcgcgcttcgatgacggccaggtgggcgtgagccgggcggggccgtgcggccgggagatgggccccgtgccgtggctcttttac

SEQ ID NO: 622650 - DNA, 120 bp, Artificial Sequence
  ENSG00000178149_18 (sequence is synthesized)
tacctagaaagcgagcggcgccgcccgtggggactgcggctggaggtgggaagtcgtggcgagctggaccaggtgctcagactgaggcggccgccctcccttcgcagggtgtgcgtgcgc

SEQ ID NO: 622651 - DNA, 120 bp, Artificial Sequence
  ENSG00000178149_19 (sequence is synthesized)
cgaggggcttgttagctgacagaaaccaacacttgaccttgggggagttgctggacttgagagggcatgtacagcaggtgcagaggctctggggaaggggggtctgtagacacatcccaa

SEQ ID NO: 622652 - DNA, 120 bp, Artificial Sequence
  ENSG00000178149_20 (sequence is synthesized)
tagaggcaccagatttgggctcctcaagggacttcctggagagtagcgccaactaggctgagcccctgacatctttctgacagaagcacctcatctgtggccctgtgaaagtagctggtg

SEQ ID NO: 622653 - DNA, 120 bp, Artificial Sequence
  ENSG00000178149_21 (sequence is synthesized)
cacctggcactctgatgactgcccctgagtactacgagtgagtgaggctgggaggaacaccaacctaagccagggtaatgaggggggactctttacccaggaccctgcccactggccttc

SEQ ID NO: 622654 - DNA, 120 bp, Artificial Sequence
  ENSG00000178149_22 (sequence is synthesized)
ggttttttgcatccctgcccttgcctgcagactgactgaccaaccctatactccctcagacccagcctggacagagatctttggtgttctctctgtggccaccatcaagtttgagatgct

SEQ ID NO: 622655 - DNA, 120 bp, Artificial Sequence
  ENSG00000178149_23 (sequence is synthesized)
gagcacagccccacagagtcaggtgagcctgggagcctgacagggccagtgttggggcacagggtgtggtggctgccttctctctctgcagctgtgcttctattccccagctcttcctgg

SEQ ID NO: 622656 - DNA, 120 bp, Artificial Sequence
  ENSG00000178149_24 (sequence is synthesized)
gaggcatagacaaccaggacactctacactctattctttattctggcctggggcacaagagcaaagagatgggccagtgactcagtctctgtctctagatatgcaagttcctggtacagc

SEQ ID NO: 622657 - DNA, 120 bp, Artificial Sequence
  ENSG00000178149_25 (sequence is synthesized)
tcagcatggatttcagctcctactacaaccgggtacacatcctgggggtgagcacacagcaaaatggggtgggacgtgcagagaggtatagggtaaaggcaaaggaagcagaggatgaga

SEQ ID NO: 622658 - DNA, 120 bp, Artificial Sequence
  ENSG00000178149_26 (sequence is synthesized)
gtctggacttctcactgctacatgatgaggtgagtgtccctcctggtagctggcacaaggaggcctggacttcccctcccagcacctttctccccaacagggtgagtggttgttgctctt

SEQ ID NO: 622659 - DNA, 120 bp, Artificial Sequence
  ENSG00000178149_27 (sequence is synthesized)
ccggaaggtgctgggctggcagtcgccggccctagggggctggatggtcgagggcgcggggtccaagctcaccagggaagctcaacgggcggacagcgcagcgagggtcgcgctcggtac

SEQ ID NO: 622660 - DNA, 120 bp, Artificial Sequence
  ENSG00000178149_28 (sequence is synthesized)
aagctacgtagcgcgagagcggtggccatggctgaccaacgcgcggcgaagtcgtcaccggcgccgttagtccccgggttgggagggccctgcggagcctgacccagcgtggctgcagcg

SEQ ID NO: 622661 - DNA, 120 bp, Artificial Sequence
  ENSG00000178150_0 (sequence is synthesized)
acagcgaggacccaaggctggggtttcctgcttggatcaggagtgcctggggatttgatccccatcctggtgcagctccgagacgctcctgggctgcgcgcgcttttgggctgcgccacc

SEQ ID NO: 622662 - DNA, 120 bp, Artificial Sequence
  ENSG00000178150_1 (sequence is synthesized)
gacagagacatctggaagccggagctagtggaagactctgcctcacctgcctccttgaaggaaacacggggaagccaggactggccgtcacgttggtgacaaatatgtcccaggactcgg

SEQ ID NO: 622663 - DNA, 120 bp, Artificial Sequence
  ENSG00000178150_2 (sequence is synthesized)
tgaccttcgcagacgtggctgtgaacttcaccaaagaggagtggaccctgctggacccagctcagaggaatctctacagagacgtgatgctggaaaattctaggaacttggcattcatag

SEQ ID NO: 622664 - DNA, 120 bp, Artificial Sequence
  ENSG00000178150_3 (sequence is synthesized)
attgggcaactccatgtaaaaccaaagacgcaacccctcagccggatattcttcctaaaagaacatttcctgaagccaacagagtgtgtctcacgagcatcagttcccagcactccacat

SEQ ID NO: 622665 - DNA, 120 bp, Artificial Sequence
  ENSG00000178150_4 (sequence is synthesized)
taagagaagactggagatgccccaaaacagaggaaccacacaggcagggggtgaataatgtgaagccacctgcagttgcccctgagaaagatgaatctcctgttagcatttgtgaagatc

SEQ ID NO: 622666 - DNA, 120 bp, Artificial Sequence
  ENSG00000178150_5 (sequence is synthesized)
atgaaatgaggaaccactctaaacctacctgcaggcttgtgccttcacagggagattccataagacaatgtatcctaacacgtgactcaagtattttcaagtataatcctgtcttaaacg

SEQ ID NO: 622667 - DNA, 120 bp, Artificial Sequence
  ENSG00000178150_6 (sequence is synthesized)
atagtcaaaaaacacatgaaaacaacgaagacgatggagtcttggggtggaacattcagtgggttccgtgtgggagaaaaacagagctgaaatcaagcacatggactggcagtcagaaca

SEQ ID NO: 622668 - DNA, 120 bp, Artificial Sequence
  ENSG00000178150_7 (sequence is synthesized)
ctgtgcatcatatacgtgatgaaattgatacgggggccaacaggcaccagcggaatccatttggaaaagctttccgtgaagacggatcccttagggcacacaacactcatggtcgagaga

SEQ ID NO: 622669 - DNA, 120 bp, Artificial Sequence
  ENSG00000178150_8 (sequence is synthesized)
aaatgtatgattttactcagtgcgagaacacctccagaaataactcaattcacgccatgcagatgcagttgtataccgcagagacaaacaagaaggattgtcaaactggggcaacctctg

SEQ ID NO: 622670 - DNA, 120 bp, Artificial Sequence
  ENSG00000178150_9 (sequence is synthesized)
gaaaacccataaatgccccgaatgtgggagagcctttttttatcagtcattccttatgagacatatgaaaattcacactggagagaaaccgtatgaatgtgggaaatgtgggaaagcctt

SEQ ID NO: 622671 - DNA, 120 bp, Artificial Sequence
  ENSG00000178150_10 (sequence is synthesized)
tagatattccttacaccttaataaacatttaagaaagcatgttgtgcagaagaagccctacgaatgtgaagaatgtgggaaagtcattcgggagtcctcaaaatatacacatataaggag

SEQ ID NO: 622672 - DNA, 120 bp, Artificial Sequence
  ENSG00000178150_11 (sequence is synthesized)
ccacactggagagaaaccctataaatgtaagacatgtggaaaagactttgcaaagtcgtcaggacttaaaaaacatcttaagactcacaaagatgagaagccctgtgaatgaaaggaagg

SEQ ID NO: 622673 - DNA, 120 bp, Artificial Sequence
  ENSG00000178150_12 (sequence is synthesized)
tggaaaatttttcattaattttctgactgtaccaaacatgtgaggaggacatattggaagggagctcaaggggttagcatgagtgagaacatcttccctgaactctcgtatcttacagaa

SEQ ID NO: 622674 - DNA, 120 bp, Artificial Sequence
  ENSG00000178150_13 (sequence is synthesized)
atgtgaaaaaaaaccctgtgaaggtaaagtctacagaaagcctttcatcttcattcatcttgagtagacatttgttctcaccctggagagaaactgcgaatctaaaaggaatatgacaaa

SEQ ID NO: 622675 - DNA, 120 bp, Artificial Sequence
  ENSG00000178150_14 (sequence is synthesized)
caaagccttcagcgtggtctcaaattcatggttcatacaagaactcacactgcagagactccttacggaaataaaaaatgtaggaaagacctgccggccgcggtggctcatgcctgtaat

SEQ ID NO: 622676 - DNA, 120 bp, Artificial Sequence
  ENSG00000178150_15 (sequence is synthesized)
actccgtctcaaaaaaaaaaaaaagtaggaaagacctctttaaacacttaccactcatgttgcatgtgaatccacatcctgaagggaggctacaactggaataaaaataagaaagctttc

SEQ ID NO: 622677 - DNA, 120 bp, Artificial Sequence
  ENSG00000178150_16 (sequence is synthesized)
ttgcacccaagtgaataaacagcctttgttgcttacacaaagcctgtttaggtggtcttctatacggacacgcgtgacacccaggagttcgagacgagtctgggcagcatatactgaggg

SEQ ID NO: 622678 - DNA, 120 bp, Artificial Sequence
  ENSG00000178150_17 (sequence is synthesized)
gacgagtctgggcagcatatactgaggggaaaaaaaagccttctttccttgggaaatgcaggaagccagcaagcggccggagtctccggagcccgcaaggaggcgcgttggctgcgcaga

SEQ ID NO: 622679 - DNA, 120 bp, Artificial Sequence
  ENSG00000178150_18 (sequence is synthesized)
aaaaaaaagaaagaaagaaaagaaaggaaggaaggaagaaaaaaatcatttcaagggtaggaagccagcaagcggccggagtctccggagcccgcaaggaggcgcgttggctgcgcagag

SEQ ID NO: 622680 - DNA, 120 bp, Artificial Sequence
  ENSG00000178150_19 (sequence is synthesized)
aggaacggtggcgcgggcggaggcgacagcgaggacccaaggctggggtttcctgcttggatcaggagtgcctggggactccgagacgctcctgggctgcgcgcgcttttgggctgcgcc

SEQ ID NO: 622681 - DNA, 120 bp, Artificial Sequence
  ENSG00000178150_20 (sequence is synthesized)
aggtgtgagccaccgcgcccggccacaacctcatcttaattcattgacatctgcaaagactctagttcacaaatcaggtcacctttgcaggtaccaagggttaagacctcaacctacctt

SEQ ID NO: 622682 - DNA, 120 bp, Artificial Sequence
  ENSG00000178150_21 (sequence is synthesized)
attttgaggaaggggtcaagaagcgagtacaaaatgtctgggcaggacgaatctctgtagtcggtccttcctggcggcctcgttaggttgatttatttcaacagtttgatccccatcctg

SEQ ID NO: 622683 - DNA, 120 bp, Artificial Sequence
  ENSG00000178163_0 (sequence is synthesized)
tccgccccccgggtagggacctacagcgggcgcggcgccggcggtctgcggccggcggtgtagacgccccttcgccgggacctggcacccgaatccggcctgccgggcctctttgtgcag

SEQ ID NO: 622684 - DNA, 120 bp, Artificial Sequence
  ENSG00000178163_1 (sequence is synthesized)
gcagcgccttgctgacgcccagggttctgatgtagaagcctacaccagggcctgaggttgtgaaactcatggcagtccacgcctgagaagagaaggcctgaaagagaaggaagagcccat

SEQ ID NO: 622685 - DNA, 120 bp, Artificial Sequence
  ENSG00000178163_2 (sequence is synthesized)
gggacttgccacggttttgacttacatctgcaactccaaggctacaggcaggaatgttacctggaatgtcagagagctgaaagcagtcatattttgggatcatgcacctactgcggcagt

SEQ ID NO: 622686 - DNA, 120 bp, Artificial Sequence
  ENSG00000178163_3 (sequence is synthesized)
atataaagaaagataattaagtatgcacccaagaagtagctgcgcccctacccatcacaaactgtatagaaggatatctcctaaggattttatcatgtgaaaactttctgaattttagtt

SEQ ID NO: 622687 - DNA, 120 bp, Artificial Sequence
  ENSG00000178163_4 (sequence is synthesized)
ggctctttttagaaatgcagataagatgaaggatattggacagcagctatacactacacacttgaacggcggacataattccttgaccatgtcacccaaacagcctgatgctaatggagc

SEQ ID NO: 622688 - DNA, 120 bp, Artificial Sequence
  ENSG00000178163_5 (sequence is synthesized)
acctcggccaaatagacaagaagcacaaacccttttgtatcaaggctcagaggcagaggctgccatgatgaccattgctacatgtgcaaagtgcaaaagtgttcacaagatctctcttca

SEQ ID NO: 622689 - DNA, 120 bp, Artificial Sequence
  ENSG00000178163_6 (sequence is synthesized)
agatttgcagaagggtacagggaaggacggtatgtatgtctgcttccagtgcagcctcggtgcagctcctcccaattttcattttgtgagcaataattccagtgcgactcatgttggaaa

SEQ ID NO: 622690 - DNA, 120 bp, Artificial Sequence
  ENSG00000178163_7 (sequence is synthesized)
taaaactgaaaacttctcaagttctgtcaatagcaaatttaaggtaaggaactttaagccaggcaaatactattgtgataaatgtcgattctctacaaaggacccgctgcagtacaaaaa

SEQ ID NO: 622691 - DNA, 120 bp, Artificial Sequence
  ENSG00000178163_8 (sequence is synthesized)
gcacacccttcaacacgaggagattaaattcatttgttctcactgcagctacatttcgtatacgaaaggagagtttcagaggcatttggtgaaacacacaggcatatttccttatcagtg

SEQ ID NO: 622692 - DNA, 120 bp, Artificial Sequence
  ENSG00000178163_9 (sequence is synthesized)
tgagtattgtgactatggtgctattagaaatgattatattgtcaaacacacgaagagagtacatgaaagggcaggtgcgaaacggccagtcaaagctgttgccaagctggagccaaaaag

SEQ ID NO: 622693 - DNA, 120 bp, Artificial Sequence
  ENSG00000178163_10 (sequence is synthesized)
aaccggaacttcaaaacaaaacccagagcttctaaaagcttccaatccacggactacatttcaaaataagtggtcagaccaactgtcaggtttctctctccatgcaaataaagacaaaat

SEQ ID NO: 622694 - DNA, 120 bp, Artificial Sequence
  ENSG00000178163_11 (sequence is synthesized)
gcacaatatcatgttgttacctgaaccaaaggaataccaaaaagatgtagtttgtattccaaataaaatgaccctgtctgagccaaatgaagtcaacctatttgagaacaaaaatgttga

SEQ ID NO: 622695 - DNA, 120 bp, Artificial Sequence
  ENSG00000178163_12 (sequence is synthesized)
agtagaagtgttatcccctgcaaaagaacctgttcagccaggtatgccattgacagttgttgcaccagcagaactagttgtccctgcaaactgtttagcccagttgatagatgtgaaggt

SEQ ID NO: 622696 - DNA, 120 bp, Artificial Sequence
  ENSG00000178163_13 (sequence is synthesized)
tgtcaatggtacacagcagcttgttctgaaactgtttccgctggaagaaaataattgccttgaagctgggagggataatggaggtaattctgaacgtatggtgaaagagaagggttcaaa

SEQ ID NO: 622697 - DNA, 120 bp, Artificial Sequence
  ENSG00000178163_14 (sequence is synthesized)
tgaacaagaaaaagtactttctgcagaaaaaacaaagtcactgacagttgacgggaatgttggaaaactcgtaggcattgatagttttcaaccttcagttcagaaacagcttaaaaatgt

SEQ ID NO: 622698 - DNA, 120 bp, Artificial Sequence
  ENSG00000178163_15 (sequence is synthesized)
gaaatgggtaaggtcttatgattttattatgccaaattctagtgtgcacaacaatggaaaatccttcattaattcggaaacaattgaggattttcagaaaaaaaataatttgtatccaca

SEQ ID NO: 622699 - DNA, 120 bp, Artificial Sequence
  ENSG00000178163_16 (sequence is synthesized)
tagaactgcttttccttccgttgccttaaaaggtcattctctagcatctgtatttaaaaacagtgttttacgtagtcttggagctgcatcaaacccttttccatataaagctgctgtttg

SEQ ID NO: 622700 - DNA, 120 bp, Artificial Sequence
  ENSG00000178163_17 (sequence is synthesized)
ttttgctgaaagtggaagaaatttacacagtagctcacagcagttactcccatttgctgcatcacctgcaacctgttccttctctggagaaaagggcttattgcctgtaagtgaaaatga

SEQ ID NO: 622701 - DNA, 120 bp, Artificial Sequence
  ENSG00000178163_18 (sequence is synthesized)
cttggaatctacaagtaaagtcaatattcctgtaaaagtggtttcctctaataggaagcaggaagataaccagacagaggaacacaaggcagtttcaactgtaggccagatttcctctca

SEQ ID NO: 622702 - DNA, 120 bp, Artificial Sequence
  ENSG00000178163_19 (sequence is synthesized)
acataagagtgagtatttacatataaacataactggagaagatagatctcaacagcctggggataagcctttggaattaaagaattctgaaaggactaacaacactaatgatggcccagt

SEQ ID NO: 622703 - DNA, 120 bp, Artificial Sequence
  ENSG00000178163_20 (sequence is synthesized)
catctcatcagtattttctctgagctctggatctgaaaatgtccccgagggcattaagtggaatagctcaacgtctaaaataaagtcaattgaactgttgcgcagaaagatagctcagtt

SEQ ID NO: 622704 - DNA, 120 bp, Artificial Sequence
  ENSG00000178163_21 (sequence is synthesized)
aattgagtcctgtgggaagccgtcatctttggcttcaaatagtgcacatcgtcgctctgtagggcaggcatcaaagggaacttcaaaagctacctctgaaggtattcaagaaatcaacgt

SEQ ID NO: 622705 - DNA, 120 bp, Artificial Sequence
  ENSG00000178163_22 (sequence is synthesized)
gtcactcactggtcttggccattccacaggtactcttcagaaacctccgaatgatggtggtattactggtaatagacagcttactcatcaacaaatatatccacactttgcagatggcag

SEQ ID NO: 622706 - DNA, 120 bp, Artificial Sequence
  ENSG00000178163_23 (sequence is synthesized)
taataggaaaaccaaaagcagagtggccaggaaggctcatgttgccacgccagtgttaatccccaaaggggctgtgttgagggttcttaattcctctgagaatgcccacatcatagaggc

SEQ ID NO: 622707 - DNA, 120 bp, Artificial Sequence
  ENSG00000178163_24 (sequence is synthesized)
tacatgtgaagcacctgtcagcataccttgcagtgaaagacagttaataaaaccagttccattttgccctgtgagacaggcggactcagacttacagcctttaagaagtgaaagggggcc

SEQ ID NO: 622708 - DNA, 120 bp, Artificial Sequence
  ENSG00000178163_25 (sequence is synthesized)
aatagatatgtccccaaatatcgagacacctctgcggcctaaactgagaaaagagagtgctgtctgtagcaccatccatagaaaaactggcctcttgtatggacagcaaggaagcagtga

SEQ ID NO: 622709 - DNA, 120 bp, Artificial Sequence
  ENSG00000178163_26 (sequence is synthesized)
attaaataagcaagggagactgctttccagaagtctttctataagtagaaataaaaccaaacaagtacacttatccaggaagaaaaacaaaattcaagctgaacctagccgctgtctcaa

SEQ ID NO: 622710 - DNA, 120 bp, Artificial Sequence
  ENSG00000178163_27 (sequence is synthesized)
ggatccttcaatttttcaggttgcaaggcaactaagactgatagcagctaagccagatcagttgattaagtgtccccgtcggaaccagccagtcattgtgttaaaccaccctgatgtgga

SEQ ID NO: 622711 - DNA, 120 bp, Artificial Sequence
  ENSG00000178163_28 (sequence is synthesized)
acgcctgacctaccagaatgcggaagaagccagtcaaattaaaaggcaaatgatgttgaaaatgaaactcaaaaaagttcataaaaacaactaccaggtagtggattccttgcctgatga

SEQ ID NO: 622712 - DNA, 120 bp, Artificial Sequence
  ENSG00000178163_29 (sequence is synthesized)
ttcttcacagtgtgtatttaagtgctggttttgtgggcgactgtatgaagaccaggaagagtggatgagtcatggccaacggcatttgatagaagcaactagagattgggatgttctttc

SEQ ID NO: 622713 - DNA, 120 bp, Artificial Sequence
  ENSG00000178163_30 (sequence is synthesized)
ctccaagggcaaataagtaaacagttactctttaaagcaagttatcttttagtttattctggtttggagtccctccaccaagattcagtagaagaaatacagactgtagaaatgagagga

SEQ ID NO: 622714 - DNA, 120 bp, Artificial Sequence
  ENSG00000178163_31 (sequence is synthesized)
ctgctaattcttcagaactgtaggaatattgggagctaggagtctgaacctgaagtatgtgattggaccccagaatgtatttgaaggctctgaaattgtacatgcaaattggtacatatg

SEQ ID NO: 622715 - DNA, 120 bp, Artificial Sequence
  ENSG00000178163_32 (sequence is synthesized)
catttttctggagagagcctgtgaaactgaacagattttcagtgggatctgagacttttctttgtttagcaccccgttttctgagtacatactgatctttcataatccattcagaggggc

SEQ ID NO: 622716 - DNA, 120 bp, Artificial Sequence
  ENSG00000178163_33 (sequence is synthesized)
agattgagaatgttttacacatgctcttcatataaatgctacagaaaaacctttgttttggtgtgcacatccattttgtttttgctttaatttgtgttctgagtatttggtgcacaatgg

SEQ ID NO: 622717 - DNA, 120 bp, Artificial Sequence
  ENSG00000178163_34 (sequence is synthesized)
aaattatattttctactttactgtcttcaatttggttatagagaaatggccattcttttactccctccctggttttgtaatactcccgagtgttccgtatagcacaaagagttttgcttt

SEQ ID NO: 622718 - DNA, 120 bp, Artificial Sequence
  ENSG00000178163_35 (sequence is synthesized)
tactggccattttaaagaatgttttcaactgcttgcctgaatttactcctttcacagcaagtgttagaagaaagataacattttcaaatacttagcttttgctttctttaaaatacattg

SEQ ID NO: 622719 - DNA, 120 bp, Artificial Sequence
  ENSG00000178163_36 (sequence is synthesized)
gtttatgacatatgggaagggaacgtacctttttgcaaagacaaaaagagattacaaaaggaaaatatctaaaactattttctctttgcccttaccactcccagaaacataagtgaccaa

SEQ ID NO: 622720 - DNA, 120 bp, Artificial Sequence
  ENSG00000178163_37 (sequence is synthesized)
tttaaaatgctagggaacaggcttacaacataggtaaaactcgcaaacacagttcaaggtaggctcataaagttgtgaaaagggtttcatatgccctttagttttcatttgggattcatc

SEQ ID NO: 622721 - DNA, 120 bp, Artificial Sequence
  ENSG00000178163_38 (sequence is synthesized)
caaagaccatgggtggatgctgtcttctctcttcttgatccctttgattcatggacactagactccctttgccatttcttctgaaccggccctcctgtggactagcacaacttccttgcc

SEQ ID NO: 622722 - DNA, 120 bp, Artificial Sequence
  ENSG00000178163_39 (sequence is synthesized)
cactgtttcttcctttctgtgcctttgagaccccttaaggttttccctcatgcgattactagaaaatggcaggaatcaacaaaatggagacctcccactgtttttgctaaagttacagga

SEQ ID NO: 622723 - DNA, 120 bp, Artificial Sequence
  ENSG00000178163_40 (sequence is synthesized)
acacgatccctagttttcattgatagtaacgctgtttctaatttgtcttaaccacattcatgcttaccctgctgctcagctttctcagggaagcaactccaggaacactccttccactcc

SEQ ID NO: 622724 - DNA, 120 bp, Artificial Sequence
  ENSG00000178163_41 (sequence is synthesized)
cctctctaccaacagatgtcaggactgtcatttatctacacatttgtgttctttagaaaaaggcccaccccctgcacaagcacagcctcttgggcagataggtggctgggtcagtgctta

SEQ ID NO: 622725 - DNA, 120 bp, Artificial Sequence
  ENSG00000178163_42 (sequence is synthesized)
agacaggattctagtcttcacttgcctgtgcagctgggcgctgaccttccaggtagagcacagatggcacaaccccgaggcagccccaacttgcatttccctccctccaggggctattcc

SEQ ID NO: 622726 - DNA, 120 bp, Artificial Sequence
  ENSG00000178163_43 (sequence is synthesized)
tgtcttaggcgatttgtggggtgcagtgaatgaaactaaagagttgttgcacctgaaaaagacaccagtgattgtttattgggtagtcgattggagactttgattttttttttttttttt

SEQ ID NO: 622727 - DNA, 120 bp, Artificial Sequence
  ENSG00000178163_44 (sequence is synthesized)
cacatgggaaagtcttagattccagtagatggaattgcaatcctttgcagtttgttctcattacagataatcaacatttcttttgtataattcaatacatgatcatcaagttaattggta

SEQ ID NO: 622728 - DNA, 120 bp, Artificial Sequence
  ENSG00000178163_45 (sequence is synthesized)
aattggtaaatttttattgaaatttaaaacttgcatttttatatatgtgtatgtgtacacataaaaatattttttaccatatgaaaattgcagtagctaattttctgatttcctatttta

SEQ ID NO: 622729 - DNA, 120 bp, Artificial Sequence
  ENSG00000178163_46 (sequence is synthesized)
catgggctggaaaaatgtagaacgtttttatattctagaaatttattttggaagtacatttttataagggtctaatctcacttttggaaaatgaaagcacaggaatgatggggtctggtt

SEQ ID NO: 622730 - DNA, 120 bp, Artificial Sequence
  ENSG00000178163_47 (sequence is synthesized)
tatgtgaacaagtgagtagaaacccctttggatcattttattactgcatttttatttggtgctttttaggaagtagatctttggtaccacttcactacgtagagcattcgaagttttatc

SEQ ID NO: 622731 - DNA, 120 bp, Artificial Sequence
  ENSG00000178163_48 (sequence is synthesized)
catgttatatattgtactcctgtggcatgaaaaatagctcccaagatatagagaggagaggagtgaagaaaaggctgtggtttttttttgttttgttttgtttgccacttttttatctcc

SEQ ID NO: 622732 - DNA, 120 bp, Artificial Sequence
  ENSG00000178163_49 (sequence is synthesized)
tattcctcaccacatagtgctttttcctgaaaagctggactgagaattggccttgaatcaggtcagagtgttaactgtcaacatgaagtattttcacttcgcagcatcaactttcaagca

SEQ ID NO: 622733 - DNA, 120 bp, Artificial Sequence
  ENSG00000178163_50 (sequence is synthesized)
taagtaaaaacacaacttgcatactttgatggagcttaattgtgtgagtagaatatgtagcaaagctttttaggattttcagaactagaatactttttaaggaattaaaagtgtttctgg

SEQ ID NO: 622734 - DNA, 120 bp, Artificial Sequence
  ENSG00000178163_51 (sequence is synthesized)
aagtcaaaaatgggaaagcaaaaagtagctgtcctccctaaagagctttagaagatagcttaacctgtaggtacatgttatgaaataaacacatttctaacaatacaagggagtaggggc

SEQ ID NO: 622735 - DNA, 120 bp, Artificial Sequence
  ENSG00000178163_52 (sequence is synthesized)
agacctgtgttgagtatttgtgtgggttcttaattttgaaggacctccaatcactacattttgttaatactgccaataaaatcattttcaacttattttttaaagtaggttttcttactt

SEQ ID NO: 622736 - DNA, 120 bp, Artificial Sequence
  ENSG00000178163_53 (sequence is synthesized)
tggtggaccagaagtgagagattgttatatttaggatataggcaaatacagtaaaagttaaaaaaaaaaaacctgacccaaagtatactctgatagactatattatattcaattttgtat

SEQ ID NO: 622737 - DNA, 120 bp, Artificial Sequence
  ENSG00000178163_54 (sequence is synthesized)
ccccagtcgagaacatcttgtaagccttcattaagggccacctgctgtctgttgaactagactgaacaaaatatattttctcacaagctccatccctttttctttaggacatgttatata

SEQ ID NO: 622738 - DNA, 120 bp, Artificial Sequence
  ENSG00000178163_55 (sequence is synthesized)
taatccatctcagaagttgaagatgtgatgttgctcggcctttggaataatttttaaatctgtaaatgtctatatgagcagaaacaaaacattgtgtaacatgttttaagcattattgta

SEQ ID NO: 622739 - DNA, 120 bp, Artificial Sequence
  ENSG00000178163_56 (sequence is synthesized)
attcctgtgttaacagtttgtgtgtctgctgctctggttttgaaacatgtttgtatatagatacaggagttggcataaattttgttaaataaagcaacaaaaattttctttgccctttga

SEQ ID NO: 622740 - DNA, 120 bp, Artificial Sequence
  ENSG00000178163_57 (sequence is synthesized)
tcaagtggcagcagatactgactatggcttcatttcacagcttcacacagcagggtagcagaaaacaaagaatgtaagattggacccagttgcagctgttcaccaactctgtgatcttca

SEQ ID NO: 622741 - DNA, 120 bp, Artificial Sequence
  ENSG00000178163_58 (sequence is synthesized)
aaaagccatatagcttctccagacctgttaatcagggaagaagcagataactgaaggctggctttgagaagtttcgaggtaacataggaacctgctcatgcaggcactctttccatctga

SEQ ID NO: 622742 - DNA, 120 bp, Artificial Sequence
  ENSG00000178163_59 (sequence is synthesized)
cttgggccaaggtgctccgtgattgacaagcagccagcctctgggagagcactctgatcagatcattgatagaacattcactactctacttatcatacccatttacttatctccatcttc

SEQ ID NO: 622743 - DNA, 120 bp, Artificial Sequence
  ENSG00000178163_60 (sequence is synthesized)
tgttagactccttaaaaacagcagcccacagcaggtgtggggataaaacagtcctgggcagtgctcattgtactcacactatgccaggcactgtgccaggaacattcaaatttctaagaa

SEQ ID NO: 622744 - DNA, 120 bp, Artificial Sequence
  ENSG00000178163_61 (sequence is synthesized)
tctacaaagtagatacctcattatacatcttacagagagcatcattggtgtttccaaggtcacagggctaggcaagggtggaaccctgagtctgcttgtctgtttgccccatgacagccc

SEQ ID NO: 622745 - DNA, 120 bp, Artificial Sequence
  ENSG00000178163_62 (sequence is synthesized)
aggggtggtggcctcaccccacctccaggcacccacaagaatataaaatcttgtacaaggatgtcgatattactattgccattcccaagtgcacctgcacctgtagtatcaggtggtttg

SEQ ID NO: 622746 - DNA, 120 bp, Artificial Sequence
  ENSG00000178163_63 (sequence is synthesized)
cagccttggctgcatagctgcatatgagaatcacctgggaagcttttaaagatcccagtatccccacctcttccccagttacagtggagtcttgcgggtggtgggggacatcattatttt

SEQ ID NO: 622747 - DNA, 120 bp, Artificial Sequence
  ENSG00000178163_64 (sequence is synthesized)
tgaagcttccaagtaattctggtgtgcagtggggtgaccagctgtcccagggacctcctttaaaaaataatatcccgggcacatgacaggccaattgccctaatgcaaccaaggttaaga

SEQ ID NO: 622748 - DNA, 120 bp, Artificial Sequence
  ENSG00000178163_65 (sequence is synthesized)
actactggtttaatgggagatattttttctgtgcttgattatactgttttattaaactctgaatccatttctttctgcaaatttttaaggcaaaaaagaaatgtgaaaatatacgtctca

SEQ ID NO: 622749 - DNA, 120 bp, Artificial Sequence
  ENSG00000178163_66 (sequence is synthesized)
tttttagcaccttcagagacccggagtcatttgatgtgcttcatgacataaaattttgtaatatgccgtgtgatactaccttatttttaccatatatgtatttttaatgcttaacaagag

SEQ ID NO: 622750 - DNA, 120 bp, Artificial Sequence
  ENSG00000178163_67 (sequence is synthesized)
catatttgctctttcacatttttttttcacatacaaagttttagacatcaagcactctaaattcttttttacaaatatttttttcttaaaatgttaagaaaaagcctataatatcacttc

SEQ ID NO: 622751 - DNA, 120 bp, Artificial Sequence
  ENSG00000178163_68 (sequence is synthesized)
ctttgtttcctgatgtagactcagttgatgtgcacagcagtgtcaagtcaatctccaaaatactccctgtagacagggtggggagaagaccctcacttcctgccgactaatgaactcatg

SEQ ID NO: 622752 - DNA, 120 bp, Artificial Sequence
  ENSG00000178163_69 (sequence is synthesized)
ttgatacagacctttgcctcatcagattcatttgttaagctaaccagtgtctgcttctctggacattactggactcttctacctgtgaagccatcttaaaaaaatatattgactgatttc

SEQ ID NO: 622753 - DNA, 120 bp, Artificial Sequence
  ENSG00000178163_70 (sequence is synthesized)
ttaacgaaacatctactctttgccaagcataaagttacctcccacttgcatacacccttttctcatttgtcctcacatcagctgtataaatgagaaatattcacattttataagtgagaa

SEQ ID NO: 622754 - DNA, 120 bp, Artificial Sequence
  ENSG00000178163_71 (sequence is synthesized)
cattcaggctcagataggttaacaagtttgaaatcatgtgctagtaaaccaaacacctaggttttgaaccttgttcttcttgtcccaaggtcattattctctactgtgttacactcagct

SEQ ID NO: 622755 - DNA, 120 bp, Artificial Sequence
  ENSG00000178163_72 (sequence is synthesized)
ccaagcagtacacttggtttcagatggaaatctaggatcccaagcatgggtacatttgtcggcagcatttggaagtatttttcgtcatcaggatggcagtcaatttgcaattcagtcatc

SEQ ID NO: 622756 - DNA, 120 bp, Artificial Sequence
  ENSG00000178163_73 (sequence is synthesized)
tcagtgcaaggtagtttggcaaaaagattatgacacttaatggatttttttcctcttttaaatctgtttacccagcattttgtagtataatgcaatgtaataacattgcattattttgag

SEQ ID NO: 622757 - DNA, 120 bp, Artificial Sequence
  ENSG00000178163_74 (sequence is synthesized)
catagtttagaagccaagaagatgctttcaaacagctgacataattcagttatggcccagatgtcctgccttccccatcacacattcatattaatggtcttagaaagctgtttctgaggc

SEQ ID NO: 622758 - DNA, 120 bp, Artificial Sequence
  ENSG00000178163_75 (sequence is synthesized)
aacagtttcttcctcaatatcatcctactggggaaattttggcagttgatgtctaatgttgatttttttttcctgattgattttaattgttcactgggcactttggggtagaattgtttt

SEQ ID NO: 622759 - DNA, 120 bp, Artificial Sequence
  ENSG00000178163_76 (sequence is synthesized)
aaaaatttggttactgggaaagctagacaagcctttgctatggtgaaagagacagaaggaatatagatataatttgtaagtggttatgccattgggcttaatgctttgcatacattatct

SEQ ID NO: 622760 - DNA, 120 bp, Artificial Sequence
  ENSG00000178163_77 (sequence is synthesized)
agtttgcatctcctgatcgccctttaagtttgcttacggtaaagcattattccttgcttggcaatgcacagagaaaaattatttgctgaaggaccctgcaaatgagggacaggatcagag

SEQ ID NO: 622761 - DNA, 120 bp, Artificial Sequence
  ENSG00000178163_78 (sequence is synthesized)
ttggaactgtaaaccctgccactccatttcatgtgatcttcatgggtacagcagctataccctgccccagcaatgagtatggtagagccacattcaaaggcggactttggggtcagcatt

SEQ ID NO: 622762 - DNA, 120 bp, Artificial Sequence
  ENSG00000178163_79 (sequence is synthesized)
cctgaaaagagctgcttaagtttgcttctacatccaaaaacgatgcagtcacagtcaactaacactgagcttgctgggcatctcctgaacagaaatgtatgtggtggtccatgtagcatg

SEQ ID NO: 622763 - DNA, 120 bp, Artificial Sequence
  ENSG00000178163_80 (sequence is synthesized)
tatgcgatataattggccacccacctttccttttcacattaacatttatcacagaaacacattcatttgctacagggatatttcacaatttggctgaactttgagagaagtgggtgagga

SEQ ID NO: 622764 - DNA, 120 bp, Artificial Sequence
  ENSG00000178163_81 (sequence is synthesized)
aaaggtagtttcgtaactagtttatatataaacctaaattgtagtgagtactcttgtaagtggagcatcttttctatggtaattataaatggctgttagcccctttgcactaaagctagg

SEQ ID NO: 622765 - DNA, 120 bp, Artificial Sequence
  ENSG00000178163_82 (sequence is synthesized)
tgggtggttttgccacagaggtaaattatctttcgggcggtataaccaaacaaataaaatataaagtgagattcagggcatgttctgaatacagcagttaattaggcagctaagaaaact

SEQ ID NO: 622766 - DNA, 120 bp, Artificial Sequence
  ENSG00000178163_83 (sequence is synthesized)
gtattttagcccctctgactatgtgattggtatttttttaaattaaaaaatggaaaataatatttttaacaggttatgatatgtcagtcatttaatcctcacagtaactctgtggggtag

SEQ ID NO: 622767 - DNA, 120 bp, Artificial Sequence
  ENSG00000178163_84 (sequence is synthesized)
gtaggtactgtttctatctcattttacaggtaaggaatcaaaacagtgggtatacccaggttgtatatctagaaagtgatagagctgggattttaaactttataatctgattccagaatc

SEQ ID NO: 622768 - DNA, 120 bp, Artificial Sequence
  ENSG00000178163_85 (sequence is synthesized)
tctacctttaaacactatgttaccacttacttctcttcaaattttattgagcattagatgtttccagtatttagaagtcaaatgcttcgtttttaataggaacttacacagtcttttatg

SEQ ID NO: 622769 - DNA, 120 bp, Artificial Sequence
  ENSG00000178163_86 (sequence is synthesized)
tttttttatagccctcaatgtcactgatgtggattctcccaaactcgatactttgtttgtttttatgtccccataataagtctttaagaaaacagggcaagtgagctcaaaatcaaaaga

SEQ ID NO: 622770 - DNA, 120 bp, Artificial Sequence
  ENSG00000178163_87 (sequence is synthesized)
aaacccaccaacagtgaatgcattcagggctatttccaggtctttcttttgaagaaagataagactcagtccagagagcacatctgtgacacaccgtgcctcttgcctttggtgcgtggc

SEQ ID NO: 622771 - DNA, 120 bp, Artificial Sequence
  ENSG00000178163_88 (sequence is synthesized)
agtcatctttggctcatgctgtaccttattctacattagaaaactcactgtatgttgctaaataattttttgaaaacaggcagattaataaatggacatcttatttattgcaccataaaa

SEQ ID NO: 622772 - DNA, 120 bp, Artificial Sequence
  ENSG00000178163_89 (sequence is synthesized)
gacctacagcgggcgcggcgccggcggtctgcggccggcggtgtagacgccccttcgccgggacctggcacccgaatccggcctgccggtgttacctggaatgtcagagagctgaaagca

SEQ ID NO: 622773 - DNA, 120 bp, Artificial Sequence
  ENSG00000178171_0 (sequence is synthesized)
atcagcctctccccagcaccgactgtgcgctcccgctcccccctcctccccacaaccccgccccacactactggcactgctgcctgagccttcctggagttacttaatccaccccagccc

SEQ ID NO: 622774 - DNA, 120 bp, Artificial Sequence
  ENSG00000178171_1 (sequence is synthesized)
caggcactgaaccacgcgtgcagacccctcgtcctcagttctgcggagacagagtccccacagcatttctgctcctccctcaagactgcggcagagcacagcaccagtagaccccacaca

SEQ ID NO: 622775 - DNA, 120 bp, Artificial Sequence
  ENSG00000178171_2 (sequence is synthesized)
cagctggggcactggcagcatggagctgaagagaggaaagaccttcatcaagtccagcctgcaggtttcccacgagaaacccccagacccagcagccgtggctgcagccagggaggggac

SEQ ID NO: 622776 - DNA, 120 bp, Artificial Sequence
  ENSG00000178171_3 (sequence is synthesized)
aggcccctggtcagtccttccaggagggcaacagaggccccacagtgagaagggcccccaagccagccccagtgcccaagaatacgacagatgccccaacaaaggggcgcagctggaccc

SEQ ID NO: 622777 - DNA, 120 bp, Artificial Sequence
  ENSG00000178171_4 (sequence is synthesized)
caaagggggacccgcagccctctgtggagccaccttcaaaccggtgcgaaagtgcaagactcacgacagcatgtctggggcaggcagggccacggctgccacagggcagctggtgggcag

SEQ ID NO: 622778 - DNA, 120 bp, Artificial Sequence
  ENSG00000178171_5 (sequence is synthesized)
tgcaagcttcccgggctccccgggcagccggcgcatgatcgactaccgccactttgtgccccagatgccctttgtgccagctgtggccaagagcatcccgaggaagaggatttccctgaa

SEQ ID NO: 622779 - DNA, 120 bp, Artificial Sequence
  ENSG00000178171_6 (sequence is synthesized)
gaggcccaagaagtgctttcggaacctattccacattcggagaaacaagactgaggacttggcctcgctggcggccgaggggaaaagcctgccctccccaggggacccgtcagaccctgg

SEQ ID NO: 622780 - DNA, 120 bp, Artificial Sequence
  ENSG00000178171_7 (sequence is synthesized)
ggggcggcgaagcaaagccttcctccccccgggtgaggggccggggctggacggcctgtgccaggacctgttggacagcgagctcctggccgatgcatcctttggtctctgcagggccct

SEQ ID NO: 622781 - DNA, 120 bp, Artificial Sequence
  ENSG00000178171_8 (sequence is synthesized)
gtgtgaggacgtggcctcactccagagcttcgactcgctcacgggttgtggggaggtgttcgcagatgagagctcggtgccatctctggagctgaacgagggcccggagagcccaaccca

SEQ ID NO: 622782 - DNA, 120 bp, Artificial Sequence
  ENSG00000178171_9 (sequence is synthesized)
ggctgctcagggcctggagagcaaggttcccaggggccctctccagggcagtgtggagcagctggcctcgcccgcccagaatgaagcctctgacttcaccaggttctgggacagtgtgaa

SEQ ID NO: 622783 - DNA, 120 bp, Artificial Sequence
  ENSG00000178171_10 (sequence is synthesized)
tcgctcagtgcgtcagcagcagcgtgccctcctaggcccgtggctttcaggcccccaggggacagacagggaccaatcccggctggacacagctgggctcgctgagctgcccctctgccc

SEQ ID NO: 622784 - DNA, 120 bp, Artificial Sequence
  ENSG00000178171_11 (sequence is synthesized)
ctgcagggaccctcgcagcggctccaaagccagctccatcgacacaggcacccccaagagcgagcagcccgaatccgtgtccacaagtgacgagggctactatgattccttctcgccagg

SEQ ID NO: 622785 - DNA, 120 bp, Artificial Sequence
  ENSG00000178171_12 (sequence is synthesized)
acttgaggaggacaagaaggaagctgagagcccaggcactcctgccgccaccttcccacgggacagctacagtggggacgccctctacgagctcttccacgaccccagcgagggtcctct

SEQ ID NO: 622786 - DNA, 120 bp, Artificial Sequence
  ENSG00000178171_13 (sequence is synthesized)
tgagagtctgtcagggccggccctggggacgccactgtccatatgcagcttccgagtgggggccgaggagaacttggccccagcaccaggccctgacctgctcagccagggcttcctaca

SEQ ID NO: 622787 - DNA, 120 bp, Artificial Sequence
  ENSG00000178171_14 (sequence is synthesized)
gagctcctggaagggcaaggagtgcctgctgaagctgtgtgacactgagctcgccatcaccatgggcatcgtcagctggctgcgccgaggccccacgccccgtgccccacccacccctgg

SEQ ID NO: 622788 - DNA, 120 bp, Artificial Sequence
  ENSG00000178171_15 (sequence is synthesized)
gcagcctgcagctccacctggttcccagggagcccctagggcacccacagagaagctggggggcagggagggcctggcctcagatgcagggggggcgacagtttgctcagcacccagcag

SEQ ID NO: 622789 - DNA, 120 bp, Artificial Sequence
  ENSG00000178171_16 (sequence is synthesized)
gcaggagctgtgggcacacccgggcaccacaggcctgctcgccggagagagcaaggccctcggaggggccacacaagggactggcacactgtccagggatgcctctcgagaggaagagac

SEQ ID NO: 622790 - DNA, 120 bp, Artificial Sequence
  ENSG00000178171_17 (sequence is synthesized)
acgaggtcactctgaaggcttgttctcctctatggagtctgcagccacttcgacaacagatacttccggtaaaaataaggccccagttccttctacctggccctgctcccagaaggagcc

SEQ ID NO: 622791 - DNA, 120 bp, Artificial Sequence
  ENSG00000178171_18 (sequence is synthesized)
tgggccaccaggggtcctggggtgtttccgaggcccctggaggccaggtcacggaggtgacactctggatgcagagcccatgctggcaggctgtgtggcccgtgtggcagccctgaagat

SEQ ID NO: 622792 - DNA, 120 bp, Artificial Sequence
  ENSG00000178171_19 (sequence is synthesized)
cagctcaaacgaacagcccccggccgcatggcctccaaggcaagacatgggcagtgggctctttgggcagcgctgggccaggggccctgacatgctggagcagaaacagtccagcagctc

SEQ ID NO: 622793 - DNA, 120 bp, Artificial Sequence
  ENSG00000178171_20 (sequence is synthesized)
ccccagcatgaccaccatccatggcctaccctactcagccagcacacaggaccagaggtgtcgagatcgtgtccaggacctgagctggctcagggtggagcccaccgggctaggtgtcca

SEQ ID NO: 622794 - DNA, 120 bp, Artificial Sequence
  ENSG00000178171_21 (sequence is synthesized)
ggcctgggcctctgtggaggaccagcccttgcagctcagcacagaggctgtggagcaggtggcacacggcagccagctggactctgagccccgctcagcccctgctgcccggtggagttc

SEQ ID NO: 622795 - DNA, 120 bp, Artificial Sequence
  ENSG00000178171_22 (sequence is synthesized)
ccagggccaccatccagaaagcctgggcctcactttgaacagccagcaggaagggggggtctctgcaagtgccccagaatgccgctgcagcctcctggcccgtgagggcctcctctgtgg

SEQ ID NO: 622796 - DNA, 120 bp, Artificial Sequence
  ENSG00000178171_23 (sequence is synthesized)
ccagccagaagtgggggcctctgggccagccatggctgagccccatctgtaggacaggctcacatgcaccaggaactgcatgtgtcttcatgaccactttcaggagagcctaggactcaa

SEQ ID NO: 622797 - DNA, 120 bp, Artificial Sequence
  ENSG00000178171_24 (sequence is synthesized)
atctctatcttttgtccctgatgtggggactgtgttgggggtggggggtggcaggactcaggcatgcagagggtagcatgttcatgtggaggcatccttgcctgaacccaccagctcagg

SEQ ID NO: 622798 - DNA, 120 bp, Artificial Sequence
  ENSG00000178171_25 (sequence is synthesized)
cagcccaccgccaaagacagcgcgaagctgcaaccacctagctgctcctcatgcaggggctggagagaggggctagggcttgaaactgagggggagaaagagctgcacattgtaaatggg

SEQ ID NO: 622799 - DNA, 120 bp, Artificial Sequence
  ENSG00000178171_26 (sequence is synthesized)
aagcagagagccaatgagtctgcctgggatgtgtgtgaatcccaaaagacgcaatcccaaatgccatagtcccaagtgttgagaatccaaaatattaaaattactatactctaaaatccg

SEQ ID NO: 622800 - DNA, 120 bp, Artificial Sequence
  ENSG00000178171_27 (sequence is synthesized)
aaatttttttttaattttttaaaagatacttacattttaaaaggatttatttgagaaacataaaaacacaacagaacacatcagccacttcacacaataaaataggcaataatacatatt

SEQ ID NO: 622801 - DNA, 120 bp, Artificial Sequence
  ENSG00000178171_28 (sequence is synthesized)
tttggaagcataaacaggtatacagacagttacaccggtgtgagttattagcagacaaactatattcatgaagaaataggtcaaaatgggaaatgtatacatgcatgtcactatgcttgg

SEQ ID NO: 622802 - DNA, 120 bp, Artificial Sequence
  ENSG00000178171_29 (sequence is synthesized)
taattgtgtgcacctcgctttatacttgcagtcatatcatgaccaacaacctaagtcttttgacgaagtcaatctatgatgcgtcaccaccacacacacagttgcccaaagagcggagat

SEQ ID NO: 622803 - DNA, 120 bp, Artificial Sequence
  ENSG00000178171_30 (sequence is synthesized)
ggcaagaactttcatctctcacaattgcagatgtacaaaaattacatctcttcatttattgaggaagttttgacgtttttatacacacgcacaatgcttacacacacagtcaacctggga

SEQ ID NO: 622804 - DNA, 120 bp, Artificial Sequence
  ENSG00000178171_31 (sequence is synthesized)
tgccggcagggtggctcaggacgaaagcctcaggacccaggagggccatgggtgtaagttccagagtccaaaggccagcgagcctgaagctctgatgtcaaggcagtggaagaaaagcct

SEQ ID NO: 622805 - DNA, 120 bp, Artificial Sequence
  ENSG00000178171_32 (sequence is synthesized)
gtcccagctctgagagagagaccagtttgccttctttatttgttctccctgggcctcagcagattgaatgctgcccaccaacattgagggtggatcttccacacctaggcccctcagatt

SEQ ID NO: 622806 - DNA, 120 bp, Artificial Sequence
  ENSG00000178171_33 (sequence is synthesized)
cacacactaatctctggaaacacctcacagacatgcccagaataatgatctcccaggtctctaggtatcccttaacccagtcgagttcacacccaaaatgaagtccacaggtccacccct

SEQ ID NO: 622807 - DNA, 120 bp, Artificial Sequence
  ENSG00000178171_34 (sequence is synthesized)
tgtcaacttggcatccatccgcatccccttaaaccattttcagtctccaaataaagccccaagcaaggcagtagctccacctaacatgatgcaactatcccgggattgtgatttttaaga

SEQ ID NO: 622808 - DNA, 120 bp, Artificial Sequence
  ENSG00000178171_35 (sequence is synthesized)
ctttagatgttagggatttgaaactttagagatttgcgtctttcagtatttcaatgttggggaccagtgtttgggattatgtcttttagaataatgatccaaacttgtgtgaggactgtg

SEQ ID NO: 622809 - DNA, 120 bp, Artificial Sequence
  ENSG00000178171_36 (sequence is synthesized)
aggctcagggtgggagacgggtgggggagccgaccttaggagggcccactgaaccggcctcaatctggccccagtctggcctactcgctgccccaggacaggtggctacaacatgctgag

SEQ ID NO: 622810 - DNA, 120 bp, Artificial Sequence
  ENSG00000178171_37 (sequence is synthesized)
ggcctgaagggcgtcccctcaggaacattgtattactgttttgtgttgctataaaggataactgtgaccagatcatttataaagtaaagaagtttatttggcttgtaattctgcaggtgt

SEQ ID NO: 622811 - DNA, 62 bp, Artificial Sequence
  ENSG00000178171_38 (sequence is synthesized)
aaagtaaagaagtttatttggcttgtaattctgcaggtgtagaggcatggcaccagcatctg

SEQ ID NO: 622812 - DNA, 83 bp, Artificial Sequence
  ENSG00000178171_39 (sequence is synthesized)
ttgcctggctaatttttctatttttttgtagagacgggttttcgccatgttgcctcagctaaaatgtctcaaaatctcctcaa

SEQ ID NO: 622813 - DNA, 120 bp, Artificial Sequence
  ENSG00000178171_40 (sequence is synthesized)
gccatgttgcctcagctaaaatgtctcaaaatctcctcaactaaaatgtctcaaaatctcagcctcccacagtgctggatgacaggagtgagccagccagcatcatgcatccctgtgcgc

SEQ ID NO: 622814 - DNA, 120 bp, Artificial Sequence
  ENSG00000178171_41 (sequence is synthesized)
cctgccagggctggcgggaccctcccacccttgttgatgggcagtgctagattatttgtcacgaatcatcccctacaaacaatgatttccctccgcttgcactctctaactagagccatg

SEQ ID NO: 622815 - DNA, 120 bp, Artificial Sequence
  ENSG00000178171_42 (sequence is synthesized)
gatggccaaatgctttttgggaagaagccaatggattctcctcggctctgcctgcaagtaacaaaggcttttgactccactccctccacgctgtcagatcgccattccccttcaggaaaa

SEQ ID NO: 622816 - DNA, 120 bp, Artificial Sequence
  ENSG00000178171_43 (sequence is synthesized)
cttcgaatggggctgtggacctcactccccaaaatgtcacaacacatgtgcagcaccccgacattcagaaccatgaagggagaaggtggctggtgtctgtaggagggacaggtgtccgtc

SEQ ID NO: 622817 - DNA, 120 bp, Artificial Sequence
  ENSG00000178171_44 (sequence is synthesized)
ctgggccagtgtcaggccagcaggtgcagggacagatgggccatccacattctccaagattagcttctacctcaaccagcacacctcagcaagatgccaggattgggctccacaggcagc

SEQ ID NO: 622818 - DNA, 120 bp, Artificial Sequence
  ENSG00000178171_45 (sequence is synthesized)
catgaaatgggtttctggaggaaagatcagcacaggaaaaggggtcagtcaggtcgcaggcaaagtgctagggaaatcccatctcatgcagagctcccaccaagaggagcgtgagttgtg

SEQ ID NO: 622819 - DNA, 120 bp, Artificial Sequence
  ENSG00000178171_46 (sequence is synthesized)
ctgtcctggctcgagaagaaggcagcacaggatctgtagctgagggtggccctcccaccaggggacgctggtcagtgcctctcctgactgcctgacgcttggtctccggtggccctctct

SEQ ID NO: 622820 - DNA, 120 bp, Artificial Sequence
  ENSG00000178171_47 (sequence is synthesized)
caccagggctccctgaggcctgctgcaagcaggacacaggctgcacatcacaggttccaaagtgtgcagcaaggcttctgaccaggcccgtccagatctggagcccctgtggagccacat

SEQ ID NO: 622821 - DNA, 120 bp, Artificial Sequence
  ENSG00000178171_48 (sequence is synthesized)
ctgagccctcctcccaagactcacacacaggaccacagcagcatcactgagccgagctgggggcaagtttcaccagattcgcttacctgatccttgcatcaacctcaatgcagttgtcag

SEQ ID NO: 622822 - DNA, 120 bp, Artificial Sequence
  ENSG00000178171_49 (sequence is synthesized)
ccccatttttcagacctggacacggaggcacagggtgctggtgtgacttgcccacagttattagtgtgtgaggtgatgggttttgtcccgtcccagctccaaaggccctgctcttcctca

SEQ ID NO: 622823 - DNA, 120 bp, Artificial Sequence
  ENSG00000178171_50 (sequence is synthesized)
agctccagaacctctcactgagctcctgcagtgaagtcccccctcagagccctcagcccttcctgctttcaggctccagatgtcagagcacccttgggtgccagccacaagtggccctcc

SEQ ID NO: 622824 - DNA, 120 bp, Artificial Sequence
  ENSG00000178171_51 (sequence is synthesized)
agcaggctgagcacccagggggaggctgccctgactcaaccccagcctggggctttgtgctgcacctgagggagtagccgctctgtaaatccttgttgaaagaatgaagtgtcaaaaggt

SEQ ID NO: 622825 - DNA, 120 bp, Artificial Sequence
  ENSG00000178171_52 (sequence is synthesized)
cacagcaccagtagaccccacacagtgagtacctgtagggcaagtgcctctttcgttctcttaataatagagtcaggtcccttctccaagggaagaccctgccttgcagccccagcctgg

SEQ ID NO: 622826 - DNA, 120 bp, Artificial Sequence
  ENSG00000178172_0 (sequence is synthesized)
acagagaacctcagctggacaaagcagccttgatctgagtgagctaactgacacaatgaaactgtcaggcatgtttctgctcctctctctggctcttttctgctttttaacaggtgtctt

SEQ ID NO: 622827 - DNA, 120 bp, Artificial Sequence
  ENSG00000178172_1 (sequence is synthesized)
cagtcagggaggacaggttgactgtggtgagttccaggaccccaaggtctactgcactcgggaatctaacccacactgtggctctgatggccagacatatggcaataaatgtgccttctg

SEQ ID NO: 622828 - DNA, 120 bp, Artificial Sequence
  ENSG00000178172_2 (sequence is synthesized)
ccatagtgaaaagtggtggaaagattagcctaaagcatcctggaaaatgctgagttaaagccaatgtttcttggtgacttgccagcttttgcagccttcttttctcacttctgcttatac

SEQ ID NO: 622829 - DNA, 120 bp, Artificial Sequence
  ENSG00000178172_3 (sequence is synthesized)
ttttgctggtggattcctttaattcataaagacatacctactctgcctgggtcttgaggagttcaatgtatgtctatttctcttgattcacttgtcaataaagtacattctgcaaaagca

SEQ ID NO: 622830 - DNA, 120 bp, Artificial Sequence
  ENSG00000178172_4 (sequence is synthesized)
gtagtgaaactttagaaagaagagccgggaggatgtattggttgttaggaaaatgtaggctaccagtagaaaatgacattctctattaataagatctgagggctttctgggaattgtctt

SEQ ID NO: 622831 - DNA, 120 bp, Artificial Sequence
  ENSG00000178175_0 (sequence is synthesized)
ctctttcttaagtcattcgaaacactgtccctgcgagttctttaagttccctgcaatctgtacacaagagaaagagggagagagagagggagagagacagagagagcagggatcaggtaa

SEQ ID NO: 622832 - DNA, 120 bp, Artificial Sequence
  ENSG00000178175_1 (sequence is synthesized)
aggagtggggctgctgcagccattcagacctcaggagctggaaaattgccaaggatgcagaaggaaatgaagatgatcaaagacgaggatgtgcatttcgacttggctgtgaagaagacc

SEQ ID NO: 622833 - DNA, 120 bp, Artificial Sequence
  ENSG00000178175_2 (sequence is synthesized)
ccctcctttccccactgcctgcagccagtggcttctcggggaaaggctccccaaagacaccccttcccggaagctctccgagggccattttcccagtttcggtatgaacctcccccagga

SEQ ID NO: 622834 - DNA, 120 bp, Artificial Sequence
  ENSG00000178175_3 (sequence is synthesized)
gacctagatgggttccccggggtcttcgaaggagcagggtctaggaaacggaagagcatgcccacaaagatgccctataaccaccctgcagaagaagtcaccctcgccctccactcagag

SEQ ID NO: 622835 - DNA, 120 bp, Artificial Sequence
  ENSG00000178175_4 (sequence is synthesized)
gagaacaaaaaccacggccttcccaacctccctttgctgttcccgcagcccccgcgccccaagtatgactctcagatgatcgacctgtgcaacgtgggcttccaattctaccgcagcctg

SEQ ID NO: 622836 - DNA, 120 bp, Artificial Sequence
  ENSG00000178175_5 (sequence is synthesized)
gaacactttgggggcaagcccgtcaagcaggaacccattaagcccagcgccgtgtggccccagccaacgcccactccattcctgcccacgccctacccctactaccccaaagtccacccg

SEQ ID NO: 622837 - DNA, 120 bp, Artificial Sequence
  ENSG00000178175_6 (sequence is synthesized)
ggcctcatgttccccttcttcgtgccctcgtcctcgcccttccccttcagccggcacaccttcctgcccaagcagcccccggaacctctgctgccccggaaagccgagccccaggagagc

SEQ ID NO: 622838 - DNA, 120 bp, Artificial Sequence
  ENSG00000178175_7 (sequence is synthesized)
gaggagaccaagcagaaggtggagagggtggacgtgaacgtgcagatcgatgacagctactacgtggacgtgggcggctcgcagaagcgctggcagtgccccacctgcgagaagtcctac

SEQ ID NO: 622839 - DNA, 120 bp, Artificial Sequence
  ENSG00000178175_8 (sequence is synthesized)
acctccaagtacaacctggtcacccacatcctgggccacagtgggatcaagccgcacgcgtgcacgcactgcgggaagctcttcaagcagctcagccacctgcatacccacatgctgacc

SEQ ID NO: 622840 - DNA, 120 bp, Artificial Sequence
  ENSG00000178175_9 (sequence is synthesized)
caccagggcacgcggccccacaagtgccaggtgtgccacaaggccttcacccagaccagccacctgaagcgccacatgatgcagcacagcgaggtgaagccgcacaactgccgcgtgtgc

SEQ ID NO: 622841 - DNA, 120 bp, Artificial Sequence
  ENSG00000178175_10 (sequence is synthesized)
ggccgcggctttgcctaccccagcgagctcaaggcccacgaagccaagcacgccagtgggcgcgagaacatctgtgtggagtgcggcctcgacttccccaccttggcccagctgaagaga

SEQ ID NO: 622842 - DNA, 120 bp, Artificial Sequence
  ENSG00000178175_11 (sequence is synthesized)
cacctcaccacgcaccggggccccatccagtacaactgctccgagtgcgacaagaccttccagtacccgagccagctgcagaaccacatgatgaagcacaaggacatccggccctacatc

SEQ ID NO: 622843 - DNA, 120 bp, Artificial Sequence
  ENSG00000178175_12 (sequence is synthesized)
tgctcagagtgtggcatggagtttgtgcagccgcaccacctcaagcagcactccctcacccacaagggtgtgaaggagcataagtgtgggatttgtgggcgggagttcaccctgctggcc

SEQ ID NO: 622844 - DNA, 120 bp, Artificial Sequence
  ENSG00000178175_13 (sequence is synthesized)
aacatgaagcgacacgtgctgatccacaccaacatccgcgcctaccagtgtcacctctgctacaagagcttcgtgcagaagcagaccctcaaggcacacatgatcgtccactctgacgtg

SEQ ID NO: 622845 - DNA, 120 bp, Artificial Sequence
  ENSG00000178175_14 (sequence is synthesized)
aagcctttcaaatgcaagctttgtgggaaggaattcaaccggatgcacaacctgatgggccacatgcacctgcactcagacagcaaacccttcaagtgcctctattgcccaagcaaattc

SEQ ID NO: 622846 - DNA, 120 bp, Artificial Sequence
  ENSG00000178175_15 (sequence is synthesized)
accctgaaggggaacctgacacgccacatgaaagtcaagcatggagtcatggagcggggccttcattcccaaggtctgggaagggggagaatcgccctggcacagacagccggtgtcctg

SEQ ID NO: 622847 - DNA, 120 bp, Artificial Sequence
  ENSG00000178175_16 (sequence is synthesized)
aggagtctggagcaggaggagccctttgacctctctcagaagcgccgggccaaggtgccggtgttccagtcagacggggagagtgcccagggcagccactgccacgaggaggaagaggag

SEQ ID NO: 622848 - DNA, 120 bp, Artificial Sequence
  ENSG00000178175_17 (sequence is synthesized)
gataactgctacgaggtggagccctacagccctggcctggccccccagagccagcagctctgcacacccgaggatctgtccaccaagtcggagcacgcccccgaggtgctggaggaagcc

SEQ ID NO: 622849 - DNA, 120 bp, Artificial Sequence
  ENSG00000178175_18 (sequence is synthesized)
tgcaaggaggagaaggaggatgcatccaagggagaatgggagaagaggagcaagggtgaccttggggcagagggcggccaggagagagactgtgccggcagagatgagtgtctcagtctc

SEQ ID NO: 622850 - DNA, 120 bp, Artificial Sequence
  ENSG00000178175_19 (sequence is synthesized)
agggcttttcagagtacccggcggggcccctctttttctgattacttatacttcaagcacagagatgagagtttgaaagaattactggagaggaaaatggaaaaacaagcagtgctttta

SEQ ID NO: 622851 - DNA, 120 bp, Artificial Sequence
  ENSG00000178175_20 (sequence is synthesized)
ggtatctaagtggacagttttaaaattacatttggaaaatgagaaggaggcagttcaaatatagctttctgcatgaactgtcattttctggagactggcgaatagtaccaatctctacaa

SEQ ID NO: 622852 - DNA, 120 bp, Artificial Sequence
  ENSG00000178175_21 (sequence is synthesized)
atggcttagactaaatgagcagggatgtaggtaatggaaagccttctcaggtcattcacggggcccttgatacccttcacacatgtgcagggtcttcatcagtggcgttttatgcattgc

SEQ ID NO: 622853 - DNA, 120 bp, Artificial Sequence
  ENSG00000178175_22 (sequence is synthesized)
cagtataataaactgtgagtattcttccagatatctaattgtaagctgatgctgaggtgcttttagaaattctactttcctttgattcatatgcaatacatggtaaatttctaattgcaa

SEQ ID NO: 622854 - DNA, 120 bp, Artificial Sequence
  ENSG00000178175_23 (sequence is synthesized)
aaatatggtgcttgaggtgtcaccttattaataactatttaggtgaatttgtgaaggttataatattttccatatagatgaaaatattagtcgtcatatatataaaaatagcctttattc

SEQ ID NO: 622855 - DNA, 120 bp, Artificial Sequence
  ENSG00000178175_24 (sequence is synthesized)
tataaccaaaaatgtcagaaatggcacaggaggatgagctattgaagagaatgctctccagtagttgctgcagatataaggtaaaatttcaggagaagaataattttgactaagggaaac

SEQ ID NO: 622856 - DNA, 120 bp, Artificial Sequence
  ENSG00000178175_25 (sequence is synthesized)
tggtgacctagaatacttagattctcttgttctgtgtcggctgtcttcatcagattgagcatttggagcattatttttcagatgatatgatgatgtttggggccctggctcctcagacaa

SEQ ID NO: 622857 - DNA, 120 bp, Artificial Sequence
  ENSG00000178175_26 (sequence is synthesized)
cctcagacaaaccctcacttctcgagcacggctccctcctggagaccattgctgtcttgctctgaggcctcatgccccataagacagatgcaggggccgggcgcagaggctcacgcctgt

SEQ ID NO: 622858 - DNA, 77 bp, Artificial Sequence
  ENSG00000178175_27 (sequence is synthesized)
aggctgaagcaggagaatcgtttgaacccaggcagtggagattgcagtgagctgagctgagatcacgctactgcact

SEQ ID NO: 622859 - DNA, 120 bp, Artificial Sequence
  ENSG00000178175_28 (sequence is synthesized)
aaaaaaaaaaaggacagatgcaggaagacttgtcaccagtgaccagggggctttctcctcagagctagagctgggggggtgacctcagagaattctcccagaaatctaagctctgactta

SEQ ID NO: 622860 - DNA, 120 bp, Artificial Sequence
  ENSG00000178175_29 (sequence is synthesized)
tttggggtactagaatagttgacagcaaatcattagtaaagaagactctggactgtgttttcagtgctggctgtacattagaagcatctggggtgacctttaaaaaaaaaccaccaaacc

SEQ ID NO: 622861 - DNA, 120 bp, Artificial Sequence
  ENSG00000178175_30 (sequence is synthesized)
aaggccttacccattaagattctgatttaattgatctggagtggagccctaggactgaaattttccaaattgctcctggcaattcttatgtgcagccaagattgagaagattgaggggac

SEQ ID NO: 622862 - DNA, 120 bp, Artificial Sequence
  ENSG00000178175_31 (sequence is synthesized)
taaaatagaactcaccatttctgtggcttccaggacacttcccagagacttcataagtatttctgttcctagcctcagactctttaaggttgagaataggagacctcacaatcatactgc

SEQ ID NO: 622863 - DNA, 120 bp, Artificial Sequence
  ENSG00000178175_32 (sequence is synthesized)
tgacttaggctttcttacctgtctgtaagagccttatgagcggacacacacagtctatatatagatacacactttttacattatactagaagatgatgcctgtgatgtttatggtcactt

SEQ ID NO: 622864 - DNA, 120 bp, Artificial Sequence
  ENSG00000178175_33 (sequence is synthesized)
actatgtttaaaaaatgcatgactggcctatggtgactcattatttcttcccagatgcttgaaccatgatgccagtgagtggaaatgactctattgggtgggatgggcccagcaggtcag

SEQ ID NO: 622865 - DNA, 120 bp, Artificial Sequence
  ENSG00000178175_34 (sequence is synthesized)
acttacttaggcactggcactgagaaaagcaatactgactgggtgtcgtgtacgtgtgactgcccatagcaataaccctctggtactgtgtctgtttatgtaaaaacttcttgtttggta

SEQ ID NO: 622866 - DNA, 120 bp, Artificial Sequence
  ENSG00000178175_35 (sequence is synthesized)
gttttgactcgtatttgtagagctaggtactggttattattgtgcttcatcctatcccagatttcccagtacattcctttagaagacatgtccatctccaactgctgggggctggccttt

SEQ ID NO: 622867 - DNA, 120 bp, Artificial Sequence
  ENSG00000178175_36 (sequence is synthesized)
tctgtaggccaaggtgctgccccattagccccacctggttgtcatcactcacccatgtgttgtgtccatctctgacccatttcccctgccaccttgcctaaagcttctcctgtcagcctc

SEQ ID NO: 622868 - DNA, 120 bp, Artificial Sequence
  ENSG00000178175_37 (sequence is synthesized)
cccaccaccatgaagtgctaagagtactatgtcctgaggtaagggcacctgcaacggagattgtgaagagaagactgtgggtttctgtggttacaagcacaactctgggtcaaaaaccca

SEQ ID NO: 622869 - DNA, 120 bp, Artificial Sequence
  ENSG00000178175_38 (sequence is synthesized)
ttccaagtcctcagaggggcaagtcccttccattcagtattaatatagctcatcagtgcctctgatgaaattgcccaggatgctggcagtgtggcctgggaggcttccagctcttggggt

SEQ ID NO: 622870 - DNA, 120 bp, Artificial Sequence
  ENSG00000178175_39 (sequence is synthesized)
ctggttacacatttattcacactgcggccatgtgttgaggacctactatgtgctgtgtttgaccacacgtcctgtagaatgccgtttggttctgagtatgcctggctggaatggaaacca

SEQ ID NO: 622871 - DNA, 120 bp, Artificial Sequence
  ENSG00000178175_40 (sequence is synthesized)
ggaaattctagagtaacaggctctagtcctttccaaccaaaacaaacctcatgggaatgtttgagggaccagttaatgttgagacagagagagtatggtctagaatggtggttttcagat

SEQ ID NO: 622872 - DNA, 120 bp, Artificial Sequence
  ENSG00000178175_41 (sequence is synthesized)
tgtgttttgagaagccagaggtcatctttaggcctctgaagagtggtaaggggaggagaagctctcaactcccacacccacctcactccaagcagctcaagttccatctgatttatacat

SEQ ID NO: 622873 - DNA, 120 bp, Artificial Sequence
  ENSG00000178175_42 (sequence is synthesized)
tagcattctaagtaaaattttatttggaggcagtaaaaaggtctaggagaaataaaaacaatttgttatggagtgtattccagggcctgtttttagttgttgactctgggcataagacac

SEQ ID NO: 622874 - DNA, 120 bp, Artificial Sequence
  ENSG00000178175_43 (sequence is synthesized)
ttaattagatctaacctgatggttaatacagcattaacctgagcaccaatgctaaaacattggttttgtatgctgttgagtgaccaacatcctggtttgcctgggatgatcgtggtttag

SEQ ID NO: 622875 - DNA, 120 bp, Artificial Sequence
  ENSG00000178175_44 (sequence is synthesized)
acctgttgtcccaggataattattcaagtgtcaccttaattctcaaaagtattccagtttgggtgagaaattacatggacactttatgcaagagcacagagttaagggaagggttggcca

SEQ ID NO: 622876 - DNA, 120 bp, Artificial Sequence
  ENSG00000178175_45 (sequence is synthesized)
gccttgcctaatgagctgatgaaccagaaggcaagccttgaaggagagtccatgtgggccatctcagagaactaagggatgaagccttccaagattaccagcattccaaaaccagaatat

SEQ ID NO: 622877 - DNA, 120 bp, Artificial Sequence
  ENSG00000178175_46 (sequence is synthesized)
catattgtgagactctgaaaataggtcactaccaaatgctttccagccttttgaccactgtcactttgaacaaatcaatggaccagcaaagtggcatatttttcttttattctttttatt

SEQ ID NO: 622878 - DNA, 120 bp, Artificial Sequence
  ENSG00000178175_47 (sequence is synthesized)
ctttcctatgattactcctcatgttacctttcaattcctctttctgtctctctttttaaaaatttgactccccaccggccatgagactaaggctgacctttcataaacccacaagagtaa

SEQ ID NO: 622879 - DNA, 120 bp, Artificial Sequence
  ENSG00000178175_48 (sequence is synthesized)
ctggtatatttgtatatgagtagttgcatgagaaagctcaatgtgcatactgtatttattaagccctgaacgcatttaataaaatattaacatggtgttttgaattatgatctttgtctg

SEQ ID NO: 622880 - DNA, 120 bp, Artificial Sequence
  ENSG00000178175_49 (sequence is synthesized)
ctttgctggaacaaaatataacagagctaacgtttgaaatccttcgcatatttggacaacattacaccaaatgttgattttgtacagaactctggcttgctatttaaaaactaaaactct

SEQ ID NO: 622881 - DNA, 120 bp, Artificial Sequence
  ENSG00000178175_50 (sequence is synthesized)
aagtatatagcagcccaagttgtgaatattgctttctgcttcactgaaaaagcagtttacctgaaaagagcatgtaacctatattttgttaatttaagcaaataaagacatgttgaaaaa

SEQ ID NO: 622882 - DNA, 120 bp, Artificial Sequence
  ENSG00000178175_51 (sequence is synthesized)
agccattcagacctcaggagctgagatgaggaaactacagctcagacagagtaaaggattcggctgaagtcctatagctccacggatcttcagggaggtccttgatctgagaagtctgga

SEQ ID NO: 622883 - DNA, 120 bp, Artificial Sequence
  ENSG00000178177_0 (sequence is synthesized)
gtgacacgtgtcaatcaacccccctccggggggcgcgcgctccggggctcgcgccgagggctcgcgcccctgcctcgtgcctgcgctgctcgtatgtaaatgagggcgcgtgacgcggga

SEQ ID NO: 622884 - DNA, 120 bp, Artificial Sequence
  ENSG00000178177_1 (sequence is synthesized)
cgcagatggacaagggaagagagagaatggccgctgccgccgccgctgctgccgccgccgccgccgccgctcagtgccggagccctcggtgcgcggcggagagaagaggattccggcggg

SEQ ID NO: 622885 - DNA, 120 bp, Artificial Sequence
  ENSG00000178177_2 (sequence is synthesized)
aactcgactcttggcgccaccgcctcatgcactgtgtaggttttgagagtattttagaagggctttatggaccacggctacgaagagacctcagtttatttgaagactgtgaaccagaag

SEQ ID NO: 622886 - DNA, 120 bp, Artificial Sequence
  ENSG00000178177_3 (sequence is synthesized)
agctgactgactggtctatggatgaaaaatgttcattttgtaacctacagagagaagcagtcagtgattgtataccatctcttgattcttcacagtcaacaccaacagaggagctatcat

SEQ ID NO: 622887 - DNA, 120 bp, Artificial Sequence
  ENSG00000178177_4 (sequence is synthesized)
ctcagggccagtccaacactgataagattgaatgccaagcagaaaattacctaaatgcactctttcgaaagaaagatcttcctcagaactgtgatcctaacattcccctagttgctcagg

SEQ ID NO: 622888 - DNA, 120 bp, Artificial Sequence
  ENSG00000178177_5 (sequence is synthesized)
aattaatgaaaaagatgatacgtcaatttgcgattgagtacatttcaaaaagtggtaaaactcaagagaatagaaatggttcaattggaccaagtatagtatgtaaaagtatccaaatga

SEQ ID NO: 622889 - DNA, 120 bp, Artificial Sequence
  ENSG00000178177_6 (sequence is synthesized)
atcaagcagaaaactcccttcaggaagagcaggaaggccccttagacctcactgtgaatcgaatgcaagaacaaaatactcagcaaggggatggagtgttagatctctctacaaagaaaa

SEQ ID NO: 622890 - DNA, 120 bp, Artificial Sequence
  ENSG00000178177_7 (sequence is synthesized)
ccagcataaaatctgaagagtcatccatatgtgatccttcttctgaaaattcagtggctggttcaactgttgatgcaaaatcagaggaagctactaaaatggaaaaaagaaaatcagcat

SEQ ID NO: 622891 - DNA, 120 bp, Artificial Sequence
  ENSG00000178177_8 (sequence is synthesized)
taaacaaagttttggaatctttgtgcatacatcaccagcaacaagttttggctatgttgaaatttctagtccaagagcagaatgctgcttctctttgctgttgtaatacatcatgtgttg

SEQ ID NO: 622892 - DNA, 120 bp, Artificial Sequence
  ENSG00000178177_9 (sequence is synthesized)
tgtcttcagaatctcaaaagcccttaatcgaagatgatttatgtggtctgttctgtagttgtgaatataggctggcagaaagaggttgtttacaaaacgaaaaacaaagccctggtttag

SEQ ID NO: 622893 - DNA, 120 bp, Artificial Sequence
  ENSG00000178177_10 (sequence is synthesized)
aacctctgccagtctgtattaaagatttacattgtttatcttgccaaactgtaactgttgaacacgttaagccagtagtgaatagaggaattgcagacagttataattctcacaggtgct

SEQ ID NO: 622894 - DNA, 120 bp, Artificial Sequence
  ENSG00000178177_11 (sequence is synthesized)
gttctggactgttaccaaacattcactctacaaaatcagcctttcgtagtcctcttttgtcaaaggaagtatgtgatctttcagtcactcttaaagatgcctgtagatctcgaagtccct

SEQ ID NO: 622895 - DNA, 120 bp, Artificial Sequence
  ENSG00000178177_12 (sequence is synthesized)
cacccccaccattatcacctatagaaactgaaggatttgaaaaattgaaagacgtcatctcagagatttcagccttagaaaataacaaacttgaagcaaacattaaccagcctccatctc

SEQ ID NO: 622896 - DNA, 120 bp, Artificial Sequence
  ENSG00000178177_13 (sequence is synthesized)
tcacaccagcagaaatcagcagcaataagagtgatcatcaagataaaatacttaaaactaaaaaatccagtaactcttattctttactctcaaatgacagcaataattctactacaaatc

SEQ ID NO: 622897 - DNA, 120 bp, Artificial Sequence
  ENSG00000178177_14 (sequence is synthesized)
atgaaaaaggtgaaactgctgtaatttttcaagatttaatggatcgcattaatgaaaaactaaaatcaatagaaaccacggatatgacaagccttgtaaaattatctagcagtgattata

SEQ ID NO: 622898 - DNA, 120 bp, Artificial Sequence
  ENSG00000178177_15 (sequence is synthesized)
atacatataatgatttaaaattgggagatttcataacatctctcttgcataatgcaaaagccagtgattatagttttatggaattattgagtcaacatgataaaaaggtagaaaataaaa

SEQ ID NO: 622899 - DNA, 120 bp, Artificial Sequence
  ENSG00000178177_16 (sequence is synthesized)
ttattcagacaagatttcgaaagcgtcaagaaactttatttgcaatgcgcaactcctctgattcacccatgtttagaaggcagtctttacagataaaaagagaacttgctagtcttgatg

SEQ ID NO: 622900 - DNA, 120 bp, Artificial Sequence
  ENSG00000178177_17 (sequence is synthesized)
aaaattttacaagaaaaaaatacaccgaaaaaagttcaaggaaattgacacaaaacaatgagatatcttcatcagacaaaggagaattctatcatgaccaagggccttctttacaaaatt

SEQ ID NO: 622901 - DNA, 120 bp, Artificial Sequence
  ENSG00000178177_18 (sequence is synthesized)
ctaaaagacttcaaggtaaaaatcatgctgaaacatcattttcaccaaattatgcattacagtcactgcaactacctcttcatagttcagaaactaacttgtcttttaatgaattttcag

SEQ ID NO: 622902 - DNA, 120 bp, Artificial Sequence
  ENSG00000178177_19 (sequence is synthesized)
aaagctttaaaacaacttcccctgagaaaatgagcataagaaagccacaggagaaatctgcagatggaaaacaatttttgcaaaatgataggaaaaatccaaagttaggtaatactcaaa

SEQ ID NO: 622903 - DNA, 120 bp, Artificial Sequence
  ENSG00000178177_20 (sequence is synthesized)
ctcttttgagaaatgatgtttctggacttttgagcagaactaaacgaaatattgtgcctccagggtggtattctgtatatgtaacaaataattatgtttttaaaaaatcccctaaagcca

SEQ ID NO: 622904 - DNA, 120 bp, Artificial Sequence
  ENSG00000178177_21 (sequence is synthesized)
aaaaagtatccgaatccacaacaaaaaacgatccagtgaaaaatattcacattgaaagctcacacaatatagacctaaacaaaattgcaatgaattctaatttacaagtggttgtgaagc

SEQ ID NO: 622905 - DNA, 120 bp, Artificial Sequence
  ENSG00000178177_22 (sequence is synthesized)
gtttggaagatacaataagtatagccaaaaaatcctggaataatcagccattatcagaaggatataaagcatccaagaaattgatagaaattgatggtaaagaccaacatgctgacagaa

SEQ ID NO: 622906 - DNA, 120 bp, Artificial Sequence
  ENSG00000178177_23 (sequence is synthesized)
atatgactcttactctaaatagaatgacatgcaaagaacagagcttatcaaaatctgtggtagcatccggcaatattatcaatagtcactgcatgcctacagtggatttgaataacaaaa

SEQ ID NO: 622907 - DNA, 120 bp, Artificial Sequence
  ENSG00000178177_24 (sequence is synthesized)
gacttgaaaatctgaaaaagtcatctattttagatatgggtcgcttgatttccagtgttgaaaatgtaccagcaaaatatgaaggtactgaaagttcatctgtttccaactattctagtc

SEQ ID NO: 622908 - DNA, 120 bp, Artificial Sequence
  ENSG00000178177_25 (sequence is synthesized)
ctatcaaactcatgtttttatctgaggttaaaagtagtgaaggggtcaaatatactttaacttcagttggcacttcccattcaaatgttgttctcccttctgaaaaacctacaacccatc

SEQ ID NO: 622909 - DNA, 120 bp, Artificial Sequence
  ENSG00000178177_26 (sequence is synthesized)
acgtaactgaagaaaaaacagaaacaaatgaggatatctcaaatgcgaactctgaaaattatcactccagtcattatgatactgatacttttcaaagagaactaaacaaattcagtcatg

SEQ ID NO: 622910 - DNA, 120 bp, Artificial Sequence
  ENSG00000178177_27 (sequence is synthesized)
caaaagaaactgcaggatcctctacaatgtttataggtgatataaatagtgataagccacaagaagaacctaaggacaattcaagcagtgctactgatccatcttttaaaagaaaaccag

SEQ ID NO: 622911 - DNA, 120 bp, Artificial Sequence
  ENSG00000178177_28 (sequence is synthesized)
gtagaccaaaaaaaataggtccccaagttgtgaaacagattaagcgaccaattggaagaccaccaaagcctaaaattgatcaaacaaacatcactgtttgccagaatgagccctttagtg

SEQ ID NO: 622912 - DNA, 120 bp, Artificial Sequence
  ENSG00000178177_29 (sequence is synthesized)
ctggaaggaaaagcccagaatgtctcatatcagaagtaaaagaaggtatttataaaaagagtattacagtaactgttatttacggaaggtcaagaagaactaaaaggcatgtttctgaag

SEQ ID NO: 622913 - DNA, 120 bp, Artificial Sequence
  ENSG00000178177_30 (sequence is synthesized)
gaagggtaaacataagcaaccttatgtctttaaacaataatgctggtgattttccaactgaatataatagtcccagaaatattagtgaagacaaaattgacttgggtgaaagaataagtg

SEQ ID NO: 622914 - DNA, 120 bp, Artificial Sequence
  ENSG00000178177_31 (sequence is synthesized)
ctgtagcaagcttgactactgaaagtgagatcttggggtctggctttgaatatgtgagacccatcaagaacaaatctgtgatacctcagccttccaagaacattattcgaccaaatcaga

SEQ ID NO: 622915 - DNA, 120 bp, Artificial Sequence
  ENSG00000178177_32 (sequence is synthesized)
agcctttggcaataagtaggaagcctggtagaccggcaaaagtgaaaatctctggcatatctgtgactattaatagaacttcacctcaggaaagagaagtaagtattagcagctgcttgc

SEQ ID NO: 622916 - DNA, 120 bp, Artificial Sequence
  ENSG00000178177_33 (sequence is synthesized)
ctcctttagaacaggataatacgtcaggaaaaaatctgcctgaagaaaagtatgaccaacagtgcactcaaatggataaaataaggcacactgaagctgatatatttaaaaatggatcaa

SEQ ID NO: 622917 - DNA, 120 bp, Artificial Sequence
  ENSG00000178177_34 (sequence is synthesized)
aacgtatgattgctactgtacctttgagacattctattagggatagaaaaccatctctgcatttcttacattcattagcatcttctagctcacttatttatagaaacgctctgctccata

SEQ ID NO: 622918 - DNA, 120 bp, Artificial Sequence
  ENSG00000178177_35 (sequence is synthesized)
aatcatataaactgcatttgcagaaaaataaaagtcagaaggaaaaacataggcactcaaagatgaaaatagcttacaaagataccccaagaaacagactttcgcggaatgcaaaaaagt

SEQ ID NO: 622919 - DNA, 120 bp, Artificial Sequence
  ENSG00000178177_36 (sequence is synthesized)
gtttggaagataataaattagtacctatttctgaagtatccttggatcctataatttcatcaaaccctttgctcaggtggtgggctacttctgcttcaaatgattccttattagaggaat

SEQ ID NO: 622920 - DNA, 120 bp, Artificial Sequence
  ENSG00000178177_37 (sequence is synthesized)
taaacaatagatttgagcaaataacaaatgcttgggtgcaagtaagtggagatgaagctgaaaattgtattcataaaaaaagagaacacattgaaaatgatcatttcaaagtagcaagcc

SEQ ID NO: 622921 - DNA, 120 bp, Artificial Sequence
  ENSG00000178177_38 (sequence is synthesized)
ctttggaaacttgtcttttagaacttgaagtttcacctgtaaaaatgctttttcagaaaaagtatgatttgaatgaactctgtacttggtttatgcaaacaacagaaacacagtctcttt

SEQ ID NO: 622922 - DNA, 120 bp, Artificial Sequence
  ENSG00000178177_39 (sequence is synthesized)
cactagttagaaaagcaaatgcccgaaaccctttggaagtaataaataccaggggaatcaaattagggaccaaatattctgactttaatgccagccccttcagaaagcactttaaaaaat

SEQ ID NO: 622923 - DNA, 120 bp, Artificial Sequence
  ENSG00000178177_40 (sequence is synthesized)
ttgcactctcttctccttcaaaatcagcagagaaattgcatatactgcataaagtggctaactctccactcttaaatgtgaaaagtaatttagcaatagctagattaaaaaggactgagt

SEQ ID NO: 622924 - DNA, 120 bp, Artificial Sequence
  ENSG00000178177_41 (sequence is synthesized)
ttaagaggttgcatcatgaaaggtggaaaagagagggaaagctgcacaaccatggaacagttgactggaactctaaaaggagaaacttaagatttttctgccagaaccaatttttaaata

SEQ ID NO: 622925 - DNA, 120 bp, Artificial Sequence
  ENSG00000178177_42 (sequence is synthesized)
agactgagggagaaacaaatgctgacatcccactccaaggaaaaagcatagtagataatcagtgtgttttgccacctgagatcaggggtgacttgcagcagagggtagtaatgcctgact

SEQ ID NO: 622926 - DNA, 120 bp, Artificial Sequence
  ENSG00000178177_43 (sequence is synthesized)
cctaatagttggaggtcaaaaaccttaaaagactgtagaatatttttgaggaagctcaactgtcttgaacacagaaatacttttaagctaaatacaatcatttactctcctgaatctact

SEQ ID NO: 622927 - DNA, 120 bp, Artificial Sequence
  ENSG00000178177_44 (sequence is synthesized)
gacagtggaaatactcatcagactcatatggaagaatcaaagcgctttactttaagatctcattctgctaggcaaaattcttttaaaaagcaatctaaagaaatagaaaatgctaacaca

SEQ ID NO: 622928 - DNA, 120 bp, Artificial Sequence
  ENSG00000178177_45 (sequence is synthesized)
aataatccttcagctgatgaatttgctgaccatcttggcaatagtaaattaagcaaatgtgttaactttgacaagaatcctgatagttttgaagttcttagcaatttgaacaaaagaaaa

SEQ ID NO: 622929 - DNA, 120 bp, Artificial Sequence
  ENSG00000178177_46 (sequence is synthesized)
agaccaccatggaagatcacagaaatgtcaacaaaaagacataaacgacagtcttgcaacagtggacaaatggcaaactatttttccaaatccctagcatgctacaagtgaaaactgatg

SEQ ID NO: 622930 - DNA, 120 bp, Artificial Sequence
  ENSG00000178177_47 (sequence is synthesized)
agaaactgaatgtgtctgatgagaatacagcaagttgccctttgagccccattaagatgtgccttaatcgtcccattgaatggaatctgaatttgacaacagcatctctaacgagctgta

SEQ ID NO: 622931 - DNA, 120 bp, Artificial Sequence
  ENSG00000178177_48 (sequence is synthesized)
cagttcataaccaaaatctcaaaagcgaagagaaatagattgcagttcttcttgcactatctttattttgtatgtcagtattccttctgaacaataagcatttatcaattgatcttgaag

SEQ ID NO: 622932 - DNA, 120 bp, Artificial Sequence
  ENSG00000178177_49 (sequence is synthesized)
tatttctagtcctgtgatttgtctttatattaaatcattagcattaatcattttgattatattctttatatgttttttttacatgttttacatcagatcattgtggaattttgtaaacgg

SEQ ID NO: 622933 - DNA, 120 bp, Artificial Sequence
  ENSG00000178177_50 (sequence is synthesized)
attttgatgtttctcttttagtggtattatgtgaattttttatgccctaagtttaaatacgtaattgtccctagttttatttctgtgcacaaagttttaatatataacacattgtgattt

SEQ ID NO: 622934 - DNA, 120 bp, Artificial Sequence
  ENSG00000178177_51 (sequence is synthesized)
ataaagctagtattgtaaagatttgtgatgataacctgacccatgagcagttgtaaaacaggtggataccaactacctcgaagcaaattggtgaaagaaaaggcaaaggtatctcttaga

SEQ ID NO: 622935 - DNA, 120 bp, Artificial Sequence
  ENSG00000178177_52 (sequence is synthesized)
agtaaatctccttcaacgttatatatgtacagaagaaaaaaagttgatcatagctttttgtcaagtagcatgtttcccattcacaggaaaatgtgagcttatcagttctttctctgtatt

SEQ ID NO: 622936 - DNA, 120 bp, Artificial Sequence
  ENSG00000178177_53 (sequence is synthesized)
ttaaatctaagtctgtgggctttaagagcaatggcacaattgcatgtttactgttcagcaaatctgtgcctcttgatagagaaaaatactatgtggtttctgtaagttaccagttttgaa

SEQ ID NO: 622937 - DNA, 120 bp, Artificial Sequence
  ENSG00000178177_54 (sequence is synthesized)
tgaaaaatggtaaatggatttacatctgttttattgtaccttagccttttattttaaagttaaagggatgacttttaaaagcaggacattccctacctttaatagtgcaaagcacagttt

SEQ ID NO: 622938 - DNA, 120 bp, Artificial Sequence
  ENSG00000178177_55 (sequence is synthesized)
cagcaatggctacatgactatgtctaaaaactgaatactcagaatactaaaggtttggtgcttaaatttatttttcccatgccagagaaagcaagctttggtatggtaaaccacatgaga

SEQ ID NO: 622939 - DNA, 120 bp, Artificial Sequence
  ENSG00000178177_56 (sequence is synthesized)
acatggctcctttctttttggatagcctggccatgtgtgaatgggattttagcttattatgtttctaagacttttccttacagcacacttaatgtaccttttcagtccttctcccaaccc

SEQ ID NO: 622940 - DNA, 120 bp, Artificial Sequence
  ENSG00000178177_57 (sequence is synthesized)
cctgcaaattgtctttaaaacaacaacacataaggaatctgaagcacaggagaacacagagccaacaaacagaatgaagaacaatcatctatttttaactgactttctatcattaccatt

SEQ ID NO: 622941 - DNA, 120 bp, Artificial Sequence
  ENSG00000178177_58 (sequence is synthesized)
tttccttttgcttaataactatcttgctttgaaactttgactccttttataagttctatgaggcacatatgtatagcaatttggttctaaaaaccagtgatcttactttagctccatctt

SEQ ID NO: 622942 - DNA, 120 bp, Artificial Sequence
  ENSG00000178177_59 (sequence is synthesized)
aaaatttcaccttaagtaaatggcctctagtagatgataagcctaaaaaaagcacaattattaaaacaaacagatccatgttaggacatttctgaataataaagagaaaaggtgtttcgt

SEQ ID NO: 622943 - DNA, 120 bp, Artificial Sequence
  ENSG00000178177_60 (sequence is synthesized)
tgggtattgcagaaaagaggaccaatttcatatagtacaagtttcgtaagtcaggccaagtgtcaatttcaaaagacaagaaatgaaattgacagtgaatagtgctcataaattggtagc

SEQ ID NO: 622944 - DNA, 120 bp, Artificial Sequence
  ENSG00000178177_61 (sequence is synthesized)
gtatataaagagaagttcctgtcacattatattcccactagaattattatccacagtaaataaatattattttgttatgccaaaaatatagcgagcagcttcatggttaataatacattt

SEQ ID NO: 622945 - DNA, 120 bp, Artificial Sequence
  ENSG00000178177_62 (sequence is synthesized)
atgttgacacctccctaatccaggaaacattcacaaacaaggactcccatatacaaatactttaggaagagagatttcccaggcagatatcaccaaaaatgttttcactgtaggaatcac

SEQ ID NO: 622946 - DNA, 120 bp, Artificial Sequence
  ENSG00000178177_63 (sequence is synthesized)
aaaataagtttttgtcaaaataactgttgttgaacgttatactggtcttcctcactggtgattgataagctcctttctagccagtttgtggtacttccttcattttccctagaaatgtta

SEQ ID NO: 622947 - DNA, 120 bp, Artificial Sequence
  ENSG00000178177_64 (sequence is synthesized)
cttgttaaatgtgtcctcaggcggtttcatctttgttgattctgcccatctaagtcataagcttctcaaatgcaagctactagctagttacacttgtaagttttccataatgacatgatt

SEQ ID NO: 622948 - DNA, 120 bp, Artificial Sequence
  ENSG00000178177_65 (sequence is synthesized)
ttaaacataaagagttcataagaatcacttggagagactatttaaaaatgagattcctaggcccacctcagattgtgataaatctgtgtgactgactgatgcacactttttctggactat

SEQ ID NO: 622949 - DNA, 120 bp, Artificial Sequence
  ENSG00000178177_66 (sequence is synthesized)
aataactgatgctgctctactgctttaatacaggccaaagtaacgtggaagcgcacagcagaaaatcttcagaaagacatcaggtttgttctgattttgacaagggtaacttcttcttta

SEQ ID NO: 622950 - DNA, 120 bp, Artificial Sequence
  ENSG00000178177_67 (sequence is synthesized)
ttaaagcaaataactggacataatcttaaaggattccacctccatcgtctttcctaacttagatcttcattgagaaattgggcaaggttaagtttacttttttctagtgctgcggttttg

SEQ ID NO: 622951 - DNA, 120 bp, Artificial Sequence
  ENSG00000178177_68 (sequence is synthesized)
gctcgtcttggtagtctcatcttcatttctgattctggttctggaacttcatgatcactaaatagatgttgaaaatacacgaatttagatacaagctttaaaaccagtttatttataaat

SEQ ID NO: 622952 - DNA, 120 bp, Artificial Sequence
  ENSG00000178177_69 (sequence is synthesized)
aaaacttttttgtttctgactcacattctatcagtgtttaattgatagcctgattccattgacttagcttaaaactaaaatctcaatgtcaaaaaaacactgacttggctatctagcaaa

SEQ ID NO: 622953 - DNA, 120 bp, Artificial Sequence
  ENSG00000178177_70 (sequence is synthesized)
gtgaatcagggaaaatctagctaatgattttatatactataacagaacctggtgttatacaggaaaaaaagccacaaacttgtaatgaagcttgtaattaaacgaggaccataactgtcc

SEQ ID NO: 622954 - DNA, 120 bp, Artificial Sequence
  ENSG00000178177_71 (sequence is synthesized)
aaaagagatttctttgaaactcaagaagtgacaaaaaaattaagttctctctcttgatttaagcaataaattccaaaaacatagtaaaaaacaagtttccccccaaaaaagacaaattta

SEQ ID NO: 622955 - DNA, 120 bp, Artificial Sequence
  ENSG00000178177_72 (sequence is synthesized)
atcaacagtgtaaaactatgtactgaaaatacacacaatacaattttgcaaatgaatacaagacagctaccaactttcagctctaacagtggcttgactgacagaagccaaaaataaaac

SEQ ID NO: 622956 - DNA, 120 bp, Artificial Sequence
  ENSG00000178177_73 (sequence is synthesized)
actctaccacacaatatacccaaattatagacagaattattctatcagtatgtaagtgtagagaacccaaatattatcaaaatcaagagtttgctaactgaagatcaaagaggagtcaca

SEQ ID NO: 622957 - DNA, 120 bp, Artificial Sequence
  ENSG00000178177_74 (sequence is synthesized)
tcatgtaattaaaaattgaaacaacatattaaagatagtactaaagaccatgccagctaataggcaaaagcaaacacgccgtaagaagtcaaatgctcttgatgatggaattttagacta

SEQ ID NO: 622958 - DNA, 120 bp, Artificial Sequence
  ENSG00000178177_75 (sequence is synthesized)
tatacctaagacagctatttatagttttcactatcttgttatatattctctctcattcgcaagaaaattagtttttttctacttgtagaaataaaaagtgaagataggcctccatatatt

SEQ ID NO: 622959 - DNA, 120 bp, Artificial Sequence
  ENSG00000178177_76 (sequence is synthesized)
ctagacatgcatgacatacctttcagagtcggcttcagcagtctgacacctcctgttcgtcctagctgaaactgtcacttttctctgtccttgaagatagtataattcattatcaggatt

SEQ ID NO: 622960 - DNA, 120 bp, Artificial Sequence
  ENSG00000178177_77 (sequence is synthesized)
tattatcagttgctttttgtttttaatctagtttctaggctaactaaatcctttgtcttcaacacaacaatcctttcaacacatgtatctcctacttgttctagccatcttggtaccagt

SEQ ID NO: 622961 - DNA, 120 bp, Artificial Sequence
  ENSG00000178177_78 (sequence is synthesized)
tatcactgccacagaaaaaggaacccaagcaagattaaaacttaatttattttgtaagcactaataatgagtaagggaaaataaggaaatttcaagcaagttaaaagaaggcaaatttta

SEQ ID NO: 622962 - DNA, 120 bp, Artificial Sequence
  ENSG00000178177_79 (sequence is synthesized)
gttcaatgtatttgaggacagtatatgaaaaatgtgttataatgaagtacctctattattgctatagcacaaagtctgtggagactcatgaaaattaagggttagaaaggtaggttaggt

SEQ ID NO: 622963 - DNA, 120 bp, Artificial Sequence
  ENSG00000178177_80 (sequence is synthesized)
gcataaacaggtgctaaagaaacaacttttttttttcttggaaggtgataaaacatagtaaggtaataatggcttcttgtaaaataacatacatgaccaattcaaatgtgttctaaaata

SEQ ID NO: 622964 - DNA, 120 bp, Artificial Sequence
  ENSG00000178177_81 (sequence is synthesized)
tatttcaatgtaaaaactagaacctttatatactggggattataagattctacttactagaaatttacaaggttaaggagtaagacaaagtttggcttgtgatgtttctcatttataagg

SEQ ID NO: 622965 - DNA, 120 bp, Artificial Sequence
  ENSG00000178177_82 (sequence is synthesized)
aataaaacaatatgaatatatgaagtttggtctattaaaaaggatggtgttctcatggtgtgatataccacaaaaaaaatctgatcaaaaccaaactgttcaatgtgacagtctgaaaat

SEQ ID NO: 622966 - DNA, 120 bp, Artificial Sequence
  ENSG00000178177_83 (sequence is synthesized)
tatatactctacttcattcatgttacacttttttctactccttacctgcttttactaatgcatttatccccaagaaaacatccaacaatatgggactaatttggaacaatatccagcaat

SEQ ID NO: 622967 - DNA, 120 bp, Artificial Sequence
  ENSG00000178177_84 (sequence is synthesized)
tggtatttaaataatttactggttacaaaacaatattatgaccagactccattttagaaaaaattaaatctgcatcgaaaagggccttaaaaaatagatttctaaaatcaaaatcatggt

SEQ ID NO: 622968 - DNA, 120 bp, Artificial Sequence
  ENSG00000178177_85 (sequence is synthesized)
tggctcatgggtgggattattagtgttccttatagtagtttgtctggatgtactttctgattcttctgtaataagcatgcattgcttttgtaatgaggaaataataaaacaataaaaaga

SEQ ID NO: 622969 - DNA, 120 bp, Artificial Sequence
  ENSG00000178177_86 (sequence is synthesized)
tccccacctcccatccccattcaactgcaattccctctttttggttggatctgaatcgttttgcctcaaacttctgggcttggggctctcaccctgtggattgtttagggtgacaggaat

SEQ ID NO: 622970 - DNA, 120 bp, Artificial Sequence
  ENSG00000178177_87 (sequence is synthesized)
acagagaggactatgtggaaagaagtgctgagtttgcagatggtttgctctcaaaagctttgaaagacattcagtctggagcactggacataaataaagcaggcatactttatggcatac

SEQ ID NO: 622971 - DNA, 120 bp, Artificial Sequence
  ENSG00000178177_88 (sequence is synthesized)
ctcaaaaaactttacttcttcacttagaagccttaccagcagggaagcctgcatcttttaaaaacaaaactcgagatttccatgatagttattcatataaggacagtaaagaaacttgtg

SEQ ID NO: 622972 - DNA, 120 bp, Artificial Sequence
  ENSG00000178177_89 (sequence is synthesized)
cagtgctgcaaaaagtagccttgtgggcaagagctcaagcagagcgcacagaaaaaagtaaactcaatctacttgaaacctcagaaataaaattcccaacagcttccacttacctccatc

SEQ ID NO: 622973 - DNA, 120 bp, Artificial Sequence
  ENSG00000178177_90 (sequence is synthesized)
agctaactctacagaaaatggtcactcagtttaaagaaaaaaatgaaagcctccaatatgaaacttcaaatcctactgtacagttaaaaattcctcagctacgagtaagttctgtctcaa

SEQ ID NO: 622974 - DNA, 120 bp, Artificial Sequence
  ENSG00000178177_91 (sequence is synthesized)
aatcacaacctgatggttctggtctgttggatgttatgtatcaagtttccaaaacctcttcagtcctagaaggatcagctctccaaaaactgaaaaatatactccctaaacagaacaaaa

SEQ ID NO: 622975 - DNA, 120 bp, Artificial Sequence
  ENSG00000178177_92 (sequence is synthesized)
tagaatgttctgggcctgtaactcactcaagtgttgactcttactttctacatggggacctctctcctttgtgtcttaattctaaaaatggaacagttgatggaacctctgaaaatactg

SEQ ID NO: 622976 - DNA, 120 bp, Artificial Sequence
  ENSG00000178177_93 (sequence is synthesized)
aagatggattagatcgaaaagacagtaagcagcccaggaaaaaacgtggccgctatcggcaatatgatcatgaaataatggaagaagctattgcaatggtaatgagcggaaaaatgagtg

SEQ ID NO: 622977 - DNA, 120 bp, Artificial Sequence
  ENSG00000178177_94 (sequence is synthesized)
tttccaaagcacaaggaatttatggggtacctcacagcactttagaatacaaggtaaaagaaagatctggaacactgaagactcctccgaagaagaaactacgattaccagacactgggt

SEQ ID NO: 622978 - DNA, 120 bp, Artificial Sequence
  ENSG00000178177_95 (sequence is synthesized)
tatataatatgacagattcagggactggcagctgcaaaaacagcagcaagcctgtgtagattacttgttaggaaaatgtttgtgagtgtgtgtgtgtgtgtgtgtttgcgtgtgtgtgta

SEQ ID NO: 622979 - DNA, 120 bp, Artificial Sequence
  ENSG00000178177_96 (sequence is synthesized)
tgtgcacaggtgtgtatttgtgtgtctatatacacacgtgggaattacaaatgctcactctgacaggagacatgaaattttacagttcaaaaaccacttacatgccttttgaaaaaaagt

SEQ ID NO: 622980 - DNA, 120 bp, Artificial Sequence
  ENSG00000178177_97 (sequence is synthesized)
tttattcagggttttcactgtggacagaattatatagttgcttacttaattctgatagtttgtatttaatccttgtataaataggtgaaaaagattcaggttttctttagtagtcaatag

SEQ ID NO: 622981 - DNA, 120 bp, Artificial Sequence
  ENSG00000178177_98 (sequence is synthesized)
cataaagcgttgtgggaaaacgagtaattgtcaagtgaaacatttttattggtgaaagaccattccagccattcagttgaaccatcttataatggaaatatgatattcatagtttataaa

SEQ ID NO: 622982 - DNA, 120 bp, Artificial Sequence
  ENSG00000178177_99 (sequence is synthesized)
cattctatacaacagacttaacacttgttgtatgtatgtcaagcaaccaatcaaagtttaaatagctatctccatactaagaaaaattaatatatacagtattagtacacgacagtgcat

SEQ ID NO: 622983 - DNA, 120 bp, Artificial Sequence
  ENSG00000178177_100 (sequence is synthesized)
atgtataatgaaatttaatatttatcatttaatagttgatttagcaagaagttggggtttataaggtatatactttaaaaaaactgacacatagttaaccccagcagctatagaaccctt

SEQ ID NO: 622984 - DNA, 120 bp, Artificial Sequence
  ENSG00000178177_101 (sequence is synthesized)
taagatggagtactaagaacaaaaaataatttaaatttaattattaaaataatttagttttgtttttcatttgaaaaataagctaatgtgtaaggttagaaaagaaagttggaatgcaac

SEQ ID NO: 622985 - DNA, 120 bp, Artificial Sequence
  ENSG00000178177_102 (sequence is synthesized)
aatgcaacttagagcatgtttataatgtgcacagaaaaagcttgagaatgataattttggtttaaatgtgctggttagttgatgttatgactactttaaattttaaggattgtgacacac

SEQ ID NO: 622986 - DNA, 120 bp, Artificial Sequence
  ENSG00000178177_103 (sequence is synthesized)
tcctactattgaaaaacctcagtgtaactttaatatatttgctgctgtgacatttcaaaacattttcagtttatcaaaatgaattgcagatttcattttggtgggcgatacattatcatt

SEQ ID NO: 622987 - DNA, 120 bp, Artificial Sequence
  ENSG00000178177_104 (sequence is synthesized)
ttgctaataaccaaatttgcagtttgttcagggtcttgaatagatttacaaatatttaacactgaagctgttttgaactttcagtaatgtaaactctctactaattgggtagttagaagc

SEQ ID NO: 622988 - DNA, 120 bp, Artificial Sequence
  ENSG00000178177_105 (sequence is synthesized)
tgggcagtgcattttaacttttactagactcataagagagactggtcatttttacctagcagttttaaaatatgggtcaaagtatccttgttggatttatggagtatgcaactgtagtgg

SEQ ID NO: 622989 - DNA, 120 bp, Artificial Sequence
  ENSG00000178177_106 (sequence is synthesized)
taaaatgttataaagcatatgccttcatataaagaatagggatttgctttatgtattcaaaattctctgagtgccccctttctctgttaaaattcaggttctgatcatttttctaagcca

SEQ ID NO: 622990 - DNA, 120 bp, Artificial Sequence
  ENSG00000178177_107 (sequence is synthesized)
gttttcctaagtccaaaaggaatacttttagctgaatttaaaaaataagtgcaccttgtcaaatgcttgtgtttttacacttgtgtttgtgtgtatttaataatcatatatacgtgtaat

SEQ ID NO: 622991 - DNA, 120 bp, Artificial Sequence
  ENSG00000178177_108 (sequence is synthesized)
actaaagagattttcagctattaaattttaaaactgcttacatgtttaaagaaactgaagagtgagaaactacacaaccaagcagttatttggtctctgagatctatacttaaccctctt

SEQ ID NO: 622992 - DNA, 120 bp, Artificial Sequence
  ENSG00000178177_109 (sequence is synthesized)
cagctattaatgttacctgcacactagggtatgaatcctcttttttttttttttcaccccaagaaaatatacataatagattacagaacagcagatgtcagggtcatctttctttttaaa

SEQ ID NO: 622993 - DNA, 120 bp, Artificial Sequence
  ENSG00000178177_110 (sequence is synthesized)
gaattaagccatattttgtgagggccagaacttgcattatttagtatatttcccccttcccccaatggaaagcaaagttaaaggtaaagtacatatttcaaaacaattttattgacctct

SEQ ID NO: 622994 - DNA, 120 bp, Artificial Sequence
  ENSG00000178177_111 (sequence is synthesized)
ttatacagaattttacttggaaaactttgggggctttgaatgcattacataatatttatattgtattgagcttttttattcctcacactatatttacattaataaattgattgagaagtt

SEQ ID NO: 622995 - DNA, 120 bp, Artificial Sequence
  ENSG00000178177_112 (sequence is synthesized)
tatagtaaagggaaacttacagaacacttttgtatcatttaaaagatgacctgaccaaaaactttacaggattcataaatcagggatcattttgctattgacttcacagtaatcagtagt

SEQ ID NO: 622996 - DNA, 120 bp, Artificial Sequence
  ENSG00000178177_113 (sequence is synthesized)
ttgcagcattttagtacttgtattatttatttttggtcagaaatagtaaattaaaatattttttgatagtttataggtaataatcaacccataacttttaaaagaaacaaaacatttcta

SEQ ID NO: 622997 - DNA, 120 bp, Artificial Sequence
  ENSG00000178177_114 (sequence is synthesized)
tttaaaagaaacaaaacatttctattattgagttaacatttgattatacaaactaggaaaggcagggaaattccccttctccccagtgattctattaagatgacctttatgttaaacttt

SEQ ID NO: 622998 - DNA, 120 bp, Artificial Sequence
  ENSG00000178177_115 (sequence is synthesized)
caaagtactttatgaatttagttaccagttactatttattaattgacaattttctgaaaaatcccgtttcagcagacttaatgaaggtgaaagcaacccttatgtgctttctacttattt

SEQ ID NO: 622999 - DNA, 120 bp, Artificial Sequence
  ENSG00000178177_116 (sequence is synthesized)
gaatgttcctcaagtattttatattaaaaaaaaaaagaaggaaaagagaaaacagtgcctctgtttttagaaaactactgctcagtaaagttgtttaaaccatttctggtagctaatgac

SEQ ID NO: 623000 - DNA, 120 bp, Artificial Sequence
  ENSG00000178177_117 (sequence is synthesized)
aattttatattaaattgtatactaactttagtgagactgatttttttagttgtttacagtacaaatacttgtatttgttttttaattgcagtatttccaatgtcgcagtaatttagtaaa

SEQ ID NO: 623001 - DNA, 120 bp, Artificial Sequence
  ENSG00000178177_118 (sequence is synthesized)
actctgtggctgccttgattttgacagattttgttaatataaactgattgttaggcaattagttatatttatgcataaatcaattgcactataattcatgaattatttattacaatattt

SEQ ID NO: 623002 - DNA, 120 bp, Artificial Sequence
  ENSG00000178177_119 (sequence is synthesized)
tctaatgaattcatgtatctgtcttgtgttgtaaatgtactgtaattctgttcctactttgtgttgttatatatctaaatctgattgtatgaattttaattgttcagttaacgtgtttct

SEQ ID NO: 623003 - DNA, 120 bp, Artificial Sequence
  ENSG00000178177_120 (sequence is synthesized)
gtgtttctaggttgtaatttgtagtaaagcacttcaatgcttttgcacttaaatttacaacactgttggtgtgtgattgatttactcattcagtaaaagaaaaaaagaaaagaaaagaaa

SEQ ID NO: 623004 - DNA, 80 bp, Artificial Sequence
  ENSG00000178184_0 (sequence is synthesized)
ggggccggggcctgggggcgccgcccccgggagtctttctgcggcccctgaggagcgagggcgacggcgaggctgaccgg

SEQ ID NO: 623005 - DNA, 120 bp, Artificial Sequence
  ENSG00000178184_1 (sequence is synthesized)
cccctgaggagcgagggcgacggcgaggctgaccggggccgaaaccatgaaccgaagttttcacaagtctcagaccttgcgattctacgattgcagcgcagtggaagtcaagagcaagtt

SEQ ID NO: 623006 - DNA, 120 bp, Artificial Sequence
  ENSG00000178184_2 (sequence is synthesized)
tggggcggaattccgaaggttctctctggaccgtcataagcctgggaagtttgaagatttctacaagctggttgtgcacacccaccatatctccaacagtgatgtaactattggctatgc

SEQ ID NO: 623007 - DNA, 120 bp, Artificial Sequence
  ENSG00000178184_3 (sequence is synthesized)
agatgtgcacggagacctgctgcccatcaacaatgatgacaacttctgcaaggcggtttctagtgcaaatcccctgctcagggtcttcatccagaaacgagaggaggccgagcgtggcag

SEQ ID NO: 623008 - DNA, 120 bp, Artificial Sequence
  ENSG00000178184_4 (sequence is synthesized)
cctcggcgcgggctcgctgtgcaggcggaggcgggcgctgggcgcgctgcgtgatgaaggaccccggcggcgtgcacacctggacatcggcctcccgcgcgacttccgccccgtatcatc

SEQ ID NO: 623009 - DNA, 120 bp, Artificial Sequence
  ENSG00000178184_5 (sequence is synthesized)
catcatcgatgtggacctggtccccgagacgcaccggcgagtgcggctgcaccggcacggctgcgagaagccgctgggcttctacatccgcgatggcgccagcgtgcgcgtgaccccgca

SEQ ID NO: 623010 - DNA, 120 bp, Artificial Sequence
  ENSG00000178184_6 (sequence is synthesized)
cgggctggagaaggtgcccggcatcttcatctcgcgcatggtacccgggggcctggcggagagcaccgggctgctggctgtgaatgacgaggtcctggaggtgaacggcattgaggtggc

SEQ ID NO: 623011 - DNA, 120 bp, Artificial Sequence
  ENSG00000178184_7 (sequence is synthesized)
cgggaagacgctggaccaggtcacggacatgatgatcgccaacagccacaacctcatcgtcaccgtcaagcccgccaaccagcgcaacaacgtggtgcgcggcggccgcgcgttgggcag

SEQ ID NO: 623012 - DNA, 120 bp, Artificial Sequence
  ENSG00000178184_8 (sequence is synthesized)
ctcgggaccgccctcggacggcaccgcgggcttcgtgggtccccccgccccgcgcgtcctgcagaacttccaccccgacgaggcggagagcgatgaggacaacgacgtcgtcatcgaggg

SEQ ID NO: 623013 - DNA, 120 bp, Artificial Sequence
  ENSG00000178184_9 (sequence is synthesized)
atcgagggcacactggagcctgcacgtcccccccagaccccgggcgcgcccgcaggcagcctctcccgggtcaatggcgcgggcctggcgcagcggctgcagcgggacctggccctggac

SEQ ID NO: 623014 - DNA, 120 bp, Artificial Sequence
  ENSG00000178184_10 (sequence is synthesized)
ccagcggctgctcagctccctgcgggccgacccccgtcacagcctggcgctgccgccaggcggcgtggaggagcacgggcccgcggtcacgctctagactcccgagaggcccccaaatcc

SEQ ID NO: 623015 - DNA, 120 bp, Artificial Sequence
  ENSG00000178184_11 (sequence is synthesized)
tagctccagttccccggtaaggacagggacaggacctgcagactgcatccgctcattttttgttgtttttgtgaccacaaaaacaacgctgctctttgtttcaacttccggatataaaaa

SEQ ID NO: 623016 - DNA, 120 bp, Artificial Sequence
  ENSG00000178184_12 (sequence is synthesized)
cacaagtattgcctatttttatagaatttcgccacagaacttaaaatgaacgcctgtagagacactctataccaggcctgagtgcaggtcttggcgcctttgcaaagtgatagaaaagat

SEQ ID NO: 623017 - DNA, 120 bp, Artificial Sequence
  ENSG00000178184_13 (sequence is synthesized)
ctgaccaagtgcaaaaaaatgctttttaaaatttttacaaatactttgtttttaaagtgaagctttaaaattacttttttaaaatagtcaaattcatgtttttaagtaagttggcccatg

SEQ ID NO: 623018 - DNA, 120 bp, Artificial Sequence
  ENSG00000178184_14 (sequence is synthesized)
caacatatctcagcattcttgctgtgctctctgctgacttgcaggcgaggccgactgtgctgatgtacgtgacaagaggctggtttttaataacgaatgcagccaggtgcagtggctcac

SEQ ID NO: 623019 - DNA, 120 bp, Artificial Sequence
  ENSG00000178184_15 (sequence is synthesized)
gggtgacagagcaagactctgtctcgggaaaaaaaaaaaatacacccaaacctgtccatgtacaaccatggagatgaattccagattttcacactgttcatagtcataattcggttggga

SEQ ID NO: 623020 - DNA, 120 bp, Artificial Sequence
  ENSG00000178184_16 (sequence is synthesized)
caggagagctcccaccagcacacttatggcacccgcagctgtggaattgttccggggcttttttttgtttgttttgagacatagtgtcttgttctgtcatccaagctggagggatctcag

SEQ ID NO: 623021 - DNA, 120 bp, Artificial Sequence
  ENSG00000178184_17 (sequence is synthesized)
ttgaactcctgacctcaggtgatacggtcccccctcagcctccaaaaatgctaggattatagacgtgagccacagcaccagaccaggggctatttttgtgacccacataggtggcccatt

SEQ ID NO: 623022 - DNA, 120 bp, Artificial Sequence
  ENSG00000178184_18 (sequence is synthesized)
tgtgacccacataggtggcccattcagcctcaaggggaaatccagggtaggaagcagcagctctgctggactgggctcagcagtcccatttgggatgtaagcctctattgcctctaagat

SEQ ID NO: 623023 - DNA, 120 bp, Artificial Sequence
  ENSG00000178184_19 (sequence is synthesized)
gacccttttcctgtgggttgactgactctgagggcgatttcggaaatgttttcagcagaaatgaaggataagcatcgcacatgtccagcaatgtctttgagaatgcagtcatttgcacgt

SEQ ID NO: 623024 - DNA, 120 bp, Artificial Sequence
  ENSG00000178184_20 (sequence is synthesized)
gagttctcatctttgttttctgaaacagacgtttcttttagtaagtcacaatacatgctaattttcatttctagaatggtcactggcagttctcacttttaactataagaagtcacgtgg

SEQ ID NO: 623025 - DNA, 120 bp, Artificial Sequence
  ENSG00000178184_21 (sequence is synthesized)
gtggaacttagtgatttttaacaaatactaaattcatcctcactttatgttgatcttccagcaacgtttatatatttagtaattttaaaaattcctatttgatacaattaaattttatat

SEQ ID NO: 623026 - DNA, 120 bp, Artificial Sequence
  ENSG00000178184_22 (sequence is synthesized)
tgttttgcttgaataaaatgttacatttatactttgagaactctgaccaaatctttcatacagatacaggtaaagaaatatttttctaggttgtcggagctgcgtacctcccgctgcttc

SEQ ID NO: 623027 - DNA, 120 bp, Artificial Sequence
  ENSG00000178184_23 (sequence is synthesized)
tccttgtggtccagcaccacctgctggtcagtggcagaactgtcctgacttcgtgaacatggaactgctaagagggaaaactgcatctcagcattttcattttttctgaatattaagtga

SEQ ID NO: 623028 - DNA, 120 bp, Artificial Sequence
  ENSG00000178184_24 (sequence is synthesized)
aaagcaagttctatttttaagaaatagcttttgctgaggagttgtgaattcctgcacctgtgtttgatgttatttgtatgcaatggattgctggccctttgttcctaagcaagagaagac

SEQ ID NO: 623029 - DNA, 120 bp, Artificial Sequence
  ENSG00000178184_25 (sequence is synthesized)
caaagatgcttccccatgacctctccggtgaggatccgcaccccccggacttgctctctgatgaagggcatgtcgttcagtgccccagcagtcagaagcagtttttgtggaactaaaact

SEQ ID NO: 623030 - DNA, 120 bp, Artificial Sequence
  ENSG00000178184_26 (sequence is synthesized)
aataatgttaccctcacaaaggaaatgttcttttactaagttattgctgattcttgaatgtctgttatataactgggtcggctatcaagaaggaaggttatatttcttatcacattttaa

SEQ ID NO: 623031 - DNA, 120 bp, Artificial Sequence
  ENSG00000178184_27 (sequence is synthesized)
gttgttaagcaaatgtgagtttttttttaagaaatgaggctttcactgagatttgtgtgctattcataattttaggaattactgcttagaacagctgcttgggtgtatttttctacacag

SEQ ID NO: 623032 - DNA, 120 bp, Artificial Sequence
  ENSG00000178184_28 (sequence is synthesized)
gtctgtacttctgccactttctccttttaaaaaaacaaaactatgcatattatgtattaaagttttcttggttttatatatcagagaataaaaacttttttgacttttgagtaaacaaaa

SEQ ID NO: 623033 - DNA, 120 bp, Artificial Sequence
  ENSG00000178184_29 (sequence is synthesized)
agggggacttctctgtgcccctgttgtcggcatgccatggtagagaatggatggcccacgcagctggcccctcatgagaccccagccatctcattccactgggagccacgtcaggacgaa

SEQ ID NO: 623034 - DNA, 120 bp, Artificial Sequence
  ENSG00000178184_30 (sequence is synthesized)
ggaggactgggaggggcgtctggctgcgtggtgtggggcctgcagtgttgtggcacacgcagcttcagccaaacatctagccctgtacctagaactaagaaataaaactataacatcaga

SEQ ID NO: 623035 - DNA, 120 bp, Artificial Sequence
  ENSG00000178187_0 (sequence is synthesized)
gcagttcggctcccggctgcagactccagctcattgtgttctgactgcgatgtggcgcttgcgatctctcgccgccggcagaggctcctcgaagagcgacacggggctgaccaggcacgg

SEQ ID NO: 623036 - DNA, 120 bp, Artificial Sequence
  ENSG00000178187_1 (sequence is synthesized)
tggtcaaagccgcagagggagagcgggagcggtcgtgaggtcgtctggggagaagggcggaggcaaagccgaggagcaggtgtgtggacccttctagcctgaggagtcctgcaggtgtga

SEQ ID NO: 623037 - DNA, 120 bp, Artificial Sequence
  ENSG00000178187_2 (sequence is synthesized)
agctccacacctgcctccatagcactttgcctgtccctaagagggctcatcggagaagaaagaatggctgtcagccacctgccaaccatggtccaggaatcggtgaccttcaaggatgtg

SEQ ID NO: 623038 - DNA, 120 bp, Artificial Sequence
  ENSG00000178187_3 (sequence is synthesized)
gctatactgttcacccaggaagagtgggggcagctgagccccgcccagagggccctgtacagggacgtgatgctggagaactacagcaacctggtctcactgggactcttaggacccaaa

SEQ ID NO: 623039 - DNA, 120 bp, Artificial Sequence
  ENSG00000178187_4 (sequence is synthesized)
ccagatacgttttcccagctagaaaaaagggaagtgtggatgccagaggacacccctggaggcttctgtcttgactggatgactatgcctgccagtaagaaatctactgtcaaggcagag

SEQ ID NO: 623040 - DNA, 120 bp, Artificial Sequence
  ENSG00000178187_5 (sequence is synthesized)
attcctgaagaagaattggatcaatggacaataaaggaaagattcagtagcagtagtcactggaagtgtgctagcctgctggagtggcaatgtggaggccaggagatcagtttgcagcga

SEQ ID NO: 623041 - DNA, 120 bp, Artificial Sequence
  ENSG00000178187_6 (sequence is synthesized)
gtggtactcactcaccccaacaccccatcacaggaatgtgatgaatccgggagcactatgagctcatctcttcacagtgatcaaagtcagggatttcaacctagcaaaaatgcctttgag

SEQ ID NO: 623042 - DNA, 120 bp, Artificial Sequence
  ENSG00000178187_7 (sequence is synthesized)
tgtagtgagtgtggaaaagtcttctctaagagttcaactcttaataaacatcagaaaattcataatgaaaaaaatgcaaatcagaaaattcatattaaggagaaaagatatgaatgtaga

SEQ ID NO: 623043 - DNA, 120 bp, Artificial Sequence
  ENSG00000178187_8 (sequence is synthesized)
gaatgtgggaaagcctttcaccagagtacgcaccttatccatcaccaaagaattcacactggcgagaaaccctatgaatgtaaggaatgtggcaaggccttctcagtgagctcctcactt

SEQ ID NO: 623044 - DNA, 120 bp, Artificial Sequence
  ENSG00000178187_9 (sequence is synthesized)
gtggaaaagcttttatccgaaatatacaccttgcccatcatcatagaatacatactggagagaaaccttttaaatgtaacatttgtgaaaaagcctttgtgtgcagggcacaccttacca

SEQ ID NO: 623045 - DNA, 120 bp, Artificial Sequence
  ENSG00000178187_10 (sequence is synthesized)
aacaccagaatatccacagtggagagaaaccctataaatgcaatgaatgtggaaaagcctttaatcagagtacaagtttccttcagcatcagagaattcacactggagagaaaccctttg

SEQ ID NO: 623046 - DNA, 90 bp, Artificial Sequence
  ENSG00000178187_11 (sequence is synthesized)
cttcagcatcagagaattcacactggagagaaaccctttgaatgtaatgaatgtgggaaggccttcagggtgaactcttcccttactgaa

SEQ ID NO: 623047 - DNA, 120 bp, Artificial Sequence
  ENSG00000178187_12 (sequence is synthesized)
catcctttgcacgacatcggaaaattcacactggagagaaaccttacagatgtggcttgtgtgagaaagcctttcgggaccaatcagcactagcccaacatcagagaattcatactgggg

SEQ ID NO: 623048 - DNA, 120 bp, Artificial Sequence
  ENSG00000178187_13 (sequence is synthesized)
aaaaaccttatacatgtaacatatgtgaaaaagccttcagtgaccattcagcccttacccaacataagagaattcatactagggaaaaaccttacaaatgtaaaatctgtgagaaagcct

SEQ ID NO: 623049 - DNA, 120 bp, Artificial Sequence
  ENSG00000178187_14 (sequence is synthesized)
ttatccgaagcactcacctgactcaacatcagaggattcacacaggagagaaaccctataaatgtaataaatgtgggaaagcttttaaccagactgcaaacctcattcagcatcagagac

SEQ ID NO: 623050 - DNA, 120 bp, Artificial Sequence
  ENSG00000178187_15 (sequence is synthesized)
atcatattggagagaagtgatatgaatgcagtttgtatggaagacctttgagactgagtagatgaattattgaatgtgagataatccgttctagagaataactatgaaagcttgcatcaa

SEQ ID NO: 623051 - DNA, 120 bp, Artificial Sequence
  ENSG00000178187_16 (sequence is synthesized)
tgaaagcttgcatcaagatagtcactttatttactgagggtcaggtttcacagtgtcatggggtttgggcatttaagaatggcaaacactcggctgggcacagtggctcacgtctgtaat

SEQ ID NO: 623052 - DNA, 120 bp, Artificial Sequence
  ENSG00000178187_17 (sequence is synthesized)
tcgtgaggtcgtctggggagaagggcggaggcaaagccgaggaggtgcgggttgtggtccattctggaggacgctgatcgaatgccccaaacttcccggaatcaggtgtgtggacccttc

SEQ ID NO: 623053 - DNA, 120 bp, Artificial Sequence
  ENSG00000178187_18 (sequence is synthesized)
ttctcttgagatcgctcagtgaggctgaagggaaagaccagagggtgggtggaaggcatgagaactggacctggagcaggctttctgcagggaaaagtcaatgtatagtaccctcagaag

SEQ ID NO: 623054 - DNA, 120 bp, Artificial Sequence
  ENSG00000178187_19 (sequence is synthesized)
gaggagagagaatggggagcaaacaggaaccaaaacactcactgcttggggtactggaggcctcccaggatgtgaatgctcactgcctcgctctggactgctgtatgagagcttttgacc

SEQ ID NO: 623055 - DNA, 70 bp, Artificial Sequence
  ENSG00000178188_0 (sequence is synthesized)
ctgacctcaagcgcgctcccggccctgacctcattttttttttttctatttttaaaatagggattctagt

SEQ ID NO: 623056 - DNA, 120 bp, Artificial Sequence
  ENSG00000178188_1 (sequence is synthesized)
ctgggattacaggcgtgagccagcgctcccggccctgacctcattttttttttttctatttttaaaatagggattctagttctgttgcctgggctggagtgccgtggcgccatctcggct

SEQ ID NO: 623057 - DNA, 89 bp, Artificial Sequence
  ENSG00000178188_2 (sequence is synthesized)
cctcattatttctacccaccccctcccccaccactaccaccatcttcatctccagcctcagagatgcaaactcctggaccgcctgcccc

SEQ ID NO: 623058 - DNA, 120 bp, Artificial Sequence
  ENSG00000178188_3 (sequence is synthesized)
ctccagcctcagagatgcaaactcctggaccgcctgcccctttcctcagataaaccaaggtcgtaagttcaggctccgcctccccgcagggcctccccaaggtcacccgcttctttcctc

SEQ ID NO: 623059 - DNA, 120 bp, Artificial Sequence
  ENSG00000178188_4 (sequence is synthesized)
gctcagctccttggtggcgttgtccgcgtgcccctccacagcggggccggcgctctaggctgcagcgggccgttcacacagcctcatcatctcgctggtttccggtgctcggcggctact

SEQ ID NO: 623060 - DNA, 120 bp, Artificial Sequence
  ENSG00000178188_5 (sequence is synthesized)
ctagccctcagccgggccctgggactctatcccctaaggccggttctctatggtcgacatcgcccctttgtcccgaatttcctccgggaggacgctctggtgggatccaagcacttcccc

SEQ ID NO: 623061 - DNA, 120 bp, Artificial Sequence
  ENSG00000178188_6 (sequence is synthesized)
cgctgcgtctgtggtcgcttttaggtgcaactggagaaggcactgaagccctacgagattcacaccgtcttcggtctcctggggtcggcgccgagtgggaggatggcggaagtaagtatg

SEQ ID NO: 623062 - DNA, 120 bp, Artificial Sequence
  ENSG00000178188_7 (sequence is synthesized)
aaggtgcccttccctcccgccgctgttctctatggtctcttccttcagcgacgggaaagggggtcctgacgcctgcgcggaaccgggctgggcgctcgtcgcgtagtgggtgggggcgca

SEQ ID NO: 623063 - DNA, 120 bp, Artificial Sequence
  ENSG00000178188_8 (sequence is synthesized)
gggagcgggagccgccgccgccgccgccgccgccggagctaacctcggggaccgagatgcaggtgggaccggaaccggaacccccctcttcaagtaccttttccctctccgcgacccggc

SEQ ID NO: 623064 - DNA, 120 bp, Artificial Sequence
  ENSG00000178188_9 (sequence is synthesized)
cctggcgcccgagaggattcctgggtgggggtgggcgtggagggccgggggctggagaggcactcggccccggagagtgcagcagacagggctggtcccgaggtggatgcggccccggaa

SEQ ID NO: 623065 - DNA, 120 bp, Artificial Sequence
  ENSG00000178188_10 (sequence is synthesized)
aatgggcggctggggggtgtccagggagtagggtcggatcggagtatatggaccaccgggcccggagggtccgagccgagagcggagcctgcaccctccacctcccgcccttcgggaaat

SEQ ID NO: 623066 - DNA, 120 bp, Artificial Sequence
  ENSG00000178188_11 (sequence is synthesized)
atcagaactgagccaggaggcaggtgcaccgggaaaatgtgtctgagtcctgcttggcagaagagaaactgagtcaccagcttaggagtcgcagggtcagcgggcctgaagggggctggg

SEQ ID NO: 623067 - DNA, 120 bp, Artificial Sequence
  ENSG00000178188_12 (sequence is synthesized)
tctgtctgcggtgcggaggattgggtgggcctgtgtgagccgaggtggccgctggctggagattggtttgcacttcttggctgggttcccccgtgctccatgactcctgcatctcctgat

SEQ ID NO: 623068 - DNA, 120 bp, Artificial Sequence
  ENSG00000178188_13 (sequence is synthesized)
tgtttctcgttggtttggagttgtccctgcggttggagccatctgagcttgtagggtcgaggcccaggaggaaggggagggttcaccgacttacagcctggctgtaggtttgaacaggag

SEQ ID NO: 623069 - DNA, 120 bp, Artificial Sequence
  ENSG00000178188_14 (sequence is synthesized)
tctgaggtcgctgagggtttggggaggctttcctgagctgctctggccccagtcctggggctgtcaccttccagtattgcgtggcgggaggagcgctaacaagagccaagggttgtaaat

SEQ ID NO: 623070 - DNA, 120 bp, Artificial Sequence
  ENSG00000178188_15 (sequence is synthesized)
tccacacccagctctgccactttctagttgtaagaccttgagagggctcctcctttctctaatttctattttagaaaattggaacaataatattcttctcccacatgaagatagtaacaa

SEQ ID NO: 623071 - DNA, 120 bp, Artificial Sequence
  ENSG00000178188_16 (sequence is synthesized)
tggcagtcgttcagcggatgcttactttgcgttcagcgctgacataccccattccatgtaattctctcaacatttcgaggggagggatcattagctttgtttaacagatagaaaaacgga

SEQ ID NO: 623072 - DNA, 120 bp, Artificial Sequence
  ENSG00000178188_17 (sequence is synthesized)
ggctcagagaggacgtggaatttgttcaagataacatcgctcataaggtggctggactgggtgctcataaggtggtttgagccctggtctgactcaagtccatggccttaaccagaaggc

SEQ ID NO: 623073 - DNA, 120 bp, Artificial Sequence
  ENSG00000178188_18 (sequence is synthesized)
taacctgcctttagggcatactccccagtgggagaagaggaaggtgaaaaatcctagggccccagctctccctgtgatgttttgtttacgtgaggccagcaaagacttgacctgagccaa

SEQ ID NO: 623074 - DNA, 120 bp, Artificial Sequence
  ENSG00000178188_19 (sequence is synthesized)
cccagtttctcctctggggcccctgcggcctctggccccagactgaagggataccaaagaagtgggctgtagctatttcacatctccttcacgcagtgcgtgggtgctggactctggggt

SEQ ID NO: 623075 - DNA, 120 bp, Artificial Sequence
  ENSG00000178188_20 (sequence is synthesized)
cagctttcaagacaattactgttttggtccatcatgcatccatcctcattaatgaatcggccccctccaaagagttggaccctaagatgcgtgaggcaggctctctaaggtctagaatcc

SEQ ID NO: 623076 - DNA, 120 bp, Artificial Sequence
  ENSG00000178188_21 (sequence is synthesized)
cagctcctctctagccccctgcgagctggggcggtgaggtgctatggctgaggctggcccagccgggccctggggacagggactatgaagtggggaaaacagtagacttggagttctgaa

SEQ ID NO: 623077 - DNA, 120 bp, Artificial Sequence
  ENSG00000178188_22 (sequence is synthesized)
acttttctgagcttcggtttcctcatctgttcgagaggtctttgaaacctctcagggaaaggtaagataaccaagtgggagcctctagaatggctcatgggaagtgtgacatgaatattg

SEQ ID NO: 623078 - DNA, 120 bp, Artificial Sequence
  ENSG00000178188_23 (sequence is synthesized)
gaggatccgatgtagagggggggtgatctggaaaagttcccttttttagggggaaggtgctccaaagccctctactgctggatccaaagctaaggaaagtgggggcaaatgtggcaggct

SEQ ID NO: 623079 - DNA, 120 bp, Artificial Sequence
  ENSG00000178188_24 (sequence is synthesized)
agggtgccaggatctgggagagggaagggaggtgttgggctcccttccccattgctctctgcggagtctgaagtagggtcggacgtctctggctgggggtgggatgcagcctccggtgcg

SEQ ID NO: 623080 - DNA, 120 bp, Artificial Sequence
  ENSG00000178188_25 (sequence is synthesized)
ccctcagcagtgaccctcgtgtgtgcctctctcttcctttcgcagctgctgccgcccacccctcgtcttctggctgcctccctctttgtgccccacaggctccccctctccacctcctgg

SEQ ID NO: 623081 - DNA, 120 bp, Artificial Sequence
  ENSG00000178188_26 (sequence is synthesized)
ggcccatcatgaatggtgccccttccccagaggacggggcctccccctcgtctcccccgctgcccccacccccgccccctagttggcgggagttctgtgagtcccacgcccgggctgcgg

SEQ ID NO: 623082 - DNA, 120 bp, Artificial Sequence
  ENSG00000178188_27 (sequence is synthesized)
ctctggactttgcccgccgttttcgcctctacctggcctcccacccccaatatgcggggcccggggccgaggctgccttctcccgccgttttgctgagctcttcctgcagcactttgaag

SEQ ID NO: 623083 - DNA, 120 bp, Artificial Sequence
  ENSG00000178188_28 (sequence is synthesized)
ccgaggtggcccgggcctctggctccctgtcgccacccatcctggctcccctgagccctggtgcggagatttcgccacatgacctgtcccttgagagctgcagggtgggtgggcccctgg

SEQ ID NO: 623084 - DNA, 120 bp, Artificial Sequence
  ENSG00000178188_29 (sequence is synthesized)
ctgtgctgggcccttctcgatcatctgaggacctggccggccccctcccttcctcagtctcttcctcctctacaacctcctccaagccgaagctcaagaagcgcttttccctgcgttcag

SEQ ID NO: 623085 - DNA, 120 bp, Artificial Sequence
  ENSG00000178188_30 (sequence is synthesized)
tgggtcgctctgtccgaggctcagtccgtggcatcctgcagtggcgggggaccgttgaccctccctcctccgctgggcccctggagacctcgtcaggccccccagtcttaggtggaaaca

SEQ ID NO: 623086 - DNA, 120 bp, Artificial Sequence
  ENSG00000178188_31 (sequence is synthesized)
gcaactccaactcctctggcggggctgggaccgttggtaggggactggtcagtgatggaacgtcccctggggaaagatggactcaccgttttgagaggctgagactcagtcggggagggg

SEQ ID NO: 623087 - DNA, 120 bp, Artificial Sequence
  ENSG00000178188_32 (sequence is synthesized)
gcgccttgaaggatggagcagggatggtgcagagggaagagctgctgagtttcatgggggctgaggaggcagcccctgacccagccggagtgggccggggaggaggggtggctgggcctc

SEQ ID NO: 623088 - DNA, 120 bp, Artificial Sequence
  ENSG00000178188_33 (sequence is synthesized)
cttcagggggaggagggcagcctcagtggcagaagtgtcgcctgctgcttcgaagtgaaggagaaggaggaggaggaagtcgcctggagttctttgtaccacccaaggcctctcggcccc

SEQ ID NO: 623089 - DNA, 120 bp, Artificial Sequence
  ENSG00000178188_34 (sequence is synthesized)
gactcagcatcccctgctcttctatcacagacgtccggacaaccacagccctggagatgcctgaccgggagaacacgtttgtggttaaggtggaaggtccatccgagtatatcatggaga

SEQ ID NO: 623090 - DNA, 120 bp, Artificial Sequence
  ENSG00000178188_35 (sequence is synthesized)
cagtggatgcccagcatgtgaaggcctgggtgtctgacatccaagaatgcctgagcccaggaccctgccctgctaccagtccccgccccatgaccctccctctggcccctgggacctcat

SEQ ID NO: 623091 - DNA, 120 bp, Artificial Sequence
  ENSG00000178188_36 (sequence is synthesized)
tccttacaagggagaacacagacagcctggagctgtcctgcctgaatcactcggagagtctacccagccaggacctgctgcttggacccagcgagagcaatgaccgcctgtcgcaggggg

SEQ ID NO: 623092 - DNA, 120 bp, Artificial Sequence
  ENSG00000178188_37 (sequence is synthesized)
catatgggggcctctcagaccgcccctcggcatccatctcccccagctctgcctccattgccgcctcccattttgactcgatggaactgcttcccccagagttgcccccccgcatcccca

SEQ ID NO: 623093 - DNA, 120 bp, Artificial Sequence
  ENSG00000178188_38 (sequence is synthesized)
ttgaagagggacccccaacagggacagttcatcccctctcagccccctaccctcccttggacactccggaaacagccacagggtccttcctgttccagggggagccagagggcggtgagg

SEQ ID NO: 623094 - DNA, 120 bp, Artificial Sequence
  ENSG00000178188_39 (sequence is synthesized)
gggaccagcccctctcagggtatccttggttccacgggatgctctctcggctcaaggctgcacagttggtgctgactggcggcactggctcccacggtgtcttcctggtgcgccagagtg

SEQ ID NO: 623095 - DNA, 120 bp, Artificial Sequence
  ENSG00000178188_40 (sequence is synthesized)
agacaaggcggggtgaatacgtcctcaccttcaacttccagggcaaggccaagcacctgcgtttgtcgctgaacgaggagggtcagtgccgggtccagcacctgtggttccagtccattt

SEQ ID NO: 623096 - DNA, 120 bp, Artificial Sequence
  ENSG00000178188_41 (sequence is synthesized)
tcgatatgctcgagcacttccgggtgcaccccatccctttggagtcgggaggctccagtgatgttgtccttgtcagctatgtcccatcctcccagcgacagcagggccgggagcaggctg

SEQ ID NO: 623097 - DNA, 120 bp, Artificial Sequence
  ENSG00000178188_42 (sequence is synthesized)
ggagccatgcgggggtgtgcgagggagatggatgccaccccgatgcctcctgcaccctcatgcccttcggagcgagtgactgtgtaaccgaccacctcccatgacccaccccagccccct

SEQ ID NO: 623098 - DNA, 120 bp, Artificial Sequence
  ENSG00000178188_43 (sequence is synthesized)
gaacccccttcatggacagatcccccacagcctggggcagaagaggcgtcgagggcgccagaagtggcggcagcagcagccgcagcagccaaagagaggcaagagaaagagaaagcgggc

SEQ ID NO: 623099 - DNA, 120 bp, Artificial Sequence
  ENSG00000178188_44 (sequence is synthesized)
ggtggaggggtcccggaagagctggtccccgtggttgagctggtccccgtggttgaattggaagaggccatagccccaggctcagaggcccagggcgctgggtctggtggggacgcgggg

SEQ ID NO: 623100 - DNA, 120 bp, Artificial Sequence
  ENSG00000178188_45 (sequence is synthesized)
gtgcccccaatggtgcagctgcagcagtcaccactagggggtgatggagaggaagggggccaccccagggccattaacaaccagtactccttcgtgtgagccaaccccacccgctccacc

SEQ ID NO: 623101 - DNA, 120 bp, Artificial Sequence
  ENSG00000178188_46 (sequence is synthesized)
ctttttaaaccccccagccctgctcgtgagattgggctgggtagggacagaggaggccgaaatccctcccccatgcttcctgacccttgttggccaagggcatctttgatggtacaagca

SEQ ID NO: 623102 - DNA, 120 bp, Artificial Sequence
  ENSG00000178188_47 (sequence is synthesized)
gaggctcgggagaggctcccgtcacacactacaggtcccctccccagggcaggggatttgggctccatgagctccttgaggggctcttctggtcagccccaccctgggggccatttcccc

SEQ ID NO: 623103 - DNA, 120 bp, Artificial Sequence
  ENSG00000178188_48 (sequence is synthesized)
attaactacccccagcccgaggcagggtgagggggaagggctgtcagttacattaaggtggttgttgttgttgttttaaacaaaatggagaagcataaataaataaaaaggtttatctcg

SEQ ID NO: 623104 - DNA, 120 bp, Artificial Sequence
  ENSG00000178188_49 (sequence is synthesized)
gggctccgggaggcagctgcggctccgactgctcaggaacctcctcctgggcccggcagagagagaccccgagtcccccggagtccgactcgctacgcgggtcttgcgagatatctggcc

SEQ ID NO: 623105 - DNA, 120 bp, Artificial Sequence
  ENSG00000178188_50 (sequence is synthesized)
ccactgtgcccggccttgaacattcttaggtgcaactggagaaggcactgaagccctacgagattcacaccgtcttcggtctcctggggtcggcgccgagtgggaggatggcggaactgc

SEQ ID NO: 623106 - DNA, 120 bp, Artificial Sequence
  ENSG00000178188_51 (sequence is synthesized)
ttggtaaagctggctcttggctctgtgttagcagctgcgggcaggactgagaaagcagtgtgactgccttttgtctaacttcccgaggatgtagaaggaaagatgaatgtctggagggag

SEQ ID NO: 623107 - DNA, 120 bp, Artificial Sequence
  ENSG00000178188_52 (sequence is synthesized)
tcctgaccacctctcctgggatcccgagggagctggcccaggggagttggggacgcatgtggggagcaggcgccttgaggggaaggcaaggcttttttctcccaggatgggggaggctgc

SEQ ID NO: 623108 - DNA, 120 bp, Artificial Sequence
  ENSG00000178188_53 (sequence is synthesized)
ggcgcagggagcgggagccgccgccgccgccgccgccgccggagctaacctcggggaccgagatgcagctgagaggtgggcgggcgcatccccattccatcggatcctctgttccattgt

SEQ ID NO: 623109 - DNA, 120 bp, Artificial Sequence
  ENSG00000178188_54 (sequence is synthesized)
ctgtctgtctcctggacccatcctggcctcgtctttgccctccgtcgcagcctggccttgggcctgcccttcccggggacactcggtctgatccccttccctcctccctcaatgtctcat

SEQ ID NO: 623110 - DNA, 120 bp, Artificial Sequence
  ENSG00000178188_55 (sequence is synthesized)
agcgacagcagggtgagcagagcaggtctgcaggggaggaggtgcccgtgcacccaagaagtgaggtgtgtgtgccagaaagatggggcggggaggggggactatcacaaggagaagctt

SEQ ID NO: 623111 - DNA, 120 bp, Artificial Sequence
  ENSG00000178199_0 (sequence is synthesized)
agctgaacgtgactgtggcgtgcaggaagtggagcattggcatgaagtggctcctagtggctgcttggcgcacgccagctgccctcctctgactccagtggcacctgggggcctggcctc

SEQ ID NO: 623112 - DNA, 120 bp, Artificial Sequence
  ENSG00000178199_1 (sequence is synthesized)
actgacgggagaacattggcgtgaaggctgctggcgactgggccagcattcattgtgaagaccggagggacacaccctgctgctcatgtctgcagggctctgagaggaggaagcctgggg

SEQ ID NO: 623113 - DNA, 120 bp, Artificial Sequence
  ENSG00000178199_2 (sequence is synthesized)
caggacctgcgccagtggccgctgggcacagcatggagcaccccagcaagatggaattcttccagaagctgggctatgaccgggaggatgtgctccgggtgttgggcaagctgggcgagg

SEQ ID NO: 623114 - DNA, 120 bp, Artificial Sequence
  ENSG00000178199_3 (sequence is synthesized)
gcgccctggtcaacgacgtgctgcaggagcttatccgcacgggcagccgcccgggtgccctggagcacccggctgcacccaggctagtgcctcggggctcctgtggggtcccggactctg

SEQ ID NO: 623115 - DNA, 120 bp, Artificial Sequence
  ENSG00000178199_4 (sequence is synthesized)
cccagcgtggcccggggacagccctggaagaggacttcagaaccctggccagttctctgcgacccatagtgattgatggcagcaacgtggcgatgagccatggaaataaagaaaccttct

SEQ ID NO: 623116 - DNA, 120 bp, Artificial Sequence
  ENSG00000178199_5 (sequence is synthesized)
cttgccggggaatcaagctggctgttgactggttcagggacagaggacacacctacatcaaagtttttgttccatcctggaggaaggacccaccaagagctgacacccctatcagagagc

SEQ ID NO: 623117 - DNA, 120 bp, Artificial Sequence
  ENSG00000178199_6 (sequence is synthesized)
agcacgtgctggcggagctggagcggcaggcggtgctggtgtacacgccgtcccgcaaggtgcacggcaagcgcctggtctgctacgacgaccgctacatcgtgaaggtggcctacgagc

SEQ ID NO: 623118 - DNA, 120 bp, Artificial Sequence
  ENSG00000178199_7 (sequence is synthesized)
aggacggcgtcatcgtctccaacgacaactaccgggacctgcagagcgagaaccccgagtggaagtggttcatcgagcagaggctgctcatgttctccttcgtcaacgaccggttcatgc

SEQ ID NO: 623119 - DNA, 120 bp, Artificial Sequence
  ENSG00000178199_8 (sequence is synthesized)
cgcctgatgaccccctgggccgccatggaccctccctgagcaacttcctgagcaggaagccgaagcccccagagccatcctggcagcattgtccttatggcaagaaatgcacctatggca

SEQ ID NO: 623120 - DNA, 120 bp, Artificial Sequence
  ENSG00000178199_9 (sequence is synthesized)
tcaagtgcaagttctaccacccggagaggccgcaccacgcgcaactggcggtggccgacgagctccgcgccaagacaggggcccggcctggcgcgggcgccgaggagcagcggccaccga

SEQ ID NO: 623121 - DNA, 120 bp, Artificial Sequence
  ENSG00000178199_10 (sequence is synthesized)
gctccgcaggagcccgggcggccccccgggaaccatttgcgcacagcctcccgccggcgcgggggtccccggacctggccgccctgcgagggagcttctctcggctggccttcagcgacg

SEQ ID NO: 623122 - DNA, 120 bp, Artificial Sequence
  ENSG00000178199_11 (sequence is synthesized)
agggagcttctctcggctggccttcagcgacgacctggggcccctggggccgcctctcccggtccccgcctgcagcctcacgccccgactgggcgggcccgactgggtgtccgcgggcgg

SEQ ID NO: 623123 - DNA, 120 bp, Artificial Sequence
  ENSG00000178199_12 (sequence is synthesized)
gcctccctagcccggagagccagttctccccgggcgacctcccgcctccgcccggcctgcagctccagccgcggggcgaacaccgccctagggacctgcacggcgacttgctttccccgc

SEQ ID NO: 623124 - DNA, 120 bp, Artificial Sequence
  ENSG00000178199_13 (sequence is synthesized)
gcaggccacccgacgacccgtgggcccgtccaccccgctccgaccgcttccctgggcgctccgtctgggcggagccggcctggggcgacggcgccactgggggactttcagtgtacgcga

SEQ ID NO: 623125 - DNA, 120 bp, Artificial Sequence
  ENSG00000178199_14 (sequence is synthesized)
ccgaggacgacgagggggacgcgcgcgcccgggctcgcatcgcgctctacagcgtcttcccgcgtgaccaggtggaccgcgtgatggccgcgttcccggagctctcagacctcgccaggc

SEQ ID NO: 623126 - DNA, 120 bp, Artificial Sequence
  ENSG00000178199_15 (sequence is synthesized)
tcatcctcctggtacagagatgccagagcgcgggggcgcccctgggcaagccctaagggaccaacacgcacttgcagggaatggcccagcctcgccttgcgtcttggacgggtggacctg

SEQ ID NO: 623127 - DNA, 120 bp, Artificial Sequence
  ENSG00000178199_16 (sequence is synthesized)
tggttgccagcctggacctgagtgggcccatcatggtgcccccttttctttaaagatggtcagggaagcctgcttcctcctcctgagcggggttgtgggggcctggtggcacttggtgat

SEQ ID NO: 623128 - DNA, 120 bp, Artificial Sequence
  ENSG00000178199_17 (sequence is synthesized)
cctcactgaggccggggcctgctgcggggaggtccacccacttccgtggagggaatgattttccatgtgcacggagactgcgggtccaagctgcagtagaacccacaagtgggtcacaaa

SEQ ID NO: 623129 - DNA, 120 bp, Artificial Sequence
  ENSG00000178199_18 (sequence is synthesized)
atcaatttagtgggtcaccaccacaaacacagtggactgggacagggcaaagcgcaccctgtgccatcaggctgagtctgaactcttgttacctatcctgtgtccccacccccttggcag

SEQ ID NO: 623130 - DNA, 120 bp, Artificial Sequence
  ENSG00000178199_19 (sequence is synthesized)
ccatgtaactaacctcaatgtgggtcgtagtcagaagtttaaaaaagactatgaatgctcttgaatttcattgcttcaggtaatgtttgaaatatgtagtcaggtggccaggggaggttt

SEQ ID NO: 623131 - DNA, 120 bp, Artificial Sequence
  ENSG00000178199_20 (sequence is synthesized)
gctatctggaagttttcatgttagctattgctaaccccacccgcaagggcagcccagcctccaggtgtgggctctcctgtgctctgaattgtgtggctgtcctatgctggggacaagtgg

SEQ ID NO: 623132 - DNA, 120 bp, Artificial Sequence
  ENSG00000178199_21 (sequence is synthesized)
gctctgaattgtgtggctgtcctatgctggggacaagtggtaggagcgctttgtcccagggccaccttctggggccttcacacacatacccccaccacacaaacacacacacacacacac

SEQ ID NO: 623133 - DNA, 120 bp, Artificial Sequence
  ENSG00000178199_22 (sequence is synthesized)
acaccacacagacacatactgtttggctaagggttaagtatctccaatattttattagccatccatcatggcagtttccagaataggctttctactgtaccagctgagctgccttctttt

SEQ ID NO: 623134 - DNA, 80 bp, Artificial Sequence
  ENSG00000178199_23 (sequence is synthesized)
gcgagactccgtcttaaaaaaaaaaaaaagacagagtctcactctgtcactctgtctggagtatattcaagtgatccccc

SEQ ID NO: 623135 - DNA, 120 bp, Artificial Sequence
  ENSG00000178199_24 (sequence is synthesized)
gacagccgcacttcacagttacactggggctggatgagtcaggacttttgctctcaaatctacaggtgggttaggagaaaactgacatgagctcagtcagagtttattgccaccttcctg

SEQ ID NO: 623136 - DNA, 120 bp, Artificial Sequence
  ENSG00000178199_25 (sequence is synthesized)
gtgccgtttcttctagccagctactgctctgggtttgaggagaaagggcctactcatttgcaatggctaagaagtgagatggtgctgccagagtgccgacccccgaatcctcaggggccc

SEQ ID NO: 623137 - DNA, 120 bp, Artificial Sequence
  ENSG00000178199_26 (sequence is synthesized)
tggcctctcctggcagcatccacccattctggttaccatgccagccctccagactatggctcatttgttcactagagggcttggtagcttggcagtttggggaaagcgggaggcacttcc

SEQ ID NO: 623138 - DNA, 120 bp, Artificial Sequence
  ENSG00000178199_27 (sequence is synthesized)
caggggaagaccagagaagaccagcccccagccccacaaacttcctgcagcctgctggtgcagagggaactcttgccagtttactaccagatttcatgagatgttggcaggcctgggggg

SEQ ID NO: 623139 - DNA, 120 bp, Artificial Sequence
  ENSG00000178199_28 (sequence is synthesized)
cacctcagggagagtgcgttcccagccctttcattcatggtaaatgacacccctggggcatacagtgatgttaggtttttctctgaaacttctttgatcttttaaaaccagattcttagc

SEQ ID NO: 623140 - DNA, 120 bp, Artificial Sequence
  ENSG00000178199_29 (sequence is synthesized)
atggattgagccagatctgttccttaccccctttttccaaagaggacggtgcacccacaattttaccataacatattgggatctcaggcctgaagatgacccattctttgtaaataagtt

SEQ ID NO: 623141 - DNA, 120 bp, Artificial Sequence
  ENSG00000178199_30 (sequence is synthesized)
tgacccattctttgtaaataagttggattttcctcataatatgtgtgggtttttttggtgggggaggagggggcagggttccgctctgtcatctgtcacccaggctggagtgcagtagtg

SEQ ID NO: 623142 - DNA, 120 bp, Artificial Sequence
  ENSG00000178199_31 (sequence is synthesized)
cctgagtagctgggactacagttgtgccaccacgtccagctaattttttctattttttgtaaagacccaaagcgttgggattacaggcatgagccacctcaacgggcctttatttttttt

SEQ ID NO: 623143 - DNA, 120 bp, Artificial Sequence
  ENSG00000178199_32 (sequence is synthesized)
tctattttttgtaaagacccaaagcgttgggattacaggcatgagccacctcaacgggcctttattttttttattttaatttttattattattatttttgaaacggagtctcgctctgtc

SEQ ID NO: 623144 - DNA, 61 bp, Artificial Sequence
  ENSG00000178199_33 (sequence is synthesized)
cttgtgacgggcctttatttttatttttaaccttttgacaagacacgctttctattagagc

SEQ ID NO: 623145 - DNA, 120 bp, Artificial Sequence
  ENSG00000178199_34 (sequence is synthesized)
tatttttaaccttttgacaagacacgctttctattagagctgctttttgtctccctggttcgatttcctgatgtagaatcattgtgttgctgatttttcagttgaaaatgtttaaactgc

SEQ ID NO: 623146 - DNA, 120 bp, Artificial Sequence
  ENSG00000178199_35 (sequence is synthesized)
ttcctttgagaacaagtttgagttttagtaagctgtaaagctgttttatttgattcactgtgaataagacaagtacaaaaaaaaaagtgaaaacacagcacatttcaagtgtaatcccct

SEQ ID NO: 623147 - DNA, 120 bp, Artificial Sequence
  ENSG00000178199_36 (sequence is synthesized)
ttggaatttttccaaagtcttagtatatgtctttgtgacagaaaaacatagatgggacaggtaaatgaaatgttcctagttgcatagctgttaaccatgcttcaaaaataaatcattttt

SEQ ID NO: 623148 - DNA, 120 bp, Artificial Sequence
  ENSG00000178199_37 (sequence is synthesized)
taccacacctggattctttattgtcaaattgtctattagtttctcctactggctttcccctagattggtctgttctgttaaaaattgtgggtttagactgggcacgatggctcatgtctg

SEQ ID NO: 623149 - DNA, 87 bp, Artificial Sequence
  ENSG00000178199_38 (sequence is synthesized)
gggtttagactgggcatgggcttcatgagttcaggagttcgagaccagcctggtcaacctggtgagaccctgtctctactaaaaata

SEQ ID NO: 623150 - DNA, 120 bp, Artificial Sequence
  ENSG00000178199_39 (sequence is synthesized)
gagactctgtctcaaaaaacaaaaaaaagtaggcgtgaagaagactgaggttgtggccagtctcagcagccgcagttctgtgttgttccacctggggggatgtgaggggctcaaatccac

SEQ ID NO: 623151 - DNA, 120 bp, Artificial Sequence
  ENSG00000178199_40 (sequence is synthesized)
cttttccaggagaagcagtgaggccatggcaaggacctccctttgctggatgtgcagcaggcagttcccaaggacacaggctgcttgcccatttcctagacttctaaaatcctcattata

SEQ ID NO: 623152 - DNA, 120 bp, Artificial Sequence
  ENSG00000178199_41 (sequence is synthesized)
gaactatgaagccatctcatagaagctgctcttcttgttcaaacatgcagcagagctctcctcgactgatcaaaccagaggctgttgccatcttgggtttgccctgaggcagccttccca

SEQ ID NO: 623153 - DNA, 120 bp, Artificial Sequence
  ENSG00000178199_42 (sequence is synthesized)
gaggcctctggaagggggtttggggtagaactgtagaatgtcaggggttgaggagtagaagcaagacaagccactctaattggcattcttccaaataaaatggatccagctttggtttga

SEQ ID NO: 623154 - DNA, 120 bp, Artificial Sequence
  ENSG00000178199_43 (sequence is synthesized)
tcaggacaagacaactttctcctcaccatggtggctgagttctggaggctgtaatttcgtggatttctgtggagctggcagagctcatgtctgcagggctctgagaggaggaagcctggg

SEQ ID NO: 623155 - DNA, 120 bp, Artificial Sequence
  ENSG00000178199_44 (sequence is synthesized)
ctgggagcagctgccagggagtagctcagctcacctgttagtcatcccgattttgcccgacttccactccatctccaccaccagaagtgctccaagactgcagggcaatggctcccacct

SEQ ID NO: 623156 - DNA, 120 bp, Artificial Sequence
  ENSG00000178199_45 (sequence is synthesized)
gagagttaactttcctgacagggttattgtagaactgacatcctggccggtgatttcatgggagccaggatcccatgccagggtcggatgcaggggtcatgcacacagcaaagctgtgtc

SEQ ID NO: 623157 - DNA, 120 bp, Artificial Sequence
  ENSG00000178199_46 (sequence is synthesized)
tgagaagccgggagcctggacacaaacccagctgcgggtctcagtcccttcacctggcccctggcagcttctgtcctcaccctaccctgctctccacccctccaccctatggactttggt

SEQ ID NO: 623158 - DNA, 120 bp, Artificial Sequence
  ENSG00000178199_47 (sequence is synthesized)
cactgctatccatgaagagttaagaattttatcccagcaccctgggggatgccagccttctagccagctctttcactgacttgcttcgtcaagttatttgatgtttccaagttcagtaaa

SEQ ID NO: 623159 - DNA, 120 bp, Artificial Sequence
  ENSG00000178199_48 (sequence is synthesized)
tccttggtgcacttctaacatcgatagtcaaatatctacttagttgtttgtttaatgatatttgtcttcctcactgcgctataagctccatgaaggcactgattatgactgttcaatgcc

SEQ ID NO: 623160 - DNA, 79 bp, Artificial Sequence
  ENSG00000178201_0 (sequence is synthesized)
aatttgtttcaatgcatcaataacaatggtgtttactaaaatattagtgtggaaaaggttttatggtgtattatttttg

SEQ ID NO: 623161 - DNA, 120 bp, Artificial Sequence
  ENSG00000178201_1 (sequence is synthesized)
aatattagtgtggaaaaggttttatggtgtattatttttgcttttcatatctccaggctacttaattgaaggttttattgaaataagtgtagactcacaagcagtcataagaaataatac

SEQ ID NO: 623162 - DNA, 120 bp, Artificial Sequence
  ENSG00000178201_2 (sequence is synthesized)
agaaaaagccctgtccatattacccagggttccgtcatgattacattttgcaaactatagtataatatcactctaatgatattgactcttctgtgttctgtttttatatatttccctagt

SEQ ID NO: 623163 - DNA, 120 bp, Artificial Sequence
  ENSG00000178201_3 (sequence is synthesized)
tttgcttgtatttacttgttgcatgtgtgtaagccctgagttttataggtttgatttgtggatctgttgtgcggttgagccctcattcattcacctgcttctctgcagttggacacacaa

SEQ ID NO: 623164 - DNA, 120 bp, Artificial Sequence
  ENSG00000178201_4 (sequence is synthesized)
gcaattgcctttgcacgaacagggacaatcttaatttctgtttaagatgagaaaatatggttggagacacattaaaacttctgtctccactgatgacaagatacttctttctgctttttt

SEQ ID NO: 623165 - DNA, 120 bp, Artificial Sequence
  ENSG00000178201_5 (sequence is synthesized)
attctactgattcttcagacctcaatgaaaatcaacatcccctagattttgatgaaatggcttttggaaaagtaaaatcagggattagcttcctcattcagactggagttgggatcctgg

SEQ ID NO: 623166 - DNA, 120 bp, Artificial Sequence
  ENSG00000178201_6 (sequence is synthesized)
gaaattcctttctcctttgtttttataacttaattttgttcactggacacaagctgagacccacggacttgattctcagccaactggccttggctaactccatggtccttttctttaaag

SEQ ID NO: 623167 - DNA, 120 bp, Artificial Sequence
  ENSG00000178201_7 (sequence is synthesized)
ggatacctcagacaatggcagcttttggattgaaatatttgctgaatgacactggatgtaagtttgtcttttattatcacagggtgggcacaagagtttccctcagcaccatctgccttc

SEQ ID NO: 623168 - DNA, 120 bp, Artificial Sequence
  ENSG00000178201_8 (sequence is synthesized)
gtttattgacttctgttgtctcctctgctgggccccccatgtcttgatgaatgcatctgttcttctattagtgaatggcccactgaatagcaaaaacagtagtgcaaaaaacaattatgg

SEQ ID NO: 623169 - DNA, 120 bp, Artificial Sequence
  ENSG00000178201_9 (sequence is synthesized)
atactgttcttacaaagcatcaaagagatttagctcattacatgcagtcttatatttttcccctgattttatgagtttgggcttcatggtctgggccagtggctccatggtcttcttcct

SEQ ID NO: 623170 - DNA, 120 bp, Artificial Sequence
  ENSG00000178201_10 (sequence is synthesized)
ctacagacacaagcagcaagtccaacacaatcacagcaacagactctcctgcagaccttcccaggaagccagagccacacacaccatcatggtcctggtgagctccttttttgttttcta

SEQ ID NO: 623171 - DNA, 120 bp, Artificial Sequence
  ENSG00000178201_11 (sequence is synthesized)
ttcagtccatagttttctgacaatttggacaactgtagttgcaaacccaggccagtggatagtgaccaactctgtgttggtcgcctcatgtttcccagcacgcagcccttttgtcctcat

SEQ ID NO: 623172 - DNA, 120 bp, Artificial Sequence
  ENSG00000178201_12 (sequence is synthesized)
catgagtgatactcatatctctcagttctgttttgcctgcaggacaaggaaaacactctttcctaatctggttgtcatgccatgagtcttttctcttcatggaattcagctatttatcat

SEQ ID NO: 623173 - DNA, 120 bp, Artificial Sequence
  ENSG00000178201_13 (sequence is synthesized)
aactcttgctaagatttaggaaatattaactactagttatttgtgatagcaacatacacatggccagtaatgctcttgtccaggaagatctaataccagagctaaaaatgaaagtcatgg

SEQ ID NO: 623174 - DNA, 120 bp, Artificial Sequence
  ENSG00000178201_14 (sequence is synthesized)
atactgttacacaaagaacactctatataactgtgttaagtccttcagacaagttcaggaaatcaaaaagtttaaaaagggaattctttagagatttaggggagatttctcatttttgta

SEQ ID NO: 623175 - DNA, 120 bp, Artificial Sequence
  ENSG00000178201_15 (sequence is synthesized)
ctatgaagaatcatggaatgttttaaaaatatttttaaagcacagtttgattcaggtgcttcttgaacagcataaatcccctggagagtccacatgtaagaaagacatgtgcaggccggg

SEQ ID NO: 623176 - DNA, 82 bp, Artificial Sequence
  ENSG00000178201_16 (sequence is synthesized)
acatgtgttttgggaggctgaggcactcccaaatgcctcaagtgatccactcaagatgacttgaggccaggagttcgagacc

SEQ ID NO: 623177 - DNA, 120 bp, Artificial Sequence
  ENSG00000178201_17 (sequence is synthesized)
caaaaaccctgtctcaaatacaaaaattagccaaccatgtggcacacacctgtagtcccagctactccagagggtgaagcacgagaattacttaccagcttgggtgacggagggagactc

SEQ ID NO: 623178 - DNA, 80 bp, Artificial Sequence
  ENSG00000178202_0 (sequence is synthesized)
agttgtgccccgccgaccatgcgccgcctcccgcgggccctgctgctgcagctgcgcctcgccctgctggtggccgcggg

SEQ ID NO: 623179 - DNA, 120 bp, Artificial Sequence
  ENSG00000178202_1 (sequence is synthesized)
tgggggcccgggctgcaggcggccgtcgtcctgccggtccgctatttctacctgcaggcggtcaactcggagggccagaacctcactcgctctcccgcaggtgaaacaccattcaaagtc

SEQ ID NO: 623180 - DNA, 120 bp, Artificial Sequence
  ENSG00000178202_2 (sequence is synthesized)
gtagtcaaatctctttcacctaaagagttggtccggatacatgtccctaaacctttggacaggaatgatggaacatttttgatgagatataggatgtatgaaactgtcgatgaaggcctg

SEQ ID NO: 623181 - DNA, 120 bp, Artificial Sequence
  ENSG00000178202_3 (sequence is synthesized)
aagatagaggtcctttatggtgatgaacatgtggctcagtctccctatattttgaaaggaccagtgtaccatgagtactgtgagtgtccggaagatcctcaggcctggcagaagactctt

SEQ ID NO: 623182 - DNA, 120 bp, Artificial Sequence
  ENSG00000178202_4 (sequence is synthesized)
tcttgtccaaccaaggaaccacagattgcaaaagattttgcttcctttcccagcatcaatctccagcaaatgctaaaagaagtccccaaaaggtttggggatgagagaggtgccattgtt

SEQ ID NO: 623183 - DNA, 120 bp, Artificial Sequence
  ENSG00000178202_5 (sequence is synthesized)
cattacacgattctcaataaccatgtttaccggagatctttagggaaatacacagacttcaagatgttctctgatgagattttgttatcattgacaagaaaggtccttctcccagattta

SEQ ID NO: 623184 - DNA, 120 bp, Artificial Sequence
  ENSG00000178202_6 (sequence is synthesized)
gaattttatgttaatcttggagattggcccttggagcatcgaaaagtcaatggaacccctagccccatacctatcatttcatggtgtggctctctggattcaagagatgttgtccttcca

SEQ ID NO: 623185 - DNA, 120 bp, Artificial Sequence
  ENSG00000178202_7 (sequence is synthesized)
acgtatgacatcacccactccatgcttgaagccatgcggggtgttacaaatgatctcctctctattcagggaaatacagggccttcctggatcaataaaacagagagagctttcttcaga

SEQ ID NO: 623186 - DNA, 120 bp, Artificial Sequence
  ENSG00000178202_8 (sequence is synthesized)
ggtagagacagccgagaggagaggctccagttggtacagctgtccaaagaaaatcctcagctactagatgcaggaattacaggatatttctttttccaagagaaagaaaaggagcttgga

SEQ ID NO: 623187 - DNA, 120 bp, Artificial Sequence
  ENSG00000178202_9 (sequence is synthesized)
aaagccaagttgatgggtttctttgatttctttaagtacaagtatcaagtaaatgtggatgggaccgtggctgcttacagatatccatatctcatgctgggcgacagtctggttttaaag

SEQ ID NO: 623188 - DNA, 120 bp, Artificial Sequence
  ENSG00000178202_10 (sequence is synthesized)
caggactcgccatattatgaacatttctacatggcactagaaccttggaagcattatgttccaattaaaagaaatctgagtgatttattagagaaagttaaatgggctaaggaaaatgat

SEQ ID NO: 623189 - DNA, 120 bp, Artificial Sequence
  ENSG00000178202_11 (sequence is synthesized)
gaagaagccaagaagattgcaaaagaaggacagttgatggctagggacctactacagccacacaggctttactgctactattaccaagtactgcagaaatatgccgagcgccagtccagc

SEQ ID NO: 623190 - DNA, 120 bp, Artificial Sequence
  ENSG00000178202_12 (sequence is synthesized)
aaacccgaagtacgtgatggaatggaacttgttcctcagccagaagatagcacagccatctgccagtgccacaggaaaaagccttcaagagaagaactttgagtcagcccagaatcacac

SEQ ID NO: 623191 - DNA, 120 bp, Artificial Sequence
  ENSG00000178202_13 (sequence is synthesized)
tcctgtgtatcccggctacactttaaggaaagattgaatctaagctgtgaaggacagtatagaagactgcaccaagtggactagttctcccggtggctttatatatgtagatggatatag

SEQ ID NO: 623192 - DNA, 120 bp, Artificial Sequence
  ENSG00000178202_14 (sequence is synthesized)
cagtactggttgagtatccctcatctgaaatgcttaggaccaggagtgtttcaggcttcagattttttaagatttgggaatatttgcatgtacataatgaggtatcttggggatgagatc

SEQ ID NO: 623193 - DNA, 120 bp, Artificial Sequence
  ENSG00000178202_15 (sequence is synthesized)
caagtctaaacacaaaattcatttatattttatatataccttgttcacataccctgaaggtaattttatataatatttttaataatttgtgcatgaaacaaagtttgtatacattgaact

SEQ ID NO: 623194 - DNA, 120 bp, Artificial Sequence
  ENSG00000178202_16 (sequence is synthesized)
gtcagaaagcaaaggtgtcactatcttagcgacccaagtggtggtgtcagcactcaaaaagttttggattttggggtatttcagattttagatttttgtatgaggaatgttcaacctgta

SEQ ID NO: 623195 - DNA, 120 bp, Artificial Sequence
  ENSG00000178202_17 (sequence is synthesized)
ctgctattatcagcatcatagtttctctaaaaagaaaacttggggatcatagccgatagagagacttgctaaaatataaatcagcctctgcaaaactgtttacatatttattggtttaca

SEQ ID NO: 623196 - DNA, 120 bp, Artificial Sequence
  ENSG00000178202_18 (sequence is synthesized)
tattttattggtttatttctatcccctgttcactttttctcttccacttccaattatgaagagaaaatatttgttcagggttgtccccccgccccccgtcactgcataatttctcctctt

SEQ ID NO: 623197 - DNA, 120 bp, Artificial Sequence
  ENSG00000178202_19 (sequence is synthesized)
acaagctgcttttggctttcattaataacagcttccttttagaaggtctgataaggatatttaaggaagaagagaatgactctgttattaaaggtggcatggagactgtggagggaatat

SEQ ID NO: 623198 - DNA, 120 bp, Artificial Sequence
  ENSG00000178202_20 (sequence is synthesized)
tttttaaagcactactcatatcctttaaactaaattttgccaaagcccgagacaacattaaggagaaattgtaccttaagttagtaattccaaatctatctgagttgtatacccatcaaa

SEQ ID NO: 623199 - DNA, 120 bp, Artificial Sequence
  ENSG00000178202_21 (sequence is synthesized)
gacaatacagttattaacatagatgaaggtatgctataggcatcattcattatctctatattgaataggtgaaagataactgtagtcaggtgaaaggcattcattatttttaagctgaaa

SEQ ID NO: 623200 - DNA, 120 bp, Artificial Sequence
  ENSG00000178202_22 (sequence is synthesized)
aggggatccttgaaaacactgaaaacctctacaacaatcttcaggaagcctgctatcttgggattcactaataataggccaagaacaaaggcaagcatccattcctcactccaccacttt

SEQ ID NO: 623201 - DNA, 120 bp, Artificial Sequence
  ENSG00000178202_23 (sequence is synthesized)
tctatttcagtgggtgtcgttgctacgatgaagactttggaaatttcctttctcttttaggacagggtcaggatttaggactcatagcctgaaagctcattacatactccttgtaaccat

SEQ ID NO: 623202 - DNA, 120 bp, Artificial Sequence
  ENSG00000178202_24 (sequence is synthesized)
tactccttgtaaccatcagtccaaggttcagttcactaaagtgcatgttctaaaacaagagctatcctcattccaaattttaaaatatgtactctggccggttgcagtggctcacgcctg

SEQ ID NO: 623203 - DNA, 120 bp, Artificial Sequence
  ENSG00000178202_25 (sequence is synthesized)
caaaaactgaaaataaaaataaaaatatgtattctcctaactgaaatatttacttaatctggaaaacaatgtaactatttttaaagtggttacatctattcttgctgaagaacaataaac

SEQ ID NO: 623204 - DNA, 120 bp, Artificial Sequence
  ENSG00000178202_26 (sequence is synthesized)
agaattttttgactaagcataaccaaatttcagaacagtctaatcaatgccaagtatccaaggcaaactctaatacccatccattgtgcaaaaccacaagcacgcaagtattaaataaga

SEQ ID NO: 623205 - DNA, 120 bp, Artificial Sequence
  ENSG00000178202_27 (sequence is synthesized)
gcaagctgtcctgagcccatacctaatgaatttgtgtcttaaatattgtacattgtgtttgaggcttgtcaaaactgggattatggcaagaaaggttgcctaactcatacctttctgcct

SEQ ID NO: 623206 - DNA, 120 bp, Artificial Sequence
  ENSG00000178202_28 (sequence is synthesized)
caaattccaggtgctaaaggctaatggcattttaaacatcttacatttttaaaaatttatattgcctctgccaaacaggcctaatagttaaaagcaagttgagacaaaccaggcagattc

SEQ ID NO: 623207 - DNA, 120 bp, Artificial Sequence
  ENSG00000178202_29 (sequence is synthesized)
agtgtgtggaacaggaaggatgtgctttaaaaaaaggtggaatccctcaaaaaattctatagggagacagcagccttaatctacataattcttcatctcgccaattcagccgcagccttt

SEQ ID NO: 623208 - DNA, 120 bp, Artificial Sequence
  ENSG00000178202_30 (sequence is synthesized)
aaagagttagtgttaatggctttctggtttgaaaacaaaaatgcatctatgtggttgaaagtttgggaggagattcaccaatatctgaggagaagatggagtgaagggaattcttacttt

SEQ ID NO: 623209 - DNA, 120 bp, Artificial Sequence
  ENSG00000178202_31 (sequence is synthesized)
ttgctttatacctttctataatatttagatttttttttactgtaagtatggatcaaattgcaaaataaagaaaaatgccaaccttagaaaagacaataaatgcacaaaagatataaacag

SEQ ID NO: 623210 - DNA, 120 bp, Artificial Sequence
  ENSG00000178202_32 (sequence is synthesized)
tgcacaaaagatataaacaggaacagcaaatatttatattttttccattttgctctttttaaatctatgtttagaactttatatcttgggacttatgtatatatataccttttaaataaa

SEQ ID NO: 623211 - DNA, 120 bp, Artificial Sequence
  ENSG00000178202_33 (sequence is synthesized)
gatgttaatgctggtcagctaggcctgaattccaaaagggaggagggtataatgaggcatgcctggttcccctttcccttcgtggccgaactagtttttcagattaactttggaatgccc

SEQ ID NO: 623212 - DNA, 120 bp, Artificial Sequence
  ENSG00000178202_34 (sequence is synthesized)
ttggccaaaaggagggatccatttggacggtctaggaggcttagaattttatttttggtttacataatgtctaaaaattaatacgttctttttctccttgctaaaaggaccagtgtacca

SEQ ID NO: 623213 - DNA, 120 bp, Artificial Sequence
  ENSG00000178202_35 (sequence is synthesized)
tatagtcccagctactcatggggctgatgcaggttgaggcaggaggttcatgagcccaggaggttggagctgtaatgagctaggattctgcctctgcactcctagctggatgacagagca

SEQ ID NO: 623214 - DNA, 120 bp, Artificial Sequence
  ENSG00000178202_36 (sequence is synthesized)
aagaaaaaaaaaaaaaaaagaatgcatgaaccagacatgacagttcctggcctcaaagatcttccaaaggaaatgatttttttttaaccaccaatgctgcaggaaaaagcaacatattta

SEQ ID NO: 623215 - DNA, 120 bp, Artificial Sequence
  ENSG00000178209_0 (sequence is synthesized)
gagcccgcgccctcacgctcagcaccccagcctgcctgcccgcccgcctgccctgccgctgcccgctgtcacaccctgtagcgcgggagcttctcgcagcgccccgggccttctcgtggt

SEQ ID NO: 623216 - DNA, 120 bp, Artificial Sequence
  ENSG00000178209_1 (sequence is synthesized)
accctgcctgctgcctttgcccccgcactgactgcccggctccagcagccatggtggccggcatgctcatgccacgggaccagctgcgggccatctatgaggtgctcttccgcgagggcg

SEQ ID NO: 623217 - DNA, 120 bp, Artificial Sequence
  ENSG00000178209_2 (sequence is synthesized)
tgatggtggccaagaaggaccggcggccccgcagcttgcacccccatgtgcccggcgtcaccaacctgcaggtcatgcgtgccatggcgtccctgcgggcacggggcctggtccgcgaga

SEQ ID NO: 623218 - DNA, 120 bp, Artificial Sequence
  ENSG00000178209_3 (sequence is synthesized)
cctttgcctggtgccacttttactggtacctcaccaatgaaggcatcgcccacctccgccagtacctgcacctgccgccagagatcgtgcccgcctctctgcagcgcgtgcgccgccccg

SEQ ID NO: 623219 - DNA, 120 bp, Artificial Sequence
  ENSG00000178209_4 (sequence is synthesized)
tcgccatggtgatgcccgcacgccgcaccccccacgtgcaggctgtgcagggtcccctgggctccccacccaagcgggggccgctgccgacggaggagcagcgggtctaccgtcggaagg

SEQ ID NO: 623220 - DNA, 120 bp, Artificial Sequence
  ENSG00000178209_5 (sequence is synthesized)
agcttgaggaggtgtcacctgagacccctgtggtgcctgctaccacccagcggaccctggccaggccaggcccggagcctgccccagccacagatgagcgggatcgtgtgcagaagaaaa

SEQ ID NO: 623221 - DNA, 120 bp, Artificial Sequence
  ENSG00000178209_6 (sequence is synthesized)
ccttcaccaagtgggtcaacaagcacctcatcaaggcccagaggcacatcagtgacctgtatgaagacctccgcgatggccacaacctcatctccctgctggaggtcctctcgggggaca

SEQ ID NO: 623222 - DNA, 120 bp, Artificial Sequence
  ENSG00000178209_7 (sequence is synthesized)
gcctgccccgggagaaggggaggatgcgtttccacaagctgcagaatgtccagattgccctggactacctccggcaccgccaggtgaagctggtgaacatcaggaatgatgacatcgctg

SEQ ID NO: 623223 - DNA, 120 bp, Artificial Sequence
  ENSG00000178209_8 (sequence is synthesized)
acggcaaccccaagctgacccttggcctcatctggacaatcattctgcacttccagatctcagatatccaggtgagtgggcagtcggaggacatgacggccaaggagaagctgctgctgt

SEQ ID NO: 623224 - DNA, 120 bp, Artificial Sequence
  ENSG00000178209_9 (sequence is synthesized)
ggtcgcagcgaatggtggaggggtaccagggcctgcgatgcgacaacttcacctccagctggagagacggccgcctcttcaatgccatcatccaccggcacaagcccctgctcatcgaca

SEQ ID NO: 623225 - DNA, 120 bp, Artificial Sequence
  ENSG00000178209_10 (sequence is synthesized)
tgaacaaggtgtaccggcagaccaacctggagaacctggaccaggccttctctgtggcggagcgggacctgggagtgacgcggctcctggaccctgaggacgtggatgtccctcagcccg

SEQ ID NO: 623226 - DNA, 120 bp, Artificial Sequence
  ENSG00000178209_11 (sequence is synthesized)
acgagaagtccatcatcacctacgtctcgtcgctgtatgacgccatgccccgcgtgccggacgtgcaggatggggtgagggccaacgagctgcagctgcgctggcaggagtaccgggagc

SEQ ID NO: 623227 - DNA, 120 bp, Artificial Sequence
  ENSG00000178209_12 (sequence is synthesized)
tggtgctgctgctgcttcagtggatgcgacaccacacggccgcctttgaggaacgcaggttcccctccagcttcgaggagattgagatcctgtggtctcagttcctgaagtttaaggaga

SEQ ID NO: 623228 - DNA, 120 bp, Artificial Sequence
  ENSG00000178209_13 (sequence is synthesized)
tggagctaccagccaaggaggccgacaagaacaggtccaagggcatctaccaatccctggagggagcggtgcaagcaggccagctcaaggtgccccctggctaccacccgctggatgtgg

SEQ ID NO: 623229 - DNA, 120 bp, Artificial Sequence
  ENSG00000178209_14 (sequence is synthesized)
agaaggagtggggcaagctgcacgtggccatcctggagcgggagaagcagctccgcagcgagtttgagaggctggagtgtcttcagcgcatcgtgaccaagctgcagatggaggcggggc

SEQ ID NO: 623230 - DNA, 120 bp, Artificial Sequence
  ENSG00000178209_15 (sequence is synthesized)
tgtgtgaggagcagctgaaccaggccgacgccctgctgcagtcggatgtccggctgctggctgcaggcaaagtgccacagcgggcgggggaggtggaacgggacttggacaaggcggata

SEQ ID NO: 623231 - DNA, 120 bp, Artificial Sequence
  ENSG00000178209_16 (sequence is synthesized)
gcatgatccggctgctcttcaacgacgtgcagaccctcaaggatggacggcacccgcagggcgagcagatgtaccgcagggtgtaccgtctgcacgagcgcctggtagccatccgcaccg

SEQ ID NO: 623232 - DNA, 120 bp, Artificial Sequence
  ENSG00000178209_17 (sequence is synthesized)
agtacaacctacggctgaaggcaggcgtggcggcccctgcaacccaggtggcccaggtgactctgcagagtgtgcagaggcgccccgagctggaggactccactctgcgctacctgcagg

SEQ ID NO: 623233 - DNA, 120 bp, Artificial Sequence
  ENSG00000178209_18 (sequence is synthesized)
acctgctggcctgggtggaggagaaccagcaccgtgtggatggcgctgagtggggtgtggacctgcccagcgtggaggcgcagctgggcagccaccgaggcctgcaccagtccatcgaag

SEQ ID NO: 623234 - DNA, 120 bp, Artificial Sequence
  ENSG00000178209_19 (sequence is synthesized)
aattccgggccaagatcgagcgggcacggagtgacgagggccagctctcccccgccacccggggtgcctaccgtgactgcctgggtcggctggacctgcagtacgccaagctgctgaact

SEQ ID NO: 623235 - DNA, 120 bp, Artificial Sequence
  ENSG00000178209_20 (sequence is synthesized)
cctccaaggcccgcctcaggtccctggagagcttgcacagctttgtggcagccgccactaaggagctaatgtggctgaatgagaaggaggaggaggaggtgggcttcgactggagcgacc

SEQ ID NO: 623236 - DNA, 120 bp, Artificial Sequence
  ENSG00000178209_21 (sequence is synthesized)
gcaacaccaacatgaccgccaagaaggagagctactcggcgctgatgcgggagctggagctgaaggagaagaagatcaaggagctccaaaatgctggggaccggctgctgcgggaggacc

SEQ ID NO: 623237 - DNA, 120 bp, Artificial Sequence
  ENSG00000178209_22 (sequence is synthesized)
acccggcccggcccacggtggagtccttccaggcggccctgcagacgcagtggagctggatgctacagctgtgctgctgtatcgaggcacacctgaaggagaacgctgcctactttcagt

SEQ ID NO: 623238 - DNA, 120 bp, Artificial Sequence
  ENSG00000178209_23 (sequence is synthesized)
tcttctcagatgtgcgggaggccgaggggcagttgcagaagctgcaggaggcactgcgtaggaaatacagttgtgatcgctccgccaccgtcacccggctggaggacctgctgcaggatg

SEQ ID NO: 623239 - DNA, 120 bp, Artificial Sequence
  ENSG00000178209_24 (sequence is synthesized)
cccaggacgagaaggaacagctgaacgagtacaagggccacctctcaggcctggccaagcgggccaaggccgtcgtgcagctgaagccccgccacccagcccaccccatgcggggccgcc

SEQ ID NO: 623240 - DNA, 120 bp, Artificial Sequence
  ENSG00000178209_25 (sequence is synthesized)
tgcccctgctggccgtgtgcgactataagcaggtggaggtgactgtgcacaagggtgacgagtgccagctggtgggccctgcacagccgtcccactggaaggtgctcagcagctccggca

SEQ ID NO: 623241 - DNA, 120 bp, Artificial Sequence
  ENSG00000178209_26 (sequence is synthesized)
gcgaggccgccgtgccctccgtgtgcttcctggtgcccccgcccaaccaggaggcccaggaggccgtcaccaggctggaggcccagcaccaggccctggtcacgctgtggcaccagttgc

SEQ ID NO: 623242 - DNA, 120 bp, Artificial Sequence
  ENSG00000178209_27 (sequence is synthesized)
acgtggacatgaagagccttctggcctggcagagccttcgccgcgacgtgcagctcatccgctcctggtccctggccacgttccgcaccctgaagccagaggagcagcgccaagccctgc

SEQ ID NO: 623243 - DNA, 120 bp, Artificial Sequence
  ENSG00000178209_28 (sequence is synthesized)
acagcctggagctgcactaccaggccttcctgcgggacagccaggacgcgggcggcttcggacccgaggaccggctgatggctgagcgcgagtacggctcctgcagccaccactaccagc

SEQ ID NO: 623244 - DNA, 120 bp, Artificial Sequence
  ENSG00000178209_29 (sequence is synthesized)
agctgctgcagagcctggaacagggtgcacaggaagagtctcgctgccagcgctgcatctccgagctcaaagacatccggctgcagctggaggcctgtgagacgcgcaccgtgcaccgcc

SEQ ID NO: 623245 - DNA, 120 bp, Artificial Sequence
  ENSG00000178209_30 (sequence is synthesized)
tgcggctgccgctggacaaagagccggcacgggagtgtgcccagcgcatcgccgagcagcagaaggcacaggcagaggtggaggggctgggcaagggggtcgcccggctctctgccgagg

SEQ ID NO: 623246 - DNA, 120 bp, Artificial Sequence
  ENSG00000178209_31 (sequence is synthesized)
ccgagaaggtcttggccctaccagagccatcgcctgcggcccccacgctgcgctcggagctggagctgacgctgggcaagctggagcaggtccgcagcctgtctgccatctacctggaga

SEQ ID NO: 623247 - DNA, 120 bp, Artificial Sequence
  ENSG00000178209_32 (sequence is synthesized)
agctcaagaccatcagcctggtgatccgcggcacgcagggggccgaggaggtgctcagggcccacgaggagcagctcaaggaggcccaggccgtgccggccaccctcccggagctcgagg

SEQ ID NO: 623248 - DNA, 120 bp, Artificial Sequence
  ENSG00000178209_33 (sequence is synthesized)
ccaccaaggcctctctgaagaagctgcgggcccaggccgaggcacagcagcccacgttcgacgccctgcgggatgagctgcggggggcacaggaggtgggggagcgactgcagcagcggc

SEQ ID NO: 623249 - DNA, 120 bp, Artificial Sequence
  ENSG00000178209_34 (sequence is synthesized)
acggggagcgggacgtggaggtggagcgctggcgggagcgggtcgcccagttgcttgagcgctggcaggctgtgctggcccagaccgacgtgcggcagcgcgagctcgagcaactgggcc

SEQ ID NO: 623250 - DNA, 120 bp, Artificial Sequence
  ENSG00000178209_35 (sequence is synthesized)
gccagctgcgttactaccgcgagagtgcagaccccttgggcgcctggctgcaggacgccaggcggcggcaggagcagatccaggccatgccgctggccgacagccaggctgtgcgggagc

SEQ ID NO: 623251 - DNA, 120 bp, Artificial Sequence
  ENSG00000178209_36 (sequence is synthesized)
agctgcggcaggagcaggccctgctggaggagatcgagcgccacggcgagaaggtcgaggagtgccagaggtttgcgaaacagtacatcaacgccatcaaggactatgaactccagctgg

SEQ ID NO: 623252 - DNA, 120 bp, Artificial Sequence
  ENSG00000178209_37 (sequence is synthesized)
tgacgtacaaggcgcagcttgagccggtggcctccccggccaagaagcccaaggtccagtcgggatcagagagtgtcatccaggagtacgtggacctgcgtacgcactacagcgagctga

SEQ ID NO: 623253 - DNA, 120 bp, Artificial Sequence
  ENSG00000178209_38 (sequence is synthesized)
ccacactgacgagccagtacatcaagttcatcagcgagactctgcggcgcatggaggaggaggagaggctggctgagcagcagcgggcagaggagcgcgagcggctggccgaggtggagg

SEQ ID NO: 623254 - DNA, 120 bp, Artificial Sequence
  ENSG00000178209_39 (sequence is synthesized)
ccgcgctggagaagcagcggcagctggccgaggcgcacgcccaggcaaaggcacaggcggagcgggaggcgaaggagctgcagcagcgcatgcaggaggaggtggtgcggcgggaggagg

SEQ ID NO: 623255 - DNA, 120 bp, Artificial Sequence
  ENSG00000178209_40 (sequence is synthesized)
cggcggtggacgcgcagcagcagaagcgcagcattcaggaggagctgcagcagctgcggcagagctcggaggcggagatccaggccaaggcccggcaggcagaggcggctgagcgcagcc

SEQ ID NO: 623256 - DNA, 120 bp, Artificial Sequence
  ENSG00000178209_41 (sequence is synthesized)
ggctgcgcatcgaggaggagatccgcgtggtgcgcctgcagttggaggccaccgagcgccagcgtggcggggctgagggggagctgcaggcactgcgtgcacgggcggaggaggctgagg

SEQ ID NO: 623257 - DNA, 120 bp, Artificial Sequence
  ENSG00000178209_42 (sequence is synthesized)
cacaaaagcgacaggcgcaggaggaggccgagcgcttgcggaggcaggtgcaggacgagagccagcgtaagcggcaggcggaggtggagctggcctcgcgcgtgaaggccgaggccgagg

SEQ ID NO: 623258 - DNA, 120 bp, Artificial Sequence
  ENSG00000178209_43 (sequence is synthesized)
gaggcggcgcgcgagaagcagcgggccctgcaggccctggaggagctgcggctgcaggcggaggaggcggagcggcgcctgcggcaggccgaggtggagcgagcgcggcaggtacaggtg

SEQ ID NO: 623259 - DNA, 120 bp, Artificial Sequence
  ENSG00000178209_44 (sequence is synthesized)
tggagacggcgcagcgcagtgcagaggcggagctgcagagcaaacgcgcctccttcgccgagaagacggcacagctggagcgctccctgcaggaggaacacgtggctgtggcacagctgc

SEQ ID NO: 623260 - DNA, 120 bp, Artificial Sequence
  ENSG00000178209_45 (sequence is synthesized)
gggaggaggctgagcggcgggcacagcagcaggccgaggccgagcgggcgcgcgaggaggcagagcgggagctggagcgctggcagctcaaggccaacgaggcgctacggctgcggctgc

SEQ ID NO: 623261 - DNA, 120 bp, Artificial Sequence
  ENSG00000178209_46 (sequence is synthesized)
aggcggaggaggtggcgcagcagaagagcctggcgcaggccgaggctgagaagcagaaggaggaggcggagcgcgaggcgcggcggcgcggcaaggcggaggagcaggccgtccggcagc

SEQ ID NO: 623262 - DNA, 120 bp, Artificial Sequence
  ENSG00000178209_47 (sequence is synthesized)
gggagctggctgaacaagagctggagaagcagcggcagctggcggaaggcaccgcgcagcagcgcctggccgcggagcaggagttgatccggctgcgggccgagacggagcagggggagc

SEQ ID NO: 623263 - DNA, 120 bp, Artificial Sequence
  ENSG00000178209_48 (sequence is synthesized)
agcagcggcagctgctggaggaggagctggcccggctgcagcgtgaggcggctgcagccacgcagaaacggcaggagctggaagccgagctggccaaggtgcgggccgagatggaggtgc

SEQ ID NO: 623264 - DNA, 120 bp, Artificial Sequence
  ENSG00000178209_49 (sequence is synthesized)
tgctggccagcaaggcgagggctgaggaggagtcgcgctccaccagcgagaagtccaagcagaggctggaggccgaggccggccggttccgcgagctggccgaggaggccgcccgcctgc

SEQ ID NO: 623265 - DNA, 120 bp, Artificial Sequence
  ENSG00000178209_50 (sequence is synthesized)
gtgccctggcggaagaggccaagcggcagcggcagctggccgaggaagacgcggcgcggcagcgggccgaggcggagcgggtgcttgcggagaagctggccgccatcggcgaggccacgc

SEQ ID NO: 623266 - DNA, 120 bp, Artificial Sequence
  ENSG00000178209_51 (sequence is synthesized)
ggctcaagacggaggcggagatcgcgctcaaggagaaggaggcggagaacgagcgcctgcggcggctggcggaggacgaggccttccagcggcggcggctggaggagcaggccgcgcaac

SEQ ID NO: 623267 - DNA, 120 bp, Artificial Sequence
  ENSG00000178209_52 (sequence is synthesized)
acaaggctgacatcgaggagcgcctggcccagctgcgcaaggcatcggacagcgagctggagcggcagaaggggctggtggaggacacgctgaggcagcggcggcaggtggaggaggaga

SEQ ID NO: 623268 - DNA, 120 bp, Artificial Sequence
  ENSG00000178209_53 (sequence is synthesized)
tcctggcgctgaaggcgagcttcgagaaggcggccgctggcaaggcggagctggagctggagctgggacgcatccgcagcaacgcggaggacacgctgcgcagcaaggagcaggccgagc

SEQ ID NO: 623269 - DNA, 120 bp, Artificial Sequence
  ENSG00000178209_54 (sequence is synthesized)
tggaggctgcgaggcagcggcagctggcggcggaggaggagcggcggcgccgtgaggctgaggagcgcgtgcagaagagcctggcggccgaggaggaggccgcacggcagcggaaggcgg

SEQ ID NO: 623270 - DNA, 120 bp, Artificial Sequence
  ENSG00000178209_55 (sequence is synthesized)
cgctggaggaagtcgagcggctgaaagccaaggtggaggaggcgcggcgcctgcgggagcgagcggagcaggagtcggcgcggcagctgcagctggcccaggaggccgcccagaagcggc

SEQ ID NO: 623271 - DNA, 120 bp, Artificial Sequence
  ENSG00000178209_56 (sequence is synthesized)
tgcaggcggaagagaaggcacacgccttcgcggtgcagcagaaggagcaggagctacagcagacgctgcagcaggagcagagcgtgctggaccagctgcgcggcgaggcggaggcggccc

SEQ ID NO: 623272 - DNA, 120 bp, Artificial Sequence
  ENSG00000178209_57 (sequence is synthesized)
ggcgggcggctgaggaggcggaggaggcccgggtgcaggcggagcgtgaggcggcgcagtcccggcggcaggtggaagaggccgagcggctgaagcagtcggcagaggagcaggcacagg

SEQ ID NO: 623273 - DNA, 120 bp, Artificial Sequence
  ENSG00000178209_58 (sequence is synthesized)
cccgggctcaggcacaggcggctgcagagaagctgcgcaaggaggccgagcaagaggcggcgcggcgggcacaggcggagcaggcggccctgcggcagaagcaggcagctgacgcggaga

SEQ ID NO: 623274 - DNA, 120 bp, Artificial Sequence
  ENSG00000178209_59 (sequence is synthesized)
tggagaagcataagaaattcgccgagcagacgctgcggcagaaggcgcaggtggagcaggagctgacaacactgcggctgcagctggaggagaccgaccaccagaagaacctgctggacg

SEQ ID NO: 623275 - DNA, 120 bp, Artificial Sequence
  ENSG00000178209_60 (sequence is synthesized)
aggagctgcagcggctgaaggcggaggccacggaggccgcacgccagcgcagccaggtggaggaggagctcttctcggtgcgcgtgcagatggaggagctgagcaagctcaaggcacgca

SEQ ID NO: 623276 - DNA, 120 bp, Artificial Sequence
  ENSG00000178209_61 (sequence is synthesized)
tcgaggctgagaaccgcgcactcatcttgcgtgacaaggacaatacgcagcgcttcctgcaggaggaggctgagaagatgaagcaggtggcggaggaggccgcgcggctgagtgtggcgg

SEQ ID NO: 623277 - DNA, 120 bp, Artificial Sequence
  ENSG00000178209_62 (sequence is synthesized)
cccaagaggctgcgcgactgcggcagctggcagaggaggacctggcacagcagcgggccttggcagagaagatgctcaaggagaagatgcaggcggtgcaggaggccacgcgactcaagg

SEQ ID NO: 623278 - DNA, 120 bp, Artificial Sequence
  ENSG00000178209_63 (sequence is synthesized)
aactgctgcagcagcagaaggagcttgcgcaggagcaggcgcggcggctgcaggaggacaaggagcagatggcgcagcagctggcggaggagacgcagggcttccagcggacgctggagg

SEQ ID NO: 623279 - DNA, 120 bp, Artificial Sequence
  ENSG00000178209_64 (sequence is synthesized)
ccgagcggcagcggcagctggagatgagcgctgaggctgagcgcctcaagctgcgtgtggccgagatgagccgagcccaggcccgcgctgaggaggacgcccagcgcttccggaagcagg

SEQ ID NO: 623280 - DNA, 120 bp, Artificial Sequence
  ENSG00000178209_65 (sequence is synthesized)
cggaggagatcggtgagaagctgcaccgcacggagctcgccacccaggagaaggtgaccctggtgcagacactggagatccagcgacagcagagtgaccatgatgccgagcgcctgcggg

SEQ ID NO: 623281 - DNA, 120 bp, Artificial Sequence
  ENSG00000178209_66 (sequence is synthesized)
aggccatcgctgagctggagcgtgagaaggagaagctccaacaggaggccaaactgctgcagctcaagtctgaggagatgcagacggtgcagcaggagcagctgctgcaggagacgcagg

SEQ ID NO: 623282 - DNA, 120 bp, Artificial Sequence
  ENSG00000178209_67 (sequence is synthesized)
ccctgcagcaaagcttcctctctgaaaaggacagcctgctacagcgggagcgcttcatcgagcaggagaaggccaagctggagcagctcttccaggacgaggtggccaaggcacagcagc

SEQ ID NO: 623283 - DNA, 120 bp, Artificial Sequence
  ENSG00000178209_68 (sequence is synthesized)
tgcgtgaggagcagcagcggcagcagcagcagatggagcaggaacggcagcggctggtggccagcatggaggaggcgcggcggcggcagcatgaggccgaggagggcgtgcggcgcaagc

SEQ ID NO: 623284 - DNA, 120 bp, Artificial Sequence
  ENSG00000178209_69 (sequence is synthesized)
aggaggagctgcagcagctggagcagcagcggcggcagcaggaggagctgctggctgaggagaaccagaggctgcgtgagcagctgcagctcctggaggagcagcaccgggccgcgctgg

SEQ ID NO: 623285 - DNA, 120 bp, Artificial Sequence
  ENSG00000178209_70 (sequence is synthesized)
cgcactcagaggaggtcactgcctcgcaggtggctgccacaaagaccctgcccaatggccgggatgcacttgatggccccgcggcagaggcagagccggagcacagcttcgatggcctgc

SEQ ID NO: 623286 - DNA, 120 bp, Artificial Sequence
  ENSG00000178209_71 (sequence is synthesized)
ggcggaaggtgtcagctcagaggctgcaggaggccggcatcctgagtgcggaggagctgcagcggttggcgcagggccacaccacggtggacgagctcgcacggcgggaagacgtgcgcc

SEQ ID NO: 623287 - DNA, 120 bp, Artificial Sequence
  ENSG00000178209_72 (sequence is synthesized)
actacctgcagggccgcagcagtatcgcagggctgttgctgaaggccaccaatgagaagctgagtgtttacgccgccctgcagaggcagctgctgagtcccggcacggccctcatcctgc

SEQ ID NO: 623288 - DNA, 120 bp, Artificial Sequence
  ENSG00000178209_73 (sequence is synthesized)
tggaggcgcaggcggcctcaggcttcctgctggaccctgtgcggaaccggcggctgaccgtcaacgaggctgtgaaggagggtgtggtgggccccgagctgcaccacaagctgctgtcgg

SEQ ID NO: 623289 - DNA, 120 bp, Artificial Sequence
  ENSG00000178209_74 (sequence is synthesized)
ccgagcgcgccgtcactggctacaaggacccctacactggccagcagatctctctcttccaagccatgcagaagggcctcatcgtccgggagcacggcatccgcctgctggaggcccaga

SEQ ID NO: 623290 - DNA, 120 bp, Artificial Sequence
  ENSG00000178209_75 (sequence is synthesized)
tcgccacgggcggcgttatcgaccccgtgcacagccaccgcgtgcccgtggacgtggcctaccggcgcggctacttcgacgaggagatgaaccgcgtcctggcggaccccagcgacgaca

SEQ ID NO: 623291 - DNA, 120 bp, Artificial Sequence
  ENSG00000178209_76 (sequence is synthesized)
ccaagggcttctttgaccccaacacgcacgagaacctcacgtacctgcagctactggagcgctgcgtggaggaccccgagacgggcctgtgccttctgccactcacggataaggctgcca

SEQ ID NO: 623292 - DNA, 120 bp, Artificial Sequence
  ENSG00000178209_77 (sequence is synthesized)
agggcggggagctggtctacactgactccgaggcccgggacgtctttgagaaggccaccgtgtctgcgccgttcggcaagttccagggcaagacggtgaccatttgggagatcatcaact

SEQ ID NO: 623293 - DNA, 120 bp, Artificial Sequence
  ENSG00000178209_78 (sequence is synthesized)
cggaatacttcacggcagagcagcggcgggacctgctgcggcagttccgcacgggccggatcacagtggagaagatcatcaagatcatcatcacggtggtggaggagcaggagcagaagg

SEQ ID NO: 623294 - DNA, 120 bp, Artificial Sequence
  ENSG00000178209_79 (sequence is synthesized)
gccggctttgctttgagggcctgcgcagcctggtgccagccgccgagctgctggagagcagggtcatcgaccgcgagctctaccagcagctgcagcgaggtgagcgctctgtgcgagacg

SEQ ID NO: 623295 - DNA, 120 bp, Artificial Sequence
  ENSG00000178209_80 (sequence is synthesized)
tagccgaggtggacactgtgcggcgggctctccggggtgccaacgtcatcgcgggtgtatggctggaggaggcggggcagaagctgagtatctacaatgccctgaagaaagacctgctgc

SEQ ID NO: 623296 - DNA, 120 bp, Artificial Sequence
  ENSG00000178209_81 (sequence is synthesized)
catccgacatggccgtggccctgttggaagcccaggccggcaccgggcacatcatcgaccccgccaccagcgcccggctgaccgtggacgaggcagtgcgtgctggcctggtgggccccg

SEQ ID NO: 623297 - DNA, 120 bp, Artificial Sequence
  ENSG00000178209_82 (sequence is synthesized)
agtttcatgagaagctgctatcagccgagaaggctgtgacagggtacagggacccctacacagggcagagcgtctccctgttccaggccctgaagaagggcctcattccccgggagcagg

SEQ ID NO: 623298 - DNA, 120 bp, Artificial Sequence
  ENSG00000178209_83 (sequence is synthesized)
gcctgcgcctgttggacgcccagctgtccacgggcggcatcgtggaccccagcaagagccaccgcgtgcccctggatgtcgcctgcgcccgaggctgcctggatgaggagaccagcaggg

SEQ ID NO: 623299 - DNA, 120 bp, Artificial Sequence
  ENSG00000178209_84 (sequence is synthesized)
ccctgtcggcaccaagggccgacgccaaggcctacagtgaccccagcacaggggagccggccacctacggcgagctccagcagcggtgccggcccgaccagctgaccgggctgagcctgc

SEQ ID NO: 623300 - DNA, 120 bp, Artificial Sequence
  ENSG00000178209_85 (sequence is synthesized)
tgccgctctcagaaaaggctgctcgggcccggcaggaggagctctactcagagctgcaggcccgtgagacctttgaaaagaccccggttgaggtccccgtgggtggcttcaagggcagga

SEQ ID NO: 623301 - DNA, 120 bp, Artificial Sequence
  ENSG00000178209_86 (sequence is synthesized)
cggtgacggtgtgggagctcatcagctctgagtacttcactgcggagcagcggcaggagctgttgcgtcagttccgcacgggcaaggtcaccgtggagaaggtcatcaagattctcatta

SEQ ID NO: 623302 - DNA, 120 bp, Artificial Sequence
  ENSG00000178209_87 (sequence is synthesized)
ccatcgtggaggaggtggagaccctgcggcaggagaggctgtccttcagcggcctccgtgcccctgtgccagccagcgagctcctggcttccggggtcctcagcagagcccagtttgagc

SEQ ID NO: 623303 - DNA, 120 bp, Artificial Sequence
  ENSG00000178209_88 (sequence is synthesized)
agctcaaggacggcaagacgacggtcaaggacctttcggagctgggctccgtgcggacgctgctgcagggcagtggctgcctcgccggcatctacctggaggacaccaaggagaaggtgt

SEQ ID NO: 623304 - DNA, 120 bp, Artificial Sequence
  ENSG00000178209_89 (sequence is synthesized)
ccatctacgaggccatgcgccggggcctgctgagagccacaacggctgcgctcctgctggaggcgcaggcggccactggcttcctggtggaccccgtgcggaaccagcgcctgtatgtcc

SEQ ID NO: 623305 - DNA, 120 bp, Artificial Sequence
  ENSG00000178209_90 (sequence is synthesized)
acgaggccgtgaaggcgggcgtggtgggccccgagcttcacgagcagctgctgtctgccgagaaggccgtcaccggctacagagacccctactcgggcagcaccatctccctcttccagg

SEQ ID NO: 623306 - DNA, 88 bp, Artificial Sequence
  ENSG00000178209_91 (sequence is synthesized)
tcatcgaccccgtgcacagccaccgcgtgcctgtggacgtggcctaccagcgcggctacttcagtgaggagatgaaccgcgtcctggc

SEQ ID NO: 623307 - DNA, 120 bp, Artificial Sequence
  ENSG00000178209_92 (sequence is synthesized)
agcgcggctacttcagtgaggagatgaaccgcgtcctggcggaccccagcgacgacaccaagggcttctttgaccccaacacgcatgagaacctcacgtacaggcagctgctggagcggt

SEQ ID NO: 623308 - DNA, 120 bp, Artificial Sequence
  ENSG00000178209_93 (sequence is synthesized)
gcgtggaggaccccgagacgggcttgcgccttctgccactgaaaggggcggagaaggctgaggtggtggagaccacgcaggtgtacactgaggaggagacaagaagggcatttgaagaga

SEQ ID NO: 623309 - DNA, 120 bp, Artificial Sequence
  ENSG00000178209_94 (sequence is synthesized)
cacagatcgacattcccggcggcggcagccacggcggctccaccatgtccctgtgggaggtgatgcagtcggacctgatccccgaggagcagcgggcccagctgatggctgacttccagg

SEQ ID NO: 623310 - DNA, 120 bp, Artificial Sequence
  ENSG00000178209_95 (sequence is synthesized)
ccggccgggtgaccaaggaacgcatgatcatcatcatcatcgagatcattgagaagacagagatcatccgccagcagggtctggcctcctacgactacgtgcgccgccgcctcacggctg

SEQ ID NO: 623311 - DNA, 120 bp, Artificial Sequence
  ENSG00000178209_96 (sequence is synthesized)
aggacctgttcgaggctcggatcatctctctcgagacctacaacctgctccgggagggcaccaggagcctccgtgaggctctcgaggcggagtccgcctggtgctacctctatggcacgg

SEQ ID NO: 623312 - DNA, 120 bp, Artificial Sequence
  ENSG00000178209_97 (sequence is synthesized)
gctccgtggctggtgtctacctgcccggttccaggcagacactgagcatctaccaggctctcaagaaagggctgctgagtgccgaggtggcccgcctgctgctggaggcacaggcagcca

SEQ ID NO: 623313 - DNA, 120 bp, Artificial Sequence
  ENSG00000178209_98 (sequence is synthesized)
caggcttcctgctggacccggtgaagggggagcggctgactgtggatgaggctgtgcggaagggcctcgtggggcccgagctgcacgaccgcctgctctcggctgagcgggcggtcaccg

SEQ ID NO: 623314 - DNA, 120 bp, Artificial Sequence
  ENSG00000178209_99 (sequence is synthesized)
gctaccgtgacccctacaccgagcagaccatctcgctcttccaggccatgaagaaggagctgatccctactgaggaggccctgcggctgctggatgcccagctggccaccggcggcatcg

SEQ ID NO: 623315 - DNA, 120 bp, Artificial Sequence
  ENSG00000178209_100 (sequence is synthesized)
tggacccccgcctgggcttccaccttcccctggaggtggcttaccagcgtggctacctcaacaaggacacgcacgaccagctgtcagagcccagcgaggtgcgcagctacgtggacccgt

SEQ ID NO: 623316 - DNA, 120 bp, Artificial Sequence
  ENSG00000178209_101 (sequence is synthesized)
ccaccgacgagcgcctcagctacacgcagctgctcaggcggtgccgtcgtgacgacggcaccggccagctgctcctgccactgtcggacgcccgcaagctgaccttccgtggcctgcgga

SEQ ID NO: 623317 - DNA, 120 bp, Artificial Sequence
  ENSG00000178209_102 (sequence is synthesized)
agcagatcaccatggaggagctggtgcgctcgcaggtcatggacgaggccacggcgctgcagctgcgggagggcctgacctccatcgaggaggtcaccaagaacttgcagaagttcctgg

SEQ ID NO: 623318 - DNA, 120 bp, Artificial Sequence
  ENSG00000178209_103 (sequence is synthesized)
aaggcaccagctgcatcgctggtgtcttcgtggacgccaccaaggaacggctctcggtgtaccaggccatgaagaagggcatcatccgccccggcacagcctttgagctcctggaggcgc

SEQ ID NO: 623319 - DNA, 120 bp, Artificial Sequence
  ENSG00000178209_104 (sequence is synthesized)
aggcggccaccggttacgtcatcgaccccatcaagggactgaagctgacggtggaggaggctgtgcgtatgggcattgtgggccccgagttcaaggacaagctgctgtcggccgagcgcg

SEQ ID NO: 623320 - DNA, 120 bp, Artificial Sequence
  ENSG00000178209_105 (sequence is synthesized)
cgagcgcgccgtcactgggtacaaggacccctactctgggaagctcatctccctcttccaggccatgaagaagggcctgatcctgaaggaccatggcatccgcctgctggaggcccagat

SEQ ID NO: 623321 - DNA, 120 bp, Artificial Sequence
  ENSG00000178209_106 (sequence is synthesized)
gcggcatcatcgaccctgaggagagccaccggctgcccgtggaggtggcctacaagcgcggcctcttcgatgaggagatgaacgagatcctgaccgacccctcggacgacaccaagggct

SEQ ID NO: 623322 - DNA, 120 bp, Artificial Sequence
  ENSG00000178209_107 (sequence is synthesized)
tctttgaccctaacacggaggagaacctcacctacctgcagctgatggagcgttgtatcactgacccccagacgggcctgtgtctcttgccgctgaaggagaagaagcgggagcggaaga

SEQ ID NO: 623323 - DNA, 120 bp, Artificial Sequence
  ENSG00000178209_108 (sequence is synthesized)
cgtcctccaagtcctccgtgcgcaagcgccgagtggtcatcgtggaccccgagacgggcaaggagatgtcagtgtacgaggcctaccgcaagggcctgattgaccaccagacgtacctgg

SEQ ID NO: 623324 - DNA, 120 bp, Artificial Sequence
  ENSG00000178209_109 (sequence is synthesized)
agctgtccgagcaggagtgcgagtgggaggagatcaccatctcctcctcggacggcgtggtcaagtccatgatcatcgaccgccgctccgggcgccagtacgacatcgatgatgccatcg

SEQ ID NO: 623325 - DNA, 120 bp, Artificial Sequence
  ENSG00000178209_110 (sequence is synthesized)
ccaagaacctcatcgaccgctcggcactggaccagtaccgcgccggcacgctctccatcaccgagttcgccgacatgctctcgggcaacgccggtggtttccgctcccgttcctcctcgg

SEQ ID NO: 623326 - DNA, 120 bp, Artificial Sequence
  ENSG00000178209_111 (sequence is synthesized)
tgggatcctcctcctcctaccccatcagccccgccgtctccaggacccagctggcctcctggtcagaccccactgaggagacgggccccgtggctggcatcctggacacggagacgctgg

SEQ ID NO: 623327 - DNA, 120 bp, Artificial Sequence
  ENSG00000178209_112 (sequence is synthesized)
agaaggtgtccatcaccgaggccatgcaccggaacctggtggataacatcacggggcagcggctgctggaggcgcaggcctgcaccgggggcatcatcgaccccagcaccggtgagcgct

SEQ ID NO: 623328 - DNA, 120 bp, Artificial Sequence
  ENSG00000178209_113 (sequence is synthesized)
tccctgtcaccgacgccgtcaacaagggcctggtggacaagatcatggtggaccgcatcaacctggcccagaaggccttctgcggcttcgaggacccacgcaccaagaccaagatgtcgg

SEQ ID NO: 623329 - DNA, 120 bp, Artificial Sequence
  ENSG00000178209_114 (sequence is synthesized)
ccgcccaggccctgaagaagggctggctctactacgaggccggccagcgcttcctggaggtgcagtacctgaccggcggcttgatcgagcccgacacgccgggccgcgtgcccctggacg

SEQ ID NO: 623330 - DNA, 120 bp, Artificial Sequence
  ENSG00000178209_115 (sequence is synthesized)
aggccctgcagcgcggcacggtggacgcccgcaccgcacagaagctgcgtgacgtgggcgcctactccaagtacctcacctgccctaagaccaagctcaagatctcctataaggacgcgc

SEQ ID NO: 623331 - DNA, 120 bp, Artificial Sequence
  ENSG00000178209_116 (sequence is synthesized)
tggaccgcagcatggtggaggagggcacggggctgcggctgctggaggctgccgcgcagtccaccaagggctactacagcccctacagcgtcagcggctccggctctaccgctggctccc

SEQ ID NO: 623332 - DNA, 120 bp, Artificial Sequence
  ENSG00000178209_117 (sequence is synthesized)
gcaccggctcgcgcaccggctcccgggccggctcccgccgcggcagctttgacgccaccggctccggcttctccatgaccttctcttcatcctcctactcctcctcgggctacggccgcc

SEQ ID NO: 623333 - DNA, 120 bp, Artificial Sequence
  ENSG00000178209_118 (sequence is synthesized)
ggtcctcggcctccctggggggccctgagtctgccgtggcctgaggctgcctgcgcccaccccgctctgcatgcggcccagcccggctcccaccgaggcgcgggggccgttttcaacgct

SEQ ID NO: 623334 - DNA, 120 bp, Artificial Sequence
  ENSG00000178209_119 (sequence is synthesized)
gttttcaacgcttaaaggtgtcttcctcccaagtggtgcctaaagtttaaccaaaaagaccagactaatatattaatatatatctgctgtccagacagcctgtatcttgggggacagggc

SEQ ID NO: 623335 - DNA, 120 bp, Artificial Sequence
  ENSG00000178209_120 (sequence is synthesized)
tggcccagccctgctggccgcctcaccccctcgggtctcctcactcccttctacctgccactcacacagccaggtgccttggagggtcccaagctgggccccagcccaccctcctgtctt

SEQ ID NO: 623336 - DNA, 120 bp, Artificial Sequence
  ENSG00000178209_121 (sequence is synthesized)
cccagggtagcccgcctgccagtcctagctgcacagggcagctgggcccaaccctgtctgtagagggccctggtgtttctagcactggcctgcacggtgggccttgctggggacgggggg

SEQ ID NO: 623337 - DNA, 120 bp, Artificial Sequence
  ENSG00000178209_122 (sequence is synthesized)
ccccagtcagcctctctcccagtctacccagagaagccccttccccatgggaagacgaggccctcgggcccagcccccacagtgctgtctgatctgtgctttccagctcaccccccacac

SEQ ID NO: 623338 - DNA, 120 bp, Artificial Sequence
  ENSG00000178209_123 (sequence is synthesized)
tcactcctgagacccctggcctccggcgtcagcctccagcctctgttcccctagtaagtgccttccatgtcggcctctaaccccaggccccgaggacccagacccagtggggaggcggac

SEQ ID NO: 623339 - DNA, 120 bp, Artificial Sequence
  ENSG00000178209_124 (sequence is synthesized)
gttccagccggcatggctgggaactgcagacctgtcctcctggtgggtccaggggcccctccagcttgtggagccccacactggggtgccgcctgcccgtctctctcccatggagcccca

SEQ ID NO: 623340 - DNA, 120 bp, Artificial Sequence
  ENSG00000178209_125 (sequence is synthesized)
gccccctttgggcccagggacaccagccaggctctgtgctgaccctcctgttgcacccagccctggtctcagcagcgaccacccctgcctccaccctctgagctttgcatgttccactaa

SEQ ID NO: 623341 - DNA, 120 bp, Artificial Sequence
  ENSG00000178209_126 (sequence is synthesized)
ccccgggcgggtggcaggtggaggtgtcaggctgctggcgcctctgcaagggcagaacactaacctgaccgtgggcggggccttgcggtatccgcccccaataaaagcaattccaacctt

SEQ ID NO: 623342 - DNA, 120 bp, Artificial Sequence
  ENSG00000178209_127 (sequence is synthesized)
tgagctgagcctgtgccgagtgagcgtctcgtggggccgccagccttcagctgcctgtgtgccacacggggctgcccagagcaccgtgcctgaggccgagggtccgggcgacgaaggtgt

SEQ ID NO: 623343 - DNA, 120 bp, Artificial Sequence
  ENSG00000178209_128 (sequence is synthesized)
gggggcagcatgtctcagcaccagctccgcgtgccgcagcccgagggcctgggccgaaagagaaccagctcggaggacaacctgtacctggctgtgctcagggcctctgagggcaagaaa

SEQ ID NO: 623344 - DNA, 120 bp, Artificial Sequence
  ENSG00000178209_129 (sequence is synthesized)
gctgtctagcctggagcagccggttcccagcgcaggaagggcagccctggcggctccgcgtggcggctatggagccctcgggcagcctgtttccctccctggtggttgtgggtcacgttg

SEQ ID NO: 623345 - DNA, 120 bp, Artificial Sequence
  ENSG00000178209_130 (sequence is synthesized)
attgatcagctgaagccccgcccctggccggcaagccctgccccggacctccgggctcctcccccggctgcggcgctggcctgggcagtgcggtgcggggctggactctgcctggtggtg

SEQ ID NO: 623346 - DNA, 120 bp, Artificial Sequence
  ENSG00000178209_131 (sequence is synthesized)
agagtggccgccgggtgctggaggctccgctgcaccccgcgccccgcgcccgccggcatggccggcccgctgcccgacgagcaggacttcatccaggcctacgaggaggtgcgcgagaag

SEQ ID NO: 623347 - DNA, 120 bp, Artificial Sequence
  ENSG00000178209_132 (sequence is synthesized)
gtggccggcatgtcgggggcggggggcgcctttgcctcgccgagggaggtcttgctggagcggccgtgctggctggacgggggctgcgagccggcccgcaggggctacctctaccagcag

SEQ ID NO: 623348 - DNA, 120 bp, Artificial Sequence
  ENSG00000178209_133 (sequence is synthesized)
ggcggcagagctgaagtgagcggagccaccaggaggccatgtcgggtgaggacgctgaggtccgggcagtctctgaagatgtctccaatggaagcagtggctcgcccagccctggggaca

SEQ ID NO: 623349 - DNA, 120 bp, Artificial Sequence
  ENSG00000178209_134 (sequence is synthesized)
cactgccctggaaccttgggaaaacgcagcggagccggcgcagcgggggtggcgctgggagcaacgggagtgtcctggacccagctgagcgggcggtcattcgcatcgcagatgagcggg

SEQ ID NO: 623350 - DNA, 120 bp, Artificial Sequence
  ENSG00000178209_135 (sequence is synthesized)
ctcggtgttggagggctgagagggagggaagggggagccaccatggatcaggtgagaagcctctccacagaggcctggcgaggtccaccctgctgcagcagagcaggtgcctgcgtgagg

SEQ ID NO: 623351 - DNA, 120 bp, Artificial Sequence
  ENSG00000178209_136 (sequence is synthesized)
cgagggagcgggacgtaagcaggagctcacgcctggtgagtggctgtgcctgccggctgcagcggcacgggagctccccaagaccgtggagcccggctttctgggggctggtggcccgtc

SEQ ID NO: 623352 - DNA, 120 bp, Artificial Sequence
  ENSG00000178209_137 (sequence is synthesized)
ttcatctctgcttactgactaaggggtggctgcgaggaggagccgctgctaccagggcatgagtgggccctccctctgcctcccaccccttccctccttcctgcctcgccttcctccctg

SEQ ID NO: 623353 - DNA, 120 bp, Artificial Sequence
  ENSG00000178217_0 (sequence is synthesized)
atgctgcagcagatcctgcacgacatgtacatcgaccccgagctccttgccgagctcagcgatgtgcagaagcacatcctcttctacaaaatgcgggaggagcagctgaggcgctggaag

SEQ ID NO: 623354 - DNA, 120 bp, Artificial Sequence
  ENSG00000178217_1 (sequence is synthesized)
gagcgggagacttgggaggccctggcccaggacgagggtctcaggcctccaaagaccaagcgagcagcgagtgacaagcacatccaatggctcctaggggcagatggcgaggtctgggtc

SEQ ID NO: 623355 - DNA, 120 bp, Artificial Sequence
  ENSG00000178217_2 (sequence is synthesized)
tggatcatgggagaaggccctggtgacaagccctacgaagagatctctgaggagctgattgcagagagggcgcggctgcaggcacagagggaagctgaggagctctggagacagaaggag

SEQ ID NO: 623356 - DNA, 120 bp, Artificial Sequence
  ENSG00000178217_3 (sequence is synthesized)
gcagagatcaccaagaagttccgggatgctctggccaatgagaaagcccggatcttggcggagaagtggaaagtggagatggaagaccgcaaggctgccaaagtcctggaggaacgcatc

SEQ ID NO: 623357 - DNA, 120 bp, Artificial Sequence
  ENSG00000178217_4 (sequence is synthesized)
cacgaggaattcaagaggaaagaggaagaggagaggaagcgaggagaagagcagattcgcctccaggaagagcagagggcgaaggagctctactggaccctgaagcaggctcagctgcat

SEQ ID NO: 623358 - DNA, 120 bp, Artificial Sequence
  ENSG00000178217_5 (sequence is synthesized)
gagtaccgacaccactcgctccgtgctatccagaagggcacggtcgctggcctcagctccatgttccgggagcttggccagagccatgagcaggaggcaagactctaccaccacctcccc

SEQ ID NO: 623359 - DNA, 120 bp, Artificial Sequence
  ENSG00000178217_6 (sequence is synthesized)
gacccgggtctgccgcagccccttgccctgccggtcagcaggacctgggagcgcccgctgcgcccagtctccagagatgtcatcgtccgctggtttaaggaggagcagctgcctcgccga

SEQ ID NO: 623360 - DNA, 120 bp, Artificial Sequence
  ENSG00000178217_7 (sequence is synthesized)
gctggcttcgagaggaacaccaagttcatcgccccctggttccatggaattattagccgagaagatgcagaagctctcctggagaacatgactgagggagcattcctggtccgggtcagt

SEQ ID NO: 623361 - DNA, 120 bp, Artificial Sequence
  ENSG00000178217_8 (sequence is synthesized)
gagaaaatctggggttacaccctctcctaccgcctgcagaaagggttcaaacactttcttgtggatgcttctggggatttttacagcttcctgggagtggaccccaatcgccatgcaacg

SEQ ID NO: 623362 - DNA, 120 bp, Artificial Sequence
  ENSG00000178217_9 (sequence is synthesized)
ctcacggatctcgttgatttccataaggaggaaattatcactgtttcaggaggagagttacttcaggaaccctgcggacagagggacagcccaccagactaccatctgttgtttgaataa

SEQ ID NO: 623363 - DNA, 120 bp, Artificial Sequence
  ENSG00000178217_10 (sequence is synthesized)
aaagcagccgtgccgtgtcccagggcgggaattgtgcggggacgggctccacggaggaatcttctcttccttcccttgatgttgccagaggactcaggaggctctccagatgctgcagcg

SEQ ID NO: 623364 - DNA, 120 bp, Artificial Sequence
  ENSG00000178217_11 (sequence is synthesized)
accctgcggacagagggacagcccaccagactaccatctgttgtttgaataatttttttccttatcaattggattcattttggtatcctgtttttgaactcagcttaagaacttctcatc

SEQ ID NO: 623365 - DNA, 120 bp, Artificial Sequence
  ENSG00000178217_12 (sequence is synthesized)
tcaaatcctatggccttctggaagatccaccactatccaaaggaaaaagtagattaatatgcctcaagggatatgacatctatggcatagggctactggtctcatcccagcgatcgggac

SEQ ID NO: 623366 - DNA, 120 bp, Artificial Sequence
  ENSG00000178217_13 (sequence is synthesized)
agaaattgctaatagctcatgcaactctttcatgaagagcttagctatgaccttagaagacaaagcctgtttgtcatggctgccgtaaaccgagctcttacagtgcgtggaccatgtttt

SEQ ID NO: 623367 - DNA, 120 bp, Artificial Sequence
  ENSG00000178217_14 (sequence is synthesized)
aataatccaaaataattccagtgccgaaccctgaatttaacatatggtagacattcagtaaatgtttgttgaatgaatgcatgtcttctaaaagttttccaacacaaattagcagtggtt

SEQ ID NO: 623368 - DNA, 120 bp, Artificial Sequence
  ENSG00000178217_15 (sequence is synthesized)
ttatttcctactcgccactctataaaatcatggcaataatagaagattatgaaggatttctatggaggacataaatgctgcatctttcataatctccattatcaccctcattgatattat

SEQ ID NO: 623369 - DNA, 120 bp, Artificial Sequence
  ENSG00000178217_16 (sequence is synthesized)
cattggaattatctaaggtgagccccagtttccagggcagctgattgacaccgtcctgccttccttatttaacctcttcttttgccactcgcctctatctttgaatcatattttggcctt

SEQ ID NO: 623370 - DNA, 120 bp, Artificial Sequence
  ENSG00000178217_17 (sequence is synthesized)
ggttttgcaatggttttatgtcatcctacagatgtcttcaagacctggggtgagttatcaatgcaagaatggttcttagaaatctgatgaggcctctgctctctgggatgtggccctctc

SEQ ID NO: 623371 - DNA, 120 bp, Artificial Sequence
  ENSG00000178217_18 (sequence is synthesized)
tatgcaggttactccaatgattagctctgtcctcattgtccttttaattcccttgtcaacttaatctcagtatgttgcttatattaacaagaagactcacgcaataactcctcgataact

SEQ ID NO: 623372 - DNA, 120 bp, Artificial Sequence
  ENSG00000178217_19 (sequence is synthesized)
ctcagtgatggtatctgttggtgcatacttgtgttccacagttatggccatatacacagaggtagtatatgatgaagagaagattacagtctttacagtcaagaagacttgggttcatat

SEQ ID NO: 623373 - DNA, 120 bp, Artificial Sequence
  ENSG00000178217_20 (sequence is synthesized)
cctaaccctggaacttactagcattataatgcttgcagcattgtgtttggtgagaggaaaagaatgaatggattctaggaatgttagggaacgatttactttacccgatggctgtatcaa

SEQ ID NO: 623374 - DNA, 120 bp, Artificial Sequence
  ENSG00000178217_21 (sequence is synthesized)
acatctatgccccacttcttctcttgcctcacctattccttagattcttggtcacttctctaccacaagccaccagcactataaccagttttgcgtgggttctgctcttcctccctatgt

SEQ ID NO: 623375 - DNA, 120 bp, Artificial Sequence
  ENSG00000178217_22 (sequence is synthesized)
tgatcagtgtcatgtgagcataagccaatggtagcttgccacatgccccatctcccattgctgcagaggcataagacagaagagatgggaagtgaatgcccgatgtggtgaatctgggat

SEQ ID NO: 623376 - DNA, 120 bp, Artificial Sequence
  ENSG00000178217_23 (sequence is synthesized)
gaatgggagtcataggctggtagatcgctttttcctccttcttcctcctggaggaactattctgagagtcatctgtttgtatggtcttgtagaagacagtcctgtaagatcgagcaacca

SEQ ID NO: 623377 - DNA, 120 bp, Artificial Sequence
  ENSG00000178217_24 (sequence is synthesized)
gtcatgatgaaaccaagtggtggccggatcagtatgacaccctgctgcccccgtttttaattcttctctgccttgccctgctctctcctgttgctctgggattgcacttctgaatgaagt

SEQ ID NO: 623378 - DNA, 120 bp, Artificial Sequence
  ENSG00000178217_25 (sequence is synthesized)
agcagctcataagcttttgccacaggctctgtcttttggggaatccaggataagaacccattatacagaagtgttcaataatatcaattttgcaactcactcagctccatggcttccccc

SEQ ID NO: 623379 - DNA, 120 bp, Artificial Sequence
  ENSG00000178217_26 (sequence is synthesized)
ggtctacctgtctcactacatgcataaagtgaaatgatggaaggaatctgctttctgaactctaatgtgccttcattgattatcattaaaattatcattaaaattgccttatttctatgg

SEQ ID NO: 623380 - DNA, 120 bp, Artificial Sequence
  ENSG00000178217_27 (sequence is synthesized)
ccgtcactaggtttttttgtgggttagttaaatgataaacatgaaagctctgtccaaatgaaaaaggtatttctaacaacaaccacaataacaataacaacttagtgcttagcccatgat

SEQ ID NO: 623381 - DNA, 120 bp, Artificial Sequence
  ENSG00000178217_28 (sequence is synthesized)
gtatcaggggatatgatgtgatgattttcaaggtgttggaggcaacttctgttccaagaactcccagcagctttgaaagcagactgagatgagttgagaccctgaatccctgggctgttg

SEQ ID NO: 623382 - DNA, 120 bp, Artificial Sequence
  ENSG00000178217_29 (sequence is synthesized)
ttcctgtcacccctaattaatatgtgagagacaacagctgggttttccatccctaacacatttatttcattttatttggggcctgcaatttctgcatgtctcatatattttaggttttac

SEQ ID NO: 623383 - DNA, 120 bp, Artificial Sequence
  ENSG00000178217_30 (sequence is synthesized)
ctttttacctggctttaaaataaatcccttgtaagttgtcctgcaaatgaaattactgtctggaaaactgcaatttcatcttgagagttttattatgctaataaatgtcaggattctcat

SEQ ID NO: 623384 - DNA, 120 bp, Artificial Sequence
  ENSG00000178217_31 (sequence is synthesized)
actaacagatcactcgacacctaccagcccaggcagggctgggactgggcatttcctggctgagctggaggcttgggcccttcccattgtctcagaaccccaggtgatgccaagacatgg

SEQ ID NO: 623385 - DNA, 120 bp, Artificial Sequence
  ENSG00000178217_32 (sequence is synthesized)
gctctcctgggatgccgtgcttggtgacccaggagaaggactagattgctcctggtggttgctcccccttgcagagtcccacctgcccctttgggtcctgttgcctggcctcttttgctg

SEQ ID NO: 623386 - DNA, 120 bp, Artificial Sequence
  ENSG00000178217_33 (sequence is synthesized)
tcctgggtagaggagatgagttcgtcgctggctgcaagctgaggccaactgacaatgctgcacagagaaggggcaccgagagtggccccggattgagcagtccgtagtgcagagcagccc

SEQ ID NO: 623387 - DNA, 120 bp, Artificial Sequence
  ENSG00000178217_34 (sequence is synthesized)
atgtggaagaagaggctgggtgaagcaggctgccctgcactgcttaatgaagaagaaagacatctgaggttactgagaaggaagagtgtgaggactgggaacacaggctggctctctgta

SEQ ID NO: 623388 - DNA, 120 bp, Artificial Sequence
  ENSG00000178217_35 (sequence is synthesized)
gggctgtagggggtaaaggaaagcccagagtggcagcgagtgggaagacaggggctggaggccaactccacagatgacagctcaggacctgggagcgcccgctgcgcccagtctccagag

SEQ ID NO: 623389 - DNA, 120 bp, Artificial Sequence
  ENSG00000178222_0 (sequence is synthesized)
agagctgcccgccttcgggccctgcgcggggaggctggtcccaaccttgcgtgggcttcgcgtgggcccggcctcgccgctgcggtcgcccgcctggcatggccaactgggtgttctgta

SEQ ID NO: 623390 - DNA, 120 bp, Artificial Sequence
  ENSG00000178222_1 (sequence is synthesized)
atcgctgcttccagccgccccacaggacgtcgtgcttcagcctcaccaactgcgggcacgtgtactgcgacgcctgcctcggcaaaggtaaaaagaatgaatgcttgatttgtaaagctc

SEQ ID NO: 623391 - DNA, 120 bp, Artificial Sequence
  ENSG00000178222_2 (sequence is synthesized)
cttgtcgtacagttttgctttcaaagcataccgacgcagatatccaggcattcttcatgagcatagacagtctgtgtaagaagtactccagggaaacctcccagattttagaatttcaag

SEQ ID NO: 623392 - DNA, 120 bp, Artificial Sequence
  ENSG00000178222_3 (sequence is synthesized)
aaaaacacaggaagagattgttagccttctatagagaaaagatttctaggttggaagaatcccttaggaagtcagtgctgcagatagaacaactacaaagtatgagatcatcacaacaaa

SEQ ID NO: 623393 - DNA, 120 bp, Artificial Sequence
  ENSG00000178222_4 (sequence is synthesized)
cagctttcagcacaataaaaagttcagtttcaacaaaaccacacggatgcctgctgccacctcactcatcagcccccgacagactggagtcgatggaagttgatctctctccttctccga

SEQ ID NO: 623394 - DNA, 120 bp, Artificial Sequence
  ENSG00000178222_5 (sequence is synthesized)
ttagaaaatctgagatagcagccggccctgcgagaatctccatgattagtccacctcaagatggacgaatggccccctgtgcccggagagtgtgtcatttccagaggttcaccatgtttc

SEQ ID NO: 623395 - DNA, 120 bp, Artificial Sequence
  ENSG00000178222_6 (sequence is synthesized)
tgcatagacgtctgtcctcactggctgctcctcctagcgttcagttctggaaggcacggggaactcaccaactctaaaacacttccaatatatgctgaggtacaaagggccgtcttgttt

SEQ ID NO: 623396 - DNA, 120 bp, Artificial Sequence
  ENSG00000178222_7 (sequence is synthesized)
ccgttccagcaggctgagggcaccctggacacgttcagaacacccgctgtgtctgttgtgtttcctctttgccaatttgaaaggaaaaagtcattttgatttgcatttatgtgactatta

SEQ ID NO: 623397 - DNA, 120 bp, Artificial Sequence
  ENSG00000178222_8 (sequence is synthesized)
atgattctgagtgttttcaatttattcctctgtgttttttctacaaattatctgctttattcctttgtcatttatgtggaagccctcagtgtgcaggatattaaccttttacccaatttg

SEQ ID NO: 623398 - DNA, 120 bp, Artificial Sequence
  ENSG00000178222_9 (sequence is synthesized)
atatatattgttattatcccttttattttataggttctcatgcttagggagtttttttttcacatacttaaatcatttttttctaactgggtggtttttaaaactttttcttagagcagt

SEQ ID NO: 623399 - DNA, 120 bp, Artificial Sequence
  ENSG00000178222_10 (sequence is synthesized)
tttaggttcacagaaaaattgaaaggaaggtacagatttcccatatacaccatgactccacacacgcacagctcccccatcatcctcatcctccaccagagcagtccatgtgttaaaact

SEQ ID NO: 623400 - DNA, 120 bp, Artificial Sequence
  ENSG00000178222_11 (sequence is synthesized)
gatgatcctacttgaatacatcattatcacccaacgtccatggtttacattagggttcactctaggtgtcgaatgttctatgggtttgaacaaatatctagtgacatgtgtccccatcgt

SEQ ID NO: 623401 - DNA, 120 bp, Artificial Sequence
  ENSG00000178222_12 (sequence is synthesized)
agcagcatatggaatagtgccacaccctaaaaatcctctgtgcgccacctgttcatccttcccccacctcccaccaacccttgacagccactgatctttttacggtccctttttcagact

SEQ ID NO: 623402 - DNA, 120 bp, Artificial Sequence
  ENSG00000178222_13 (sequence is synthesized)
ctcctggagttggaattgtacagtatgtggcttctcagattgactcctttcacttagcaatacacacttatggttcccccatctcttctcatggtttgctagctcattttttcagtcact

SEQ ID NO: 623403 - DNA, 120 bp, Artificial Sequence
  ENSG00000178222_14 (sequence is synthesized)
cttctcatggtttgctagctcattttttcagtcactgaataatattccattatctggatgtatcatagttcatccattcacctactgaagggcatcttggttgcttccaagttttggcaa

SEQ ID NO: 623404 - DNA, 120 bp, Artificial Sequence
  ENSG00000178222_15 (sequence is synthesized)
ggttttgtgtagacatgttttcagctcctttgggtaaatactaaggagtgtgaatgctggatcagatggtgagagggtgtttagttttgaaagaaattgccaaactaccttccaaagtgg

SEQ ID NO: 623405 - DNA, 120 bp, Artificial Sequence
  ENSG00000178222_16 (sequence is synthesized)
cagcagcttttcgcattcccactagcaacgaatgagagttcctgttgctccacgtcctcacatttgatgatgtcagtgttctggattttggccagctgataggtatgtagtggtatcttg

SEQ ID NO: 623406 - DNA, 120 bp, Artificial Sequence
  ENSG00000178222_17 (sequence is synthesized)
ctgttttattttgcatttcattgataacatatgactaggagcatcttatgctgatttttcatctgcatatcttctttgctgaagtgtctgttaaggtatttggcccattttttaattgga

SEQ ID NO: 623407 - DNA, 120 bp, Artificial Sequence
  ENSG00000178222_18 (sequence is synthesized)
ttgttttcttattgttgagttttaagagtcctgtgtatattttggatgacatttcttttttgtgtgtcttttttttggatgacatttccttatcagataaatatgtatcttgaaaatata

SEQ ID NO: 623408 - DNA, 120 bp, Artificial Sequence
  ENSG00000178222_19 (sequence is synthesized)
acatcctccaaggaggtgcccagaggctcgacccatggaagccaagcagcagccagagatccccaagaacactgggtcagcacaacacgggcacccagaccaggatgccggcggtcccag

SEQ ID NO: 623409 - DNA, 120 bp, Artificial Sequence
  ENSG00000178222_20 (sequence is synthesized)
ccatcccagcaggaccctcattcacaccaagtccccttggggccagaagttgcttgagttcataaaacatgtctgttatcacagacatcagagccacaggccgtgcgctccagggtggtt

SEQ ID NO: 623410 - DNA, 120 bp, Artificial Sequence
  ENSG00000178222_21 (sequence is synthesized)
ttgccaagtgctgcagaggccaggtgctgtctcaggagagaagacccagcagacccggccagcccctccagccacctgtctgctctgcctctcgtgcctctcaggcttccggcatgggcc

SEQ ID NO: 623411 - DNA, 120 bp, Artificial Sequence
  ENSG00000178222_22 (sequence is synthesized)
gtggaggtcacaggctctgcccagtgacctcgtggccccactgtttgtcagttacactgtggaggtgagcatcacaaacgcagggtggagttttcccgcagctgtgtgacgtgaggtggt

SEQ ID NO: 623412 - DNA, 120 bp, Artificial Sequence
  ENSG00000178222_23 (sequence is synthesized)
attgtaacatttatgctctaatatcaacgtaacataaatattggcatttgttacaatatgttaacacatcatggatttattgttatttttaaatgaattaataaatacttttagatttgt

SEQ ID NO: 623413 - DNA, 120 bp, Artificial Sequence
  ENSG00000178222_24 (sequence is synthesized)
caaagcatcgcccctttcctgtgtctgacagcgagtcaccaacagcacgcctttacagctgcgtgaggagagccccgtggatcccgcacaggggtacccgtgtccgcttgcgccgtcgga

SEQ ID NO: 623414 - DNA, 72 bp, Artificial Sequence
  ENSG00000178222_25 (sequence is synthesized)
ttgcagatcaaaatcaagtctttggcatctggaaattatagacaggagttttaatattgtggatatcaagcc

SEQ ID NO: 623415 - DNA, 120 bp, Artificial Sequence
  ENSG00000178222_26 (sequence is synthesized)
aaattatagacaggagttttaatattgtggatatcaagcctgacaatatggaagagctaacaggtgatttcagccgcagaattccatctgaacagctataacacatctgtatctagcagc

SEQ ID NO: 623416 - DNA, 120 bp, Artificial Sequence
  ENSG00000178222_27 (sequence is synthesized)
tgaagtcatttcaaagacaaagttgtgtttttaccgcgacttccatgcctcctgcgggacctgctcaccttggggcagtgacacctgaaagatgagcacccagccacccgctctgccccc

SEQ ID NO: 623417 - DNA, 120 bp, Artificial Sequence
  ENSG00000178222_28 (sequence is synthesized)
ttccagtcctccagccttcgtgcccaccagcatgtgtacgttagacagccagtgcgactgtactttccctcttgttgaaataattaagtaatgtagtggaataaagtatttttctgatta

SEQ ID NO: 623418 - DNA, 120 bp, Artificial Sequence
  ENSG00000178222_29 (sequence is synthesized)
gctctccaagatcaagaatgaaagatgactgcagatgcagagggaagagctcgttcatttaccagaaactttcatcagagcaaaaatgctgtgggaaaaccgaagggaagaagggagaca

SEQ ID NO: 623419 - DNA, 120 bp, Artificial Sequence
  ENSG00000178222_30 (sequence is synthesized)
gtcagaggagcatgggaaagcctctcaggattccacctctgcaaattccctacaagggacccccactaacgccaacaccacagttaccagggagagcaggaagaggggactctccaagct

SEQ ID NO: 623420 - DNA, 120 bp, Artificial Sequence
  ENSG00000178222_31 (sequence is synthesized)
tttcaaagctggtgcgttagtggctcctgttgtcaggtcttaatttcacacctttaacacccgcagtggccatgtgctgagtgacagttgcagttgtaagagccagtgatgtaaatggca

SEQ ID NO: 623421 - DNA, 120 bp, Artificial Sequence
  ENSG00000178222_32 (sequence is synthesized)
gtggggtgttgagttcacttggcttcagcgctagggaggagcagggccgtgcgactcacaggacgctatgggaactgctgaattcatgtgaaatgccgtttgcaaacccagtaagaacat

SEQ ID NO: 623422 - DNA, 120 bp, Artificial Sequence
  ENSG00000178222_33 (sequence is synthesized)
ttcactgattcagagccttcttacactttcagttgggatgacctggggggaagtcagtttttatgatttaattcaataccttttctccatctatttagtatgagatcatcacaacaaaca

SEQ ID NO: 623423 - DNA, 85 bp, Artificial Sequence
  ENSG00000178222_34 (sequence is synthesized)
agccaggtgcactatcccgagaccatggagctgtgaggggtgtgcttggttctgctgtgggagttgtgcttggttctgtgatgag

SEQ ID NO: 623424 - DNA, 120 bp, Artificial Sequence
  ENSG00000178222_35 (sequence is synthesized)
ggtgcactatcccgagaccatggagctgtgggagttgtgcttggttctgtgatgagccaggtgcactatcctgagaccgtggagctgtggggggtgtgcttggttccgtgatgagccagg

SEQ ID NO: 623425 - DNA, 120 bp, Artificial Sequence
  ENSG00000178222_36 (sequence is synthesized)
cgagaatctccatgattagtccacctcaagatggacgaatggggccacatctaacagcttctttctgtttcatcccatggttgaccttgtctaagccccctgtgcccggagagtgtgtca

SEQ ID NO: 623426 - DNA, 120 bp, Artificial Sequence
  ENSG00000178222_37 (sequence is synthesized)
tgggaaatgtgttcctaacagacagtgggagtccgaatctcgtaagccgcaatattggaattttacccattgttttcttgttgcattcttagtctgagatagcagccggccctgcgagaa

SEQ ID NO: 623427 - DNA, 120 bp, Artificial Sequence
  ENSG00000178226_0 (sequence is synthesized)
acttggctctgcctccgctgactctagcgccatggcccggcacctgctcctcccccttgtgatgcttgtcatcagtcccatcccaggagccttccaggactcagctctcagtcctaccca

SEQ ID NO: 623428 - DNA, 120 bp, Artificial Sequence
  ENSG00000178226_1 (sequence is synthesized)
ggaagaacctgaagatctggactgcgggcgccctgagccctcggcccgcatcgtggggggctcaaacgcgcagccgggcacctggccttggcaagtgagcctgcaccatggaggtggcca

SEQ ID NO: 623429 - DNA, 120 bp, Artificial Sequence
  ENSG00000178226_2 (sequence is synthesized)
catctgcgggggctccctcatcgccccctcctgggtcctctccgctgctcactgtttcatgacgaatgggacgctggagcccgcggccgagtggtcggtactgctgggcgtgcactccca

SEQ ID NO: 623430 - DNA, 120 bp, Artificial Sequence
  ENSG00000178226_3 (sequence is synthesized)
ggacgggcccctggacggcgcgcacacccgcgcagtggccgccatcgtggtgccggccaactacagccaagtggagctgggcgccgacctggccctgctgcgcctggcctcacccgccag

SEQ ID NO: 623431 - DNA, 120 bp, Artificial Sequence
  ENSG00000178226_4 (sequence is synthesized)
cctgggccccgccgtgtggcctgtctgcctgccccgcgcctcacaccgcttcgtgcacggcaccgcctgctgggccaccggctggggagacgtccaggaggcagatcctctgcctctccc

SEQ ID NO: 623432 - DNA, 120 bp, Artificial Sequence
  ENSG00000178226_5 (sequence is synthesized)
ctgggtgctacaggaagtggagctaaggctgctgggcgaggccacctgtcaatgtctctacagccagcccggtcccttcaacctcactctccagatattgccagggatgctgtgtgctgg

SEQ ID NO: 623433 - DNA, 120 bp, Artificial Sequence
  ENSG00000178226_6 (sequence is synthesized)
ctacccagagggccgcagggacacctgccagggtgactctggggggcccctggtctgtgaggaaggcggccgctggttccaggcaggaatcaccagctttggctttggctgtggacggag

SEQ ID NO: 623434 - DNA, 120 bp, Artificial Sequence
  ENSG00000178226_7 (sequence is synthesized)
aaaccgccctggagttttcactgctgtggctacctatgaggcatggatacgggagcaggtgatgggttcagagcctgggcctgcctttcccacccagccccagaagacccagtcagatcc

SEQ ID NO: 623435 - DNA, 120 bp, Artificial Sequence
  ENSG00000178226_8 (sequence is synthesized)
ccaggagcccagggaggagaactgcaccattgccctgcctgagtgcgggaaggccccgcggccaggggcctggccctgggaggcccaggtgatggtgccaggatccagaccctgccatgg

SEQ ID NO: 623436 - DNA, 120 bp, Artificial Sequence
  ENSG00000178226_9 (sequence is synthesized)
ggcgctggtgtctgaaagctgggtcttggcacctgccagctgctttctggacccgaacagctccgacagcccaccccgcgacctcgacgcctggcgcgtgctgctgccctcgcgcccgcg

SEQ ID NO: 623437 - DNA, 120 bp, Artificial Sequence
  ENSG00000178226_10 (sequence is synthesized)
cgcggagcgggtggcgcgcctggtgcagcacgagaacgcttcgtgggacaacgcctcggacctggcgctgctgcagctgcgcacgcccgtgaacctgagcgcggcttcgcggcccgtgtg

SEQ ID NO: 623438 - DNA, 120 bp, Artificial Sequence
  ENSG00000178226_11 (sequence is synthesized)
tggggccgcggggaacccgcgcttggcccaggcgcgctgctggaggcggagctgttaggcggctggtggtgccactgcctgtacggccgccagggggcggcagtaccgctgcccggagac

SEQ ID NO: 623439 - DNA, 120 bp, Artificial Sequence
  ENSG00000178226_12 (sequence is synthesized)
agacccgccgcacgcgctctgccctgcctaccaggaaaaggaggaggtgggcagctgctggaatgactcgcgttggagccttttgtgccaggaggaggggacctggtttctggctggaat

SEQ ID NO: 623440 - DNA, 120 bp, Artificial Sequence
  ENSG00000178226_13 (sequence is synthesized)
cagagactttcccagtggctgtctacgtccccgagccttcttccctctgcagactcatggcccatggatcagccatgtgactcggggagcctacctggaggaccagctagcctgggattg

SEQ ID NO: 623441 - DNA, 120 bp, Artificial Sequence
  ENSG00000178226_14 (sequence is synthesized)
gggccctgatggggaggagactgagacacagacttgtcccccacacacagagcatggtgcctgtggcctgcggctggaggctgctccagtgggggtcctgtggccctggctggcagaggt

SEQ ID NO: 623442 - DNA, 120 bp, Artificial Sequence
  ENSG00000178226_15 (sequence is synthesized)
gcatgtggctggtgatcgagtctgcactgggatcctcctggccccaggctgggtcctggcagccactcactgtgtcctcaggccaggctctacaacagtgccttacattgaagtgtatct

SEQ ID NO: 623443 - DNA, 120 bp, Artificial Sequence
  ENSG00000178226_16 (sequence is synthesized)
gggccgggcaggggccagctccctcccacagggccaccaggtatcccgcttggtcatcagcatccggctgccccagcacctgggactcaggccccccctggccctcctggagctgagctc

SEQ ID NO: 623444 - DNA, 120 bp, Artificial Sequence
  ENSG00000178226_17 (sequence is synthesized)
ccgggtggagccctccccatcagccctgcccatctgtctccacccggcgggtatccccccgggggccagctgctgggtgttgggctggaaagaaccccaggaccgagtccctgtggctgc

SEQ ID NO: 623445 - DNA, 120 bp, Artificial Sequence
  ENSG00000178226_18 (sequence is synthesized)
tgctgtctccatcttgacacaacgaatctgtgactgcctctatcagggcatcctgccccctggaaccctctgtgtcctgtatgcagaggggcaggagaacaggtgtgagatgacctcagc

SEQ ID NO: 623446 - DNA, 120 bp, Artificial Sequence
  ENSG00000178226_19 (sequence is synthesized)
accgcccctcctgtgccagatgacggaagggtcctggatcctcgtgggcatggctgttcaagggagccgggagctgtttgctgccattggtcctgaagaggcctggatctcccagacagt

SEQ ID NO: 623447 - DNA, 120 bp, Artificial Sequence
  ENSG00000178226_20 (sequence is synthesized)
gggagaggccaacttcctgccccccagtggctccccacactggcccactggaggcagcaatctctgccccccagaactggccaaggcctcgggatccccgcatgcagtctacttcctgct

SEQ ID NO: 623448 - DNA, 120 bp, Artificial Sequence
  ENSG00000178226_21 (sequence is synthesized)
cctgctgactctcctgatccagagctgaggggctagggtcccagcaccacttcccccttctccaccctctacttcccgcccagtggggctggaatgtggcccagccggctggaacctcaa

SEQ ID NO: 623449 - DNA, 120 bp, Artificial Sequence
  ENSG00000178226_22 (sequence is synthesized)
gggccccacccaccgagattgcagcggctctggctaattgggcctcagtgcccgggctattttgaacccaggaatccttgggggtggtgggaggagcggacaataaaggtgtaaacacag

SEQ ID NO: 623450 - DNA, 120 bp, Artificial Sequence
  ENSG00000178226_23 (sequence is synthesized)
acaagtgtcctcctctctttcccctctggctcccagctctcagtcctacccaggaagaacctgaagatctggaggggcaaactgaagtgggtggaggacgggccttcgtcctgagttacc

SEQ ID NO: 623451 - DNA, 120 bp, Artificial Sequence
  ENSG00000178226_24 (sequence is synthesized)
gcagggagcagaccttcacttggctctgcctccgctgactctagcgccatggcccggcacctgctcctcccccttgtgatgcttgtcatcagtcccatcccaggagccttccaggactca

SEQ ID NO: 623452 - DNA, 120 bp, Artificial Sequence
  ENSG00000178226_25 (sequence is synthesized)
ggtaaggtagccggactgggggaaagtcacgtgcagaggcagaaaagaccagaggactggcatgggtgctggcaggggttgctgaacggacagggaagtgggaagatagggtcgggggtt

SEQ ID NO: 623453 - DNA, 120 bp, Artificial Sequence
  ENSG00000178226_26 (sequence is synthesized)
ctctggctcccagctctcagtcctacccaggaagaacctgaagatctgggtaaggaagaggccttggcaccctcagaccttaaaggaggctaaggctggtcaggccatgagggaggtgga

SEQ ID NO: 623454 - DNA, 120 bp, Artificial Sequence
  ENSG00000178226_27 (sequence is synthesized)
aaagaccagaaatgtagacaagcctgggtcctctatgttctttgttcagaggggcaaactgaagtgggtggaggacgggccttcgtcctgagttacctgggcttctggagtggggaaccc

SEQ ID NO: 623455 - DNA, 120 bp, Artificial Sequence
  ENSG00000178226_28 (sequence is synthesized)
gccctaggggctcctgggagtgcacagacccatggcaggggctcaggggtcagccatggggccccaactgaggtggccacctcctctccctagcctgtggcctgcggctggaggctgctc

SEQ ID NO: 623456 - DNA, 120 bp, Artificial Sequence
  ENSG00000178226_29 (sequence is synthesized)
gtgatgcttggtaacctcaggggacaagagtggctgcaaagggcctgggtcctggcatctggggggctggagagcaggattcctggtttctgtgtggggagcaggaagtcagagagaagg

SEQ ID NO: 623457 - DNA, 120 bp, Artificial Sequence
  ENSG00000178226_30 (sequence is synthesized)
aagtgaggcagcagaaggcgaggatgtatcagaggagggagagggaggcctgggtgccctggggagacggaggctaggaggctgggggagggagtcagggagggcacatactgagtgcga

SEQ ID NO: 623458 - DNA, 120 bp, Artificial Sequence
  ENSG00000178229_0 (sequence is synthesized)
gtcgcgtgacgtcatctccgtgagcaggattggccctggaacagtgtggggcctggaccgctgggtaggcgcgtccagcggcctgagcaggggagggtaatgaggctgttacgcgccttc

SEQ ID NO: 623459 - DNA, 120 bp, Artificial Sequence
  ENSG00000178229_1 (sequence is synthesized)
tccgcatcttggcgggagcctgacgccccgcttcttccctaacggggtgttccaccggcgcctgccgaggcctaggcctccgcagccgccctccgtctcctcagccccgacgctgcgccc

SEQ ID NO: 623460 - DNA, 120 bp, Artificial Sequence
  ENSG00000178229_2 (sequence is synthesized)
gctttgtgcgcatttttctctggggaaactgaggctccgagtgcgaaagtcagccgaggtcgccccgcccaggacagagaagggctgggggtcggctgagccgcggcattcccgggcccc

SEQ ID NO: 623461 - DNA, 120 bp, Artificial Sequence
  ENSG00000178229_3 (sequence is synthesized)
gctagggctgcagggtctcaggatggcagcctcggcgcaggtgtctgtgacctttgaggatgtggctgtgacattcacccaggaggagtggggacagttggatgcagcccagagaacctt

SEQ ID NO: 623462 - DNA, 120 bp, Artificial Sequence
  ENSG00000178229_4 (sequence is synthesized)
gtatcaggaggtgatgctggagacctgcggacttctcatgtctctgggctgtcctttgttcaaaccagagctgatctaccagttggatcacagacaggagctatggatggctacaaaaga

SEQ ID NO: 623463 - DNA, 120 bp, Artificial Sequence
  ENSG00000178229_5 (sequence is synthesized)
cctctcccaaagctcctatccaggtgacaacacaaaacccaagaccacagagcctaccttttctcacctggccttgcctgaggaagtcttactccaggaacaactgacacaaggagcctc

SEQ ID NO: 623464 - DNA, 120 bp, Artificial Sequence
  ENSG00000178229_6 (sequence is synthesized)
aaagaactcccaattagggcaatccaaggatcaggatgggccatctgaaatgcaagaagtccacttgaaaatagggataggcccccagcgggggaagctgctggagaaaatgagttctga

SEQ ID NO: 623465 - DNA, 120 bp, Artificial Sequence
  ENSG00000178229_7 (sequence is synthesized)
acgtgatggtttggggtcagatgatggtgtatgtacaaagattacacagaaacaagtttcaacagaaggtgatctctatgaatgtgattcacatggaccagttacagatgccttgattcg

SEQ ID NO: 623466 - DNA, 120 bp, Artificial Sequence
  ENSG00000178229_8 (sequence is synthesized)
cgaagagaaaaattcctataaatgtgaggaatgcgggaaagtgtttaaaaagaatgccctccttgttcagcatgaacggattcacactcaagtgaagccctatgaatgcacagagtgtgg

SEQ ID NO: 623467 - DNA, 120 bp, Artificial Sequence
  ENSG00000178229_9 (sequence is synthesized)
gaaaacctttagcaagagcactcatcttcttcagcacctcatcatccacactggggagaagccctataagtgcatggagtgtgggaaggcttttaaccgcaggtcacacctcacacggca

SEQ ID NO: 623468 - DNA, 120 bp, Artificial Sequence
  ENSG00000178229_10 (sequence is synthesized)
ccagcggattcacagtggagagaagccttataagtgcagtgaatgtggaaaggccttcacccaccgctccacttttgtcttgcatcacaggagccacactggagaaaaaccctttgtgtg

SEQ ID NO: 623469 - DNA, 120 bp, Artificial Sequence
  ENSG00000178229_11 (sequence is synthesized)
caaagagtgtggcaaagcctttcgagataggccaggtttcattcgacactacatcatccacacgggagagaagccctatgagtgcattgagtgtgggaaggccttcaaccgccggtcata

SEQ ID NO: 623470 - DNA, 120 bp, Artificial Sequence
  ENSG00000178229_12 (sequence is synthesized)
cctcacgtggcaccaacagattcacactggagtgaaaccctttgaatgcaacgagtgtggaaaagctttttgcgagagtgcagacctcattcaacactacattatccacactggggagaa

SEQ ID NO: 623471 - DNA, 120 bp, Artificial Sequence
  ENSG00000178229_13 (sequence is synthesized)
gccctataagtgcatggagtgtgggaaggcgttcaaccgtaggtcacacctcaagcagcatcaacggattcacactggggagaagccttatgaatgcagtgaatgtggaaaggccttcac

SEQ ID NO: 623472 - DNA, 120 bp, Artificial Sequence
  ENSG00000178229_14 (sequence is synthesized)
ccactgctccacttttgtcttgcataaaaggacccacacaggagaaaaaccctatgaatgcaaagaatgtggaaaagcctttagtgatagggcagacctcattcgccacttcagcatcca

SEQ ID NO: 623473 - DNA, 120 bp, Artificial Sequence
  ENSG00000178229_15 (sequence is synthesized)
agagaaaccctatgaatgcatccagtgtgggaaagccttttgccggagcgcaaaccttattcgacactccatcattcacactggagagaagccgtatgaatgcagtgagtgtggaaaggc

SEQ ID NO: 623474 - DNA, 120 bp, Artificial Sequence
  ENSG00000178229_16 (sequence is synthesized)
ttttaatcgcggctcatccctcacacatcatcaaaggattcatactgggagaaaccctaccattgtaacagatgtgggaagaccttttatgactgcacagacttcagtcaacatccagga

SEQ ID NO: 623475 - DNA, 120 bp, Artificial Sequence
  ENSG00000178229_17 (sequence is synthesized)
acttttattagggaaagagtttttgaatatcaccactgaagaaaatctgtggtgaaagggaacatcttaccatctggccattcacactgaagagaaacttcataagcatcctctctttga

SEQ ID NO: 623476 - DNA, 120 bp, Artificial Sequence
  ENSG00000178229_18 (sequence is synthesized)
gaaaacgtgtaatagatgatcatttgtcgtctaaacaatcaagttagaaattgaaccagcctggagtcttattctccacctgagaattcacccatgagagagacccagtggttgctatgc

SEQ ID NO: 623477 - DNA, 120 bp, Artificial Sequence
  ENSG00000178229_19 (sequence is synthesized)
cacccatgagagagacccagtggttgctatgcacttaggaaaactttcagccacatctttcttcttagtttacagtgaaatattatctcagggatattttttttttttttttgagacgga

SEQ ID NO: 623478 - DNA, 120 bp, Artificial Sequence
  ENSG00000178229_20 (sequence is synthesized)
catctcagggatatttaaacaaaggaagaggaaatatagggaagagaaagaaaccacagcttcttttagacttgtctgacaagcctatggcaattttgtcgtccctttgttattttatgt

SEQ ID NO: 623479 - DNA, 120 bp, Artificial Sequence
  ENSG00000178229_21 (sequence is synthesized)
gggagagggaaatgtttcagaaacgaaagatctcatcccctttatttttctgtgtatgcattcactgctgcccagtgtcagaacagttatacaaacgagggcttgaaaacattttgtgaa

SEQ ID NO: 623480 - DNA, 120 bp, Artificial Sequence
  ENSG00000178229_22 (sequence is synthesized)
aacttgcttagtcctgcaacgttctccactctcgaggtgcagaagcatacatctttataaaaaatatggaggcttgagttatgaaacacttttataaggagataaggatgtacatatgtt

SEQ ID NO: 623481 - DNA, 120 bp, Artificial Sequence
  ENSG00000178229_23 (sequence is synthesized)
tggacacattgtccacttcagatgcttgtttaaaaaaatgtttcaccatgtgtctttacccaatacacatactttttcttgatgtggatttactttttttttttttttttaagttttcct

SEQ ID NO: 623482 - DNA, 120 bp, Artificial Sequence
  ENSG00000178229_24 (sequence is synthesized)
gggatagggatgatagtgtaattgttcatgcccacagtaatcctgggaatcttagttttttcctatgattgtggtttctcagcttctttacctctcctttgagttaggtccacctcagtt

SEQ ID NO: 623483 - DNA, 120 bp, Artificial Sequence
  ENSG00000178229_25 (sequence is synthesized)
ttctaaaggtcaaattaaggcccccccaaaaatacagtatgtagctgaattcctttgaaagatcatgataaactcagaagaacaaacatagaaggaatgtcatttttaatctttttaaag

SEQ ID NO: 623484 - DNA, 120 bp, Artificial Sequence
  ENSG00000178229_26 (sequence is synthesized)
agtgtgtgaaaattcactttaactggaattttaacaggcaagccggcatgcatatatgtagggatgtgtgactttcacagttgtcaccatggacttaggcttgattaaaatgctacacat

SEQ ID NO: 623485 - DNA, 120 bp, Artificial Sequence
  ENSG00000178229_27 (sequence is synthesized)
ttagagcgttttgtaattccttttttatatttttaagactagattttgagccatgtgatagttttacctcatattaaatatattgtacagaagtaaaaataatcatgtattcactttgaa

SEQ ID NO: 623486 - DNA, 80 bp, Artificial Sequence
  ENSG00000178233_0 (sequence is synthesized)
agacaaaaggcggcggcgggagcgggcgggaggcggagcggcgccgcgagggcctcaaggtgacacccgcccccggcccc

SEQ ID NO: 623487 - DNA, 80 bp, Artificial Sequence
  ENSG00000178233_1 (sequence is synthesized)
ccctcagcccccagccccttactcccggtgccctttccgggccccctcccccggcggggggtggggagcagcgagggccc

SEQ ID NO: 623488 - DNA, 80 bp, Artificial Sequence
  ENSG00000178233_2 (sequence is synthesized)
ggcccctggcagccccccgggaggtcctgagctcgacgcgccccctctacgccatgtccccccctggctcggccgcggga

SEQ ID NO: 623489 - DNA, 120 bp, Artificial Sequence
  ENSG00000178233_3 (sequence is synthesized)
gggtctcggaggagctcacggcggcggcggcagcggcggcggcggacgagggccccgcccgagaggagcagcgtcccatccagccctctttcaccaagtccctctgccgtgagtcccact

SEQ ID NO: 623490 - DNA, 120 bp, Artificial Sequence
  ENSG00000178233_4 (sequence is synthesized)
ggaagtgcctcctgctctcgctgctcatgtacggctgcctgggggcagtggcctggtgccacgtcaccacagtgacgcgcctcaccttcagcagcgcctaccagggcaacagcctcatgt

SEQ ID NO: 623491 - DNA, 120 bp, Artificial Sequence
  ENSG00000178233_5 (sequence is synthesized)
accatgacagcccctgctccaacggctatgtctacatccccctggccttcctgctcatgttgtacgccgtctacctggtggagtgttggcactgccaagcccgccatgagctgcagcacc

SEQ ID NO: 623492 - DNA, 120 bp, Artificial Sequence
  ENSG00000178233_6 (sequence is synthesized)
gtgttgatgtgagcagtgtgcgggaacgtgtgggccgcatgcagcaagccacgccctgcatctggtggaaggccatcagctaccactatgtccgccgcacccgccaggtcaccagatacc

SEQ ID NO: 623493 - DNA, 120 bp, Artificial Sequence
  ENSG00000178233_7 (sequence is synthesized)
gcaatggagacgcctataccaccacccaggtctaccacgaacgcgtcaacacgcacgtggcggaggctgagttcgactacgcgcgctgcggcgttcgcgacgtgtccaagacgctggtgg

SEQ ID NO: 623494 - DNA, 120 bp, Artificial Sequence
  ENSG00000178233_8 (sequence is synthesized)
ggctggagggcgcgccggccacgcggctgcgcttcaccaagtgcttcagtttcgccagcgtggaggccgagaacgcgtacctgtgccagcgcgcgcgcttcttcgcagagaacgagggcc

SEQ ID NO: 623495 - DNA, 120 bp, Artificial Sequence
  ENSG00000178233_9 (sequence is synthesized)
tagacgactacatggaggcacgcgagggcatgcacctcaagaacgtggacttccgtgagttcatggtggccttcccggacccggcccggccgccctggtacgcctgctcgtcggccttct

SEQ ID NO: 623496 - DNA, 120 bp, Artificial Sequence
  ENSG00000178233_10 (sequence is synthesized)
gggccgcggcgctgctcacgctgtcgtggccgctgcgagtgctggccgagtaccgcacggcctacgcgcactaccacgtggagaagctatttggcctggagggcccgggctcggccagca

SEQ ID NO: 623497 - DNA, 120 bp, Artificial Sequence
  ENSG00000178233_11 (sequence is synthesized)
gcgcaggcggtggcctcagccccagcgatgagctgctgcccccgctcacccaccgcctgccgcgggtcaacacagtagacagcacggagctcgagtggcacatccgctccaaccagcagc

SEQ ID NO: 623498 - DNA, 120 bp, Artificial Sequence
  ENSG00000178233_12 (sequence is synthesized)
tggtgcccagctactctgaggcggtgctcatggacctggcggggctcgggacgcgctgcggcggggcaggcggcggctacgcgccctcgtgccgctacggtggggtaggcggcccgggcg

SEQ ID NO: 623499 - DNA, 120 bp, Artificial Sequence
  ENSG00000178233_13 (sequence is synthesized)
cggcgggcgtggctccctaccggcgcagctgcgagcactgccagcgcgccgtcagcagctcgtctatcttctcgcgcagcgccctaagcatctgcgccagcccgcgggccggcccggggc

SEQ ID NO: 623500 - DNA, 120 bp, Artificial Sequence
  ENSG00000178233_14 (sequence is synthesized)
ggcgcgggctgcgggggcagccgcttctcgctgggccgtctctacggctcccggcgcagctgcctgtggcgcagccgcagcgggagcgtcaacgaggccagctgccccacggagcagacg

SEQ ID NO: 623501 - DNA, 120 bp, Artificial Sequence
  ENSG00000178233_15 (sequence is synthesized)
agcagacgcggctgtccagccaggccagcatgggggacgacgaggacgacgacgaggaggaggccgggccgccgccgccctaccacgacgccctctactttccggtcctcatcgtccacc

SEQ ID NO: 623502 - DNA, 120 bp, Artificial Sequence
  ENSG00000178233_16 (sequence is synthesized)
ggcaggaggggtgtctgggccacagccaccggccgctgcaccgccacggctcctgcgtagagacctcactgtgacctccggccccggagtggcccgcgccgtcctcccgcctgcccctcg

SEQ ID NO: 623503 - DNA, 120 bp, Artificial Sequence
  ENSG00000178233_17 (sequence is synthesized)
ccggactgtgctccctctgcgacgcagggcgagtcaccacggtgactgaggccgcgcggggggcagggaaagggaggtgagggccgcaagacaggcccggatggggccgagacccccgct

SEQ ID NO: 623504 - DNA, 120 bp, Artificial Sequence
  ENSG00000178233_18 (sequence is synthesized)
gtccctgtacataaagagaccgatgggtgggagggggtcggctgctccccgagatccccctggcagagtcattcttccagccccaaccctgagttcctaaagggacacctccctcctgtc

SEQ ID NO: 623505 - DNA, 120 bp, Artificial Sequence
  ENSG00000178233_19 (sequence is synthesized)
cagcccttcaacagatcttctgttagatgacaaccgtgccgtgggccccgcgttgggccttgtctgaagggagaggccctggcatgcggatgggagatttagaggctgtggagaagggaa

SEQ ID NO: 623506 - DNA, 120 bp, Artificial Sequence
  ENSG00000178233_20 (sequence is synthesized)
ggtctgaggctggggccaggtgtcagccctaggcctccatccaacaccgtggaaatgttgctgccctcttcttggcgctgaccccaagattggggtttcctttctgccgctccctccact

SEQ ID NO: 623507 - DNA, 120 bp, Artificial Sequence
  ENSG00000178233_21 (sequence is synthesized)
gttgtttatctaactgggcccccactccaggtccagagggactgtgctcactgcacagacatcactcaccttccgctccccagtcctgcagagctgttgccagggtgcagtggggagggg

SEQ ID NO: 623508 - DNA, 120 bp, Artificial Sequence
  ENSG00000178233_22 (sequence is synthesized)
agtgaaatgtggaggactgtgtacctcagtcctctctctaaactcctcagcctcccaacaggggcctcctcacctgggttctgagtgtataccccttttagagagtgagatgccacccgg

SEQ ID NO: 623509 - DNA, 120 bp, Artificial Sequence
  ENSG00000178233_23 (sequence is synthesized)
gcagcactcgttaaagctggccagcacgagtgactaaggggagagagcatgacatagacctgggtggcaacggggacctctggaagcaggtgggagtaagagaggagagggcagtggagg

SEQ ID NO: 623510 - DNA, 120 bp, Artificial Sequence
  ENSG00000178233_24 (sequence is synthesized)
gtagaggaaaaggacctccagaggtggggtgtctgtgggggcggcctttgcctccctaaacctgtgcggaggagtggagtgtgcttgtcgctcaaacacatctctgggggactgaggacg

SEQ ID NO: 623511 - DNA, 120 bp, Artificial Sequence
  ENSG00000178233_25 (sequence is synthesized)
ttgtcacaagccccaactggagaaataattccaatggcagggtcagaggcaagcattctctaaatcttgcccaacccttccatccttccctatcctatgagctgaagccctgctgtgtgt

SEQ ID NO: 623512 - DNA, 120 bp, Artificial Sequence
  ENSG00000178233_26 (sequence is synthesized)
cgcagggtcttcaaaggggcatcctgccaccaccccagggcgctggccccacgtcctgttcccctaaagctctgacaccgccttctctccgtgtgctccccccaccacctccaccctgat

SEQ ID NO: 623513 - DNA, 120 bp, Artificial Sequence
  ENSG00000178233_27 (sequence is synthesized)
gtgcttcagtgtgcatgtctgtgaacagccctcctgccctgccaactcccctggctaaagtctccccagcagatttagcacccagggattgagctcacatttcaggctagagaggataac

SEQ ID NO: 623514 - DNA, 120 bp, Artificial Sequence
  ENSG00000178233_28 (sequence is synthesized)
ccttgggccacccacatctctcacccctgatgcttcttacttcgcctgagccatcagaactcctccttaccctccttcagcccctctcatcttccttcagcccagccaggcctgcaccac

SEQ ID NO: 623515 - DNA, 120 bp, Artificial Sequence
  ENSG00000178233_29 (sequence is synthesized)
caactgtgtggcctccacctatgcaacatcgcctctggctccccttcccttcttcctagcggggagtgcgaggggcccaaattgtggggataccatggcccatggcttctaaagggttta

SEQ ID NO: 623516 - DNA, 120 bp, Artificial Sequence
  ENSG00000178233_30 (sequence is synthesized)
gctttactttcaggtagagatggctgagtgaggagggagaagaggctagagagagggaggcttgggcaggggaaacagctgcccaccaggttttcctggacagcagtgcccacctgccta

SEQ ID NO: 623517 - DNA, 120 bp, Artificial Sequence
  ENSG00000178233_31 (sequence is synthesized)
ctagcactgaacctgcctggaccctgagtctgtgctccttgggggcctggcgtttggagcacccttctttcctctgaatggacatctgtgaggtacaggtggtgagctgcagcctcaggc

SEQ ID NO: 623518 - DNA, 120 bp, Artificial Sequence
  ENSG00000178233_32 (sequence is synthesized)
tccatttcttagccagctggcacctggatgtcatgctttgtgtggggacagcctggccacctcagggctccaaggaaggaggaacgtggctcctcctccctcaggcctgttcctgagaca

SEQ ID NO: 623519 - DNA, 120 bp, Artificial Sequence
  ENSG00000178233_33 (sequence is synthesized)
gagcctggtctcacaagaggggaagggggacctctattattatttttgcctgtattgaccatttctgcctaggtcgtctcagacagcctcatctcccacacatgcacagacttagagaga

SEQ ID NO: 623520 - DNA, 120 bp, Artificial Sequence
  ENSG00000178233_34 (sequence is synthesized)
aaccaattctttggtctattttcttggtagctttactgattgccagggaaaatgaaaaccagaaaattaattaatctctaaaattaaactttacactgaatgttcttgtttctctaatta

SEQ ID NO: 623521 - DNA, 120 bp, Artificial Sequence
  ENSG00000178233_35 (sequence is synthesized)
gaacttctgctagcagctgtggctatacacacacacacacacacacacaccctcacacctacacgtttgcactccggaactgtcagagggtgtcaggcacagacagactctaggttgcct

SEQ ID NO: 623522 - DNA, 120 bp, Artificial Sequence
  ENSG00000178233_36 (sequence is synthesized)
agacaggcacacacatgcagtcactcccaagccccctttggtgctctgctcagcgcctgcttagcggaaggagtccctggagagcaggcactcctggactggggttgtagcccatgacct

SEQ ID NO: 623523 - DNA, 120 bp, Artificial Sequence
  ENSG00000178233_37 (sequence is synthesized)
gccctttggggacacagttctggaggctctgggccaatgaatcagcccaaggaggatgggcaatggcgctcagcctgaatcagtcagctaggtctcttgtggccctgggggctgatgtga

SEQ ID NO: 623524 - DNA, 120 bp, Artificial Sequence
  ENSG00000178233_38 (sequence is synthesized)
ttcctgtaggtgtggccccagggtggacagctacagagtgatgggggactcatgtagggcacctggaaggctccatgtgtcctggggacaagggcttgtggggtgggctgggcctggctg

SEQ ID NO: 623525 - DNA, 120 bp, Artificial Sequence
  ENSG00000178233_39 (sequence is synthesized)
gggagaagacaggtctctgtcaattgggtgcatcacactgtggcctttttgtcgtggatttaagcgcaaagattgtacaaatcaaactggtggataataaagtcgtggatgactcactga

SEQ ID NO: 623526 - DNA, 120 bp, Artificial Sequence
  ENSG00000178233_40 (sequence is synthesized)
ccagcctaaaggggttcagagcccagacatgaatccccagcggctcatggtcagcaatatggggagtgggaaggacgaggtccagtgtgtgctcccacctcaaagctctccctctcccca

SEQ ID NO: 623527 - DNA, 120 bp, Artificial Sequence
  ENSG00000178233_41 (sequence is synthesized)
ttcctcctactggctcaaccagacccacctctcctgttccctccctcctccacctgagacccccagcagcccctgtcctctctgtagcccttccagactcacgggggacctgacatccca

SEQ ID NO: 623528 - DNA, 120 bp, Artificial Sequence
  ENSG00000178233_42 (sequence is synthesized)
gggaagatgccatcagagatgcagacactgagtgtgcggatgtggtcagccaccacgcggtacgctgtgtctgtgcgcccctcgtctgccacccctactcggcccaagtaagggggtgcc

SEQ ID NO: 623529 - DNA, 120 bp, Artificial Sequence
  ENSG00000178233_43 (sequence is synthesized)
ctgcagccctgggaagcagaagagtcagccagtggccctgcctgacctggcccaggtgggtgctctttatcgcctctagagcatctgccctcagccctaaagccaaccacatccagaatg

SEQ ID NO: 623530 - DNA, 80 bp, Artificial Sequence
  ENSG00000178234_0 (sequence is synthesized)
gctcggggactgggcgagggccctgggcctgaggaggcgcggccgccactgcgcccagcgcctgcgcgacgcctggctgc

SEQ ID NO: 623531 - DNA, 120 bp, Artificial Sequence
  ENSG00000178234_1 (sequence is synthesized)
gctcctgcgggtcggactggggctgtggcgggagagaagatgccgcagcccgagtcccagaaggcggcgatcctgggctgcgggcaaggcggaaattgacaatggcccttcagctatgct

SEQ ID NO: 623532 - DNA, 120 bp, Artificial Sequence
  ENSG00000178234_2 (sequence is synthesized)
aggtctataatgggaagtgtcacagttcggtatttctgttatgggtgcctttttacatctgcgacctggacagttttgctttttgtttatttcaacttcagtgaagtgactcagccactt

SEQ ID NO: 623533 - DNA, 120 bp, Artificial Sequence
  ENSG00000178234_3 (sequence is synthesized)
aagaatgtgcccgtcaaggggtctgggccccacggaccatctccaaaaaaattctatccccgtttcactcgaggcccaagtcgagtgctcgagccacagttcaaagcaaacaaaattgac

SEQ ID NO: 623534 - DNA, 120 bp, Artificial Sequence
  ENSG00000178234_4 (sequence is synthesized)
gatgtgatagacagtcgtgttgaagatccagaagaaggccacttgaaattctcttctgaattaggtatgatttttaatgaacgcgatcaagagttgagagacttgggctatcagaaacat

SEQ ID NO: 623535 - DNA, 120 bp, Artificial Sequence
  ENSG00000178234_5 (sequence is synthesized)
gcttttaatatgcttatcagtgaccgcttgggctaccacagagatgtgccagacacaaggaatgcagcatgtaaagaaaagttctacccacctgacctgccagctgctagtgttgttatc

SEQ ID NO: 623536 - DNA, 120 bp, Artificial Sequence
  ENSG00000178234_6 (sequence is synthesized)
tgtttctataatgaagcgttttctgccttgcttcggacagtgcacagtgtcatagaccgcacgccagcacacctgcttcatgagatcatccttgtggatgatgatagtgactttgatgat

SEQ ID NO: 623537 - DNA, 120 bp, Artificial Sequence
  ENSG00000178234_7 (sequence is synthesized)
ttgaaaggagaactagatgaatatgtccaaaaatacctccctggaaaaattaaagtcataagaaatacaaagcgtgaggggttgattcgagggagaatgattggcgcggcccacgcgaca

SEQ ID NO: 623538 - DNA, 120 bp, Artificial Sequence
  ENSG00000178234_8 (sequence is synthesized)
ggagaagtccttgtgttcctggacagccactgtgaagtgaatgtgatgtggctgcagcccttgctggccgccatccgtgaggaccggcacaccgtggtgtgcccagtgattgacatcatc

SEQ ID NO: 623539 - DNA, 120 bp, Artificial Sequence
  ENSG00000178234_9 (sequence is synthesized)
agcgccgacacgctggcctacagctcgtcccctgtcgtccgcggagggttcaactggggactgcacttcaaatgggatcttgtccccctttctgagctaggacgagcggagggagccact

SEQ ID NO: 623540 - DNA, 120 bp, Artificial Sequence
  ENSG00000178234_10 (sequence is synthesized)
gcaccaataaagtcaccaacaatggctggaggtttgtttgccatgaacagacagtatttccatgaacttggacagtatgatagtggcatggatatctggggaggagaaaatttggaaata

SEQ ID NO: 623541 - DNA, 120 bp, Artificial Sequence
  ENSG00000178234_11 (sequence is synthesized)
ggccaggacaccatgacacacaactctttgcggctggcacatgtctggttggatgaatacaaggagcagtatttttccttaagacctgacctgaagacgaaaagctatggcaatatcagt

SEQ ID NO: 623542 - DNA, 120 bp, Artificial Sequence
  ENSG00000178234_12 (sequence is synthesized)
gagcgtgtggaactgagaaagaagttgggctgtaaatcatttaaatggtatttggataatgtatacccagagatgcagatatctgggtcccacgccaaaccccaacaacccatttttgtc

SEQ ID NO: 623543 - DNA, 120 bp, Artificial Sequence
  ENSG00000178234_13 (sequence is synthesized)
aatagagggccaaaacgacccaaagtccttcaacgtggaaggctctatcacctccagaccaacaaatgcctggtggcccagggccgcccaagtcagaagggaggtctcgtggtgcttaag

SEQ ID NO: 623544 - DNA, 120 bp, Artificial Sequence
  ENSG00000178234_14 (sequence is synthesized)
gcctgtgactacagtgacccaaatcagatctggatctataatgaagagcatgaattggttttaaatagtctcctttgtctagatatgtcagagactcgctcatcagacccgccacggctc

SEQ ID NO: 623545 - DNA, 120 bp, Artificial Sequence
  ENSG00000178234_15 (sequence is synthesized)
atgaaatgccacgggtcaggaggatcccagcagtggacctttgggaaaaacaatcggctataccaggtgtcggttggacagtgcctgagagcagtggatcccctgggtcagaagggctct

SEQ ID NO: 623546 - DNA, 120 bp, Artificial Sequence
  ENSG00000178234_16 (sequence is synthesized)
gtcgccatggcgatctgcgatggctcctcttcacagcagtggcatttggaaggttaaggtggatgctgtggtgggaacgttgcttcatcaggcgttgcctccggtgtggagtttggggct

SEQ ID NO: 623547 - DNA, 120 bp, Artificial Sequence
  ENSG00000178234_17 (sequence is synthesized)
ttaggaaagcctgggttgggtggagcagaaccatcttggagaagatgacagttccctgtcctcccggagatgcctgggtgtgttagcagaggtgacacgtgtctgacagagacgggagct

SEQ ID NO: 623548 - DNA, 120 bp, Artificial Sequence
  ENSG00000178234_18 (sequence is synthesized)
ctgagtgtccacgggtgaagaagtgagtgtccacgggtgaagaagtgagtatgtttcacctggacattaaggtgatgtttgagctgctgttaaggaatttcttgcttatagaggcaaacc

SEQ ID NO: 623549 - DNA, 120 bp, Artificial Sequence
  ENSG00000178234_19 (sequence is synthesized)
acagtatcattttaactctagaattgggcttgtacagaaggataaaacccaggaaaatggatatttctattcagatttatttatgcctctttttaatcccctttaatgatgcagtggttt

SEQ ID NO: 623550 - DNA, 120 bp, Artificial Sequence
  ENSG00000178234_20 (sequence is synthesized)
ttatctgatcaggaacttgtcatgatttcctttcttagacttcataggagatagtgctttaaaaaaaaaaaaaacttctattatttgtttagtatgttgtaagtagatcattttaaaaaa

SEQ ID NO: 623551 - DNA, 120 bp, Artificial Sequence
  ENSG00000178234_21 (sequence is synthesized)
ctgaatctatattatgtttaacttcagaaggcatcatttataagacagtatggcagttaattataaaattattttgatgaattatgatacaatctacataataaagaatccttttgatta

SEQ ID NO: 623552 - DNA, 120 bp, Artificial Sequence
  ENSG00000178234_22 (sequence is synthesized)
attttgagttgattttcacatagaggtgggaggctagtttcattcctctgcatatgaatatccagttttcccagtatcatctattgaagatactgtcctttccccaagggatctctctgg

SEQ ID NO: 623553 - DNA, 120 bp, Artificial Sequence
  ENSG00000178234_23 (sequence is synthesized)
gatcttttaccttagtgcctggtggagttcctggaggtaaagcccacagaagtgtgggtctcgcacctcctgagactgcttccccgagtttctcactctcactagtccacaccgagcatc

SEQ ID NO: 623554 - DNA, 120 bp, Artificial Sequence
  ENSG00000178234_24 (sequence is synthesized)
cagcaccagcttatggctctggcagtttctgctccaggtctatagtgagcgagagctgctactttttacttgggcattcattcaaagtgttgaagaataacagcctctaccatcccttat

SEQ ID NO: 623555 - DNA, 120 bp, Artificial Sequence
  ENSG00000178234_25 (sequence is synthesized)
caagtacgtggtaggtggggatcctacacgtgcagtcacagctgggctgaccacaaataagtctgaagaaatccattatctttgtaacctgcttataaactatgctacccaaatttgggc

SEQ ID NO: 623556 - DNA, 120 bp, Artificial Sequence
  ENSG00000178234_26 (sequence is synthesized)
cgtgaaattttttccgtggcttactttaaaaaacacacctctttttatttgaaataactgtaggttcacaggaagttacaaagacggcctatgtacctttatccagttgctccatcataa

SEQ ID NO: 623557 - DNA, 120 bp, Artificial Sequence
  ENSG00000178234_27 (sequence is synthesized)
tgcaatgatacagaactgtttcctcacccggagggcccttgtgctgcctctttctagtcacacctcctgctttcctctactcttccccagtccctgaaaccacgactctatgattttgtt

SEQ ID NO: 623558 - DNA, 120 bp, Artificial Sequence
  ENSG00000178234_28 (sequence is synthesized)
tccatctctgattttgttatttcaagaatgtcatataaatggaatcacacggtatgtgaccttttgagatgggcttttttcatttggcatgatgccttggcttatgcttctctattaagt

SEQ ID NO: 623559 - DNA, 120 bp, Artificial Sequence
  ENSG00000178234_29 (sequence is synthesized)
ctcttacactgatcgtccccagataaaagtggattgcattctgatagctcctcaatgatctctgaatgccagtattttatgattcactacatattctatattctgtacgcctttcttaat

SEQ ID NO: 623560 - DNA, 120 bp, Artificial Sequence
  ENSG00000178234_30 (sequence is synthesized)
tcaacatagactcttgctaagaatggctttgtgtacccaaacaggatagaaggctttttattacactgctcattcagctctcagtgaccttgcaagaaaggctggaagcccattttatag

SEQ ID NO: 623561 - DNA, 120 bp, Artificial Sequence
  ENSG00000178234_31 (sequence is synthesized)
agggagaaatataaaaagtaatttgctcagaccccatagctgttaagtagtagagtggaaatgagacctctggtctgcatagctccaagccttctgctcttttcatgacagcaggctgca

SEQ ID NO: 623562 - DNA, 120 bp, Artificial Sequence
  ENSG00000178234_32 (sequence is synthesized)
ggaacacagtggtacaggtgtatgccagtgactttttcatgcactcgagcgtttattaagtaccacttgtatcaacatcagagttggtataccagtatacttaaatatagaaggtaaaga

SEQ ID NO: 623563 - DNA, 120 bp, Artificial Sequence
  ENSG00000178234_33 (sequence is synthesized)
aatggagagagtcatgggagcaaaattctcaaaccttggccaaaaacaaacaaacaaaaaacctaataaataaatctgagtctggaccacgtagaagattggttacatactgatttctag

SEQ ID NO: 623564 - DNA, 120 bp, Artificial Sequence
  ENSG00000178234_34 (sequence is synthesized)
aatttatggttggtttttgtttttttttaagtcaacttgtattttggttttcactttgtggctattttacctaaaaggaaaaattcataatttgaggtggtttgtatattaactatggaa

SEQ ID NO: 623565 - DNA, 120 bp, Artificial Sequence
  ENSG00000178234_35 (sequence is synthesized)
agaattactgcttattatcttacacgatctttcaagttattctgaaatatacaggtgaatgacatagaattccttaaaaaatatttagcaaccttggaagaaagatgctaaattaataaa

SEQ ID NO: 623566 - DNA, 120 bp, Artificial Sequence
  ENSG00000178234_36 (sequence is synthesized)
aggacatattcaatgctgttcttgttattcttggtaggggcaatagaagttgtttcttaactattttgaaatggactaagacttaataaattcctttgtaataaaaggcatttatatctc

SEQ ID NO: 623567 - DNA, 120 bp, Artificial Sequence
  ENSG00000178234_37 (sequence is synthesized)
attaacccacaggcctgaggttttcattgttgaaccctttttaaaaactcagtactatccatacatcttcttgtatttgaatatccgttaactgtacgcatagtggtcctacttggtggt

SEQ ID NO: 623568 - DNA, 120 bp, Artificial Sequence
  ENSG00000178234_38 (sequence is synthesized)
gcggctggcacatgtctggttggatgaatacaagacacagcccacacacgcagaccctcctgggagttttccgtaatttttaagaacatcgatgactgagactcacgagtttgagaccca

SEQ ID NO: 623569 - DNA, 120 bp, Artificial Sequence
  ENSG00000178234_39 (sequence is synthesized)
aaaaaaaaaaacctcagttctgctcacatttatcaagaggagcttaaaatgcagaataaaatgtcgatgatttatatgttgctaactagaagaaaggtgtatcccattggcaggtgagag

SEQ ID NO: 623570 - DNA, 120 bp, Artificial Sequence
  ENSG00000178234_40 (sequence is synthesized)
ccactgaagctaagagggtggggggcagtagaaaggaaaggtgggagatggaagaaacagaaatgagcaagaggcgtccccgagagcgccaccagctgcgcctccctctctccggggaga

SEQ ID NO: 623571 - DNA, 120 bp, Artificial Sequence
  ENSG00000178234_41 (sequence is synthesized)
actgctgtgtggcagccatcatccatagttacagtgcatgtcctagtcaccagtgagaaggcagctgtgttctctgtactctgtttactgaggcagagagatgtcttctaagtgtgtgcc

SEQ ID NO: 623572 - DNA, 120 bp, Artificial Sequence
  ENSG00000178234_42 (sequence is synthesized)
aaacttcaaaatattttgattaaaataattgtaataaaaatacctacatacaactggccaccgtcatggcaccaaaacatcttggaatactcaatatctgggcttccaaagagttgagtt

SEQ ID NO: 623573 - DNA, 120 bp, Artificial Sequence
  ENSG00000178234_43 (sequence is synthesized)
gttacggtgagactttgactctgtttactgaagagattctgaattgcctgtcagttttttcaagagtcgcgcgtatgatttgtatgggtccctcaatcacagcaggacactgcacgcagc

SEQ ID NO: 623574 - DNA, 120 bp, Artificial Sequence
  ENSG00000178234_44 (sequence is synthesized)
attactggctgagggacgtccttgttgaccaccggcagtgaagtgtagtggagcagttaggccgtctggggctgggagggtggcagtcgtgtttcatgctgtgtcagcgcgtcatcccat

SEQ ID NO: 623575 - DNA, 120 bp, Artificial Sequence
  ENSG00000178234_45 (sequence is synthesized)
aaaagcgtttgatatgaaaagttttgaggtgtccataagctatgacaggtgacactgtggacttaacagagtgtaatgacaggcttcagcttgcctttcattatattctctttatgggaa

SEQ ID NO: 623576 - DNA, 120 bp, Artificial Sequence
  ENSG00000178234_46 (sequence is synthesized)
cttctctacgcaagtgtaggacctcaagtgtagatccttgccttgccggcatagctgccttctgtgagggtaagttatgtgacgctttccaagagcgcagaggcatatgggaatacaccc

SEQ ID NO: 623577 - DNA, 120 bp, Artificial Sequence
  ENSG00000178234_47 (sequence is synthesized)
cggacagaggccatggaagtgtcaacttcgtgtgtcagaggccaggccaacaagtggagaaatggggcagtgatctgctatttgctcttagctctgggaaccaaatcacagagcagaggt

SEQ ID NO: 623578 - DNA, 120 bp, Artificial Sequence
  ENSG00000178234_48 (sequence is synthesized)
catggatttcatgcctggtgttcccagaagtcatctgagctcagcagaaagcacattgatcaaccacatttccttagctgtctttgtgtcttaaactcattacagttatatagtcacagt

SEQ ID NO: 623579 - DNA, 120 bp, Artificial Sequence
  ENSG00000178234_49 (sequence is synthesized)
taaattgtaggggtccggccataaaatcatccccttctcctgagtcatctcttagagttggcttctaaaagctaagggcaggtactgtctgtgttgcccagtgtcccttcttttatgaag

SEQ ID NO: 623580 - DNA, 120 bp, Artificial Sequence
  ENSG00000178234_50 (sequence is synthesized)
aaggcacttctcccagagcagtgtcaactctccctcagtggctaggaggaagcctagagctttcccccttcctcttctctctaccctataataagacaaaaacaaacccagtatcaggat

SEQ ID NO: 623581 - DNA, 120 bp, Artificial Sequence
  ENSG00000178234_51 (sequence is synthesized)
gtttagtgtcaggtgtttttctctaagtaggagagagcagtgtgtgcccatgtagttgatcgcttaccattattatttcttgctgtttgtctcaccctcgcagttctgtgatagttgtca

SEQ ID NO: 623582 - DNA, 120 bp, Artificial Sequence
  ENSG00000178234_52 (sequence is synthesized)
ccggtgtctctccagtgtagcatgcatattgcatttcattgtgtacttttttatacatgttgttcttatatccctgacttcatttgaaggttctttagggcagggatgacattttaattt

SEQ ID NO: 623583 - DNA, 120 bp, Artificial Sequence
  ENSG00000178234_53 (sequence is synthesized)
ctttcatctgctgtagattagtaaacatgtatatgtagctagaattcctagctgacactgtctgcatgttaaaactgctaataacttttggagttataacttttgtctatcttgatgctc

SEQ ID NO: 623584 - DNA, 120 bp, Artificial Sequence
  ENSG00000178234_54 (sequence is synthesized)
ctgtgttctgaggctagaacttaggaattaaaaatgcatatatttttatgagccttggaattcgtacctccggaataacctttcacattttgcctggaaccacctccaggcttgggaggc

SEQ ID NO: 623585 - DNA, 120 bp, Artificial Sequence
  ENSG00000178234_55 (sequence is synthesized)
gtctctgggattgtttcccacattctgagctgtgccttctcttacagctctatcacctccagaccaacaaatgcctggtggcccagggccgcccaagtcagaagggaggtctcgtggtgc

SEQ ID NO: 623586 - DNA, 120 bp, Artificial Sequence
  ENSG00000178234_56 (sequence is synthesized)
ttaaggcctgtgactacagtgacccaaatcaggtgagtgacacctcggggctcacagccagtgtccgcaaggaggcttccagtgtagggaagctgctgccagtcactcctgaggacatca

SEQ ID NO: 623587 - DNA, 120 bp, Artificial Sequence
  ENSG00000178234_57 (sequence is synthesized)
gtgtctactattctggcttttcttaacccatttctgtgtagtgttgcgttattggaacgctaagcttatgggggttatctatatcctagtgctcaaggtcaccgccagggtctgattttt

SEQ ID NO: 623588 - DNA, 120 bp, Artificial Sequence
  ENSG00000178234_58 (sequence is synthesized)
caccgaaaaaaactgcaacctccagcataaatgggttaaaaggaagagagtggccttagatgacacctcagtcagctactttcgtctcctttgtatgtttttcctatctctgctcgtcgt

SEQ ID NO: 623589 - DNA, 120 bp, Artificial Sequence
  ENSG00000178234_59 (sequence is synthesized)
catagagcattttagttgtttacaccattatttgtactttctaatattatgcggaataaattgtgacttacgagccataggaatttgttagaaatggccaagggaagcactacagaattt

SEQ ID NO: 623590 - DNA, 120 bp, Artificial Sequence
  ENSG00000178234_60 (sequence is synthesized)
cagttgattccattcacctaatttcatttcagcttatgtatgtctcctaaataatattaaaacgggcctaaaaatcagcaaataacttcagtttagaacggtaatttcaaactcgtttat

SEQ ID NO: 623591 - DNA, 120 bp, Artificial Sequence
  ENSG00000178234_61 (sequence is synthesized)
gtctgataaaatagcataatggaacagcagtctaatctcataaattgtagtgtctcatttctattttagtggtgggttggtgtcactcagaaaggaaaaaaaaagccacttgggcttttg

SEQ ID NO: 623592 - DNA, 120 bp, Artificial Sequence
  ENSG00000178234_62 (sequence is synthesized)
ggtaaataatgtgtgctgtgatgtgtgctgtgagatgtcatccagcgctccaccagaagaggtcacgcccactgtctcaggtgatacgtgtgttgaaaatgtagtttaaaagggatttct

SEQ ID NO: 623593 - DNA, 120 bp, Artificial Sequence
  ENSG00000178234_63 (sequence is synthesized)
tttcactgccgttggttctctgagcattaacccacaggcctgaggttttcattgttgaaccctttttaaaaactcagtactatccatacatcttcttgtatttgaatatccgttaactga

SEQ ID NO: 623594 - DNA, 120 bp, Artificial Sequence
  ENSG00000178235_0 (sequence is synthesized)
cgcgctctcttcctccctcagacaactcgccccccgccctccgcccccctccacgtaattccgaaagagcagaagaaagagaaggagaacaggaaaagaagagctagtaagcgagagcga

SEQ ID NO: 623595 - DNA, 120 bp, Artificial Sequence
  ENSG00000178235_1 (sequence is synthesized)
gagcacagaaaagaaaaaaaaaagccttaagaggaccgaaggggaggaaaggaaaaggatggacaaccacaaaacgcagcgattgcggaaattttccagcgccattggctgggcagcgtg

SEQ ID NO: 623596 - DNA, 120 bp, Artificial Sequence
  ENSG00000178235_2 (sequence is synthesized)
agtccttcggtcgggcgtgatttcagcaccgggggaactggacagcacctcggggggacttctgggcaacccgcaaccacagcaagaactccaccagcagcctcaacaacagaagccgcg

SEQ ID NO: 623597 - DNA, 120 bp, Artificial Sequence
  ENSG00000178235_3 (sequence is synthesized)
gaaaaccctgctttgtatcagagaggcaaggtcagtccgacgcacagccatgcacaggcagtgcgcctgtactacgctgcaaaccctctgcttgtttctctaacatgcacttgcttctaa

SEQ ID NO: 623598 - DNA, 120 bp, Artificial Sequence
  ENSG00000178235_4 (sequence is synthesized)
ttactagcattgtttcatttctgatcagtgaagatcagtagatgagattctgtaagggtgtacttttaatttatatgtatatatttaacttctttttctgttatttttaaagtgttgtgg

SEQ ID NO: 623599 - DNA, 120 bp, Artificial Sequence
  ENSG00000178235_5 (sequence is synthesized)
ttttttttttttttttttctttgcttgccttgcactacgtgcctggatagtttgtggatataattattgactggcgtctgggctattgcagtgcgggggggttagggaggaaggaatcca

SEQ ID NO: 623600 - DNA, 120 bp, Artificial Sequence
  ENSG00000178235_6 (sequence is synthesized)
gggggttagggaggaaggaatccacccccacccccccaaacccttttcttctcctttcctggcttcggacattggagcactaaatgaacttgaattgtgtctgtggcgagcaggatggtc

SEQ ID NO: 623601 - DNA, 120 bp, Artificial Sequence
  ENSG00000178235_7 (sequence is synthesized)
gctgttactttgtgatgagatcggggatgaattgctcgctttaaaaatgctgctttggattctgttgctggagacgtctctttgttttgccgctggaaacgttacaggggacgtttgcaa

SEQ ID NO: 623602 - DNA, 120 bp, Artificial Sequence
  ENSG00000178235_8 (sequence is synthesized)
agagaagatctgttcctgcaatgagatagaaggggacctacacgtagactgtgaaaaaaagggcttcacaagtctgcagcgtttcactgccccgacttcccagttttaccatttatttct

SEQ ID NO: 623603 - DNA, 120 bp, Artificial Sequence
  ENSG00000178235_9 (sequence is synthesized)
gcatggcaattccctcactcgacttttccctaatgagttcgctaacttttataatgcggttagtttgcacatggaaaacaatggcttgcatgaaatcgttccgggggcttttctggggct

SEQ ID NO: 623604 - DNA, 120 bp, Artificial Sequence
  ENSG00000178235_10 (sequence is synthesized)
gcagctggtgaaaaggctgcacatcaacaacaacaagatcaagtcttttcgaaagcagacttttctggggctggacgatctggaatatctccaggctgattttaatttattacgagatat

SEQ ID NO: 623605 - DNA, 120 bp, Artificial Sequence
  ENSG00000178235_11 (sequence is synthesized)
agacccgggggccttccaggacttgaacaagctggaggtgctcattttaaatgacaatctcatcagcaccctacctgccaacgtgttccagtatgtgcccatcacccacctcgacctccg

SEQ ID NO: 623606 - DNA, 120 bp, Artificial Sequence
  ENSG00000178235_12 (sequence is synthesized)
gggtaacaggctgaaaacgctgccctatgaggaggtcttggagcaaatccctggtattgcggagatcctgctagaggataacccttgggactgcacctgtgatctgctctccctgaaaga

SEQ ID NO: 623607 - DNA, 120 bp, Artificial Sequence
  ENSG00000178235_13 (sequence is synthesized)
atggctggaaaacattcccaagaatgccctgatcggccgagtggtctgcgaagcccccaccagactgcagggtaaagacctcaatgaaaccaccgaacaggacttgtgtcctttgaaaaa

SEQ ID NO: 623608 - DNA, 120 bp, Artificial Sequence
  ENSG00000178235_14 (sequence is synthesized)
ccgagtggattctagtctcccggcgccccctgcccaagaagagacctttgctcctggacccctgccaactcctttcaagacaaatgggcaagaggatcatgccacaccagggtctgctcc

SEQ ID NO: 623609 - DNA, 120 bp, Artificial Sequence
  ENSG00000178235_15 (sequence is synthesized)
aaacggaggtacaaagatcccaggcaactggcagatcaaaatcagacccacagcagcgatagcgacgggtagctccaggaacaaacccttagctaacagtttaccctgccctgggggctg

SEQ ID NO: 623610 - DNA, 120 bp, Artificial Sequence
  ENSG00000178235_16 (sequence is synthesized)
cagctgcgaccacatcccagggtcgggtttaaagatgaactgcaacaacaggaacgtgagcagcttggctgatttgaagcccaagctctctaacgtgcaggagcttttcctacgagataa

SEQ ID NO: 623611 - DNA, 120 bp, Artificial Sequence
  ENSG00000178235_17 (sequence is synthesized)
caagatccacagcatccgaaaatcgcactttgtggattacaagaacctcattctgttggatctgggcaacaataacatcgctactgtagagaacaacactttcaagaaccttttggacct

SEQ ID NO: 623612 - DNA, 120 bp, Artificial Sequence
  ENSG00000178235_18 (sequence is synthesized)
caggtggctatacatggatagcaattacctggacacgctgtcccgggagaaattcgcggggctgcaaaacctagagtacctgaacgtggagtacaacgctatccagctcatcctcccggg

SEQ ID NO: 623613 - DNA, 120 bp, Artificial Sequence
  ENSG00000178235_19 (sequence is synthesized)
cactttcaatgccatgcccaaactgaggatcctcattctcaacaacaacctgctgaggtccctgcctgtggacgtgttcgctggggtctcgctctctaaactcagcctgcacaacaatta

SEQ ID NO: 623614 - DNA, 120 bp, Artificial Sequence
  ENSG00000178235_20 (sequence is synthesized)
cttcatgtacctcccggtggcaggggtgctggaccagttaacctccatcatccagatagacctccacggaaacccctgggagtgctcctgcacaattgtgcctttcaagcagtgggcaga

SEQ ID NO: 623615 - DNA, 120 bp, Artificial Sequence
  ENSG00000178235_21 (sequence is synthesized)
acctcaagtgtgagacgccggtgaacttctttagaaaggatttcatgctcctctccaatgacgagatctgccctcagctgtacgctaggatctcgcccacgttaacttcgcacagtaaaa

SEQ ID NO: 623616 - DNA, 120 bp, Artificial Sequence
  ENSG00000178235_22 (sequence is synthesized)
acagcactgggttggcggagaccgggacgcactccaactcctacctagacaccagcagggtgtccatctcggtgttggtcccgggactgctgctggtgtttgtcacctccgccttcaccg

SEQ ID NO: 623617 - DNA, 120 bp, Artificial Sequence
  ENSG00000178235_23 (sequence is synthesized)
tggtgggcatgctcgtgtttatcctgaggaaccgaaagcggtccaagagacgagatgccaactcctccgcgtccgagattaattccctacagacagtctgtgactcttcctactggcaca

SEQ ID NO: 623618 - DNA, 120 bp, Artificial Sequence
  ENSG00000178235_24 (sequence is synthesized)
atgggccttacaacgcagatggggcccacagagtgtatgactgtggctctcactcgctctcagactaagaccccaaccccaataggggagggcagagggaaggcgatacatccttcccca

SEQ ID NO: 623619 - DNA, 120 bp, Artificial Sequence
  ENSG00000178235_25 (sequence is synthesized)
ccgcaggcaccccgggggctggaggggcgtgtacccaaatccccgcgccatcagcctggatgggcataagtagataaataactgtgagctcgcacaaccgaaagggcctgaccccttact

SEQ ID NO: 623620 - DNA, 120 bp, Artificial Sequence
  ENSG00000178235_26 (sequence is synthesized)
tagctccctccttgaaacaaagagcagactgtggagagctgggagagcgcagccagctcgctctttgctgagagccccttttgacagaaagcccagcacgaccctgctggaagaactgac

SEQ ID NO: 623621 - DNA, 120 bp, Artificial Sequence
  ENSG00000178235_27 (sequence is synthesized)
agtgccctcgccctcggccccggggcctgtggggttggatgccgcggttctatacatatatacatatatccacatctatatagagagatagatatctatttttcccctgtggattagccc

SEQ ID NO: 623622 - DNA, 120 bp, Artificial Sequence
  ENSG00000178235_28 (sequence is synthesized)
cgtgatggctccctgttggctacgcagggatgggcagttgcacgaaggcatgaatgtattgtaaataagtaactttgacttctgacaaaaaacaaaaagtgctgcatggctcgcatggaa

SEQ ID NO: 623623 - DNA, 120 bp, Artificial Sequence
  ENSG00000178235_29 (sequence is synthesized)
tccacgcgctccagggactctgcccgcccccgcgactggagacggcatctcgttcacagcacccaccctcttacctgataagttccatcgtatcaaactttctataaacaaaatacagta

SEQ ID NO: 623624 - DNA, 120 bp, Artificial Sequence
  ENSG00000178235_30 (sequence is synthesized)
taatcagaaagtgccatttcgccattatttgtgatcggtaggcagttcagagcataagttaactgtgaaaaaaatgtaaaggttttatttaggacatttgcatggctagtcatcagtcca

SEQ ID NO: 623625 - DNA, 120 bp, Artificial Sequence
  ENSG00000178235_31 (sequence is synthesized)
ttttatgagttaacaatgtattttgttgagggaagtttttaggggttgttttgggttcttttattttgatggtgatgttttattttattttatttttttcagggggtcttttttttaata

SEQ ID NO: 623626 - DNA, 120 bp, Artificial Sequence
  ENSG00000178235_32 (sequence is synthesized)
catatccaataatgccttccatctgaatgtaaaataagtacccatgatttctattatagtatcagtgtaattatttaaaaaatgattttgaggcagttaagcatgaccaattaatgtcac

SEQ ID NO: 623627 - DNA, 120 bp, Artificial Sequence
  ENSG00000178235_33 (sequence is synthesized)
tctagtgcttaggctgcgatcctatggtagcaattctgtgctggtataaatcttacttataaagtaggaaaagagaaccgaggaagcacgtgaaacttactaattctattcgaggatttt

SEQ ID NO: 623628 - DNA, 120 bp, Artificial Sequence
  ENSG00000178235_34 (sequence is synthesized)
ataatggcatattttttcagtattaaagcgaaaatgttttcaactctgggtccttacctttttccagcttcatatttgcaagtggtaaattggatttgcggtggaagagacaggggaggg

SEQ ID NO: 623629 - DNA, 120 bp, Artificial Sequence
  ENSG00000178235_35 (sequence is synthesized)
aaacggttggggttagatcccttcctgagctacattaaggctctttctctaatcgccttacttagctttttaccctttaagtagctcctcttccctcgcccccaccctctaccccacccc

SEQ ID NO: 623630 - DNA, 120 bp, Artificial Sequence
  ENSG00000178235_36 (sequence is synthesized)
caccttcgctcagactttaccggctttccccagtccataaaggtcttgccccaacactcaccccttctttttttcccctctccaaatgcagcagtgaatccctttattaatactggaaat

SEQ ID NO: 623631 - DNA, 120 bp, Artificial Sequence
  ENSG00000178235_37 (sequence is synthesized)
ccctctctgctgcttttgttggtgctgcccacactgcagatatattaaggatgttaggagagatttgatttaattgactctgcctagataggtctcattaaacagagtggagatttcatt

SEQ ID NO: 623632 - DNA, 120 bp, Artificial Sequence
  ENSG00000178235_38 (sequence is synthesized)
ggtcagcactcctcaatgaaagacagacctaatgactggcatttgagatgctgctggcattttgaattcaacatctgctgaaaacggtaaaactaattagtgcccacccaccctccccgc

SEQ ID NO: 623633 - DNA, 120 bp, Artificial Sequence
  ENSG00000178235_39 (sequence is synthesized)
cccagcaactgcatattgaaatttgttaaagcactcatctttatggaaattaatcattatcctaaagaagtgtttctctcccatcatccggatttctggttgtggcccagcaattaacaa

SEQ ID NO: 623634 - DNA, 120 bp, Artificial Sequence
  ENSG00000178235_40 (sequence is synthesized)
aaacagcttcaactgttcgaattttatgaaccaatgtaactctggcctcaatcatattcctctgggatttctaaacagcagttaagctacaaaaagcaaacaaaaccacacatattgatg

SEQ ID NO: 623635 - DNA, 120 bp, Artificial Sequence
  ENSG00000178235_41 (sequence is synthesized)
gagtctgcattccaccacatatccacccttgagaagtatgtcaaaagactgcagactatagatttttttttaatataggattataaatcagctagtgaaagacctcagagcagttgtaag

SEQ ID NO: 623636 - DNA, 120 bp, Artificial Sequence
  ENSG00000178235_42 (sequence is synthesized)
tagatctgccatctagaactcatattctaaagggaagtgatttctcagaacagtgatgttctggaatatgtattatttattttaacacttttttaataaaatctttattataaaccatga

SEQ ID NO: 623637 - DNA, 120 bp, Artificial Sequence
  ENSG00000178252_0 (sequence is synthesized)
tttattgtgtactgactccatctgccccgtcaaataaaaaaccacaaggttcgagccgccgggcccgacaaactccgggtcggcgaaacagagtccgcgataggtgcagcgggctggcag

SEQ ID NO: 623638 - DNA, 120 bp, Artificial Sequence
  ENSG00000178252_1 (sequence is synthesized)
ctgggagcgccccgcaagcgtcacgtgagggggcgaggggcgggatgcccctccgcgggccccgccaatgatgagctggattgcgtgggacgaagggtcgtcattggacaaccgccgcgg

SEQ ID NO: 623639 - DNA, 120 bp, Artificial Sequence
  ENSG00000178252_2 (sequence is synthesized)
gcgccctggtctctgctacctgtagctgagggcgctgttgatgggcagcgcggcgcgctgggaaggctcgttctcgcgagagttcagctcccttcttagccgtggctgcctcagcacctc

SEQ ID NO: 623640 - DNA, 120 bp, Artificial Sequence
  ENSG00000178252_3 (sequence is synthesized)
gaggatcgacatggacgctctcgaggactacgtttggccgcgggcaacctcggagcttatactcctcccagtgacgggtctggagtgcgtgggggaccggctgttggcgggtgagggtcc

SEQ ID NO: 623641 - DNA, 120 bp, Artificial Sequence
  ENSG00000178252_4 (sequence is synthesized)
cgatgtcctggtgtacagcttggactttggtgggcatctgcggatgataaagcgagtgcagaacctgcttggccactatcttatccatggcttccgggtacggccagagcctaatggaga

SEQ ID NO: 623642 - DNA, 120 bp, Artificial Sequence
  ENSG00000178252_5 (sequence is synthesized)
ccttgacttggaggccatggtggctgtgtttggaagcaagggactccgagttgtgaaaattagctggggacagggccacttctgggagctttggcgctctggcctgtggaacatgtctga

SEQ ID NO: 623643 - DNA, 120 bp, Artificial Sequence
  ENSG00000178252_6 (sequence is synthesized)
ctggatttgggatgcacgctggcttgagggaaatatagccttggccctgggccacaactcagtggtgctatatgaccctgtagtagggtgcatcctgcaagaggtgccctgcacagacag

SEQ ID NO: 623644 - DNA, 120 bp, Artificial Sequence
  ENSG00000178252_7 (sequence is synthesized)
gtgcaccctctcttcagcctgcctgattggagacgcctggaaggagctgaccatagtggcaggtgctgtttccaaccagctcttggtctggtacccagcaactgccttagcagacaacaa

SEQ ID NO: 623645 - DNA, 120 bp, Artificial Sequence
  ENSG00000178252_8 (sequence is synthesized)
acctgtagcacctgaccgacgaatcagtgggcatgtgggcatcatcttcagcatgtcatacctggaaagcaagggattgctggctacagcttcagaagaccgaagcgttcgtatctggaa

SEQ ID NO: 623646 - DNA, 120 bp, Artificial Sequence
  ENSG00000178252_9 (sequence is synthesized)
ggtgggcgacctgcgagtgcctgggggtcgggtgcagaatattgggcactgctttgggcacagcgcccgtgtgtggcaggtcaagcttctagagaattaccttatcagtgcaggagagga

SEQ ID NO: 623647 - DNA, 120 bp, Artificial Sequence
  ENSG00000178252_10 (sequence is synthesized)
ttgtgtctgcttggtgtggagccatgaaggtgagatcctccaggcctttcggggacaccagggacgtgggatccgggccatagctgcccatgagaggcaggcctgggtgatcactggggg

SEQ ID NO: 623648 - DNA, 120 bp, Artificial Sequence
  ENSG00000178252_11 (sequence is synthesized)
tgatgactcaggcattcggctgtggcacttggtagggcgtgggtaccggggattgggggtctcggctctctgcttcaagtcccgtagtaggccaggtacactcaaggctgtgactctggc

SEQ ID NO: 623649 - DNA, 120 bp, Artificial Sequence
  ENSG00000178252_12 (sequence is synthesized)
tggctcttggcgactgctggcagtgactgatacaggggccctgtatctctatgacgtcgaggtcaagtgctgggagcagctgctagaggataaacatttccagtcctactgcctgctgga

SEQ ID NO: 623650 - DNA, 120 bp, Artificial Sequence
  ENSG00000178252_13 (sequence is synthesized)
ggcagctcctggtcccgagggcttcggattgtgtgctatggccaatggggaaggtcgtgtcaaggttgtccccatcaacactccaactgctgctgtggaccagaccctgtttcctgggaa

SEQ ID NO: 623651 - DNA, 120 bp, Artificial Sequence
  ENSG00000178252_14 (sequence is synthesized)
ggtgcacagcttgagctgggccctgcgtggttatgaggagctcctgttgctggcatcgggccctggcggggtagtagcttgcctagagatctcagccgcaccctctggcaaggccatctt

SEQ ID NO: 623652 - DNA, 120 bp, Artificial Sequence
  ENSG00000178252_15 (sequence is synthesized)
tgtcaaggaacgttgtcggtacctgctgcccccaagcaagcagagatggcacacatgcagtgccttcctacccccaggtgacttcctggtgtgtggtgaccgccggggctctgtgctgct

SEQ ID NO: 623653 - DNA, 120 bp, Artificial Sequence
  ENSG00000178252_16 (sequence is synthesized)
attcccctccagaccaggtctgctcaaggaccctggggtgggaggcaaggctcgggctggtgctggggcacctgtagtgggtagtggtagtagtgggggtgggaatgctttcactgggtt

SEQ ID NO: 623654 - DNA, 120 bp, Artificial Sequence
  ENSG00000178252_17 (sequence is synthesized)
gggcccagtgtctaccctgccctctctgcacgggaagcagggtgtgacctcagtcacatgccatggtggctatgtgtataccacagggcgtgatggagcctactaccagctgtttgtacg

SEQ ID NO: 623655 - DNA, 120 bp, Artificial Sequence
  ENSG00000178252_18 (sequence is synthesized)
tgggagcatggttatcctgggtttccatgccaatgagtttgtggtgtggaaccctcggtcacacgagaagctgcacatcgtcaactgtggtggagggcaccgttcgtgggcattctctga

SEQ ID NO: 623656 - DNA, 120 bp, Artificial Sequence
  ENSG00000178252_19 (sequence is synthesized)
tactgaggcggccatggcctttgcttacctcaaggatggggatgtcatgctgtacagggctctgggtggctgcacccggccacacgtgattctccgggagggtctgcatggccgtgagat

SEQ ID NO: 623657 - DNA, 120 bp, Artificial Sequence
  ENSG00000178252_20 (sequence is synthesized)
cacttgtgtaaagcgtgtgggcaccattaccctggggcctgaatatggagtgcccagcttcatgcagcctgatgacctggagcctggcagtgaggggcccgacttgactgacattgtgat

SEQ ID NO: 623658 - DNA, 120 bp, Artificial Sequence
  ENSG00000178252_21 (sequence is synthesized)
cacatgtagtgaggacactactgtctgtgtcctagcactccctacaaccacaggctcagcccacgcactcacagctgtttgtaaccatatctcctcggtacgtgctgtggctgtgtgggg

SEQ ID NO: 623659 - DNA, 120 bp, Artificial Sequence
  ENSG00000178252_22 (sequence is synthesized)
cattggcaccccaggtggccctcaggatcctcagccaggcctgactgcccatgtggtgtctgcgggggggcgggctgagatgcactgcttcagcatcatggttactccggaccccagcac

SEQ ID NO: 623660 - DNA, 120 bp, Artificial Sequence
  ENSG00000178252_23 (sequence is synthesized)
cccaagccgcctcgcctgccatgtcatgcacctttcgtcccaccggctagatgagtattgggaccggcaacgcaatcggcatcggatggttaaggtagacccagagaccaggtacatgtc

SEQ ID NO: 623661 - DNA, 120 bp, Artificial Sequence
  ENSG00000178252_24 (sequence is synthesized)
ccttgctgtgtgtgaacttgaccagcccggccttggcccccttgtggctgcagcctgtagtgatggggccgtaaggctctttcttttgcaggattctgggcggattctgcagctccttgc

SEQ ID NO: 623662 - DNA, 120 bp, Artificial Sequence
  ENSG00000178252_25 (sequence is synthesized)
tgaaaccttccaccataagcgatgtgtcctcaaggtccactcctttacacacgaggcacccaaccagaggcggaggctcctcctgtgcagcgcagctactgatggcagcctggctttctg

SEQ ID NO: 623663 - DNA, 120 bp, Artificial Sequence
  ENSG00000178252_26 (sequence is synthesized)
ggatctcaccaccatgctagaccatgactccactgtcctggagcctccagtggatcctgggcttccctaccggcttggcaccccctccctgactctccaggcccacagctgtggtatcaa

SEQ ID NO: 623664 - DNA, 120 bp, Artificial Sequence
  ENSG00000178252_27 (sequence is synthesized)
cagcctgcacaccttgcccacccgtgagggccaccatctcgtggccagtggcagtgaagatggatccctccatgtcttcgtgcttgctgtggagatgctacagctagaagaggctgtggg

SEQ ID NO: 623665 - DNA, 120 bp, Artificial Sequence
  ENSG00000178252_28 (sequence is synthesized)
agaggctgggctggtaccccagctgcgtgtgctagaggaatactctgtcccctgtgcacatgctgcccatgtgacaggcctcaagatcctaagcccaagcatcatggtctcagcctccat

SEQ ID NO: 623666 - DNA, 120 bp, Artificial Sequence
  ENSG00000178252_29 (sequence is synthesized)
tgatcaacggctgaccttctggcgtctggggcatggtgaacccaccttcatgaatagcactgtgttccatgtgcctgatgtggctgacatggactgctggcctgtgagccctgagtttgg

SEQ ID NO: 623667 - DNA, 120 bp, Artificial Sequence
  ENSG00000178252_30 (sequence is synthesized)
ccaccgttgtgcccttgggggtcaggggcttgaggtttacaactggtatgactgaggtatcctgcggtggctggcgtgctgggcatggggcctgctcacagacagcatggagcagggatg

SEQ ID NO: 623668 - DNA, 120 bp, Artificial Sequence
  ENSG00000178252_31 (sequence is synthesized)
ggctgtctgtgcccatgctcagcatgccttgaggggaggaggtggtggccgtgggttcctgatgtcggtgcaggagctgaaggtgagtggagtgctgccaagaatatgcccgactcccca

SEQ ID NO: 623669 - DNA, 120 bp, Artificial Sequence
  ENSG00000178252_32 (sequence is synthesized)
tgacaagacagaactttgtaacaaacagtaccaatttattttggccgtgggtttttgctttttttccagttgatgactttgtgaacattcccaggtattggagcctctgtggccttaaat

SEQ ID NO: 623670 - DNA, 120 bp, Artificial Sequence
  ENSG00000178252_33 (sequence is synthesized)
gtggctcagtggagggagacccagcatagccaggccagtatggagcacctcacgcacagctctcagaagctgcaggcggacgaacatctgaccaaagaggtgtggtcgaggctcctgaaa

SEQ ID NO: 623671 - DNA, 120 bp, Artificial Sequence
  ENSG00000178252_34 (sequence is synthesized)
gagaaagggcctgctggtctcatcctctgcttcctttgcctttaccctatacctctctgcacgtcccaccccattttgctgtgtgctcacccccaggatgtgtacccggttgtagtagga

SEQ ID NO: 623672 - DNA, 120 bp, Artificial Sequence
  ENSG00000178252_35 (sequence is synthesized)
gctgaaatccatgctgagctgtaccaggaacttgcatatctagagacagagactgagtcactggcccatctctttgctcttgtgccccaggccagaataaagaatagagtgtagagtgtc

SEQ ID NO: 623673 - DNA, 120 bp, Artificial Sequence
  ENSG00000178252_36 (sequence is synthesized)
accgcacccggccgagaccaaggattttctaagattcaagctgcaggattgtgtgtcctgatgcattcataggctacatgccgagaagtttccctgatccccatctcttccctgtgggtc

SEQ ID NO: 623674 - DNA, 120 bp, Artificial Sequence
  ENSG00000178252_37 (sequence is synthesized)
aaggtgggggtgaagatcctctgaggagggtggcgtcgcggaaaacggcggataagacctttccgagtagggggcggtgcccggggaagcaggggctgagaccccctcctgagatggttg

SEQ ID NO: 623675 - DNA, 120 bp, Artificial Sequence
  ENSG00000178252_38 (sequence is synthesized)
caggaaatcaggtgtggaggtccctccaaggagaaccgggtcgcaaaggacaggcgaggcctgggacctgaggtgtcagagtccaggctggtctcgaacagtcattacatgaagccacta

SEQ ID NO: 623676 - DNA, 120 bp, Artificial Sequence
  ENSG00000178252_39 (sequence is synthesized)
accagcccggccttggcccccttgtggctgcagcctgtagtgatggggccgtaaggtgagagcatagggcccagtgggacaggagacaaaggaagtaaggttgtctaggatgcgttctga

SEQ ID NO: 623677 - DNA, 120 bp, Artificial Sequence
  ENSG00000178252_40 (sequence is synthesized)
gtgacttcctggtgtgtggtgaccgccggggctctgtgctgctattcccctccagaccagggcgtgatggagcctactaccagctgtttgtacgagacggccagctccagccagtcctaa

SEQ ID NO: 623678 - DNA, 120 bp, Artificial Sequence
  ENSG00000178257_0 (sequence is synthesized)
acctccttgcccagagagacaggcaacgtagaccatgggttcccgctgtgccaagctcaacacaggccagagcccaggccacagcccaggccacagcacgggccatggccggggccacga

SEQ ID NO: 623679 - DNA, 120 bp, Artificial Sequence
  ENSG00000178257_1 (sequence is synthesized)
aggaggaagaggaggaggagggggaagaggaggagaaagaagagctgccggtgcagggcaagctgctgctgctggagcctgagcggcaggaggagggccacaaggacaacgccgaggccc

SEQ ID NO: 623680 - DNA, 120 bp, Artificial Sequence
  ENSG00000178257_2 (sequence is synthesized)
agcagagccccgagcccaagcggacaccctcctgacccgcaacgaaggcccaggaagggacgcccactgctgctccggcgacagtgttcagagaagagtcaataaaaagtctctgaggaa

SEQ ID NO: 623681 - DNA, 120 bp, Artificial Sequence
  ENSG00000178279_0 (sequence is synthesized)
gtaaagctaggcctgctgggagaggatgaggaggaggccctgcccctccaaacgtggcctcctatggacacccagactcacagccttcctatcacccacactcagctccatagcaactct

SEQ ID NO: 623682 - DNA, 120 bp, Artificial Sequence
  ENSG00000178279_1 (sequence is synthesized)
cagccccaaagccgcacctgcacccgccattgccaaaccttcagccagagttgcagacagagccatcgtggcagccggagccagagctccagccagagcccggccagccaccgcaaccca

SEQ ID NO: 623683 - DNA, 120 bp, Artificial Sequence
  ENSG00000178279_2 (sequence is synthesized)
ccggccaccagagccagagtcccaacactagtccaccaccaaagcgccacaaaaagactatgaactcccaccactctcccatgcggcccaccatcctgcactgccgctgccccaagaaca

SEQ ID NO: 623684 - DNA, 120 bp, Artificial Sequence
  ENSG00000178279_3 (sequence is synthesized)
gaaagaacttggaaggcaagctgaaaaagaaaaaaatggccaagaggatccagcaggtgtacaaaaccaagacgcggagctcaggatggaaatccaactaatgagaccgcactccttggc

SEQ ID NO: 623685 - DNA, 120 bp, Artificial Sequence
  ENSG00000178279_4 (sequence is synthesized)
ttgttcctgcgtgtttcacccaaaggagaaaatgctaggatgaagtcaatcttcttgcaggaacatgttactatggtgatttctacgcaacactaattaaagcttgtacctggaagacta

SEQ ID NO: 623686 - DNA, 120 bp, Artificial Sequence
  ENSG00000178279_5 (sequence is synthesized)
agactcagcttaatctgacccaagggctcctaccctgaaccagtagctgggactatccccagggtacccctgagagctgccccagcctgggggtgagggtaaggggtagggggctttgtc

SEQ ID NO: 623687 - DNA, 120 bp, Artificial Sequence
  ENSG00000178279_6 (sequence is synthesized)
gagcagaccttgggggcagtgagaggaaggctgcagccaggtcacaaaggaaccacaggcaagaaggaagagggagaagagaaacaatggcagttggctagctgaatgtatgatacattg

SEQ ID NO: 623688 - DNA, 120 bp, Artificial Sequence
  ENSG00000178279_7 (sequence is synthesized)
atgactgggtgggtaaacaataaataggttatagaaaggatagttggaagaatgcattggctgaatgataggaagtttggatacgattagctggatggatggataaatggatgaatgcac

SEQ ID NO: 623689 - DNA, 120 bp, Artificial Sequence
  ENSG00000178279_8 (sequence is synthesized)
tggctggctagttatttggttggttaggtagatgatcagtttgaagattgtggttggtggatgaattggttagaaatagagttaaatagttgtagaagttttgatgggttggtttgattg

SEQ ID NO: 623690 - DNA, 120 bp, Artificial Sequence
  ENSG00000178279_9 (sequence is synthesized)
gttaaatattatcttaatagagtaatatagagtaattgaataaacagagagaagaatagatatctagactaatgggatagaatgggaaagaaatgttgaataaatgaatggaatgagtga

SEQ ID NO: 623691 - DNA, 120 bp, Artificial Sequence
  ENSG00000178279_10 (sequence is synthesized)
actaatgaatgggtggatgacaaatggaagggataaatggatggatacctggattcacataggtcaaaaggacactgacggtagtctaaactctatctatgtcccatattcaatcacaaa

SEQ ID NO: 623692 - DNA, 120 bp, Artificial Sequence
  ENSG00000178279_11 (sequence is synthesized)
tgagtagttgtaagaccttacaggaggtcaaggaggtcactgacttcatgaagtgctcagctattaaaggttcctttcccactcttatcccttaggatggaaatccaactaatgagaccg

SEQ ID NO: 623693 - DNA, 120 bp, Artificial Sequence
  ENSG00000178287_0 (sequence is synthesized)
tccacattgtcctttgagaatgagaagtcatcctggagcacagctcttcccacgctccgggcccacacacccagcctcactccatcaaaggagccccgctgcctgcccacccaccctggg

SEQ ID NO: 623694 - DNA, 120 bp, Artificial Sequence
  ENSG00000178287_1 (sequence is synthesized)
tgctttctggcttgcagtgctcttggcagacatgaggcaacgattgctcccgtccgtcaccagccttctccttgtggccctgctgtttccaggatcgtctcaagccagacatgtgaacca

SEQ ID NO: 623695 - DNA, 120 bp, Artificial Sequence
  ENSG00000178287_2 (sequence is synthesized)
gcacaaacgggtttcagctgctacgccacgcagtgaaacgggacctcttaccaccgcgcaccccaccttaccaaggggatgttccactgggaattagaaataccatctgccgtatgcagc

SEQ ID NO: 623696 - DNA, 120 bp, Artificial Sequence
  ENSG00000178287_3 (sequence is synthesized)
aagggatctgcagactttttttctgccattctggtgagaaaaagcgtgacattagctctgatccctggaataggtgttgcgtatcaaatacagatgaagaaggaaaagagaaaccagaga

SEQ ID NO: 623697 - DNA, 120 bp, Artificial Sequence
  ENSG00000178287_4 (sequence is synthesized)
tggatggcagatctgggatctaaaatataagctcccggaaggcagggatgttgaagtatcccaagggcttaaaggaatgtgtggcttatagtaggtgttcaataaatatttgttgaatga

SEQ ID NO: 623698 - DNA, 120 bp, Artificial Sequence; identical to SEQ ID NO: 516085
  ENSG00000178287_5 (sequence is synthesized)

SEQ ID NO: 623699 - DNA, 120 bp, Artificial Sequence; identical to SEQ ID NO: 516086
  ENSG00000178287_6 (sequence is synthesized)

SEQ ID NO: 623700 - DNA, 120 bp, Artificial Sequence; identical to SEQ ID NO: 516087
  ENSG00000178287_7 (sequence is synthesized)

SEQ ID NO: 623701 - DNA, 120 bp, Artificial Sequence
  ENSG00000178287_8 (sequence is synthesized)
ctcttaccaccgcgcaccccaccttaccaagaaatgaaatgaaggaggtgggctcgatctcagactccatcagagcacagcagcctgggggtgtggaagcagagcctcacccaaggacca

SEQ ID NO: 623702 - DNA, 120 bp, Artificial Sequence
  ENSG00000178287_9 (sequence is synthesized)
ctgcctcctgtcttctggagttgtgaccgcagggtggcccaggtggatcggcttcagaggccaggaggcagctctctgcagccgaagagcaggagcctcacccacggtctgtggctctga

SEQ ID NO: 623703 - DNA, 120 bp, Artificial Sequence
  ENSG00000178287_10 (sequence is synthesized)
ctaagcctggactgcctctcggctgtgctccgtggactggctccccagggatccatgtgagagaccggagtatgatcctcagtgcgaggacaaataaaagtagtgattatgtccacccca

SEQ ID NO: 623704 - DNA, 120 bp, Artificial Sequence; identical to SEQ ID NO: 516094
  ENSG00000178287_11 (sequence is synthesized)

SEQ ID NO: 623705 - DNA, 120 bp, Artificial Sequence; identical to SEQ ID NO: 516095
  ENSG00000178287_12 (sequence is synthesized)

SEQ ID NO: 623706 - DNA, 120 bp, Artificial Sequence
  ENSG00000178287_13 (sequence is synthesized)
tcatatttgtgctccttcacgggagggcagggaggttcaacggaccttaaaacatgaaggtcttttttctgtttgctgttctcttttgtttggtccaaacaaactcagtgcacatctctc

SEQ ID NO: 623707 - DNA, 120 bp, Artificial Sequence
  ENSG00000178287_14 (sequence is synthesized)
tcatatttgtgctccttcacgggagggcagggaggttcaacggaccttaaaacatgaaggtcttttttctgtttgctgttctcttttgtttggtccaaacaaactcaggggatgttccac

SEQ ID NO: 623708 - DNA, 120 bp, Artificial Sequence
  ENSG00000178295_0 (sequence is synthesized)
gcagttgcggggtttcgcgccgccggagtctgagaggccggaagtgccccttagcgggtgggggaagctggtaggcacgggcggctccgcagtgaccggactcgggggagcagataatca

SEQ ID NO: 623709 - DNA, 120 bp, Artificial Sequence
  ENSG00000178295_1 (sequence is synthesized)
ccagaatgggagtgaatgacttgtggcaaattttggagcctgttaagcaacacatccccttgcgtaatcttggtgggaaaaccattgcagttgatctgagtctctgggtgtgtgaggcac

SEQ ID NO: 623710 - DNA, 120 bp, Artificial Sequence
  ENSG00000178295_2 (sequence is synthesized)
agacagtcaaaaaaatgatgggcagcgtcatgaagccccacctcaggaacttattttttcgtatctcatatttaacacaaatggatgtaaaactggtatttgttatggaaggggaaccac

SEQ ID NO: 623711 - DNA, 120 bp, Artificial Sequence
  ENSG00000178295_3 (sequence is synthesized)
caaagctgaaagctgatgtcataagcaagaggaatcagtctcggtatgggtcttctggaaaatcgtggtctcagaaaacagggagatcacattttaaatcagtcttaagagagtgcctcc

SEQ ID NO: 623712 - DNA, 120 bp, Artificial Sequence
  ENSG00000178295_4 (sequence is synthesized)
atatgctcgaatgcttaggaatcccctgggttcaggctgctggggaagctgaagccatgtgtgcttatctcaatgctggtggtcatgtcgatggctgcctcaccaatgatggagatactt

SEQ ID NO: 623713 - DNA, 120 bp, Artificial Sequence
  ENSG00000178295_5 (sequence is synthesized)
tcctttatggggcccagactgtttacaggaatttcactatgaatacaaaggacccacatgttgactgttacacaatgtcatctatcaagagtaaactaggtttggatagagatgctctgg

SEQ ID NO: 623714 - DNA, 120 bp, Artificial Sequence
  ENSG00000178295_6 (sequence is synthesized)
ttggattagcaatacttcttggctgtgattatctcccaaagggagtccctggagttggaaaagagcaagcattaaaacttatacagattttgaaagggcaaagtttacttcagaggttta

SEQ ID NO: 623715 - DNA, 120 bp, Artificial Sequence
  ENSG00000178295_7 (sequence is synthesized)
atcggtggaatgaaacatcttgtaactctagtccacaactgctagtcactaaaaaactggctcattgttccgtatgttcccatccaggttcacctaaggatcatgaacgtaatggatgca

SEQ ID NO: 623716 - DNA, 120 bp, Artificial Sequence
  ENSG00000178295_8 (sequence is synthesized)
gattatgtaaaagtgataaatattgtgagccacatgactatgaatactgctgtccttgtgagtggcaccgtacagaacatgataggcaactcagtgaagtagagaacaatattaagaaga

SEQ ID NO: 623717 - DNA, 120 bp, Artificial Sequence
  ENSG00000178295_9 (sequence is synthesized)
aagcttgctgttgtgagggattcccattccatgaggttattcaagaattccttttaaacaaggataaattggtgaaggttatcaggtaccaaagacctgatttgttattgtttcagagat

SEQ ID NO: 623718 - DNA, 120 bp, Artificial Sequence
  ENSG00000178295_10 (sequence is synthesized)
ttactcttgaaaaaatggagtggcccaatcactatgcatgtgagaaattgctggtacttttgacccattatgacatgatagaaagaaagcttggtagcagaaactctaatcaactacagc

SEQ ID NO: 623719 - DNA, 120 bp, Artificial Sequence
  ENSG00000178295_11 (sequence is synthesized)
caattcgaattgttaagactcgaatcagaaatggagttcattgttttgaaatagaatgggaaaagcctgaacattatgctatggaagataaacaacatggagaatttgctttattaacaa

SEQ ID NO: 623720 - DNA, 120 bp, Artificial Sequence
  ENSG00000178295_12 (sequence is synthesized)
ttgaggaagaatcattgtttgaagcagcatatcctgagatcgttgctgtttaccaaaaacaaaagttagaaattaaagggaagaaacaaaaacgtattaagcctaaagaaaacaatttgc

SEQ ID NO: 623721 - DNA, 120 bp, Artificial Sequence
  ENSG00000178295_13 (sequence is synthesized)
cagaaccagatgaagtaatgagctttcagtcacacatgactttaaaacccacatgtgaaatctttcataagcagaattccaagttaaattcggggatttcccctgatcctacattaccac

SEQ ID NO: 623722 - DNA, 120 bp, Artificial Sequence
  ENSG00000178295_14 (sequence is synthesized)
aggaatctatttctgcctcattgaatagcttgcttttacctaaaaatactccatgtttgaatgcacaagaacagttcatgtcttctctaagacctttggctatacagcaaattaaagctg

SEQ ID NO: 623723 - DNA, 120 bp, Artificial Sequence
  ENSG00000178295_15 (sequence is synthesized)
tcagtaagtctctaatttcagaatctagtcaacccaatacctcatctcataatatatccgtgattgctgatctacacttgagcactattgactgggaaggtacttcttttagtaattctc

SEQ ID NO: 623724 - DNA, 120 bp, Artificial Sequence
  ENSG00000178295_16 (sequence is synthesized)
cagctattcaaaggaatactttttctcatgatttaaaatcagaagttgaatcagagctatcagccatccctgatggctttgaaaatatcccagaacaactgtcctgtgaatcagaaaggt

SEQ ID NO: 623725 - DNA, 120 bp, Artificial Sequence
  ENSG00000178295_17 (sequence is synthesized)
acactgcaaacataaagaaagtgttggatgaggattctgatgggattagtcctgaagagcatctactttctggcattactgatttatgtcttcaggatttgcctttaaaggaacgaatat

SEQ ID NO: 623726 - DNA, 120 bp, Artificial Sequence
  ENSG00000178295_18 (sequence is synthesized)
ttacaaaattatcatatcctcaggataatctacaaccagatgtcaacctgaaaactttgtccatacttagtgtaaaagaatcttgtattgctaacagtggttctgattgtacatcacatc

SEQ ID NO: 623727 - DNA, 120 bp, Artificial Sequence
  ENSG00000178295_19 (sequence is synthesized)
tttcaaaggatcttccaggaattcccttgcaaaatgaatccagagactctaaaattctaaaaggagaccagctgcttcaagaagactataaagtcaatacttctgtcccttattctgtca

SEQ ID NO: 623728 - DNA, 120 bp, Artificial Sequence
  ENSG00000178295_20 (sequence is synthesized)
gtaacacagtggtaaagacctgcaatgttagaccaccaaatactgctttagatcatagtagaaaagttgatatgcaaaccactcggaaaattttaatgaagaagagtgtttgccttgaca

SEQ ID NO: 623729 - DNA, 120 bp, Artificial Sequence
  ENSG00000178295_21 (sequence is synthesized)
gacattcctctgatgaacaaagtgccccagtgtttgggaaagctaagtacacaactcaaagaatgaagcacagttctcaaaagcataattcatcccatttcaaagaaagtggccataaca

SEQ ID NO: 623730 - DNA, 120 bp, Artificial Sequence
  ENSG00000178295_22 (sequence is synthesized)
agttgagtagccctaagatacatattaaagaaactgaacagtgtgtcagatcttatgaaacagctgaaaatgaagaaagctgtttcccagattcaacaaaaagttctctgagttctctac

SEQ ID NO: 623731 - DNA, 120 bp, Artificial Sequence
  ENSG00000178295_23 (sequence is synthesized)
aatgtcataagaaagaaaacaactctggtacttgtttggatagccctcttcctttacgccagagattaaaactaagattccaaagcacttgaaatttaaaacacttaggtataacttaac

SEQ ID NO: 623732 - DNA, 120 bp, Artificial Sequence
  ENSG00000178295_24 (sequence is synthesized)
tattttagtactatcagcaatagcagagacagagggaaggtatctagttcatgtgtggtaaaaattttaatgttctctgtgtcatgaaacacttgccattttaatcaaagttgtaatttt

SEQ ID NO: 623733 - DNA, 120 bp, Artificial Sequence
  ENSG00000178295_25 (sequence is synthesized)
taaaaagtcacctaaaactctggttttaaaagatcctctgtattgaaaacttctgataatgtatgtcattatgtccttactattccttaattgtagttttaaaatattggtatagtactt

SEQ ID NO: 623734 - DNA, 120 bp, Artificial Sequence
  ENSG00000178295_26 (sequence is synthesized)
gacagagtaaatacttcatctgattgttcatttttactttttcttccacaagcctctaaagtatttatattccagcttgttcccaagaggataattctttatacttctcttcattctttt

SEQ ID NO: 623735 - DNA, 120 bp, Artificial Sequence
  ENSG00000178295_27 (sequence is synthesized)
aaggccttgcaaggtcttccgttataactcgctttcctaaaagctattttctccctcagtgtgaagatacctttagtgtgctcttccactttggaaggccatgcaaggtgttccattata

SEQ ID NO: 623736 - DNA, 120 bp, Artificial Sequence
  ENSG00000178295_28 (sequence is synthesized)
actctttttcctaagagttatattctccctcagtttgaagatacctttagtgtgctcttccacttttggtgtcttagtctcttttgaggggcaaaaatagaaaaggagagaagatgtcag

SEQ ID NO: 623737 - DNA, 120 bp, Artificial Sequence
  ENSG00000178295_29 (sequence is synthesized)
tatgtttagtaaaaatcatgctcgtaatggctgaataaactgagcaaagtaactccttatgtatccccagaagttcacaggtatatcgggtggaaaaagatttggaaaatcaaatgtata

SEQ ID NO: 623738 - DNA, 120 bp, Artificial Sequence
  ENSG00000178295_30 (sequence is synthesized)
accaaaaggattagaaactagcccaggatcacgtagctaactaataatcctgtgggaatcagttttcttgcctgctaatttttttatttttctattttttccttctatagcacttttccc

SEQ ID NO: 623739 - DNA, 120 bp, Artificial Sequence
  ENSG00000178295_31 (sequence is synthesized)
ccttttgttttgaatctatgcaatattgactttaataccaccaaatattaagtcatgcattaatttaggtcgcactcaaaaattctagagaggcatccagattgaaaaggaaaatggtgt

SEQ ID NO: 623740 - DNA, 120 bp, Artificial Sequence
  ENSG00000178295_32 (sequence is synthesized)
ctgcagatgacaagattgtatgcatcaaaaattctaagaaatccactagaaaactattaaaactgataaagcgagttcatccaggtcgtagaatacaagaccaatgtgcaatgatcattg

SEQ ID NO: 623741 - DNA, 86 bp, Artificial Sequence
  ENSG00000178295_33 (sequence is synthesized)
ccaggtcgtagaatacaagaccaatgtgcaatgatcattgcattttgtttttgtttgtgagactggggtgtagtggcgccatcttg

SEQ ID NO: 623742 - DNA, 88 bp, Artificial Sequence
  ENSG00000178295_34 (sequence is synthesized)
tgtgccaccattgggattttcccttgttggtcaggctagtcatgaactcctggcctcaagcgatccacccatcttggcctcccagagt

SEQ ID NO: 623743 - DNA, 120 bp, Artificial Sequence
  ENSG00000178295_35 (sequence is synthesized)
cccagagtgctgggattacaggtgtgaatcaccatactcagcctcaattgtatttctgtacacctctaaataaatggaaatacattccatgttcatgaatcagaagacataagatgacca

SEQ ID NO: 623744 - DNA, 120 bp, Artificial Sequence
  ENSG00000178295_36 (sequence is synthesized)
tcatgaatcagaagacataagatgaccatactccccaaactgatctacaggttaaatgtaattcccattaattccagctggtttctttgctgattctaaaattcatatggaaatttcagg

SEQ ID NO: 623745 - DNA, 120 bp, Artificial Sequence
  ENSG00000178295_37 (sequence is synthesized)
aacacagaatattaggaagaatcttgaaagagtttgaatgacccacccttcctgattttaagtatacagaactacagtaatgaatgtgttgtactggtataaaggtagacatataggtca

SEQ ID NO: 623746 - DNA, 120 bp, Artificial Sequence
  ENSG00000178295_38 (sequence is synthesized)
atatagatcaatggcatagaattgagaattcagaaaaaaagccttcacgtttatggtcagttgattttaaaccagagtgccaagacaattcaatgggaaaaggaaacagtctttgaacca

SEQ ID NO: 623747 - DNA, 120 bp, Artificial Sequence
  ENSG00000178295_39 (sequence is synthesized)
actgtcttctggatctattggatatctatgtaaaaaagagtgacatttgattcctacttcacatgatatttaagaagtaacttaagatggatcaaatacctaaatgtaagctaaagctat

SEQ ID NO: 623748 - DNA, 120 bp, Artificial Sequence
  ENSG00000178295_40 (sequence is synthesized)
aaaactcttagaagaaaacatagacgtaaatctttgtgactttggattaggcaaggatttcttaaatatacccaaagcataggcaacaaaagagaatacacaaactggacttcatcaaaa

SEQ ID NO: 623749 - DNA, 120 bp, Artificial Sequence
  ENSG00000178295_41 (sequence is synthesized)
ttgaaatgacaccatcaagaaagtgaaaagacagcttacagaatgggagaaaatatttgcaaatcataaatgtgataagggacttgtatcttggtggtatataaagaactcgtaactcaa

SEQ ID NO: 623750 - DNA, 120 bp, Artificial Sequence
  ENSG00000178295_42 (sequence is synthesized)
ttataaaaagacaactttgaaatgggcaaaatagctcaacaggcttttctgcaaagaagaaatacaaatgaccaagaagcacatttaaaaattttcagtactattactcatcaggaaaat

SEQ ID NO: 623751 - DNA, 120 bp, Artificial Sequence
  ENSG00000178295_43 (sequence is synthesized)
gcaaatcaaaaccacaagacacccaatgtctacaatcaaaaagataataactagtattgatgaggatgtggagaaattgaaattctcataacatgctggtaggaatgtaaaatggggcag

SEQ ID NO: 623752 - DNA, 120 bp, Artificial Sequence
  ENSG00000178295_44 (sequence is synthesized)
ccactttggaaaaagtctggtagttcttcaaatggttaaatgtagagttacgatatgatccagcaattcctctcccaggtatatacccaagataaatgaaaacttatatccacataaaaa

SEQ ID NO: 623753 - DNA, 120 bp, Artificial Sequence
  ENSG00000178295_45 (sequence is synthesized)
cctgtgcacaaatgtccatagcagcgttattcataatagcctaaaagtggaaacaatcccagttccagaatgaggaaggggagaaactaatgtgtattagctattgtgtgctaagcattc

SEQ ID NO: 623754 - DNA, 120 bp, Artificial Sequence
  ENSG00000178295_46 (sequence is synthesized)
aactagattatttacaaaccttgtatcatctcaactctttaaggactgtattgcaatgttttgaatattcagagagaaaaaagtcgttgctaaaacattttccaaggttctgcttattct

SEQ ID NO: 623755 - DNA, 120 bp, Artificial Sequence
  ENSG00000178295_47 (sequence is synthesized)
gatttgttcagtcgtggctgtgatagttcaggaccatctagaccaggtaaataaaatatctagaggcattcttgagattgtatgagatgaaaataacaaaattagttgggagtggccagt

SEQ ID NO: 623756 - DNA, 120 bp, Artificial Sequence
  ENSG00000178295_48 (sequence is synthesized)
ctgagttcattttgctatatagctcaggagtccccaacccctgggctatggacaggtaccagtccatcacctgtcaggaaccggcctgcacagcaggtgttgagcggcatgcaagcgaga

SEQ ID NO: 623757 - DNA, 89 bp, Artificial Sequence
  ENSG00000178295_49 (sequence is synthesized)
cattagagacgcatgcgaggatctagtttgtgcactcctactgagaatctaatgcctgatgatataaggtggaacagcttcatcccaca

SEQ ID NO: 623758 - DNA, 120 bp, Artificial Sequence
  ENSG00000178295_50 (sequence is synthesized)
taatgcctgatgatataaggtggaacagcttcatcccacagccatctccccctcatcatccgtggaaaaactgttttccacgaaagtggtcctcggtgccagaaaggttggggactgctg

SEQ ID NO: 623759 - DNA, 120 bp, Artificial Sequence
  ENSG00000178295_51 (sequence is synthesized)
atatacctaatataggcataagtgtaaaattatagttcctcctcctcaaggatttctctgttttcattgtccaggttataccaattctttttaaagcattccatgttcttgttccttgat

SEQ ID NO: 623760 - DNA, 120 bp, Artificial Sequence
  ENSG00000178295_52 (sequence is synthesized)
gtggtcatgttatcacttgtaaatcaaatcttttaagttgctgcttacgtatttgctcatcacttcattgtcttgttgaggatgccttgcttccctttgaaatactctgccaaagatctg

SEQ ID NO: 623761 - DNA, 120 bp, Artificial Sequence
  ENSG00000178295_53 (sequence is synthesized)
cctccagctgctaggatcctgtaattggtttctttctgatggctccatgctaaggccctgctctggcctaactgctttgggctttgtgtaatcaatcttaagtccttggcggtttttctt

SEQ ID NO: 623762 - DNA, 120 bp, Artificial Sequence
  ENSG00000178295_54 (sequence is synthesized)
cttaagtccttggcggtttttcttttagatttttttccatataaaatctctatctggccacacatggtggccgtgcctgtaatcccagcacgctgggaggctgaggcgggtggattgctt

SEQ ID NO: 623763 - DNA, 120 bp, Artificial Sequence
  ENSG00000178295_55 (sequence is synthesized)
cagtgagctgagatagtgccactgcacttcactccaggatgggcgaaaaagtgtctaaaaaaaattaaaatttaaattaaaaaaaaatatacaatctccgtcttctagattttataatga

SEQ ID NO: 623764 - DNA, 120 bp, Artificial Sequence
  ENSG00000178295_56 (sequence is synthesized)
attttataatgaggactctactttttccttttgggtagcatggcttgagccatcttgtcaggcatacctagcttcagattcttttctgctaacagattttctctgtgaccctggagacat

SEQ ID NO: 623765 - DNA, 120 bp, Artificial Sequence
  ENSG00000178295_57 (sequence is synthesized)
tttctaacttttctgagactcatttattcaaatgtttatgtgacaggcattgtgctgggccctggagatacagtgatcaatggcatcctataaggttttgatatctgtgaagtcactgcc

SEQ ID NO: 623766 - DNA, 120 bp, Artificial Sequence
  ENSG00000178295_58 (sequence is synthesized)
accattgacacattctagggactcagtaaattgtagctgtgtccgataccatcatttggaaagagcactatcagattttggattcaaactgaatgcagccaagcactgccttttggtaaa

SEQ ID NO: 623767 - DNA, 120 bp, Artificial Sequence
  ENSG00000178295_59 (sequence is synthesized)
aatgtggacacagtaacactagtagggggcagtgtgagggtgggagatgtgttttcagaagaaggaaactctagattagcatcacacaagggatcctaacgtggcatttgagctactgga

SEQ ID NO: 623768 - DNA, 120 bp, Artificial Sequence
  ENSG00000178295_60 (sequence is synthesized)
aaaaaattgtgcttgcttaaatataatgtggtaactaatattcatctaatcacctaccacatttttggagcacccactttgagcaaggttcttaggcttttctatgtacaacagccagct

SEQ ID NO: 623769 - DNA, 120 bp, Artificial Sequence
  ENSG00000178295_61 (sequence is synthesized)
ggaggcccagtgagtttaaaatttttccaggtcacccaactagaaaaagttaaagctgggactagaactcagatctcctaattcatgagtgaaaacaattctctgtatttatgtttccat

SEQ ID NO: 623770 - DNA, 120 bp, Artificial Sequence
  ENSG00000178295_62 (sequence is synthesized)
acatcattcagttcttgactcaaatatcacctcagagagtcctaatctttttatctcctgacattataaatgttgagttcagggttttttttttcattgtttcccaaactagaatgcaga

SEQ ID NO: 623771 - DNA, 120 bp, Artificial Sequence
  ENSG00000178295_63 (sequence is synthesized)
cttgatgagggcagggactaagtcctttctgttcacagaattctagaacagtgtttgacacagtaactactagatgcatgaatgacaattctccacaacgccccacccatggagcctgta

SEQ ID NO: 623772 - DNA, 120 bp, Artificial Sequence
  ENSG00000178295_64 (sequence is synthesized)
ccagcagtggctgcacttaaccttgcggaatctggccttagtacttcagcatggctcacaaggctgaggcagcctggccccaacttgtctcttcagcttcatgcattcatagtcatgaac

SEQ ID NO: 623773 - DNA, 120 bp, Artificial Sequence
  ENSG00000178295_65 (sequence is synthesized)
cttggctctagccacctaagaccatttgttattccctgcacggatgtctctgcctgaaatgcttgctgcttccttattggctagataaacctcatctattaaggaccagctcacatgtca

SEQ ID NO: 623774 - DNA, 120 bp, Artificial Sequence
  ENSG00000178295_66 (sequence is synthesized)
taactttataatcccaagcagaattatttgctctatacgtgtccccaaagaaattacccatacattcatcagagtatttatcacattcattcattcgttccacaaatattagctgatgcc

SEQ ID NO: 623775 - DNA, 120 bp, Artificial Sequence
  ENSG00000178295_67 (sequence is synthesized)
tgccgtgtaggaggcacaatattccttacttaaaaatgcctctatctctccctcagataagactaagatctctgagcacaggaatcaagtcttatttctgttcacttcccccagatgcct

SEQ ID NO: 623776 - DNA, 120 bp, Artificial Sequence
  ENSG00000178295_68 (sequence is synthesized)
acacagggtttgactcttctgcctcaccaactcttacccatcgagattcagtgtaaacgtggtcttctctaagaaagtcttctgttgcttctctggatcgctgctagtccccatagactt

SEQ ID NO: 623777 - DNA, 120 bp, Artificial Sequence
  ENSG00000178295_69 (sequence is synthesized)
ctaaaatattatctgtctatagttttgtgttgggttacattttttgtttcccacaccagactatgaacatcctcagggcagagaaactatattgtacttctgaatttatagcacccggca

SEQ ID NO: 623778 - DNA, 120 bp, Artificial Sequence
  ENSG00000178295_70 (sequence is synthesized)
tgaatttatagcacccggcagagggattggcacagaaagtgtccagtgaggccgggtgtgggggctcacatcagcagtttgggaggccgagatgggcagattgcctgaggtcaggagttc

SEQ ID NO: 623779 - DNA, 120 bp, Artificial Sequence
  ENSG00000178295_71 (sequence is synthesized)
tgggcaagaagagcgaaactccatctaaacaaaagaaaaaagaaagtgttcagtgaatgggtgctgattgactgatggtgatttcagtcagggtcttagttctaaatttctctgtggaga

SEQ ID NO: 623780 - DNA, 120 bp, Artificial Sequence
  ENSG00000178295_72 (sequence is synthesized)
cagtcagggtcttagttctaaatttctctgtggagagagaccaaatctaaccgggtggattagcttgatacctagtcgcctttagccacttcaagacgccctgccaagatgcttgctttc

SEQ ID NO: 623781 - DNA, 120 bp, Artificial Sequence
  ENSG00000178295_73 (sequence is synthesized)
tgaaggtgaagagtctaaatcaactgctgttcctgttctgctggtagcacttagggtaaaacagcttaaatagtattactgaaggcagcctcctttcatctatatattaacgtggcaatg

SEQ ID NO: 623782 - DNA, 120 bp, Artificial Sequence
  ENSG00000178295_74 (sequence is synthesized)
tttatcaccttcttaaccaagcaaagcttttatcaggctcagctaacagcttgcattagcctctttcaggaacttgccacattgcctataaactgacatgctgcagagtcagccccagca

SEQ ID NO: 623783 - DNA, 120 bp, Artificial Sequence
  ENSG00000178295_75 (sequence is synthesized)
atagtccaaaacagtgggactctttttgatgatttcaaaatggatagtttagttagccccaggccagataaattcactaagttgcctgtttggcaatggagggcagagttatcagcaaag

SEQ ID NO: 623784 - DNA, 120 bp, Artificial Sequence
  ENSG00000178295_76 (sequence is synthesized)
taggctgacccttctgtgggcagaatgaatattttgctaatgtttagaagaattccttttgtaagcatcaaagaagaactttaataaggattaagtgtctgagcttccttagcattattc

SEQ ID NO: 623785 - DNA, 120 bp, Artificial Sequence
  ENSG00000178295_77 (sequence is synthesized)
tattccaagacccaaaaaggaaaataacctccccaaatggtaaaaactgcttgtatatttagaattctctgatcaaagacctaatgaaaagattctatagtgtttgcgtcatcataagtt

SEQ ID NO: 623786 - DNA, 120 bp, Artificial Sequence
  ENSG00000178295_78 (sequence is synthesized)
aaatcttcatctaccacccaactgatacctgcctttctgtgagtgaaatcagaaacggctgttctttaataaatgctttcaatctgaaagtcagaaagtgatttatgaaacacccaggtg

SEQ ID NO: 623787 - DNA, 120 bp, Artificial Sequence
  ENSG00000178295_79 (sequence is synthesized)
aggggagactacaagtccctttgccttttagttttcaagcaatactggttgcagtaactgctctgatgtaattattgctaacatttacgtttttattaaactgaaaatgctaactgtgaa

SEQ ID NO: 623788 - DNA, 120 bp, Artificial Sequence
  ENSG00000178295_80 (sequence is synthesized)
gctggattcgaaacgcttcctggtgctcctgggcctggcggttgagcccggggagctagtctttgcttgggtaaagaaagaggactttcctttttttttttccttttgagaaaattcaga

SEQ ID NO: 623789 - DNA, 120 bp, Artificial Sequence
  ENSG00000178295_81 (sequence is synthesized)
ccggaagtgccccttagcgggtgggggaagctggtaggcacgggcggctccgcagtgaccggactcgggggaggtgagtgatttgcctaagtaaaagggaaagataattgagcgcccccg

SEQ ID NO: 623790 - DNA, 120 bp, Artificial Sequence
  ENSG00000178295_82 (sequence is synthesized)
gcagctggtctacgcatgcgtccgctaggccggctgggagccggcaagggaaagccgagcgggccccattgggggaaaggggtcagtcacttcccggaagaggcggggccgcgcgggccc

SEQ ID NO: 623791 - DNA, 120 bp, Artificial Sequence
  ENSG00000178295_83 (sequence is synthesized)
gccgcccgggtcctcccactgattcctttgaccatctggcttacggacgagctctttgttcgctgctcctccgaaaacgccttcaatgactccctttgaataaagtaggaagtccgaacc

SEQ ID NO: 623792 - DNA, 120 bp, Artificial Sequence
  ENSG00000178295_84 (sequence is synthesized)
gagccgccaggccgcgacttggcccctgttttccactcgcgagggccctgcgtcaccccgcctcgggaaagctgcgcgttctccggccgcttgcgcttggccgaagctgctgggtcccgc

SEQ ID NO: 623793 - DNA, 120 bp, Artificial Sequence
  ENSG00000178295_85 (sequence is synthesized)
tgtgcttcccccgggcatgcgatggggataattcccacgcctcgctcaaagccatcccgggagagccctccctggtccccataggcacagttgggtgttcccttttccgtgttaaccttg

SEQ ID NO: 623794 - DNA, 120 bp, Artificial Sequence
  ENSG00000178295_86 (sequence is synthesized)
ttcccccacggtaacctagagtgtaaaccccctaaataaacgtcagaagtaatgaagtcttaacttccttggcttaggtttcagcgcccttctcaaccccacactcccgcttcagtcttt

SEQ ID NO: 623795 - DNA, 120 bp, Artificial Sequence
  ENSG00000178295_87 (sequence is synthesized)
acacaacccttcccatgaatatgctgacctaacaagtaacctacttttcatactccaaaatcttctcttctgtgtggggaaaataatgcattgactgccacctcactccacctccaaata

SEQ ID NO: 623796 - DNA, 120 bp, Artificial Sequence
  ENSG00000178295_88 (sequence is synthesized)
aattgatgttgaaattctggcctccggtaatggaattctttacatcaaagtcactttttatttctaaaagtaatcacatatatattatattcctactgtggcccttgccatggatcaacg

SEQ ID NO: 623797 - DNA, 120 bp, Artificial Sequence
  ENSG00000178295_89 (sequence is synthesized)
aaaaatatgacatagtcaaaatagaccaaaacatctggccttgttgtaaccaatgggaaacacggttgggaggtccctacttacatgtcacttgcttcaggaaccgttccttgattccta

SEQ ID NO: 623798 - DNA, 120 bp, Artificial Sequence
  ENSG00000178295_90 (sequence is synthesized)
agtgggggaccttttttcctaaatacaactatagcttgctttcttacctcttaagccctttttatctgcagtctcacttaccctactaaggtctttaaatgcagggcttgatcttccatt

SEQ ID NO: 623799 - DNA, 120 bp, Artificial Sequence
  ENSG00000178295_91 (sequence is synthesized)
attgtatctccagcacctataaagctttcctgttaaatagtagacatttaataagtatttattgataaacgtgaagtatgcctcaacgtttaggctaaattcatatgaaaataaaattga

SEQ ID NO: 623800 - DNA, 120 bp, Artificial Sequence
  ENSG00000178295_92 (sequence is synthesized)
aaaaataattttaaagaacagcattagttactgagattatgtggtaaatcccttaaaatataatcttgcattgaaatagttttcaccatttaccagtctttatatgaatatatactcatc

SEQ ID NO: 623801 - DNA, 120 bp, Artificial Sequence
  ENSG00000178295_93 (sequence is synthesized)
taaatggaaattgggaaatttaagcattttctgcttttccgaagtaaattttctaatgtttttcttaaagctgaactaaattgcaaaacttgctttaataaagtgtgtatttttgcatca

SEQ ID NO: 623802 - DNA, 120 bp, Artificial Sequence
  ENSG00000178295_94 (sequence is synthesized)
cctttatggggcccagactgtttacaggaatttcactatgaatacaaaggtgtttattttctttctctttttcagcatttgtttacgaactaccttttttaaagggctgattaaatgaaa

SEQ ID NO: 623803 - DNA, 120 bp, Artificial Sequence
  ENSG00000178297_0 (sequence is synthesized)
atggagcccactgtggctgacgtacacctcgtgcccaggacaaccaaggaagtccccgctctggatgccgcgtgctgtcgagcggccagcattggcgtggtggccaccagccttgtcgtc

SEQ ID NO: 623804 - DNA, 120 bp, Artificial Sequence
  ENSG00000178297_1 (sequence is synthesized)
ctcaccctgggagtccttttggccttcctctctacacagggcttccacgtggaccacacggccgagctgcggggaatccggtggaccagcagtttgcggcgggagacctcggactatcac

SEQ ID NO: 623805 - DNA, 120 bp, Artificial Sequence
  ENSG00000178297_2 (sequence is synthesized)
cgcacgctgacgcccaccctggaggcactgctgcactttctgctgcgacccctccagacgctgagcctgggcctggaggaggagctattgcagcgagggatccgggcaaggctgcgggag

SEQ ID NO: 623806 - DNA, 120 bp, Artificial Sequence
  ENSG00000178297_3 (sequence is synthesized)
cacggcatctccctggctgcctatggcacaattgtgtcggctgagctcacagggagacataagggacccttggcagaaagagacttcaaatcaggccgctgtccagggaactccttttcc

SEQ ID NO: 623807 - DNA, 120 bp, Artificial Sequence
  ENSG00000178297_4 (sequence is synthesized)
tgcgggaacagccagtgtgtgaccaaggtgaacccggagtgtgacgaccaggaggactgctccgatgggtccgacgaggcgcactgcgagtgtggcttgcagcctgcctggaggatggcc

SEQ ID NO: 623808 - DNA, 120 bp, Artificial Sequence
  ENSG00000178297_5 (sequence is synthesized)
ggcaggatcgtgggcggcatggaagcatccccgggggagtttccgtggcaagccagccttcgagagaacaaggagcacttctgtggggccgccatcatcaacgccaggtggctggtgtct

SEQ ID NO: 623809 - DNA, 120 bp, Artificial Sequence
  ENSG00000178297_6 (sequence is synthesized)
gctgctcactgcttcaatgagttccaagacccgacgaagtgggtggcctacgtgggtgcgacctacctcagcggctcggaggccagcaccgtgcgggcccaggtggtccagatcgtcaag

SEQ ID NO: 623810 - DNA, 120 bp, Artificial Sequence
  ENSG00000178297_7 (sequence is synthesized)
caccccctgtacaacgcggacacggccgactttgacgtggctgtgctggagctgaccagccctctgcctttcggccggcacatccagcccgtgtgcctcccggctgccacacacatcttc

SEQ ID NO: 623811 - DNA, 120 bp, Artificial Sequence
  ENSG00000178297_8 (sequence is synthesized)
ccacccagcaagaagtgcctgatctcaggctggggctacctcaaggaggacttcctggtcaagccagaggtgctgcagaaagccactgtggagctgctggaccaggcactgtgtgccagc

SEQ ID NO: 623812 - DNA, 120 bp, Artificial Sequence
  ENSG00000178297_9 (sequence is synthesized)
ttgtacggccattcactcactgacaggatggtgtgcgctggctacctggacgggaaggtggactcctgccagggtgactcaggaggacccctggtctgcgaggagccctctggccggttc

SEQ ID NO: 623813 - DNA, 120 bp, Artificial Sequence
  ENSG00000178297_10 (sequence is synthesized)
tttctggctggcatcgtgagctggggaatcgggtgtgcggaagcccggcgtccaggggtctatgcccgagtcaccaggctacgtgactggatcctggaggccaccaccaaagccagcatg

SEQ ID NO: 623814 - DNA, 120 bp, Artificial Sequence
  ENSG00000178297_11 (sequence is synthesized)
cctctggcccccaccatggctcctgcccctgccgcccccagcacagcctggcccaccagtcctgagagccctgtggtcagcacccccaccaaatcgatgcaggccctcagtaccgtgcct

SEQ ID NO: 623815 - DNA, 120 bp, Artificial Sequence
  ENSG00000178297_12 (sequence is synthesized)
cttgactgggtcaccgttcctaagctacaagaatgtggggccaggcctgcaatggagaagcccacccgggtcgtgggcgggttcggagctgcctccggggaggtgccctggcaggtcagc

SEQ ID NO: 623816 - DNA, 120 bp, Artificial Sequence
  ENSG00000178297_13 (sequence is synthesized)
tctgccgcccactgcttcaaccacacgaaggtggagcaggttcgggcccacctgggcactgcgtccctcctgggcctgggcgggagcccggtgaagatcgggctgcggcgggtagtgctg

SEQ ID NO: 623817 - DNA, 120 bp, Artificial Sequence
  ENSG00000178297_14 (sequence is synthesized)
caccccctctacaaccctggcatcctggacttcgacctggctgtcctggagctggccagccccctggccttcaacaaatacatccagcctgtctgcctgcccctggccatccagaagttc

SEQ ID NO: 623818 - DNA, 120 bp, Artificial Sequence
  ENSG00000178297_15 (sequence is synthesized)
cctgtgggccggaagtgcatgatctccggatggggaaatacgcaggaaggaaatgccaccaagcccgagctcctgcagaaggcgtccgtgggcatcatagaccagaaaacctgtagtgtg

SEQ ID NO: 623819 - DNA, 120 bp, Artificial Sequence
  ENSG00000178297_16 (sequence is synthesized)
ctctacaacttctccctcacagaccgcatgatctgcgcaggcttcctggaaggcaaagtcgactcctgccagggtgactctgggggccccctggcctgcgaggaggcccctggcgtgttt

SEQ ID NO: 623820 - DNA, 120 bp, Artificial Sequence
  ENSG00000178297_17 (sequence is synthesized)
tatctggcagggatcgtgagctggggtattggctgcgctcaggttaagaagccgggcgtgtacacgcgcatcaccaggctaaagggctggatcctggagatcatgtcctcccagcccctt

SEQ ID NO: 623821 - DNA, 120 bp, Artificial Sequence
  ENSG00000178297_18 (sequence is synthesized)
cccatgtctcccccctcgaccacaaggatgctggccaccaccagccccaggacgacagctggcctcacagtcccgggggccacacccagcagacccacccctggggctgccagcagggtg

SEQ ID NO: 623822 - DNA, 120 bp, Artificial Sequence
  ENSG00000178297_19 (sequence is synthesized)
acgggccaacctgccaactcaaccttatctgccgtgagcaccactgctaggggacagacgccatttccagacgccccggaggccaccacacacacccagctaccagactgtggcctggcg

SEQ ID NO: 623823 - DNA, 120 bp, Artificial Sequence
  ENSG00000178297_20 (sequence is synthesized)
ccggccgcgctcaccaggattgtgggcggcagcgcagcgggccgtggggagtggccgtggcaggtgagcctgtggctgcggcgccgggaacaccgttgcggggccgtgctggtggcagag

SEQ ID NO: 623824 - DNA, 120 bp, Artificial Sequence
  ENSG00000178297_21 (sequence is synthesized)
aggtggctgctgtcggcggcgcactgcttcgacgtctacggggaccccaagcagtgggcggccttcctaggcacgccgttcctgagcggcgcggaggggcagctggagcgcgtggcgcgc

SEQ ID NO: 623825 - DNA, 120 bp, Artificial Sequence
  ENSG00000178297_22 (sequence is synthesized)
atctacaagcacccgttctacaatctctacacgctcgactacgacgtggcgctgctggagctggcggggccggtgcgtcgcagccgcctggtgcgtcccatctgcctgcccgagcccgcg

SEQ ID NO: 623826 - DNA, 120 bp, Artificial Sequence
  ENSG00000178297_23 (sequence is synthesized)
ccgcgacccccggacggcacgcgctgcgtcatcaccggctggggctcggtgcgcgaaggaggctccatggcgcggcagctgcagaaggcggccgtgcgcctcctcagcgagcagacctgc

SEQ ID NO: 623827 - DNA, 120 bp, Artificial Sequence
  ENSG00000178297_24 (sequence is synthesized)
cgccgcttctacccagtgcagatcagcagccgcatgctgtgtgccggcttcccgcagggtggcgtggacagctgctcgggtgacgctgggggacccctggcctgcagggagccctctgga

SEQ ID NO: 623828 - DNA, 120 bp, Artificial Sequence
  ENSG00000178297_25 (sequence is synthesized)
cggtgggtgctaactggggtcactagctggggctatggctgtggccggccccacttcccaggtgtctatacccgggtggcagctgtgagaggctggataggacagcacatccaggagtga

SEQ ID NO: 623829 - DNA, 120 bp, Artificial Sequence
  ENSG00000178297_26 (sequence is synthesized)
ccacttcggggtgggcgggatccgggcagtagcggtgcagcctcgtcgtccggagcgcggtgagtcggggtctcctgcgggctcagcctcccctcggaacagcccccacttcctccaacc

SEQ ID NO: 623830 - DNA, 120 bp, Artificial Sequence
  ENSG00000178297_27 (sequence is synthesized)
cgtgaaagcaacaggagcagcaggccacccaacaccccaccccaccgtaccctacccaaggacgggtgtgggggggctgtgggtcatggggatgcattttggtaccaccctttgttccaa

SEQ ID NO: 623831 - DNA, 120 bp, Artificial Sequence
  ENSG00000178297_28 (sequence is synthesized)
tcgtcatagtatcttcataattttggatcttcctgttcaaggaaaggtcacatgtgtatccgtttattcccatcttacgttgcgtgtaccctcatggtatctttctgtccacaggtcttg

SEQ ID NO: 623832 - DNA, 120 bp, Artificial Sequence
  ENSG00000178297_29 (sequence is synthesized)
agatcctgggccaggcactgcatgggagacaggcatgagcaggacctctttctgccttcgaggaaaacacgggggcatctggggctcacttggcactcatccaccttgtgctgtacctgg

SEQ ID NO: 623833 - DNA, 120 bp, Artificial Sequence
  ENSG00000178297_30 (sequence is synthesized)
atgcttttgggaattgagggagagccctgtgagtagctattcagggctatcacgggggcgtcgaccaccccactgcgtgtcaggagtgaccaccagggtgtggcttccacgtggaccaca

SEQ ID NO: 623834 - DNA, 120 bp, Artificial Sequence
  ENSG00000178297_31 (sequence is synthesized)
aaaagagactcataaagctgtagggggttgggggggggcattggcacaggtgtagaaaatgaagcctgagggtcccctgacttgtccgaggtcccccagcttgggatccttttcaggagg

SEQ ID NO: 623835 - DNA, 120 bp, Artificial Sequence
  ENSG00000178297_32 (sequence is synthesized)
agcccagcagcccctctttccctggtcctcctccctggagccgaaggtcagaggatggtcctggggcccaggcagccctgtgtggcttcctgggggtgtgcatcagccctgtccctcccc

SEQ ID NO: 623836 - DNA, 120 bp, Artificial Sequence
  ENSG00000178301_0 (sequence is synthesized)
agagccggagcccgcaacccgctcaggcggcgacggagccatgtcgccgctgctggggctccggtccgagctgcaggacacctgcacctcgctgggactgatgctgtcggtggtgctgct

SEQ ID NO: 623837 - DNA, 120 bp, Artificial Sequence
  ENSG00000178301_1 (sequence is synthesized)
catggggctggcccgcgtagtcgcccggcagcagctgcacaggccggtggcccacgccttcgtcctggagtttctagccaccttccagctctgctgctgcacccacgagctgcaactgct

SEQ ID NO: 623838 - DNA, 120 bp, Artificial Sequence
  ENSG00000178301_2 (sequence is synthesized)
gagcgaacagcaccccgcgcaccccacctggacgctgacgctcgtctacttcttctcgcttgtgcatggcctgactctggtgggcacgtccagcaacccgtgcggcgtgatgatgcagat

SEQ ID NO: 623839 - DNA, 120 bp, Artificial Sequence
  ENSG00000178301_3 (sequence is synthesized)
gatgctggggggcatgtcccccgagacgggtgcggtgaggctattggctcagctggttagtgccctgtgcagcaggtactgcacaagcgccttgtggagcttgggtctgacccagtatca

SEQ ID NO: 623840 - DNA, 120 bp, Artificial Sequence
  ENSG00000178301_4 (sequence is synthesized)
cgtcagcgagaggagcttcgcttgcaagaatcccatccgagtcgacttgctcaaagcggtcatcacagaggccgtctgctcctttctcttccacagcgctctgctgcacttccaggaagt

SEQ ID NO: 623841 - DNA, 120 bp, Artificial Sequence
  ENSG00000178301_5 (sequence is synthesized)
ccgaaccaagcttcgtatccacctgctggctgcactcatcacctttttggtctatgcaggaggaagtctaacaggagctgtatttaatccagctttggcactttcgctacatttcatgtg

SEQ ID NO: 623842 - DNA, 120 bp, Artificial Sequence
  ENSG00000178301_6 (sequence is synthesized)
ttttgatgaagcattccctcagttttttatagtatactggctggctccttctttaggtatattgttgatgattttgatgttcagctttttccttccatggctgcataacaaccatacaat

SEQ ID NO: 623843 - DNA, 120 bp, Artificial Sequence
  ENSG00000178301_7 (sequence is synthesized)
taacatacaggacagtccagctggatgtgataaagattttatcacctcatatggaaaacaccggctgcactggattcatcagtgttaacttcctttgaggaagctgccttatagttttca

SEQ ID NO: 623844 - DNA, 120 bp, Artificial Sequence
  ENSG00000178301_8 (sequence is synthesized)
tcactgggactttaaaaaaaaattactgtgaaaatgaggtattctgtacttctcagttaagacttgttctttgagtgatgtattaaatgctgctagaaaagcctcattacattaaatata

SEQ ID NO: 623845 - DNA, 120 bp, Artificial Sequence
  ENSG00000178301_9 (sequence is synthesized)
aatcaatcttaaatgataattgttaactttgatgaaaaacgagtacaggatgagaagggaagtaaaggtgatagtaagatcaacgaatttgtgtatcaagtgtcacccaaatgaacagaa

SEQ ID NO: 623846 - DNA, 120 bp, Artificial Sequence
  ENSG00000178301_10 (sequence is synthesized)
tttttaactataaaagtacaaggcgtcaacttacagaactggggagaggatactttcagccaccacctcacaaaatgataccatcaagcagtgtcatctttcaacaggaaagttgctttt

SEQ ID NO: 623847 - DNA, 120 bp, Artificial Sequence
  ENSG00000178301_11 (sequence is synthesized)
agaagtagaatatatattcactcacatgcaagcgatttcctacattttaagtacattaaaatctaatacctaaaatagtttctctaaatagacaatctcactagctccagccaagtggtt

SEQ ID NO: 623848 - DNA, 120 bp, Artificial Sequence
  ENSG00000178301_12 (sequence is synthesized)
attctttaatagaatataataaaacaaaacacccatacaaagtcaggatttaagcttttcacattctcctttgaaccaacagctagctaccttatgaagtagggagggcatgtattttta

SEQ ID NO: 623849 - DNA, 120 bp, Artificial Sequence
  ENSG00000178301_13 (sequence is synthesized)
atctccattttacagataaggaaactaagcctagatgggtttgctgccctggcttagatcacatagagccaaataccatctctagtcttcaacttcaatccaaaaattcttctcggtcac

SEQ ID NO: 623850 - DNA, 120 bp, Artificial Sequence
  ENSG00000178301_14 (sequence is synthesized)
gattatgactaaagggaaatcaagggttcatagaaacattaaatactttataataacgttaaaacttgtttagaaattaactagtattttttgaggtttaaagaaccttccagttttact

SEQ ID NO: 623851 - DNA, 120 bp, Artificial Sequence
  ENSG00000178301_15 (sequence is synthesized)
aaaaacgaggtggctatgtgagatggccttcagcggtctttccagctccacggttttacagtgtggagcggggaaagaaaaactctaaggtcctcgctgcaaagcaaccatcagagctcc

SEQ ID NO: 623852 - DNA, 120 bp, Artificial Sequence
  ENSG00000178301_16 (sequence is synthesized)
agagctccgccgcgccgtgccgctcctctccgccccgtggtccgggtgtcaccgcccgcaggggcgcaagggccgcagcacgcgtgcgcagtgggcaccaagagcgctgcgtcgaccgcg

SEQ ID NO: 623853 - DNA, 120 bp, Artificial Sequence
  ENSG00000178307_0 (sequence is synthesized)
cgcggaggggcccggcgctagtagcccgcagacagcgcggcggcccccagcgggagaggcagcctggcggccaggacagcgcggccgggcgcctccgcgcagtgctctgggagttgtagg

SEQ ID NO: 623854 - DNA, 120 bp, Artificial Sequence
  ENSG00000178307_1 (sequence is synthesized)
cacttgcctctcctctctccttcagctactggctctcgaaactcaaggacctaccggtgggtgggcgcctgtgactcccaggctgcgaacgccgggaactcagtttcttcagaaatgctc

SEQ ID NO: 623855 - DNA, 120 bp, Artificial Sequence
  ENSG00000178307_2 (sequence is synthesized)
gaaccaggacggctcctggagtcctcgcgccctcgcagaaggactacgggccccggcgaccccgggggcggggcttccggcgcgctgccttgtgggcacggtagttccgccgggtctggc

SEQ ID NO: 623856 - DNA, 120 bp, Artificial Sequence
  ENSG00000178307_3 (sequence is synthesized)
ttccgcctgccgagcggccccggaccgcaggccggactacacttcccgtcggcccgcctgctctcccgatgccgccttggcgcgagacgttggcaagcagagtgtctccaagatggccgc

SEQ ID NO: 623857 - DNA, 120 bp, Artificial Sequence
  ENSG00000178307_4 (sequence is synthesized)
ttggggaaggaggcgtcttggcccgggcagcagtggcggcagcgcccgagagagggtgagcttgtcggccacagactgctacattgtgcatgagatctacaatggggagaatgcccaaga

SEQ ID NO: 623858 - DNA, 120 bp, Artificial Sequence
  ENSG00000178307_5 (sequence is synthesized)
ccagtttgagtacgagctggagcaggccctggaagcccagtacaagtacattgtgattgagcccactcgcattggcgacgagacagcccgctggatcaccgtgggcaactgcctgcacaa

SEQ ID NO: 623859 - DNA, 120 bp, Artificial Sequence
  ENSG00000178307_6 (sequence is synthesized)
gacggccgtgctggcgggcaccgcctgcctcttcaccccgttggcgctgcccttagattattcccactacatttccctgcccgctggtgtgctgagcctggcctgctgcaccctctatgg

SEQ ID NO: 623860 - DNA, 120 bp, Artificial Sequence
  ENSG00000178307_7 (sequence is synthesized)
gatctcctggcagtttgacccttgctgcaagtaccaagtggagtacgacgcctataaactgtcgcgcctgcctctgcacacactcacctcctccaccccggtggtgctggtccggaagga

SEQ ID NO: 623861 - DNA, 120 bp, Artificial Sequence
  ENSG00000178307_8 (sequence is synthesized)
tgtgtaaagaagatttacgaactctatgccgtatgatttcagtagaacagggagcgaagcaaaaccacccggcccacaagagacaacagagtattcagatcgccacactctgtgaggcag

SEQ ID NO: 623862 - DNA, 120 bp, Artificial Sequence
  ENSG00000178307_9 (sequence is synthesized)
cagagcctgggcaggtgtttggcttagtatttgttatttttaaaaaataacagatcacgggtgtacccagggtttttcagctcattacactaagatgtggatttccataacccaagaggg

SEQ ID NO: 623863 - DNA, 120 bp, Artificial Sequence
  ENSG00000178307_10 (sequence is synthesized)
gggtctgaggctgtggaagtccgactgggcagtggaatgctgatggaggcagacgctgccgagggggtgtggacgtgctttgggggaggtctttaagtctattgtttaactgtaccatcc

SEQ ID NO: 623864 - DNA, 120 bp, Artificial Sequence
  ENSG00000178307_11 (sequence is synthesized)
agagcccaccagaagctattgatcattaaaattatgagaatttcaactcccgctgttctctctttccatgactgcccgcagctgctgctgcacatctgctctgggtggcggcttgcacat

SEQ ID NO: 623865 - DNA, 120 bp, Artificial Sequence
  ENSG00000178307_12 (sequence is synthesized)
ggaaggagcaggtgccatggtagccaccctgccctgctcctagctgcggcccagtgttaccacttacagcgacgacaagcctagatccaaggtagtcctggggccaaaccccgcccagga

SEQ ID NO: 623866 - DNA, 120 bp, Artificial Sequence
  ENSG00000178307_13 (sequence is synthesized)
gcagtctcctggctcaccttggcctcatcattccgaaggccatcactgccaccatgctgttcaggaacatggtaggataaggtgacgaggcttggaggcctttgggtgtccacttgagtt

SEQ ID NO: 623867 - DNA, 120 bp, Artificial Sequence
  ENSG00000178307_14 (sequence is synthesized)
cacgtggggaactctgggctccaggatcgctcttcagagatctgaacacctgtgttttctttgaagcaccaaaactcttcctactgtggaccatgagtttattaacccattgccctaggc

SEQ ID NO: 623868 - DNA, 120 bp, Artificial Sequence
  ENSG00000178307_15 (sequence is synthesized)
tgacagaagagccctcggagcaatcttggaagcaccccctggcctcagtgctcgctgttccacaggagccaagccggtgcttctccctcacaccagaaggtagactgtgtcacctgccac

SEQ ID NO: 623869 - DNA, 120 bp, Artificial Sequence
  ENSG00000178307_16 (sequence is synthesized)
ttctccctcacaccagaaggtagactgtgtcacctgccacatttcctctaaggcaggggtggccaatcttgacttccctgtgccacattggaaaaagaattgtcttggaccacacataaa

SEQ ID NO: 623870 - DNA, 120 bp, Artificial Sequence
  ENSG00000178307_17 (sequence is synthesized)
gcgaggtcgaaggcctcggcggagagcttaggggaaggggcgttagccgggctgagtaaggtaggcagcggccatgcggggcggggcccgaggccgggccgtgctgaaaggaactggcgc

SEQ ID NO: 623871 - DNA, 120 bp, Artificial Sequence
  ENSG00000178307_18 (sequence is synthesized)
ccagcgcaggcctcagggacccgcctagctgcccgcgggccgatcggctgctgaagcacccttcccgcctgggcacgcgcgtggccatctcggccgcggccccagacgtgtagaggaagg

SEQ ID NO: 623872 - DNA, 120 bp, Artificial Sequence
  ENSG00000178307_19 (sequence is synthesized)
cagggcccccggagagagaaagaaggggaagccttcacagagcaggccggccgcggcaggggtagtttgatctgcacgtttactagggagctttagctcccgccagatgtgtctcttccg

SEQ ID NO: 623873 - DNA, 120 bp, Artificial Sequence
  ENSG00000178307_20 (sequence is synthesized)
agcccagagccggccacttcctcgagggaagattctgaagacttttggatggttctgtgcaagcgctcctgccgtagaagtcctttaaagtgacctttcctaatgaatgggaaccaacag

SEQ ID NO: 623874 - DNA, 120 bp, Artificial Sequence
  ENSG00000178307_21 (sequence is synthesized)
tgtttgtaatgaagaacatcagactctgagctgtaacctgaattcttgtccaaaattcagcacactggcaacgagcacatcaaacagattgccacttgtcctgtcggcgtctttgagaca

SEQ ID NO: 623875 - DNA, 120 bp, Artificial Sequence
  ENSG00000178307_22 (sequence is synthesized)
cacttgcccatctaggaaagcacagtgcaggtatctgtgttctgccaccgtgtgccagcccggaccagctcacagacagccctgcctgtcttacttgggctgctcggcttcactgtctca

SEQ ID NO: 623876 - DNA, 120 bp, Artificial Sequence
  ENSG00000178307_23 (sequence is synthesized)
ttccgtgtttcatgttcaagttgcagtttttgcatctgggaagcagtttcagctagtggaaaccactagaagctgttcagccactagaaatttgggagaagatgtattggtggagccacc

SEQ ID NO: 623877 - DNA, 120 bp, Artificial Sequence
  ENSG00000178307_24 (sequence is synthesized)
tggattaactgtccgctaaagcttgattgttatagcagcggtcagcaaaaaaggaaaagtttttgttttgctggttctccccctccccgtctttttgggtgagcttgtcggccacagact

SEQ ID NO: 623878 - DNA, 120 bp, Artificial Sequence
  ENSG00000178338_0 (sequence is synthesized)
agcggccgccttgctcctctaggtcccaggcgctctgcggagctttcgctgcccggtgagcggcgccgggcttgaggtcgcccagacgtcggaggagccgggtcacgaggctggagcttc

SEQ ID NO: 623879 - DNA, 120 bp, Artificial Sequence
  ENSG00000178338_1 (sequence is synthesized)
ctgcttgcagagtgcggcggggaggcgcggcccgggaacgcgggatcctggggagatctgccttctggagactgcgccgtcctcccgggagagccagaaagaggacatggctgctgggca

SEQ ID NO: 623880 - DNA, 120 bp, Artificial Sequence
  ENSG00000178338_2 (sequence is synthesized)
gcgggaagcgaggccccaggtgtcactgacattcgaggacgtggctgtgctctttacctgggatgagtggagaaagctggctccttctcagagaaacttgtaccgggatgtgatgctgga

SEQ ID NO: 623881 - DNA, 120 bp, Artificial Sequence
  ENSG00000178338_3 (sequence is synthesized)
gaactataggaacctggtctcactgggactctcatttaccaaaccaaaagtcatctccctgttgcagcaaggagaagatccctgggaggtggagaaagacagttctggtgtctcctctct

SEQ ID NO: 623882 - DNA, 120 bp, Artificial Sequence
  ENSG00000178338_4 (sequence is synthesized)
aggatgtaagagcacacctaaaatgacaaagtcaactcaaactcaggattcatttcaggagcagataaggaaaagattgaaaagggatgaaccctggaacttcatatcagaaagatcctg

SEQ ID NO: 623883 - DNA, 120 bp, Artificial Sequence
  ENSG00000178338_5 (sequence is synthesized)
catatatgaagagaaattaaagaaacagcaggacaaaaatgaaaatttacaaataatttcagttgcccatacaaaaatccttactgtagatagaagccataaaaatgttgaatttggcca

SEQ ID NO: 623884 - DNA, 120 bp, Artificial Sequence
  ENSG00000178338_6 (sequence is synthesized)
aaacttctacctgaaatcagtcttcattaagcaacagagatttgctaaagaaaaaactccatcaaaatgtgaaatacaaagaaatagtttcaagcagaattcaaatttacttaaccaatc

SEQ ID NO: 623885 - DNA, 120 bp, Artificial Sequence
  ENSG00000178338_7 (sequence is synthesized)
aaaaatcaaaacagcagagaaacgctataaatgcagtacatgtgaaaaagccttcattcacaattcatcccttcgtaaacatcagaaaaaccacactggagaaaaattatttaaatgtaa

SEQ ID NO: 623886 - DNA, 120 bp, Artificial Sequence
  ENSG00000178338_8 (sequence is synthesized)
agaatgtttaaaagctttcagccaaagttctgctcttattcaacatcaaagaactcatacaggagagaaaccctatatatgtaaagaatgtgggaaagccttcagccatagtgcatccct

SEQ ID NO: 623887 - DNA, 120 bp, Artificial Sequence
  ENSG00000178338_9 (sequence is synthesized)
ttgtaagcatttaaggacccatactgtggagaaatgctatagatgtaaagaatgtggtaaatccttcagtcgaaggtctgggctttttatacatcaaaaaatccatgctcaagaaaatcc

SEQ ID NO: 623888 - DNA, 120 bp, Artificial Sequence
  ENSG00000178338_10 (sequence is synthesized)
ccataaatacaatccaggcaggaaggcatccagttacagcacttccctttctggaagtcagaaaattcatctcagaaagaagtcctacttatgtaatgaatgtggcaacacctttaagtc

SEQ ID NO: 623889 - DNA, 120 bp, Artificial Sequence
  ENSG00000178338_11 (sequence is synthesized)
actggagagaagccttttaaatgtagtgaatgtgggagagccttcagccagagtgcctctcttattcaacatgaaagaattcacaccggagaaaagccctatagatgcaatgaatgtggg

SEQ ID NO: 623890 - DNA, 120 bp, Artificial Sequence
  ENSG00000178338_12 (sequence is synthesized)
aaaggctttacttctatttcacgacttaatagacaccgaataattcatactggagagaaattgtataattgtaatgaatgtggtaaagccttaagctcccactcaacacttattattcat

SEQ ID NO: 623891 - DNA, 120 bp, Artificial Sequence
  ENSG00000178338_13 (sequence is synthesized)
gagcgaattcatactggagaaaaaccatgtaaatgtaaagtatgtggaaaagccttcagacagagttccgctctcattcaacatcagagaatgcatactggagaaagaccctataagtgt

SEQ ID NO: 623892 - DNA, 120 bp, Artificial Sequence
  ENSG00000178338_14 (sequence is synthesized)
aacgaatgtgacaaaacattcaggtgtaactcatcgcttagtaatcaccagagaattcatactggagagaaaccatatcgatgtttagaatgtgggatgtcttttggccaaagtgcagct

SEQ ID NO: 623893 - DNA, 120 bp, Artificial Sequence
  ENSG00000178338_15 (sequence is synthesized)
cttatacaacatcagaggattcatacaggagaaaaaccctttaaatgtaatacatgtggaaaaacttttagacaaagctcatcacttattgcacatcaaagaattcatactggagagaaa

SEQ ID NO: 623894 - DNA, 120 bp, Artificial Sequence
  ENSG00000178338_16 (sequence is synthesized)
ccctatgaatgtaatgcatgtgggaaactctttagccagaggtcatcccttactaatcattataaaattcacattgaagaggactccttaaaagccgatttgcatgtgtgaaagccttaa

SEQ ID NO: 623895 - DNA, 120 bp, Artificial Sequence
  ENSG00000178338_17 (sequence is synthesized)
accaaaactcatcagagaatacatgcttgagagtgatttattaaatataatgaatatgagaaaactcttagttctcatcagatactaagttttaagaataaactttagctatgtaataac

SEQ ID NO: 623896 - DNA, 120 bp, Artificial Sequence
  ENSG00000178338_18 (sequence is synthesized)
ttatgggaaaagcttttatacttgtcactcactttttaaaatatcccgagacagttcactgttgcagacattgaaattggccatttgtaagataaaaggtatgtttataaaatctcttta

SEQ ID NO: 623897 - DNA, 120 bp, Artificial Sequence
  ENSG00000178338_19 (sequence is synthesized)
tataatatatgctatctatgacatgcaaaaaagaaaagtctgggtgctgaggtgctgaatttttcattagaaaaacatttgtataaactactattatataaatataagcatatttattac

SEQ ID NO: 623898 - DNA, 120 bp, Artificial Sequence
  ENSG00000178338_20 (sequence is synthesized)
agcaaacattttaatagcaaacaaaacaattgatcttaaaaatatatgcaatatatacttacctggcagggaagattaccatgatcacgaaggtggttttcccagggcaaggcttatcca

SEQ ID NO: 623899 - DNA, 120 bp, Artificial Sequence
  ENSG00000178338_21 (sequence is synthesized)
ttgcactccagatgtgctgaccccttcaatttcccaaaatgtggaaaactcaactgcataatttatggtagtgggggactacattcgcactttctcctgaaatatatatatatatgcagt

SEQ ID NO: 623900 - DNA, 120 bp, Artificial Sequence
  ENSG00000178338_22 (sequence is synthesized)
attagagcaaaggaccaataagagataaaaactaactgaactacctcttagtgcctggaatttaccttttcctgacttactgtcaaacttcgtgcatggcttttattaaaaaagaaaaaa

SEQ ID NO: 623901 - DNA, 120 bp, Artificial Sequence
  ENSG00000178338_23 (sequence is synthesized)
atgcagaaatatggaagactaaccaagcagaccaggagagaccagcaatagtgtcccagagaccatgatgtctgagcccagttttggaagaatagtaggctgggcatggtggctcacacc

SEQ ID NO: 623902 - DNA, 120 bp, Artificial Sequence
  ENSG00000178338_24 (sequence is synthesized)
atcccagcactttgggaggccaagacaagaggattgcttgagcccaggaaggagttggagaccagcctgagcaacaacaacaacaaaattagccaggcatagtggtgcacatctgtagtc

SEQ ID NO: 623903 - DNA, 71 bp, Artificial Sequence
  ENSG00000178338_25 (sequence is synthesized)
gagctttggggaaagagcaagactctgcctcccccacatgcgcccccccacccctgcccctgccagaaaaa

SEQ ID NO: 623904 - DNA, 120 bp, Artificial Sequence
  ENSG00000178338_26 (sequence is synthesized)
ccccacatgcgcccccccacccctgcccctgccagaaaaattgtttgtggatccctgttatcagaataaggacattccctcatattcctagtgtgatgtgagtttttatcataaaaggga

SEQ ID NO: 623905 - DNA, 120 bp, Artificial Sequence
  ENSG00000178338_27 (sequence is synthesized)
gtagtattttgtcatgtccattttctgcattggttgaaatgatcattttgtttttctcttcattcttttaatagataattgtttgaattttggtgttaaccaatgtttcattcctgaaat

SEQ ID NO: 623906 - DNA, 120 bp, Artificial Sequence
  ENSG00000178338_28 (sequence is synthesized)
gtgcagtgggtgctggcagtgccagctggcgccgaggaactcagcggcgtggggcgagccctggccctggtgggctcagcgggtcgctgctgccactgcgggtccagcgtcccctccgta

SEQ ID NO: 623907 - DNA, 120 bp, Artificial Sequence; identical to SEQ ID NO: 557530
  ENSG00000178338_29 (sequence is synthesized)

SEQ ID NO: 623908 - DNA, 120 bp, Artificial Sequence
  ENSG00000178338_30 (sequence is synthesized)
ggttttagagctgcggattccagggctggaaagcagaaggggttcttcctggctccctttttcttctcagatctgccttctggagactgcgccgtcctcccgggagagccagaaagagga

SEQ ID NO: 623909 - DNA, 80 bp, Artificial Sequence
  ENSG00000178342_0 (sequence is synthesized)
atggagccatggccctgctccccgggcggcggcggcgggacccgcgcccggcacgtcatcatcaacgtgggcggctgccg

SEQ ID NO: 623910 - DNA, 120 bp, Artificial Sequence
  ENSG00000178342_1 (sequence is synthesized)
gcgcgcctggagcgcctgcgcgcctgccgcggccacgacgacctgctgcgcgtgtgtgacgactacgacgtgagccgcgacgagttcttcttcgaccgcagcccgtgcgccttccgcgcc

SEQ ID NO: 623911 - DNA, 120 bp, Artificial Sequence
  ENSG00000178342_2 (sequence is synthesized)
atcgtggcgcttttgcgcgcagggaagctgcgactgctgcggggcccgtgcgcgctggccttccgcgacgagctggcctactggggcatcgacgaggcgcgcctggagcgctgctgcctg

SEQ ID NO: 623912 - DNA, 80 bp, Artificial Sequence
  ENSG00000178342_3 (sequence is synthesized)
ctggggcatcgacgaggcgcgcctggagcgctgctgcctgcgccgcctgcgccgccgcgaggaggaggcggccgaggccc

SEQ ID NO: 623913 - DNA, 120 bp, Artificial Sequence
  ENSG00000178342_4 (sequence is synthesized)
cggcgcctgcgcgacgtggtggacaacccgcactcggggctggcgggcaagctcttcgcctgcgtgtccgtgtccttcgtggccgtcacggccgtgggcctctgcctgagcaccatgccg

SEQ ID NO: 623914 - DNA, 120 bp, Artificial Sequence
  ENSG00000178342_5 (sequence is synthesized)
tggttctccttcgagttcctgctgcgctccctgcaggccgagagcaagtgcgccttcctgcgcgcgccactcaacatcattgacatcctggcgctcctgccgttctacgtgtcgctgctg

SEQ ID NO: 623915 - DNA, 120 bp, Artificial Sequence
  ENSG00000178342_6 (sequence is synthesized)
ctggggctggcggcaggcccgggcgggaccaagctcctggagcgcgcggggctggtgctgcggctgctgcgtgcgctgcgcgtgctctacgtgatgcgcctggcgcgccactcgctgggg

SEQ ID NO: 623916 - DNA, 120 bp, Artificial Sequence
  ENSG00000178342_7 (sequence is synthesized)
ctgcgttcgctgggcctgaccatgcgccgctgcgcgcgcgagttcgggctgctgctgctgttcctctgcgtggccatggcgctcttcgcgccactggtgcacctggccgagcgcgagctg

SEQ ID NO: 623917 - DNA, 120 bp, Artificial Sequence
  ENSG00000178342_8 (sequence is synthesized)
ggcgcgcgccgcgacttctccagcgtgcccgccagctattggtgggccgtcatctccatgaccaccgtgggctacggcgacatggtcccgcgcagcctgcccgggcaggtggtggcgctc

SEQ ID NO: 623918 - DNA, 120 bp, Artificial Sequence
  ENSG00000178342_9 (sequence is synthesized)
agcagcatcctcagcggcatcctgctcatggccttcccggtcacctccatcttccacaccttttcgcgctcctactccgagctcaaggagcagcagcagcgcgcggccagccccgagccg

SEQ ID NO: 623919 - DNA, 120 bp, Artificial Sequence
  ENSG00000178342_10 (sequence is synthesized)
gccctgcaggaggacagcacgcactcggccacagccaccgaggacagctcgcagggccccgacagcgcgggcctggccgacgactccgcggatgcgctgtgggtgcgggcagggcgctga

SEQ ID NO: 623920 - DNA, 120 bp, Artificial Sequence
  ENSG00000178342_11 (sequence is synthesized)
actgatgcagagttgggattgcttctttcctaaatcaaaattcctgttgagccagtaagaacagattctccactgcaccgatgtccggcacgcagtccccaggcgggcacactgcccagc

SEQ ID NO: 623921 - DNA, 120 bp, Artificial Sequence
  ENSG00000178342_12 (sequence is synthesized)
agcccagtggcaggagctcagagctgacttgcttcttgcccaggtctggggttggtgcagcgcccgcagctcacgggccacagcagcggaaggtctgcggcattttggaccttgctgttg

SEQ ID NO: 623922 - DNA, 120 bp, Artificial Sequence
  ENSG00000178342_13 (sequence is synthesized)
ccggggcagtgggtgttggcgccacatccaggacccatctcccgcctggtgccgctgccatcacagtgaagctggactgaaacccacagacaggtccagccctgccgggcaggcgtgatc

SEQ ID NO: 623923 - DNA, 120 bp, Artificial Sequence
  ENSG00000178342_14 (sequence is synthesized)
ccctccagctgcagcgtcgggacccccgaggtgcgccaaggggtggggggcgtctggcctgggggagcggctcctgccggccgcgtcctcggccctcgtgcgtgagcagccccagaactt

SEQ ID NO: 623924 - DNA, 120 bp, Artificial Sequence
  ENSG00000178342_15 (sequence is synthesized)
cgtgcgtgagcagccccagaacttggcggggccctgcctgactccccgtggcagcgctgggcaaagtcactggcctttgtcctcctgccccacccctttccttggatttttaattttcta

SEQ ID NO: 623925 - DNA, 120 bp, Artificial Sequence
  ENSG00000178342_16 (sequence is synthesized)
cgcctagctaaaaataaatttagtaagtccgagagattccacgcctgctgtggatgacttcatccccctgcctccagccagggaggagggagcacggcccctgccaagcccccatggcat

SEQ ID NO: 623926 - DNA, 120 bp, Artificial Sequence
  ENSG00000178343_0 (sequence is synthesized)
agcaaccccgcggccgtttgtacttggccgcggcggagctgactcctgctcctgtgacagataggggctggggctgagcggccgcctgtctggggtactcgcacgtggggaacaaattct

SEQ ID NO: 623927 - DNA, 120 bp, Artificial Sequence
  ENSG00000178343_1 (sequence is synthesized)
tttcctccggctcctctcgggacccggcgatcgccacaggttgggactctgtgcggcgctggagttggcagccccgggcgctatggctcccttgaggagtggggagggaggtggccgggg

SEQ ID NO: 623928 - DNA, 120 bp, Artificial Sequence
  ENSG00000178343_2 (sequence is synthesized)
cgcccctcgcgcggggagcgctatgagccgggcgaagggcggcagcgacagccccagcaactgcctctgccggcgcctcccgcaggccctcgccaactcgccccgcgcaccatgctgact

SEQ ID NO: 623929 - DNA, 120 bp, Artificial Sequence
  ENSG00000178343_3 (sequence is synthesized)
tgctgactcccggcctgcggaactcgtagtgcagcccctgtcgcctccccggcccctgctatcccacgcaggactggcttcggccgccggggccagcagcttgcgacgtgtccctgggga

SEQ ID NO: 623930 - DNA, 120 bp, Artificial Sequence
  ENSG00000178343_4 (sequence is synthesized)
ggcggaatcgctgtgcgccctgagcccgggctcagcccttcgctttccagctgcgtcctgctcccggccgcccagggagcccagtggcgatgagggcactgctggcgctttgccttctcc

SEQ ID NO: 623931 - DNA, 120 bp, Artificial Sequence
  ENSG00000178343_5 (sequence is synthesized)
ttggctggctgcgctggggcccggcgggcgcccagcagtccggagagtactgccacggctgggtggacgtgcagggcaactaccacgagggcttccagtgcccagaggacttcgacacgc

SEQ ID NO: 623932 - DNA, 120 bp, Artificial Sequence
  ENSG00000178343_6 (sequence is synthesized)
tggacgctaccatctgctgcggctcctgcgcgctccgctactgttgcgccgcggccgacgccaggctggagcagggcggctgcaccaacgaccgccgcgaactggagcacccaggcatca

SEQ ID NO: 623933 - DNA, 120 bp, Artificial Sequence
  ENSG00000178343_7 (sequence is synthesized)
ctgcgcagcctgtctacgtcccctttctcatcgtcggctccatcttcattgcgttcatcatcctgggctctgtagtggctatttattgttgcacctgtttgagacccaaggagccctcgc

SEQ ID NO: 623934 - DNA, 120 bp, Artificial Sequence
  ENSG00000178343_8 (sequence is synthesized)
agcagccaatccgcttctcactccgcagctatcagacagagaccctgcccatgatcctgacctccaccagccccagggcaccctcccggcagtccagcacagccacgagctccagctcca

SEQ ID NO: 623935 - DNA, 120 bp, Artificial Sequence
  ENSG00000178343_9 (sequence is synthesized)
cgggctgcctggtgccctcaccgcccccgccatacaccaccagccactcaatccacctggctcagccatctggtttcctggtgtcaccccagtatttcgcttaccccctccagcaggagc

SEQ ID NO: 623936 - DNA, 120 bp, Artificial Sequence
  ENSG00000178343_10 (sequence is synthesized)
ccccactgcctgggaagagctgtccagacttcagttccagttgacacgcccaggccatgaatccacaactcagtcagatggcagacaggtggagccctgctcccattgccacatgcaatt

SEQ ID NO: 623937 - DNA, 120 bp, Artificial Sequence
  ENSG00000178343_11 (sequence is synthesized)
ctgagaaaatttcccttgtaactgatcagtgtcatggaggagcatgctaggaaaacacagcaccttctaatttgaaagttcctgtctccaatcacagaaaggctaaaccagagaactgtt

SEQ ID NO: 623938 - DNA, 120 bp, Artificial Sequence
  ENSG00000178343_12 (sequence is synthesized)
ttctggttttgcaaacatgtgatcattacatttcaatctatgctacttttattcaaaatatgcagcagtttgactttaaagttgcaaactggctaaaaacgttttactggacattcagct

SEQ ID NO: 623939 - DNA, 120 bp, Artificial Sequence
  ENSG00000178343_13 (sequence is synthesized)
atattgcttagaaaagggctacatgtttctttttcatataagttgttcattgagttatgataggaatatattcataaataagcaaagaaaaatacctaattgtaattatcaaaggttcac

SEQ ID NO: 623940 - DNA, 120 bp, Artificial Sequence
  ENSG00000178343_14 (sequence is synthesized)
ttaaaaaattaactattaggtaaacttaagggggcagtgaaaaatctatttatgatttcgggagtaacctaaccatgaataatattagcataatgagaacatttactttttaaataaata

SEQ ID NO: 623941 - DNA, 120 bp, Artificial Sequence
  ENSG00000178343_15 (sequence is synthesized)
actaaattttgtttacaatatgagtttttccagaatacaaggtttcaataatcacatgaggagtttaaagttttaaatatatactcagacattcattgtaacacagagtgtatgtaaaat

SEQ ID NO: 623942 - DNA, 120 bp, Artificial Sequence
  ENSG00000178343_16 (sequence is synthesized)
catttcccccactcactggagggagtatttattgcagactttttgttcagcaacatttagtgtttcagtgaaagttggacagttggggcttaaaacatttatttgtaaaatgagctatgt

SEQ ID NO: 623943 - DNA, 120 bp, Artificial Sequence
  ENSG00000178343_17 (sequence is synthesized)
tcaaatgtaaatatttgtaatttaatgtatttaccacattgactgtactaattatttagtagtcatactgtaatttttatgttaataataactggagttcaaagtctagctattggtata

SEQ ID NO: 623944 - DNA, 120 bp, Artificial Sequence
  ENSG00000178343_18 (sequence is synthesized)
atcatctaatattatatatatctccagtgcccctgaattttatgtttgatgactatatatttgggcatatatcttgttggattagaataaataaaacactttatattttcatgaactcta

SEQ ID NO: 623945 - DNA, 120 bp, Artificial Sequence
  ENSG00000178358_0 (sequence is synthesized)
caagacttgatgtcacagacccaaaaaaatgtgttcttttttcttgtgccaaacaggtaaacaggcaaaaatatcaatgggagaagaaaaccaaacctttgtgtccaagtttatcttcct

SEQ ID NO: 623946 - DNA, 120 bp, Artificial Sequence
  ENSG00000178358_1 (sequence is synthesized)
gggtctttcacaggacttgcagacccagatcctgctatttatccttttcctcatcatttatctgctgaccgtgcttggaaaccagctcatcatcattctcatcttcctggattctcgcct

SEQ ID NO: 623947 - DNA, 120 bp, Artificial Sequence
  ENSG00000178358_2 (sequence is synthesized)
tcacactcccatgtatttttttcttagaaatctctcctttgcagatctctgtttctctactagcattgtccctcaagtgttggttcacttcttggtaaagaggaaaaccatttcttttta

SEQ ID NO: 623948 - DNA, 120 bp, Artificial Sequence
  ENSG00000178358_3 (sequence is synthesized)
tgggtgtatgacacagataattgtctttcttctggttgggtgtacagagtgtgcgctgctggcagtgatgtcctatgaccggtatgtggctgtctgcaagcccctgtactactctaccat

SEQ ID NO: 623949 - DNA, 120 bp, Artificial Sequence
  ENSG00000178358_4 (sequence is synthesized)
atataatcaatcactacttttgtgaacctcctgccctcctgaagctggcttccatagacacttacagcacagaaatggccatcttttcaatgggcgtggtaatcctcctggcccctgtct

SEQ ID NO: 623950 - DNA, 120 bp, Artificial Sequence
  ENSG00000178358_5 (sequence is synthesized)
ccctgattcttggttcttattggaatattatctccactgttatccagatgcagtctggggaagggagactcaaggctttttccacctgtggctcccatcttattgttgttgtcctcttct

SEQ ID NO: 623951 - DNA, 120 bp, Artificial Sequence
  ENSG00000178358_6 (sequence is synthesized)
atgggtcaggaatattcacctacatgcgaccaaactccaagactacaaaagaactggataaaatgatatctgtgttctatacagcggtgactccaatgttgaaccccataatttatagct

SEQ ID NO: 623952 - DNA, 120 bp, Artificial Sequence
  ENSG00000178358_7 (sequence is synthesized)
tgaggaacaaagatgtcaaaggggctctcaggaaactagttgggagaaagtgcttctctcataggcagtgacctctgagtctgacttttagagctatggcaacattctttaaaaaggagc

SEQ ID NO: 623953 - DNA, 120 bp, Artificial Sequence
  ENSG00000178363_0 (sequence is synthesized)
gagacagcccgccggccgcccggatctccacctgccaccccagagctgggacagcagccgggctgcggcactgggagggagaccccacagtggcctcttctgccacccacgcccccaccc

SEQ ID NO: 623954 - DNA, 120 bp, Artificial Sequence
  ENSG00000178363_1 (sequence is synthesized)
ctggcatggccgaccagctgactgaggagcaggtcacagaattcaaggaggccttctccctgtttgacaaggatggggacggctgcatcaccacccgcgagctgggcacggtcatgcggt

SEQ ID NO: 623955 - DNA, 120 bp, Artificial Sequence
  ENSG00000178363_2 (sequence is synthesized)
ccctgggccagaaccccacggaggccgagctgcgggacatgatgagtgagatcgaccgggacggcaacggcaccgtggacttccccgagttcctgggcatgatggccaggaagatgaagg

SEQ ID NO: 623956 - DNA, 120 bp, Artificial Sequence
  ENSG00000178363_3 (sequence is synthesized)
acacggacaacgaggaggagatccgcgaggccttccgcgtgttcgacaaggacggcaacggcttcgtcagcgccgccgagctgcgacacgtcatgacccggctgggggagaagctgagtg

SEQ ID NO: 623957 - DNA, 120 bp, Artificial Sequence
  ENSG00000178363_4 (sequence is synthesized)
acgaggaggtggacgagatgatccgggccgcggacacggacggagacggacaggtgaactacgaggagtttgtccgtgtgctggtgtccaagtgaggccggcgcccaccatgctcctggg

SEQ ID NO: 623958 - DNA, 120 bp, Artificial Sequence
  ENSG00000178363_5 (sequence is synthesized)
cgcccacgcggcccacagggcaagaacccggggcctcccgcctcctcccccatccccctgcctcccctgggcactgtggcttcctcctgcgcctggttgattcagcccacctctctgcat

SEQ ID NO: 623959 - DNA, 120 bp, Artificial Sequence
  ENSG00000178363_6 (sequence is synthesized)
cccgcttcccgcgtctcttctctgcactcctgccgaccttcccacctgctcgtctgaatgacacggaacgctcccactgcaggcaaaccgtgacgccctccccactcgggagaagcagag

SEQ ID NO: 623960 - DNA, 120 bp, Artificial Sequence
  ENSG00000178363_7 (sequence is synthesized)
accgagcaccagggcaggttgcgctgactctgcggccctccaggacggacaccgggtgaccccttagggcacccaggcaagatccctaagaggcacccaatgcccaggccaggggggctg

SEQ ID NO: 623961 - DNA, 120 bp, Artificial Sequence
  ENSG00000178363_8 (sequence is synthesized)
cagccctcagcccccgccaggattcccgcaggctcctggactggaagctccctccgcggtcggattctggagggtgggaggcatcttggcctgcagtaagcggtgctgacggggactctg

SEQ ID NO: 623962 - DNA, 120 bp, Artificial Sequence
  ENSG00000178363_9 (sequence is synthesized)
gccacagaggtcaggcctcctgaaaacagcactgccttccgcgctgccccagcttgccccattccttgtccgccaacccaccgtgattcatcttctgaagctgggagtgaaactgggtca

SEQ ID NO: 623963 - DNA, 120 bp, Artificial Sequence
  ENSG00000178363_10 (sequence is synthesized)
gctgtaacctgttcctattcatctggaaggagggaggcttggatgagcaggggatgagagctgcagggaaataaatgagatattcgtccttatttcatttcctttttttttttggtttcc

SEQ ID NO: 623964 - DNA, 120 bp, Artificial Sequence
  ENSG00000178363_11 (sequence is synthesized)
atggaaatgatccttgttaaattcagggttgaaacgaggcaggaatctccatttttgtgctttttgaaaatgcaatgaattcctatacgggggagcgggaaaggtgcctcagagagagac

SEQ ID NO: 623965 - DNA, 120 bp, Artificial Sequence
  ENSG00000178363_12 (sequence is synthesized)
aagtctggatgagggaaatattgaatattctcaatcaaatggatacgctggcagcaaagagtggttaaaagtccatcaggacttgaaagacctgagtccattacgttgagaagggacctg

SEQ ID NO: 623966 - DNA, 120 bp, Artificial Sequence
  ENSG00000178363_13 (sequence is synthesized)
ctgattgctttgattccccctggcaagtgctccctggttgtgaagtgccaggcactagagatggtgaggggttggggggcagttgggcacacacagtgtaagagcaattcagagccgtta

SEQ ID NO: 623967 - DNA, 120 bp, Artificial Sequence
  ENSG00000178363_14 (sequence is synthesized)
gtcctgcactagccctgcaagctgctggcaacacctagagaaggtcgaaggggccctgccagagatcccttcaattctaaagggaggtatgttttgcgggatgggcactagacggagctc

SEQ ID NO: 623968 - DNA, 120 bp, Artificial Sequence
  ENSG00000178372_0 (sequence is synthesized)
agaactgtctgggacagacgctgcccggatccctgcggctgcctgcactctggaccacgagctctgagagcagcaggttgagggccggtgggcagcagctcggaggctccgcgaggtgca

SEQ ID NO: 623969 - DNA, 120 bp, Artificial Sequence
  ENSG00000178372_1 (sequence is synthesized)
ggagacgcaggcatggccggtgagctgactcctgaggaggaggcccagtacaaaaaggctttctccgcggttgacacggatggaaacggcaccatcaatgcccaggagctgggcgcggcg

SEQ ID NO: 623970 - DNA, 120 bp, Artificial Sequence
  ENSG00000178372_2 (sequence is synthesized)
ctgaaggccacgggcaagaacctctcggaggcccagctaaggaaactcatctccgaggttgacagcgacggcgacggcgaaatcagcttccaggagttcctgacggcggcgaagaaggcc

SEQ ID NO: 623971 - DNA, 120 bp, Artificial Sequence
  ENSG00000178372_3 (sequence is synthesized)
gcgccttcgaccaggatggcgacggccacatcaccgtggacgagctcaggcgggccatggcggggctggggcagccgctgccgcaggaggagctggacgccatgatccgcgaggccgacg

SEQ ID NO: 623972 - DNA, 120 bp, Artificial Sequence
  ENSG00000178372_4 (sequence is synthesized)
tggaccaggacgggcgggtgaactacgaggagttcgcgaggatgctcgcccaggagtgaggctccccgcctgtgtccccctggctgcgctctgagccttcagggccaccgcccgctgctg

SEQ ID NO: 623973 - DNA, 120 bp, Artificial Sequence
  ENSG00000178372_5 (sequence is synthesized)
cttttgtgctgggactctccggggaaacctggtcggtggatgggaaactgcctccccctgggaggaaggctttgcgctccggggcctggatgcggcgccctcgggccgcctgcgagcccc

SEQ ID NO: 623974 - DNA, 120 bp, Artificial Sequence
  ENSG00000178372_6 (sequence is synthesized)
tctctgcctccagaccttgggcagaaggaggcctccttgggcctggtccccctttgccctgcagtggaatgagggcccctcagccccgcattgatctaaataaaggactgccgagttcca

SEQ ID NO: 623975 - DNA, 120 bp, Artificial Sequence
  ENSG00000178381_0 (sequence is synthesized)
agatccgggggctgcggataaatccccgtaggccgcgggcagcgagatgttgcgttccggtgtgggtgtgggtgtgcctccgacggcgtctcggtgccagtgtcgaggttctttctgctt

SEQ ID NO: 623976 - DNA, 120 bp, Artificial Sequence
  ENSG00000178381_1 (sequence is synthesized)
agctacccggagccgactacggaggaggacacctgagtttacgtctcttccatctgctgctcacctcagctgcctgggtccccgacgagagccaggtgacacttaactccgccatctgcg

SEQ ID NO: 623977 - DNA, 120 bp, Artificial Sequence
  ENSG00000178381_2 (sequence is synthesized)
ttttgagcactgttctcataatggagtttcctgatttggggaagcattgttcagaaaagacttgcaagcagctagattttcttccagtaaaatgtgatgcatgtaaacaagatttctgta

SEQ ID NO: 623978 - DNA, 120 bp, Artificial Sequence
  ENSG00000178381_3 (sequence is synthesized)
gcacataagtgtccgtttgcattccagaaggatgttcacgtcccagtatgcccactctgtaatacccccatcccagtaaaaaagggccagataccagacgtggtggttggtgatcacatt

SEQ ID NO: 623979 - DNA, 120 bp, Artificial Sequence
  ENSG00000178381_4 (sequence is synthesized)
gacagagactgtgactctcaccctgggaagaagaaagagaagatttttacataccgttgctcaaaagagggctgcaagaagaaagagatgctgcagatggtatgtgcccaatgtcacggc

SEQ ID NO: 623980 - DNA, 120 bp, Artificial Sequence
  ENSG00000178381_5 (sequence is synthesized)
aacttctgtatccagcacagacaccctttggaccacagctgcagacacgggagtcgccccaccatcaaagctgggtgagaagagactccgctgcgatggctcggagcacgcagtagcatg

SEQ ID NO: 623981 - DNA, 120 bp, Artificial Sequence
  ENSG00000178381_6 (sequence is synthesized)
cgtggaagcagcttacactctagtgggaagtggagccccattgagcaccatcccacactggctgctgatcttgtttgttgagggagatgggactataataaaattgaatgctgaagttga

SEQ ID NO: 623982 - DNA, 120 bp, Artificial Sequence
  ENSG00000178381_7 (sequence is synthesized)
ttgggagatttcctcaccctggctcctggcgggctggcccagcgactcgggtactggttcacccggctcatgtgaacgcaatttcgtctgtgtggggtgctgcagctcttggttggtgaa

SEQ ID NO: 623983 - DNA, 120 bp, Artificial Sequence
  ENSG00000178381_8 (sequence is synthesized)
cacggaaaggttgctgtgtgtaactgcacagtgtgacgcgatgctccagtggtgcgacttcgtcaggatggatgaaggacacaggactgggaccccaagttacagaagcagctcgctcca

SEQ ID NO: 623984 - DNA, 120 bp, Artificial Sequence
  ENSG00000178381_9 (sequence is synthesized)
tcaccgtctgaagctgcactgtcttgctggtatggtagggactagcgacgtatggctaactcattgaaaattaaattttaaaatccagtttttcagtcccactagcctcgtttcaggtgc

SEQ ID NO: 623985 - DNA, 120 bp, Artificial Sequence
  ENSG00000178381_10 (sequence is synthesized)
ctgctgttaggcagtacagaggagcgtgtctgccctcacaggacattctgttggatgactctcagacaactgagatcttattttcagggactcatggagtcacttagttgtaaccttatg

SEQ ID NO: 623986 - DNA, 120 bp, Artificial Sequence
  ENSG00000178381_11 (sequence is synthesized)
ttccaagcttactttagatgttcaaatacttggttcctttgatctgttacaccatagctgttacaccatagctgtgtcttcaccagatgcaagaaagattttaatatttgacttggaagc

SEQ ID NO: 623987 - DNA, 120 bp, Artificial Sequence
  ENSG00000178381_12 (sequence is synthesized)
caatcaggaaggcagtaaatacgcttattgatttgaataactgcagccttgacatagtatttaggtgactcccagagtacacagcagaaactgaaagaggacctaaggaaatgagcttgc

SEQ ID NO: 623988 - DNA, 120 bp, Artificial Sequence
  ENSG00000178381_13 (sequence is synthesized)
cccgagtccagaggtttgagacttgttgttgacttttcagatggttcccagcccgtgtttactttgtctctggatgggtcacaggtcattttagtgaactctgccacttgaccgtggtgg

SEQ ID NO: 623989 - DNA, 120 bp, Artificial Sequence
  ENSG00000178381_14 (sequence is synthesized)
acgcggccacataaccgtccagggggcggggggcagcgcggtgaaatggaaaaggatttaactgggggatctaggtgctggggacactgacattttcggaccccggccgcagccctgagt

SEQ ID NO: 623990 - DNA, 120 bp, Artificial Sequence
  ENSG00000178381_15 (sequence is synthesized)
cagcttccccgctcctcgcccgcccggctgcgcctgcgcggagccgcctcactgtgacccagcaagcgcgccgcctgcgagaagcgaccggacacttcgagaagggaagtggagaagcga

SEQ ID NO: 623991 - DNA, 120 bp, Artificial Sequence
  ENSG00000178385_0 (sequence is synthesized)
gtaaacagagccgggccgggatggtcagcgcccgggcgggctgtcaccgtgaggcgggcggcaggctgcgggagtcaagcccctccaggagcggactgaaggccccgcaggtgaatggag

SEQ ID NO: 623992 - DNA, 120 bp, Artificial Sequence
  ENSG00000178385_1 (sequence is synthesized)
agtagcagccggggcccaggaaatcaaggattggcgtggcattgctttgacaagtacttgctgttgtcttcacagaggtctcactgaagaataatctcaaaggaacatttggtctcccta

SEQ ID NO: 623993 - DNA, 120 bp, Artificial Sequence
  ENSG00000178385_2 (sequence is synthesized)
tacatctgttaatgcccattagccactagcaaatgcttttaattaccaggaaaacatcaaccactttgggtttggcctgctccagggagcccaatgaaggtttcttccagttgtttccat

SEQ ID NO: 623994 - DNA, 120 bp, Artificial Sequence
  ENSG00000178385_3 (sequence is synthesized)
agctctattgctgaagcacccctcttggttgggtgaatgttcatgaagccatttctggaaccagcttaggaggctaaggcctcctggagcctgtgacatggaagctttggaagtggatga

SEQ ID NO: 623995 - DNA, 120 bp, Artificial Sequence
  ENSG00000178385_4 (sequence is synthesized)
tatcagcccagccttagaagttacggaggaattctttagtactttggatagtaatctagaaaaggctgtgcagcaggcagaggtttatgggatccaggaagtccctgaactggtggggca

SEQ ID NO: 623996 - DNA, 120 bp, Artificial Sequence
  ENSG00000178385_5 (sequence is synthesized)
tgaggtactcagtaacataacagacaatggtgctatgagaaatgtcacctccctgggcaaggggggcatgatttgggaccactgtaagagcaggctcttagaaaccaaagctcaaaatgt

SEQ ID NO: 623997 - DNA, 120 bp, Artificial Sequence
  ENSG00000178385_6 (sequence is synthesized)
cttccctgccaaagaacagtttatggtccagagagggacaaccccagataatctttcctggatggaacaaaaggaagcatcaacctttaatttcttcaatatctgtcagcgtcggaggga

SEQ ID NO: 623998 - DNA, 120 bp, Artificial Sequence
  ENSG00000178385_7 (sequence is synthesized)
ccggcctcgttctgtaaatgacttactggatgagacctcaactttcaagccagggcatgctcgatcacgatcagatattacccaagtggactggagggtagtcctcaaaaccacgccttt

SEQ ID NO: 623999 - DNA, 120 bp, Artificial Sequence
  ENSG00000178385_8 (sequence is synthesized)
gcagcagcagcaacagcagcagccattgcttcaaggcccgcatgtcaccaggccatcttttctgttgccctcaccaaataagatagaagatgctcaaggaaatactgaacacaagcagac

SEQ ID NO: 624000 - DNA, 120 bp, Artificial Sequence
  ENSG00000178385_9 (sequence is synthesized)
attcccaaacattctaaagaagggttacctggagattagaaaggaccatgacagttactggcaaagctgttatgcagaactttcaccttacaacttatacttctacagcctcgacagcag

SEQ ID NO: 624001 - DNA, 120 bp, Artificial Sequence
  ENSG00000178385_10 (sequence is synthesized)
tgggaatcaaaacctttatgccacgtaccagctttcacacttccagagcatatctgttttaggcaacctggaggccaggatggtggatactgttttgtatgacaacactcagctacagct

SEQ ID NO: 624002 - DNA, 120 bp, Artificial Sequence
  ENSG00000178385_11 (sequence is synthesized)
aaaggcagagtcaccatgggaggctttggactggggacagaagctttgggaagtagtgcatgctgctgtgcccggttacatggggcggcagaatgagctgacaatctcaccagggcttgg

SEQ ID NO: 624003 - DNA, 120 bp, Artificial Sequence
  ENSG00000178385_12 (sequence is synthesized)
ccatcatgatgactatacacagaatcatagtttccagaagaaaaccagtgggctgctgccaccgtcccctgtcctggacagctccaaacagtaccaaaacatcctcaaatcagggactct

SEQ ID NO: 624004 - DNA, 120 bp, Artificial Sequence
  ENSG00000178385_13 (sequence is synthesized)
ctacaggctgactgtccaaaacaactggaaggcatttacatttgtgctgagcagggcttaccttatggcttttcagcctggcaagctagacgaggatccactgttgagctacaacgtgga

SEQ ID NO: 624005 - DNA, 120 bp, Artificial Sequence
  ENSG00000178385_14 (sequence is synthesized)
cgtgtgtctggctgtccagatggacaacctggatggctgcgactcttgctttcaagtcattttcccccaggatgtccttcgcctccgagctgagacccgacagagggctcaggaatggat

SEQ ID NO: 624006 - DNA, 120 bp, Artificial Sequence
  ENSG00000178385_15 (sequence is synthesized)
ggaggctctgaagatagctgccaatgtggcgaggagttcagagcaaaacctgcaagtcacactgaggaacaaacccaaggatcaaatgggtgggcatgaactcaggaagaacaaacgcca

SEQ ID NO: 624007 - DNA, 120 bp, Artificial Sequence
  ENSG00000178385_16 (sequence is synthesized)
atctgtgactaccagcttcctgagcattttgacgactttgtctttggaacgaggactcactgctcagagtttcaaatgtgcaggctgccagcgatccataggtctttccaatgggaaagc

SEQ ID NO: 624008 - DNA, 120 bp, Artificial Sequence
  ENSG00000178385_17 (sequence is synthesized)
caaggtgtgcaactacagtgggtggtattactgcagtagctgccacgtggatgacagctttctcattccagcacgcatagtccacaactgggatacttcaaagtataaggtgtcgaagca

SEQ ID NO: 624009 - DNA, 120 bp, Artificial Sequence
  ENSG00000178385_18 (sequence is synthesized)
ggccaaggagtttctggagtacgtgtacgaagagccgctcatcgacatccagcaggagaacgccatgctgtaccaccacgcagagccgctggccgccgtgctgcggctgcggcagcggct

SEQ ID NO: 624010 - DNA, 120 bp, Artificial Sequence
  ENSG00000178385_19 (sequence is synthesized)
gaagtcgctccgagcctatttgttcagctgccgggcagcggtggcagaggatctccgccgcagaattttccccagagaatacctccttcaacagatccacctgtattcacttgccgacct

SEQ ID NO: 624011 - DNA, 120 bp, Artificial Sequence
  ENSG00000178385_20 (sequence is synthesized)
gcagcaggtaatagagggaaagctggctccattcttgggcaaggtcattaaatttgccacctcacacgtgtacagctgcagtctttgtagccagaaggggttcatctgtgaaatctgtaa

SEQ ID NO: 624012 - DNA, 120 bp, Artificial Sequence
  ENSG00000178385_21 (sequence is synthesized)
caatggagagatcctctacccttttgaggatatttcaacaagcaggtgtgaaagctgtggagccgttttccattctgaatgcaaagaaaagtctgtcccctgcccgaggtgtgttcgccg

SEQ ID NO: 624013 - DNA, 120 bp, Artificial Sequence
  ENSG00000178385_22 (sequence is synthesized)
agagctgcagaagaagcagaagtctttctggcagagactgaacatggacgagagtctagaggaggcttgcaccatgttcgagctgtcctaccagaacacctgactccagccgacccgaag

SEQ ID NO: 624014 - DNA, 120 bp, Artificial Sequence
  ENSG00000178385_23 (sequence is synthesized)
gccagggattcaccaatcaacaatccatcagccccagagcggcctcctaactagccagttagacccctttggaagaagagtatgtatcctcttcaactagatatagatatatatatttat

SEQ ID NO: 624015 - DNA, 120 bp, Artificial Sequence
  ENSG00000178385_24 (sequence is synthesized)
ttatatatacgcaaatacctatacgtcctgtacgtatgctctgtgtacatcattgtccagacgatccacagaacctctgtggctcgagaaactaccaatagctggattacacttagccaa

SEQ ID NO: 624016 - DNA, 120 bp, Artificial Sequence
  ENSG00000178385_25 (sequence is synthesized)
gaatttcagctgcttgctcccagacaaaacgtggtatacacaatgctttatagttcagactttttttttctctctgtctctcggtacattttattacccaagacacaaaaggaagcattt

SEQ ID NO: 624017 - DNA, 120 bp, Artificial Sequence
  ENSG00000178385_26 (sequence is synthesized)
cctgcacaaaacagtgctttaggttatttttgtgttatttatttttagccttcacagaggctgaggtaactgaggcaggcacccatcatcatctgtttcataagaaaaccttcaaaacac

SEQ ID NO: 624018 - DNA, 120 bp, Artificial Sequence
  ENSG00000178385_27 (sequence is synthesized)
aagagactgctgggtccttccaggacctggtgtccgtggcgctcccgcctcagttcctcctgtggaggcggggaatcacgtaagcagagccgatggctggaaacaggagccaagccccct

SEQ ID NO: 624019 - DNA, 120 bp, Artificial Sequence
  ENSG00000178385_28 (sequence is synthesized)
ctgacagaaagcatacacccctcatttatgaggagggctggttctggttttgaagttaatctcagaagtttttttcctgagaagagaagaaacctctgcgaccaataactgcgtgttgtc

SEQ ID NO: 624020 - DNA, 120 bp, Artificial Sequence
  ENSG00000178385_29 (sequence is synthesized)
ggtctgtttttcggtactaatcccatcacccacctaatgatgtgacgctccaccgtgttttccaggctgtacacatggctttcttaacagttttcaacgggtgcccatggttgatattta

SEQ ID NO: 624021 - DNA, 120 bp, Artificial Sequence
  ENSG00000178385_30 (sequence is synthesized)
tgatttttttcatgatgctggccggaggaaatgtcctggggtggttgttaaagacatcgtcgtgtagactggtagataaggctatctagtaagtatattcccaaagagggtcgttttagt

SEQ ID NO: 624022 - DNA, 120 bp, Artificial Sequence
  ENSG00000178385_31 (sequence is synthesized)
ttcttttctcagaatcctgtggaggcagttcctacctattcattttaagtgctttatttctcgttgttcttcctgcactttcatttcgacctttgtcaatgtgaccattcttgctttctc

SEQ ID NO: 624023 - DNA, 120 bp, Artificial Sequence
  ENSG00000178385_32 (sequence is synthesized)
gctttctcatttttttgtttaaaaaatcagagtaatgtggaacttcaaaataccaactttggactattaagaaaatacaaacttacaagtataattaatgaattagatctaatattattt

SEQ ID NO: 624024 - DNA, 120 bp, Artificial Sequence
  ENSG00000178385_33 (sequence is synthesized)
atatatatatacacacacatatataattgccaccttgaagtaaaacaaagagtgctaaaataaataataggagtaagaaagagatctgctttgctatttggcaggtagtgttctccagct

SEQ ID NO: 624025 - DNA, 120 bp, Artificial Sequence
  ENSG00000178385_34 (sequence is synthesized)
gcagtgcccttggaagagcacgtggcagtcactgtgaccaaaacggcaggtaggacagccctgggaccctgacagctcccattccttccccttaactctccctagagcaagaaaaatatg

SEQ ID NO: 624026 - DNA, 120 bp, Artificial Sequence
  ENSG00000178385_35 (sequence is synthesized)
tttataatggaacagttctcagtagactttatgagaagattctgtagctttcgcgctgagcagatgccttctatgtcttcatggtttagtagttttgctgctattaggatcagtggctca

SEQ ID NO: 624027 - DNA, 120 bp, Artificial Sequence
  ENSG00000178385_36 (sequence is synthesized)
caacatacttggtacattcaaccccattgctcctttcccccacacgccgcttccccaagaccccaactcatgatacttccatccatctagagatgtgacatttcagactgacttttgtgc

SEQ ID NO: 624028 - DNA, 120 bp, Artificial Sequence
  ENSG00000178385_37 (sequence is synthesized)
agttagatgtaagcattttacctctcaacccacaccagttcctttggccccaggccacacatttcaccttaatagctcaacaccatacatgcatttattttctgactatacagtagccgc

SEQ ID NO: 624029 - DNA, 120 bp, Artificial Sequence
  ENSG00000178385_38 (sequence is synthesized)
aaccaaggcttgaaaacttgttaaaaggccagggccctattcatgagacgcctgacggtgccttttacccttagaaaagcaggttgacttttcccccactctagttaaagagaatgttgc

SEQ ID NO: 624030 - DNA, 120 bp, Artificial Sequence
  ENSG00000178385_39 (sequence is synthesized)
acacaaaagaaaaagggtggaaaatctcaaacacttggcaacaggcaaacaaatttgatcatctcctttcctcctcctcttggtaaaatacagtatttatattttccagcctcagagaag

SEQ ID NO: 624031 - DNA, 120 bp, Artificial Sequence
  ENSG00000178385_40 (sequence is synthesized)
gatgtgctcccatggcaaagtgccttctccctccgcccccagctccctgtcactgtagcttacttttgccttcgctgtaattaatgtatccgtgattccaactgtcagcgaggccattcc

SEQ ID NO: 624032 - DNA, 120 bp, Artificial Sequence
  ENSG00000178385_41 (sequence is synthesized)
tagcacactgcatttggagacctgaagtgcagtgccatctcctccccttgtaacatgtttgccctgcatacagaatttcctctcctagctcacaggcacccagggtcatacctgccgaga

SEQ ID NO: 624033 - DNA, 120 bp, Artificial Sequence
  ENSG00000178385_42 (sequence is synthesized)
gtcaagggcgaaattctggatccccgttcaaaacatctttgttttcaccagtccccatttagagggccctgctaaatacgagcagtccctgtgaactcctaaggaggactttccacccac

SEQ ID NO: 624034 - DNA, 120 bp, Artificial Sequence
  ENSG00000178385_43 (sequence is synthesized)
atcattttctgcttattttcaaaagggaaacaaaaaatcgatgtgttatcaccatcagctacccagagctgggtccatgtccagcactcctgtttcctctccttttcgtaccaccctgac

SEQ ID NO: 624035 - DNA, 120 bp, Artificial Sequence
  ENSG00000178385_44 (sequence is synthesized)
agcttggtcggtgccagccacaggcctatgacattctctgccaccaccaccaaaatctgataggacagagtggagccagcttaggagttgggtctgccatgaaaattcaaaattgctgtt

SEQ ID NO: 624036 - DNA, 120 bp, Artificial Sequence
  ENSG00000178385_45 (sequence is synthesized)
ttcagcccagaataccttggcgcacatgaacgcccttactgttttcaactttaacaaattacttggtgcactgttaggtaattgttccactgcttagaaactgtcgaaacaaaagcaaat

SEQ ID NO: 624037 - DNA, 120 bp, Artificial Sequence
  ENSG00000178385_46 (sequence is synthesized)
ctgtggattaccacctctttcagaccaaactaatacctgcttttcctcgtgttccatttttcatcccatattaaatatcttgcacataaaacatatgaaaaaatggccaattaatctcct

SEQ ID NO: 624038 - DNA, 120 bp, Artificial Sequence
  ENSG00000178385_47 (sequence is synthesized)
ggagctggcaactgactccggggaaccgctttttgctgaaaggctcattccctagtgtatcacttgaggaaatccctcctaaaagtgccagaaactcatgtgtgagatcgtccaaccctg

SEQ ID NO: 624039 - DNA, 120 bp, Artificial Sequence
  ENSG00000178385_48 (sequence is synthesized)
gtgaaatgttggcatctaaccccgcagtaaagaagccagttcctaaaatagacctcattttgcaccgcggcaggaaggccacaaagtacttaaaaagccgtcaactggaatgggggtagt

SEQ ID NO: 624040 - DNA, 120 bp, Artificial Sequence
  ENSG00000178385_49 (sequence is synthesized)
gttctttccaggcccgctttttccaaagttaaaagcctctttatatgaaaaccatgtaaactctcagcagccccctttgcttcactgccttttctagggagtgcattagagtcattttta

SEQ ID NO: 624041 - DNA, 120 bp, Artificial Sequence
  ENSG00000178385_50 (sequence is synthesized)
cgtctgtagtgctaaagggtcacctagttaggagctttaacatcggattcgctgagagggtcatcggtttttgattcttctagagtaggcctccaccaagaagggaatacgtctaatact

SEQ ID NO: 624042 - DNA, 120 bp, Artificial Sequence
  ENSG00000178385_51 (sequence is synthesized)
tgggatctgtggtttgcaacacaagtggtatccctcagactcctgaaaagggactatgccgtgacttccttccggctgcagtgagatccgaggtgtttacaccaccctagttgccgaatg

SEQ ID NO: 624043 - DNA, 120 bp, Artificial Sequence
  ENSG00000178385_52 (sequence is synthesized)
cagcctttgctcagctagagtgtgtcctctgacggagcctggcctctgtttttgtctctgtgtgttgtgtgtacacactgaacgtggacatcggatagttcttttctgtgcctcctcaga

SEQ ID NO: 624044 - DNA, 120 bp, Artificial Sequence
  ENSG00000178385_53 (sequence is synthesized)
gaggcttggcttccaaacctgggagtttgttctctacccattggctagaaaaggccgtccataaattagtatatccaggtgggactagcacgatgccacgcacactgaacattttctgca

SEQ ID NO: 624045 - DNA, 120 bp, Artificial Sequence
  ENSG00000178385_54 (sequence is synthesized)
gaggggcgttagcagtggaagtagagacacattctggtcctcctttagagtcaagccaatgctgttgctcgtgtatttgtgcacaattattcatctccgttgatctgacacactctcttg

SEQ ID NO: 624046 - DNA, 120 bp, Artificial Sequence
  ENSG00000178385_55 (sequence is synthesized)
aaatcactagattatgaaacagatcttcacctcctgattccaatactgcctggtttcaacacaggggttgttttatttttttacttctcctagtaaatagagatgtgtataatttttgcc

SEQ ID NO: 624047 - DNA, 120 bp, Artificial Sequence
  ENSG00000178385_56 (sequence is synthesized)
cattttatttcttgagttgtctgcaccacttcttttcttactctgaaataatgtgaaaacgtgaagttggagcaagaccttgaaagagcctccctcctttgcgtgacctgaatcggtagc

SEQ ID NO: 624048 - DNA, 120 bp, Artificial Sequence
  ENSG00000178385_57 (sequence is synthesized)
ggcactctctgtttcccctgcctccgtgtcacttgttagtgatgggcattaggagcttcatatgttgcacaccttgtatcactcttccgaccctgagtcaggtagagctgtctgctcgag

SEQ ID NO: 624049 - DNA, 120 bp, Artificial Sequence
  ENSG00000178385_58 (sequence is synthesized)
gtcgaatccagtgatgggtgactaagctctgctcggttaatgtaaacagacaagtgttgatttctgtcatgtggaacggtgtttcgacagttaagtctagcacccagtagtctccttatt

SEQ ID NO: 624050 - DNA, 120 bp, Artificial Sequence
  ENSG00000178385_59 (sequence is synthesized)
ggtagacgattctaatttcattggattcaaaaatctctgactcaagggtctttccttagtgcgttttaatgggtgcatggctgagggaaaatccaagtcattgttaaactctaggtaaaa

SEQ ID NO: 624051 - DNA, 120 bp, Artificial Sequence
  ENSG00000178385_60 (sequence is synthesized)
taaactctaggtaaaagacaagagtatgggataccctcctaaccataccggtagttgtcagttttatttaaagtgggttccacttggccaggattggtggctcacgcctgtaatcccagc

SEQ ID NO: 624052 - DNA, 86 bp, Artificial Sequence
  ENSG00000178385_61 (sequence is synthesized)
caggagtttgagaccagccgggccaaaaatggtgaaatcaggtctatactaaaaataaaaaaattaggctgaacaggccgaggtgg

SEQ ID NO: 624053 - DNA, 67 bp, Artificial Sequence
  ENSG00000178385_62 (sequence is synthesized)
ctctttactaaaaatacaaaaattagctgagtgttttggtggatgcctataatcccagctacttggg

SEQ ID NO: 624054 - DNA, 120 bp, Artificial Sequence
  ENSG00000178385_63 (sequence is synthesized)
tccgtctcaaaaaaaaaaaaaaaagtaagttccaaatgatcatgttttgtggcactgtcttcgtaaagtggccgctggtgtgatggaaagcattgctaaactcaagtgagacaactgctg

SEQ ID NO: 624055 - DNA, 120 bp, Artificial Sequence
  ENSG00000178385_64 (sequence is synthesized)
ttttgctttggattttccctgtgaaaagagaagccactgcctgttcgtcttgttagaaagacaagactttgaatgaagttccagactttgaatgaagttccagactttgaatgaagctgg

SEQ ID NO: 624056 - DNA, 120 bp, Artificial Sequence
  ENSG00000178385_65 (sequence is synthesized)
ttgttgcccagagtagaagattcaggcacctacagcaactcacagcaactcctaactcttaggagggctccctcctattggccgtgaagctgcaaaccagcctctctcttttccctggat

SEQ ID NO: 624057 - DNA, 120 bp, Artificial Sequence
  ENSG00000178385_66 (sequence is synthesized)
cttccttgcccctagttctgagccccagcccagaggcaggcctcatggctaataaaccagctagaggacagctggggcctgtggctccttctccatgttggccttcccttgtgtctcttg

SEQ ID NO: 624058 - DNA, 120 bp, Artificial Sequence
  ENSG00000178385_67 (sequence is synthesized)
tccctgtaggagtgccttatagtactgtctcgtgcttctagtctagtctgaaccacttgaagcctgcaggacccttcaactaaatctggatccctttgcttcttccctgctggctactct

SEQ ID NO: 624059 - DNA, 120 bp, Artificial Sequence
  ENSG00000178385_68 (sequence is synthesized)
tcatatagatgctcttggagcctgtgcattccatgatgcatgtcagaactctcaccttgttcagcctggtgtgccttaacctcaggagtaaagggaatcatgtcggaaacacgtcgttaa

SEQ ID NO: 624060 - DNA, 120 bp, Artificial Sequence
  ENSG00000178385_69 (sequence is synthesized)
agtagaatggtacaaacattggcttcttagtgccattagcacttttaccaggaaatgcaaaagatgcaaccacataatgttttcactttgttttatgctgttcttcaatcgctctttttg

SEQ ID NO: 624061 - DNA, 120 bp, Artificial Sequence
  ENSG00000178385_70 (sequence is synthesized)
tttatttgtttgtttgctttcattaaccaaactcaggggaatgtcatgatgtcaccaaggccaatgggtagagaaataaaaaccagccatccataattgaatctgtaaagtcagtgaact

SEQ ID NO: 624062 - DNA, 120 bp, Artificial Sequence
  ENSG00000178385_71 (sequence is synthesized)
tagccttttcaggttcaaaattacacaaacacaaggattttcttatctttcacctttcaaaggttttctttttattttgccacctgttttccaaataagaagtgggaagcctcttagata

SEQ ID NO: 624063 - DNA, 120 bp, Artificial Sequence
  ENSG00000178385_72 (sequence is synthesized)
aattgtgataaaaatgtctctttgtttggcgtgagctatcaaattagctttgtgtgtccactgagccatcaaattaggctttggctgctggaggcctaggttctagctttggtcacctat

SEQ ID NO: 624064 - DNA, 120 bp, Artificial Sequence
  ENSG00000178385_73 (sequence is synthesized)
cagaatcttactgttacgctgggcatggtggcatgtgcctacagtcccagctatttgggaggctgaagtgggtagattgcttgagcccaggagcctgtgcaatatggtgagacccatctc

SEQ ID NO: 624065 - DNA, 120 bp, Artificial Sequence
  ENSG00000178385_74 (sequence is synthesized)
aaaaaacaaacaaaaaaagaagtagaatcttactgtgaatagctactagcctaccctagaagatatatattttaaatctgtttcttaggaatagtagctaaaagaaggaatggccaaagg

SEQ ID NO: 624066 - DNA, 89 bp, Artificial Sequence
  ENSG00000178385_75 (sequence is synthesized)
cagctctttgggaggctggggtgaagtctgggcaagatagcgagaccctcatctctttgaaaaatatatatatatacttttttttttaa

SEQ ID NO: 624067 - DNA, 120 bp, Artificial Sequence
  ENSG00000178385_76 (sequence is synthesized)
catctctttgaaaaatatatatatatacttttttttttaaaggagagaaaatgcttaggttgcaaatggagagtattgaacgtggtgatgtaaaaaacttctgcaaaacttgttctgtag

SEQ ID NO: 624068 - DNA, 120 bp, Artificial Sequence
  ENSG00000178385_77 (sequence is synthesized)
ctcctgggtcaggtctatgccattttttcttatatctgctcacacagtacagaaatgactaaaattttgggtctgggctgttatatcactttgtgttaagttatttgtagtagctaatgt

SEQ ID NO: 624069 - DNA, 120 bp, Artificial Sequence
  ENSG00000178385_78 (sequence is synthesized)
gctaatgtgctaacttatatatgtgttctttctgttttttggattttaccttttgttttggcataacttatctatatttttgtttacattattttaaaaatatcagtaactgtaataata

SEQ ID NO: 624070 - DNA, 120 bp, Artificial Sequence
  ENSG00000178385_79 (sequence is synthesized)
aagttgtattgttgacaatacctctagtttttaaggtcatctgtcacataatttaagtgcaccagttcctaatgtataaagttctctctctctctctctcaataaacaatgcagaaaata

SEQ ID NO: 624071 - DNA, 60 bp, Artificial Sequence
  ENSG00000178385_80 (sequence is synthesized)
atatgtggcctgatgctgagatggagtttcactcttgttggccaggctggggtgcaatgg

SEQ ID NO: 624072 - DNA, 120 bp, Artificial Sequence
  ENSG00000178385_81 (sequence is synthesized)
aggcgtgagccactgcacccagcctcaaacacaaattaaatacatacctctctttaacctaaatagaaaaaccgtaaagcccagattgcaagatttttaaatacaataagaatatcctga

SEQ ID NO: 624073 - DNA, 120 bp, Artificial Sequence
  ENSG00000178385_82 (sequence is synthesized)
attataaaactgctttgctaaagcctaatccaggatttatcctcctagaggactacaaggaaagcacagccttgggagagataaacattttgacaaaacaatgataaaattccacatcct

SEQ ID NO: 624074 - DNA, 120 bp, Artificial Sequence
  ENSG00000178385_83 (sequence is synthesized)
gagaatacctccttcaacagatccacctgtattcacttgccgacctgcagcagacccaggcactacagccaaatctaacctgatccacagatgattgaaggatcgggggagctcggcacg

SEQ ID NO: 624075 - DNA, 120 bp, Artificial Sequence
  ENSG00000178385_84 (sequence is synthesized)
ggatgtggcagcaaatgtgcggcactaaggacaaagtcactgccttttgtggaagccagatcagaaagatgactgtgtgttgtgagtggtggatagagagccctgttgcccaggtgagaa

SEQ ID NO: 624076 - DNA, 120 bp, Artificial Sequence
  ENSG00000178385_85 (sequence is synthesized)
ggagctcagttgagataaggattccaggagccaactcgagcccctcaggtagagacaacaataccggttgaggctgcagctgtggagttggatggtgtttagtcagtgctgaaatcactt

SEQ ID NO: 624077 - DNA, 120 bp, Artificial Sequence
  ENSG00000178385_86 (sequence is synthesized)
tcctgggagtcccttggcatgcagtcatctgagtgctgttgttgttgttgggtttttgttgtttcctattttaaaagagtaatcataatactgacgaagtgagggcctgttttcaaagaa

SEQ ID NO: 624078 - DNA, 120 bp, Artificial Sequence
  ENSG00000178385_87 (sequence is synthesized)
catttacttaaagatatagagtaaggttagcatcggtcttgccagtggtagaaacctatgccaccaacagccatcatgaaagggccccaggagtctttctggttcttcatttctattcag

SEQ ID NO: 624079 - DNA, 120 bp, Artificial Sequence
  ENSG00000178385_88 (sequence is synthesized)
tttgattcaacaagtgtgtattgattgaatgctttctgtgtgccaatcattgagctagccacagaggaggcaaaggtgattaagccacaattccttccctcactgagctcacagtctgat

SEQ ID NO: 624080 - DNA, 120 bp, Artificial Sequence
  ENSG00000178385_89 (sequence is synthesized)
gagagaggcagataggcattgttgaagtcagcggagttgaacctagggtacttggggaatacatctgaccaagtgtgtggcagattgtattttgcaaaaatagctgcaacagtatcttcc

SEQ ID NO: 624081 - DNA, 120 bp, Artificial Sequence
  ENSG00000178385_90 (sequence is synthesized)
atcccacatgtctttcttacactgtgactttgatgctcctcctattcagtagtgagatctgtgttccttctccccgaatttgggcaggtctgtgactatggaagtgatgccatgtgattt

SEQ ID NO: 624082 - DNA, 120 bp, Artificial Sequence
  ENSG00000178385_91 (sequence is synthesized)
ccaaagccaagtcataaaaggtgatatagctccaacctggtgctgtctggagatgctcactcatggcaacccagtggccatgttgtaaggaagtccagattagccctcatagaacaacca

SEQ ID NO: 624083 - DNA, 120 bp, Artificial Sequence
  ENSG00000178385_92 (sequence is synthesized)
catgaacaggcctcatatggtagttgttctagctggcagcgatcatcagccaccagagagatgagtgaagacagccccacatgattccagctgctagccttcaagtcttctcacctaggc

SEQ ID NO: 624084 - DNA, 120 bp, Artificial Sequence
  ENSG00000178385_93 (sequence is synthesized)
tagagatgaggctgcagatattatggagcagaaacaaaccatctccacagtgtccttcctggagtcctgaccgaccgacaaaatgtgtgagcccataataaaatggttgttttgcaccac

SEQ ID NO: 624085 - DNA, 120 bp, Artificial Sequence
  ENSG00000178386_0 (sequence is synthesized)
agtctgaggttcctgctttaatgaccggggtagtttgagccatttctgcgtcttgcaggacattttgaacgaaccccctttgcttgaggctcgcaaccacccgatgatcgatgatcgtct

SEQ ID NO: 624086 - DNA, 120 bp, Artificial Sequence
  ENSG00000178386_1 (sequence is synthesized)
caggggaaaagaagccttggcgaagagcagaggtttagaggcacaattctgctttccctggaactgtgtcattcaggactctgcaaattccctaaagtaggaggaaaaatgaccatgtcc

SEQ ID NO: 624087 - DNA, 120 bp, Artificial Sequence
  ENSG00000178386_2 (sequence is synthesized)
aaggaggcagtgaccttcaaggatgtggcagtggtcttcactgaggaggagctggggctgctggaccttgcccagaggaagctgtatcgagatgtgatgctggagaacttcaggaacctg

SEQ ID NO: 624088 - DNA, 120 bp, Artificial Sequence
  ENSG00000178386_3 (sequence is synthesized)
ctgtcagtggggcatcaaccattccaccgagatactttccactttctaagggaggaaaagttttggatgatggatatagcaacccaaagggaagggaattcaggaggcaagatccaacct

SEQ ID NO: 624089 - DNA, 120 bp, Artificial Sequence
  ENSG00000178386_4 (sequence is synthesized)
gagatgaagacttttccagaagcaggaccacatgaagggtggtcctgccagcagatctgggaagaaattgcaagtgatttaaccaggcctcaagactctaccataaagagctctcagttc

SEQ ID NO: 624090 - DNA, 120 bp, Artificial Sequence
  ENSG00000178386_5 (sequence is synthesized)
tttgaacagggtgatgcccactcccaggttgaggaaggactatctataatgcacacaggacagaaaccttccaattgtgggaagtgtaaacaatccttcagtgatatgtccatctttgat

SEQ ID NO: 624091 - DNA, 120 bp, Artificial Sequence
  ENSG00000178386_6 (sequence is synthesized)
cttcctcagcaaatacgctcagcagagaagtctcattcctgtgatgagtgtggaaaaagcttctgttacatctcagcgcttcatattcatcagagagtccacctgggagagaaactcttt

SEQ ID NO: 624092 - DNA, 120 bp, Artificial Sequence
  ENSG00000178386_7 (sequence is synthesized)
aagtgtgacgtgtgtggtaaggaattcagtcagagtttacatctgcaaactcatcagagagtccatactggagagaaacctttcaaatgtgaacaatgtgggagaggcttcagatgtaga

SEQ ID NO: 624093 - DNA, 120 bp, Artificial Sequence
  ENSG00000178386_8 (sequence is synthesized)
tcagcacttacagttcattgcaaattacacatgggagagaaacattataattgtgaggcatgtgggagggccttcattcatgatttccagcttcagaaacatcagagaattcacacaggg

SEQ ID NO: 624094 - DNA, 120 bp, Artificial Sequence
  ENSG00000178386_9 (sequence is synthesized)
cttcattcgtaggctggatttgtgtaagcatcagacgatccacacaggagagaaaccatataattgtaaagaatgtgggaagagcttcagacggtcctcctatcttttgatccatcagcg

SEQ ID NO: 624095 - DNA, 120 bp, Artificial Sequence
  ENSG00000178386_10 (sequence is synthesized)
agtccacactggagaaaagccatacaaatgtgacaagtgtgggaagagctacattactaagtcaggtcttgacttgcaccatagagcccacacaggagagagaccttataactgtgatga

SEQ ID NO: 624096 - DNA, 120 bp, Artificial Sequence
  ENSG00000178386_11 (sequence is synthesized)
ctgtgggaagagctttagacaggcctcaagtattttgaatcataagagactccattgccgaaaaaaaccattcaaatgtgaggattgtggaaagaagcttgtataccggtcataccgtaa

SEQ ID NO: 624097 - DNA, 120 bp, Artificial Sequence
  ENSG00000178386_12 (sequence is synthesized)
agaccaacaaaaaaaccacagtggagaaaatccatccaaatgtgaagactgtgggaagcgctacaagaggcgcttgaatcttgatataattttatcattatttttaaatgacacgtaagt

SEQ ID NO: 624098 - DNA, 120 bp, Artificial Sequence
  ENSG00000178386_13 (sequence is synthesized)
gttgtacatatttatggggtacagtgtgatatttaaatatatgtatatgatgtataatgatcaaatcagtgtaattagcacatttatcacctcaattatctcttttttgtgttgagaaaa

SEQ ID NO: 624099 - DNA, 120 bp, Artificial Sequence
  ENSG00000178386_14 (sequence is synthesized)
ttaaaaattcattgttccagcagtttgaaaataaattgttgtcgatgatagtcacctttagtgctgcagaacagcagaacttcttcctcttatctacctgtacttttgcatccattagcc

SEQ ID NO: 624100 - DNA, 120 bp, Artificial Sequence
  ENSG00000178386_15 (sequence is synthesized)
aacctttggccatcccacctatcccttacccttccctgcctctagagccactgttctcactacttctaagaaatcagctttttaagcttccccatgtgattgaggacagtttgaagttag

SEQ ID NO: 624101 - DNA, 120 bp, Artificial Sequence
  ENSG00000178386_16 (sequence is synthesized)
tgtttcagccatagctcagcataccccagtggtcgtgggactgtcagagcagagaatgctgcagggtttctaacagaagtttgacaattagttattattcaggagacaggtcttagtata

SEQ ID NO: 624102 - DNA, 120 bp, Artificial Sequence
  ENSG00000178386_17 (sequence is synthesized)
agagtttgttcacacactttcaaaacactaatgatgaacatgtcaaaattgatgaccactagaatgtcagccacatgtgtctttgtatttttgctgcatccttacattgcttgagtctgg

SEQ ID NO: 624103 - DNA, 72 bp, Artificial Sequence
  ENSG00000178386_18 (sequence is synthesized)
ctttgtatttttgctgcatccttacattgcttgagtctggaagattgaggctgcactgacctatggtagtgc

SEQ ID NO: 624104 - DNA, 120 bp, Artificial Sequence
  ENSG00000178386_19 (sequence is synthesized)
gccccacagcagtgtccaagcatgttacaacccatgctgtttcagctctgccatctggggatggccaagtgccaatcagctcagtggagcatcagggtagcagcccctgccctcttggca

SEQ ID NO: 624105 - DNA, 120 bp, Artificial Sequence
  ENSG00000178386_20 (sequence is synthesized)
agtcagtggaccggtacaggtctgtggccctggagttggatatccttgctttaaaccctgagcctcctttcagccatctgacggctcaacagtcactctatctagctccttgaatattgt

SEQ ID NO: 624106 - DNA, 120 bp, Artificial Sequence
  ENSG00000178386_21 (sequence is synthesized)
atctcctcgcttgttccctgtccaagaacactcctgtcaatcatgggagacatttagacttcataaattctttctattcaatattttcgctcgaggactctgggaaggacaactgtcagg

SEQ ID NO: 624107 - DNA, 120 bp, Artificial Sequence
  ENSG00000178386_22 (sequence is synthesized)
ggagcaccatgtagtcgcaacacttgagcctaaagggtgaggtgatggacattttccttttgcatctgaggctctgcagtccagacaccttgcgggattcctgatacttcagctcaggca

SEQ ID NO: 624108 - DNA, 120 bp, Artificial Sequence
  ENSG00000178386_23 (sequence is synthesized)
caattctgctttccctggaactgtgtcattcaggactctgcaaattccctaaagtaggaggaaaaatgaccatgtccaagggcatcaaccattccaccgagatactttccactttctaag

SEQ ID NO: 624109 - DNA, 120 bp, Artificial Sequence
  ENSG00000178394_0 (sequence is synthesized)
gtggaggatggggcttctcggttctagatatttctgggattggagactgtttgctagtggggagactccagctccggcagccagttcgggagcggcaaagtaaaatggacagcgacagac

SEQ ID NO: 624110 - DNA, 120 bp, Artificial Sequence
  ENSG00000178394_1 (sequence is synthesized)
agacgttccagccacctctccgccgccgggagatcctggagctgctttcaggccaactccagtttcccagctggagcttctgaacgcgctggactgcgagagcccagggagcgcctgaaa

SEQ ID NO: 624111 - DNA, 120 bp, Artificial Sequence
  ENSG00000178394_2 (sequence is synthesized)
gctgctcctcggagatacccttcgccgaagcagtaagaacttcctgcttgggtctctgcattcccttcctccgaaacttcccaggagaagggcggaagaccccaggggaaggggcgaggc

SEQ ID NO: 624112 - DNA, 120 bp, Artificial Sequence
  ENSG00000178394_3 (sequence is synthesized)
gaatcttcgcgctgctttttcttccctcccccttcccgcgccgggcgcgcaggcatggatgtgctcagccctggtcagggcaacaacaccacatcaccaccggctccctttgagaccggc

SEQ ID NO: 624113 - DNA, 120 bp, Artificial Sequence
  ENSG00000178394_4 (sequence is synthesized)
ggcaacactactggtatctccgacgtgaccgtcagctaccaagtgatcacctctctgctgctgggcacgctcatcttctgcgcggtgctgggcaatgcgtgcgtggtggctgccatcgcc

SEQ ID NO: 624114 - DNA, 120 bp, Artificial Sequence
  ENSG00000178394_5 (sequence is synthesized)
ttggagcgctccctgcagaacgtggccaattatcttattggctctttggcggtcaccgacctcatggtgtcggtgttggtgctgcccatggccgcgctgtatcaggtgctcaacaagtgg

SEQ ID NO: 624115 - DNA, 120 bp, Artificial Sequence
  ENSG00000178394_6 (sequence is synthesized)
acactgggccaggtaacctgcgacctgttcatcgccctcgacgtgctgtgctgcacctcatccatcttgcacctgtgcgccatcgcgctggacaggtactgggccatcacggaccccatc

SEQ ID NO: 624116 - DNA, 120 bp, Artificial Sequence
  ENSG00000178394_7 (sequence is synthesized)
gcgcaccccggaagaccgctcggaccccgacgcatgcaccattagcaaggatcatggctacactatctattccacctttggagctttctacatcccgctgctgctcatgctggttctcta

SEQ ID NO: 624117 - DNA, 120 bp, Artificial Sequence
  ENSG00000178394_8 (sequence is synthesized)
tgggcgcatattccgagctgcgcgcttccgcatccgcaagacggtcaaaaaggtggagaagaccggagcggacacccgccatggagcatctcccgccccgcagcccaagaagagtgtgaa

SEQ ID NO: 624118 - DNA, 120 bp, Artificial Sequence
  ENSG00000178394_9 (sequence is synthesized)
tggagagtcggggagcaggaactggaggctgggcgtggagagcaaggctgggggtgctctgtgcgccaatggcgcggtgaggcaaggtgacgatggcgccgccctggaggtgatcgaggt

SEQ ID NO: 624119 - DNA, 120 bp, Artificial Sequence
  ENSG00000178394_10 (sequence is synthesized)
gcaccgagtgggcaactccaaagagcacttgcctctgcccagcgaggctggtcctaccccttgtgcccccgcctctttcgagaggaaaaatgagcgcaacgccgaggcgaagcgcaagat

SEQ ID NO: 624120 - DNA, 120 bp, Artificial Sequence
  ENSG00000178394_11 (sequence is synthesized)
ggccctggcccgagagaggaagacagtgaagacgctgggcatcatcatgggcaccttcatcctctgctggctgcccttcttcatcgtggctcttgttctgcccttctgcgagagcagctg

SEQ ID NO: 624121 - DNA, 120 bp, Artificial Sequence
  ENSG00000178394_12 (sequence is synthesized)
ccacatgcccaccctgttgggcgccataatcaattggctgggctactccaactctctgcttaaccccgtcatttacgcatacttcaacaaggactttcaaaacgcgtttaagaagatcat

SEQ ID NO: 624122 - DNA, 120 bp, Artificial Sequence
  ENSG00000178394_13 (sequence is synthesized)
taagtgtaagttctgccgccagtgatgacggaggagtagccggccagtcgaggctacaggatccgtcccattcactatgcttcccccaaccctagggaatcaacacttaagataattcgc

SEQ ID NO: 624123 - DNA, 120 bp, Artificial Sequence
  ENSG00000178395_0 (sequence is synthesized)
gcagcgtcctcgggaggtctcaggccccttgggcagacgctgcgcgtgcccagagggagggatggcaggcttcagccacttctcccagccgccctaccgggatctctgggaacccccgcg

SEQ ID NO: 624124 - DNA, 120 bp, Artificial Sequence
  ENSG00000178395_1 (sequence is synthesized)
gcccggcggagaacgagagtccacgcagcggctgggcgggcagaggtccggagccgactccaccgcgtgctcccgggccgggactccgggtgcggagagcgaagctggggcgtgctggct

SEQ ID NO: 624125 - DNA, 120 bp, Artificial Sequence
  ENSG00000178395_2 (sequence is synthesized)
gcacccgcactgttcgttcaccccgcggcctcgcaggcgcgggtgctcagattcactgcggggcagccgaagcctgagcgatgtggcccgcaggcccctggaacgttccaggaagcaccg

SEQ ID NO: 624126 - DNA, 120 bp, Artificial Sequence
  ENSG00000178395_3 (sequence is synthesized)
gccccgcagcaggcgcctggaagatgcctggggagagacaggaaccaagccccgcccggcttggcagccgcagacccagctgccaccccagcggccgcagccctgcccgcattaccctct

SEQ ID NO: 624127 - DNA, 120 bp, Artificial Sequence
  ENSG00000178395_4 (sequence is synthesized)
ggcccagggagactcgcccccgccttgccccggaggagctggcactcccctgagtggcacattcagggtagaaaaggcacagggtggagaccagtgggcagtgccactcggcagacatct

SEQ ID NO: 624128 - DNA, 120 bp, Artificial Sequence
  ENSG00000178395_5 (sequence is synthesized)
aggtcgctggtccccttcctcagttccctcggagcggtcttctgtgccctcgcaaaagttcaagaggcactcagcctgcgtgtgcgcccagaagagagacagcagcgaccaggttgagtc

SEQ ID NO: 624129 - DNA, 120 bp, Artificial Sequence
  ENSG00000178395_6 (sequence is synthesized)
attagccagccgggactcccagcccttggcctccagcaaagagatgcggagcccgcacacccaggtcctgaagagcaagctggaagaggtggtggtgtcctcccaggaccagcagattgt

SEQ ID NO: 624130 - DNA, 120 bp, Artificial Sequence
  ENSG00000178395_7 (sequence is synthesized)
ggccctggtgctgacccgtctcaagaaggcccagaggatacgggagctgcagcagcaggcggctaaggcctgggaggagctgaagcgctcggatcagaaggtccagatgaccctggagcg

SEQ ID NO: 624131 - DNA, 120 bp, Artificial Sequence
  ENSG00000178395_8 (sequence is synthesized)
tgctgctgcggcagagccaggagcagtggcaggagaaggagcagcgcaagaccctccagagccctgagcagcgcggcctgcggcgggacagccagaggaagaacgtgcccccgggggaaa

SEQ ID NO: 624132 - DNA, 120 bp, Artificial Sequence
  ENSG00000178395_9 (sequence is synthesized)
gccggtggaaggagcaaccagaggaccaggagagcccgcgccaggagaagctggagaaggcgcgcgcccaggcagagcaccgaaaacagtgccaggtgcggcgcctgcgggagcaggaga

SEQ ID NO: 624133 - DNA, 120 bp, Artificial Sequence
  ENSG00000178395_10 (sequence is synthesized)
agatgctacggaacctccgggagcagcacagcctgcagctgcagaggaggctggtggaagcctgtcgcaagaggcacctacatgccgtggagggccagaagaaggtccaggacaccaacc

SEQ ID NO: 624134 - DNA, 120 bp, Artificial Sequence
  ENSG00000178395_11 (sequence is synthesized)
tgagctccctcatcaattaccaggcccggaaggtcctcatggactgccaggccaaggctgaggagctccttaggcagctgtccctggaacaaagtttccagcggtcccaggagatacacc

SEQ ID NO: 624135 - DNA, 120 bp, Artificial Sequence
  ENSG00000178395_12 (sequence is synthesized)
agggcctgaggaaggagcggcaacgcgagctgagggagaaggcccagaaggaggaagagcagttgcagcaggccaggtggcgcgcaggggagtcagaggaacagaggaagatgcgcaaaa

SEQ ID NO: 624136 - DNA, 120 bp, Artificial Sequence
  ENSG00000178395_13 (sequence is synthesized)
gaattctggtggagctggcggatgagaagatccgacaggccaggagtcacgtgcacaagaccactagggacaaggtgcagcacctccgggagctcaaccacctgagggagaaaaaccacc

SEQ ID NO: 624137 - DNA, 120 bp, Artificial Sequence
  ENSG00000178395_14 (sequence is synthesized)
acatcctgaaactgaaagccgagaaggaggaaaagtgtcacattgagggcatcaaggaggccattaagaaaaaggagcagagggtgcagcacatttcccaagggaaagacccaaacttcc

SEQ ID NO: 624138 - DNA, 120 bp, Artificial Sequence
  ENSG00000178395_15 (sequence is synthesized)
aggagttccagaagctccctcaggcctccaggagagaggagagagcgcctcccaacagctcccttgatcagatggtactagaggcccagctccgtgcctgtcagcagaacaggggttact

SEQ ID NO: 624139 - DNA, 120 bp, Artificial Sequence
  ENSG00000178395_16 (sequence is synthesized)
gagaaccaaggacgcctggcttacagtgcgcagccagaaggagatgtggcaatgtgattccttttgtaatctgattataattgaacattgattttaaaaaagcatgtaaaatagctgcaa

SEQ ID NO: 624140 - DNA, 120 bp, Artificial Sequence
  ENSG00000178397_0 (sequence is synthesized)
aggctgcgcggccaggctggtacaggcggctgctcgcggaggcacttctccgagcgtgacgtgcggactccgctccactgcggcccgcccgcccgccggtctagccgccgcctccttcgc

SEQ ID NO: 624141 - DNA, 120 bp, Artificial Sequence
  ENSG00000178397_1 (sequence is synthesized)
tccctgagcacgccaggcgagggtcagctgccggggcgacgcggcgcggagagggcgggcgggggggctgtgggagcgccggtctctatatggcggcggctctgtcgggcctggctgtcc

SEQ ID NO: 624142 - DNA, 120 bp, Artificial Sequence
  ENSG00000178397_2 (sequence is synthesized)
ggctctcgcgctcggccgccgcccgctcctatggggtcttctgcaaggggctgactcgcacgctgctcatcttcttcgacctggcctggcggctgcgtatcaacttcccctacctctaca

SEQ ID NO: 624143 - DNA, 120 bp, Artificial Sequence
  ENSG00000178397_3 (sequence is synthesized)
tcgtggcttccatgatgctcaacgtccgcctgcaggttcatattgagatccattgaaggccctcccagactgacgaaggcgtgacctcaggcccaccgcatccaagaacacgaagcatga

SEQ ID NO: 624144 - DNA, 120 bp, Artificial Sequence
  ENSG00000178397_4 (sequence is synthesized)
gggacagaagagggcccctcggcacctgcctggcacaagtgcagcaggccggaggaggtgactcggacaaactatcatgcagccttaagaaaagaatgccggagggcccttggcctgcag

SEQ ID NO: 624145 - DNA, 120 bp, Artificial Sequence
  ENSG00000178397_5 (sequence is synthesized)
atgcaccctcctggatgaataagcctgtggttgatggaaattcacaaagtgaggcattatcactggaaatgagaaaggatccgagcggggctggcctctggcttcacagtggcggcccag

SEQ ID NO: 624146 - DNA, 120 bp, Artificial Sequence
  ENSG00000178397_6 (sequence is synthesized)
tgcttccatatgtgagagaatcagtaagaagaaatccagcctcagcagccactccgagcacagccgtgggtttgttccctgctccaacagagtgttttgctcgggtgtcctgcagtggtg

SEQ ID NO: 624147 - DNA, 120 bp, Artificial Sequence
  ENSG00000178397_7 (sequence is synthesized)
ttgaagctctggggcggcgagactggctgggaggagggcccagggccactgacggccacagaggacagtgccccaaaggagagcctcgggtgtcacgactgccacgccatcaaaaagtgc

SEQ ID NO: 624148 - DNA, 120 bp, Artificial Sequence
  ENSG00000178397_8 (sequence is synthesized)
cggaaatgggaagttttcaggatgacccaccaagtgcttttcccaagggtctgggctctgagttggaacccgcttgcctgcactccatcctgtctgcaacgctgcacgtgtatcccgaag

SEQ ID NO: 624149 - DNA, 120 bp, Artificial Sequence
  ENSG00000178397_9 (sequence is synthesized)
agcaaacaatagaattcaagaaaatgcttaaaagcacctcagatggtctgcagataacactggggttactggctctgcaaccttttgaattagcaaatacattatgccatagttaaggta

SEQ ID NO: 624150 - DNA, 120 bp, Artificial Sequence
  ENSG00000178397_10 (sequence is synthesized)
caagcagaacaataccaatagattaattttaagagttgtcttagaatgatttctttcgcattaagtctggatgcaaactgtgcagcccttaggttcctgctgtagttttgtacgacctgg

SEQ ID NO: 624151 - DNA, 120 bp, Artificial Sequence
  ENSG00000178397_11 (sequence is synthesized)
cagacttaaagtaaattgagtttaaattcaaagccagttgatgcggaaggaacttttttggcatgtgttaaattgtgctttaaaagacatataaagaattgggaaacatttcaggagacg

SEQ ID NO: 624152 - DNA, 120 bp, Artificial Sequence
  ENSG00000178397_12 (sequence is synthesized)
atcatagcctgtataaataccagattagaacatacggatttaccatgaagttctgtcttcaacatccattctaaagggctactgtcccaaatcctgtgtgtccttttgacttgtctgatc

SEQ ID NO: 624153 - DNA, 120 bp, Artificial Sequence
  ENSG00000178397_13 (sequence is synthesized)
acccaatggaagtggatacttgtaaagtctacaccactgtacttggcgttaaatcttgctgaattcgtggtaagctgttaccatgtctacattttgtagaatgattttggtctgcagcaa

SEQ ID NO: 624154 - DNA, 120 bp, Artificial Sequence
  ENSG00000178397_14 (sequence is synthesized)
aattcgatttcacttctcatacccctttccttccacttgaaatgcaatttagacagaggccctgtggtgaaagttgcaatattaagtttacctttagaagatcccttctcaaactcagaa

SEQ ID NO: 624155 - DNA, 120 bp, Artificial Sequence
  ENSG00000178397_15 (sequence is synthesized)
ccctagcagtgttaccttaaacaaaaatgagctcgagaaaaaagtagctcagttacagagaagcaaatcgagttatttcccacataaaaagtttcccagattctaagaattgcagtatcc

SEQ ID NO: 624156 - DNA, 120 bp, Artificial Sequence
  ENSG00000178397_16 (sequence is synthesized)
tgtaccctaaaatttttcaaggtgactcctgttgtcgtctgttgataactttaataaaggtcatttaaggacataagtttttaaagactcccaaagtgaaacttaaacattttcgggatt

SEQ ID NO: 624157 - DNA, 120 bp, Artificial Sequence
  ENSG00000178397_17 (sequence is synthesized)
atcgattgcatatatcagtttatgctgtgtgctgaattactatgccatgtgctattttagtgtttggggaaaatgaaaaataaaatttgttctttagcttaataaatatgtcttatttta

SEQ ID NO: 624158 - DNA, 70 bp, Artificial Sequence
  ENSG00000178397_18 (sequence is synthesized)
tcatattgagatccattgaaggccctcccagactgacgaaggcgtgacctcaggcccaccgcatccaaga

SEQ ID NO: 624159 - DNA, 120 bp, Artificial Sequence
  ENSG00000178401_0 (sequence is synthesized)
gggggacctcggagatccacgagattgccagagaaggaaattgaggcccaagaagctgcatgacttagccaagttcacggagtagaacccgggattggagcccgggacattgaaatgaag

SEQ ID NO: 624160 - DNA, 120 bp, Artificial Sequence
  ENSG00000178401_1 (sequence is synthesized)
gcgtcttgcattgcagctccgttgcagcgcagaggcgcaggaaggcagactaccacgagcctcgggctgcggcctcgccctcctggtcgagcctcctgccctccaaccctctgctcccgt

SEQ ID NO: 624161 - DNA, 120 bp, Artificial Sequence
  ENSG00000178401_2 (sequence is synthesized)
ttctccctctggttcatagcccgcgggacagagcagccctggattgggaggctcctcaggtctcaggctcaggtgcagaagcagagcccctaactggaaggctcggaggtgggccggtga

SEQ ID NO: 624162 - DNA, 120 bp, Artificial Sequence
  ENSG00000178401_3 (sequence is synthesized)
ggcaagcaagccctgtggggggttgaggacagcttgggttggatgtccctcactgcagcctgtccgtggatgtctctgccttaagggaattggaggtggaaccatccagtcttgaaggtc

SEQ ID NO: 624163 - DNA, 120 bp, Artificial Sequence
  ENSG00000178401_4 (sequence is synthesized)
aacggagcgtgaagagaggagcgtgcagcttgagggtctaaggataactctggggccatgacagccatgagtctcacagaggaccccgagacttctgtgctgcgagtaaccggacttgtt

SEQ ID NO: 624164 - DNA, 120 bp, Artificial Sequence
  ENSG00000178401_5 (sequence is synthesized)
ctgagacctttgccctagaggatggccaaggggctcctggtgacctatgccctctgggctgtggggggccctgctgggctccaccacctgtacctgggaagggacagccacgccctgctc

SEQ ID NO: 624165 - DNA, 120 bp, Artificial Sequence
  ENSG00000178401_6 (sequence is synthesized)
tggatgctgaccctggggggaggtgggctgggctggctctgggagttctggaagctcccaagctttgtagctcaggccaacagagcccagggacagaggcagagccccagaggggtgaca

SEQ ID NO: 624166 - DNA, 120 bp, Artificial Sequence
  ENSG00000178401_7 (sequence is synthesized)
ccccctctgagtcccattcgctttgctgcccaggtgatagttggcatctattttggccttgtggcactgattagcctttcttccatggtcaacttctatattgtggccctcccactggca

SEQ ID NO: 624167 - DNA, 120 bp, Artificial Sequence
  ENSG00000178401_8 (sequence is synthesized)
tggtggctgctgttggcaaccagacctcagactttaagaacactctggggtcagcatttctcacttcacctatcttctatggccgccccatagccatactgcccattagcgtggccgcca

SEQ ID NO: 624168 - DNA, 120 bp, Artificial Sequence
  ENSG00000178401_9 (sequence is synthesized)
gcattacagctcagaggcatcgccgctacaaagctttggtggcatcagagccgctcagtgtgcggctctatcgtctgggcttggcttaccttgctttcacaggcccactggcatacagtg

SEQ ID NO: 624169 - DNA, 120 bp, Artificial Sequence
  ENSG00000178401_10 (sequence is synthesized)
ccctctgcaacacagctgccaccctcagctatgtggcagaaacctttggctccttcttgaattggttcagcttcttcccccttcttggccgcctcatggagtttgtcctccttctgcctt

SEQ ID NO: 624170 - DNA, 120 bp, Artificial Sequence
  ENSG00000178401_11 (sequence is synthesized)
accggatctggaggctactgatgggggagactggcttcaacagcagctgctttcaggagtgggcgaagctctatgagtttgttcacagttttcaggatgagaagcgtcagctggcttacc

SEQ ID NO: 624171 - DNA, 120 bp, Artificial Sequence
  ENSG00000178401_12 (sequence is synthesized)
aggttttgggcctctcagaaggggcaacaaatgaagaaatacatcggagttaccaggagctagtgaaggtctggcacccagaccacaacctggaccagacagaggaggcacagaggcact

SEQ ID NO: 624172 - DNA, 120 bp, Artificial Sequence
  ENSG00000178401_13 (sequence is synthesized)
tcctggagatccaggctgcgtatgaagtcctgagtcaacccaggaagccctggggatcccggaggtgaaaagaaacttccccctgaggactgactcttcctagcagagctgggcaacttg

SEQ ID NO: 624173 - DNA, 120 bp, Artificial Sequence
  ENSG00000178401_14 (sequence is synthesized)
gaggactgactcttcctagcagagctgggcaacttgtcccaaatctagctttgcccacgaatggcatcccaacagagttaaagaaactgcttgcaggggctgggcgtggtggctcatgcc

SEQ ID NO: 624174 - DNA, 120 bp, Artificial Sequence
  ENSG00000178401_15 (sequence is synthesized)
agtgagccctaagaggtcatatagagagcagcatttcctctccaggccgagatgagggctgagggcgtttggagggaagcgctctgcctactgccgggaggtgacacccgcgaggccgac

SEQ ID NO: 624175 - DNA, 120 bp, Artificial Sequence
  ENSG00000178401_16 (sequence is synthesized)
cctgtgctgctgtgcctcggtacccgcacaaggtgtctggggaccgcccggacccccccttccatcggcggcagcgccacctggcggccatggtgcggtggtgtgggaggagctgggccc

SEQ ID NO: 624176 - DNA, 120 bp, Artificial Sequence
  ENSG00000178401_17 (sequence is synthesized)
gggctgggcactgagcccaccggagctgcaggcgtctgcagagccttgcaccgagtttccccgcgagggcgggcgggaggagtcccaggcgggaatgtgatccccagggggccggggagg

SEQ ID NO: 624177 - DNA, 120 bp, Artificial Sequence
  ENSG00000178401_18 (sequence is synthesized)
gccctggggaggagcctggcctggggaagccggacttccgtgacacaacagacacaaaagacaaagtccatttggatggaagtgggagcagggcgagacgggccattttcactctgtggt

SEQ ID NO: 624178 - DNA, 120 bp, Artificial Sequence
  ENSG00000178401_19 (sequence is synthesized)
tcaaaaaaaaaaaaaagaaagaaaaactgcttgcaggggacatgagaaaacaatggggtgagaaaaggttgtggtagaaggatgtgtttatattctgaatttctgaattcttggctattg

SEQ ID NO: 624179 - DNA, 120 bp, Artificial Sequence
  ENSG00000178401_20 (sequence is synthesized)
ggctattgcattcttgacaatttttcttaaaaccagagagtgaaaggcatattataaaacaatcaaatatcttttagagtatggacaactattatatatcaataaaaaattaattagaaa

SEQ ID NO: 624180 - DNA, 120 bp, Artificial Sequence
  ENSG00000178401_21 (sequence is synthesized)
aaatatatcttttagagaacacaccaccttatcccacccatgatatattgatgtgtgatggagaaagattatttaactatttttttaaatgtgtaaagcagcagggcatagtggcttacg

SEQ ID NO: 624181 - DNA, 87 bp, Artificial Sequence
  ENSG00000178401_22 (sequence is synthesized)
gaggctgaggcaggaacaactgagattgagccactgcactgtactccagcctgggcggcagagctagattctgtctcaaaaattaaa

SEQ ID NO: 624182 - DNA, 120 bp, Artificial Sequence
  ENSG00000178401_23 (sequence is synthesized)
agcctgggcggcagagctagattctgtctcaaaaattaaataaataaataagtaagtaaataaataaataaataaatgtataaagcactatgttaggagattgaaggaaaaatatgaagg

SEQ ID NO: 624183 - DNA, 120 bp, Artificial Sequence
  ENSG00000178401_24 (sequence is synthesized)
ttctagtattcacaagctgtcctgtgataagagagatttgatcttttctgtagatggggtgagactaggattaaatttcaaaatttgagaaaaatattttcattccatttatgggagaac

SEQ ID NO: 624184 - DNA, 120 bp, Artificial Sequence
  ENSG00000178401_25 (sequence is synthesized)
tttctagcagctacactttctccaaaagggaacaagctactgtggagtggggggtagttcttcctcctctgcttagaggagaatttttggagagctctcagactttacataggtgattgg

SEQ ID NO: 624185 - DNA, 120 bp, Artificial Sequence
  ENSG00000178401_26 (sequence is synthesized)
actggctgacttctcaggtcttcccagtatttgaggtctgattctgggctacataccctactcctagaagcatacaatctgatgggagataatgacacaggtacacagatatcaaagccc

SEQ ID NO: 624186 - DNA, 120 bp, Artificial Sequence
  ENSG00000178401_27 (sequence is synthesized)
ttgttcagtgttttgaactaaatgtcataagagctgtaaatagtgtattggcacattggaggagggacagataacattgttttatggggactcagaaagattcattattttatatgtcat

SEQ ID NO: 624187 - DNA, 120 bp, Artificial Sequence
  ENSG00000178401_28 (sequence is synthesized)
atgtccctttggggactttgggaaaccctagggaaccagcggctagagcatctcaagggggccttattcaattctaggtaactagccaggtgtgaaagaaagggcccagggtgtctcact

SEQ ID NO: 624188 - DNA, 120 bp, Artificial Sequence
  ENSG00000178401_29 (sequence is synthesized)
ttgcagaggaagattggagaccaggaacatgattttaaattatgtgcctttactgcagctttcttgctctctttgtgtgtgtgcattctttccatttttttcttctttctggatgttaaa

SEQ ID NO: 624189 - DNA, 120 bp, Artificial Sequence
  ENSG00000178401_30 (sequence is synthesized)
ctggatgttaaatctgagtaatatatatcatttttaaagtggaattatgaccaggcatggtgcctcttgcctataatcctagcactttggcaagccaaggcaggaagattgcttgagccc

SEQ ID NO: 624190 - DNA, 120 bp, Artificial Sequence
  ENSG00000178401_31 (sequence is synthesized)
acatggcaaaactccatctctacaaaaagtacaaaaatgagccaggtgttgtggggtgcgcctgtagtcccagctaaggaggctgagattgggaggatcacttgaacccaaaaggtggag

SEQ ID NO: 624191 - DNA, 89 bp, Artificial Sequence
  ENSG00000178401_32 (sequence is synthesized)
caaaaggtacactccagcctgagtgacacagtgacagcctgtctcaaaaatataaaaataaataaataaataaagtggaattatgttga

SEQ ID NO: 624192 - DNA, 120 bp, Artificial Sequence
  ENSG00000178401_33 (sequence is synthesized)
gagttttttttttttacaaaatatggatatattttaatttactcaaatgggaactactgataagcagttcttatttttccagcataagcaaggctacaataaatatctttgaatatatgt

SEQ ID NO: 624193 - DNA, 120 bp, Artificial Sequence
  ENSG00000178401_34 (sequence is synthesized)
ccaaatctagctttgcccacgaatggcatcccaacagagttaaagaaactgcttgcaggggcatgagctactgaccccagcctagatgacctttaagcttgctttcaacctgcattctgg

SEQ ID NO: 624194 - DNA, 120 bp, Artificial Sequence
  ENSG00000178401_35 (sequence is synthesized)
tttaattgctcgaagaacaatataatgaccatctcaccctccaaaaattcacttgcatcacactgtttgttttcagttattcatgttcacttctagtcgtcgttcataaatgtacatcat

SEQ ID NO: 624195 - DNA, 120 bp, Artificial Sequence
  ENSG00000178401_36 (sequence is synthesized)
tttacatggttgaatcatatcagggacataattttgtactttcccccctccctgataaagatgatgtttttacagtaaaataaaaaaatgcttgtgattcaataagcttttaaaatatta

SEQ ID NO: 624196 - DNA, 120 bp, Artificial Sequence
  ENSG00000178403_0 (sequence is synthesized)
gccagacacgcagccactgaaccacaagcagcttcgcgttaactggagtgcctgggagtcgcgtgccaggagccgcacggccagggactgactgacagacagacacgcaccaccaccaca

SEQ ID NO: 624197 - DNA, 120 bp, Artificial Sequence
  ENSG00000178403_1 (sequence is synthesized)
acacacgagacccgggcgggccgccgccgccgccgccggggctcttggcaaactcgccggtcgcagaggtcccccgcggagctgcgccacagtagcgccgggcttgcagctttcacgccg

SEQ ID NO: 624198 - DNA, 120 bp, Artificial Sequence
  ENSG00000178403_2 (sequence is synthesized)
ggcgaaggacccggcgctgcgctcgcagctgcgcggagattcccggcacaggccaaagtcacagcaacgctgaggcacagttagagccaactaagatgttcgtcaaatccgagaccttgg

SEQ ID NO: 624199 - DNA, 120 bp, Artificial Sequence
  ENSG00000178403_3 (sequence is synthesized)
agttgaaggaggaagaggacgtgttagtgctgctcggatcggcctcccccgccttggcggccctgaccccgctgtcatccagcgccgacgaagaagaggaggaggagccgggcgcgtcag

SEQ ID NO: 624200 - DNA, 120 bp, Artificial Sequence
  ENSG00000178403_4 (sequence is synthesized)
ggcgcggggcggcgtggctgcgggtgcggagggctgccggcccgcacggctgctgggtctggtacacgattgcaaacggcgcccttcccgggcgcgggccgtctcccgaggcgccaagac

SEQ ID NO: 624201 - DNA, 120 bp, Artificial Sequence
  ENSG00000178403_5 (sequence is synthesized)
gcccttcccgggcgcgggccgtctcccgaggcgccaagacggccgagacggtgcagcgcatcaagaagacccgtagactgaaggccaacaaccgcgagcgaaaccgcatgcacaacctca

SEQ ID NO: 624202 - DNA, 120 bp, Artificial Sequence
  ENSG00000178403_6 (sequence is synthesized)
acgcggcactggacgcgctgcgcgaggtgctccccacgttccccgaggacgccaagctcaccaagatcgagaccctgcgcttcgcccacaactacatctgggcactcaccgagaccctgc

SEQ ID NO: 624203 - DNA, 120 bp, Artificial Sequence
  ENSG00000178403_7 (sequence is synthesized)
gcctggcggatcactgcgggggcggcggcgggggcctgccgggggcgctcttctccgaggcagtgttgctgagcccgggaggagccagcgccgccctgagcagcagcggagacagcccct

SEQ ID NO: 624204 - DNA, 120 bp, Artificial Sequence
  ENSG00000178403_8 (sequence is synthesized)
cgcccgcctccacgtggagttgcaccaacagccccgcgccgtcctcctccgtgtcctccaattccacctccccctacagctgcactttatcgcccgccagcccggccgggtcagacatgg

SEQ ID NO: 624205 - DNA, 120 bp, Artificial Sequence
  ENSG00000178403_9 (sequence is synthesized)
cacctcccgacaagcaccgctatgcacctcacctccccatagccagggattgtatctagagctgccatttctgctacccacgccaggccttagtgggttccctttcctgtccccagtcga

SEQ ID NO: 624206 - DNA, 120 bp, Artificial Sequence
  ENSG00000178403_10 (sequence is synthesized)
gccctcctcccttcccctgcccctcctttccacgccctggaaaccatctcacttcacagggcaggtgtagcctttctgattcctcggttgtttcttgcatttcttggctttgggtatcct

SEQ ID NO: 624207 - DNA, 120 bp, Artificial Sequence
  ENSG00000178403_11 (sequence is synthesized)
tcattcagacgggctctgatttactgaaggtgtgatggagcttattgtcaaagccaagggtggcgttttgggggcgcttcttgagacgaaaaagaccctgggaagagatgatggtggcat

SEQ ID NO: 624208 - DNA, 120 bp, Artificial Sequence
  ENSG00000178403_12 (sequence is synthesized)
atctaaagagtttgcagagcggactgacgctcctcccctttctctttaacgccgaaggacttggtgcagttcgtgtgaatctcacagggggaatgcaactggttcctgtgatctcttcac

SEQ ID NO: 624209 - DNA, 120 bp, Artificial Sequence
  ENSG00000178403_13 (sequence is synthesized)
ctttgcttctacatagagatgttaatgtcgagtagaaagaaatgtatcttagcatctgaatgattttgctggtaataatattatccacagatttgcaatggctggcatctgctttattcc

SEQ ID NO: 624210 - DNA, 120 bp, Artificial Sequence
  ENSG00000178403_14 (sequence is synthesized)
cattgctgtctgcaggctgtgggaatttcacctgtcaaaccaaacttccctctctgatgtgcactttgttctgtttcccagattcgtcacaatgcctattgtcctgtccttctctttcct

SEQ ID NO: 624211 - DNA, 120 bp, Artificial Sequence
  ENSG00000178403_15 (sequence is synthesized)
ttttcttccccattttgccatctgtctcttatgatttataaggggaaaaaaacttgttttgttagaggggcaggttagaagtcattgtataatttgtaggctttgtaatgattgaatgca

SEQ ID NO: 624212 - DNA, 120 bp, Artificial Sequence
  ENSG00000178403_16 (sequence is synthesized)
agcgtggaaatttaggctgaactctctatcaaaaggaaaaatgtggaggaaaagggaaaaatcaggagggaggattgcctcatgtattatttatttcgaccttttaggggagaaggaact

SEQ ID NO: 624213 - DNA, 120 bp, Artificial Sequence
  ENSG00000178403_17 (sequence is synthesized)
cccccattctttcaagagattaaaaataaatcaacagtctgaaaacctaagcagacacggagcattatccggatcagccacacacgtgttcccttctatttattataaagaaatttttca

SEQ ID NO: 624214 - DNA, 120 bp, Artificial Sequence
  ENSG00000178403_18 (sequence is synthesized)
tgggaaaatatgtattttttgtatattctacagagtttattctagtatgtatttacatcttgaagaacaagaaagttgttcttgtgattaaactataaataaactatctaattttcataa

SEQ ID NO: 624215 - DNA, 120 bp, Artificial Sequence
  ENSG00000178404_0 (sequence is synthesized)
atgagtagccagccagggcagaggccgggctgcaggtggaggcggggaagcgattccggccacctttgtgatgggcgtctcactacctacaaagtcagcccagtgatttcaagacagccc

SEQ ID NO: 624216 - DNA, 120 bp, Artificial Sequence
  ENSG00000178404_1 (sequence is synthesized)
tggagacagtgcttcctgccctcctgtcagcttctgcctccctgtaatgtgttctgggtggtctagctcagtcatctggagacacacacagtttgctgtggaacgttgtggcttctgtgg

SEQ ID NO: 624217 - DNA, 120 bp, Artificial Sequence
  ENSG00000178404_2 (sequence is synthesized)
ctcctcaggcccgggggcgccccttgaaccctccactcttggctccaagcaccttccctgggaagctgtatctgctgggttcgcagacaggaacagaaacatggatggagccatgtggct

SEQ ID NO: 624218 - DNA, 120 bp, Artificial Sequence
  ENSG00000178404_3 (sequence is synthesized)
gagcctctgtcctgataacgaagacctgctttggaggaaaaagcacaaattgctacaagcccggggcaaaggcgatctcgctctgcagagaagagcggatgccaagctgtggaaaaacta

SEQ ID NO: 624219 - DNA, 120 bp, Artificial Sequence
  ENSG00000178404_4 (sequence is synthesized)
ccagctccagcgcttggctgaggagttgaggagagggtatcaggaggcacagcacctgcacgtcggtggcctggacaggctgcagtcagcacgtctgttgggctggggaggaggacgggc

SEQ ID NO: 624220 - DNA, 120 bp, Artificial Sequence
  ENSG00000178404_5 (sequence is synthesized)
cagggaaaatgagcctgactcgcaggggcccatccagcgaagatcagccaggcccccgagggccaaggagaagcatagagcagcccttagtgaagagaggagttgcagggaagagttggg

SEQ ID NO: 624221 - DNA, 120 bp, Artificial Sequence
  ENSG00000178404_6 (sequence is synthesized)
ccagcaacaccccaggcactccaggccccggaagacagcagcgagtccagagaaaccacagactacaaaagccacgggtcggatgaattctcacctggccccgcctgagaagagaaaggg

SEQ ID NO: 624222 - DNA, 120 bp, Artificial Sequence
  ENSG00000178404_7 (sequence is synthesized)
aaggccagaaccttcgaccaagtctgggggtggccgctgtgccatccatcctcggaggagcaaaggggcggacctagaaaggtcaaacccactcgtggctgctgtgggagaaatcgggct

SEQ ID NO: 624223 - DNA, 120 bp, Artificial Sequence
  ENSG00000178404_8 (sequence is synthesized)
aaagggggcagtttgctttgttccagccctgaccagtcgctctcagggacagagtctggaggggaagctgagagacctcgggcagctgtggccagctgattccagctgcagaagggaagc

SEQ ID NO: 624224 - DNA, 120 bp, Artificial Sequence
  ENSG00000178404_9 (sequence is synthesized)
cgtgtccccagcatctcagtgcacgctccgggagaagaacaagtggcagaaagagctggagttggcctttgaagagttgtttaatataaacagaaagctgaaaaaacacctgtgcttgta

SEQ ID NO: 624225 - DNA, 120 bp, Artificial Sequence
  ENSG00000178404_10 (sequence is synthesized)
cctggcactgaagcccaggatggaccagagacctggggaagggcatgccttctcagagatgcaagagtgtggcgctgggaccccaagagggaagaaaatggcagacccagagatgctgcc

SEQ ID NO: 624226 - DNA, 120 bp, Artificial Sequence
  ENSG00000178404_11 (sequence is synthesized)
tgccggggaacccaggagcccagcagaggaggaggcgcagcaggcagcgtccaagaccgacttgaaaacgttcatgggcaaggcccagaaccaaaaatatcagggcacggtcaagcccac

SEQ ID NO: 624227 - DNA, 120 bp, Artificial Sequence
  ENSG00000178404_12 (sequence is synthesized)
gtttagaaatggaagtcaaacattgtctcccgaggcaggtatatttatcaacaaagaggactcattattgtatagcactgaatctggacaagagacccccaaactgggcacgctggcaga

SEQ ID NO: 624228 - DNA, 120 bp, Artificial Sequence
  ENSG00000178404_13 (sequence is synthesized)
gggctcccttcagctccaccttcaagaccaggcagacagagtgggctcgacggcatccaggcaaaggcagaaagcagagatggagcagagaagacaaaaacaactggaatcgcttgaaca

SEQ ID NO: 624229 - DNA, 120 bp, Artificial Sequence
  ENSG00000178404_14 (sequence is synthesized)
aatggaacacccagatatgagcttggaaatccactacaaagctgagctagaaaaagagaggagggagcaaagaagagctcgactggcccatctgaagtcctcctccacgagagcccagga

SEQ ID NO: 624230 - DNA, 120 bp, Artificial Sequence
  ENSG00000178404_15 (sequence is synthesized)
aagggagagaggatctgagctcagcaccacttccccatcgggcaccagcctcgccgacgacgaccggcacagtcagatgatccgagaccagcagcagcagatcttacagcaaaacaggtt

SEQ ID NO: 624231 - DNA, 120 bp, Artificial Sequence
  ENSG00000178404_16 (sequence is synthesized)
gcacaagcagtttcttgaagaagcccggaaatgcttgcgggagtttcagaacatatgctaaatgcgagaggcccacccggggtaaatacatcactgataatggtgctgccagcactggta

SEQ ID NO: 624232 - DNA, 120 bp, Artificial Sequence
  ENSG00000178404_17 (sequence is synthesized)
aagccagactctgttctcggcgcttcacacgggccgtctcgtctgatgctgtggcgtcctgcagggtgggaacgggcggtgcccgtggacgtggcgctgtgcctgccggcgtcctgggca

SEQ ID NO: 624233 - DNA, 120 bp, Artificial Sequence
  ENSG00000178404_18 (sequence is synthesized)
ccacagcgttgccgcttgcccactgcctcctagcatggccagtgatcagggccaaagcggtcagtgagaaggaagtggactctggaaacgacatttatggcaaccctatcaagaggatcc

SEQ ID NO: 624234 - DNA, 120 bp, Artificial Sequence
  ENSG00000178404_19 (sequence is synthesized)
agtatgagatcaagcagataaagatgttcaaagggcctgagaaggatatagagtttatctacacggccccctcctcggcagtgtgtggggtctcgctggacgttggaggaaagaaggaat

SEQ ID NO: 624235 - DNA, 120 bp, Artificial Sequence
  ENSG00000178404_20 (sequence is synthesized)
gagtagccagccagggcagaggccgggctgcaggtggaggcggggaagcgattccggccacctttgggaagcggtaatggacgctgtcgaggtatgtttagtgagccaccggttgcatca

SEQ ID NO: 624236 - DNA, 80 bp, Artificial Sequence
  ENSG00000178409_0 (sequence is synthesized)
acacaaagagaggggaaaatacacggcgctcgcccgcccgccgcccccagcgcctccccgggccgccctggccaggccct

SEQ ID NO: 624237 - DNA, 120 bp, Artificial Sequence
  ENSG00000178409_1 (sequence is synthesized)
ccacgtggcgcccaaactcggcgcgggcccgcccggcaaagtacagaactcgcgtcccagcggaatagaagatgaactcaactgaattcaccgaagatgtagaagaagttctaaaaagta

SEQ ID NO: 624238 - DNA, 120 bp, Artificial Sequence
  ENSG00000178409_2 (sequence is synthesized)
tcactgtgaaagtggagacagaggctgaagatgctgctctggactgctccgtgaattccaggacttctgagaagcactctgtggacagcgtcctcactgccctgcaggactccagcaaac

SEQ ID NO: 624239 - DNA, 120 bp, Artificial Sequence
  ENSG00000178409_3 (sequence is synthesized)
gaaagcagctggtcagcgatggcctgctagactctgtccccggcgtgaagaggaggcggctgatccccgaggctctcctagcaggcatgcggaaccgtgagaacagctcgccctgccaag

SEQ ID NO: 624240 - DNA, 120 bp, Artificial Sequence
  ENSG00000178409_4 (sequence is synthesized)
gcaatggtgagcaggccggcaggggcaggagcctgggcaatgtgtggcctggagaggaggagccctgcaacgatgccaccaccccttcctacaagaagcctctgtatggcatctcgcaca

SEQ ID NO: 624241 - DNA, 120 bp, Artificial Sequence
  ENSG00000178409_5 (sequence is synthesized)
agatcatggagaagaagaatcctccctcgggggacctgctaaacgtgtacgagctctttgagaaggcaaacgccagcaacagcccctcgtcactgcggctcctgaatgagccacagaagc

SEQ ID NO: 624242 - DNA, 120 bp, Artificial Sequence
  ENSG00000178409_6 (sequence is synthesized)
gggactgtggcagcaccggggcaggcactgacaacgaccccaacatctacttcctgatccagaagatgttctacatgctgaacaccctcacgtccaacatgtcccagctgcacagcaagg

SEQ ID NO: 624243 - DNA, 120 bp, Artificial Sequence
  ENSG00000178409_7 (sequence is synthesized)
tggacctgctctcccttgaggtgagccgcatcaagaagcaggtgagccccactgagatggtggccaaattccagccgccccctgagtaccagctcacagccgcagagctcaagcagatcg

SEQ ID NO: 624244 - DNA, 120 bp, Artificial Sequence
  ENSG00000178409_8 (sequence is synthesized)
tggaccagagcctgtcagggggggacctggcctgccgcttgctggtgcagctcttccccgagctcttcagcgacgtggacttctcccggggctgcagtgcctgtggctttgcggccaagc

SEQ ID NO: 624245 - DNA, 120 bp, Artificial Sequence
  ENSG00000178409_9 (sequence is synthesized)
gcaagctggagtcgctgcacctgcagctcatccgcaactatgtggaggtctactacccctcggtgaaggacacggctgtgtggcaggccgagtgcctgccccagctgaacgacttcttca

SEQ ID NO: 624246 - DNA, 120 bp, Artificial Sequence
  ENSG00000178409_10 (sequence is synthesized)
gccgcttctgggcccagcgggaaatggaggacagccagcccagcggccaggtcgccagcttctttgaggcagagcaggtggaccccggccacttcctggacaacaaagaccaggaggagg

SEQ ID NO: 624247 - DNA, 120 bp, Artificial Sequence
  ENSG00000178409_11 (sequence is synthesized)
ccctgtctcttgaccggagcagcaccatcgcctcagaccacgtggtggacacgcaggacctcactgagttcctggacgaagcctcctcaccaggcgagtttgccgtcttcctcctccacc

SEQ ID NO: 624248 - DNA, 120 bp, Artificial Sequence
  ENSG00000178409_12 (sequence is synthesized)
ggctcttccccgagctcttcgaccaccgcaagctgggtgaacagtacagctgctacggggacggtggaaagcaggagctggacccgcagcggctgcagatcatccgcaactacacggaga

SEQ ID NO: 624249 - DNA, 120 bp, Artificial Sequence
  ENSG00000178409_13 (sequence is synthesized)
tctacttccctgacatgcaggaggaggaggcctggctgcagcagtgtgcccagcgcatcaacgacgagctcgagggcctggggctggacgcgggcagtgaaggcgaccccccgcgtgatg

SEQ ID NO: 624250 - DNA, 120 bp, Artificial Sequence
  ENSG00000178409_14 (sequence is synthesized)
actgctacgactcctccagtctgcccgacgacatctcagtggtcaaggtggaggacagcttcgagggcgagcggccgggtcgccgctccaagaagatctggctggtgcccatcgacttcg

SEQ ID NO: 624251 - DNA, 120 bp, Artificial Sequence
  ENSG00000178409_15 (sequence is synthesized)
acaagttagagatcccccagcctgacttcgaggtgcccggtgccgactgcctgctcagcaaggagcagctacgcagcatctacgagagcagcctgtccatcggcaacttcgcctcgcgcc

SEQ ID NO: 624252 - DNA, 120 bp, Artificial Sequence
  ENSG00000178409_16 (sequence is synthesized)
tgctggtgcacctgttccccgagctcttcacgcacgagaacctgcgcaagcagtacaactgcagcggctccctgggcaagaagcagctggacccctcccgcatcaagctcatccgccact

SEQ ID NO: 624253 - DNA, 120 bp, Artificial Sequence
  ENSG00000178409_17 (sequence is synthesized)
acgtgcagctgctctacccacgcgccaaaaacgaccgcgtctggaccctggagttcgtgggcaaactggatgagcgctgccggcgccgggacacggagcaaaggcgctcctaccagcagc

SEQ ID NO: 624254 - DNA, 120 bp, Artificial Sequence
  ENSG00000178409_18 (sequence is synthesized)
agcgcaaggtccacgtgccgggccctgagtgcagagacttgaccagctatgcaatcaaccccgagaggttccgggaggagtttgaggggcccccactgccccccgagaggagcagcaagg

SEQ ID NO: 624255 - DNA, 120 bp, Artificial Sequence
  ENSG00000178409_19 (sequence is synthesized)
acttttgcaagatccccttggacgagctggtggtcccctcgcctgacttcccggtgccttctccctacctgctgtctgacaaggaggtgcgtgagatcgtgcagcagagcctctccgtgg

SEQ ID NO: 624256 - DNA, 120 bp, Artificial Sequence
  ENSG00000178409_20 (sequence is synthesized)
gcaactttgccgcccggctcctcgtccgcctgtttcccgaactcttcaccgccgagaacctccggctgcagtacaaccattccggggcttgcaacaagaagcaactggaccccacgcggc

SEQ ID NO: 624257 - DNA, 120 bp, Artificial Sequence
  ENSG00000178409_21 (sequence is synthesized)
tgcggctcatccgccactacgtggaagccgtctacccggtggagaagatggaggaggtgtggcactacgaatgtatccccagcatcgatgagaggtgccgccgccccaacaggaaaaaat

SEQ ID NO: 624258 - DNA, 120 bp, Artificial Sequence
  ENSG00000178409_22 (sequence is synthesized)
gcgacatcctcaagaaagcaaagaaagtggagaagtgaaggcccgtgacctgcccagagattcggggtcaccagaggctgagcgatgggcacccttgggactgagcaatacttgggagca

SEQ ID NO: 624259 - DNA, 120 bp, Artificial Sequence
  ENSG00000178409_23 (sequence is synthesized)
cgcctatggcatccacagacaggcaccttatgtccgtggggagtggcttactacatttgcacacgtaaacacccacccaaccgcaagaaagaagccttgagtttggtctcttgtacttac

SEQ ID NO: 624260 - DNA, 120 bp, Artificial Sequence
  ENSG00000178409_24 (sequence is synthesized)
aacttctgtcctatgtgccccggcggggcagcctgagtgtggggagagcaagctgtgagggcagggaccagaggttaggggtcctctctccctggttgtgccctccccagcccctcacag

SEQ ID NO: 624261 - DNA, 120 bp, Artificial Sequence
  ENSG00000178409_25 (sequence is synthesized)
aaaaagaaacccttaaaaaaaatcattgggctctttgggggccattttacttagaaaaaaatctctttaaaagtgccatgttcgtgcacagtggctaatcatagcttcaggtggcatgga

SEQ ID NO: 624262 - DNA, 120 bp, Artificial Sequence
  ENSG00000178409_26 (sequence is synthesized)
tactgattttactgaccttgttttttacatctgattttggaagagtcaagatgccccttggatggcagtagaggggatggaatagtgcgaagtcctttacgaccacatgcaagttttccc

SEQ ID NO: 624263 - DNA, 120 bp, Artificial Sequence
  ENSG00000178409_27 (sequence is synthesized)
ttctgctctggtgccagggaaggcttccgttcagcttggcctgtccttcaggcgcgttggtagaatgttgtgtcactctttaggcgagaacactggatgatgatgatatgaatgtagaca

SEQ ID NO: 624264 - DNA, 120 bp, Artificial Sequence
  ENSG00000178409_28 (sequence is synthesized)
gccgtggaaacacgttcgcagtgtctccatctgagccgtgtccttccgctgcccccattccttctccatacatggttgctggttggagggagtggacatgtttccttggaaaacagtgca

SEQ ID NO: 624265 - DNA, 120 bp, Artificial Sequence
  ENSG00000178409_29 (sequence is synthesized)
ggggcttttggcttcttgttagatttaagggtgggcctctttgagctcaccatgaactgtttacttttccgtgtgtgtatttgtacaaaatccaggttccgggagctttgtggtgacttc

SEQ ID NO: 624266 - DNA, 120 bp, Artificial Sequence
  ENSG00000178409_30 (sequence is synthesized)
cccagacctcagtgttagctactccaggcagtactacatcctcattcctcagggcgggcccaggtctgggcccctcttggggataccatgcattggaaggacacaggccattttagatgg

SEQ ID NO: 624267 - DNA, 120 bp, Artificial Sequence
  ENSG00000178409_31 (sequence is synthesized)
ggtacacatgtcccttcccagggtccactcagaactttcctcttggactctctagaaggtcctgctgtcctatacctggccaccccctgccttggggggcacatgtcttcgttccctccc

SEQ ID NO: 624268 - DNA, 120 bp, Artificial Sequence
  ENSG00000178409_32 (sequence is synthesized)
gactgggaatgtcaggctcctgcaggccagctgcatgctctccaggagcaccaactgggaaatcccctgacaggtaaagtcctttaaaatgatacttttacctacctaactctgggggcc

SEQ ID NO: 624269 - DNA, 120 bp, Artificial Sequence
  ENSG00000178409_33 (sequence is synthesized)
aaatgcttaagagggaaaggaaacagtcgaatgcaaacagtgtgtcataccagagtcctggaaaatttattgaatcacacagggtagtcatagaacccctgtgggatggcttaatatttt

SEQ ID NO: 624270 - DNA, 120 bp, Artificial Sequence
  ENSG00000178409_34 (sequence is synthesized)
gctactttaaaatgcagagataacagaaacaatctggattttcttcattcagctgataagaacttcagttccagtggctgtatgacataattttgcctgtacccaggagcattttttaaa

SEQ ID NO: 624271 - DNA, 120 bp, Artificial Sequence
  ENSG00000178409_35 (sequence is synthesized)
atacaggattttaaaagcaatgttaagttgctgatctaactagtaaatttgctcctaagtgtcatttacagattatttctgttgaaactgcaaacagatttagaaaggcacagggactga

SEQ ID NO: 624272 - DNA, 120 bp, Artificial Sequence
  ENSG00000178409_36 (sequence is synthesized)
atgactctctgtcttacacagctactcatgcacacacgcactgcttactaaaagctgaagtgagatgaagggggcctacacgaataacaagttcaacttctttgtgcctggaaaggaggg

SEQ ID NO: 624273 - DNA, 120 bp, Artificial Sequence
  ENSG00000178409_37 (sequence is synthesized)
actggagcagccaggagactcactttcccccctcgcttgggcccttctctatgccttagtctctccagcacatgcacacagcatgcacacacacgcaccctacccaaagacagctgtggc

SEQ ID NO: 624274 - DNA, 120 bp, Artificial Sequence
  ENSG00000178409_38 (sequence is synthesized)
cctctcccaccacctcccccttcccaccgctggttgttgggggctggaggcgggaggtcccatggaatttgttctggtttctaggatgtaaacgaggactccaagccatgaattgccctg

SEQ ID NO: 624275 - DNA, 120 bp, Artificial Sequence
  ENSG00000178409_39 (sequence is synthesized)
ctttctagagggtggaatgttgaccctgcaactttagaagcacaatcatttattaataatttttttgaaactcccatctacccctgttagagaaatcaacaggttctaggaattaaatat

SEQ ID NO: 624276 - DNA, 120 bp, Artificial Sequence
  ENSG00000178409_40 (sequence is synthesized)
gtctctttgtaacccagagcatgttcaatttttggaaaccgtatttcagtgattttcttaataccttacatgtgtagggcatcttcccccagaatcttacagtccctttctgtgaagaga

SEQ ID NO: 624277 - DNA, 120 bp, Artificial Sequence
  ENSG00000178409_41 (sequence is synthesized)
agtggacacacgtgggaactctcaccatctctggactgtcgtcaggaaacgcctgcaggtccttgccctgtctgtatggtgtcctcacttctccatccatacaggtggctccagtgggca

SEQ ID NO: 624278 - DNA, 120 bp, Artificial Sequence
  ENSG00000178409_42 (sequence is synthesized)
tttttttattttaaattttttacatgaagcaatagaagtacaaaatacttattttttcaaaatttaatgtgttccatgaaacctgttggcagtcgctttccttcccccacatctaaattc

SEQ ID NO: 624279 - DNA, 120 bp, Artificial Sequence
  ENSG00000178409_43 (sequence is synthesized)
tttttggatttttttttttttttttttggccttgtatcccaaggactaaaagattagcacagacacgttttgatgttgaatgaactagtaagtcacagtaggtggtagtcttcattgatt

SEQ ID NO: 624280 - DNA, 120 bp, Artificial Sequence
  ENSG00000178409_44 (sequence is synthesized)
ggtggtagtcttcattgatttctctgtaagtttttaaagaatgtatgaagatagtcacgaatgtactgagtgttcgcatcccccttcagttcaccttggctgtgtctacaggacaacaaa

SEQ ID NO: 624281 - DNA, 120 bp, Artificial Sequence
  ENSG00000178409_45 (sequence is synthesized)
tgtttgacagggaataaagtcgtgtctggtgtcatttgcgctagcgtgcccctcccctttcggtgttggctccaaaccttcctttccttttatgtttgtggggagtggggaaccacatca

SEQ ID NO: 624282 - DNA, 120 bp, Artificial Sequence
  ENSG00000178409_46 (sequence is synthesized)
gcagcaatcatcaaccaaccaaccaatgggatctacttagtggtgaatagattggctatttaattggtaaaagttgctggtctgaccacaccacagcatgaccactgggttcatttagag

SEQ ID NO: 624283 - DNA, 120 bp, Artificial Sequence
  ENSG00000178409_47 (sequence is synthesized)
atggcctccgtttccaacgttccccacaaatgtttgcttctttcccagtcaagaggggatctcgagactcccgagtggaggtcgtgagcttgcaccccgcctggctgtgtagatcgactg

SEQ ID NO: 624284 - DNA, 120 bp, Artificial Sequence
  ENSG00000178409_48 (sequence is synthesized)
tatagatacatgaagtgggggtgagggccaaggggctattactgctgttgggaaatacttgcctctcgtagatccagccttaatgtttttctgacatcctagtaatagcagaccctgcac

SEQ ID NO: 624285 - DNA, 120 bp, Artificial Sequence
  ENSG00000178409_49 (sequence is synthesized)
aaagtggatatcagacttaatactgtgaggagacaaaataatgagaatagttttaccaaagataatgaaatctcgcatcatgtctgcattttaccatagattggagtgcatccttaggaa

SEQ ID NO: 624286 - DNA, 120 bp, Artificial Sequence
  ENSG00000178409_50 (sequence is synthesized)
actgaatgtaacaaaaacccaggacatttttggaaattgtatgctctctagcaactttgtgtgaatttttatacaaacactgttttatgagttatataaaatgttataaaaatagaaaaa

SEQ ID NO: 624287 - DNA, 80 bp, Artificial Sequence
  ENSG00000178409_51 (sequence is synthesized)
atgggccccgccgccagggggcgcagcgctcccttcccggccgttccacggcggttcgcggttcccgctgcccaggagct

SEQ ID NO: 624288 - DNA, 120 bp, Artificial Sequence
  ENSG00000178409_52 (sequence is synthesized)
gcgaggcctggccggccggccgcaaagctgaagcctggggcgctcgccgctcctcgtgagcgctcctttccttctctatgataaacgtgatttcccacgcatgctttgcccttgcctcat

SEQ ID NO: 624289 - DNA, 120 bp, Artificial Sequence
  ENSG00000178409_53 (sequence is synthesized)
ccgtgagctgtgcaccaccgatttggaggcccttgtgtgcttgtttacctacgtctccctatgtagctattttaaacaaggtgtttttacagagataaaagttttattgattgctcaggt

SEQ ID NO: 624290 - DNA, 120 bp, Artificial Sequence
  ENSG00000178409_54 (sequence is synthesized)
ggtctttctggaagaattctgcacgtaaacgctaactcgacaagagtgccgggaggaacaaggttactcactagagttggaaatgtgcagttcatctccttaaagtaacttttgaatggt

SEQ ID NO: 624291 - DNA, 120 bp, Artificial Sequence
  ENSG00000178409_55 (sequence is synthesized)
tgaatacaaatagtaaacatgccacagggcagcgtggcatagtgccagaaagctacggttgcaggaaactgaggtttaatttttagaagtcaatgtcacctgtagcagagaagttccttg

SEQ ID NO: 624292 - DNA, 120 bp, Artificial Sequence
  ENSG00000178425_0 (sequence is synthesized)
cctgtcccgcagcgtcccgccagccagctccttgcacccttcgcggccgaggcgctccctggtgctccccgcgcagccatggctcagcacttctccctggccgcctgcgacgtggtcgga

SEQ ID NO: 624293 - DNA, 120 bp, Artificial Sequence
  ENSG00000178425_1 (sequence is synthesized)
ttcgacctggaccacactctgtgtcgctacaacctgcccgagagcgccccgctcatttataatagctttgcccagttcctagttaaggagaaagggtacgataaggaattgctcaatgtg

SEQ ID NO: 624294 - DNA, 120 bp, Artificial Sequence
  ENSG00000178425_2 (sequence is synthesized)
accccagaggattgggatttctgttgcaaaggtttggcattggatctagaagatgggaacttccttaaacttgcaaataatggcactgttctcagggcaagccatggcaccaagatgatg

SEQ ID NO: 624295 - DNA, 120 bp, Artificial Sequence
  ENSG00000178425_3 (sequence is synthesized)
actccagaggtgctggcagaggcatatggcaagaaagagtggaagcacttcttgtcggacactggaatggcttgccgctcaggaaagtattacttttacgacaactactttgacctgcca

SEQ ID NO: 624296 - DNA, 120 bp, Artificial Sequence
  ENSG00000178425_4 (sequence is synthesized)
ggagctcttctgtgtgccagggtggtggactatttaacaaaactgaacaatggtcaaaaaacatttgatttttggaaggatatagttgctgctatacaacacaattataaaatgtcagct

SEQ ID NO: 624297 - DNA, 120 bp, Artificial Sequence
  ENSG00000178425_5 (sequence is synthesized)
tttaaggaaaactgtggaatatattttccagaaataaaaagagatccaggcagatatttacatagttgtcctgaatctgtgaaaaaatggcttcgacagctaaagaatgctgggaaaatt

SEQ ID NO: 624298 - DNA, 120 bp, Artificial Sequence
  ENSG00000178425_6 (sequence is synthesized)
cttctgttaattaccagttctcacagtgattactgtagacttctctgcgaatatattcttgggaatgattttacagacctttttgacattgtgattacaaatgcattgaagcctggtttc

SEQ ID NO: 624299 - DNA, 120 bp, Artificial Sequence
  ENSG00000178425_7 (sequence is synthesized)
ttctcccacttaccaagtcagagacctttccggacactcgagaatgatgaggagcaggaggcactgccatctctggataaacctggctggtactcccaagggaacgctgtccacctctat

SEQ ID NO: 624300 - DNA, 120 bp, Artificial Sequence
  ENSG00000178425_8 (sequence is synthesized)
gaacttctgaagaaaatgactggcaaacctgaacccaaggttgtttattttggtgacagcatgcattcagatattttcccagctcgtcactatagtaattgggagacagtcctcatcctg

SEQ ID NO: 624301 - DNA, 120 bp, Artificial Sequence
  ENSG00000178425_9 (sequence is synthesized)
gaagaactcagaggggatgaaggcacgaggagtcagaggcctgaggagtcagagcctctagagaagaaaggaaaatatgagggaccaaaagcaaaacctttaaatacttcatctaaaaaa

SEQ ID NO: 624302 - DNA, 120 bp, Artificial Sequence
  ENSG00000178425_10 (sequence is synthesized)
tggggctctttttttattgattcagttttgggactggaaaatacagaagactccttggtttatacatggtcttgtaagagaatcagtacttacagcactattgcaattccaagtattgaa

SEQ ID NO: 624303 - DNA, 120 bp, Artificial Sequence
  ENSG00000178425_11 (sequence is synthesized)
gcaatcgcagaattacctctggactacaaatttacaagattctcttcaagcaattcaaaaacagctggctactatccaaatcctccactggtcttatcaagtgatgagacactgatatcc

SEQ ID NO: 624304 - DNA, 120 bp, Artificial Sequence
  ENSG00000178425_12 (sequence is synthesized)
aaataagttgtctttactgaaaaatgaagtgaagacccatatatgcagttaaaaaaaagttaattttcaaaaaatactgtaaaagactttaaggaacaagttttattgaccaataagttg

SEQ ID NO: 624305 - DNA, 120 bp, Artificial Sequence
  ENSG00000178425_13 (sequence is synthesized)
atatttgtccataggtctcctttctataaatcatcttgatgtttaacaactcttattatattaaaatctcagtatcctaaaacttagaaccttattgatattttctatacagtagttttg

SEQ ID NO: 624306 - DNA, 120 bp, Artificial Sequence
  ENSG00000178425_14 (sequence is synthesized)
tgattagaattcacctggggacacacactcacacgcacagtcactcttacacatatgcctagtccagtggttctcaaagtgtgatccatagactaatagcatagcattacctgagaactt

SEQ ID NO: 624307 - DNA, 120 bp, Artificial Sequence
  ENSG00000178425_15 (sequence is synthesized)
gataatgcatatttgcaggccccacgcaaaacctgctgaatcagaagctctgagagtaaggcctaccaatctggtttaacaagcccgtcaggtgattctgatttacagtacagtttgaga

SEQ ID NO: 624308 - DNA, 120 bp, Artificial Sequence
  ENSG00000178425_16 (sequence is synthesized)
cccactggctagaacatatcctccagagacttggcttaattggtctgggtaaatatggctgagcgttgttatcttttgttatcttttatatgccctaggaaagtacaaccagaattgaaa

SEQ ID NO: 624309 - DNA, 120 bp, Artificial Sequence
  ENSG00000178425_17 (sequence is synthesized)
accaactgatctataccagttctttcaattaatagtcaagaacattgagtccagtgagattaagtgatttttgcaggctatgaggttttatgctattcctgtgttctccaaaacaagaaa

SEQ ID NO: 624310 - DNA, 120 bp, Artificial Sequence
  ENSG00000178425_18 (sequence is synthesized)
ataaaaagacatgacttattctctgttcatacagcaagtatggaaaaaagatgatctagaagtcaactatctcaacctccattgttacccactaggtttttttctaataatgttaaaggc

SEQ ID NO: 624311 - DNA, 120 bp, Artificial Sequence
  ENSG00000178425_19 (sequence is synthesized)
tatttaatttatttaatcaactttaagcattacattctcaattggggacaaaaattggttcttggggtgaaaaaatattagatatggcttgtggacttccaatatcatcctatccaacaa

SEQ ID NO: 624312 - DNA, 120 bp, Artificial Sequence
  ENSG00000178425_20 (sequence is synthesized)
aatcttattccttagtattaatttatctcattgggaagaaatttgtagttaaaactatttaatgtaatttgaatttaatttctgtaattgggaaggagggtaataatgaacaaaaagttt

SEQ ID NO: 624313 - DNA, 120 bp, Artificial Sequence
  ENSG00000178425_21 (sequence is synthesized)
gagaaaaaaatgctttaatgggttttacaggcatgctacaatccaggactgtggtgttctatgtgccgtgtatggtcatattagtagctatttgttgcaagatacttgaagccaaatgtt

SEQ ID NO: 624314 - DNA, 120 bp, Artificial Sequence
  ENSG00000178425_22 (sequence is synthesized)
tgcagtataggttcctggctactgtttatgctgtgatttcactctgtctatcatgggcagtattagaaaacacactggttttcactatctggtttacaaacactatcattattttacctg

SEQ ID NO: 624315 - DNA, 120 bp, Artificial Sequence
  ENSG00000178425_23 (sequence is synthesized)
gattgaagtgcagaatttggcatatcgatgcatgcaatggaaagaaaaaaaatttgttaaaatttgtaaatgttcagctaaatctcagatatactgtgggatgagtatctcagggtaagt

SEQ ID NO: 624316 - DNA, 120 bp, Artificial Sequence
  ENSG00000178425_24 (sequence is synthesized)
aacaaaaaaacaaacaaaaaaaatcactgaaatttttccctcacagtcagtagctttgtttgatatttaacaataagtatatggtgatatacttgaaatttatgtccagaatgtcactgg

SEQ ID NO: 624317 - DNA, 120 bp, Artificial Sequence
  ENSG00000178425_25 (sequence is synthesized)
aatattacaatgagcataaataatcaagcttaggactaaatgaaagatactatctcatgtatgctttaaatagagaatttatttcttttaaaaataaagctatctttccttatccatgtt

SEQ ID NO: 624318 - DNA, 120 bp, Artificial Sequence
  ENSG00000178425_26 (sequence is synthesized)
tactctgtaaatggcaaataatacatctttaaatgcttatgaactactgttaatatgaaaaatgagaagtccaaaataagaaataactgcactttttgggccacttgagtagtggcgggg

SEQ ID NO: 624319 - DNA, 120 bp, Artificial Sequence
  ENSG00000178425_27 (sequence is synthesized)
gttcaggaggcagaattcagttgtcagaagttctagtattccctttatcattccacctaaagaccctgaacaagttaccaccaaatttggcttcagttttttccatcttatgaaaggaaa

SEQ ID NO: 624320 - DNA, 120 bp, Artificial Sequence
  ENSG00000178425_28 (sequence is synthesized)
aagactataattaggctttttaaatttgtattttcattctttgtaaagagtgccaatggatatgaagattaaaaataatccaaatccataaaaattaaaaagaaaatattaaagaagtta

SEQ ID NO: 624321 - DNA, 120 bp, Artificial Sequence
  ENSG00000178425_29 (sequence is synthesized)
tatgaagcaaaaaaattgtataaatggacagaagacatgtaatattcgcatacaggcaaacattcataatctaaaggacacctaaaaatagatgtaagcgagcggaggttttctttgctg

SEQ ID NO: 624322 - DNA, 120 bp, Artificial Sequence
  ENSG00000178425_30 (sequence is synthesized)
gccactgtttatcgcatcagcagaggaaagatctgaatgactcagtgaccaaatgttttgtcagaatctggtatttggaatactgaggtagtaaaaactttatctgaaccatgaattaca

SEQ ID NO: 624323 - DNA, 120 bp, Artificial Sequence
  ENSG00000178425_31 (sequence is synthesized)
gaattacaatctaaaatcaacttctgagtttgttaaactctaaactgaaatcaagtattatttccccaccaatattcatatccaaaaataactttaaatacacacacacacacacacaca

SEQ ID NO: 624324 - DNA, 120 bp, Artificial Sequence
  ENSG00000178425_32 (sequence is synthesized)
tagtgaactggtttgaatgaaaataaatttatataattattttatataacaaatcagcataaaatggaaaatcaaactgcctctctagatataataaccttcactgactgttggaaatac

SEQ ID NO: 624325 - DNA, 120 bp, Artificial Sequence
  ENSG00000178425_33 (sequence is synthesized)
atggatagctttttaaaatcttcagtgttggagtaacagtcccttacatcttttcagcctcttgagtacaagaagactatcataagagttagttccagattggtgcaagactggaataca

SEQ ID NO: 624326 - DNA, 120 bp, Artificial Sequence
  ENSG00000178425_34 (sequence is synthesized)
cttgactgcttttattaaagccatgagggcataccaagtaattcacccagtatggtcttattgccacccttgaaaatccctgggcatggtccagtccacatagaatgaattcagaaaggt

SEQ ID NO: 624327 - DNA, 120 bp, Artificial Sequence
  ENSG00000178425_35 (sequence is synthesized)
gtctcttgttggtctctagaactatcctcagaaataatagtaaaacagtggtcatgagtagcctcactaggctacttcatgtacattatcttgtttactctctatagcaaccatatgaga

SEQ ID NO: 624328 - DNA, 120 bp, Artificial Sequence
  ENSG00000178425_36 (sequence is synthesized)
tgtatataattattaaattgtacagatgggaaaattgaaattcagagagattaaatacaatgcttgctctgtgttacactgttagtaagagagcaatacatgaacccaagtttgatcctc

SEQ ID NO: 624329 - DNA, 120 bp, Artificial Sequence
  ENSG00000178425_37 (sequence is synthesized)
aaaatcacacttttaattacttgatacataatgtcttccaatattgaatctagactagggcaaattctcagcccaaaaccacacttcaatttagcaataatgtcgtgctaggacatgaga

SEQ ID NO: 624330 - DNA, 120 bp, Artificial Sequence
  ENSG00000178425_38 (sequence is synthesized)
gggattaacattgaagacacagcctctatctttaagtaattcataatttagccaaatatattaaatatctgtaatataaaacttacctaggaaagtaaaatagagatccaagaatcagga

SEQ ID NO: 624331 - DNA, 120 bp, Artificial Sequence
  ENSG00000178425_39 (sequence is synthesized)
gtcctaaagcatataatgagtctgttcctcttggaagccacacatgtcaaggtcatcagtaagcaggcctactctttcttcatattctgggttaatgttcaccttgactgcttggtaaat

SEQ ID NO: 624332 - DNA, 120 bp, Artificial Sequence
  ENSG00000178425_40 (sequence is synthesized)
ttccctcactggtgctgaagtaaccaaaatggggaaggagtgatgaaaactcatctttgagtaagcttagtgggaaatagtatatctgggcctatagagaagttgggtcattacttagaa

SEQ ID NO: 624333 - DNA, 120 bp, Artificial Sequence
  ENSG00000178425_41 (sequence is synthesized)
tgacaactggaaaagtacatagactgcttgccaatcagtttgttgtaccatgtacctgttcacagactcttttcaaaaaacaagtttattttactttttttggtactttggtcatgttgt

SEQ ID NO: 624334 - DNA, 120 bp, Artificial Sequence
  ENSG00000178425_42 (sequence is synthesized)
ttccttggtaaagatcaaagttgaataaagcttaacaaagtttaataaagaaaaggaataaattactatctaaatgtgttaaaagcaatcaccaagtttaatcacttaaaaaataaatat

SEQ ID NO: 624335 - DNA, 120 bp, Artificial Sequence
  ENSG00000178425_43 (sequence is synthesized)
tctcttaacagaaatgtcagcggttacttacaatgcttagcagctaaattccatgagtataacgtttaatgtctttttggtacattaaatattcagtgcctttgatgaagggaacaaact

SEQ ID NO: 624336 - DNA, 120 bp, Artificial Sequence
  ENSG00000178425_44 (sequence is synthesized)
gataatttcattcatgtgcagcaaacatcaaggttacataagtaaattcaaatgtgtcaatctgtaactgtatggagtcctgtattaaatcaagtgataaaatgtacccttctcaaaggc

SEQ ID NO: 624337 - DNA, 120 bp, Artificial Sequence
  ENSG00000178425_45 (sequence is synthesized)
tattcatgaataagcataaccttcaactgaggcctgaatagtcatgtgtcagtagggtttttgttaacatttgtatgccaaatttattacgatagctgtgatagagtagaagttatgcta

SEQ ID NO: 624338 - DNA, 120 bp, Artificial Sequence
  ENSG00000178425_46 (sequence is synthesized)
gcttgaaatcagaaaactcaacagtgagacttgcatcttaggcagttctactttctggacctctgttttctcaactatttaaatggaaataataaaacttgtgttacaaggattatcaaa

SEQ ID NO: 624339 - DNA, 120 bp, Artificial Sequence
  ENSG00000178425_47 (sequence is synthesized)
gtaatatgtgcacttcgaagtgcctgacatatctcagatcttttgaggagattgtgaagccagggaataagtaactgaaacaagatcaaatatccatgtcttaaattgtgattctctagg

SEQ ID NO: 624340 - DNA, 120 bp, Artificial Sequence
  ENSG00000178425_48 (sequence is synthesized)
acagggactcagtaattaaaaatataggcaagggtttgttttggtttttgtttgttaatgatgaaaacatttaaggacgttgagttaactggagataaagcagcagcacgaggagtaatg

SEQ ID NO: 624341 - DNA, 120 bp, Artificial Sequence
  ENSG00000178425_49 (sequence is synthesized)
gggagaagggcctgatgagaaggtcagagaagccttttataagtgtctggcttgcactgaatgcccagaaatggaagcgcaaggaaagtgttgtgtgaggaccagggtaattatgcagtg

SEQ ID NO: 624342 - DNA, 120 bp, Artificial Sequence
  ENSG00000178425_50 (sequence is synthesized)
tcaccactactcacagggattatggcctgagaaactaaaatgatacttcttaggtgaccagaggatgggagaacttcttaactggtttggaggtccacataaagaataattggggtctag

SEQ ID NO: 624343 - DNA, 120 bp, Artificial Sequence
  ENSG00000178425_51 (sequence is synthesized)
aattaaggaaggaaaagcaatacaaagaaatggagcagggctatagcagtgaaccaattggttggtaagtgaaacctgtaagatgcctaattgagtaatttaatgactaattttattagg

SEQ ID NO: 624344 - DNA, 120 bp, Artificial Sequence
  ENSG00000178425_52 (sequence is synthesized)
ctaaacagaacagaaaccatgctaatctgtaacaaataagtggcgccagcctattacagtgaatgctattggttagactaaagcagataataaaccaagtgtaggaaaaatgacattttc

SEQ ID NO: 624345 - DNA, 120 bp, Artificial Sequence
  ENSG00000178425_53 (sequence is synthesized)
tgattacatccagaacaggcatagaaaaggtataataaagcttgaaacaggtggctgacaatgcagaaatcaatcactgaactgaaaaggtaaaatgaacattgttagaggaatttagga

SEQ ID NO: 624346 - DNA, 120 bp, Artificial Sequence
  ENSG00000178425_54 (sequence is synthesized)
ttaagatggatgtagagcttgcaaaagaaaacctagctctctaatacttaaagttctctagccctagaaaaaaatacctcagcaagaaattgcaagtaataattgcaccaagagtcagca

SEQ ID NO: 624347 - DNA, 120 bp, Artificial Sequence
  ENSG00000178425_55 (sequence is synthesized)
tctattttaactgtatgtttaattaagtttctaactcaaatgagaaattttgggccatttttgtcaaatttttgcttagatggctacaaatacttagcaattcattttcatagattttgt

SEQ ID NO: 624348 - DNA, 120 bp, Artificial Sequence
  ENSG00000178425_56 (sequence is synthesized)
agcatccacaaagccctccttactgcagagaatgcagaggtatttatccaataaactttcatgtaattgctgctatacagcaaaactatcattaccggtaattaaagttgtgatacctga

SEQ ID NO: 624349 - DNA, 120 bp, Artificial Sequence
  ENSG00000178425_57 (sequence is synthesized)
atacgtgtttgttaagctatgtttgtctagtgaattagctgaaaagtaggtactttgctgtgtatcttacttaggatttaatttaagcttaaatattattataaagttggttctgactac

SEQ ID NO: 624350 - DNA, 120 bp, Artificial Sequence
  ENSG00000178425_58 (sequence is synthesized)
gatcgtggggtaacagagccctgctccattggctgtcaccatgccacagtctcctggggactcctgagggttaatggatggagcagtctgacttgcagatgctgattctcatatccctta

SEQ ID NO: 624351 - DNA, 120 bp, Artificial Sequence
  ENSG00000178445_0 (sequence is synthesized)
attggccaagggcttcctggccccaacccacctcccgcctccagggcgccgcttaaagtgtgcggagcaggtgccttgggtggagccacaactttgcgcgagtgtcttggttgagcgcag

SEQ ID NO: 624352 - DNA, 120 bp, Artificial Sequence
  ENSG00000178445_1 (sequence is synthesized)
cgcccattcattgcccgcgagcgtccatccatctgtccggccgactgtccagcgaaaggggctccaggccgggcgcagccgccacccgggggaccgaggccaggagaggggccaagagcg

SEQ ID NO: 624353 - DNA, 80 bp, Artificial Sequence
  ENSG00000178445_2 (sequence is synthesized)
cggctgacccttgcgggccggggcaggggacggtggccgcggccatgcagtcctgtgccagggcgtgggggctgcgcctg

SEQ ID NO: 624354 - DNA, 120 bp, Artificial Sequence
  ENSG00000178445_3 (sequence is synthesized)
cggggccgtgctgggcgccgcggagccgggacagcagcagtggcggcggggacagcgccgcggctggggcctcgcgcctcctggagcgccttctgcccagacacgacgacttcgctcgga

SEQ ID NO: 624355 - DNA, 120 bp, Artificial Sequence
  ENSG00000178445_4 (sequence is synthesized)
ggcacatcggccctggggacaaagaccagagagagatgctgcagaccttggggctggcgagcattgatgaattgatcgagaagacggtccctgccaacatccgtttgaaaagacccttga

SEQ ID NO: 624356 - DNA, 120 bp, Artificial Sequence
  ENSG00000178445_5 (sequence is synthesized)
aaatggaagaccctgtttgtgaaaatgaaatccttgcaactctgcatgccatttcaagcaaaaaccagatctggagatcgtatattggcatgggctattataactgctcagtgccacaga

SEQ ID NO: 624357 - DNA, 120 bp, Artificial Sequence
  ENSG00000178445_6 (sequence is synthesized)
cgattttgcggaacttactggagaactcaggatggatcacccagtatactccataccagcctgaggtgtctcaggggaggctggagagtttactcaactaccagaccatggtgtgtgaca

SEQ ID NO: 624358 - DNA, 120 bp, Artificial Sequence
  ENSG00000178445_7 (sequence is synthesized)
tcacaggcctggacatggccaatgcatccctgctggatgaggggactgcagccgcagaggcactgcagctgtgctacagacacaacaagaggaggaaatttctcgttgatccccgttgcc

SEQ ID NO: 624359 - DNA, 120 bp, Artificial Sequence
  ENSG00000178445_8 (sequence is synthesized)
acccacagacaatagctgttgtccagactcgagccaaatatactggagtcctcactgagctgaagttaccctgtgaaatggacttcagtggaaaagatgtcagtggagtgttgttccagt

SEQ ID NO: 624360 - DNA, 120 bp, Artificial Sequence
  ENSG00000178445_9 (sequence is synthesized)
acccagacacggaggggaaggtggaagactttacggaactcgtggagagagctcatcagagtgggagcctggcctgctgtgctactgaccttttagctttgtgcatcttgaggccacctg

SEQ ID NO: 624361 - DNA, 120 bp, Artificial Sequence
  ENSG00000178445_10 (sequence is synthesized)
gagaatttggggtagacatcgccctgggcagctcccagagatttggagtgccactgggctatgggggaccccatgcagcattttttgctgtccgagaaagcttggtgagaatgatgcctg

SEQ ID NO: 624362 - DNA, 120 bp, Artificial Sequence
  ENSG00000178445_11 (sequence is synthesized)
gaagaatggtgggggtaacaagagatgccactgggaaagaagtgtatcgtcttgctcttcaaaccagggagcaacacattcggagagacaaggctaccagcaacatctgtacagctcagg

SEQ ID NO: 624363 - DNA, 120 bp, Artificial Sequence
  ENSG00000178445_12 (sequence is synthesized)
ccctcttggcgaatatggctgccatgtttgcaatctaccatggttcccatgggctggagcatattgctaggagggtacataatgccactttgattttgtcagaaggtctcaagcgagcag

SEQ ID NO: 624364 - DNA, 120 bp, Artificial Sequence
  ENSG00000178445_13 (sequence is synthesized)
ggcatcaactccagcatgacctgttctttgataccttgaagattcagtgtggctgctcagtgaaggaggtcttgggcagggccgctcagcggcagatcaattttcggctttttgaggatg

SEQ ID NO: 624365 - DNA, 120 bp, Artificial Sequence
  ENSG00000178445_14 (sequence is synthesized)
gcacacttggtatttctcttgatgaaacagtcaatgaaaaagatctggacgatttgttgtggatctttggttgtgagtcatctgcagaactggttgctgaaagcatgggagaggagtgca

SEQ ID NO: 624366 - DNA, 120 bp, Artificial Sequence
  ENSG00000178445_15 (sequence is synthesized)
gaggtattccagggtctgtgttcaagaggaccagcccgttcctcacccatcaagtgttcaacagctaccactctgaaacaaacattgtccggtacatgaagaaactggaaaataaagaca

SEQ ID NO: 624367 - DNA, 120 bp, Artificial Sequence
  ENSG00000178445_16 (sequence is synthesized)
ctgaactcgcacctatcacatggaaagaatttgcaaacatccacccctttgtgcctctggatcaagctcaaggatatcagcagcttttccgagagcttgagaaggatttgtgtgaactca

SEQ ID NO: 624368 - DNA, 120 bp, Artificial Sequence
  ENSG00000178445_17 (sequence is synthesized)
caggttatgaccaggtctgtttccagccaaacagcggagcccagggagaatatgctggactggccactatccgagcctacttaaaccagaaaggagaggggcacagaacggtttgcctca

SEQ ID NO: 624369 - DNA, 120 bp, Artificial Sequence
  ENSG00000178445_18 (sequence is synthesized)
ttccgaaatcagcacatgggaccaacccagcaagtgcccacatggcaggcatgaagattcagcctgtggaggtggataaatatgggaatatcgatgcagttcacctcaaggccatggtgg

SEQ ID NO: 624370 - DNA, 120 bp, Artificial Sequence
  ENSG00000178445_19 (sequence is synthesized)
ataagcacaaggagaacctagcagctatcatgattacatacccatccaccaatggggtgtttgaagagaacatcagtgacgtgtgtgacctcatccatcaacatggaggacaggtctacc

SEQ ID NO: 624371 - DNA, 120 bp, Artificial Sequence
  ENSG00000178445_20 (sequence is synthesized)
tagacggggcaaatatgaatgctcaggtgggaatctgtcgccctggagacttcgggtctgatgtctcgcacctaaatcttcacaagaccttctgcattccccacggaggaggtggtcctg

SEQ ID NO: 624372 - DNA, 120 bp, Artificial Sequence
  ENSG00000178445_21 (sequence is synthesized)
gcatggggcccatcggagtgaagaaacatctcgccccgtttttgcccaatcatcccgtcatttcactaaagcggaatgaggatgcctgtcctgtgggaaccgtcagtgcggccccatggg

SEQ ID NO: 624373 - DNA, 120 bp, Artificial Sequence
  ENSG00000178445_22 (sequence is synthesized)
gctccagttccatcttgcccatttcctgggcttatatcaagatgatgggaggcaagggtcttaaacaagccacggaaactgcgatattaaatgccaactacatggccaagcgattagaaa

SEQ ID NO: 624374 - DNA, 120 bp, Artificial Sequence
  ENSG00000178445_23 (sequence is synthesized)
cacactacagaattcttttcaggggtgcaagaggttatgtgggtcatgaatttattttggacacgagacccttcaaaaagtctgcaaatattgaggctgtggatgtggccaagagactcc

SEQ ID NO: 624375 - DNA, 120 bp, Artificial Sequence
  ENSG00000178445_24 (sequence is synthesized)
aggattatggatttcacgcccctaccatgtcctggcctgtggcagggaccctcatggtggagcccactgagtcggaggacaaggcagagctggacagattctgtgatgccatgatcagca

SEQ ID NO: 624376 - DNA, 120 bp, Artificial Sequence
  ENSG00000178445_25 (sequence is synthesized)
ttcggcaggaaattgctgacattgaggagggccgcatcgaccccagggtcaatccgctgaagatgtctccacactccctgacctgcgttacatcttcccactgggaccggccttattcca

SEQ ID NO: 624377 - DNA, 120 bp, Artificial Sequence
  ENSG00000178445_26 (sequence is synthesized)
gagaggtggcagcattcccactccccttcgtgaaaccagagaacaaattctggccaacgattgcccggattgatgacatatatggagatcagcacctggtttgtacctgcccacccatgg

SEQ ID NO: 624378 - DNA, 120 bp, Artificial Sequence
  ENSG00000178445_27 (sequence is synthesized)
aagtttatgagtctccattttctgaacaaaagagggcgtcttcttagtcctctgtccctaagtttaaaggactgatttgatgcctctccccagagcatttgataagcaagaaagatttca

SEQ ID NO: 624379 - DNA, 120 bp, Artificial Sequence
  ENSG00000178445_28 (sequence is synthesized)
tctcccaccccagcctcaagtaggagttttatatactgtgtatatctctgtaatctctgtcaaggtaaatgtaaatacagtagctggagggagtcgaagctgatggttggaagacggatt

SEQ ID NO: 624380 - DNA, 120 bp, Artificial Sequence
  ENSG00000178445_29 (sequence is synthesized)
tgctttggtattctgcttccacatgtgccagttgcctggattgggagccattttgtgttttgcgtagaaagttttaggaactttaacttttaatgtggcaagtttgcagatgtcatagag

SEQ ID NO: 624381 - DNA, 120 bp, Artificial Sequence
  ENSG00000178445_30 (sequence is synthesized)
gctatcctggagacttaatagacatttttttgttccaaaagagtccatgtggactgtgccatctgtgggaaatcccagggcaaatgtttacattttgtataccctgaagaactctttttc

SEQ ID NO: 624382 - DNA, 120 bp, Artificial Sequence
  ENSG00000178445_31 (sequence is synthesized)
ctctaatatgcctaatctgtaatcacatttctgagtgttctcctctttttctgtgtgaggtttttttttttttaatctgcatttattagtattctaataaaagcatcttgatcggaagaa

SEQ ID NO: 624383 - DNA, 120 bp, Artificial Sequence
  ENSG00000178445_32 (sequence is synthesized)
tcttaagcgggaaggaaaccagtggaatagcaatgtgattttgatggtggtgttattaggcatggagactgtgaactctgtgcagttgccttctaaaggaagctgaaaatccacaatgct

SEQ ID NO: 624384 - DNA, 120 bp, Artificial Sequence
  ENSG00000178445_33 (sequence is synthesized)
ttcagcatgaaagtggttagtgagaaatataataggaaacaagattgaccgtaaaccaaattgttacagctggctgacacacacgtcgtagttccttttgttcttcactgtattttggta

SEQ ID NO: 624385 - DNA, 120 bp, Artificial Sequence
  ENSG00000178445_34 (sequence is synthesized)
tagttttgaaatttttcataataacaaaaggctattttcaatgcgtggtcctgagcaaggatatagaaagctccatctttgggtaggagtggttgagctgtagtgcacaaactggatgct

SEQ ID NO: 624386 - DNA, 120 bp, Artificial Sequence
  ENSG00000178445_35 (sequence is synthesized)
gttgctttgattgttttgattgttcaagaccttttgactccagcagagctccttgatgagcttctctcagcgtctggacagtgaccatgtgtcacgtgctggtgaacccctggccagggc

SEQ ID NO: 624387 - DNA, 120 bp, Artificial Sequence
  ENSG00000178445_36 (sequence is synthesized)
atcacatctgccctgtgtgatgggtactgttactatccccattttacacatctctcaggcacataggcacagggagatgaagttacttgtgatgtgagtggtttcctgaagcacggcata

SEQ ID NO: 624388 - DNA, 120 bp, Artificial Sequence
  ENSG00000178445_37 (sequence is synthesized)
ttcattttcttgtcctcaaaatgaaaaaacctcaaataggctaggacttgtttttcagaagccaggaaaacagaagagcagtctttgcctttcttcttggaagagagcggagatagctgc

SEQ ID NO: 624389 - DNA, 120 bp, Artificial Sequence
  ENSG00000178445_38 (sequence is synthesized)
aaaatgaatgctgtcttactggaaaagaaacgttaattaattttcccttataaaccgaaagcacgattgttctttgttgtctgtctttccagatatactggagtcctcactgagctgaag

SEQ ID NO: 624390 - DNA, 120 bp, Artificial Sequence
  ENSG00000178445_39 (sequence is synthesized)
gagagccgaacctgagactgccaggaatggtgtcacattaaaagtgcctcattcttttggggctgatcaggcccttgactcgatatttgcggagcccagggagaatatgctggactggcc

SEQ ID NO: 624391 - DNA, 120 bp, Artificial Sequence
  ENSG00000178445_40 (sequence is synthesized)
agtagcttatcccctgagtgtgagggagaaggggcccaagtgtgacactggtagcttgttgttaaaattattccactgactatcccttgctagtcactgctgacagctggaggtcactgc

SEQ ID NO: 624392 - DNA, 120 bp, Artificial Sequence
  ENSG00000178445_41 (sequence is synthesized)
ggaggtcactgctgtagggctccagccagtattatgcacccaggctagttggaaagattgttaatggtgtttcattgaaagtgcctctaggctggggatggtggctcatgcctgtaatcc

SEQ ID NO: 624393 - DNA, 120 bp, Artificial Sequence
  ENSG00000178445_42 (sequence is synthesized)
agagttttccttttcttttaaaaagaaccctaattaggcgatttcaatgaggttcccacaaggctttgtagtcgcaaaacacagaggtgactcttttaactcagaggcactttcctctgc

SEQ ID NO: 624394 - DNA, 120 bp, Artificial Sequence
  ENSG00000178445_43 (sequence is synthesized)
gggatcagggacttgatggattatgtaaatgtcttctcttgcattctaatgaaaagtctgcagttcttcctttgaccagagtctactctacccctcccatcaccaacagggagaaatccc

SEQ ID NO: 624395 - DNA, 120 bp, Artificial Sequence
  ENSG00000178445_44 (sequence is synthesized)
cgttttctaattccagcttgtgtaaaaaactgaatgaattattcatggtggtagtaagagtactccttgcagaacctgcctgcctctttctgcccaatcttccctctccttctcgccttc

SEQ ID NO: 624396 - DNA, 120 bp, Artificial Sequence
  ENSG00000178445_45 (sequence is synthesized)
cccacttaataatcaaaatggcagtcacacttacacatcttcgtgtcaggaattgtaacacaaatgtcagctttgcaaatatccatgactgtgccagccccatcatgctgaattcctggc

SEQ ID NO: 624397 - DNA, 120 bp, Artificial Sequence
  ENSG00000178445_46 (sequence is synthesized)
tccacctctacccttccattgctccacaaagcttttttccaacaagtgttccaggccagtagttgaaattattaagtccctccattatagtaatataggacatgacttccctggccaccc

SEQ ID NO: 624398 - DNA, 120 bp, Artificial Sequence
  ENSG00000178445_47 (sequence is synthesized)
ccatgttctcaaacatgcctgctctgatatgctggccaggaaaacaaacagggatgtgacttttatatatgcttgccttctgtaaaaggaaagaataaagaagacttttatttacagaaa

SEQ ID NO: 624399 - DNA, 120 bp, Artificial Sequence
  ENSG00000178445_48 (sequence is synthesized)
atagaggacatttctgtgaacaccatggatgtggctctgcctgcttttcctctgaggggagaaggcagcaccggccagccatggccttcacactggagggtgcttccaagctcttgactt

SEQ ID NO: 624400 - DNA, 120 bp, Artificial Sequence
  ENSG00000178445_49 (sequence is synthesized)
ggcccgttttgttttctttttgtagaaagaataaaaatattgttttgatcaggttttggaacgtttgaaaaacagagaaaaatgggactcacatacaactgttaagattttgtgtgtatt

SEQ ID NO: 624401 - DNA, 88 bp, Artificial Sequence
  ENSG00000178445_50 (sequence is synthesized)
gtggtgccatctcggctcactgcaaccaccaccttccaggttcaagcaattctctcactcagtcctacacctggctaatttttgtaat

SEQ ID NO: 624402 - DNA, 61 bp, Artificial Sequence
  ENSG00000178445_51 (sequence is synthesized)
gagtagctggaactacaggcacccgcccctacacctggctaatttttgtaatttttttttc

SEQ ID NO: 624403 - DNA, 120 bp, Artificial Sequence
  ENSG00000178445_52 (sequence is synthesized)
tgctgggattacaggtgtgagccaatgagcccagctccacctctttcatgtttattcattctataagaagcagagcagttcgtagactgtcttcaggggctattaattactggagctatt

SEQ ID NO: 624404 - DNA, 120 bp, Artificial Sequence
  ENSG00000178445_53 (sequence is synthesized)
cttcacaggcttgagaagttatgcttgctctgagtctctataagtggattcatttttgctgagagtgaggaaagtgggttaagaagaaggagtacatcattatctcatgagtagatactt

SEQ ID NO: 624405 - DNA, 120 bp, Artificial Sequence
  ENSG00000178445_54 (sequence is synthesized)
tcctggaaggaaattcatcagttggtggaccgtggaatttgggaagccccggaggaatattggtctatttattaaaacgctgacttaatggtttattcctgatgatggttgtgtggtcag

SEQ ID NO: 624406 - DNA, 120 bp, Artificial Sequence
  ENSG00000178445_55 (sequence is synthesized)
tagctcattctggggagctactggcagcctggacctagagaagaagcctgtttatgaactacaggtcgaatatccctaatctgaaaatctaaaactttttctaaaaatttatatttattt

SEQ ID NO: 624407 - DNA, 120 bp, Artificial Sequence
  ENSG00000178445_56 (sequence is synthesized)
aaatctaaaactttttctaaaaatttatatttatttttttgagacagggtcttgcccctattacccaggctggagtgcagttgtgtgatcgcggctcactgcagcctcgacttcccaggc

SEQ ID NO: 624408 - DNA, 77 bp, Artificial Sequence
  ENSG00000178445_57 (sequence is synthesized)
aggctcaggtgattctatttttagtagggctagggtttggccatgttgccctggctggtctggaactcctgatctaa

SEQ ID NO: 624409 - DNA, 120 bp, Artificial Sequence
  ENSG00000178445_58 (sequence is synthesized)
gggtgcccacatgaggctcaaataaagatctgtaatttcaaataagggatatgtcattggtagaacaaagtgaactgggtcgcacagactttggcctcattaactccttgttacttacgg

SEQ ID NO: 624410 - DNA, 120 bp, Artificial Sequence
  ENSG00000178445_59 (sequence is synthesized)
tatactgtttgacgtcgcgtatttctaattctttgtttgcagcctgaaaccaaaacatcaaaaggtccttcaaagaaacataaaattctgtatgtgtcttatggatatatgtttaatata

SEQ ID NO: 624411 - DNA, 120 bp, Artificial Sequence
  ENSG00000178445_60 (sequence is synthesized)
tccatacctatatatacgcaaaagtaattatttgatgttgagggtaaagttgctgaaaagtgtcaatggctctagaaatattttgtataaaaggatcaggactatacaacacatttaact

SEQ ID NO: 624412 - DNA, 120 bp, Artificial Sequence
  ENSG00000178445_61 (sequence is synthesized)
taatctcatccccagacacctccggtcatatgttcagtaatgccccccacctgccattagccataatcaggttcacaggtgtgtagtgagctgaagataagacacatcggcacagtgtgc

SEQ ID NO: 624413 - DNA, 120 bp, Artificial Sequence
  ENSG00000178445_62 (sequence is synthesized)
taaacatttttatttgtaataagactaaatgaaacctttattgccaataataaacttacccggtgcccatggcttcttggtcctcgctgatacacataaaaagctgatgcacttatttat

SEQ ID NO: 624414 - DNA, 70 bp, Artificial Sequence
  ENSG00000178445_63 (sequence is synthesized)
actccctgacctgcgttacatcttcccactgggaccggccttattccagagaggtggcagcattcccact

SEQ ID NO: 624415 - DNA, 120 bp, Artificial Sequence
  ENSG00000178449_0 (sequence is synthesized)
ggcaagccgaatcctagaggctaacccggcaggtgggagggagaaagttgctttctgcaccaatagctgaggcgttcagggttgtccagggacgctaccctcacgtgtctggttccgagt

SEQ ID NO: 624416 - DNA, 120 bp, Artificial Sequence
  ENSG00000178449_1 (sequence is synthesized)
gctgcgttcggctgtgctgggaagttgcgtagacagtggcctcgagaccctgcctgcctgaggaggcctcggttggatgcgaaggagctgcagcatccagtgcctctccatgagaccata

SEQ ID NO: 624417 - DNA, 120 bp, Artificial Sequence
  ENSG00000178449_2 (sequence is synthesized)
acctccatgatgcttctcactgtgtatggggggtacctctgcagtgtccgagtctaccactatttccagtggcgcagggcccagcgccaggccgcagaagaacagaagacctcaggaatc

SEQ ID NO: 624418 - DNA, 120 bp, Artificial Sequence
  ENSG00000178449_3 (sequence is synthesized)
atgtagaactggggggctttttctcctgagcagagaggcccaaggcatgctgtggagagacttcacctgccaccatttccaggtcaacaggactagagcgttgatggttttcaaaccctg

SEQ ID NO: 624419 - DNA, 120 bp, Artificial Sequence
  ENSG00000178449_4 (sequence is synthesized)
ttggaagaaagtgcccatggtttctctggttctgccagtttgacagtttatggaggcttttgaatcgtaatagcaatgtgagggtgaggtacacctacagacattaaataatttgctgtg

SEQ ID NO: 624420 - DNA, 120 bp, Artificial Sequence
  ENSG00000178449_5 (sequence is synthesized)
gtggcctcgagaccctgcctgcctgaggaggcctcggttggatgcgaaggagctgcagcatccaggtacgctgccggctagggccgagcaggggctgccagtcccactgcctgcgcgccc

SEQ ID NO: 624421 - DNA, 120 bp, Artificial Sequence
  ENSG00000178449_6 (sequence is synthesized)
acctgggccagtctccgcttgccgcgtcctcccatcccctagtctgcaggcctggtgcccttgaattcacccgcttctgttgcgttgcggaccgcgagctgcactgcttcctgcccaagc

SEQ ID NO: 624422 - DNA, 120 bp, Artificial Sequence
  ENSG00000178449_7 (sequence is synthesized)
agtggcctcgagaccctgcctgcctgaggaggcctcggttggatgcgaaggagctgcagcatccaggggacaagatgccaactggcaagcagctagctgacattggctataagaccttct

SEQ ID NO: 624423 - DNA, 120 bp, Artificial Sequence
  ENSG00000178449_8 (sequence is synthesized)
tgcgttcggctgtgctgggaagttgcgtagacagtggcctcgagaccctgcctgcctgaggaggcctcggttggatgcgaaggagctgcagcatccaggcgcggtggctcacgccgtaat

SEQ ID NO: 624424 - DNA, 120 bp, Artificial Sequence
  ENSG00000178460_0 (sequence is synthesized)
aggactccgctccgcctacgctgcaggcggagagcaaccgccaagcttggtgggagtcaaggttttcacatcctttctatgagtttcgccatctatagcttttatcaacaattgtggttt

SEQ ID NO: 624425 - DNA, 120 bp, Artificial Sequence
  ENSG00000178460_1 (sequence is synthesized)
aatcaattagaaatattaaccaggagaaaatgtcaaatctaaaaatgaaagaggcggccctcatctatcttgacagaagtggaggcctccaaaagtttatagatgattgcaagtactaca

SEQ ID NO: 624426 - DNA, 120 bp, Artificial Sequence
  ENSG00000178460_2 (sequence is synthesized)
atgattcaaaacaaagctatgctgtctatcgattcaaaattttaataaatccctctgatgttgttgaattagatgctgagcttggaaatcacattttacaccaacctttaaaagctgctg

SEQ ID NO: 624427 - DNA, 120 bp, Artificial Sequence
  ENSG00000178460_3 (sequence is synthesized)
aagtctttcaatcagtctgttttattgctgttaagactctctcattaattggacaattgcagactgaaacgcaaattaatatagtgctgaaattaacacatttacctcccctgccaagtt

SEQ ID NO: 624428 - DNA, 120 bp, Artificial Sequence
  ENSG00000178460_4 (sequence is synthesized)
atggtcttgatctttgtgagtttccacttgattatacatctcagagattttatatgatgcaaggaattgtgattgcaatgacaactataaccaagtatacacaaggggcaagatttcttt

SEQ ID NO: 624429 - DNA, 120 bp, Artificial Sequence
  ENSG00000178460_5 (sequence is synthesized)
gttcagatgaagcatgccctctttcaaaaggatttcagtatataagagtgcatgtgcctggtgctacagaatctgcaacgataagaaatgactttttgtgtaatctatgtgcatcttcac

SEQ ID NO: 624430 - DNA, 120 bp, Artificial Sequence
  ENSG00000178460_6 (sequence is synthesized)
ttcaagaagacagaaaatttagagtacttggtgataaacaaatagttgaaataattgccacaaaggcacttcgtgcttttcaaggatattctaacaaccagccatttaggtttcaatcac

SEQ ID NO: 624431 - DNA, 120 bp, Artificial Sequence
  ENSG00000178460_7 (sequence is synthesized)
ttacaattttcctaagagatgaatcagtgaataaaatgaatataggaaatgaatataaaattattggaattccaacctgtgtaaaaacctcacaaactgctgtctgtatagaagcaaata

SEQ ID NO: 624432 - DNA, 120 bp, Artificial Sequence
  ENSG00000178460_8 (sequence is synthesized)
gcataactttttgtaattcaaaagttccttcaggaattagtgacaacttcaggtgtctcctctccttaacttccagctcatgctggaagtttacagcaatacttgccaatatctttgcat

SEQ ID NO: 624433 - DNA, 120 bp, Artificial Sequence
  ENSG00000178460_9 (sequence is synthesized)
cacaaattacccctcctgggacttacaatttgctcaagctctgtttgttgatgagtctagtacagacaactgaccgtaacaaggaactggaagattgcctggatattttaattataacaa

SEQ ID NO: 624434 - DNA, 120 bp, Artificial Sequence
  ENSG00000178460_10 (sequence is synthesized)
gtgatactctactcatagacaggcttctgaattttagcataaaccttgtcccccgtggtatacgtcatctagtctctactgaaatttttcccactctatccaggaataagtatggaactg

SEQ ID NO: 624435 - DNA, 120 bp, Artificial Sequence
  ENSG00000178460_11 (sequence is synthesized)
gagcagttagcattcaggctggcagtgctttgctagctaaaggtggtatctgctttataggagacttggcttcacacaaaaaagataaacttgaacagcttcaaacagttctggagagca

SEQ ID NO: 624436 - DNA, 120 bp, Artificial Sequence
  ENSG00000178460_12 (sequence is synthesized)
gaagcatcacagtgtacatcccaggaaagaagtttggggaggatattgatcaacagatgacttttccagttcagtgcagtttttggtcttttgttgatgtggattcatcttcaaggagaa

SEQ ID NO: 624437 - DNA, 120 bp, Artificial Sequence
  ENSG00000178460_13 (sequence is synthesized)
atgcacagaaaatcaacactctaattggtcagatggattgcagtttgattccagctaaccttgtggaggcatttggtttattgattaactgcaacgagtcatctccctgccacccatttc

SEQ ID NO: 624438 - DNA, 120 bp, Artificial Sequence
  ENSG00000178460_14 (sequence is synthesized)
ttcctactgtgcaacacactttgaacaaagccattaatcctgaagggctgttttatgcggcttctagacagttcacaactgaagattttgaaaagctattggcttttgcaaagaatttga

SEQ ID NO: 624439 - DNA, 120 bp, Artificial Sequence
  ENSG00000178460_15 (sequence is synthesized)
atgtagaattcagcttggaagcagaaagaatgacccatggctattatctagcaagtcgcagaatcagaacaggctctgtatgtggatcaaagctgtcagcatctgcattaaaatatctcg

SEQ ID NO: 624440 - DNA, 120 bp, Artificial Sequence
  ENSG00000178460_16 (sequence is synthesized)
ttttcctatctgaagcccatgcacgactgaacttaaggaacaaagtgcttaaagaagatgtgctgattgcagccttactatttgaaacatccctcacattgaaatatggggccactgtat

SEQ ID NO: 624441 - DNA, 120 bp, Artificial Sequence
  ENSG00000178460_17 (sequence is synthesized)
tttgtgttgctccgaatgcagtatttccatttgaactgtataatgaagaatacttagagcaaagggatctctatctgactcagtgccaacaacagctggaacaatttattgccacatatg

SEQ ID NO: 624442 - DNA, 120 bp, Artificial Sequence
  ENSG00000178460_18 (sequence is synthesized)
gacctgggacaactattttctctagtgatgaataagcaatttgaggaatttttgttcattcctacttaagcagtggagaaaaagtgtgactattttgagagtgactttgaagtaatgctt

SEQ ID NO: 624443 - DNA, 120 bp, Artificial Sequence
  ENSG00000178460_19 (sequence is synthesized)
tgataatactctgtacaggaatatattacaatactgtttttaaaaatataaaatatagtcccctcaaaactaattgctaatgggataaatactaatccaaacctctaaaaccaacagaat

SEQ ID NO: 624444 - DNA, 120 bp, Artificial Sequence
  ENSG00000178460_20 (sequence is synthesized)
tttaaaacttagaacaatgtggacaatttaaagtgataaagttgtcaaggagaatactataaagaaaaacctggttagcccagaataccagtggtgaacagataaaaatgtaaatgttgc

SEQ ID NO: 624445 - DNA, 120 bp, Artificial Sequence
  ENSG00000178460_21 (sequence is synthesized)
tagttcactctactgtcacaagatggcaataactctttacctacaaattactctaaaacatttttcttccacttgtgaacttgctaaactgatgagtaaatactttatataacccgaagc

SEQ ID NO: 624446 - DNA, 120 bp, Artificial Sequence
  ENSG00000178460_22 (sequence is synthesized)
ttcaaatgtaaggccttttcatactttattactggcctgtccattacatactactgttttagaagccctaaatatggaatcgggaaaagccttggaagttttccatacgtatacgctagg

SEQ ID NO: 624447 - DNA, 120 bp, Artificial Sequence
  ENSG00000178460_23 (sequence is synthesized)
ttaaatgaaaaaaatactttacacggaaacaaggagccaataacttataaattggctctctaaccctaactggttacaagaaaggctccaaaaggcaaagaaaccaacttgcaaatctag

SEQ ID NO: 624448 - DNA, 120 bp, Artificial Sequence
  ENSG00000178460_24 (sequence is synthesized)
tcctcatttttggagggaagatatctgctctgaaaagataggggcaccatgagaaaacaaatccatcttgtaaaatttataaatcctttttagttcagtttccataactttaataaaaga

SEQ ID NO: 624449 - DNA, 120 bp, Artificial Sequence
  ENSG00000178460_25 (sequence is synthesized)
tcagttctattcacagaaaagcaaaatgtcattaccaaattgccactttattaaccaagatgttaccatgcatcaattctttcaaaactggtcccttaacagagatgcttaactgtacag

SEQ ID NO: 624450 - DNA, 120 bp, Artificial Sequence
  ENSG00000178460_26 (sequence is synthesized)
ctggacctctcccactctccacaggacccggaggaagttgttcactattactgaatacctactagtagcagggagtaaacagtattagttttcagaagccaaaggtagtgtttttgtttt

SEQ ID NO: 624451 - DNA, 120 bp, Artificial Sequence
  ENSG00000178460_27 (sequence is synthesized)
cagaagccaaaggtagtgtttttgttttttgtttttttgagatggggtctcgctctgtcatgcaggctggagtgcagtggtgttatcttggcactgcaacctccacctcccgggttcaag

SEQ ID NO: 624452 - DNA, 120 bp, Artificial Sequence
  ENSG00000178460_28 (sequence is synthesized)
aagacaacaggtatgagccaacacgactggcgactgtagttttcaacaaaatacttacatattacagttctataatgttaagacgtttattttgtgcttctcaaatactacatttcaaac

SEQ ID NO: 624453 - DNA, 120 bp, Artificial Sequence
  ENSG00000178460_29 (sequence is synthesized)
atgtctggctctctatggggggaaggcaaaacacattcctattttataaaactaggatccttttacaattggaaagtttaaaaacttttttttttggagacaggggctgtcaccgtttgg

SEQ ID NO: 624454 - DNA, 120 bp, Artificial Sequence
  ENSG00000178460_30 (sequence is synthesized)
agggttgtggcgccacctcagctccctgcagccttgaccttgcaagtaattctcccaccttaggcctccgagtagctgggactacagggacatgctaccaccctgggataacttctgcat

SEQ ID NO: 624455 - DNA, 120 bp, Artificial Sequence
  ENSG00000178460_31 (sequence is synthesized)
tttttgtagagatggaattttgccatgtttcccaggctggtctcaagtcatcctcccatctcagtacctcagcttcccagtgttgggattacaggagtgagccaccatgcatggcacaaa

SEQ ID NO: 624456 - DNA, 120 bp, Artificial Sequence
  ENSG00000178460_32 (sequence is synthesized)
gatggcttttatttacttatctatatttatatatacatatttatatgtagctgtcacccaagctgtagtgtactgatgcaatcatagctcactgccaccttaatctccccagctcaaaaa

SEQ ID NO: 624457 - DNA, 120 bp, Artificial Sequence
  ENSG00000178460_33 (sequence is synthesized)
acccaacctcagtctcaaagatggttacttcaccacaaaaaaattaaaatgtttaagtttctcattaaagagtagaagtgtacattcagaaacaattatgggaggtaattcattaatatt

SEQ ID NO: 624458 - DNA, 120 bp, Artificial Sequence
  ENSG00000178460_34 (sequence is synthesized)
aaatatgccaacggtattttaaaggttattggagaattagaagggggtggggtgcaggacgaaaaattaatgggtgcaatgtacaccattcaggtaatggctgcacaaaaagctcagact

SEQ ID NO: 624459 - DNA, 120 bp, Artificial Sequence
  ENSG00000178460_35 (sequence is synthesized)
ccaaactacttcatatacctatgcaacagaactgcacttataccccccaaatctatactgagggaagtgactaagatgttgctatacaggttttataccatttatcatataaaaattata

SEQ ID NO: 624460 - DNA, 120 bp, Artificial Sequence
  ENSG00000178460_36 (sequence is synthesized)
accttggtaaaaggaatttataagctagtactcaacaggagaaaagatttagctctaaaccttcacccagatataaattcagctttagaattcttgccaatttagtcctagacagactgg

SEQ ID NO: 624461 - DNA, 120 bp, Artificial Sequence
  ENSG00000178460_37 (sequence is synthesized)
tctgctcagtcatttctcttaacatagcatattgcttagttattacatgtactagtattaggatgacttttttgttcacaaagatgaaagcaaactgaataaaaaaggtgaaacctttat

SEQ ID NO: 624462 - DNA, 120 bp, Artificial Sequence
  ENSG00000178460_38 (sequence is synthesized)
ctgtaagggggaatttgattgctatttggtattaaagagttttaagattcaaccacctggtacaacagcaggctctgaaggggaagccagacagggaacctagaggtacaagcaatgtct

SEQ ID NO: 624463 - DNA, 120 bp, Artificial Sequence
  ENSG00000178460_39 (sequence is synthesized)
ccccagctgtcagcctcaatgagaatcaccacccataaataagctaattattgacaagattataatctttcgaatatgttcaaaacaggtctgactagtgactatgagaatggagctatt

SEQ ID NO: 624464 - DNA, 120 bp, Artificial Sequence
  ENSG00000178460_40 (sequence is synthesized)
tagagttgatttaaaagaaaacactttattgttcagcaattaaaagttagccaaatatgtatttttctccataatttattgtgatgttatcaacatcaagtaaaatgctcattttcatca

SEQ ID NO: 624465 - DNA, 120 bp, Artificial Sequence
  ENSG00000178460_41 (sequence is synthesized)
cctatttcacttgtttctctgcttgattgctagttggttggtttgtaaatggccttgttccaaaaggactaaaggcttcacaattccttttgttatatcatgttacatcattttaatctc

SEQ ID NO: 624466 - DNA, 120 bp, Artificial Sequence
  ENSG00000178460_42 (sequence is synthesized)
taataatttttttactaaactgatttttattggatgccatatgagatatgtctgggaaaagtgcactgatttcaaatgcaaatccttgtttttaaaaatgtggctgttgggcgggcacgg

SEQ ID NO: 624467 - DNA, 120 bp, Artificial Sequence
  ENSG00000178460_43 (sequence is synthesized)
tattaattggtcacagatttgcatacatcctttccatgagcattattacaagaagaatatttagaatttttctgagccagtataagtatttaaatcaatctttatcaataaaattcaaaa

SEQ ID NO: 624468 - DNA, 120 bp, Artificial Sequence
  ENSG00000178460_44 (sequence is synthesized)
cctttgaaagataaattgataagtgataagttgaattactccaattttcaacctatttccccactcagacctttgtaaataaatacatccttcccagccttcctttccccctattcccta

SEQ ID NO: 624469 - DNA, 120 bp, Artificial Sequence
  ENSG00000178460_45 (sequence is synthesized)
gctctgtattctctttctgtactttgttttgaatagtcttccccctaaggaacaaactaaccattttcttatttttcttcaatattccatcaataatattgactcactgcatccagataa

SEQ ID NO: 624470 - DNA, 120 bp, Artificial Sequence
  ENSG00000178460_46 (sequence is synthesized)
ggctgtcagaagtgccataattactatctggggggaacatcatcctaactttggagtaagcctctatttagcattttgtggctccccactagcaagtaccctttccttaaaacttgctta

SEQ ID NO: 624471 - DNA, 120 bp, Artificial Sequence
  ENSG00000178460_47 (sequence is synthesized)
cttgcttaaatattcacaaagttagaaataagctccctatttagtatcttgtatgcaaatccaaagcaaaaaataaatttacaaaatgaatttaaaatagaaaaaaataaaattgaaatt

SEQ ID NO: 624472 - DNA, 120 bp, Artificial Sequence
  ENSG00000178462_0 (sequence is synthesized)
attactacagggcaggaagggcacgttctcatcagcatgagggagtgcctttccatccacatcggtcaagctggcatccagattggggacgcctgctgggaactctattgcctggaacat

SEQ ID NO: 624473 - DNA, 120 bp, Artificial Sequence
  ENSG00000178462_1 (sequence is synthesized)
ggaatccagccaaatggcgttgttcttgacactcaacaggatcagctggaaaatgcaaaaatggagcacacaaatgcatctttcgataccttcttctgtgagacaagagctgggaagcat

SEQ ID NO: 624474 - DNA, 120 bp, Artificial Sequence
  ENSG00000178462_2 (sequence is synthesized)
gtgcctagagcactcttcgtggacttggagccaactgttatagatgggatccggacgggccagcaccgttcactcttccaccccgagcagctccttagcggaaaggaggatgctgctaac

SEQ ID NO: 624475 - DNA, 120 bp, Artificial Sequence
  ENSG00000178462_3 (sequence is synthesized)
aattacgcgcgaggccgttactctgtggggtcggaggtcatcgaccttgtgctggagaggacccggaagctggcagaacagtgtggtggacttcagggatttttgattttccgaagcttt

SEQ ID NO: 624476 - DNA, 120 bp, Artificial Sequence
  ENSG00000178462_4 (sequence is synthesized)
ggaggaggcactggttcagggtttacgtctctcttaatggagaggctcacaggagaatatagcagaaagactaagctggagttctcggtctacccagcccccaggatctccactgctgtg

SEQ ID NO: 624477 - DNA, 120 bp, Artificial Sequence
  ENSG00000178462_5 (sequence is synthesized)
gtagagccttataactctgtcctcaccacccactccaccacagagcacacggactgtaccttcatggtggacaacgaggccgtctatgatatatgccatcgtaaactcggtgttgaatgc

SEQ ID NO: 624478 - DNA, 120 bp, Artificial Sequence
  ENSG00000178462_6 (sequence is synthesized)
ccctctcatgccagcatcaatagattggtggttcaggtggtatcttccatcactgcctccctccggtttgaagggcccttgaatgtagacctaattgaattccagaccaacctggtacct

SEQ ID NO: 624479 - DNA, 120 bp, Artificial Sequence
  ENSG00000178462_7 (sequence is synthesized)
caaccagctggtcaagtgtgatcctcggcttgggaagtacatggcctgctgcctactctatagaggggatgtggtccccaaggaagtgaatgcagcaatcgcagccacgaagtcgaggca

SEQ ID NO: 624480 - DNA, 120 bp, Artificial Sequence
  ENSG00000178462_8 (sequence is synthesized)
ctctgttcagtttgtagattggtgtccaactggtttcaaggtgggcatcaacaatcggccgcccacggtgatgccgggtggggacctggccaaagtccaccggtccatctgcatgctgag

SEQ ID NO: 624481 - DNA, 120 bp, Artificial Sequence
  ENSG00000178462_9 (sequence is synthesized)
caacaccacggcgattgtggaggcctgggcccgcctggaccacaagtttgacctcatgtacgccaagagagcatttctgcactggtacctcagagaaggcatggaagaagcagagttctt

SEQ ID NO: 624482 - DNA, 120 bp, Artificial Sequence
  ENSG00000178462_10 (sequence is synthesized)
ggaggccagggaagatctggcagccctggagagggactatgaggaagtggcgcaaagtttctgaggcatgtatgatgggtgcaaatgaatgtcaagttaaaatggcatgttttcttttca

SEQ ID NO: 624483 - DNA, 120 bp, Artificial Sequence
  ENSG00000178462_11 (sequence is synthesized)
agccgttatatgcctagtgggtagttcccctgatgagcagaaaaatgaactcaaatcaggcaagactctaggttccacactaaattaagtgggtcagtaccaacaatgaacacattattt

SEQ ID NO: 624484 - DNA, 120 bp, Artificial Sequence
  ENSG00000178462_12 (sequence is synthesized)
cctggtctactggtacaagtcagctctgctacctgggagcctttggaagcttagagtcctttgaactgctgagtcacttctaggtgggatttttttgttttaccaagagacaatgaaatc

SEQ ID NO: 624485 - DNA, 120 bp, Artificial Sequence
  ENSG00000178462_13 (sequence is synthesized)
ctgaagtttatgcttttcctttctggtaccggaagtagaaaacagcacatgttgattacgaatgttttttcccccatgtctacattttttacactgattaaatcataaatattttcagta

SEQ ID NO: 624486 - DNA, 80 bp, Artificial Sequence
  ENSG00000178467_0 (sequence is synthesized)
gcgcgacctgggtgccatggcggcagcggcggtgacaggccagcggcctgagaccgcggcggccgaggaggcctcgaggc

SEQ ID NO: 624487 - DNA, 120 bp, Artificial Sequence
  ENSG00000178467_1 (sequence is synthesized)
ggccgggctgggcgacggcgaggacgcaccggtgcgtccgctgtgcaagccccgcggcatctgctcgcgcgcctacttcctggtgctgatggtgttcgtgcacctgtacctgggtaacgt

SEQ ID NO: 624488 - DNA, 120 bp, Artificial Sequence
  ENSG00000178467_2 (sequence is synthesized)
gctggcgctgctgctcttcgtgcactacagcaacggcgacgaaagcagcgatcccgggccccaacaccgtgcccagggccccgggcccgagcccaccttaggtcccctcacccggctgga

SEQ ID NO: 624489 - DNA, 120 bp, Artificial Sequence
  ENSG00000178467_3 (sequence is synthesized)
gggcatcaaggtggggcacgagcgtaaggtccagctggtcaccgacagggatcacttcatccgaaccctcagcctcaagccgctgctcttcgaaatccccggcttcctgactgatgaaga

SEQ ID NO: 624490 - DNA, 120 bp, Artificial Sequence
  ENSG00000178467_4 (sequence is synthesized)
gtgtcggctcatcatccatctggcgcagatgaaggggttacagcgcagccagatcctgcctactgaagagtatgaagaggcaatgagcactatgcaggtcagccagctggacctcttccg

SEQ ID NO: 624491 - DNA, 120 bp, Artificial Sequence
  ENSG00000178467_5 (sequence is synthesized)
gctgctggaccagaaccgtgatgggcaccttcagctccgtgaggttctggcccagactcgcctgggaaatggatggtggatgactccagagagcattcaggagatgtacgccgcgatcaa

SEQ ID NO: 624492 - DNA, 120 bp, Artificial Sequence
  ENSG00000178467_6 (sequence is synthesized)
ggctgaccctgatggtgacggagtgctgagtctgcaggagttctccaacatggaccttcgggacttccacaagtacatgaggagccacaaggcagagtccagtgagctggtgcggaacag

SEQ ID NO: 624493 - DNA, 120 bp, Artificial Sequence
  ENSG00000178467_7 (sequence is synthesized)
gagatcgtggagctcagcgagccgctgcaggttgttcgatatggtgaggggggccactaccatgcccacgtggacagtgggcctgtgtacccagagaccatctgctcccataccaagctg

SEQ ID NO: 624494 - DNA, 120 bp, Artificial Sequence
  ENSG00000178467_8 (sequence is synthesized)
gtagccaacgagtctgtacccttcgagacctcctgccgctacatgacagtgctgttttatttgaacaacgtcactggtgggggcgagactgttttccctgtagcagataacagaacctac

SEQ ID NO: 624495 - DNA, 120 bp, Artificial Sequence
  ENSG00000178467_9 (sequence is synthesized)
gatgaaatgagtctgattcaggatgacgtggacctccgtgacacacggaggcactgtgacaagggaaacctgcgtgtcaagccccaacagggcacagcagtcttctggtacaactacctg

SEQ ID NO: 624496 - DNA, 120 bp, Artificial Sequence
  ENSG00000178467_10 (sequence is synthesized)
cctgatgggcaaggttgggtgggtgacgtagacgactactcgctgcacgggggctgcctggtcacgcgcggcaccaagtggattgccaacaactggattaatgtggaccccagccgagcg

SEQ ID NO: 624497 - DNA, 120 bp, Artificial Sequence
  ENSG00000178467_11 (sequence is synthesized)
cggcaagcgctgttccaacaggagatggcccgccttgcccgagaagggggcaccgactcacagcccgagtgggctctggaccgggcctaccgcgatgcgcgcgtggaactctgagggaag

SEQ ID NO: 624498 - DNA, 120 bp, Artificial Sequence
  ENSG00000178467_12 (sequence is synthesized)
agttagccccggttcccagccgcgggtcgccagttgcccaagatcaggggtccggctgtccttctgtcctgctgcagactaaaggtctggccaatgtcttgccccaccccgccagccgcg

SEQ ID NO: 624499 - DNA, 120 bp, Artificial Sequence
  ENSG00000178467_13 (sequence is synthesized)
atacggcgcagttcctatattcatgttatttattgtgtactgactccatctgccccgtcaaataaaaaaccacaaggttcgagccgccgggcccgacaaactccgggtcggcgaaacaga

SEQ ID NO: 624500 - DNA, 120 bp, Artificial Sequence
  ENSG00000178467_14 (sequence is synthesized)
ctcccactagtgtatgccttaatggtgccgctcttgtccgcgtctacgcttgggaccttggcttctgacttggagagtgtacagctctgcccgacggcaacccagcttgggaagagaagc

SEQ ID NO: 624501 - DNA, 120 bp, Artificial Sequence
  ENSG00000178467_15 (sequence is synthesized)
agagaagccccagcgtgggctggggctcaaggcgcaggaaggccgagcccggcgcggacgcaggcggctccgggcgggctcagcacccccaggcaccgtctcctagtgaccgcggcgctc

SEQ ID NO: 624502 - DNA, 120 bp, Artificial Sequence
  ENSG00000178467_16 (sequence is synthesized)
cccgagaggaccggcgctcagcccgggtccccacgctgcccccggcgctgctctgcgtcggtcccgcgcgctcccactcactcgcctgctgtcgctctccgggccggggcgacttggccc

SEQ ID NO: 624503 - DNA, 120 bp, Artificial Sequence
  ENSG00000178467_17 (sequence is synthesized)
gtgcacaattttgaaaacttgggcccttcccccacagccaggcagcctctctgcacccctttatagtggccagagatggggaggtgaagatccagccttgctttttacccctgggaagta

SEQ ID NO: 624504 - DNA, 120 bp, Artificial Sequence
  ENSG00000178467_18 (sequence is synthesized)
ggcaggcagccaggccccccgttccccttggtgatggtctcgagggcagttcttggagacccttttgataacatcaggcagagttgagagcctggggacaggaagtagggctgctagttg

SEQ ID NO: 624505 - DNA, 120 bp, Artificial Sequence
  ENSG00000178467_19 (sequence is synthesized)
gcagagaacagagtgggtggagcaggagcaaggcgacagtgaggccagctagagcttggctgtttaccctgctccatccatctctccagccagacacgaggtccaccccagcagacagct

SEQ ID NO: 624506 - DNA, 120 bp, Artificial Sequence
  ENSG00000178467_20 (sequence is synthesized)
tccctggtctaagtgagatctcccttgccttcctcttgtccacctggagtcatgccgaagcgcctaaaatggtagtgctgctacctgtgctaactgctggggaggggtgggcagggaagc

SEQ ID NO: 624507 - DNA, 120 bp, Artificial Sequence
  ENSG00000178467_21 (sequence is synthesized)
tgtcatgcaagtggtgccccctctggtaataactctcaggaggtttctgaggtgtggtcatcaccctcatgcccaaattctggaccaagagaggaagatacagcagttagaaaggacttg

SEQ ID NO: 624508 - DNA, 120 bp, Artificial Sequence
  ENSG00000178467_22 (sequence is synthesized)
gaacagtggctttgcggctggtgaaccagagtgaagaatctggccgtgacctgtggctggatggctgccacactgctataggccccagaacagaggtggtgacagtctcacagcccttga

SEQ ID NO: 624509 - DNA, 120 bp, Artificial Sequence
  ENSG00000178467_23 (sequence is synthesized)
atgtcccccaccctcagaggaatctgggccaaagagtggaaggtgatgtccttgggtcagccagaataacatggagcaaagataccaactactcttccagaaccccaagagggtagaacc

SEQ ID NO: 624510 - DNA, 120 bp, Artificial Sequence
  ENSG00000178467_24 (sequence is synthesized)
cctgcttaatggtttgagcagggacagtggagaatgttctcatgagagggggtggcctgactttcgttgctaaggtgggctggtaacgcagtaggcagggctggcgaagtaggttccacc

SEQ ID NO: 624511 - DNA, 120 bp, Artificial Sequence
  ENSG00000178467_25 (sequence is synthesized)
caggatgaaacctggggtcatgaggaactccccgggggctggccctgcttgcaccctggcgtatgtatgtaaggccctggatgaggcccagcactgcctgctctctcctcaccctccaca

SEQ ID NO: 624512 - DNA, 120 bp, Artificial Sequence
  ENSG00000178467_26 (sequence is synthesized)
ggccggagagtggccaccactctatatagccaggctggaaggccagggtcctggccatatggctcaagcttcctttggagaaccttctctggccactctaatagggggtgggcctctttc

SEQ ID NO: 624513 - DNA, 120 bp, Artificial Sequence
  ENSG00000178467_27 (sequence is synthesized)
ttcttagggccaaattagggcttaaactgagaaaaggaactgctctgggtcttcctgtaaggcctgatgtgacagaaaccaggttcatctgacccaaaagtccaggtgggggacaagtgt

SEQ ID NO: 624514 - DNA, 120 bp, Artificial Sequence
  ENSG00000178467_28 (sequence is synthesized)
gcccctcagtgcctgaggtcaggggctgctgctgcctttggggtaggtagggaagtgcagcctgccactgttgcctcccaatatgggcttggtgggcattgatggtgggtgccctgtgca

SEQ ID NO: 624515 - DNA, 120 bp, Artificial Sequence
  ENSG00000178467_29 (sequence is synthesized)
cagggtgagggtgcccaccacatcatgcgtgccatccgccagaggtgagcacctgaagctgttctcactggagcagggggagaagactgggcagggcctccacagaagtccttgtctggg

SEQ ID NO: 624516 - DNA, 120 bp, Artificial Sequence
  ENSG00000178467_30 (sequence is synthesized)
gccaagaggacagaatggattaacccatttgggattaagttccatttgttagaccaggattgggacccactgaaagacaggcaattaacaaaggcaaattagccctccttgcaggcacac

SEQ ID NO: 624517 - DNA, 120 bp, Artificial Sequence
  ENSG00000178467_31 (sequence is synthesized)
aatgggcaactggggttagatagagattgagcacttctttctgattagataaatgacctcttatctttgaccccttatctgaccccgtcacagcaggaaaagggtttttaaataaacaac

SEQ ID NO: 624518 - DNA, 120 bp, Artificial Sequence
  ENSG00000178467_32 (sequence is synthesized)
tttcttccagggaggaggacctcaggactccccgccccctttatttagtggaaatgtcaacatttccacatagcaggtgtctctgtctttggcatctgagggagaaggatcatcatgagt

SEQ ID NO: 624519 - DNA, 120 bp, Artificial Sequence
  ENSG00000178467_33 (sequence is synthesized)
aaccccctcctgctcttacagggccagtctgagatggcttaagggacttccaggggaggtgggtaggggcaaagcttgtggcaggcctagggtccaccttggccagctccttcagatcac

SEQ ID NO: 624520 - DNA, 120 bp, Artificial Sequence
  ENSG00000178467_34 (sequence is synthesized)
cccaactgggggctgccttcaatcctcagaccaggaacacccatgacacaggcacagccctgcactgtgggcgtgccccttggcatggggccaggagatcactgggttatcccggttagt

SEQ ID NO: 624521 - DNA, 120 bp, Artificial Sequence
  ENSG00000178467_35 (sequence is synthesized)
gatgccctcacctctccccacaagttgtttacccaatggctggaaaggggtggctactggtcatcgtgaccactggagtcaacacagactgatgtacccacagacaccaaaacttgcccc

SEQ ID NO: 624522 - DNA, 120 bp, Artificial Sequence
  ENSG00000178467_36 (sequence is synthesized)
ctgagttctgaagcaaggggcaaggctgggcccctagcttgtcctgcccattcctccaggtgttgatcttgattccacttagagaagctgaagctgtgcctccctcccctgtcaagccag

SEQ ID NO: 624523 - DNA, 120 bp, Artificial Sequence
  ENSG00000178467_37 (sequence is synthesized)
ttctttcctcttcaggtggctgttctggcccagccccttcccatccccaaggagcccttcagcgcgccctgttgcttctgctagcctacctttccctgccaggcccttgctcagggccat

SEQ ID NO: 624524 - DNA, 120 bp, Artificial Sequence
  ENSG00000178467_38 (sequence is synthesized)
ggcatttaactaagtgcacctgtgatcttggccaaaaaaccattgcaactcacagtaagagactgggtttcggggaaggaggggctagggacattttggcactggcctgccctattgtct

SEQ ID NO: 624525 - DNA, 120 bp, Artificial Sequence
  ENSG00000178467_39 (sequence is synthesized)
cccatcctagtctgtcctggtccctggcaacaggaacctgggcagcttatcctgcccacaggtaagcccctgggagcatccacaactggggacctgctcagtgccccccctgccttacag

SEQ ID NO: 624526 - DNA, 120 bp, Artificial Sequence
  ENSG00000178467_40 (sequence is synthesized)
gggctggcaggggcttagacaagtgaagtacacacctctccaggtctaaggatgtgggcccaaattattccttgggcatatctggttggtttccctttggtcacccttggctggcctggc

SEQ ID NO: 624527 - DNA, 120 bp, Artificial Sequence
  ENSG00000178467_41 (sequence is synthesized)
gtgaccacgtgacctctattttgaaaatggctgcttcagagcagcccttccagaggattaccaaagtgaaggaccttccccgtcctcgaaatagggtaacactccctcttatcccaactc

SEQ ID NO: 624528 - DNA, 120 bp, Artificial Sequence
  ENSG00000178467_42 (sequence is synthesized)
cctgcagtccattcttccatcacagggctggcagggtgagcctgaggctggtgtctaaacgtttcattgcacctgtcttccgtgccaccattaattctgtcaccttctagaactgggagg

SEQ ID NO: 624529 - DNA, 120 bp, Artificial Sequence
  ENSG00000178467_43 (sequence is synthesized)
ggaaaatcccactgccgaagtgggccttgtggtctgatgagaagcaggccgtccaaatgtagataaactggtacccccccagcctcctccactggagtaccagtcagaggctcagctttt

SEQ ID NO: 624530 - DNA, 120 bp, Artificial Sequence
  ENSG00000178467_44 (sequence is synthesized)
gctgccagcactctgagattcttcttaaggtgaagtctttgttcagccatcatgggcaaagctttctagggtgactccagttggagccacaacatagctcatcgtttctgagctctagtt

SEQ ID NO: 624531 - DNA, 120 bp, Artificial Sequence
  ENSG00000178467_45 (sequence is synthesized)
atgtgcttgccttcatatgattatttcatttaattcctgcaacccctctgtgaagtgggtgtagatcctactcaggccagtgagggggaaagttagggacagagagctgctgtggcttgg

SEQ ID NO: 624532 - DNA, 120 bp, Artificial Sequence
  ENSG00000178467_46 (sequence is synthesized)
ccaggctgacacggttacttcagtggtgaagctaggattagaacccacatagcctgcctctaaggcctatgcagtaaagccacagtgcgagctgtgaagaccccagagtccttcaaagac

SEQ ID NO: 624533 - DNA, 120 bp, Artificial Sequence
  ENSG00000178467_47 (sequence is synthesized)
caccagtgtcaactgggtggggacccctagtcccatggacattgtccagggtgtttgtgtagcccagccctgggtacctggcctccgtgacaaacatatttgcaaacccagggccattcc

SEQ ID NO: 624534 - DNA, 120 bp, Artificial Sequence
  ENSG00000178467_48 (sequence is synthesized)
tgcctgccgggggatggaatgggttaggagctggggccaaagtagaacatctgagcacaagtcattacctccaaggcagagggtcctggttggggattatgcctagacctgtcagaatga

SEQ ID NO: 624535 - DNA, 120 bp, Artificial Sequence
  ENSG00000178467_49 (sequence is synthesized)
tgtcatatgcatgctgtttgtagggaaatagattatgctgtcagtcctgttgtgggagaggcacccaaagctggttgttgttattattactattactattgagtaacgttgaagtctgtg

SEQ ID NO: 624536 - DNA, 120 bp, Artificial Sequence
  ENSG00000178467_50 (sequence is synthesized)
ccaggcactattttaggtgccaggaacacagcattgaactaaatataaacaatgaaacaaaaccctgaagctgacattcaaatgaagaggaaacagacaataaacaaacaaataaatata

SEQ ID NO: 624537 - DNA, 120 bp, Artificial Sequence
  ENSG00000178467_51 (sequence is synthesized)
tttatacccagtaaaaagtagcaatcaagcctctgcccttcaggatcactctctagccttcagtcccaacccaaagatgggtcagcccatatccaggttagctctggctcacctcccagg

SEQ ID NO: 624538 - DNA, 120 bp, Artificial Sequence
  ENSG00000178467_52 (sequence is synthesized)
gctctcctggaaaatgtgtgctctcatcatcaagagaggtcccacatttccaacgccagccagcctttgcaggacaactcaatcttgacaagtcagaatcaaggggtctgtaaaatcctc

SEQ ID NO: 624539 - DNA, 120 bp, Artificial Sequence
  ENSG00000178467_53 (sequence is synthesized)
catcctccagacctggtggccactgagggacatgcagtaccccaggaaccctgaagggaggaaggtactgggtgcaccagcgccctggctcagtccttggcctcacccacctcctcttct

SEQ ID NO: 624540 - DNA, 120 bp, Artificial Sequence
  ENSG00000178467_54 (sequence is synthesized)
tggccttaatgaactgaggttgagggttttatagggctgttcctgcacccagggagccaacagaggagatcctgcaggggtttgcacagctccgaggtgcccggacccacctggtgaggc

SEQ ID NO: 624541 - DNA, 120 bp, Artificial Sequence
  ENSG00000178467_55 (sequence is synthesized)
cccaacatgctgactgggctgtttgtttttgattagcacacagcaggggactgtagaggctggaggcacctccactgggcttgcagattactggcacctaataaactgaagaaacctggg

SEQ ID NO: 624542 - DNA, 120 bp, Artificial Sequence
  ENSG00000178467_56 (sequence is synthesized)
cttaggatttctaaatgtattctttttcagcttaagaaaacaattaggcagctacatcagaccatagtcctcctcatgacaaacactggaggcccaaaagtagagaaacaattttagtgt

SEQ ID NO: 624543 - DNA, 88 bp, Artificial Sequence
  ENSG00000178467_57 (sequence is synthesized)
aaacactggaggcccaaaagtagagaaacaattttagtgtgcgtatcagttcaaggttgatctcgctctatggccaggctggagtgca

SEQ ID NO: 624544 - DNA, 120 bp, Artificial Sequence
  ENSG00000178473_0 (sequence is synthesized)
aaatgaaatctcatcccagcgtagacaccacgtctggaattacgatccaccctgtgatctgtcacttttatatacacacaggggaggggaccgtttccatagagagggaatatcacagcc

SEQ ID NO: 624545 - DNA, 120 bp, Artificial Sequence
  ENSG00000178473_1 (sequence is synthesized)
cacttaggaacaataccggagaagcaggagccgagaccccggagcagccacaagttcatggggacgtgcacggggccgccctcctggccctgaagctgcgccggcctccctgagcgtttc

SEQ ID NO: 624546 - DNA, 120 bp, Artificial Sequence
  ENSG00000178473_2 (sequence is synthesized)
gctgcggagggaagtccactctcggggagagatgctgatgccggtccacttcctgctgctcctgctgctgctcctggggggccccaggacaggcctcccccacaagttctacaaagccaa

SEQ ID NO: 624547 - DNA, 120 bp, Artificial Sequence
  ENSG00000178473_3 (sequence is synthesized)
gcccatcttcagctgcctcaacaccgccctgtctgaggctgagaagggccagtgggaggatgcatccctgctgagcaagaggagcttccactacctgcgcagcagagacgcctcttcggg

SEQ ID NO: 624548 - DNA, 120 bp, Artificial Sequence
  ENSG00000178473_4 (sequence is synthesized)
agaggaggaggagggcaaagagaaaaagactttccccatctctggggccaggggtggagccagaggcacccggtacagatacgtgtcccaagcacagcccaggggaaagccacgccagga

SEQ ID NO: 624549 - DNA, 120 bp, Artificial Sequence
  ENSG00000178473_5 (sequence is synthesized)
gacgtccccaccaacatcatgaacctcctcttcaacatcgccaaggccaagaacctgcgtgcccaggcggccgccaatgcccacctgatggcgcaaattgggaggaagaagtagaggcgg

SEQ ID NO: 624550 - DNA, 120 bp, Artificial Sequence
  ENSG00000178473_6 (sequence is synthesized)
gagggggaggggagggggaggggagggcgagggggggaggggagggggagggtgctgtctgctggtttgtgttttgtgggatcagtcagttttacaggttgctgcactgctgagcccctc

SEQ ID NO: 624551 - DNA, 120 bp, Artificial Sequence
  ENSG00000178473_7 (sequence is synthesized)
tacaggttgctgcactgctgagcccctctgatctcttctggcctttgaccctgtctccctcctgctctgtctgtacacacagaagtgcagtattgtccaaccttcccagacacaaagcag

SEQ ID NO: 624552 - DNA, 120 bp, Artificial Sequence
  ENSG00000178473_8 (sequence is synthesized)
ctaacgttcctccctgtactcagcgtctccttcctccctccccacagcaagaggcaaagttcatgcattcctcctctccagtcttctctctgttgaccccatgcctgagaagagagcgtt

SEQ ID NO: 624553 - DNA, 120 bp, Artificial Sequence
  ENSG00000178473_9 (sequence is synthesized)
cagggctcctctcccacacatcaacttcttccagggcagaaagaggagctgcagcactcgccttcctgccaccgaatccttccctacctcctcaccccattaaaacaatggcttcttcaa

SEQ ID NO: 624554 - DNA, 120 bp, Artificial Sequence
  ENSG00000178498_0 (sequence is synthesized)
agtcatgtgaccggcaatggcggcgctgacgagagctgcatttggaagtgttgtggagacagccccgtagcccaatgcgaccagactcagggaaaacatcaggcccctccagctgagccc

SEQ ID NO: 624555 - DNA, 120 bp, Artificial Sequence
  ENSG00000178498_1 (sequence is synthesized)
ttgtgtgagccccgcccctccctaaatgccagacttgggagctgacagacagcactgcctgtgctgggtttaaaagtcctggtcagctgagtggaaatagaaggatttctgctgccatca

SEQ ID NO: 624556 - DNA, 120 bp, Artificial Sequence
  ENSG00000178498_2 (sequence is synthesized)
tcttccatgggctttccaggtcacacgacctacaagtagggagcagggaaagaagagtgagcctgcatgccaattctaagctcttcaggatcaaatgtcgttcgtcctgtccagaatggc

SEQ ID NO: 624557 - DNA, 120 bp, Artificial Sequence
  ENSG00000178498_3 (sequence is synthesized)
agcctgtggaggcacctgcaagaacaaagtgactgtgtccaagcccgtgtgggacttcctgagcaaagagaccccagcccggctggcccggcttcgggaggagcaccgtgtgtccatcct

SEQ ID NO: 624558 - DNA, 120 bp, Artificial Sequence
  ENSG00000178498_4 (sequence is synthesized)
catagatggcgagacttctgacatctatgttctccagctttccccacagggtcctcccccggcccctccaaatgggctctacctagcccggaaggctctcaaggggctgctaaaagaggc

SEQ ID NO: 624559 - DNA, 120 bp, Artificial Sequence
  ENSG00000178498_5 (sequence is synthesized)
agagaaagagctgaagaaagctcagaggcagggggagctgatgggctgcctggctctggggggtggaggggagcaccctgagatgcaccgcgcaggcccaccccctctccgagcagcccc

SEQ ID NO: 624560 - DNA, 120 bp, Artificial Sequence
  ENSG00000178498_6 (sequence is synthesized)
acttctgcccccaggagctcgggggctcccccctcctcctccccccctgcccccacctcttcctcctcgccttcgggaggaggcagaagagcaggagagcacctgccccatctgtctggg

SEQ ID NO: 624561 - DNA, 120 bp, Artificial Sequence
  ENSG00000178498_7 (sequence is synthesized)
ggagatccagaatgccaagacattggagaagtgccggcattcattctgcgagggctgcatcacccgggctctgcaggtgaaaaaggcctgccccatgtgcggccgcttctatgggcagct

SEQ ID NO: 624562 - DNA, 120 bp, Artificial Sequence
  ENSG00000178498_8 (sequence is synthesized)
gcccggtgtccagggggctgaacacccaaacccaggagttcggtatcctggcaccacacgggtggcctacctcccggactgccctgagggcaacaaggtgctgaccctgttccgcaaggc

SEQ ID NO: 624563 - DNA, 120 bp, Artificial Sequence
  ENSG00000178498_9 (sequence is synthesized)
gtttgaccagcgtctcaccttcactatcggcacgtccatgaccacagggagaccgaatgtcatcacctggaacgacatccaccacaagaccagctgcacagggggaccccagctgtttgg

SEQ ID NO: 624564 - DNA, 120 bp, Artificial Sequence
  ENSG00000178498_10 (sequence is synthesized)
gtacccagaccccacctacctgacccgggtgcaagaggagctgagagcgaagggtatcacagatgactgaaggacatcgcctttgccaaggcccctgctgtctgcctctactaggaccca

SEQ ID NO: 624565 - DNA, 120 bp, Artificial Sequence
  ENSG00000178498_11 (sequence is synthesized)
gcagaagcctctttctcctctctgccccctgccccccacaccacacctgtaggggacctgtctgactgggaagggagttccgagagggagggggcaatcccttcccccatcccccactgg

SEQ ID NO: 624566 - DNA, 120 bp, Artificial Sequence
  ENSG00000178498_12 (sequence is synthesized)
ccaagtgtttcaatgcagtgtgagccactcccttctggcagaggccgacctccaaggctctgttctcccctccccgtgtacatatactcccggtttccctgcccctccattgcccttggc

SEQ ID NO: 624567 - DNA, 120 bp, Artificial Sequence
  ENSG00000178498_13 (sequence is synthesized)
tttttctggtatgtgctgtgctccacgaccaagccgagaaaggacctagggtggggaagggagggtctcttgattcctaaccgcccccacatactgctccaccgctgaacttcgggtgcc

SEQ ID NO: 624568 - DNA, 120 bp, Artificial Sequence
  ENSG00000178498_14 (sequence is synthesized)
ggggaggagaaattgggctgatgtgagctccccgtcacccgccatggagccggctgtgtgtgttcatcagatacagttctcccttaaccttgtcctttctctcctgtgtctcagtctccg

SEQ ID NO: 624569 - DNA, 120 bp, Artificial Sequence
  ENSG00000178498_15 (sequence is synthesized)
tcagtctgtctttctccgctcttctctgacccctgtgaggaacctccttaccctgttctggaatcgctgccagactgtagcttttaatttaataaaaataaagtaaaatatgcaactctt

SEQ ID NO: 624570 - DNA, 80 bp, Artificial Sequence
  ENSG00000178498_16 (sequence is synthesized)
agtcatgtgaccggcaatggcggcgctgacgagaggtaggtgagcccggcgccccccacacccaccgcgcgccccccggg

SEQ ID NO: 624571 - DNA, 120 bp, Artificial Sequence
  ENSG00000178498_17 (sequence is synthesized)
ccccctcctccacctcccctccccgcgcgcggctccgggctccccgctccgtgcccggccgatcatctttctagcaccctccagccttggcctccattcgggggttctgagggctgcgat

SEQ ID NO: 624572 - DNA, 120 bp, Artificial Sequence
  ENSG00000178498_18 (sequence is synthesized)
cgggccgacatgcacccccacccggcggtggggatccgggggctttggctactgagggatgtggggagttggttccgggtcgggtcttggaggaggccgtggggggagggcgggagctgc

SEQ ID NO: 624573 - DNA, 120 bp, Artificial Sequence
  ENSG00000178498_19 (sequence is synthesized)
ttcagtggatgcccccagggacccttgcccatccgggctgtgcctccctctggcctctgtctggagggagagactggttccttgtccggcctgggttgccacagaggaatcacagaccca

SEQ ID NO: 624574 - DNA, 120 bp, Artificial Sequence
  ENSG00000178498_20 (sequence is synthesized)
ccctaaactggggccccgcctcccttttctgtgccagcaggacttggacctaggacacctaggtcctgggtcccccgtgatggggagagaagtgttgcatcgcggatagactgtatgggc

SEQ ID NO: 624575 - DNA, 120 bp, Artificial Sequence
  ENSG00000178498_21 (sequence is synthesized)
tgagactctagggttccattttcacttatgaatctcgaggtgcatctggccttgggggacgatgatggaggcatgaagggacagctgctccttcttggatcagtcaataaatggaggtca

SEQ ID NO: 624576 - DNA, 120 bp, Artificial Sequence
  ENSG00000178498_22 (sequence is synthesized)
cttaacagacttcagcagaagggactgagttagctctcaaggaaggctccctggcaataggggctgaattatttggcaatgtggagcaggcgaggagttggggagcataggaaatattcc

SEQ ID NO: 624577 - DNA, 120 bp, Artificial Sequence
  ENSG00000178498_23 (sequence is synthesized)
ggtccatgtgatctgagggaggtggcaagaagacctccacctgtgtgggcgttttctttcctgacttctcttatgtgtgccctaggctttcttgggggcctcagagctggggaagaaagg

SEQ ID NO: 624578 - DNA, 120 bp, Artificial Sequence
  ENSG00000178498_24 (sequence is synthesized)
aggaaggttagcatgttgaagttccttcttgagcaacttggggagaagctgataatggaattctgcagagaagagaggagatggaaggggagtttttatttctgggttggctgaggggaa

SEQ ID NO: 624579 - DNA, 120 bp, Artificial Sequence
  ENSG00000178498_25 (sequence is synthesized)
catttttgttttggggaggaagggcaggggcttgcggatagaagggggtcaaaggaacggtgattatcacctgtgaggggaaagggggtgctgtcctccctccttcccttttcctcagcc

SEQ ID NO: 624580 - DNA, 120 bp, Artificial Sequence
  ENSG00000178498_26 (sequence is synthesized)
tgcaccccctgcaatcccccacctttcggggtctccccctccttgttgctaaggcccggaccgtcatcccagcaacagcctcagtcatgtgaccggcaatggcggcgctgacgagagtcc

SEQ ID NO: 624581 - DNA, 120 bp, Artificial Sequence
  ENSG00000178498_27 (sequence is synthesized)
agagaaccacttccaaactgttcagccatctcagtttctcctacattcaacctggtcctggtgtgcccagcttagcctacaaaaataagcagaactgggctaaattatcttggatttgga

SEQ ID NO: 624582 - DNA, 120 bp, Artificial Sequence
  ENSG00000178498_28 (sequence is synthesized)
ggtgtcctcccttaggggaggtggggaggtgtctgagccacctagaatgagggtgagcatggggataatagcaagttcaaacagctaacaaccctcaccctcatttctctttgctcccag

SEQ ID NO: 624583 - DNA, 120 bp, Artificial Sequence
  ENSG00000178498_29 (sequence is synthesized)
ttcaggatcaaagtaagcaaaaaggaggggcaaagagtctccctcccctttaaacagcccatttttccccaagaggtgggaggggcaagttgtttctatgatctgggagaaatgacagga

SEQ ID NO: 624584 - DNA, 120 bp, Artificial Sequence
  ENSG00000178498_30 (sequence is synthesized)
gaaacaagactgatacttggcttagatgataatatagctctggaaacttttttgctcttcagtgggttttgggtttggaagataaggggagacagaatatgaatttgggtgaagggttgg

SEQ ID NO: 624585 - DNA, 120 bp, Artificial Sequence
  ENSG00000178498_31 (sequence is synthesized)
ggattaggctttgagaaaacagaggtaatagagggtttggaaggaacctgaagtaggaggcactgatacttgtcaaatggggaccccccaccctgagtccctttcaccctgggggcagtg

SEQ ID NO: 624586 - DNA, 120 bp, Artificial Sequence
  ENSG00000178502_0 (sequence is synthesized)
accaacagccgcatcgttccgaggctgtggaggccgggcgcagcggcgtcaagatggcggctgcggcagtggcggcggcggcggcggcggccgcggctgcatctcttcaggtactggaga

SEQ ID NO: 624587 - DNA, 120 bp, Artificial Sequence
  ENSG00000178502_1 (sequence is synthesized)
tggagagcatggagacggccgccgccggctcggcaggactggccgccgaggtccgaggcagcggcacggtggacttcgggcctgggccggggatctctgcaatggaggcgagcgggggcg

SEQ ID NO: 624588 - DNA, 120 bp, Artificial Sequence
  ENSG00000178502_2 (sequence is synthesized)
atccgggcccagaagccgaggatttcgagtgcagctctcactgctcagagctgtcctggcggcagaacgagcagcggcgccagggcctcttctgcgacattaccctgtgcttcggcgggg

SEQ ID NO: 624589 - DNA, 120 bp, Artificial Sequence
  ENSG00000178502_3 (sequence is synthesized)
ctggaggccgcgagttccgggcccaccgctcggtactggctgccgccaccgagtacttcacgcccctgctctcgggccagttttccgagtcccgctcgggacgggtggagatgcgcaagt

SEQ ID NO: 624590 - DNA, 120 bp, Artificial Sequence
  ENSG00000178502_4 (sequence is synthesized)
ggagctccgagccggggcccgaacccgacacagtggaagccgtaatcgagtacatgtacaccgggcgcatccgcgtcagcacgggcagcgtgcacgaggtgctggagttggccgacaggt

SEQ ID NO: 624591 - DNA, 120 bp, Artificial Sequence
  ENSG00000178502_5 (sequence is synthesized)
tcctactcattcgtttaaaagaattttgtggagaatttctcaagaaaaaacttcatctctcaaattgtgtggcaattcatagcttagcacacatgtacaccctgagccaacttgctctga

SEQ ID NO: 624592 - DNA, 120 bp, Artificial Sequence
  ENSG00000178502_6 (sequence is synthesized)
aggctgctgatatgatacggagaaatttccacaaagtgattcaggatgaagaattttatacgttacctttccatctcattagagactggctttcagatttggaaattacagttgattctg

SEQ ID NO: 624593 - DNA, 120 bp, Artificial Sequence
  ENSG00000178502_7 (sequence is synthesized)
aagaggttctctttgaaaccgttttgaaatgggttcagagaaatgctgaagagagagagagatactttgaagaactttttaaattgctcaggttgtcccagatgaaacctacctacctta

SEQ ID NO: 624594 - DNA, 120 bp, Artificial Sequence
  ENSG00000178502_8 (sequence is synthesized)
ctcgacatgtcaaaccagagaggctggtagccaataatgaagtttgtgtcaagttggtcgctgacgcagtggagagacatgctctgagagctgagaatatacaatctggcacatgccagc

SEQ ID NO: 624595 - DNA, 120 bp, Artificial Sequence
  ENSG00000178502_9 (sequence is synthesized)
accccacttctcatgtgtcactattgcctcgttatgggcaaaacatggatgtgatcatggttattggaggtgtgtcagaaggaggggactatttaagtgaatgtgtgggatactttgttg

SEQ ID NO: 624596 - DNA, 120 bp, Artificial Sequence
  ENSG00000178502_10 (sequence is synthesized)
atgaggacagatgggtaaatctgccacatattcataatcacctcgatggacatgctgttgcagtaacagaatcctacgtgtatgttgctggatcaatggagccagggtttgctaaaactg

SEQ ID NO: 624597 - DNA, 120 bp, Artificial Sequence
  ENSG00000178502_11 (sequence is synthesized)
tagaaaggtataacccaaatttgaatacatgggaacatgtttgtagtctgatgacaagaaagcattcttttggactaacagaagtcaaagggaagctctatagcattggaggacatggca

SEQ ID NO: 624598 - DNA, 120 bp, Artificial Sequence
  ENSG00000178502_12 (sequence is synthesized)
actttagtcctggttttaaagatgtgactgtttataatcctgagcttgataaatggcacaacttggaatcggcaccaaagattcttcgagatgtcaaagcactagccattgaagaccggt

SEQ ID NO: 624599 - DNA, 120 bp, Artificial Sequence
  ENSG00000178502_13 (sequence is synthesized)
ttgtatacattgccgcccgcactcctgtagaccgggacactgaagatggattaaaggctgtaattacttgctatgatacagagactcgacagtggcaagatgtggaatctttgccgctta

SEQ ID NO: 624600 - DNA, 120 bp, Artificial Sequence
  ENSG00000178502_14 (sequence is synthesized)
ttgacaattactgctttttccaaatgtctgtggtcaattcaaacttttatcagacagcatcatgttgtcccaagagttattgtttagaaaacgaagaggcagtaagaaaaattgccagcc

SEQ ID NO: 624601 - DNA, 120 bp, Artificial Sequence
  ENSG00000178502_15 (sequence is synthesized)
aagtgtctgatgagatccttgaaagcttgcctccagaagtcctaagcatcgaaggagcagccatttgctattacaaagatgatgtcttcattataggaggctggaaaaacagtgatgata

SEQ ID NO: 624602 - DNA, 120 bp, Artificial Sequence
  ENSG00000178502_16 (sequence is synthesized)
ttgataaacagtatcggaaagaagcctaccgatattgtgcggagaggaagaggtggatgcttcttcctcctatgccacaacctcgttgtagagccactgcttgtcacgtgaggatcccat

SEQ ID NO: 624603 - DNA, 120 bp, Artificial Sequence
  ENSG00000178502_17 (sequence is synthesized)
accggtacttgcatggcacacagagataccctatgcctcaaaacctgatgtggcagaaggaccgcatcagacagatgcaagagatacatcgtcacgccctgaacatgaggcgagtgccaa

SEQ ID NO: 624604 - DNA, 120 bp, Artificial Sequence
  ENSG00000178502_18 (sequence is synthesized)
gctctcagattgaatgctaggttctctcaagcgtgccgattaaaactgttacacccgtttcgtgaagctgaagatacccaggctgttatttaaaaaagtatgtcgataacttattttcta

SEQ ID NO: 624605 - DNA, 120 bp, Artificial Sequence
  ENSG00000178502_19 (sequence is synthesized)
catgaactgattattaccccatataaaggaaatagagttaaaaactaaagaatgggagactcagttcaatacatggtcattttgttagcttgcaatttttgtctttggtttgtttgtttg

SEQ ID NO: 624606 - DNA, 120 bp, Artificial Sequence
  ENSG00000178502_20 (sequence is synthesized)
tgctagctaaataagatcttattaaggacaagtggaaaaatcaggtgtagttgcttagctgttttcctgccaacgagttatgactcctttgtcttgaggacttacgttttgaacatgctt

SEQ ID NO: 624607 - DNA, 120 bp, Artificial Sequence
  ENSG00000178502_21 (sequence is synthesized)
taagcaccaattttatttgcacatttactttgatattctttttcattttttattaaatgattggttttggcaagatctgacttctgcattgagccctcatctgcaggaggcatgtgcaat

SEQ ID NO: 624608 - DNA, 120 bp, Artificial Sequence
  ENSG00000178502_22 (sequence is synthesized)
agtgagactgaaatttgaatgaaaacactcaatatttcagcaagataatttgagaatgtttgcattgatattttcttatgtttatctagaaatgccagtttccttcctagaagatgtgac

SEQ ID NO: 624609 - DNA, 120 bp, Artificial Sequence
  ENSG00000178502_23 (sequence is synthesized)
tgatgagaaattttttactggctcatgcattttttgaatatttttcattagcagctgtttatagactttaagccttcaatctgaggtgacggtagttggcaaaagtatagatctttagct

SEQ ID NO: 624610 - DNA, 120 bp, Artificial Sequence
  ENSG00000178502_24 (sequence is synthesized)
aattgactaaatacagagcaagttacatgtgtgaactttgtttctctaagaagaaaagtattagtgtagactgggaaatcaaaggcatttaaaattttttcaacatttttttcaggagtt

SEQ ID NO: 624611 - DNA, 120 bp, Artificial Sequence
  ENSG00000178502_25 (sequence is synthesized)
gcaggattatttgaggatatgttaatgagtgtaaataatgcctatgacaatcgacactcaatgccttccattttaatttttgctctaatgcatattatatagaatcttcattattccttt

SEQ ID NO: 624612 - DNA, 120 bp, Artificial Sequence
  ENSG00000178502_26 (sequence is synthesized)
tacaggcatgagccaccgtgcccagtccattattcttttctacaagaaactgtttttttccaaaatgggaaggaagtcacaatttagagaaatgttgctaaagagaagccttattatttc

SEQ ID NO: 624613 - DNA, 120 bp, Artificial Sequence
  ENSG00000178502_27 (sequence is synthesized)
gctaaagagaagccttattatttctgattgttatattttatccagttgccccacactttcaaactttgcctgagcctaggataccaaatttgggtacataattttggcttttaaaggttt

SEQ ID NO: 624614 - DNA, 120 bp, Artificial Sequence
  ENSG00000178502_28 (sequence is synthesized)
caagaccagcctgggaaacatagcaagatcctgtctctacaaaaagtagaaaaattagctgagtgtggtagctggcacgtgcctgtagtccttcctacttgaagccaaggtgggaggatc

SEQ ID NO: 624615 - DNA, 120 bp, Artificial Sequence
  ENSG00000178502_29 (sequence is synthesized)
accagagcctgggaaggttgaggctgaaatgagctgtgatcatgccactctaccttgggtgacagagagacggtgtctcaaataaaaattaaaaagatcactgaagctatcttttattta

SEQ ID NO: 624616 - DNA, 120 bp, Artificial Sequence
  ENSG00000178502_30 (sequence is synthesized)
gttttatacgttattcgaattatcttatgtctcctgagctttataaaagttagcactcaaattgacttttttttttttttgggccaggggatggggtcccactttgtcacccaggttgga

SEQ ID NO: 624617 - DNA, 86 bp, Artificial Sequence
  ENSG00000178502_31 (sequence is synthesized)
gtacagtggtatgcaagccatcctgccacctcagcatacggagtagctgggactatgggcacgcgccaccacgcccagctaatttt

SEQ ID NO: 624618 - DNA, 120 bp, Artificial Sequence
  ENSG00000178502_32 (sequence is synthesized)
ttggtagagatggggtttctccatgttgccgaggctggtctccaactcctgggctcaggagatccacccgtatcagcctcccagggtgctaggattaggtgtgagccaccacgcccggcc

SEQ ID NO: 624619 - DNA, 120 bp, Artificial Sequence
  ENSG00000178502_33 (sequence is synthesized)
gattaggtgtgagccaccacgcccggcctcaaaataacttttttttttttttttgaaacagtcacgctttgtcgccctggctggagtgcagttgcgcagtctcagctcactgcaacctcc

SEQ ID NO: 624620 - DNA, 80 bp, Artificial Sequence
  ENSG00000178502_34 (sequence is synthesized)
aatttactcttaatgctcagttaatataaaggattcctaacagtttacaatgtggttttcttgtttttgttgttgttttg

SEQ ID NO: 624621 - DNA, 120 bp, Artificial Sequence
  ENSG00000178502_35 (sequence is synthesized)
cagtttacaatgtggttttcttgtttttgttgttgttttggttttttaagatgtgaggtctcaccttattggccaggctggtctcaagctcctttcctcaagcaatcctcccaccttggc

SEQ ID NO: 624622 - DNA, 120 bp, Artificial Sequence
  ENSG00000178502_36 (sequence is synthesized)
ctcccaaagagccacctgtccaatgatttatcctgtttcttaagaactgtctttaccttcttagacattttgtcataccattctagaagtcaaattccaagtgcagtgattttttttttc

SEQ ID NO: 624623 - DNA, 120 bp, Artificial Sequence
  ENSG00000178502_37 (sequence is synthesized)
cctagtccattatagttaatcttcttgttagtgatcaaataccaaaagagaaaagcacaaccagaaattttggctatttgctgcaagttgtaggtcttgggctctatactaagaacttga

SEQ ID NO: 624624 - DNA, 120 bp, Artificial Sequence
  ENSG00000178502_38 (sequence is synthesized)
aatttttaaattagtatccctgcctaggtgaaaagtttttaataaatgtgttgaaaatcaactttaaatccatttaatttagactggagtgggcgtgagaaactgcaagtctatttctac

SEQ ID NO: 624625 - DNA, 120 bp, Artificial Sequence
  ENSG00000178502_39 (sequence is synthesized)
atataaggatatattattatattgtcccatcccaccactacctttttctcaatttctatttctttgtagttattttagtaaaagccatttggattctgagaagcactaattcttagctgt

SEQ ID NO: 624626 - DNA, 120 bp, Artificial Sequence
  ENSG00000178502_40 (sequence is synthesized)
gataggtctatgcaagtaagacagaatcattaaatgaagctcactaaatgaagttctcatttctctccaacagactgtgctagcaaacttcgttttcttgattgtatttaaataatttag

SEQ ID NO: 624627 - DNA, 120 bp, Artificial Sequence
  ENSG00000178502_41 (sequence is synthesized)
tatctcactacgataatagtttttaactggaagggtgtgatgtgttttttgttttttgttctcagagttgtcttctgagataattattaccaagtcatttgtggggttgtgtttttttca

SEQ ID NO: 624628 - DNA, 120 bp, Artificial Sequence
  ENSG00000178502_42 (sequence is synthesized)
catcatgtgacagaaattataactcataagatttaggcataatctggttttaaaaccttgattgaaactgttgttttttaacttagcaggcagcctaggccatggctgaaaagaaggggt

SEQ ID NO: 624629 - DNA, 120 bp, Artificial Sequence
  ENSG00000178502_43 (sequence is synthesized)
aagtccttcattgcatgatgatgtgtgcaggttttcctgattttctaatttttatttttgaattcacatgtgtaatttcacatcaataacttgtgtttctgaaatatcctaactaacttg

SEQ ID NO: 624630 - DNA, 120 bp, Artificial Sequence
  ENSG00000178502_44 (sequence is synthesized)
ttaataaggaaagaaaccagatttgcttaaatctgttcaaggctgacattctgaaattctaaactggaaataacttcccagagtatttggaaaggttctaagtacaaggatcaggcctaa

SEQ ID NO: 624631 - DNA, 120 bp, Artificial Sequence
  ENSG00000178502_45 (sequence is synthesized)
aatagctccttgggaaagaaatttcctttttgatgagaaaacttaaaatattgtttttggtaatgtaagcagttaaaaacatgactttagaaagacagcttaatgcgtattcaagcaaac

SEQ ID NO: 624632 - DNA, 120 bp, Artificial Sequence
  ENSG00000178502_46 (sequence is synthesized)
ctttgttttgttgcttttgcttttgtttgtagaagagagaggaagttattataccaaaaagtaatagtatatgtaactttgagtgaggctacttatatcttagaatgggtatccttgaac

SEQ ID NO: 624633 - DNA, 120 bp, Artificial Sequence
  ENSG00000178502_47 (sequence is synthesized)
tatatctaccccaccatggcttaaaaaaatcagtggtatatattgagaatgtcagtcatgagcttagtgtttaagtaacacatcccacttacagttgtttgcatgattagtcttgtgtat

SEQ ID NO: 624634 - DNA, 120 bp, Artificial Sequence
  ENSG00000178502_48 (sequence is synthesized)
catgatgttcaactttgcttttgctgtgccagttcaaaaatatcttttttgctaaaaactcttaaaattcatgacataagttttgttttgatcacccggttttatatagtatttctggga

SEQ ID NO: 624635 - DNA, 120 bp, Artificial Sequence
  ENSG00000178502_49 (sequence is synthesized)
ccaaaaaatttaaatatacctttttaatataaaacagaagtttgaagctggaaagatagtgtttatggaagatttgtgtgcttttgtgttttttaaacccgtcaggctgctggtaaggca

SEQ ID NO: 624636 - DNA, 120 bp, Artificial Sequence
  ENSG00000178502_50 (sequence is synthesized)
gtttctagggctcacttttcctccttacctcttgactagtgtagcatgtggtatgtttaaaatatttcattttctgctttgtaattctaaagtcaacactatactgtatgtagacaggag

SEQ ID NO: 624637 - DNA, 120 bp, Artificial Sequence
  ENSG00000178502_51 (sequence is synthesized)
agctgatttgtatattttagttatttggtctaatcaagcataactaaagggacttcttttttgatacttttctcaaattaagtttaaatatagtatacgggccacatttcatgtctttga

SEQ ID NO: 624638 - DNA, 120 bp, Artificial Sequence
  ENSG00000178502_52 (sequence is synthesized)
aagtgttgtacattactgtaaaccaagtactctgtctacaccagagggtgctttaactgcaaaatatttgagaaacaattcagtctctcaaacattttggcacagttcatcactccagtt

SEQ ID NO: 624639 - DNA, 120 bp, Artificial Sequence
  ENSG00000178502_53 (sequence is synthesized)
tgttactttcttgagaatagtccattttttgtttttgttattgtaccgtatgttctggtcattggaaacagaacagctcatagttgggtgatgtaatataataacagtaatataacctag

SEQ ID NO: 624640 - DNA, 120 bp, Artificial Sequence
  ENSG00000178502_54 (sequence is synthesized)
tagtcattttgcttcaagtaatttaattagatagcaaaatcactgcggtttgtttattacacttgtagggctttttatcttactcagtgaccatcactacgaatgtcttacattgaagca

SEQ ID NO: 624641 - DNA, 120 bp, Artificial Sequence
  ENSG00000178502_55 (sequence is synthesized)
cagactgcagagcacttgttaacttagtcctcctgcataatgcactcgtgaaaagtagtgcttgctaggtgtttgaagattttatgatccgtgtgcttgggctcgttgagttatttgtaa

SEQ ID NO: 624642 - DNA, 120 bp, Artificial Sequence
  ENSG00000178502_56 (sequence is synthesized)
aataaacatttagtttgagttgatgcagtaagttttttggactagtagtatccaggtccctactctactgaaaatataatcttcactatctccccttaactcagaggagatgtagcattt

SEQ ID NO: 624643 - DNA, 120 bp, Artificial Sequence
  ENSG00000178502_57 (sequence is synthesized)
agaacaccttgagacatgacattgtaaaatagcttgttttatgttcctgaagctatcttgttctctgttaaagctactaattgtctcagtgtaagttttaaataaacatatttctttaaa

SEQ ID NO: 624644 - DNA, 120 bp, Artificial Sequence
  ENSG00000178522_0 (sequence is synthesized)
gagaagtacagagcaagtcccacgcacagtcctgaaaaaaattttaatcttcttttcttagaactatcttggttggcatcatcaggccctgagagcacagtgcatgtcagcatctaagat

SEQ ID NO: 624645 - DNA, 120 bp, Artificial Sequence
  ENSG00000178522_1 (sequence is synthesized)
tccacttttcaaaatgaaggacctgatactgatcctatgcctcctggaaatgagttttgcagtgccgttctttcctcagcaatctggaacaccgggtatggctagtttgagccttgagac

SEQ ID NO: 624646 - DNA, 120 bp, Artificial Sequence
  ENSG00000178522_2 (sequence is synthesized)
aatgagacagttgggaagtctgcagagattaaacacactttctcagtattctagatacggctttggaaaatcatttaattctttgtggatgcacggtctcctcccaccacattcctctct

SEQ ID NO: 624647 - DNA, 120 bp, Artificial Sequence
  ENSG00000178522_3 (sequence is synthesized)
tccatggatgaggccaagagaacatgaaactcaacagtatgaatattctttgcctgtgcatcccccacctctcccatcacagccatccttgaagcctcaacagccaggactgaaaccttt

SEQ ID NO: 624648 - DNA, 120 bp, Artificial Sequence
  ENSG00000178522_4 (sequence is synthesized)
tctccagtctgctgctgcaaccaccaaccaggccacagcactgaaagaagcacttcagcctccaattcacctgggacatctgcccttgcaggaaggagaactgcctctggttcagcagca

SEQ ID NO: 624649 - DNA, 120 bp, Artificial Sequence
  ENSG00000178522_5 (sequence is synthesized)
ggtggcaccatcagataagccaccaaagcctgagctcccaggagtagattttgctgatccacaaggtccatcactcccaggaatggattttcctgatccacaaggtccatcactcccagg

SEQ ID NO: 624650 - DNA, 120 bp, Artificial Sequence
  ENSG00000178522_6 (sequence is synthesized)
attggattttgctgatccacaaggttcaacaattttccaaatagcccgtttgatttctcacggaccaatgccacaaaataaacaatctccactttatccaggaatgttgtacgtgccttt

SEQ ID NO: 624651 - DNA, 120 bp, Artificial Sequence
  ENSG00000178522_7 (sequence is synthesized)
tggagcaaatcaattgaatgcccctgccagacttggcatcatgagttcagaagaagtggcaggcgggagagaagacccaatggcctatggagccatgtttccaggatttggaggcatgag

SEQ ID NO: 624652 - DNA, 120 bp, Artificial Sequence
  ENSG00000178522_8 (sequence is synthesized)
ggccctgagaacgaagaaggaggtgcacaaggctcccctatgccggaggccaacccagacaatctagaaaacccagctttccttacagagctagaacctgctccccacgcagggctcctt

SEQ ID NO: 624653 - DNA, 120 bp, Artificial Sequence
  ENSG00000178522_9 (sequence is synthesized)
gctctccctaaggatgacattcccggcctgccaaggagcccttcagggaagatgaagggactccccagcgtcaccccagcagctgctgacccactgatgacccctgaattagctgatgtt

SEQ ID NO: 624654 - DNA, 120 bp, Artificial Sequence
  ENSG00000178522_10 (sequence is synthesized)
tataggacctacgatgctgacatgaccacatccgtggatttccaggaagaagcaaccatggataccacgatggccccaaactctctgcaaacatccatgccaggaaacaaagcccaggag

SEQ ID NO: 624655 - DNA, 120 bp, Artificial Sequence
  ENSG00000178522_11 (sequence is synthesized)
cccgagatgatgcatgacgcatggcatttccaagagccctgacagctctaagatattagctactttctgtatgcacaagcttcccagctttgtccccacagtgtacctttttgctaaaac

SEQ ID NO: 624656 - DNA, 120 bp, Artificial Sequence
  ENSG00000178522_12 (sequence is synthesized)
acttattacccttctgcagcaaaggcattaaaagcgctaagcatatattaataaatgcaagtggctagaaatagtgtaggtccccttcttgctttcaatatcttgttgaaataaaatgtg

SEQ ID NO: 624657 - DNA, 120 bp, Artificial Sequence
  ENSG00000178522_13 (sequence is synthesized)
tcaattgtctctgtgatttagaaacactattaataacatcagagcaaggttctaagggtctcagcatttgatcatcactttttcttagctgtcttaagcattatagaatttctcttacca

SEQ ID NO: 624658 - DNA, 120 bp, Artificial Sequence
  ENSG00000178522_14 (sequence is synthesized)
gcatgacactattatattcaggaaacatggcactgcttttttctctaagcaaaggcaaatatcctcataattctaagctaattcatttaaactttattaaatggggattggtggaaaact

SEQ ID NO: 624659 - DNA, 120 bp, Artificial Sequence
  ENSG00000178522_15 (sequence is synthesized)
aactcctgactggtattactgggtttggtataatttaatttaaaattctcatttatagagtattttatttaatctagtataaaaaatctagcctattttaaataaagaatttttctcact

SEQ ID NO: 624660 - DNA, 80 bp, Artificial Sequence
  ENSG00000178531_0 (sequence is synthesized)
gccggggagaggccgaacgcgcagccggcgcgggtccctgagagagcgcggccgccgggcggtcggtccccgtccgggtc

SEQ ID NO: 624661 - DNA, 120 bp, Artificial Sequence
  ENSG00000178531_1 (sequence is synthesized)
agagagcgcggccgccgggcggtcggtccccgtccgggtcgaagccaggggcgcgcggcgatgtgagccatgagcgcgacgtggacgctgtcgccggagcccctgccgccgtcgacgggg

SEQ ID NO: 624662 - DNA, 120 bp, Artificial Sequence
  ENSG00000178531_2 (sequence is synthesized)
cccccggtgggcgcgggcctggacgcggagcagcgcacggtgttcgccttcgtgctctgcctgctcgtggtgctggtgctgttgatggtgcgctgcgtgcgcatcctgctcgacccctac

SEQ ID NO: 624663 - DNA, 120 bp, Artificial Sequence
  ENSG00000178531_3 (sequence is synthesized)
agccgcatgcccgcctcgtcctggaccgaccacaaggaggcgctcgagcgcgggcagttcgactacgcgttggtgtgaggggcgcggcgccccctagccggccctgcgccggggtctcag

SEQ ID NO: 624664 - DNA, 120 bp, Artificial Sequence
  ENSG00000178531_4 (sequence is synthesized)
ggggcgccgcggggccaggactgcgctcaggatcccgccccggagcccccagcccgggggagagggggagggagttgggagaagcccagcccctccccctcgagacccctcccatgtccc

SEQ ID NO: 624665 - DNA, 120 bp, Artificial Sequence
  ENSG00000178531_5 (sequence is synthesized)
cacctcgtgcctttatccgccctgtcccttcctctctgcgcatctcacccgcccggctggcccccacccccgactctgaatcccgggcgggaggaggacccccgcaccgccccctcccca

SEQ ID NO: 624666 - DNA, 120 bp, Artificial Sequence
  ENSG00000178531_6 (sequence is synthesized)
gcgtgtaagtggctctgctattgtgcgtccctggaagtggggacccccttgtccctcctccctcccctgttgtctggccgtcgtcaaccccaccttgactgagtgttgagcccgtccttg

SEQ ID NO: 624667 - DNA, 120 bp, Artificial Sequence
  ENSG00000178531_7 (sequence is synthesized)
ggctctggtccctgcggggcaggctctcccgggcccacggggcggacgctgcataccaatttgccctgcaccgcctgtcccggagacggagcccgaaggcctgccatggcggctgtgtcg

SEQ ID NO: 624668 - DNA, 120 bp, Artificial Sequence
  ENSG00000178531_8 (sequence is synthesized)
aggatgcgtggcgcctgccgtggcgggacagcgtgggcaggctcatttctgcccccaacccgggccccaggacaggtcagcgcgccctgccccggtgcccaccgctgccccccatccgcc

SEQ ID NO: 624669 - DNA, 120 bp, Artificial Sequence
  ENSG00000178531_9 (sequence is synthesized)
ctcctgccacttgcccctgacccccctgccgtgcctcccgcagccctcccatgccgttccactcctccctgcctctgagccgaacatgataataaaagctattattgagcgcttactgca

SEQ ID NO: 624670 - DNA, 120 bp, Artificial Sequence
  ENSG00000178537_0 (sequence is synthesized)
gaaaggtcggcggcgccggcactgcagctggggctgagaagccaggacggcccgagaactgacagacggagtgacagacggactgaccatggccgaccagccaaaacccatcagcccgct

SEQ ID NO: 624671 - DNA, 120 bp, Artificial Sequence
  ENSG00000178537_1 (sequence is synthesized)
caagaacctgctggccggcggctttggcggcgtgtgcctggtgttcgtcggtcaccctctggacacggtcaaggtccgactgcagacacagccaccgagtttgcctggacaacctcccat

SEQ ID NO: 624672 - DNA, 120 bp, Artificial Sequence
  ENSG00000178537_2 (sequence is synthesized)
gtactctgggacctttgactgtttccggaagactctttttagagagggcatcacggggctatatcggggaatggctgcccctatcatcggggtcactcccatgtttgccgtgtgcttctt

SEQ ID NO: 624673 - DNA, 120 bp, Artificial Sequence
  ENSG00000178537_3 (sequence is synthesized)
tgggtttggtttggggaagaaactacaacagaaacacccagaagatgtgctcagctatccccagctttttgcagctgggatgttatctggcgtattcaccacaggaatcatgactcctgg

SEQ ID NO: 624674 - DNA, 120 bp, Artificial Sequence
  ENSG00000178537_4 (sequence is synthesized)
agaacggatcaagtgcttattacagattcaggcttcttcaggagaaagcaagtacactggtaccttggactgtgcaaagaagctgtaccaggagtttgggatccgaggcatctacaaagg

SEQ ID NO: 624675 - DNA, 120 bp, Artificial Sequence
  ENSG00000178537_5 (sequence is synthesized)
gactgtgcttacccttatgcgagatgtcccagctagtggaatgtatttcatgacatatgaatggctgaaaaatatcttcactccggagggaaagagggtcagtgagctcagtgcccctcg

SEQ ID NO: 624676 - DNA, 120 bp, Artificial Sequence
  ENSG00000178537_6 (sequence is synthesized)
gatcttggtggctgggggcattgcagggatcttcaactgggctgtggcaatccccccagatgtgctcaagtctcgattccagactgcacctcctgggaaatatcctaatggtttcagaga

SEQ ID NO: 624677 - DNA, 120 bp, Artificial Sequence
  ENSG00000178537_7 (sequence is synthesized)
tccttggctttgaagttgccatgaagttccttaattgggccacccccaacttgtgaggctgaaggctgctcaagttcacttctggatgctggaagctgtcgttgaggagaaggagtagta

SEQ ID NO: 624678 - DNA, 120 bp, Artificial Sequence
  ENSG00000178537_8 (sequence is synthesized)
agcagaactaagcagtcttggagggcaaggggaggggaatggtgagatccgagccctgtgcatggacttggtgagactgttgccttaatgacatcctgcaccgtgtataacttagtgtgt

SEQ ID NO: 624679 - DNA, 120 bp, Artificial Sequence
  ENSG00000178537_9 (sequence is synthesized)
cattttgaaacttgaattcattcttatcaatttaagggatcttaaaaggatttggaaatggaacaagtagcttccagaccagatactacctgtggcaagaatgctgcctaccagttaact

SEQ ID NO: 624680 - DNA, 120 bp, Artificial Sequence
  ENSG00000178537_10 (sequence is synthesized)
gctggtcctaccacagtcaaagtattcctcattaaagagagaatctcaggttctcactggaggcactgtgcatattttcaaccagatcaccaggagctgagatcttcttcagtccctagc

SEQ ID NO: 624681 - DNA, 120 bp, Artificial Sequence
  ENSG00000178537_11 (sequence is synthesized)
caggaatacccatttgatttccagggtgccatctaatcctgggctgtacatgtggatatggacttgaggcccacctctgtgtccaagtggattgagcatatatgcctaggaggagataga

SEQ ID NO: 624682 - DNA, 120 bp, Artificial Sequence
  ENSG00000178537_12 (sequence is synthesized)
ctgttaatcgttggattttgattttttttttttatgcctgcaaataatcaaaagtaaaactggagtagcctaattttctgggagcaggtggagaactttccctcctacacagtgaggaca

SEQ ID NO: 624683 - DNA, 120 bp, Artificial Sequence
  ENSG00000178537_13 (sequence is synthesized)
gtcccagtctgctgggataagtgagaaagcccagggtgtaggaaggccctttttacatactcttttctcatgagagctcactattttaacaataaacaataaacgttgtttctaattttt

SEQ ID NO: 624684 - DNA, 120 bp, Artificial Sequence
  ENSG00000178537_14 (sequence is synthesized)
cttcctgaagccttaaaaattgggttctgccccacagcacctcctgggaaatatcctaatggtttcagagatgtgctgagggagctgatccgggatgaaggagtcacatccttgtacaaa

SEQ ID NO: 624685 - DNA, 120 bp, Artificial Sequence
  ENSG00000178538_0 (sequence is synthesized)
aggccacagccgctccctcgctctgctggggcctccggacgcgcttcccacgcgggtctctggaacactcggtccgaacgcacgcctgcttgcactcacactgcggttcacacccggagg

SEQ ID NO: 624686 - DNA, 120 bp, Artificial Sequence
  ENSG00000178538_1 (sequence is synthesized)
cgctctcgcactcacactgccgctcacgcgtgctcacactcccccacgcgcgctccgctccggctccagccccgcgcccagcgaaggcgcaggcactgctgccgagagcgccgaggggcc

SEQ ID NO: 624687 - DNA, 120 bp, Artificial Sequence
  ENSG00000178538_2 (sequence is synthesized)
ccgcggccttcccatggcggacctgagcttcatcgaagataccgtcgccttccccgagaaggaagaggatgaggaggaagaagaggagggtgtggagtggggctacgaggaaggtgttga

SEQ ID NO: 624688 - DNA, 120 bp, Artificial Sequence
  ENSG00000178538_3 (sequence is synthesized)
gtggggtctggtgtttcctgatgctaatggggaataccagtctcctattaacctaaactcaagagaggctaggtatgacccctcgctgttggatgtccgcctctccccaaattatgtggt

SEQ ID NO: 624689 - DNA, 120 bp, Artificial Sequence
  ENSG00000178538_4 (sequence is synthesized)
gtgccgagactgtgaagtcaccaatgatggacataccattcaggttatcctgaagtcaaaatcagttctttcgggaggaccattgcctcaagggcatgaatttgaactgtacgaagtgag

SEQ ID NO: 624690 - DNA, 120 bp, Artificial Sequence
  ENSG00000178538_5 (sequence is synthesized)
atttcactggggaagagaaaaccagcgtggttctgagcacacggttaatttcaaagcttttcccatggagctccatctgatccactggaactccactctgtttggcagcattgatgaggc

SEQ ID NO: 624691 - DNA, 120 bp, Artificial Sequence
  ENSG00000178538_6 (sequence is synthesized)
tgtggggaagccgcacggaatcgccatcattgctctgtttgttcagataggaaaggaacatgttggcttgaaggctgtgactgaaatcctccaagatattcagtataaggggaagtccaa

SEQ ID NO: 624692 - DNA, 120 bp, Artificial Sequence
  ENSG00000178538_7 (sequence is synthesized)
aacaataccttgctttaatcctaacactttattaccagaccctctgctgcgggattactgggtgtatgaaggctctctcaccatcccaccttgcagtgaaggtgtcacctggatattatt

SEQ ID NO: 624693 - DNA, 120 bp, Artificial Sequence
  ENSG00000178538_8 (sequence is synthesized)
ccgataccctttaactatatcccagctacagatagaagaatttcgaaggctgaggacacatgttaagggggcagaacttgtggaaggctgtgatgggattttgggagacaactttcggcc

SEQ ID NO: 624694 - DNA, 120 bp, Artificial Sequence
  ENSG00000178538_9 (sequence is synthesized)
cactcagcctcttagtgacagagtcattagagctgcatttcagtagccaaagaggacaggaacaagtctgtcttcatgagggaggaagacaatggtcctataatgcccttggataagaaa

SEQ ID NO: 624695 - DNA, 120 bp, Artificial Sequence
  ENSG00000178538_10 (sequence is synthesized)
aggaaacttttgagctgcaccttcagtttatcctcaaagcctgcgttgtttgtcttcatctaatccagctttgatggacatctgtgatggttgcctgtacacttgctgaaatgaaatatt

SEQ ID NO: 624696 - DNA, 120 bp, Artificial Sequence
  ENSG00000178538_11 (sequence is synthesized)
agaaatggctgtatattccaaagaaaccctatattatatatccacattactgctgctaggattcatagttgcacatactgtttattgcttatgtgtagaaggaatgaaactagtttccag

SEQ ID NO: 624697 - DNA, 120 bp, Artificial Sequence
  ENSG00000178538_12 (sequence is synthesized)
agttgttattaatatgaatatatatcatgtgttaatattgagaaaggaaaaatacattcccggtgttagtagttcttcatttcctgtctccaacagaaaattcactcattttagaactag

SEQ ID NO: 624698 - DNA, 120 bp, Artificial Sequence
  ENSG00000178538_13 (sequence is synthesized)
tgtaattcttgataataaaataagagttttgattaagaacagcatagagcttcaaaatgcaaagtgaatgattagtaaaattatgtctcattttattttttcagcacccataccacaatt

SEQ ID NO: 624699 - DNA, 120 bp, Artificial Sequence
  ENSG00000178538_14 (sequence is synthesized)
aatattaggctggattgccatgggaaacattttttggcattaatgcagcaacataatactcactttaggtattactacatagttgaaggatttaactgaatgtatggatcaaatttattt

SEQ ID NO: 624700 - DNA, 120 bp, Artificial Sequence
  ENSG00000178538_15 (sequence is synthesized)
atttgacatattcgaagctgtggtttaataggaatttgagaaaggtgtaagaaataggataaaaagaaggtcagcaccatgtaccaggaatagctttactttccatacatagaaatataa

SEQ ID NO: 624701 - DNA, 120 bp, Artificial Sequence
  ENSG00000178538_16 (sequence is synthesized)
atttagtggtatcctatattactttagtgtcgtacgctttgtaagacttaaatattttattctattgattccactactttggtatgttaagacatttctttaaagatgaccaacaatatc

SEQ ID NO: 624702 - DNA, 120 bp, Artificial Sequence
  ENSG00000178538_17 (sequence is synthesized)
cttattttaggtgccactagcagatgtaagcgtatacttagttgccgttagatgtgacagaatgagataatttatgtaaagcagtagagtacctggcacaaagcaaacaataaatattat

SEQ ID NO: 624703 - DNA, 120 bp, Artificial Sequence
  ENSG00000178538_18 (sequence is synthesized)
tgttattgttgttataattgtaaaatgaatgacttcaaaaacatagtcccagtttggagggattttgtgatgcagaatatctaagtcatagaaatagaagacaggtggaataagtatatg

SEQ ID NO: 624704 - DNA, 120 bp, Artificial Sequence
  ENSG00000178538_19 (sequence is synthesized)
ttcagagtttttagatgtgttgagtagagacggtaataatggaagcattaaatacaaatgaaaatcacaccagatatccctgaaattcaagcaaagaaagttcatcatgtattcttgggc

SEQ ID NO: 624705 - DNA, 120 bp, Artificial Sequence
  ENSG00000178538_20 (sequence is synthesized)
agcaagagaaaggactagggttatggcaatgtgtggaaaagttgaggcttgctaagggttgagatctgttggtagccctggatcacatggggtcagcaccaggcagtgcctctgaaagcg

SEQ ID NO: 624706 - DNA, 120 bp, Artificial Sequence
  ENSG00000178538_21 (sequence is synthesized)
gagagaggtcctggacttcccttgtgtataacagttcctagtgtccaacaatgaggaaacggtgaagcatggttacaaaactgtgacaaaaatatttacatctagcactgttaccactca

SEQ ID NO: 624707 - DNA, 120 bp, Artificial Sequence
  ENSG00000178538_22 (sequence is synthesized)
catgccaaacattggctgcacacgtgcagccttatttgtaattaacatcaaaagactagatctgaagccttccataaatgagaggccattcatatggcattcctggaacaaaacactgca

SEQ ID NO: 624708 - DNA, 120 bp, Artificial Sequence
  ENSG00000178538_23 (sequence is synthesized)
atctttccctgaaatacacaaaataaacaaatacaataacaaatagtaattaaatgactttcaggataacatctagttgttcagacttcacccttcacaggtgtgtgtgtatgtgtgttt

SEQ ID NO: 624709 - DNA, 120 bp, Artificial Sequence
  ENSG00000178538_24 (sequence is synthesized)
atgtctgtatattgaagcaatttgaatttatttactgtatattttctgagtaaaagactgaaatgaactacttggttcagatcatggtgtccattggtgacattgtttggaggcataata

SEQ ID NO: 624710 - DNA, 120 bp, Artificial Sequence
  ENSG00000178538_25 (sequence is synthesized)
ttctttatatggaaaatcctttaattccacagttagttacctcagattcagaatatgaatactgtttataatacgcttttgtaggaatgaatttgaaaggtagtttgtcagtaaacgaaa

SEQ ID NO: 624711 - DNA, 120 bp, Artificial Sequence
  ENSG00000178538_26 (sequence is synthesized)
gcacaacaactaatctcaaatctgttttgatggtgtgataggaaagaaagtaaaacctatgtgatggaccctgtaattggggcaggaatctcccaaagaaaaaggggagaattaatgaca

SEQ ID NO: 624712 - DNA, 120 bp, Artificial Sequence
  ENSG00000178538_27 (sequence is synthesized)
aatgtcatagatcttgaaatttaatttagggtgcattttgtttatgaaacaatttaataaggcaacaaagtgaaatgatttttcatgtagcttatacacatgtaagtgcctctgattcat

SEQ ID NO: 624713 - DNA, 120 bp, Artificial Sequence
  ENSG00000178538_28 (sequence is synthesized)
ggtaactaacgtacctgatggtgtgtaaagtaatactgttgtcagaaggtttgccaattaagataatttgagtttactctttttttgttggttagtttagctgaaggcttgtcaatttta

SEQ ID NO: 624714 - DNA, 120 bp, Artificial Sequence
  ENSG00000178538_29 (sequence is synthesized)
ttgatttttttcaaggagccaaagtggattttggggttttctctattgtgtttgtattctctatgtcatcaaactctgctcaaatcttacaaaatagtaagattagtaagaaagcagact

SEQ ID NO: 624715 - DNA, 120 bp, Artificial Sequence
  ENSG00000178538_30 (sequence is synthesized)
aacttctgcttgctttgtatttagtttgtgtcttttccagtattttaaggtggaaggttaggttattgatttgaattcttttttgaataaaggcattaacagttataaattttcctctga

SEQ ID NO: 624716 - DNA, 120 bp, Artificial Sequence
  ENSG00000178538_31 (sequence is synthesized)
gcattgctttagctgcatccaataagttttggtatgccatgtttttgttttcattcatctcaaggtattagaaaatactttgccttttaatttctttttgatgcaatggttatttaggag

SEQ ID NO: 624717 - DNA, 120 bp, Artificial Sequence
  ENSG00000178538_32 (sequence is synthesized)
tacattgtttaatttccacatatttatgaattcccaaatttgttattgatttataatttttttctgttgtgatcagaaaacatactttatatgatctcagtcttaaatttatcgaggttt

SEQ ID NO: 624718 - DNA, 120 bp, Artificial Sequence
  ENSG00000178538_33 (sequence is synthesized)
gctttctggcttagcatatggtttatcctgcagaataatccatgtgtacttaagagtatgtattgtactgttgttggatgctgtgttctatagatagatggctgttaggtctatagtgtt

SEQ ID NO: 624719 - DNA, 120 bp, Artificial Sequence
  ENSG00000178538_34 (sequence is synthesized)
ggcctgttgtgttgttcaagtcttctatttccttgttgatatgcctatttctgtctattatgaaagtagtgtattgaattctctgactgttgttgaataatctcttccttcaattctgtc

SEQ ID NO: 624720 - DNA, 120 bp, Artificial Sequence
  ENSG00000178538_35 (sequence is synthesized)
agtttttttctacattcattttgggacttttgtccttctttatctctagtaacatttttttattttaatatatactttgtcagatattaatatagctgccccagctttcttatagttgct

SEQ ID NO: 624721 - DNA, 120 bp, Artificial Sequence
  ENSG00000178538_36 (sequence is synthesized)
atttgtatgatgtatcttttttcatcttttcactttcaacttatttatatttttgaatctaaagtgtgtctccaacttatagttggatcttgtttttttttgaaatccagtctgacagtc

SEQ ID NO: 624722 - DNA, 120 bp, Artificial Sequence
  ENSG00000178538_37 (sequence is synthesized)
tctctgccttttggttggattatttaacccatttgcacttaatgttattgtttatatagttggatttgtgtctgccattttactttttgttttccacatgtcttgtatctttttgttgtt

SEQ ID NO: 624723 - DNA, 120 bp, Artificial Sequence
  ENSG00000178538_38 (sequence is synthesized)
gttcctttattcctcctctattactttttttttaattaggtgaatattttctagtatatttcaattgctttaattatttttttcatttttttgagtatattttcacagtggttgctaaag

SEQ ID NO: 624724 - DNA, 120 bp, Artificial Sequence
  ENSG00000178538_39 (sequence is synthesized)
ggcatatcatatacttgttaatttatcagaatctatttcagatttataataactttattacagtgagttatttagttactactaaatagctctgaactctcttctccctttttgtgctat

SEQ ID NO: 624725 - DNA, 120 bp, Artificial Sequence
  ENSG00000178538_40 (sequence is synthesized)
tattgttatacatattacatctatacatgctgtaagcccaacaatacattgttatatttttcctgtaattgtatgtatattaagcaagcagagacttgagaacaaattatatttatagag

SEQ ID NO: 624726 - DNA, 120 bp, Artificial Sequence
  ENSG00000178538_41 (sequence is synthesized)
tttcttctagtaagcttttaatttaccatttctggttatgttcattttgtcttgtaaatttgagtcaccatctggtgtgatttcttactccagtactactttgttcttatttacctcctt

SEQ ID NO: 624727 - DNA, 120 bp, Artificial Sequence
  ENSG00000178538_42 (sequence is synthesized)
tgtgttgtcattgtcaaatatgtcacatttgtatatgttctgggtctaaagcataattacatgatattttatacaattgctctttaagagaaggaagaaatgcatttatactgtctttca

SEQ ID NO: 624728 - DNA, 120 bp, Artificial Sequence
  ENSG00000178538_43 (sequence is synthesized)
taattacataattacatttaccagtgcccttttttttttggaatggattcaaattagtatctggggtcacttcattccaggcagaagtcctttttttaatatatttttatataaggcaaa

SEQ ID NO: 624729 - DNA, 120 bp, Artificial Sequence
  ENSG00000178538_44 (sequence is synthesized)
tctgatagggacaaatctttagtttttgtttatatgggctatctttattttaccttctttgagatagttttgctaaatataaaactcctggtgaaaagtttctgtttctgtttttgtttt

SEQ ID NO: 624730 - DNA, 120 bp, Artificial Sequence
  ENSG00000178538_45 (sequence is synthesized)
ctcagcatctgctgagatgccagctataaagcttaatgaggtttccttctacaagacaaatcgtttttctgtttctgctttcaaaaacaaatggtttcccccctgccccagatttcgtac

SEQ ID NO: 624731 - DNA, 120 bp, Artificial Sequence
  ENSG00000178538_46 (sequence is synthesized)
tatgatgtatctgggtgtgagtctgtatttattctgcttggaatttgttgagcttcttgggtatgtagatgaatgattttttttaagaaaaatattaaatttgggatgtttgagccatta

SEQ ID NO: 624732 - DNA, 120 bp, Artificial Sequence
  ENSG00000178538_47 (sequence is synthesized)
gaaagataactgaatcaatgtgaagtctgtgagtccctccagttgtcttcctcctcatcaggactaaaactggacttaagaggcagtgatccactaagcactgcttctgttcagaaataa

SEQ ID NO: 624733 - DNA, 120 bp, Artificial Sequence
  ENSG00000178538_48 (sequence is synthesized)
ataacaaatcatcttgtaaaaatcttgttttctgaataaagtattcagcgatttactgaaaatgatttagtttaaaagtagatgcatagctcttgaattttatcagtttatactaaaatt

SEQ ID NO: 624734 - DNA, 120 bp, Artificial Sequence
  ENSG00000178538_49 (sequence is synthesized)
taaaaaatgcttaatgcaatggaagcctagggcagcacatgaaacctcctgtctactctcgtggcttggcgtgtgcgcatgagcacatggccagaaaggcaatctacagtattaaatttc

SEQ ID NO: 624735 - DNA, 120 bp, Artificial Sequence
  ENSG00000178538_50 (sequence is synthesized)
cttgtaaaaattctgcctctgcaaattcagtaggtcatttttgtggatgctttggataggtgacgagctgaagacaagcaaccgttggagaaacctcaacagtaatgaaaagtgtaggtt

SEQ ID NO: 624736 - DNA, 120 bp, Artificial Sequence
  ENSG00000178538_51 (sequence is synthesized)
tgctagtttaaaattggtgggttggttttattcaccccaagccacttggggagggagggagaaagagagattttttgagagtgattcttttgtccaaagaattccctccccgacttacgt

SEQ ID NO: 624737 - DNA, 120 bp, Artificial Sequence
  ENSG00000178538_52 (sequence is synthesized)
tcttagttaacttctgctgtttctttgatacgcagttgaaatcttatgtcttctgtgggacttttctctagttttttccctaggcagaattcatctctctctctctgctccctgtatgct

SEQ ID NO: 624738 - DNA, 120 bp, Artificial Sequence
  ENSG00000178538_53 (sequence is synthesized)
tgatagggcactgccatggcgctggccccatgggttgtaccatttagtctccacagcgtctttcttgctgcctgtgagctcctgaggaccgaagctccctctcaccccctttttactccc

SEQ ID NO: 624739 - DNA, 120 bp, Artificial Sequence
  ENSG00000178538_54 (sequence is synthesized)
atcatttgcccactgccaggcacagtggagatagacagttcacactggtgaaagtgaggggatgttggattcagtccacgtcttgatgttatttctagaaggaacctcagtttaccccag

SEQ ID NO: 624740 - DNA, 120 bp, Artificial Sequence
  ENSG00000178538_55 (sequence is synthesized)
aaaatagccctttggtgtcatgtaagagtatgttctgggggctgctggtcttccagtctttttttttgacattcacaactgtgcatgtgcttaatattaaatataaaattgctcatgacc

SEQ ID NO: 624741 - DNA, 120 bp, Artificial Sequence
  ENSG00000178538_56 (sequence is synthesized)
agatgcaatatccagtaccacttcagtggctggaaatcatggctgtataattctatgtcagtgatacatgtattttagagtattctgttgaagtgtttgacagcattactgtaattataa

SEQ ID NO: 624742 - DNA, 120 bp, Artificial Sequence
  ENSG00000178538_57 (sequence is synthesized)
tggtaatttagtaataaaagcgtatgtacttcatcttgataaaatttatgacacattcttgagctctgttaattacaggtcaagtaggtattttaattttatgcagtattgaagaaaaac

SEQ ID NO: 624743 - DNA, 120 bp, Artificial Sequence
  ENSG00000178538_58 (sequence is synthesized)
tatgattatattttcctatcagagtagcctttaattccaagttttggtggctttcataagaacagacaccctcaggcccagaaaaagtgacatgcatgcatacctctttagtaacttacc

SEQ ID NO: 624744 - DNA, 120 bp, Artificial Sequence
  ENSG00000178538_59 (sequence is synthesized)
atgttgtccccgtgaagcagcaccagtcatgtcccagtgaccaaggagcacataggaggggacttggggagcgtgtgagcctcagtgtggacccttctcgtctcctgcagaattgatcct

SEQ ID NO: 624745 - DNA, 120 bp, Artificial Sequence
  ENSG00000178538_60 (sequence is synthesized)
cttgtttctcaggggagggagcatatctggcatgcattgaaatacttcttctatggaagtgccttttatatgataaattgagaagcacttattaattatctgaatatgatacactattga

SEQ ID NO: 624746 - DNA, 120 bp, Artificial Sequence
  ENSG00000178538_61 (sequence is synthesized)
tatgatacactattgattgaaacataatctatgtattttaatatatagaattcaatgtatgtattccttactcttaaggaactaacaaaataaaatatcacaaacacggaagagataaaa

SEQ ID NO: 624747 - DNA, 120 bp, Artificial Sequence
  ENSG00000178562_0 (sequence is synthesized)
acacttcgggttcctcggggaggaggggctggaaccctagcccatcgtcaggacaaagatgctcaggctgctcttggctctcaacttattcccttcaattcaagtaacaggaaacaagat

SEQ ID NO: 624748 - DNA, 120 bp, Artificial Sequence
  ENSG00000178562_1 (sequence is synthesized)
tttggtgaagcagtcgcccatgcttgtagcgtacgacaatgcggtcaaccttagctgcaagtattcctacaatctcttctcaagggagttccgggcatcccttcacaaaggactggatag

SEQ ID NO: 624749 - DNA, 120 bp, Artificial Sequence
  ENSG00000178562_2 (sequence is synthesized)
tgctgtggaagtctgtgttgtatatgggaattactcccagcagcttcaggtttactcaaaaacggggttcaactgtgatgggaaattgggcaatgaatcagtgacattctacctccagaa

SEQ ID NO: 624750 - DNA, 120 bp, Artificial Sequence
  ENSG00000178562_3 (sequence is synthesized)
tttgtatgttaaccaaacagatatttacttctgcaaaattgaagttatgtatcctcctccttacctagacaatgagaagagcaatggaaccattatccatgtgaaagggaaacacctttg

SEQ ID NO: 624751 - DNA, 120 bp, Artificial Sequence
  ENSG00000178562_4 (sequence is synthesized)
tccaagtcccctatttcccggaccttctaagcccttttgggtgctggtggtggttggtggagtcctggcttgctatagcttgctagtaacagtggcctttattattttctgggtgaggag

SEQ ID NO: 624752 - DNA, 120 bp, Artificial Sequence
  ENSG00000178562_5 (sequence is synthesized)
taagaggagcaggctcctgcacagtgactacatgaacatgactccccgccgccccgggcccacccgcaagcattaccagccctatgccccaccacgcgacttcgcagcctatcgctcctg

SEQ ID NO: 624753 - DNA, 120 bp, Artificial Sequence
  ENSG00000178562_6 (sequence is synthesized)
acacggacgcctatccagaagccagccggctggcagcccccatctgctcaatatcactgctctggataggaaatgaccgccatctccagccggccacctcaggcccctgttgggccacca

SEQ ID NO: 624754 - DNA, 120 bp, Artificial Sequence
  ENSG00000178562_7 (sequence is synthesized)
atgccaatttttctcgagtgactagaccaaatatcaagatcattttgagactctgaaatgaagtaaaagagatttcctgtgacaggccaagtcttacagtgccatggcccacattccaac

SEQ ID NO: 624755 - DNA, 120 bp, Artificial Sequence
  ENSG00000178562_8 (sequence is synthesized)
ttaccatgtacttagtgacttgactgagaagttagggtagaaaacaaaaagggagtggattctgggagcctcttccctttctcactcacctgcacatctcagtcaagcaaagtgtggtat

SEQ ID NO: 624756 - DNA, 120 bp, Artificial Sequence
  ENSG00000178562_9 (sequence is synthesized)
ccacagacattttagttgcagaagaaaggctaggaaatcattccttttggttaaatgggtgtttaatcttttggttagtgggttaaacggggtaagttagagtagggggagggataggaa

SEQ ID NO: 624757 - DNA, 120 bp, Artificial Sequence
  ENSG00000178562_10 (sequence is synthesized)
gacatatttaaaaaccattaaaacactgtctcccactcatgaaatgagccacgtagttcctatttaatgctgttttcctttagtttagaaatacatagacattgtcttttatgaattctg

SEQ ID NO: 624758 - DNA, 120 bp, Artificial Sequence
  ENSG00000178562_11 (sequence is synthesized)
atcatatttagtcattttgaccaaatgagggatttggtcaaatgagggattccctcaaagcaatatcaggtaaaccaagttgctttcctcactccctgtcatgagacttcagtgttaatg

SEQ ID NO: 624759 - DNA, 120 bp, Artificial Sequence
  ENSG00000178562_12 (sequence is synthesized)
ttcacaatatactttcgaaagaataaaatagttctcctacatgaagaaagaatatgtcaggaaataaggtcactttatgtcaaaattatttgagtactatgggacctggcgcagtggctc

SEQ ID NO: 624760 - DNA, 120 bp, Artificial Sequence
  ENSG00000178562_13 (sequence is synthesized)
acaacaacaacaacaacaacaacaaaccacaaaattatttgagtactgtgaaggattatttgtctaacagttcattccaatcagaccaggtaggagctttcctgtttcatatgtttcagg

SEQ ID NO: 624761 - DNA, 120 bp, Artificial Sequence
  ENSG00000178562_14 (sequence is synthesized)
ctttcctgtttcatatgtttcagggttgcacagttggtctctttaatgtcggtgtggagatccaaagtgggttgtggaaagagcgtccataggagaagtgagaatactgtgaaaaaggga

SEQ ID NO: 624762 - DNA, 120 bp, Artificial Sequence
  ENSG00000178562_15 (sequence is synthesized)
tgttagcattcattagagtatgaggatgagtcccaagaaggttctttggaaggaggacgaatagaatggagtaatgaaattcttgccatgtgctgaggagatagccagcattaggtgaca

SEQ ID NO: 624763 - DNA, 120 bp, Artificial Sequence
  ENSG00000178562_16 (sequence is synthesized)
atcttccagaagtggtcaggcagaaggtgccctggtgagagctcctttacagggactttatgtggtttagggctcagagctccaaaactctgggctcagctgctcctgtaccttggaggt

SEQ ID NO: 624764 - DNA, 120 bp, Artificial Sequence
  ENSG00000178562_17 (sequence is synthesized)
agagcatcagagttcttaagggactgggtaaggcctgaccctgaaatgaccatggatatttttctacctacagtttgagtcaactagaatatgcctggggaccttgaagaatggcccttc

SEQ ID NO: 624765 - DNA, 120 bp, Artificial Sequence
  ENSG00000178562_18 (sequence is synthesized)
agtggccctcaccatttgttcatgcttcagttaattcaggtgttgaaggagcttaggttttagaggcacgtagacttggttcaagtctcgttagtagttgaatagcctcaggcaagtcac

SEQ ID NO: 624766 - DNA, 120 bp, Artificial Sequence
  ENSG00000178562_19 (sequence is synthesized)
tgcccacctaagatgatggttcttcaactataaaatggagataatggttacaaatgtctcttcctatagtataatctccataagggcatggcccaagtctgtctttgactctgcctatcc

SEQ ID NO: 624767 - DNA, 120 bp, Artificial Sequence
  ENSG00000178562_20 (sequence is synthesized)
ctgacatttagtagcatgcccgacatacaatgttagctattggtattattgccatatagataaattatgtataaaaattaaactgggcaatagcctaagaaggggggaatattgtaacac

SEQ ID NO: 624768 - DNA, 120 bp, Artificial Sequence
  ENSG00000178562_21 (sequence is synthesized)
aaatttaaacccactacgcagggatgaggtgctataatatgaggaccttttaacttccatcattttcctgtttcttgaaatagtttatcttgtaatgaaatataaggcacctcccacttt

SEQ ID NO: 624769 - DNA, 120 bp, Artificial Sequence
  ENSG00000178562_22 (sequence is synthesized)
tatgtatagaaagaggtcttttaatttttttttaatgtgagaaggaagggaggagtaggaatcttgagattccagatcgaaaatactgtactttggttgatttttaagtgggcttccatt

SEQ ID NO: 624770 - DNA, 120 bp, Artificial Sequence
  ENSG00000178562_23 (sequence is synthesized)
ccatggatttaatcagtcccaagaagatcaaactcagcagtacttgggtgctgaagaactgttggatttaccctggcacgtgtgccacttgccagcttcttgggcacacagagttcttca

SEQ ID NO: 624771 - DNA, 120 bp, Artificial Sequence
  ENSG00000178562_24 (sequence is synthesized)
atccaagttatcagattgtatttgaaaatgacagagctggagagttttttgaaatggcagtggcaaataaataaatacttttttttaaatggaaagacttgatctatggtaataaatgat

SEQ ID NO: 624772 - DNA, 120 bp, Artificial Sequence
  ENSG00000178562_25 (sequence is synthesized)
tttgttttctgactggaaaaataggcctactaaagatgaatcacacttgagatgtttcttactcactctgcacagaaacaaagaagaaatgttatacagggaagtccgttttcactatta

SEQ ID NO: 624773 - DNA, 120 bp, Artificial Sequence
  ENSG00000178562_26 (sequence is synthesized)
gtatgaaccaagaaatggttcaaaaacagtggtaggagcaatgctttcatagtttcagatatggtagttatgaagaaaacaatgtcatttgctgctattattgtaagagtcttataatta

SEQ ID NO: 624774 - DNA, 120 bp, Artificial Sequence
  ENSG00000178562_27 (sequence is synthesized)
atggtactcctataatttttgattgtgagctcacctatttgggttaagcatgccaatttaaagagaccaagtgtatgtacattatgttctacatattcagtgataaaattactaaactac

SEQ ID NO: 624775 - DNA, 120 bp, Artificial Sequence
  ENSG00000178562_28 (sequence is synthesized)
tatatgtctgctttaaatttgtactttaatattgtcttttggtattaagaaagatatgctttcagaatagatatgcttcgctttggcaaggaatttggatagaacttgctatttaaaaga

SEQ ID NO: 624776 - DNA, 120 bp, Artificial Sequence
  ENSG00000178562_29 (sequence is synthesized)
ggtgtggggtaaatccttgtataaatctccagtttagccttttttgaaaaagctagactttcaaatactaatttcacttcaagcagggtacgtttctggtttgtttgcttgacttcagtc

SEQ ID NO: 624777 - DNA, 120 bp, Artificial Sequence
  ENSG00000178562_30 (sequence is synthesized)
acaatttcttatcagaccaatggctgacctctttgagatgtcaggctaggcttacctatgtgttctgtgtcatgtgaatgctgagaagtttgacagagatccaacttcagccttgacccc

SEQ ID NO: 624778 - DNA, 120 bp, Artificial Sequence
  ENSG00000178562_31 (sequence is synthesized)
atcagtccctcgggttaactaactgagccaccggtcctcatggctattttaatgagggtattgatggttaaatgcatgtctgatcccttatcccagccatttgcactgccagctgggaac

SEQ ID NO: 624779 - DNA, 120 bp, Artificial Sequence
  ENSG00000178562_32 (sequence is synthesized)
tataccagacctggatactgatcccaaagtgttaaattcaactacatgctggagattagagatggtgccaataaaggacccagaaccaggatcttgattgctatagacttattaataatc

SEQ ID NO: 624780 - DNA, 120 bp, Artificial Sequence
  ENSG00000178562_33 (sequence is synthesized)
caggtcaaagagagtgacacacactctctcaagacctggggtgagggagtctgtgttatctgcaaggccatttgaggctcagaaagtctctctttcctatagatatatgcatactttctg

SEQ ID NO: 624781 - DNA, 120 bp, Artificial Sequence
  ENSG00000178562_34 (sequence is synthesized)
acatataggaatgtatcaggaatactcaaccatcacaggcatgttcctacctcagggcctttacatgtcctgtttactctgtctagaatgtccttctgtagatgacctggcttgcctcgt

SEQ ID NO: 624782 - DNA, 120 bp, Artificial Sequence
  ENSG00000178562_35 (sequence is synthesized)
cacccttcaggtccttgctcaagtgtcatcttctcccctagttaaactaccccacaccctgtctgctttccttgcttatttttctccatagcattttaccatctcttacattagacattt

SEQ ID NO: 624783 - DNA, 120 bp, Artificial Sequence
  ENSG00000178562_36 (sequence is synthesized)
ttcttatttatttgtagtttataagcttcatgaggcaagtaactttgctttgtttcttgctgtatctccagtgcccagagcagtgcctggtatataataaatatttattgactgagtgaa

SEQ ID NO: 624784 - DNA, 120 bp, Artificial Sequence
  ENSG00000178562_37 (sequence is synthesized)
taaagtcatcaaaacaacgttatatcctgtgtgaaatgctgcagtcaggatgccttgtggtttgagtgccttgatcatgtgccctaaggggatggtggcggtggtggtggccgtggatga

SEQ ID NO: 624785 - DNA, 120 bp, Artificial Sequence
  ENSG00000178562_38 (sequence is synthesized)
cggagactctcaggccttggcaggtgcgtctttcagttcccctcacacttcgggttcctcggggaggaggggctggaaccctagcccatcgtcaggacaaagatgctcaggctgctcttg

SEQ ID NO: 624786 - DNA, 120 bp, Artificial Sequence
  ENSG00000178567_0 (sequence is synthesized)
ctctccccttgcggcctttctaacgttggccctgctcttgtggcctcccgcagaatgtggatgacgcccaaaagaagcaagatggaagtcgacgaggctctagttttccggcccgagtgg

SEQ ID NO: 624787 - DNA, 120 bp, Artificial Sequence
  ENSG00000178567_1 (sequence is synthesized)
acccagcgttatttggtggtggagcctccggagggcgatggggccctgtgcctggtctgtcgccgcctcatcgtagctacccgcgaacgcgacgtcaggcgccactacgaggctgagcac

SEQ ID NO: 624788 - DNA, 120 bp, Artificial Sequence
  ENSG00000178567_2 (sequence is synthesized)
gaatactacgagcggtatgtggcggacggcgagcgcgcggccctggtggagcgtctgcgtcagggcgacttgcccgtggcctccttcactcctgaagagagagctgctcgtgcaggcctc

SEQ ID NO: 624789 - DNA, 120 bp, Artificial Sequence
  ENSG00000178567_3 (sequence is synthesized)
gggctctgccgcctcttggccttgaagggtcgcggctggggtgagggggactttgtataccagtgcatggaggtgttgctgagagaggtactgcccgagcatgtaagcgtcctgcaaggc

SEQ ID NO: 624790 - DNA, 120 bp, Artificial Sequence
  ENSG00000178567_4 (sequence is synthesized)
gttgacttatctccagatatcacaaggcagaggatcctgagcattgacaggaatctacgcaaccagctttttaaccgagccagggactttaaagcctattctcttgccttggacgaccag

SEQ ID NO: 624791 - DNA, 120 bp, Artificial Sequence
  ENSG00000178567_5 (sequence is synthesized)
gcttttgtggcctatgagaactacctcctggtctttatccgcggtgtaggccctgagttggaggtgcaagaagatcttctgaccataatcaacctgactcatcatttcagtgttggtgcg

SEQ ID NO: 624792 - DNA, 120 bp, Artificial Sequence
  ENSG00000178567_6 (sequence is synthesized)
ctcatgtcggcaatcctagagtccctgcagacagcagggcttagcttgcagagaatggttggactgaccacgacccatactttgaggatgattggtgagaactcaggactcgtctcatac

SEQ ID NO: 624793 - DNA, 120 bp, Artificial Sequence
  ENSG00000178567_7 (sequence is synthesized)
atgagagaaaaggccgtaagccccaactgttggaatgtcattcattattcaggatttcttcacttggaactgttgagctcctatgatgtagatgttaatcagatcataaataccatatcc

SEQ ID NO: 624794 - DNA, 120 bp, Artificial Sequence
  ENSG00000178567_8 (sequence is synthesized)
gaatggatagttttgattaagaccagaggcgttaggcgacctgaatttcagactttactaacggaatctgaatcagagcatggtgaaagggttaatggacgatgtctgaacaattggctt

SEQ ID NO: 624795 - DNA, 120 bp, Artificial Sequence
  ENSG00000178567_9 (sequence is synthesized)
aggagagggaaaactttaaaactaatattctctctaagaaaagaaatggaagcgttcttggtttcagtaggggcaacaacagtccacttctcagacaaacaatggctttgtgactttggc

SEQ ID NO: 624796 - DNA, 120 bp, Artificial Sequence
  ENSG00000178567_10 (sequence is synthesized)
ttcttggtggacattatggaacaccttcgagaactcagtgaagaattacgagttagtaaagtctttgctgctgctgcctttgaccatatttgtactttcgaagttaagctgaatttattt

SEQ ID NO: 624797 - DNA, 120 bp, Artificial Sequence
  ENSG00000178567_11 (sequence is synthesized)
caaagacatattgaggaaaaaaatctaacagactttcctgccctcagagaagttgttgatgagctaaaacagcaaaataaggaagatgaaaaaatatttgatcctgataggtatcaaatg

SEQ ID NO: 624798 - DNA, 120 bp, Artificial Sequence
  ENSG00000178567_12 (sequence is synthesized)
gtgatctgtcgtctccaaaaagaatttgagagacattttaaggacctcaggttcattaaaaaggacttagaacttttttcaaatccatttaactttaaacctgaatatgcacctatttca

SEQ ID NO: 624799 - DNA, 120 bp, Artificial Sequence
  ENSG00000178567_13 (sequence is synthesized)
gtgagggtggagctaacaaaacttcaggcaaacactaatctttggaatgaatacagaatcaaagacttggggcagttttatgctggattgtctgctgaatcctacccaattatcaaaggg

SEQ ID NO: 624800 - DNA, 120 bp, Artificial Sequence
  ENSG00000178567_14 (sequence is synthesized)
gttgcctgtaaggtggcatccttgtttgatagtaaccaaatctgtgaaaaggctttttcatatttgactcgaaaccaacacactttgagtcagccattaacagatgagcatctccaagcc

SEQ ID NO: 624801 - DNA, 120 bp, Artificial Sequence
  ENSG00000178567_15 (sequence is synthesized)
ctgtttcgggttgccacaactgaaatggagcccggttgggatgaccttgtgagagaaagaaatgaatctaatccataaggctttgtagtacaagattgaaaaactcaacaagaatttaat

SEQ ID NO: 624802 - DNA, 120 bp, Artificial Sequence
  ENSG00000178567_16 (sequence is synthesized)
tctaaaagcaaaaattggtttgagttttcaagtttactaatttggattgtgagaaagtaccaagtaccagccgtccaaactgatcacaattaaaattctgacagttgccttttttttcat

SEQ ID NO: 624803 - DNA, 120 bp, Artificial Sequence
  ENSG00000178567_17 (sequence is synthesized)
ctcaaatggcagcatgggactgaaacatgagaatgccaccttttttaaaacttagtttagtgacaaagtcattgtcttttatgatatagttaattttaaagagatttagtattaatgtga

SEQ ID NO: 624804 - DNA, 120 bp, Artificial Sequence
  ENSG00000178567_18 (sequence is synthesized)
gttgaatttgcagtctgttttttaggtgttctgaagataaatgccaaaaatttcagctcttattttaatggagtgttaaaattctgattcatatagtcttaaattatcaactccttaaat

SEQ ID NO: 624805 - DNA, 120 bp, Artificial Sequence
  ENSG00000178567_19 (sequence is synthesized)
gtgcttttgaaccaatttgcagaagctcacatagcaagttcataagtttccaaaaaggaagcccatacataacagtggaggtgttttgtctaaccatcaaaatgtttgagactttttttt

SEQ ID NO: 624806 - DNA, 120 bp, Artificial Sequence
  ENSG00000178567_20 (sequence is synthesized)
aaacatttctgagttcgaaggtaatactgacagatttcttccctcttccctccccatcacccacctcagtgataacacattactgatagaggaagtcattagaatcatttttaagtttca

SEQ ID NO: 624807 - DNA, 120 bp, Artificial Sequence
  ENSG00000178567_21 (sequence is synthesized)
gatataggagacttcatgcaatttggagataagactaattattgggggttttccttggattttttttttaataactgggggctattttatcagcttgcctattaaaggactatggtaagt

SEQ ID NO: 624808 - DNA, 120 bp, Artificial Sequence
  ENSG00000178567_22 (sequence is synthesized)
atagaatcttaatggttgccagttagtaattctttttttttttttttttactgtagacacaagtttggccctatcaaaaacgatgaggaaaaaagattgcactccaggattaggaggtgt

SEQ ID NO: 624809 - DNA, 120 bp, Artificial Sequence
  ENSG00000178567_23 (sequence is synthesized)
gagatattttagcttttttgtcttatctgcgtgggtattgctgctttattttaaaaaatcctgcctaaagtaaacactttgttttaaaatgatacagtatcagattttgttagatgctag

SEQ ID NO: 624810 - DNA, 120 bp, Artificial Sequence
  ENSG00000178567_24 (sequence is synthesized)
aaatggatttattctaaaatttggaactgtcgtacacattctatatgtaagatagcacacaagtagaaatatttaaaagcagtcttattcacagattgcagtaattctgtatttctacta

SEQ ID NO: 624811 - DNA, 120 bp, Artificial Sequence
  ENSG00000178567_25 (sequence is synthesized)
agataatctgctttgtgccaaaacagtaatttccaaacttctgttcaccatgaaaaggcaatcttaaagttcattatgtaaaactaattataaacaggacccaatttatattcatagatc

SEQ ID NO: 624812 - DNA, 120 bp, Artificial Sequence
  ENSG00000178567_26 (sequence is synthesized)
ctctcaagtattatacaatttaaaaactcttgttccaaagtcctgtcttaactattgaaacaccttaatctgtggttactaatccagcaaattcaaggaaccaggctatgactaagaatt

SEQ ID NO: 624813 - DNA, 120 bp, Artificial Sequence
  ENSG00000178567_27 (sequence is synthesized)
taggtggaattgatgtctgggcaattaaaataaatggcataagagcttaaaaaccaaagttgtgccagtggctttcaactagaggcagtaacctgtcattccagaggatgctgagaaatg

SEQ ID NO: 624814 - DNA, 120 bp, Artificial Sequence
  ENSG00000178567_28 (sequence is synthesized)
tgtaggggcacttttttggttgtcatatttactaggggcttctgttggcatttaagcctaaagacactcacccctgcagtgcatgggacagcctggcacaatgaagaattagccctccca

SEQ ID NO: 624815 - DNA, 120 bp, Artificial Sequence
  ENSG00000178567_29 (sequence is synthesized)
aaatgtagattattttatttcaagggatagggcagattaccattagaagcaaaattaaaagtacaagctgggcaaactgacagaatactagataggagagactaattccaaccttctaaa

SEQ ID NO: 624816 - DNA, 120 bp, Artificial Sequence
  ENSG00000178567_30 (sequence is synthesized)
tttggctagtaaagtgcaataaaggcattgataagttctgttagctcaccatagcacttgtaaatcaggaattaataattgaatcagatttaagggctctgtcctgttatacatatttaa

SEQ ID NO: 624817 - DNA, 120 bp, Artificial Sequence
  ENSG00000178567_31 (sequence is synthesized)
ggcagaaaaaaagttacatgtcgattaggtacttatcaagaatggtcaagctgagattttggttaatagagtaagcttacatatctagagaaacaacatagtggaaaaccgaaaaaaaaa

SEQ ID NO: 624818 - DNA, 120 bp, Artificial Sequence
  ENSG00000178567_32 (sequence is synthesized)
aacagaaaaatctaccggtaatttcccaatagctttgaatattcacagcagagctttattacttgagagaaagactggaagacctgaaagccacttctgctttctaaccccagttcctta

SEQ ID NO: 624819 - DNA, 120 bp, Artificial Sequence
  ENSG00000178567_33 (sequence is synthesized)
ggtgttaataaaattagtttgcatcatgtagtcattgagtgagggggagatataagccaaggattttaaattgacccttagctatagagaatttgctataagctagtcttgtttgtaaaa

SEQ ID NO: 624820 - DNA, 120 bp, Artificial Sequence
  ENSG00000178567_34 (sequence is synthesized)
aaaaaaaaaaagaaaaagaaaaaagtgtattttactgttttctgtattaagtaattctgtaactgcatggcagtctttttttttttaaataaatatagttgttactggtcctgttgtagc

SEQ ID NO: 624821 - DNA, 120 bp, Artificial Sequence
  ENSG00000178567_35 (sequence is synthesized)
tagcagtgaatatagttaaaatacgtacattaaaaaaaaaattattaggtccttaccagttactgtcctatagctcattcctactagttttcttgacagatttgtattcccagtgtcccg

SEQ ID NO: 624822 - DNA, 120 bp, Artificial Sequence
  ENSG00000178567_36 (sequence is synthesized)
tattgccactcaaattgctctactatgctaagtccttgttaatagtcttaccctccttgaaacacttgaacacttgatgactttagctttgaggagataccatctccaggtgtgctttct

SEQ ID NO: 624823 - DNA, 120 bp, Artificial Sequence
  ENSG00000178567_37 (sequence is synthesized)
tagtctttgcaggcacctcttcccttcaatatctgttcttcgtatttttaaaaaaatttgttttagactgccttgttctgtgtcagctcgctagctgatctcatttccttccatggtttc

SEQ ID NO: 624824 - DNA, 120 bp, Artificial Sequence
  ENSG00000178567_38 (sequence is synthesized)
cttaccatttatatgcaaatgactgtcagattcatatctcctttctagatcttccctaattgatgtatctaattgctaacaaatgctctttgctgtctcaggcactacatgtcattgatc

SEQ ID NO: 624825 - DNA, 120 bp, Artificial Sequence
  ENSG00000178567_39 (sequence is synthesized)
ttgcccccaatcctgctcctcctctcatgtttcctctttgactaaatggcattaccactaccaaccattcatttgtcctttttaccaattctccaatgctgccattttaattcaggccat

SEQ ID NO: 624826 - DNA, 120 bp, Artificial Sequence
  ENSG00000178567_40 (sequence is synthesized)
caacctacctaaattatagcaacagcctccttattagtctccctgttttttatttttattcctttctacactacaaccaaattgctccaaaagacttactgatcatgtcactgcattgct

SEQ ID NO: 624827 - DNA, 120 bp, Artificial Sequence
  ENSG00000178567_41 (sequence is synthesized)
ttcaccattgctcttagggtacaatacaaatttatcttcatctttaaggtctcagtatgccacttcatctaggaaaccttcattgatgccctctagattaggtgcccttactatccattc

SEQ ID NO: 624828 - DNA, 120 bp, Artificial Sequence
  ENSG00000178567_42 (sequence is synthesized)
cctatacaccctgttctttcccagacatacacttggcacactttattgttactgcttattgatcactgctagactgtaagctttgtaagggcagggaccatataagccttgttcactgtt

SEQ ID NO: 624829 - DNA, 120 bp, Artificial Sequence
  ENSG00000178567_43 (sequence is synthesized)
atatctctagtgcttagcacaatgcctggcatttcaataaatgtttggacaaacgaatatttgtgtagtgttttacaatttttgaagctctttcacagtcttatttgaccttcacagtca

SEQ ID NO: 624830 - DNA, 120 bp, Artificial Sequence
  ENSG00000178567_44 (sequence is synthesized)
ttctgccttagactgtccattgggtaacttttatccacatattactaattgaaaaatgaagacaagttctttgtaactagggacctcgttgtattctcagaatttagtgtagtgcttagc

SEQ ID NO: 624831 - DNA, 120 bp, Artificial Sequence
  ENSG00000178567_45 (sequence is synthesized)
atgtgacttaaatatgtattatgtgactgttaaacaaattgtggttttctctgttgtatgaaaggagagaaggataacaaattgcggttttccctggtaaacacagtaagtagtaaactc

SEQ ID NO: 624832 - DNA, 120 bp, Artificial Sequence
  ENSG00000178567_46 (sequence is synthesized)
aggattcaaaaccaaatatacacaccaaatccactatgtaatattaagtttgcatatccatgtatagaatcttatttttttttaccctttgtaaacagtgtcatatatatatatatattt

SEQ ID NO: 624833 - DNA, 120 bp, Artificial Sequence
  ENSG00000178567_47 (sequence is synthesized)
tttttttttttttaaatttccaaaggaacctacatatagagggaaaagattagacaactacttagtgaactaaaacaatatgtttttactaaatgttacatttagtattggaaaaagata

SEQ ID NO: 624834 - DNA, 120 bp, Artificial Sequence
  ENSG00000178567_48 (sequence is synthesized)
atgccgcctaagagttaataatcatttttccttttgtaggcatcaacactaggagaaaatggcatgctatttacttgctactttcctttacagatgatttttggctcttctgggatttaa

SEQ ID NO: 624835 - DNA, 120 bp, Artificial Sequence
  ENSG00000178567_49 (sequence is synthesized)
aagtaagtaaatttaacaaagtagaagactgactcagcccttctggtcactatatattcagttcacttgtttttacacctgcagaatgtccttatcacccaaagggagatgacccaaaag

SEQ ID NO: 624836 - DNA, 120 bp, Artificial Sequence
  ENSG00000178567_50 (sequence is synthesized)
tgacatctagttaatgtatacttctaaagtttgctgtattcctttgccttcttgttcccatgcctctctgaacttaatttctgggtaactgaggcttttcaggcttaggtgggaaagcca

SEQ ID NO: 624837 - DNA, 120 bp, Artificial Sequence
  ENSG00000178567_51 (sequence is synthesized)
cacccttagtctgtttccttaagccattttgaccaatttatgggattaactagtataatcttagttggagttttagtctgaggcatattaagtcattcagagatcttaacagtaggtgtc

SEQ ID NO: 624838 - DNA, 90 bp, Artificial Sequence
  ENSG00000178567_52 (sequence is synthesized)
aggcatattaagtcattcagagatcttaacagtaggtgtcatagtcatccagtgatttggtgcttgctgcaaaactggggtctcactttg

SEQ ID NO: 624839 - DNA, 120 bp, Artificial Sequence
  ENSG00000178567_53 (sequence is synthesized)
gcaatctctgccttcctggctcaagcaattctcccactgcagcctcctaagtagctgggaatacaggtatacacgagtacacccagctaatttttgtatttttatgtggagacagggtct

SEQ ID NO: 624840 - DNA, 120 bp, Artificial Sequence
  ENSG00000178567_54 (sequence is synthesized)
tgctgtattccccaggctagtctcgaattcctggactcaagcagtccgcccgcctcgggctcccaaaatgttggtgttatacgtgtgagcctctgcacccggcggcaaaactggctttta

SEQ ID NO: 624841 - DNA, 120 bp, Artificial Sequence
  ENSG00000178567_55 (sequence is synthesized)
atcaaccttttggctaaaggatttctctttttatttatttgtaaaaggatttcccatttttatctttctttttgatattaaaatgttgcctcatcctacccagtaagtacttgaatttga

SEQ ID NO: 624842 - DNA, 120 bp, Artificial Sequence
  ENSG00000178567_56 (sequence is synthesized)
attctcttccttttcatttttgcctgcaaactgaccagtcttttctgagttcatctcttctgtacgttttgtcaagtgcagtgaacagcaactacaaaatattttgtttttctgtctttt

SEQ ID NO: 624843 - DNA, 120 bp, Artificial Sequence
  ENSG00000178567_57 (sequence is synthesized)
tctttagtaaagggtagatgatctgcctttcaggttatctcaaggggcagtttcacctttccataatataaattacccttgtgtaagttatttcttccatcttctgatagcaatttcctg

SEQ ID NO: 624844 - DNA, 120 bp, Artificial Sequence
  ENSG00000178567_58 (sequence is synthesized)
aatgcctgccagctaaccattaagccagtgttcagtattttagcattttaaaaaacaagggaccaatttctgtgtcagcatgggctagcttgccattgaataacaaaggcaaaatctcac

SEQ ID NO: 624845 - DNA, 120 bp, Artificial Sequence
  ENSG00000178567_59 (sequence is synthesized)
tgtctcacacaacttttctattgcaacttgcctagggactttggtttagatcataggttggccatgatcaaactatggtccatgggcaaaatctgtctagctccttatttatctaaataa

SEQ ID NO: 624846 - DNA, 120 bp, Artificial Sequence
  ENSG00000178567_60 (sequence is synthesized)
agttttactggaatatagccttgtccatttatttattatctgtggctactttggttctacaatggcacagctgagtagttgctacagagtgtgtacatctcacaaaacctaaaatactta

SEQ ID NO: 624847 - DNA, 120 bp, Artificial Sequence
  ENSG00000178567_61 (sequence is synthesized)
ttctgtggccctttacagagaaagttcaccaatttgtgctctaagttgccttcattctgggtctcaggctgacaaagcagataccatcaggagtgtgggtgctaactttgggaaatgaaa

SEQ ID NO: 624848 - DNA, 120 bp, Artificial Sequence
  ENSG00000178567_62 (sequence is synthesized)
aaagagtatggcaaatcacttaaggactcttaaaggactttcattggccaaagcaaatcacatagccacattaaagttctaggaggagtgtgatccttgcatatacctgggagaaaaacc

SEQ ID NO: 624849 - DNA, 120 bp, Artificial Sequence
  ENSG00000178567_63 (sequence is synthesized)
agaaatatttggaagacaacaccactgattaacatcttcatttatatgctttcttccaatatattttcaacttgttactgaggtaaaatttaaaagtgtaccgatattaagtgtacacct

SEQ ID NO: 624850 - DNA, 120 bp, Artificial Sequence
  ENSG00000178567_64 (sequence is synthesized)
cagtgggtttttatatatgcccttgaatgcaccacccaggtcaaaatatagaatatttctagcacttcagtaggtgtccttatgttccccaggcccccaccaaccccttttatcaccacg

SEQ ID NO: 624851 - DNA, 120 bp, Artificial Sequence
  ENSG00000178567_65 (sequence is synthesized)
gattagttttgcctgttttaaaactttatgtaagtgaaataattatatgcactcttccgtgtcttgttcaacattgtatctgtgagagtaatccatgttatatgtagtagcagttcatgt

SEQ ID NO: 624852 - DNA, 120 bp, Artificial Sequence
  ENSG00000178567_66 (sequence is synthesized)
tttacttctgtgtagtattccattgtgtgactacatcacaacttacccattctaccgttgatagaaatttaggttgtttccagcttgtggtcattatgaataaagttactatgaaaatga

SEQ ID NO: 624853 - DNA, 120 bp, Artificial Sequence
  ENSG00000178567_67 (sequence is synthesized)
cgtagctacccgcgaacgcgacgtcaggcgccactacgaggctgagcacgaatactacgagcgacacaagtttggccctatcaaaaacgatgaggaaaaaagattgcactccaggattag

SEQ ID NO: 624854 - DNA, 120 bp, Artificial Sequence
  ENSG00000178568_0 (sequence is synthesized)
acagtccggcccagagcgccaagcgcacacaccgagcacactcccacacgcgcacacacgcgctcacactcgccccctcctcgggccccggccctggacccgcgggcgcggactcggtcg

SEQ ID NO: 624855 - DNA, 120 bp, Artificial Sequence
  ENSG00000178568_1 (sequence is synthesized)
cccgccctgggagtcgccacaccgcgcgcgccgcgcccgcccccctcgcacccccacgcgcgcccggctgggggatctcctccgcgtgcccgaaagggggatatgccatttggacatgta

SEQ ID NO: 624856 - DNA, 120 bp, Artificial Sequence
  ENSG00000178568_2 (sequence is synthesized)
attgtcagcacgggatctgagacttccaaaaaatgaagccggcgacaggactttgggtctgggtgagccttctcgtggcggcggggaccgtccagcccagcgattctcagtcagtgtgtg

SEQ ID NO: 624857 - DNA, 120 bp, Artificial Sequence
  ENSG00000178568_3 (sequence is synthesized)
caggaacggagaataaactgagctctctctctgacctggaacagcagtaccgagccttgcgcaagtactatgaaaactgtgaggttgtcatgggcaacctggagataaccagcattgagc

SEQ ID NO: 624858 - DNA, 120 bp, Artificial Sequence
  ENSG00000178568_4 (sequence is synthesized)
acaaccgggacctctccttcctgcggtctgttcgagaagtcacaggctacgtgttagtggctcttaatcagtttcgttacctgcctctggagaatttacgcattattcgtgggacaaaac

SEQ ID NO: 624859 - DNA, 120 bp, Artificial Sequence
  ENSG00000178568_5 (sequence is synthesized)
tttatgaggatcgatatgccttggcaatatttttaaactacagaaaagatggaaactttggacttcaagaacttggattaaagaacttgacagaaatcctaaatggtggagtctatgtag

SEQ ID NO: 624860 - DNA, 120 bp, Artificial Sequence
  ENSG00000178568_6 (sequence is synthesized)
accagaacaaattcctttgttatgcagacaccattcattggcaagatattgttcggaacccatggccttccaacttgactcttgtgtcaacaaatggtagttcaggatgtggacgttgcc

SEQ ID NO: 624861 - DNA, 120 bp, Artificial Sequence
  ENSG00000178568_7 (sequence is synthesized)
ataagtcctgtactggccgttgctggggacccacagaaaatcattgccagactttgacaaggacggtgtgtgcagaacaatgtgacggcagatgctacggaccttacgtcagtgactgct

SEQ ID NO: 624862 - DNA, 120 bp, Artificial Sequence
  ENSG00000178568_8 (sequence is synthesized)
gccatcgagaatgtgctggaggctgctcaggacctaaggacacagactgctttgcctgcatgaatttcaatgacagtggagcatgtgttactcagtgtccccaaacctttgtctacaatc

SEQ ID NO: 624863 - DNA, 120 bp, Artificial Sequence
  ENSG00000178568_9 (sequence is synthesized)
caaccacctttcaactggagcacaatttcaatgcaaagtacacatatggagcattctgtgtcaagaaatgtccacataactttgtggtagattccagttcttgtgtgcgtgcctgcccta

SEQ ID NO: 624864 - DNA, 120 bp, Artificial Sequence
  ENSG00000178568_10 (sequence is synthesized)
gttccaagatggaagtagaagaaaatgggattaaaatgtgtaaaccttgcactgacatttgcccaaaagcttgtgatggcattggcacaggatcattgatgtcagctcagactgtggatt

SEQ ID NO: 624865 - DNA, 120 bp, Artificial Sequence
  ENSG00000178568_11 (sequence is synthesized)
ccagtaacattgacaaattcataaactgtaccaagatcaatgggaatttgatctttctagtcactggtattcatggggacccttacaatgcaattgaagccatagacccagagaaactga

SEQ ID NO: 624866 - DNA, 120 bp, Artificial Sequence
  ENSG00000178568_12 (sequence is synthesized)
acgtctttcggacagtcagagagataacaggtttcctgaacatacagtcatggccaccaaacatgactgacttcagtgttttttctaacctggtgaccattggtggaagagtactctata

SEQ ID NO: 624867 - DNA, 120 bp, Artificial Sequence
  ENSG00000178568_13 (sequence is synthesized)
gtggcctgtccttgcttatcctcaagcaacagggcatcacctctctacagttccagtccctgaaggaaatcagcgcaggaaacatctatattactgacaacagcaacctgtgttattatc

SEQ ID NO: 624868 - DNA, 120 bp, Artificial Sequence
  ENSG00000178568_14 (sequence is synthesized)
ataccattaactggacaacactcttcagcacaatcaaccagagaatagtaatccgggacaacagaaaagctgaaaattgtactgctgaaggaatggtgtgcaaccatctgtgttccagtg

SEQ ID NO: 624869 - DNA, 120 bp, Artificial Sequence
  ENSG00000178568_15 (sequence is synthesized)
atggctgttggggacctgggccagaccaatgtctgtcgtgtcgccgcttcagtagaggaaggatctgcatagagtcttgtaacctctatgatggtgaatttcgggagtttgagaatggct

SEQ ID NO: 624870 - DNA, 120 bp, Artificial Sequence
  ENSG00000178568_16 (sequence is synthesized)
ccatctgtgtggagtgtgacccccagtgtgagaagatggaagatggcctcctcacatgccatggaccgggtcctgacaactgtacaaagtgctctcattttaaagatggcccaaactgtg

SEQ ID NO: 624871 - DNA, 120 bp, Artificial Sequence
  ENSG00000178568_17 (sequence is synthesized)
tggaaaaatgtccagatggcttacagggggcaaacagtttcattttcaagtatgctgatccagatcgggagtgccacccatgccatccaaactgcacccaagggtgtaacggtcccacta

SEQ ID NO: 624872 - DNA, 120 bp, Artificial Sequence
  ENSG00000178568_18 (sequence is synthesized)
gtcatgactgcatttactacccatggacgggccattccactttaccacaacatgctagaactcccctgattgcagctggagtaattggtgggctcttcattctggtcattgtgggtctga

SEQ ID NO: 624873 - DNA, 120 bp, Artificial Sequence
  ENSG00000178568_19 (sequence is synthesized)
catttgctgtttatgttagaaggaagagcatcaaaaagaaaagagccttgagaagattcttggaaacagagttggtggaaccattaactcccagtggcacagcacccaatcaagctcaac

SEQ ID NO: 624874 - DNA, 120 bp, Artificial Sequence
  ENSG00000178568_20 (sequence is synthesized)
ttcgtattttgaaagaaactgagctgaagagggtaaaagtccttggctcaggtgcttttggaacggtttataaaggtatttgggtacctgaaggagaaactgtgaagattcctgtggcta

SEQ ID NO: 624875 - DNA, 120 bp, Artificial Sequence
  ENSG00000178568_21 (sequence is synthesized)
ttaagattcttaatgagacaactggtcccaaggcaaatgtggagttcatggatgaagctctgatcatggcaagtatggatcatccacacctagtccggttgctgggtgtgtgtctgagcc

SEQ ID NO: 624876 - DNA, 120 bp, Artificial Sequence
  ENSG00000178568_22 (sequence is synthesized)
caaccatccagctggttactcaacttatgccccatggctgcctgttggagtatgtccacgagcacaaggataacattggatcacaactgctgcttaactggtgtgtccagatagctaagg

SEQ ID NO: 624877 - DNA, 120 bp, Artificial Sequence
  ENSG00000178568_23 (sequence is synthesized)
gaatgatgtacctggaagaaagacgactcgttcatcgggatttggcagcccgtaatgtcttagtgaaatctccaaaccatgtgaaaatcacagattttgggctagccagactcttggaag

SEQ ID NO: 624878 - DNA, 120 bp, Artificial Sequence
  ENSG00000178568_24 (sequence is synthesized)
gagatgaaaaagagtacaatgctgatggaggaaagatgccaattaaatggatggctctggagtgtatacattacaggaaattcacccatcagagtgacgtttggagctatggagttacta

SEQ ID NO: 624879 - DNA, 120 bp, Artificial Sequence
  ENSG00000178568_25 (sequence is synthesized)
tatgggaactgatgacctttggaggaaaaccctatgatggaattccaacgcgagaaatccctgatttattagagaaaggagaacgtttgcctcagcctcccatctgcactattgacgttt

SEQ ID NO: 624880 - DNA, 120 bp, Artificial Sequence
  ENSG00000178568_26 (sequence is synthesized)
acatggtcatggtcaaatgttggatgattgatgctgacagtagacctaaatttaaggaactggctgctgagttttcaaggatggctcgagaccctcaaagatacctagttattcagggtg

SEQ ID NO: 624881 - DNA, 120 bp, Artificial Sequence
  ENSG00000178568_27 (sequence is synthesized)
atgatcgtatgaagcttcccagtccaaatgacagcaagttctttcagaatctcttggatgaagaggatttggaagatatgatggatgctgaggagtacttggtccctcaggctttcaaca

SEQ ID NO: 624882 - DNA, 120 bp, Artificial Sequence
  ENSG00000178568_28 (sequence is synthesized)
tcccacctcccatctatacttccagagcaagaattgactcgaataggagtgaaattggacacagccctcctcctgcctacacccccatgtcaggaaaccagtttgtataccgagatggag

SEQ ID NO: 624883 - DNA, 120 bp, Artificial Sequence
  ENSG00000178568_29 (sequence is synthesized)
gttttgctgctgaacaaggagtgtctgtgccctacagagccccaactagcacaattccagaagctcctgtggcacagggtgctactgctgagatttttgatgactcctgctgtaatggca

SEQ ID NO: 624884 - DNA, 120 bp, Artificial Sequence
  ENSG00000178568_30 (sequence is synthesized)
ccctacgcaagccagtggcaccccatgtccaagaggacagtagcacccagaggtacagtgctgaccccaccgtgtttgccccagaacggagcccacgaggagagctggatgaggaaggtt

SEQ ID NO: 624885 - DNA, 120 bp, Artificial Sequence
  ENSG00000178568_31 (sequence is synthesized)
acatgactcctatgcgagacaaacccaaacaagaatacctgaatccagtggaggagaacccttttgtttctcggagaaaaaatggagaccttcaagcattggataatcccgaatatcaca

SEQ ID NO: 624886 - DNA, 120 bp, Artificial Sequence
  ENSG00000178568_32 (sequence is synthesized)
atgcatccaatggtccacccaaggccgaggatgagtatgtgaatgagccactgtacctcaacacctttgccaacaccttgggaaaagctgagtacctgaagaacaacatactgtcaatgc

SEQ ID NO: 624887 - DNA, 120 bp, Artificial Sequence
  ENSG00000178568_33 (sequence is synthesized)
cagagaaggccaagaaagcgtttgacaaccctgactactggaaccacagcctgccacctcggagcacccttcagcacccagactacctgcaggagtacagcacaaaatatttttataaac

SEQ ID NO: 624888 - DNA, 120 bp, Artificial Sequence
  ENSG00000178568_34 (sequence is synthesized)
agaatgggcggatccggcctattgtggcagagaatcctgaatacctctctgagttctccctgaagccaggcactgtgctgccgcctccaccttacagacaccggaatactgtggtgtaag

SEQ ID NO: 624889 - DNA, 120 bp, Artificial Sequence
  ENSG00000178568_35 (sequence is synthesized)
ctcagttgtggttttttaggtggagagacacacctgctccaatttccccacccccctctctttctctggtggtcttccttctaccccaaggccagtagttttgacacttcccagtggaag

SEQ ID NO: 624890 - DNA, 120 bp, Artificial Sequence
  ENSG00000178568_36 (sequence is synthesized)
atacagagatgcaatgatagttatgtgcttacctaacttgaacattagagggaaagactgaaagagaaagataggaggaaccacaatgtttcttcatttctctgcatgggttggtcagga

SEQ ID NO: 624891 - DNA, 120 bp, Artificial Sequence
  ENSG00000178568_37 (sequence is synthesized)
tttctctgcatgggttggtcaggagaatgaaacagctagagaaggaccagaaaatgtaaggcaatgctgcctactatcaaactagctgtcactttttttctttttctttttctttctttg

SEQ ID NO: 624892 - DNA, 120 bp, Artificial Sequence
  ENSG00000178568_38 (sequence is synthesized)
tttttttttttaaagcagatggttgaaacacccatgctatctgttcctatctgcaggaactgatgtgtgcatatttagcatccctggaaatcataataaagtttccattagaacaaaaga

SEQ ID NO: 624893 - DNA, 120 bp, Artificial Sequence
  ENSG00000178568_39 (sequence is synthesized)
ataacattttctataacatatgatggtgtctgaaattgagaatccagtttctttccccagcagtttctgtcctagcaagtaagaatggccaactcaactttcataatttaaaaatctcca

SEQ ID NO: 624894 - DNA, 120 bp, Artificial Sequence
  ENSG00000178568_40 (sequence is synthesized)
ttaaagttataactagtaattatgttttcaacactttttggtttttttcattttgttttgctctgaccgattcctttatatttgctcccctatttttggctttaatttctaattgcaaag

SEQ ID NO: 624895 - DNA, 120 bp, Artificial Sequence
  ENSG00000178568_41 (sequence is synthesized)
atgtttacatcaaagcttcttcacagaatttaagcaagaaatattttaatatagtgaaatggccactactttaagtatacaatctttaaaataagaaagggaggctaatatttttcatgc

SEQ ID NO: 624896 - DNA, 120 bp, Artificial Sequence
  ENSG00000178568_42 (sequence is synthesized)
tatcaaattatcttcaccctcatcctttacatttttcaacatttttttttctccataaatgacactacttgataggccgttggttgtctgaagagtagaagggaaactaagagacagttc

SEQ ID NO: 624897 - DNA, 120 bp, Artificial Sequence
  ENSG00000178568_43 (sequence is synthesized)
tctgtggttcaggaaaactactgatactttcaggggtggcccaatgagggaatccattgaactggaagaaacacactggattgggtatgtctacctggcagatactcagaaatgtagttt

SEQ ID NO: 624898 - DNA, 120 bp, Artificial Sequence
  ENSG00000178568_44 (sequence is synthesized)
gcacttaagctgtaattttatttgttctttttctgaactccattttggattttgaatcaagcaatatggaagcaaccagcaaattaactaatttaagtacatttttaaaaaaagagctaa

SEQ ID NO: 624899 - DNA, 120 bp, Artificial Sequence
  ENSG00000178568_45 (sequence is synthesized)
gataaagactgtggaaatgccaaaccaagcaaattaggaaccttgcaacggtatccagggactatgatgagaggccagcacattatcttcatatgtcacctttgctacgcaaggaaattt

SEQ ID NO: 624900 - DNA, 120 bp, Artificial Sequence
  ENSG00000178568_46 (sequence is synthesized)
gttcagttcgtatacttcgtaagaaggaatgcgagtaaggattggcttgaattccatggaatttctagtatgagactatttatatgaagtagaaggtaactctttgcacataaattggta

SEQ ID NO: 624901 - DNA, 120 bp, Artificial Sequence
  ENSG00000178568_47 (sequence is synthesized)
taataaaaagaaaaacacaaacattcaaagcttagggataggtccttgggtcaaaagttgtaaataaatgtgaaacatcttctcatgcaattattttattatccaacacactaatctttt

SEQ ID NO: 624902 - DNA, 120 bp, Artificial Sequence
  ENSG00000178568_48 (sequence is synthesized)
gatactttatataattccctttcttcatatactgcatccagtactagaaccatcattattatgtatcattttgaaagaatacctgatgagatgaaggatgagaacaaatgacagagatga

SEQ ID NO: 624903 - DNA, 120 bp, Artificial Sequence
  ENSG00000178568_49 (sequence is synthesized)
gtctccaagtaaagggggcctcacatcaataattaggaaacttagatataagtcgcccttttctgaaaattctaccccaagtcatttagatttttaaaaaatatttctaatgttaaaata

SEQ ID NO: 624904 - DNA, 120 bp, Artificial Sequence
  ENSG00000178568_50 (sequence is synthesized)
ttgtgtttcttcctattctgaacaagtaaatccatccatccatccatccaaacctcctttatctaactgtgtctactaaaagcaccatgttttgtggggaacactcagataaatggaata

SEQ ID NO: 624905 - DNA, 120 bp, Artificial Sequence
  ENSG00000178568_51 (sequence is synthesized)
tcatcctcaacttcaaaattctatgatctaggagatttaattaaaatgacattttaatttttctatgcgttccaacaatcagattgcatagtctcttttgtgaatagctgtcatataatc

SEQ ID NO: 624906 - DNA, 120 bp, Artificial Sequence
  ENSG00000178568_52 (sequence is synthesized)
agttgtactgtaagatatctcctttaaactcatttgggatataagttaaacatccttcaaattgttgatgttgacaaacaggataatttcaataatattattcaaacataaactggtcta

SEQ ID NO: 624907 - DNA, 120 bp, Artificial Sequence
  ENSG00000178568_53 (sequence is synthesized)
ggagaatattgcatcactgactaattagcctatctagagtctaacttcaccattaaaccaaaagcagatggtggtccttggccaagaatattggagacattggagttggtttttttctaa

SEQ ID NO: 624908 - DNA, 120 bp, Artificial Sequence
  ENSG00000178568_54 (sequence is synthesized)
gctataagaagtgaggcgagctgaaaaagtatggtagagcaggagaagggtttgtgagattccttctagtgaagttcaccctcaaacttttcaggggtaaagacacagagtgattcaggg

SEQ ID NO: 624909 - DNA, 120 bp, Artificial Sequence
  ENSG00000178568_55 (sequence is synthesized)
gccacaatctaatagctcagggctctcctatccattcagagaagtctctaggaaaagggatctcatatcagtacttatgaaaaattgaatataagcctccctttctaaataaatctgcat

SEQ ID NO: 624910 - DNA, 120 bp, Artificial Sequence
  ENSG00000178568_56 (sequence is synthesized)
cgagtcatcacagccctctttttggatactataccttgattttttttttctgatttacaatatgcatatggtttctactgggctatagaaagcagaatcactcattttggagaaggaaaa

SEQ ID NO: 624911 - DNA, 120 bp, Artificial Sequence
  ENSG00000178568_57 (sequence is synthesized)
aatgaatagttaaaacaaacttttaactgttaaggtaacagaaatgtatttagtgaatgtctctttcctcctaagaacacaagacttctacatgttgggtaatacctagagatgcatgta

SEQ ID NO: 624912 - DNA, 120 bp, Artificial Sequence
  ENSG00000178568_58 (sequence is synthesized)
ggaataatccaaaatgacccaaatgctttataatagcaccactttataattcttttgaatgatttctgtagtatataattgacttcagttgtttgagtgttttttgttttatttttgtcc

SEQ ID NO: 624913 - DNA, 120 bp, Artificial Sequence
  ENSG00000178568_59 (sequence is synthesized)
cccctgggaaaacatatttcagcatgtataagagggagaaaaaaagtttcattccttccagagaataacttatttagtccagtagggtagaattttaaaatgtcagttaaagtcttcaaa

SEQ ID NO: 624914 - DNA, 120 bp, Artificial Sequence
  ENSG00000178568_60 (sequence is synthesized)
gtgcttggggggatatcagattccagaggccaattgtagcaattgaaatttgcagaatcaattatgtaaatctgagacaaattagtattaaaattacacggagtatattttttaaatcac

SEQ ID NO: 624915 - DNA, 120 bp, Artificial Sequence
  ENSG00000178568_61 (sequence is synthesized)
ccaactttgtagattatacctattttgggcaggtatggaaaaattttgcagttaaatgattgcctaaagaaagtggtaaacaggtgaggaaagatggcctctgatctaggatagatccag

SEQ ID NO: 624916 - DNA, 120 bp, Artificial Sequence
  ENSG00000178568_62 (sequence is synthesized)
aaccacaaagcatctgcaccacaaaaggtgttagactaccaagcagctcctggttttctgcatagtattagtagcacagcttaggatgagaatcctttctccagtaacattcttaaaata

SEQ ID NO: 624917 - DNA, 120 bp, Artificial Sequence
  ENSG00000178568_63 (sequence is synthesized)
gcatgaaaaacaacgcaaaactcaaatttctattaaaacacacaaactaaaatcaagtgattcttttttgtagattagggagaaggactgaatatctaatttaagagaaggaatagtgtt

SEQ ID NO: 624918 - DNA, 120 bp, Artificial Sequence
  ENSG00000178568_64 (sequence is synthesized)
taagtgttatagtgtgtgagctaataccttctaaaggaaagacatggcatgaagattgtgcatacttacaatgctaaggaaaaatcaagaaaaggactgtgtgaggctctgctactagat

SEQ ID NO: 624919 - DNA, 120 bp, Artificial Sequence
  ENSG00000178568_65 (sequence is synthesized)
gaagttggaaggactattaatgtgcttcttgaagtatcaaaaatgaaaagaaaattaaaattgtttaagcctgacagggaaggatgtaaatacaagtttttctagagctctctaaccttt

SEQ ID NO: 624920 - DNA, 120 bp, Artificial Sequence
  ENSG00000178568_66 (sequence is synthesized)
atttcaaaactggaattattcatccatctgtaattgttgataatttaactagtatatgtagttcataaggtaatagaaaaggtgatcatgaaagcatgtatataactggacagaaccacg

SEQ ID NO: 624921 - DNA, 120 bp, Artificial Sequence
  ENSG00000178568_67 (sequence is synthesized)
ataatgctataagatgtagatttagttaggttatcagatgttaaatgattttaatattattaaataaatcaaactagaaaactaaccacaagtataatgtaacaaagttaaatgcaggat

SEQ ID NO: 624922 - DNA, 120 bp, Artificial Sequence
  ENSG00000178568_68 (sequence is synthesized)
ataaaaatgtaggatggattttgcatagtaaaaagataagtttgccatttaaaattgttgtttgttgggtttagctgaaagtaggcatatatggttccacttgggaaaacttgctttaaa

SEQ ID NO: 624923 - DNA, 120 bp, Artificial Sequence
  ENSG00000178568_69 (sequence is synthesized)
gcattacaatgaacaattttttctcattctcttattcctttatcactttttaaatgtaaagaaaattgtatttatttatttttttaaataaacaccaccttgcagaatttaataggcaaa

SEQ ID NO: 624924 - DNA, 120 bp, Artificial Sequence
  ENSG00000178568_70 (sequence is synthesized)
catgttacatatgactaagtaagggtcttcaagatgaagtaaagaaaatgtaaatgttctattaccttatgcagagacaaaaaaaaaaaggagtggtgtcatttagctagcaaacaaaca

SEQ ID NO: 624925 - DNA, 120 bp, Artificial Sequence
  ENSG00000178568_71 (sequence is synthesized)
aaatacagttaattggtgatatgtcctttcttttctcactatgccctcttgcctccaaaaatgacaacaaagaatcacaatttttctgataaataaatgctaaaccaagcgtttcaaact

SEQ ID NO: 624926 - DNA, 120 bp, Artificial Sequence
  ENSG00000178568_72 (sequence is synthesized)
attgcattgccattcttttggactttagttattagaatgatgattgttatagggcaaatgagaaatccatgtgcatcagcttctagttgttaaaaaaaccagataaattaacttctactg

SEQ ID NO: 624927 - DNA, 120 bp, Artificial Sequence
  ENSG00000178568_73 (sequence is synthesized)
tatactgtgggcagaggatcctagagctgatcctacaacatcagcttctagttgttaaaaaaaaaaaaagaaacagataaattaacttctactgtatatactgtgggcagaggatcttac

SEQ ID NO: 624928 - DNA, 120 bp, Artificial Sequence
  ENSG00000178568_74 (sequence is synthesized)
tgtgcctctgtttgtgtacatggacttcggtgtgtatcagtttgaaggacagccttgccccatgtaaacatataaatgcagattggtatcgcctggttgctatttgcttaagaacaaata

SEQ ID NO: 624929 - DNA, 120 bp, Artificial Sequence
  ENSG00000178568_75 (sequence is synthesized)
ttatacagatgagatcaggcataattttaaaagatcattatcagtggagacctcattattactgatattacaatggggccagtttttatacttctgggtagaattaataaaatttttctg

SEQ ID NO: 624930 - DNA, 120 bp, Artificial Sequence
  ENSG00000178568_76 (sequence is synthesized)
atcccagagatctgagttctctctgcagttggaaacaagaagctgttgtgggcattgtgtcgggccaggggcccttgtgtttgtgtgggcaaatatcttttagcagtgtgagctgctttt

SEQ ID NO: 624931 - DNA, 120 bp, Artificial Sequence
  ENSG00000178568_77 (sequence is synthesized)
ttcttttcattaaaagtctctctaaaataatagaaatttcagatactcggttcaagtctcactgattttgtagaggtccaaaaatgtaggatctgtcacttttgcaggcccctgcctcac

SEQ ID NO: 624932 - DNA, 120 bp, Artificial Sequence
  ENSG00000178568_78 (sequence is synthesized)
ctaattcctggccaggtgacattttgggcagaagtaaatgcttctatagtcacaagctaaaatgactctaagccccaatttcacggggggtattcacatgcttcctctggaaaatactct

SEQ ID NO: 624933 - DNA, 120 bp, Artificial Sequence
  ENSG00000178568_79 (sequence is synthesized)
ttgacagtcagctttgcaagtaagtgattaccttgttaggaatcaaagaaaaatgtatttctctctgacctttagaggaaaatagaatccttcccttttttgcccattgacacaactggc

SEQ ID NO: 624934 - DNA, 120 bp, Artificial Sequence
  ENSG00000178568_80 (sequence is synthesized)
actgctctcttccctttctaccaccctggttcaaagtagtcccccgatgctgtcctgttcctttcttaagccatagtggatctctgagatcctacaccccactttgtgaaacactgactt

SEQ ID NO: 624935 - DNA, 120 bp, Artificial Sequence
  ENSG00000178568_81 (sequence is synthesized)
catctttgccctcgaatgcctgattttttcataagagattctagcaatttggacactgtttaagtgaactatcaaactaccgcatagagaatatttaagctattaaaattatggtttccc

SEQ ID NO: 624936 - DNA, 120 bp, Artificial Sequence
  ENSG00000178568_82 (sequence is synthesized)
atgaagatcaattctctgtgtccttccctataggaatttgagacgagttagccctgtgatgaatcttgaaactcacatatgtccacatacacttggtagaacttcgatttaatctttaca

SEQ ID NO: 624937 - DNA, 120 bp, Artificial Sequence
  ENSG00000178568_83 (sequence is synthesized)
taaaagctgtacatataaccaagaagttatttttgccagtaaattaacttatttgctttattcatcttatttggttcctaatcgtaaatattttgtagctgctgtaaatttttttctccc

SEQ ID NO: 624938 - DNA, 120 bp, Artificial Sequence
  ENSG00000178568_84 (sequence is synthesized)
aaatgaggagtcttattatcataaaggtaaaggctattcagctttgataaccacctgcaattcttttttggatcattcatccatctaacaaatacataatgaggacagttcatgttaatg

SEQ ID NO: 624939 - DNA, 120 bp, Artificial Sequence
  ENSG00000178568_85 (sequence is synthesized)
aaaatccatgttgtttaatagaatgccatcctttacctacttttgctctttatggacgtttttcttttcatgctctagtgagctttccctatatcatgagaagtggttatatttgtgcaa

SEQ ID NO: 624940 - DNA, 120 bp, Artificial Sequence
  ENSG00000178568_86 (sequence is synthesized)
atatacaaatataggaaaacaaagattcatacctgtaggcaatagtctaacttgtccaaaccactttgcctttactgctatttttatccccaatgcgtagatatttcccccaggcctata

SEQ ID NO: 624941 - DNA, 120 bp, Artificial Sequence
  ENSG00000178568_87 (sequence is synthesized)
gcctttgtgaaggaaagcaaatcatacctcctgtatattgacacgaatctggttttcaaatgtcatttccagattttttagttaattgggggttgtccttttcccttaatgtgagagtca

SEQ ID NO: 624942 - DNA, 120 bp, Artificial Sequence
  ENSG00000178568_88 (sequence is synthesized)
ttttcctgtatatttctggatctctcaggggctgggaggggggagtgaggggactacaaccatagcactccaagaacccttttgggattactccagtaatcaactacgaaagttattttc

SEQ ID NO: 624943 - DNA, 120 bp, Artificial Sequence
  ENSG00000178568_89 (sequence is synthesized)
taaatgtagatatgtaaggtgttcttttaaagtaaggtactttgaaatatgtagcataaactggtactgctgttaaatgggtcgattattaaacggagcagctgtgtgagggcagctaac

SEQ ID NO: 624944 - DNA, 120 bp, Artificial Sequence
  ENSG00000178568_90 (sequence is synthesized)
tttgaatgcctgtctccctggctggtgtgtctccttctcatgttgagagcaccagggattgcgtggctgcatgctgaaaccgcattttcccatggtgtatgactagttcatctctttctt

SEQ ID NO: 624945 - DNA, 120 bp, Artificial Sequence
  ENSG00000178568_91 (sequence is synthesized)
gagcaccattacaagaagatcaaatgaaaatgagatcaatgtggaagacaattcatagcacaaaaaaagtcatcttaaatctactctcaaacattcatcttatacatgcatcaaagtaat

SEQ ID NO: 624946 - DNA, 120 bp, Artificial Sequence
  ENSG00000178568_92 (sequence is synthesized)
ttactgacatcagtttgggtgagagagggagtcactttactgaaaaggcagaggcttaaggtgtatacatttgtactcacttccttattttcttaacttgtaagcagaaaacaagccctc

SEQ ID NO: 624947 - DNA, 120 bp, Artificial Sequence
  ENSG00000178568_93 (sequence is synthesized)
tctcttgtgaagtatcttcaaaggattggggtgcaaaaataccttgctggtaagccatcaatgttttatttaaatccctgcattcaaagttagctgcctttttgaaataaacaaacaaaa

SEQ ID NO: 624948 - DNA, 120 bp, Artificial Sequence
  ENSG00000178568_94 (sequence is synthesized)
aatactactgtatgtttgaaaatgtgaatagtatttttatagcttgttaaagacatggctagttgcatttgtaaataagtataatgttgctttgattttcttttgtggacatctttattt

SEQ ID NO: 624949 - DNA, 120 bp, Artificial Sequence
  ENSG00000178568_95 (sequence is synthesized)
ggaacataattgtctttagggttgatttgtatataagtaattggcctgtgattgtttcttttttggttggaagttatcattttgacattacttgtgattctgtgttcagcactattgtga

SEQ ID NO: 624950 - DNA, 120 bp, Artificial Sequence
  ENSG00000178568_96 (sequence is synthesized)
tgtgttcaacctctgcactcgcttacacaataggatatgccaattgtgtgtggtgtaatgttattttgatttttttccatgttattgatgaaggatcatgcacctaacacatactaactt

SEQ ID NO: 624951 - DNA, 120 bp, Artificial Sequence
  ENSG00000178568_97 (sequence is synthesized)
ttttaatgttaggcatatttttagtatactttctcttattctttcttctcctccaaccttttacccatcctccttcctttccctcattcctgttgttatttgagaatgagggagaaacag

SEQ ID NO: 624952 - DNA, 120 bp, Artificial Sequence
  ENSG00000178568_98 (sequence is synthesized)
tattttacatttatgtaattaggcttttccgttagttctcaaggatcctcttttggctcttgggaaagaattgtacctgtacaaggcaattatagaatgcgaactgctttgcctcattcc

SEQ ID NO: 624953 - DNA, 120 bp, Artificial Sequence
  ENSG00000178568_99 (sequence is synthesized)
atactgatcatcccagctgaacaatttgaaaactgttctgcctttttgttacatgaatctgtcagaaatatatttttaatttaatataaatgaaattcaataaaatatgaaacaaacgtt

SEQ ID NO: 624954 - DNA, 120 bp, Artificial Sequence
  ENSG00000178568_100 (sequence is synthesized)
tgccacccatgccatccaaactgcacccaagggtgcataggctcaagtattgaagactgcatcggcctgatggataggtgtaacggtcccactagtcatgactgcatttactacccatgg

SEQ ID NO: 624955 - DNA, 120 bp, Artificial Sequence
  ENSG00000178568_101 (sequence is synthesized)
ctttcctagttatcatgaacaaaaagtactaaccagttgggttaaatttataatatattgtaactcataatatatcaaattggaaagttttgaaagaggcataaaacactttccttctca

SEQ ID NO: 624956 - DNA, 120 bp, Artificial Sequence
  ENSG00000178568_102 (sequence is synthesized)
atatggtcataacaaatgggattaagtttatctccttgctatatatttctgtggaatctatgccttcctactctctgtgattagcacatgtaatttgggaatataaaagtgaaaatgttc

SEQ ID NO: 624957 - DNA, 120 bp, Artificial Sequence
  ENSG00000178568_103 (sequence is synthesized)
atgatgcatacaggcagacctgtgtgctgatacctggaaggggtgctcttctgcctggcaggcactgtgactataggcaaaagataagagatagcgaaacgcacccaggaaaagaacaag

SEQ ID NO: 624958 - DNA, 120 bp, Artificial Sequence
  ENSG00000178568_104 (sequence is synthesized)
tggaaattacatttttaggttaatatttcctaacctggaacagttttcatattgaaaatatgttgtcttcccatttaaataaaataaagtatatttgctgcaatgaaagatacataacag

SEQ ID NO: 624959 - DNA, 120 bp, Artificial Sequence
  ENSG00000178568_105 (sequence is synthesized)
aattaatgactctataaaaaagaacctagagagatcccttgccccttctgctgtgtgaaaacatagcaagacactggcctcaaggagtgggtcctcacaagacactcaatttgctgacac

SEQ ID NO: 624960 - DNA, 120 bp, Artificial Sequence
  ENSG00000178573_0 (sequence is synthesized)
cttgctggatcagaggctttaaaatcttttttcatcttctagctgtagctcgggctgcttgtcggcttggcctccccctcccccctttgctctctgcctcgtctttccccaggacttcgc

SEQ ID NO: 624961 - DNA, 120 bp, Artificial Sequence
  ENSG00000178573_1 (sequence is synthesized)
tattttgcttttttaaaaaaaggcaagaaagaactaaactcccccctccctctcctccagtcgggctgcacctctgccttgcactttgcacagaggtagagagcgcgcgagggagagaga

SEQ ID NO: 624962 - DNA, 120 bp, Artificial Sequence
  ENSG00000178573_2 (sequence is synthesized)
ggaaagaaaaaaaataataaagagagccaagcagaagaggaggcgagaagcatgaagtgttaactcccccgtgccaaggcccgcgccgcccggacagacgcccgccgcgcctccagcccc

SEQ ID NO: 624963 - DNA, 120 bp, Artificial Sequence
  ENSG00000178573_3 (sequence is synthesized)
cgaggcgagcccttccttatgcaaagcgcgcagcggagcggcgagcgggggacgccgcgcaccgggccgggctcctccagcttcgccgccgcagccaccaccgccgccaccgcagctcgc

SEQ ID NO: 624964 - DNA, 120 bp, Artificial Sequence
  ENSG00000178573_4 (sequence is synthesized)
cttcgccgccgcagccaccaccgccgccaccgcagctcgcggaggatcttcccgagcctgaagccgccggctcggcgcgcaaggaggcgagcgagcaaggaggggccggggcgagcgagg

SEQ ID NO: 624965 - DNA, 120 bp, Artificial Sequence
  ENSG00000178573_5 (sequence is synthesized)
gagcacattggcgtgagcaggggggagggagggcgggcgcggggggcgcgggcagggcgggggggtgtgtgtgtgagcgcgctcggaggtttcgggccagccaccgccgcgcaagctaga

SEQ ID NO: 624966 - DNA, 120 bp, Artificial Sequence
  ENSG00000178573_6 (sequence is synthesized)
agcccggcaagctggctcacccgctggccacccagcacagcccgctggcccctctcctgcagcccatctggcggagcggcggcggcggcggcggcggcggcaggagaatggcatcagaac

SEQ ID NO: 624967 - DNA, 120 bp, Artificial Sequence
  ENSG00000178573_7 (sequence is synthesized)
atcagaactggcaatgagcaactccgacctgcccaccagtcccctggccatggaatatgttaatgacttcgatctgatgaagtttgaagtgaaaaaggaaccggtggagaccgaccgcat

SEQ ID NO: 624968 - DNA, 120 bp, Artificial Sequence
  ENSG00000178573_8 (sequence is synthesized)
catcagccagtgcggccgtctcatcgccgggggctcgctgtcctccacccccatgagcacgccgtgcagctcggtgcccccttcccccagcttctcggcgcccagcccgggctcgggcag

SEQ ID NO: 624969 - DNA, 120 bp, Artificial Sequence
  ENSG00000178573_9 (sequence is synthesized)
cgagcagaaggcgcacctggaagactactactggatgaccggctacccgcagcagctgaaccccgaggcgctgggcttcagccccgaggacgcggtcgaggcgctcatcagcaacagcca

SEQ ID NO: 624970 - DNA, 120 bp, Artificial Sequence
  ENSG00000178573_10 (sequence is synthesized)
gacgcggtcgaggcgctcatcagcaacagccaccagctccagggcggcttcgatggctacgcgcgcggggcgcagcagctggccgcggcggccggggccggtgccggcgcctccttgggc

SEQ ID NO: 624971 - DNA, 80 bp, Artificial Sequence
  ENSG00000178573_11 (sequence is synthesized)
ccgcgcagagcggcgcgggcccgcactaccaccaccaccaccaccacgccgccggccaccaccaccacccgacggccggc

SEQ ID NO: 624972 - DNA, 80 bp, Artificial Sequence
  ENSG00000178573_12 (sequence is synthesized)
gcggcgggggcggggggcgccctgcacccgcaccacgccgccggcggcctgcacttcgacgaccgcttctccgacgagca

SEQ ID NO: 624973 - DNA, 120 bp, Artificial Sequence
  ENSG00000178573_13 (sequence is synthesized)
ccggcggcctgcacttcgacgaccgcttctccgacgagcagctggtgaccatgtctgtgcgcgagctgaaccggcagctgcgcggggtcagcaaggaggaggtgatccggctgaagcaga

SEQ ID NO: 624974 - DNA, 120 bp, Artificial Sequence
  ENSG00000178573_14 (sequence is synthesized)
agaggcggaccctgaaaaaccgcggctatgcccagtcctgccgcttcaagagggtgcagcagagacacgtcctggagtcggagaagaaccagctgctgcagcaagtcgaccacctcaagc

SEQ ID NO: 624975 - DNA, 120 bp, Artificial Sequence
  ENSG00000178573_15 (sequence is synthesized)
aggagatctccaggctggtgcgcgagagggacgcgtacaaggagaaatacgagaagttggtgagcagcggcttccgagaaaacggctcgagcagcgacaacccgtcctctcccgagtttt

SEQ ID NO: 624976 - DNA, 120 bp, Artificial Sequence
  ENSG00000178573_16 (sequence is synthesized)
tcataactgagcccactcgcaagttggagccatcagtgggatacgccacattttggaagccccagcatcgtgtacttaccagtgtgttcacaaaatgaaatttgtgtgagagctgtacat

SEQ ID NO: 624977 - DNA, 120 bp, Artificial Sequence
  ENSG00000178573_17 (sequence is synthesized)
taaaaaaaatcatcattattattattatttgcagtcatggagaaccacctacccctgacttctgtttagtctcctttttaaataaaaattactgtgttagagaagaaggctattaaatgt

SEQ ID NO: 624978 - DNA, 120 bp, Artificial Sequence
  ENSG00000178573_18 (sequence is synthesized)
agtagttaactatgcctcttgtctgggggtttcatagagaccggtaggaaagcgcactcctgcttttcgatttatggtgtgtgcaagtaaacaggtgcattgctttcaacctgccatact

SEQ ID NO: 624979 - DNA, 120 bp, Artificial Sequence
  ENSG00000178573_19 (sequence is synthesized)
agttttaaaaattcactgaaattacaaagatacatatatatgcatatatataatggaaagtttcccggaatgcaacaattagcattttaaaatcatatataggcatgcacattctaaata

SEQ ID NO: 624980 - DNA, 120 bp, Artificial Sequence
  ENSG00000178573_20 (sequence is synthesized)
gtactttttcatgcttcattgtttctctggcagataattttactaagaagaaaaatagatattcgactccccttccctaaacaaatccacgggcagaggctccagcggagccgagccccc

SEQ ID NO: 624981 - DNA, 120 bp, Artificial Sequence
  ENSG00000178573_21 (sequence is synthesized)
tggttttctcgtaggccctagacggtgttgcatttatcagtgatgtcaaacgtgctcatttgtcagacatagctgtaaatgaaaacaatgtgtggcaaaatacaaagttagttaaataca

SEQ ID NO: 624982 - DNA, 120 bp, Artificial Sequence
  ENSG00000178573_22 (sequence is synthesized)
ctagttctagagccatgctcgccaccacctcaccacccccacccccaccgagtttggcccccttggccccctacacacacacaaacccgcacgcacacaccacacacacacacacacaca

SEQ ID NO: 624983 - DNA, 120 bp, Artificial Sequence
  ENSG00000178573_23 (sequence is synthesized)
tggtggctgttttaaactggggagggaatgggtgtctggctcatggattgccaatctgaaattctccataacttgctagcttgttttttttttttttttacacccccccgccccaccccc

SEQ ID NO: 624984 - DNA, 120 bp, Artificial Sequence
  ENSG00000178573_24 (sequence is synthesized)
ggacttgcacaatgttcaatgatctcagcagagttcttcatgtgaaacgttgatcacctttgaagcctgcatcattcacatattttttcttcttcttccccttcagttcatgaactggtg

SEQ ID NO: 624985 - DNA, 120 bp, Artificial Sequence
  ENSG00000178573_25 (sequence is synthesized)
ttcattttctgtgtgtgtgtgtgttttattttgtttggatttttttttttaattttacttttagagcttgctgtgttgcccaccttttttccaacctccaccctcactccttctcaaccc

SEQ ID NO: 624986 - DNA, 120 bp, Artificial Sequence
  ENSG00000178573_26 (sequence is synthesized)
atctcttccgagatgaaagaaaaaaaaaagcaaagtttttttttcttctcctgagttcttcatgtgagattgagcttgcaaaggaaaaaaaaatgtgaaatgttatagacttgcagcgtg

SEQ ID NO: 624987 - DNA, 120 bp, Artificial Sequence
  ENSG00000178573_27 (sequence is synthesized)
ccgagttccatcgggttttttttttagcattgttatgctaaaatagagaaaaaaatcctcatgaaccttccacaatcaagcctgcatcaaccttctgggtgtgacttgtgagttttggcc

SEQ ID NO: 624988 - DNA, 120 bp, Artificial Sequence
  ENSG00000178573_28 (sequence is synthesized)
ttgtgatgccaaatctgagagtttagtctgccattaaaaaaactcattctcatctcatgcattattatgcttgctactttgtcttagcaacaatgaactataactgtttcaaagacttta

SEQ ID NO: 624989 - DNA, 120 bp, Artificial Sequence
  ENSG00000178573_29 (sequence is synthesized)
tggaaaagagacattatattaataaaaaaaaaaagcctgcatgctggacatgtatggtataattattttttcctttttttttccttttggcttggaaatggacgttcgaagacttatagc

SEQ ID NO: 624990 - DNA, 120 bp, Artificial Sequence
  ENSG00000178573_30 (sequence is synthesized)
atggcattcatacttttgttttattgcctcatgacttttttgagtttagaacaaaacagtgcaaccgtagagccttcttcccatgaaattttgcatctgctccaaaactgctttgagtta

SEQ ID NO: 624991 - DNA, 120 bp, Artificial Sequence
  ENSG00000178573_31 (sequence is synthesized)
actgaaggcattccttgtcaaagataccagaatgggttacacatttaacctggcaaacattgaagaactcttaatgttttctttttaataagaatgacgccccactttggggactaaaat

SEQ ID NO: 624992 - DNA, 120 bp, Artificial Sequence
  ENSG00000178573_32 (sequence is synthesized)
tgtgctattgccgagaagcagtctaaaatttattttttaaaaagagaaactgccccattatttttggtttgttttatttttattttatattttttggcttttggtcattgtcaaatgtgg

SEQ ID NO: 624993 - DNA, 120 bp, Artificial Sequence
  ENSG00000178573_33 (sequence is synthesized)
aatgctctgggtttctagtatataatttaattctagtttttataatctgttagcccagttaaaatgtatgctacagataaaggaatgttatagataaatttgaaagagttaggtctgttt

SEQ ID NO: 624994 - DNA, 120 bp, Artificial Sequence
  ENSG00000178573_34 (sequence is synthesized)
agctgtagattttttaaacgattgatgcactaaattgtttactattgtgatgttaaggggggtagagtttgcaaggggactgtttaaaaaaagtagcttatacagcatgtgcttgcaact

SEQ ID NO: 624995 - DNA, 120 bp, Artificial Sequence
  ENSG00000178573_35 (sequence is synthesized)
taaatataagttgggtatgtgtagtctttgctataccactgactgtattgaaaaccaaagtattaagaggggaaacgcccctgtttatatctgtaggggtattttacattcaaaaatgta

SEQ ID NO: 624996 - DNA, 120 bp, Artificial Sequence
  ENSG00000178573_36 (sequence is synthesized)
tgtttttttttcttttcaaaattaaagtatttgggactgaattgcactaagatataacctgcaagcatataatacaaaaaaaaattgcaaaactgtttagaacgctaataaaatttatgc

SEQ ID NO: 624997 - DNA, 120 bp, Artificial Sequence
  ENSG00000178573_37 (sequence is synthesized)
agttataaaaatggcattactgcacagttttaagatgatgcagatttttttacagttgtattgtggtgcagaactggattttctgtaacttaaaaaaaaatccacagttttaaaggcaat

SEQ ID NO: 624998 - DNA, 120 bp, Artificial Sequence
  ENSG00000178573_38 (sequence is synthesized)
aatcagtaaatgttattttcagggactgacatcctgtctttaaaaagaaatgaaaagtaaatcttaccacaataaatataaaaaaatcttgtcagttacttttcttttacatattttgct

SEQ ID NO: 624999 - DNA, 120 bp, Artificial Sequence
  ENSG00000178573_39 (sequence is synthesized)
gtgcaaaattgttttatatcttgagttactaactaaccacgcgtgttgttcctatgtgcttttctttcattttcaattctggttatatcaagaaaagaataatctacaataataaacggc

SEQ ID NO: 625000 - DNA, 120 bp, Artificial Sequence
  ENSG00000178573_40 (sequence is synthesized)
atttttttttgattctgtactcagtttcttagtgtacagtttaactgggcccaacaacctcgttaaaagtgtaaaatgcatccttttctccagtggaaggattcctggaggaatagggag

SEQ ID NO: 625001 - DNA, 120 bp, Artificial Sequence
  ENSG00000178573_41 (sequence is synthesized)
acagtaattcagggtgaaattataggctgttttttgaagtgaggaggctggccccatatactgattagcaatatttaatatagatgtaaattatgacctcatttttttctccccaaagtt

SEQ ID NO: 625002 - DNA, 120 bp, Artificial Sequence
  ENSG00000178573_42 (sequence is synthesized)
ttcagttttcaaatgagttgagccataattgcccttggtaggaaaaacaaaacaaaacagtggaactaggcttcctgagcatggccctacacttctgatcaggagcaaagccatccatag

SEQ ID NO: 625003 - DNA, 120 bp, Artificial Sequence
  ENSG00000178573_43 (sequence is synthesized)
acagaggagccggacaaatatggcgcatcagaggtggcttgcgcacatatgcattgaacggtaaagagaaacagcgcttgccttttcactaaagttgactatttttccttcttctcttac

SEQ ID NO: 625004 - DNA, 120 bp, Artificial Sequence
  ENSG00000178573_44 (sequence is synthesized)
acaccgagattttcttgttagcaaggcctgacaagatttaacataaacatgacaaatcatagttgtttgttttgttttgcttttctctttaacactgaagatcatttgtcttaaatagga

SEQ ID NO: 625005 - DNA, 120 bp, Artificial Sequence
  ENSG00000178573_45 (sequence is synthesized)
aaaagaaaatccactccttacttccatatttccaagtacatatctggtttaaactatgttatcaaatcatatttcaccgtgaatattcagtggagaacttctctacctggatgagctagt

SEQ ID NO: 625006 - DNA, 120 bp, Artificial Sequence
  ENSG00000178573_46 (sequence is synthesized)
aatgatttcagatcatgctatccccagaaataaaagcaaaaaataatacctgtgtggaatataggctgtgctttgatttactggtatttaccccaaaataggctgtgtatgggggctgac

SEQ ID NO: 625007 - DNA, 120 bp, Artificial Sequence
  ENSG00000178573_47 (sequence is synthesized)
ttaaagatcccttggaaagactcaaaactaccttcactagtaggactcctaagcgctgacctatttttaaatgacacaaattcatgaaactaatgttacaaattcatgcagtttgcactc

SEQ ID NO: 625008 - DNA, 120 bp, Artificial Sequence
  ENSG00000178573_48 (sequence is synthesized)
ttagtcatcttcccctagcacaccaatagaatgttagacaaagccagcactgttttgaaaatacagccaaacacgatgacttttgttttgttttctgccgttcttaaaagaaaaaaagat

SEQ ID NO: 625009 - DNA, 120 bp, Artificial Sequence
  ENSG00000178573_49 (sequence is synthesized)
aatattgcaactctgactgaaagacttatttttaagaaaacaggttgtgtttggtgctgctaagttctggccagtttatcatctggccttcctgcctattttttacaaaacacgaagaca

SEQ ID NO: 625010 - DNA, 120 bp, Artificial Sequence
  ENSG00000178573_50 (sequence is synthesized)
gtgtgtaacctcgacattttgaccttcctttatgtgctagtttagacaggctcctgaatccacacttaattttgcttaacaaaagtcttaatagtaaacctcccctcatgagcttgaagt

SEQ ID NO: 625011 - DNA, 120 bp, Artificial Sequence
  ENSG00000178573_51 (sequence is synthesized)
caagtgttcttgacttcagatatttctttcctttttttttttttttcctcatcacaactaagagatacacaaactctgaagaagcagaaatggagagaatgcttttaacaaaaaagcatc

SEQ ID NO: 625012 - DNA, 120 bp, Artificial Sequence
  ENSG00000178573_52 (sequence is synthesized)
tgatgaaagattttaggcaaacattctcaaaataagagtgatattctggatgtagttattgcagttatctcatgacaaatgaggcctggattggaaggaaaatatagttgtgtagaatta

SEQ ID NO: 625013 - DNA, 120 bp, Artificial Sequence
  ENSG00000178573_53 (sequence is synthesized)
agcattttgataggaatctacaaggtagttgaatataataagcaggtttgggcccccaaactttagaaaatcaaatgcaaaggtgctggcaaaaatgaggtttgagtggctggctgtaag

SEQ ID NO: 625014 - DNA, 120 bp, Artificial Sequence
  ENSG00000178573_54 (sequence is synthesized)
agaaggttaactcctagtaaaaggcatttttagaaataacaattactgaaaactttgaagtatagtgggagtagcaaacaaatacatgttttttttttcttacaaagaactcctaaatcc

SEQ ID NO: 625015 - DNA, 120 bp, Artificial Sequence
  ENSG00000178573_55 (sequence is synthesized)
tgagtaagtgccattcattacaataagtctctaaatttaaaaaaaaaaaaatcatatgaggaaatctagctttcccctttacgctgcgtttgatctttgtctaaatagtgttaaaattcc

SEQ ID NO: 625016 - DNA, 120 bp, Artificial Sequence
  ENSG00000178585_0 (sequence is synthesized)
tgtgggtgcaggtttcctgggcttgccagacacacagggcggcaccttcctacttctgcccagccacagccctcccctcacagttgagcacctgtttgcctgaagttaatttccagaagc

SEQ ID NO: 625017 - DNA, 120 bp, Artificial Sequence
  ENSG00000178585_1 (sequence is synthesized)
gctgctcatgctgcggaagatgggatcaaacctgacagccagcgaggaggagttcctgcgcacctatgcaggggtggtcaacagccagctcagccagctgcctccgcactccatcgacca

SEQ ID NO: 625018 - DNA, 120 bp, Artificial Sequence
  ENSG00000178585_2 (sequence is synthesized)
gggtgcagaggacgtggtgatggcgttttccaggtcggagacggaagaccggaggcagtagctgcaaagcccttggaacaccctggatgctgttgagggccaagagatctgtgtggctcc

SEQ ID NO: 625019 - DNA, 120 bp, Artificial Sequence
  ENSG00000178585_3 (sequence is synthesized)
gtggctactctcctgagcttgtctgtggtggctttaaccttgaacaaaccctccagggtttgtgggtggattcctattgtatcaggtgctgtattttcccctcttctggagcaagtgcgt

SEQ ID NO: 625020 - DNA, 120 bp, Artificial Sequence
  ENSG00000178585_4 (sequence is synthesized)
cttttctgatcttccttcccttcagctccagctgccactgtccttgccttcagactggacaaggccttgtgacccatcaggagtttttgtcccgataccgtttcccacaggcggcacctt

SEQ ID NO: 625021 - DNA, 120 bp, Artificial Sequence
  ENSG00000178585_5 (sequence is synthesized)
tcagtggggctggcatcaagggagacaccagtggtgcgtttataattggcttaaagggatggacttgtgattggctgcaggaagaaacttttttattttttaaatcttgaccaacagaaa

SEQ ID NO: 625022 - DNA, 120 bp, Artificial Sequence
  ENSG00000178585_6 (sequence is synthesized)
ctccccaccgcggtgactctcggagcgggaggcggaggctgaggcggccgctcctgctgctgctactgccgccgccgcagcggctgctcgggctgagcacgccccggaacaggccgccgc

SEQ ID NO: 625023 - DNA, 120 bp, Artificial Sequence
  ENSG00000178585_7 (sequence is synthesized)
gcgctgcgcgccggacccgctgcccctgccggcccggccgggtcgggcggcccagggaccgacagacttgacaacggtgacagcactggggcggcaccttcctacttctgcccagccaca

SEQ ID NO: 625024 - DNA, 120 bp, Artificial Sequence
  ENSG00000178585_8 (sequence is synthesized)
ttttatttctgactcttattttttaaaaaatttgcgcctcggtatctggcttccctggaagctctccgagctctggtgctttagttaggtcatttttttagaaatgtgaagaggtctgat

SEQ ID NO: 625025 - DNA, 120 bp, Artificial Sequence
  ENSG00000178585_9 (sequence is synthesized)
tggctgcttaaactggaaaggatctgtgattggctggttaatgggaaacggtttttttctttggctgcaggtgttctgctgatatcaacagcttccctattttgaatgcagaaaacaggg

SEQ ID NO: 625026 - DNA, 120 bp, Artificial Sequence
  ENSG00000178585_10 (sequence is synthesized)
tctgggacattagtcgttatatttgacttgaaaagaaagaaaccaagtgcgctttgcaatatttattacacaaagaacttgctgctgccttcacatttggggtttgtgtttgattggctt

SEQ ID NO: 625027 - DNA, 120 bp, Artificial Sequence
  ENSG00000178585_11 (sequence is synthesized)
tcgatgcgtgtgtttggtttcccattggttcacctgtgactcctgttgccatggattcacccccctctgctgccggctctgggcctgagggtccacctggagagtacatttgctttaatg

SEQ ID NO: 625028 - DNA, 120 bp, Artificial Sequence
  ENSG00000178585_12 (sequence is synthesized)
agtgcacctgcctccaccagcaaggggaccccgagaaccctgagcagggtccacagctggaaagttgggcccctgaggagctttgtgtcgtcttgaacgagcagcccagggcctagaggt

SEQ ID NO: 625029 - DNA, 120 bp, Artificial Sequence
  ENSG00000178585_13 (sequence is synthesized)
taggcgggatttatgtgcactgcctgcatgagctggcaaccagccagcgtcccttggtgagaaagggattgctgaggcaccgtccaggccccaccggccaggccgcgcccagcagaggcg

SEQ ID NO: 625030 - DNA, 120 bp, Artificial Sequence
  ENSG00000178585_14 (sequence is synthesized)
tactacccagctctgtcctcttggccatccttctgtgtaccacttcctgaggcctcattttgggggtcatcttggaaaggggaggagcttctcccagtgtgagaccccaaagactctgga

SEQ ID NO: 625031 - DNA, 120 bp, Artificial Sequence
  ENSG00000178585_15 (sequence is synthesized)
ggtcatctggcggaggtctctgggagcccagaacccacataaaagccccagcttggctcacaaggcccaggagacctccagctaaacaccaacccctgacctaccccagccaggctccta

SEQ ID NO: 625032 - DNA, 120 bp, Artificial Sequence
  ENSG00000178585_16 (sequence is synthesized)
cctgtctgctgccagcacagtaggtcccggccagctctggagttctctcatcggaggcccatgccctccactccactgcctttggaagggtctctctccaggtcagcctggaagggacag

SEQ ID NO: 625033 - DNA, 120 bp, Artificial Sequence
  ENSG00000178585_17 (sequence is synthesized)
tatcgtttgtttatgaaatgccactgggacagctggctgggccttcaccaagcaagtcccttcagactggcccttaagccaaactcaggcccagaattgcagttcagaatggcagtcctg

SEQ ID NO: 625034 - DNA, 120 bp, Artificial Sequence
  ENSG00000178585_18 (sequence is synthesized)
gaggcagggggtgaggggcaggtctagtgttcctgcaccaaacctaagtccttccacctgccacccccttccctgggagggaggtggtcctcctatctccctggctcactggcaggtgtg

SEQ ID NO: 625035 - DNA, 120 bp, Artificial Sequence
  ENSG00000178585_19 (sequence is synthesized)
ggatctggggagagcggctggagaaagatgcagtcctcaggaagggggccgccaccctcccctatgctggtagatgctgaggcccctaggtgcccagggccagtgggaccctctcagaac

SEQ ID NO: 625036 - DNA, 120 bp, Artificial Sequence
  ENSG00000178585_20 (sequence is synthesized)
caaatctttcccctttctcggggcttggggctcgggccgtaggggctcctgagtgtcatgaagtgcacaggagccaaatgaccgagccctggagagccccatggtgggtaggtggttcgt

SEQ ID NO: 625037 - DNA, 120 bp, Artificial Sequence
  ENSG00000178585_21 (sequence is synthesized)
gctgtgctctggcaccatcagcctgttccagaaggaggattcgagcatcaggctaagaccctgtgtcctccaccatgcactcacccctagccctggttagctgacagtcagctgtgggga

SEQ ID NO: 625038 - DNA, 120 bp, Artificial Sequence
  ENSG00000178585_22 (sequence is synthesized)
acacagctacaaccctaccctggcagggacctgagagcatctcaggaggggcagcgcatgtgtgcatgtgctgtgtgagtgagcacacccgtgtgcacactcatacacatgtgcacacac

SEQ ID NO: 625039 - DNA, 120 bp, Artificial Sequence
  ENSG00000178585_23 (sequence is synthesized)
acgcactctccccgctcaggggcctggaggtctggctgagcccctggggaaaggtgagttctttcatctccctcctccaggtcggagtgcctggagtcaggtgtcgaggccacattgctg

SEQ ID NO: 625040 - DNA, 120 bp, Artificial Sequence
  ENSG00000178585_24 (sequence is synthesized)
gctgccccctctttgtagctcctataaagggcccacacctggtggatacctggttgagtgtgtggtctctgccccagcctgtccttgtcacgatcacaggccttgcttttgtaacaatga

SEQ ID NO: 625041 - DNA, 120 bp, Artificial Sequence
  ENSG00000178585_25 (sequence is synthesized)
tgaccccggcctgtctcatcttctgaagaggaaaagtcaaagtgttgctgtggctccatatttcaactaaaaatatatctgttggagaaagaaattaacaataaagaattttcataggtt

SEQ ID NO: 625042 - DNA, 120 bp, Artificial Sequence
  ENSG00000178586_0 (sequence is synthesized)
atgagtggggagaatgtcaccagggtcggcaccttcatcctggtgggcttccccacggccccagggctgcagtacctgctcttcctcctcttcctgctcacctacctctttgtcctggtg

SEQ ID NO: 625043 - DNA, 120 bp, Artificial Sequence
  ENSG00000178586_1 (sequence is synthesized)
gagaacctggccatcatcctcaccgtctggagcagcacctccctccacaggcccatgtactactttctgagctccatgtctttcctagagatctggtacgtgtctgacatcacccccaag

SEQ ID NO: 625044 - DNA, 120 bp, Artificial Sequence
  ENSG00000178586_2 (sequence is synthesized)
atgctggagggcttcctcctccagcagaaacgcatctctttcgtcgggtgcatgacgcagctctacttcttcagctccctggtgtgcaccgagtgtgtgcttctggcctccatggcctac

SEQ ID NO: 625045 - DNA, 120 bp, Artificial Sequence
  ENSG00000178586_3 (sequence is synthesized)
gaccgctacgtggccatctgccacccgctgcgctaccacgtccttgtgaccccggggctgtgcctccagctggtgggcttctcctttgtgagtggcttcaccatctccatgatcaaggtc

SEQ ID NO: 625046 - DNA, 120 bp, Artificial Sequence
  ENSG00000178586_4 (sequence is synthesized)
gtcttgaaccacttcttctgtgacatttcccccatcctcaagctggcctgcacggacttctccactgcagagctggtggatttcattctggccttcatcatcctggtgtttccactcctg

SEQ ID NO: 625047 - DNA, 120 bp, Artificial Sequence
  ENSG00000178586_5 (sequence is synthesized)
gccaccatgctgtcatatgcgcacatcaccctggctgtcctgcgcatcccctcggccaccggctgctggagagccttcttcacctgcgcctctcacctcaccgtggtcaccgtcttctat

SEQ ID NO: 625048 - DNA, 120 bp, Artificial Sequence
  ENSG00000178586_6 (sequence is synthesized)
acagccttgcttttcatgtatgtccggccccaggccattgattcccggagctccaacaagctcatctctgttttgtacacagttatcacccccatcttgaaccccttgatatactgcctg

SEQ ID NO: 625049 - DNA, 120 bp, Artificial Sequence
  ENSG00000178586_7 (sequence is synthesized)
aggaataaggaatttaagaatgccttgaaaaaagccttcggcttgacgagctgcgccgtagaggggaggctttctagtcttctggaacttcatctccaaatacacagccagcctctctga

SEQ ID NO: 625050 - DNA, 120 bp, Artificial Sequence
  ENSG00000178591_0 (sequence is synthesized)
attcctcaggacacagagcttcctctctcccaggagccatgaatatcctgatgctgaccttcattatctgtgggttgctaactcgggtgaccaaaggtagctttgaaccccaaaaatgtt

SEQ ID NO: 625051 - DNA, 120 bp, Artificial Sequence
  ENSG00000178591_1 (sequence is synthesized)
ggaagaataatgtaggacattgcagaagacgatgtttagatactgaaaggtacatacttctttgtaggaacaagctatcatgctgcatttctataatatcacatgaatatactcgacgac

SEQ ID NO: 625052 - DNA, 120 bp, Artificial Sequence
  ENSG00000178591_2 (sequence is synthesized)
cagcatttcctgtgattcacctagaggatataacattggattatagtgatgtggactcttttactggttccccagtatctatgttgaatgatctgataacatttgacacaactaaatttg

SEQ ID NO: 625053 - DNA, 120 bp, Artificial Sequence
  ENSG00000178591_3 (sequence is synthesized)
gagaaaccatgacacctgagaccaatactcctgagactactatgccaccatctgaggccactactcccgagactactatgccaccatctgagactgctacttccgagactatgccaccac

SEQ ID NO: 625054 - DNA, 120 bp, Artificial Sequence
  ENSG00000178591_4 (sequence is synthesized)
atttcaccaggaaaattccatcagggattggatgaccatggggatggacataattgctactaccaacacaacagccaagagagttgccttacaattagaaatgtgtagacagaaatgtat

SEQ ID NO: 625055 - DNA, 120 bp, Artificial Sequence
  ENSG00000178591_5 (sequence is synthesized)
agaagatacaaggattctcttaattggacttaaattctttatctgtcttcctccgatgtactcaaatatatgagctaatttttgtcttaagtgaacatttgtatatctatgtatttttcc

SEQ ID NO: 625056 - DNA, 120 bp, Artificial Sequence
  ENSG00000178591_6 (sequence is synthesized)
atgccaaaaacaaaaacgaagaccattgtttggagctgcctcttatgactaagacaagaatttttactttaacagtgcctggcccactactatcgtatataggagaacatataaaagcat

SEQ ID NO: 625057 - DNA, 120 bp, Artificial Sequence
  ENSG00000178591_7 (sequence is synthesized)
atagaaagttccagatgaatgttcccttctctaccctccaccttttattgtaagttctgaccctaaatacttttctgtgtcatgacgtcaaattttgtttaaggttctagctggtaacta

SEQ ID NO: 625058 - DNA, 120 bp, Artificial Sequence
  ENSG00000178591_8 (sequence is synthesized)
acagagtcagaagctaattctttcattcaacacaagcactgatctaactggatagagataaaagtgggacttgccttgagagtacatcatattaaattaaaagctgcatctcaaattcta

SEQ ID NO: 625059 - DNA, 120 bp, Artificial Sequence
  ENSG00000178591_9 (sequence is synthesized)
acaggaattcatatcggggtgatcactcagaagaaaaggtgaataccggatgttgtaagctattgaactgccacaagtgatatctttacacaccattctgctgtcattgggtagctttga

SEQ ID NO: 625060 - DNA, 120 bp, Artificial Sequence
  ENSG00000178597_0 (sequence is synthesized)
atagcagcagccactgctgggtactctggagccagagagtccctgggcagcatgctgtgtgccctgctcctcctgcccagcctcctgggggccaccagggccagccccacctcaggcccc

SEQ ID NO: 625061 - DNA, 120 bp, Artificial Sequence
  ENSG00000178597_1 (sequence is synthesized)
caggagtgtgcaaagggctccacggtgtggtgtcaggatctgcagacagctgccaggtgcggggctgtggggtactgccaaggggccgtatggaacaaacccaccgcgaagtctctgccc

SEQ ID NO: 625062 - DNA, 120 bp, Artificial Sequence
  ENSG00000178597_2 (sequence is synthesized)
tgcgacgtatgccaggacatagcagccgccgctggcaatgggctgaaccctgacgccacggagtctgacatcctggctttggtgatgaagacctgtgagtggctccccagccaggagtct

SEQ ID NO: 625063 - DNA, 120 bp, Artificial Sequence
  ENSG00000178597_3 (sequence is synthesized)
tcagccggatgcaagtggatggtggatgcccacagttcggccatcctgagcatgctccgtggggccccggacagtgccccggcacaggtgtgcacagcgctcagcctctgtgagccgctg

SEQ ID NO: 625064 - DNA, 120 bp, Artificial Sequence
  ENSG00000178597_4 (sequence is synthesized)
cagaggcacctggccaccctgaggccactctccaaagaggacacctttgaggctgtggctccgttcatggccaatgggccccttaccttccacccccgccaggcgcctgaaggagctctg

SEQ ID NO: 625065 - DNA, 120 bp, Artificial Sequence
  ENSG00000178597_5 (sequence is synthesized)
tgccaagactgtgtacggcaggtctcccgactccaggaggctgtccggtccaacttgaccttggccgacttgaacatccaggagcagtgtgagtccttggggcctggcctggccgtcctc

SEQ ID NO: 625066 - DNA, 120 bp, Artificial Sequence
  ENSG00000178597_6 (sequence is synthesized)
tgcaagaactacctcttccagttttttgtccctgctgaccaagcactgaggcttctccccccgcaggagctctgcaggaaggggggattctgtgaggagctaggggcacctgcccgtttg

SEQ ID NO: 625067 - DNA, 120 bp, Artificial Sequence
  ENSG00000178597_7 (sequence is synthesized)
actcaagtagtggccatggacggggtcccctccctggagctggggttgccaaggaaacagagcgagatgcagatgaaggccggtgtgacctgtgaggtgtgcatgaacgtggtgcagaag

SEQ ID NO: 625068 - DNA, 120 bp, Artificial Sequence
  ENSG00000178597_8 (sequence is synthesized)
ctggaccactggctcatgtccaacagctctgagctcatgatcacccatgccctggagcgcgtgtgctcggtaatgcctgcctctatcacgaaggagtgcatcatcttggtggacacctac

SEQ ID NO: 625069 - DNA, 120 bp, Artificial Sequence
  ENSG00000178597_9 (sequence is synthesized)
agcccctccttggtgcagcttgtggccaaaatcaccccagagaaggtgtgcaagttcatccgtctgtgtggcaaccggaggcgggcccgggcagtccatgatgcctatgccatcgtgccg

SEQ ID NO: 625070 - DNA, 120 bp, Artificial Sequence
  ENSG00000178597_10 (sequence is synthesized)
tccccagagtgggacgcggagaaccagggcagcttctgcaatgggtgcaagaggctgctcacggtgtcctcccacaacttggagagcaagagcaccaagcgagacatcctggtggccttc

SEQ ID NO: 625071 - DNA, 120 bp, Artificial Sequence
  ENSG00000178597_11 (sequence is synthesized)
aagggtggctgcagcatcctgccgctgccctatatgatccagtgcaagcacttcgtcacccagtacgagcccgtgctcattgagagtctcaaggacatgatggaccccgtggctgtgtgc

SEQ ID NO: 625072 - DNA, 120 bp, Artificial Sequence
  ENSG00000178597_12 (sequence is synthesized)
aagaaggtgggggcctgccacggccccaggaccccactgctgggcaccgaccagtgtgccctgggcccaagcttctggtgcaggagccaggaggccgccaagctgtgcaacgctgtgcaa

SEQ ID NO: 625073 - DNA, 120 bp, Artificial Sequence
  ENSG00000178597_13 (sequence is synthesized)
cactgccagaagcatgtatggaaagagatgcacctccacgctggggaacacgcgtgaccgtggctgccagagacccagagcctgctagcgaggcccatgaggtgggtgctttccccatcc

SEQ ID NO: 625074 - DNA, 120 bp, Artificial Sequence
  ENSG00000178597_14 (sequence is synthesized)
ccatttcacaaatgaaaaactgaagctctgaggagggaggctgggaaggagcagagctgaagttcaaaaccaagtattcctgatcccgaaagcctctctcttaacaacggtgccgcacag

SEQ ID NO: 625075 - DNA, 120 bp, Artificial Sequence
  ENSG00000178597_15 (sequence is synthesized)
ctttgcccttgaaagcatctctactggaccggaacacactcatgtgccccgctccctgacccagccaaggctgccctctcatctccaaggctgagatgttgccggtggtcccatgagagc

SEQ ID NO: 625076 - DNA, 120 bp, Artificial Sequence
  ENSG00000178597_16 (sequence is synthesized)
ctgcccatgggctcaggtgcccctttaccttctgctggatggacatctggctgtgagccaggctggggtcatggccggggtgagcggaggcaggggtggacggaggcttcgagggcccat

SEQ ID NO: 625077 - DNA, 120 bp, Artificial Sequence
  ENSG00000178597_17 (sequence is synthesized)
cactagtagggtcattacctcttgccaacagccgggggtgggagtctgggtctcgctcaggccagagcttctcaacctggagtccctgggggtggctgccaaaggtgtgtatgacaagca

SEQ ID NO: 625078 - DNA, 120 bp, Artificial Sequence
  ENSG00000178597_18 (sequence is synthesized)
cgtatccctggacatttccggggagaggtctggggctttggtcacattctccaagggctgctgggcttcggagcagtccccccccatgtctcagccactacagggtccctctctctcctt

SEQ ID NO: 625079 - DNA, 120 bp, Artificial Sequence
  ENSG00000178597_19 (sequence is synthesized)
caaaagctcccgggaaaagccggaggagtctggggtggccaccgggatgtggagcagcgagggcaaagacggtgaacacagccctccagctgtctgagcctcagttttctaatctgtaga

SEQ ID NO: 625080 - DNA, 120 bp, Artificial Sequence
  ENSG00000178597_20 (sequence is synthesized)
atggggatgatcatacctgcctcacaagaatgttgagacaattcacagagacgttctggagcccctttcccccgagaccggcattcatgagtctgctgggaccagaaaacccatctcagg

SEQ ID NO: 625081 - DNA, 120 bp, Artificial Sequence
  ENSG00000178597_21 (sequence is synthesized)
ggcccagcggggcacccaggagagtctggcggtgcaagcgctgtataaaccacaagcgttctccaaatgccgtgtgccgtgtttttattctcagggaaggcgcagatcccagagctgcta

SEQ ID NO: 625082 - DNA, 120 bp, Artificial Sequence
  ENSG00000178597_22 (sequence is synthesized)
caacagcctccaccttaccctggtgcctccacctcgccccggtgccccctctggcagaaagcctccggggggggtttccatctgggttcaagtgctcctgtggtttctgctcctgctgtt

SEQ ID NO: 625083 - DNA, 120 bp, Artificial Sequence
  ENSG00000178597_23 (sequence is synthesized)
tggcccccctaagacactgtgccccctccaggagagcccctgggcatgaccctgcagtgtccttgcagctggcccagcatctgcacgcagcaggtgctcacacatctgggagccgcacac

SEQ ID NO: 625084 - DNA, 120 bp, Artificial Sequence
  ENSG00000178597_24 (sequence is synthesized)
atgagtcccgggggtggaagctggtatttcacctgaggcccatggattaattctcctcttgagtaagaggtgcgccaggcctggatggacgggatgtgagcgggtgctgttttccaagag

SEQ ID NO: 625085 - DNA, 120 bp, Artificial Sequence
  ENSG00000178597_25 (sequence is synthesized)
gccacacccgagctcttaagtaaacgtcgcagacctgggccaccgccccaggaacacaggcacactgggcctgagattctggatgcctcagaagtggcccctattggctgggcaggcctg

SEQ ID NO: 625086 - DNA, 120 bp, Artificial Sequence
  ENSG00000178597_26 (sequence is synthesized)
ggcccgctgggcagtcccacaaaagataaggccagcaaggggtggtggtcgtgcctggccaccggatgggccatgggaaggcagctctgcaccagactccaaaacacaggggcccgaagt

SEQ ID NO: 625087 - DNA, 120 bp, Artificial Sequence
  ENSG00000178597_27 (sequence is synthesized)
tgttggcctcagtatctgcctcttcccctgagaccacccaccctctccaggagcagccccagaggctctctgtctgcctgccggtaggtgttcccacctgacacactctctgggacagga

SEQ ID NO: 625088 - DNA, 120 bp, Artificial Sequence
  ENSG00000178597_28 (sequence is synthesized)
tggagccataggccctcctctggcttggctgtgagtcgggaggatgcctaccgggaagtatgtgtgacatgacctgaaatcccccgacaggtcacctgggagaggccgggagagggcaag

SEQ ID NO: 625089 - DNA, 120 bp, Artificial Sequence
  ENSG00000178597_29 (sequence is synthesized)
cgccacacctgccaggtggcccagctcagcccacctgcccccaccccagagctacctgcagtgggtggtcagggtggggtgtccccacaccctcttccctacccaccccttgggcctggg

SEQ ID NO: 625090 - DNA, 120 bp, Artificial Sequence
  ENSG00000178597_30 (sequence is synthesized)
taccagctgctcccacagacccactgagcacatgcgtctccactagatggttgcccgtgatgaacggagctcactggccatgaccccacaggcccagctgcacacccaggtcatgagcac

SEQ ID NO: 625091 - DNA, 120 bp, Artificial Sequence
  ENSG00000178597_31 (sequence is synthesized)
ggccctgccccacccccataggggccctctgacccctccactcactcatccgccaccaaagctgtggaggcctgtggcagggtctcagtcacctccatcccctgtgcccggaaccaagcc

SEQ ID NO: 625092 - DNA, 120 bp, Artificial Sequence
  ENSG00000178597_32 (sequence is synthesized)
cggaacacaggaggtgctctgcaagtgctcgtggggagtggctgccttggggtctaaaggcagagaggcaggaggagcaagggacgggcccactggtgctgacggcagcaccaccattca

SEQ ID NO: 625093 - DNA, 120 bp, Artificial Sequence
  ENSG00000178597_33 (sequence is synthesized)
gcactgagactgaggcttaaggagtccatccaaatgactccatagccgccgcgttcaggctggaaaaggcttttcagcggagggtgctgtaactgtccagctgtgggagaggagatacca

SEQ ID NO: 625094 - DNA, 120 bp, Artificial Sequence
  ENSG00000178597_34 (sequence is synthesized)
gcccaggagaagagcagctggccctactgggcctagaagtttgggagacccatcccagcaaggatgggaaatcaagacagatgttgagcatggatttcccagaggtggtgactgcgccgc

SEQ ID NO: 625095 - DNA, 120 bp, Artificial Sequence
  ENSG00000178597_35 (sequence is synthesized)
acagaggagcatctctgcctgggaggagggagagggctcccgccgggctgccagagccgagcaagtacctgcaccttcagccagacacatgctgggcattcttcagatgccatcgtaagg

SEQ ID NO: 625096 - DNA, 120 bp, Artificial Sequence
  ENSG00000178597_36 (sequence is synthesized)
cggaggcctgggacgtcccagaacacctatggatgctgcccctcgggctttctcggccacaccagatgcagaggggctgtgggagcctggaaaagggcttggtggtccagctgctttgtt

SEQ ID NO: 625097 - DNA, 86 bp, Artificial Sequence
  ENSG00000178597_37 (sequence is synthesized)
gttgttgttgcttggggcttttcttagaagtgatgtgttgttagaaacttcaaaccagatacaaatatacccaacgatgttctctc

SEQ ID NO: 625098 - DNA, 120 bp, Artificial Sequence
  ENSG00000178602_0 (sequence is synthesized)
agcccatccaggcagcacggctggctgagcagagacaagggctgcccacactgggactggtagaggaagccggccctgacggatgggtggtctcgcccttcctgggttcatcctgctgca

SEQ ID NO: 625099 - DNA, 120 bp, Artificial Sequence
  ENSG00000178602_1 (sequence is synthesized)
ggtgggcctgagtcgcagatcaggaagcaccgggaagatgcaggcctgcatggtgccggggctggccctctgcctcctactggggcctcttgcaggggccaagcctgtgcaggaggaagg

SEQ ID NO: 625100 - DNA, 120 bp, Artificial Sequence
  ENSG00000178602_2 (sequence is synthesized)
gcctacccccagatcgaggacatggcccgaaccttctttgcccacttccccctggggagcacgctgggcttccacgttccctatcaggaggactgaatggtgtccagcctggtgcccgcc

SEQ ID NO: 625101 - DNA, 120 bp, Artificial Sequence
  ENSG00000178602_3 (sequence is synthesized)
caccccgccaggctgcactcggtcgggcctccacaggcatggagtccccgcaaaaacctggcccctgcaggagtcaggcctggtctcacgctcaataaactccggactgaagatgcacaa

SEQ ID NO: 625102 - DNA, 80 bp, Artificial Sequence
  ENSG00000178605_0 (sequence is synthesized)
ccccgccccaacgttcagcctccagacgcgccatgtgggccctgcgggccgccgtacgcccggggctgcggctctcccgc

SEQ ID NO: 625103 - DNA, 120 bp, Artificial Sequence
  ENSG00000178605_1 (sequence is synthesized)
gctagccgctgtcggccgcaggagccccgggaatctggaggggccgtggggcggagggcggggcctgcgggcggacggcggccgaagccgcacgggagacgacgaggaggagccggaaga

SEQ ID NO: 625104 - DNA, 120 bp, Artificial Sequence
  ENSG00000178605_2 (sequence is synthesized)
aggaggagccggaagatgcggacgagaacgccgaggaggagctgctgcggggagagcctctgctgccggcggggacccagcgcgtgtgtctggttcaccctgacgtcaagtggggcccgg

SEQ ID NO: 625105 - DNA, 120 bp, Artificial Sequence
  ENSG00000178605_3 (sequence is synthesized)
ggaagtcgcagatgactcgagccgagtggcaggtggcggaggccacagcgctggtgcacacgctggacggctggtccgtggtgcagacaatggtcgtgtccaccaaaacgccggacagga

SEQ ID NO: 625106 - DNA, 120 bp, Artificial Sequence
  ENSG00000178605_4 (sequence is synthesized)
agctcatctttggcaaagggaactttgagcacctgacagaaaagatccgagggtctccagacatcacgtgcgtcttcctgaacgtggagaggatggctgccccgaccaagaaagaactgg

SEQ ID NO: 625107 - DNA, 120 bp, Artificial Sequence
  ENSG00000178605_5 (sequence is synthesized)
aagccgcctggggcgtggaggtgtttgaccgcttcacggtcgtcctgcacatcttccgctgtaacgcccgcacgaaggaggcccggcttcaggtggccctggcggagatgccgctgcaca

SEQ ID NO: 625108 - DNA, 120 bp, Artificial Sequence
  ENSG00000178605_6 (sequence is synthesized)
ggtcgaacttgaaaagggacgtcgcccacctgtaccgaggagtcggctcgcgctacatcatggggtcaggagaatccttcatgcagctgcagcagcgtctcctgagagagaaggaggcca

SEQ ID NO: 625109 - DNA, 120 bp, Artificial Sequence
  ENSG00000178605_7 (sequence is synthesized)
ggaaagaccacgctgatcaaggcactgacgggcgatgccgccatccagccacgggaccagctgtttgccacgctggacgtcacggcccacgcgggcacgctgccctcacgcatgaccgtc

SEQ ID NO: 625110 - DNA, 120 bp, Artificial Sequence
  ENSG00000178605_8 (sequence is synthesized)
ctgtacgtggacaccatcggcttcctctcccagctgccgcacggcctcatcgagtccttctccgccaccctggaagacgtggcccactcggatctcatcttgcacgtgagggacgtcagc

SEQ ID NO: 625111 - DNA, 120 bp, Artificial Sequence
  ENSG00000178605_9 (sequence is synthesized)
caccccgaggcggagctccagaaatgcagcgttctgtccacgctgcgtggcctgcagctgcccgccccgctcctggactccatggtggaggttcacaacaaggtggacctcgtgcccggg

SEQ ID NO: 625112 - DNA, 120 bp, Artificial Sequence
  ENSG00000178605_10 (sequence is synthesized)
tacagccccacggaaccgaacgtcgtgcccgtgtctgccctgcggggccacgggctccaggagctgaaagctgagctcgatgcggcggttttgaaggcgacggggagacagatcctcact

SEQ ID NO: 625113 - DNA, 120 bp, Artificial Sequence
  ENSG00000178605_11 (sequence is synthesized)
ctccgtgtgaggctcgcaggggcgcagctcagctggctgtataaggaggccacagttcaggaggtggacgtgatccctgaggacggggcggccgacgtgagggtcatcatcagcaactca

SEQ ID NO: 625114 - DNA, 120 bp, Artificial Sequence
  ENSG00000178605_12 (sequence is synthesized)
gcctacggcaaattccggaagctctttccaggatgaacggacgcccacagaggcctgcggggtgggggcatcgctgcctggggagctgaggcgttaccgctgtgttgggggcagcttggt

SEQ ID NO: 625115 - DNA, 120 bp, Artificial Sequence
  ENSG00000178605_13 (sequence is synthesized)
gtcaggtgcagcagggtcctccttgtctggttctgcacccgtctcgctcccagccatttgctgggatgaccgtgcaggccggtgacacggccgcacctgccccaaagcgggccgcccgag

SEQ ID NO: 625116 - DNA, 120 bp, Artificial Sequence
  ENSG00000178605_14 (sequence is synthesized)
cgtccactccaagcctgagcatccacacaattccagtgggccctcggtgcctgctgtgaactgctttccctcggaatgtttccgtaacaggacattaaacctttgattttacttccgtga

SEQ ID NO: 625117 - DNA, 120 bp, Artificial Sequence
  ENSG00000178605_15 (sequence is synthesized)
tccatctacaccatcctcctgtctagaccatccccactgccctatctataccaccaccctgtctacacaatccacccatctacaccatcacctctcctctgtctataccatcctcctgtc

SEQ ID NO: 625118 - DNA, 120 bp, Artificial Sequence
  ENSG00000178605_16 (sequence is synthesized)
tacaccagcaccactaccccatctataccaccaccccgtctacataatccacccgtgtacaccacaatgttccctttgtctgcaccgtcctcctgtctacactggcaccactgccccagc

SEQ ID NO: 625119 - DNA, 120 bp, Artificial Sequence
  ENSG00000178605_17 (sequence is synthesized)
tataccaccaccccgtctacataatccacccgtgtacaccacaatgtccccttcgtctgcaccgtcctcctgtctacactggcaccactgccccatctataccaccacccgtctatacaa

SEQ ID NO: 625120 - DNA, 120 bp, Artificial Sequence
  ENSG00000178605_18 (sequence is synthesized)
tccacccatctgtctacaccatcgcctctcctctgtctacaccatccttctgtcaacaccggcaccactgccgtatctatatccacccatctacaccatcacctcccctgtgtctacacc

SEQ ID NO: 625121 - DNA, 120 bp, Artificial Sequence
  ENSG00000178605_19 (sequence is synthesized)
atcctcccatccacaccagcaccaccaccccacctacaccatcccaccatctacgccattgccaaatctacacagacgacctcactcccatccacgccttcacacgcacacccgtccaca

SEQ ID NO: 625122 - DNA, 120 bp, Artificial Sequence
  ENSG00000178605_20 (sequence is synthesized)
ccaccatctcccccgtgtccgcacggcggccccgctccatcggcccgagaacagcgacggtggctttgtcccacgcgtcgggtctggcccggggtgcccgaggagctcagggaccgtgta

SEQ ID NO: 625123 - DNA, 120 bp, Artificial Sequence
  ENSG00000178605_21 (sequence is synthesized)
cccatggtggtgtcggggaaatgacgaaaaatcaggtttcccggcagcacagagaacccttccacaaaagtagaagggaaagcaaatagttttactaaagaagcagcttcaaaccagacc

SEQ ID NO: 625124 - DNA, 120 bp, Artificial Sequence
  ENSG00000178607_0 (sequence is synthesized)
gctgcctagtcagttctgcgtccgctgaggctcggtcaccgcctcgctgtcgtcgcggcgcccccgccccgtcctctgtccgtaccgcccccggagccagggccgagtcctcgccatgcc

SEQ ID NO: 625125 - DNA, 120 bp, Artificial Sequence
  ENSG00000178607_1 (sequence is synthesized)
ggcccggcggctgctgctgctgctgacgctgctgctgcccggcctcgggatttttggaagtaccagcacagtgacgcttcctgaaaccttgttgtttgtgtcaacgctggatggaagttt

SEQ ID NO: 625126 - DNA, 120 bp, Artificial Sequence
  ENSG00000178607_2 (sequence is synthesized)
gcatgctgtcagcaagaggacaggctcaatcaaatggactttaaaagaagatccagtcctgcaggtcccaacacatgtggaagagcctgcctttctcccagatcctaatgatggcagcct

SEQ ID NO: 625127 - DNA, 120 bp, Artificial Sequence
  ENSG00000178607_3 (sequence is synthesized)
gtatacgcttggaagcaagaataatgaaggcctgacgaaacttccttttaccatcccagaattggtgcaggcatccccatgccgaagttcagatggaatcctctacatgggtaaaaagca

SEQ ID NO: 625128 - DNA, 120 bp, Artificial Sequence
  ENSG00000178607_4 (sequence is synthesized)
ggacatctggtatgttattgacctcctgaccggagagaagcagcagactttgtcatcggcctttgcagatagtctctgcccatcaacctctcttctgtatcttgggcgaacagaatacac

SEQ ID NO: 625129 - DNA, 120 bp, Artificial Sequence
  ENSG00000178607_5 (sequence is synthesized)
catcaccatgtacgacaccaaaacccgagagctccggtggaatgccacctactttgactatgcggcctcactgcctgaggacgacgtggactacaagatgtcccactttgtgtccaatgg

SEQ ID NO: 625130 - DNA, 120 bp, Artificial Sequence
  ENSG00000178607_6 (sequence is synthesized)
tgatgggctggtggtgactgtggacagtgaatctggggacgtcctgtggatccaaaactacgcctcccctgtggtggccttttatgtctggcagcgggagggtctgaggaaggtgatgca

SEQ ID NO: 625131 - DNA, 120 bp, Artificial Sequence
  ENSG00000178607_7 (sequence is synthesized)
catcaatgtcgctgtggagaccctgcgctatctgaccttcatgtctggggaggtggggcgcatcacaaagtggaagtacccgttccccaaggagacagaggccaagagcaagctgacgcc

SEQ ID NO: 625132 - DNA, 120 bp, Artificial Sequence
  ENSG00000178607_8 (sequence is synthesized)
cactctgtatgttgggaaatactctaccagcctctatgcctctccctcaatggtacacgagggggttgctgtcgtgccccgcggcagcacacttcctttgctggaagggccccagactga

SEQ ID NO: 625133 - DNA, 120 bp, Artificial Sequence
  ENSG00000178607_9 (sequence is synthesized)
tggcgtcaccattggggacaagggggagtgtgtgatcacgcccagcacggacgtcaagtttgatcccggactcaaaagcaagaacaagctcaactacttgaggaattactggcttctgat

SEQ ID NO: 625134 - DNA, 120 bp, Artificial Sequence
  ENSG00000178607_10 (sequence is synthesized)
aggacaccatgaaaccccactgtctgcgtctaccaagatgctggagagatttcccaacaatctacccaaacatcgggaaaatgtgattcctgctgattcagagaaaaagagctttgagga

SEQ ID NO: 625135 - DNA, 120 bp, Artificial Sequence
  ENSG00000178607_11 (sequence is synthesized)
agttatcaacctggttgaccagacttcagaaaacgcacctaccaccgtgtctcgggatgtggaggagaagcccgcccatgcccctgcccggcccgaggcccccgtggactccatgcttaa

SEQ ID NO: 625136 - DNA, 120 bp, Artificial Sequence
  ENSG00000178607_12 (sequence is synthesized)
ggacatggctaccatcatcctgagcaccttcctgctgattggctgggtggccttcatcatcacctatcccctgagcatgcatcagcagcagcagctccagcaccagcagttccagaagga

SEQ ID NO: 625137 - DNA, 120 bp, Artificial Sequence
  ENSG00000178607_13 (sequence is synthesized)
actggagaagatccagctcctgcagcagcagcagcagcagctgcccttccacccacctggagacacggctcaggacggcgagctcctggacacgtctggcccgtactcagagagctcggg

SEQ ID NO: 625138 - DNA, 120 bp, Artificial Sequence
  ENSG00000178607_14 (sequence is synthesized)
caccagcagccccagcacgtcccccagggcctccaaccactcgctctgctccggcagctctgcctccaaggctggcagcagcccctccctggaacaagacgatggagatgaggaaaccag

SEQ ID NO: 625139 - DNA, 120 bp, Artificial Sequence
  ENSG00000178607_15 (sequence is synthesized)
cgtggtgatagttgggaaaatttccttctgtcccaaggatgtcctgggccatggagctgagggcacaattgtgtaccggggcatgtttgacaaccgcgacgtggccgtgaagaggatcct

SEQ ID NO: 625140 - DNA, 120 bp, Artificial Sequence
  ENSG00000178607_16 (sequence is synthesized)
ccccgagtgttttagcttcgcagaccgtgaggtccagctgttgcgagaatcggatgagcacccgaacgtgatccgctacttctgcacggagaaggaccggcaattccagtacattgccat

SEQ ID NO: 625141 - DNA, 120 bp, Artificial Sequence
  ENSG00000178607_17 (sequence is synthesized)
cgagctgtgtgcagccaccctgcaagagtatgtggagcagaaggactttgcgcatctcggcctggagcccatcaccttgctgcagcagaccacctcgggcctggcccacctccactccct

SEQ ID NO: 625142 - DNA, 120 bp, Artificial Sequence
  ENSG00000178607_18 (sequence is synthesized)
caacatcgttcacagagacctaaagccacacaacatcctcatatccatgcccaatgcacacggcaagatcaaggccatgatctccgactttggcctctgcaagaagctggcagtgggcag

SEQ ID NO: 625143 - DNA, 120 bp, Artificial Sequence
  ENSG00000178607_19 (sequence is synthesized)
acacagtttcagccgccgatctggggtgcctggcacagaaggctggatcgctccagagatgctgagcgaagactgtaaggagaaccctacctacacggtggacatcttttctgcaggctg

SEQ ID NO: 625144 - DNA, 120 bp, Artificial Sequence
  ENSG00000178607_20 (sequence is synthesized)
cgtcttttactacgtaatctctgagggcagccacccttttggcaagtccctgcagcggcaggccaacatcctcctgggtgcctgcagccttgactgcttgcacccagagaagcacgaaga

SEQ ID NO: 625145 - DNA, 120 bp, Artificial Sequence
  ENSG00000178607_21 (sequence is synthesized)
cgtcattgcacgtgaattgatagagaagatgattgcgatggatcctcagaaacgcccctcagcgaagcatgtgctcaaacacccgttcttctggagcctagagaagcagctccagttctt

SEQ ID NO: 625146 - DNA, 120 bp, Artificial Sequence
  ENSG00000178607_22 (sequence is synthesized)
ccaggacgtgagcgacagaatagaaaaggaatccctggatggcccgatcgtgaagcagttagagagaggcgggagagccgtggtgaagatggactggcgggagaacatcactgtccccct

SEQ ID NO: 625147 - DNA, 120 bp, Artificial Sequence
  ENSG00000178607_23 (sequence is synthesized)
ccagacagacctgcgtaaattcaggacctataaaggtggttctgtcagagatctcctccgagccatgagaaataagaagcaccactaccgggagctgcctgcagaggtgcgggagacgct

SEQ ID NO: 625148 - DNA, 120 bp, Artificial Sequence
  ENSG00000178607_24 (sequence is synthesized)
ggggtccctccccgacgacttcgtgtgctacttcacatctcgcttcccccacctcctcgcacacacctaccgggccatggagctgtgcagccacgagagactcttccagccctactactt

SEQ ID NO: 625149 - DNA, 120 bp, Artificial Sequence
  ENSG00000178607_25 (sequence is synthesized)
ccacgagcccccagagccccagcccccagtgactccagacgccctctgagcgagggcggcccctctgttctggtggccccagctgtgactgagggcctggtcaccacaattagagcttga

SEQ ID NO: 625150 - DNA, 120 bp, Artificial Sequence
  ENSG00000178607_26 (sequence is synthesized)
tgcctcccggctttgcagggagaccaggcttcccaaaccaagtgccttgagctgcctgctctgcagcccacagaggacagtgctgaccccaggaagtgggagaagtggcccctcgtgacc

SEQ ID NO: 625151 - DNA, 120 bp, Artificial Sequence
  ENSG00000178607_27 (sequence is synthesized)
tacagggaactgggaagatgctggccccaaaagccttacggtcatgatgtctgcaaaggagggcctcagagacagcgcgagtagcacccccagccatctactggataaacttgcttcaga

SEQ ID NO: 625152 - DNA, 120 bp, Artificial Sequence
  ENSG00000178607_28 (sequence is synthesized)
ctttttaaattcctgcttaatgtcagtctacaggcctttcaggaagggagaggagggaatcgtacattttgcttgcgtgctgggacagctaggctgagatgcaccaagtacagccttcac

SEQ ID NO: 625153 - DNA, 120 bp, Artificial Sequence
  ENSG00000178607_29 (sequence is synthesized)
tggagaccggaattgagaggtgggggatgctgaggagggggaggacggagttcagagggtgtcgtcctgcagtgtgagatttctcattgatcacagatgtgcccagagtagcccaggtca

SEQ ID NO: 625154 - DNA, 120 bp, Artificial Sequence
  ENSG00000178607_30 (sequence is synthesized)
ctgttaactagtgtttctgcagaggcagcaggagccatgagcatgaggtgtggcattagggactggtcagctatgcatgctggcaggtggggttgtgtctgcaggtctcagaaatgaaga

SEQ ID NO: 625155 - DNA, 120 bp, Artificial Sequence
  ENSG00000178607_31 (sequence is synthesized)
ggctgctctgttctggaggcagccgtggcccagtgccagtggccagaacagtggcctttggtgggtgtgtcccgggccatctcggggtggtgctcaggagcgcctggggcaagaggtaaa

SEQ ID NO: 625156 - DNA, 120 bp, Artificial Sequence
  ENSG00000178607_32 (sequence is synthesized)
caggagaaagccctgggccagcgagtaggcagtcaaactccttcgtccccaaggccggtggaacaagaggctcgtggtgagtcagggccagggtgggtggccaaggccagggtcaccgtg

SEQ ID NO: 625157 - DNA, 120 bp, Artificial Sequence
  ENSG00000178607_33 (sequence is synthesized)
tgcttcatgggccagcttttttgtttttcttggcaaattttaataactatattttgattatactgtagaatgctatgtcagcataagtaagctaaacttgaagctttcttgtgaagaata

SEQ ID NO: 625158 - DNA, 120 bp, Artificial Sequence
  ENSG00000178607_34 (sequence is synthesized)
aatgcaagatagaatacatcttctattttttgtggtaccaaaaatcaccatcccctcaagagtgttcatgtatagaacattctctaatgctgaagagtaaaacattatagcaacactatg

SEQ ID NO: 625159 - DNA, 120 bp, Artificial Sequence
  ENSG00000178607_35 (sequence is synthesized)
taaatgtattgaacagtatcaaagaaatagtctctaaattgtttgtaccatatttttttttctaaacttaacataatttttagctttagtttcagtcaaaactttgtcttttctctcccg

SEQ ID NO: 625160 - DNA, 120 bp, Artificial Sequence
  ENSG00000178607_36 (sequence is synthesized)
agagccttagaggttaaaatgcaatcagcctaccgtgtaaggagatgttgtccatgtactttctccagccagttgggggatcattgcagctcaggcctggtgaactcagagattccattc

SEQ ID NO: 625161 - DNA, 120 bp, Artificial Sequence
  ENSG00000178607_37 (sequence is synthesized)
agtattaagaatgggattgttgaattttactcacagagaaatcactgtttcttcatgttgtaagatgttttctgtttgtgtatttgtatcatggttactcatcaaaagctctcattctgc

SEQ ID NO: 625162 - DNA, 120 bp, Artificial Sequence
  ENSG00000178607_38 (sequence is synthesized)
ctttgtagaattcagttcccttcctttcatcatagctaaagtgacttttttccctactattaacgtgatcctacatccttaaatctcatcgattacctcacttaggccttggaaccttgg

SEQ ID NO: 625163 - DNA, 120 bp, Artificial Sequence
  ENSG00000178607_39 (sequence is synthesized)
cccttggtcggtgtccttggcgtcttctaagcaaggctgtgcgttgttcagaaacgtggccagaccgcatttcctgctgctcccatgccgcatgccaggtggcctgagacagagctcccc

SEQ ID NO: 625164 - DNA, 120 bp, Artificial Sequence
  ENSG00000178607_40 (sequence is synthesized)
atacggctgcaaggtgctttacctgtgggctttggcagtaacccaagagaggatcagaaggtggagaaggtgccacgagtgatttaacaggcctgccacagggagtgcccccagcccagc

SEQ ID NO: 625165 - DNA, 120 bp, Artificial Sequence
  ENSG00000178607_41 (sequence is synthesized)
tcgttctcagcacaggttttctctttgggagtacccaggtgatttctagtgacccaattttgtgtcatctccctgttttagccccacttgcctagagacaactgtttccgatgccttttc

SEQ ID NO: 625166 - DNA, 120 bp, Artificial Sequence
  ENSG00000178607_42 (sequence is synthesized)
tgcttatcatactagtttctaaccacgcagatttctcaaaatcatttattcaatgtattttatttgagcacttagtgtattgagctaggcaggatatagggtgccggagatacagcgatg

SEQ ID NO: 625167 - DNA, 120 bp, Artificial Sequence
  ENSG00000178607_43 (sequence is synthesized)
aacaagacaggcaaaacttctgctttcctaaaacttgtgatgagagagaacaataaaaaagtgttgctgccacaaagaaaccaaagtgtgtggggaagggcgcgtgtttgcggtttacat

SEQ ID NO: 625168 - DNA, 120 bp, Artificial Sequence
  ENSG00000178607_44 (sequence is synthesized)
ctcttctgtcccagaatcacagggatctggtccggtcacctctggtctttcctcttagtcgcctttaggagccctggttcccgtccatcctctggggggtttgtttgaagagatctcgtg

SEQ ID NO: 625169 - DNA, 120 bp, Artificial Sequence
  ENSG00000178607_45 (sequence is synthesized)
tgggtacttgtcatgaaaacaccttgggcatcatctggtgtatccagttctagtctcgagaattctggtttcccactgtgctcagcaagtggaaagttcttttcaggccagaacagctct

SEQ ID NO: 625170 - DNA, 120 bp, Artificial Sequence
  ENSG00000178607_46 (sequence is synthesized)
gcaccatcacatatcgtgttgcggcttagctgtttggtctgtagttcaggttatgggacttctccaatcctggaaggctgttgagctttttagaagtactgtacgctatcttcaagatgg

SEQ ID NO: 625171 - DNA, 120 bp, Artificial Sequence
  ENSG00000178607_47 (sequence is synthesized)
agcttggtcacatctgttaggaatccaaaggacactatgacttatttaaatcttgtcttactaaacctctcttgggcacgtgtgccagaatttctcttgttgcttcttgagtctttttaa

SEQ ID NO: 625172 - DNA, 80 bp, Artificial Sequence
  ENSG00000178607_48 (sequence is synthesized)
atctcagtttttgaagtgctccacaagtcattaggcaccaaaacattttcacctggggaacactggcatttccctgatta

SEQ ID NO: 625173 - DNA, 120 bp, Artificial Sequence
  ENSG00000178607_49 (sequence is synthesized)
aaacattttcacctggggaacactggcatttccctgattagctgtgaagcaatctagtggctaagtgtgaaatcctgggtgcgcaggtgttctcactcccgccgtgttctcagtgcagtg

SEQ ID NO: 625174 - DNA, 120 bp, Artificial Sequence
  ENSG00000178607_50 (sequence is synthesized)
gtggtcagaggcccttccaaggagacatcactctgatcagttacagatagatgttctggaagatctgcaggtgagtagatccagcagagtttcttcccaccaactctagaagaaagggcc

SEQ ID NO: 625175 - DNA, 120 bp, Artificial Sequence
  ENSG00000178607_51 (sequence is synthesized)
ttatcagagttgaccctgagcctttggtaaggttttgtgtgcatgcgattcagttatctttggcaattcttttcttgctgcagtgagagattaattggttgctgatcaaaccgttcatgc

SEQ ID NO: 625176 - DNA, 120 bp, Artificial Sequence
  ENSG00000178607_52 (sequence is synthesized)
agatggggggacctttggattgtacggctttctcctcttggctgctttcttttcaggaagttggactttggccaggtttggctttcccagagccgttcctttctctgtcctttccttggg

SEQ ID NO: 625177 - DNA, 120 bp, Artificial Sequence
  ENSG00000178607_53 (sequence is synthesized)
tcctcatggtgtgcccattggatccttggccttgtgatcctctgggaactgggggccagttccacttttgcagccttctgtgctggaagagaagcccagcgccctggaaggagcctcttt

SEQ ID NO: 625178 - DNA, 120 bp, Artificial Sequence
  ENSG00000178607_54 (sequence is synthesized)
aagtcccccatgtcgctttctctctctgctcttttagtgtctgagattgcctttctttgaatttcccagtgtttcttttccttgtcccttccctcaccaacctggagttattttggttga

SEQ ID NO: 625179 - DNA, 120 bp, Artificial Sequence
  ENSG00000178607_55 (sequence is synthesized)
ctatgtcctggctttggcttctcctggcaggaagtcatcaggcatcctctccaggtgagccgaaattccaccctcccaggttggacatcatcttttaaacccaatggtctactcccctcc

SEQ ID NO: 625180 - DNA, 120 bp, Artificial Sequence
  ENSG00000178607_56 (sequence is synthesized)
ttctttatgaaacagtgatttcccgtgagtaactctggttctgattttttgtaccggcgcttaaattctttctgtagacgttggaaagccacaaagaacgtgactgcagtgagcctccca

SEQ ID NO: 625181 - DNA, 120 bp, Artificial Sequence
  ENSG00000178607_57 (sequence is synthesized)
ctggagcagccttaaccaacactttggccaaagcccccccacctcccctgtgtactgtgtgtgtgtttggtggatacagtattccttttcagtgtccctaaagctgtgatggggagtccc

SEQ ID NO: 625182 - DNA, 120 bp, Artificial Sequence
  ENSG00000178607_58 (sequence is synthesized)
cacttacctagaaagcattaccagtcacctactctgcattctcagatgtaaaccttgtgtagtgttctttttgcaatgacctatttatttaacctatttatatttatttaatttttactc

SEQ ID NO: 625183 - DNA, 120 bp, Artificial Sequence
  ENSG00000178607_59 (sequence is synthesized)
tgaaatgtatccagttacaattgtacttgcttaaagcacatcagatttgttttggacaacacccttgaccattttaaaactggaaaagtgatactgtatccttccatgggatggatgctt

SEQ ID NO: 625184 - DNA, 120 bp, Artificial Sequence
  ENSG00000178607_60 (sequence is synthesized)
tacagtagtcttattattaaagggtgattaatttggtcggggtaaaatgttaatttttaggtgatttttaagaattctgtgccattatgtcttctgtgtggatggttaattgtttaatta

SEQ ID NO: 625185 - DNA, 120 bp, Artificial Sequence
  ENSG00000178607_61 (sequence is synthesized)
gtacgtgttaattgtgtgatacagtcttctttgtggaacccaaaatcctctttttagctttatattttataaactgccagattgtacaacttttatgtgcatttttaaagcttgaagaca

SEQ ID NO: 625186 - DNA, 120 bp, Artificial Sequence
  ENSG00000178607_62 (sequence is synthesized)
tgagggtcattatctaagttaaacagcctatttttgtgcctcctgtacagttttataattctgctgatggcggcatcttatgtcgagccaaccacaataaaggtagttttagattttgga

SEQ ID NO: 625187 - DNA, 120 bp, Artificial Sequence
  ENSG00000178607_63 (sequence is synthesized)
aaagaaggtaatttggatttggtccttgggcgacatggacatttgcttaactggttccacagaaacatattctggagaaagagaaaacattactcattatctaataaaataaataagaaa

SEQ ID NO: 625188 - DNA, 120 bp, Artificial Sequence
  ENSG00000178607_64 (sequence is synthesized)
taaagaagaatgggatcaagagaggaaaaggcattctgctcaaaggacgtttatagctttgctgtggttatccactaagtgcatcagttaaagaagcacgttttatcttcttttttgctt

SEQ ID NO: 625189 - DNA, 71 bp, Artificial Sequence
  ENSG00000178607_65 (sequence is synthesized)
gatttattttttttattttgttaactttattaaagtcatagcactttgggaggccaaagtgagcagatcac

SEQ ID NO: 625190 - DNA, 64 bp, Artificial Sequence
  ENSG00000178607_66 (sequence is synthesized)
ctctacaaagaaaccaaaaattagccaggcctagcgatgtgttatcaaggctgcagtaagcagt

SEQ ID NO: 625191 - DNA, 120 bp, Artificial Sequence
  ENSG00000178607_67 (sequence is synthesized)
agatactctttgtcaccaggttctttctttccatggacttttcatgggcttatcataaatacttcccacagtcaatgtgcaggggccttggtgaagtctgaagggaaaccgaagtaaaat

SEQ ID NO: 625192 - DNA, 120 bp, Artificial Sequence
  ENSG00000178607_68 (sequence is synthesized)
ggtgacaagcttagccagagaggaaggaggacatccctcgttgagtctttctatgtcacagaaggaatttactgcaagcccatggaaagtagaagtaaaatcagcataggacattaacaa

SEQ ID NO: 625193 - DNA, 120 bp, Artificial Sequence
  ENSG00000178607_69 (sequence is synthesized)
gttcattccaagcggaagtgatggctggtggatatgacttgaggggaattcctgagggcaaggaaaaggaagaaaggggccccagagaagacgaggcacagctggagaaccctagggctg

SEQ ID NO: 625194 - DNA, 120 bp, Artificial Sequence
  ENSG00000178607_70 (sequence is synthesized)
tgaacactgcgactgccgcgcggggcagctgcgccgtgtttgctggaagcctccggtagctgctgaaaccttcgctccggaggtcgcctcggtaaaccttgcggatgattccaccacggc

SEQ ID NO: 625195 - DNA, 120 bp, Artificial Sequence
  ENSG00000178607_71 (sequence is synthesized)
ggaaagacgaaaaggaggcttctaggcacccgggaccgcccgtgtcccgcccttttccccgatgaagtctgacgcggcaggtccctcggcagggttaatgggacggcctggtggggcatt

SEQ ID NO: 625196 - DNA, 120 bp, Artificial Sequence
  ENSG00000178607_72 (sequence is synthesized)
gccggtctttcccagccacagacaagcttcgcgcctcgatcccccagcgcccccagacgctggatgccgaggcctggtcctttacagccgccgacgcctcatgagcgaagccagccagat

SEQ ID NO: 625197 - DNA, 120 bp, Artificial Sequence
  ENSG00000178607_73 (sequence is synthesized)
cctcatgagcgaagccagccagatgccagcaccgccttcggccccgccccgagccagcccctcccacatccccgcccggggcacgccctcggcccgcccccatctccgccccgaacacgc

SEQ ID NO: 625198 - DNA, 80 bp, Artificial Sequence
  ENSG00000178607_74 (sequence is synthesized)
cggggtgagtgaccggggagcgtggggtggaggacagctcgcgacggccgggtcggggccggggcagcgtcgcggcgccg

SEQ ID NO: 625199 - DNA, 120 bp, Artificial Sequence
  ENSG00000178607_75 (sequence is synthesized)
tcgggccgggcgtaggaggcggcaccgggccgggagagcttccctgacgggagtcgcggccccaccgaggcgtcggccgcccgaagagcctcccaagccagcgcggctgtcacgggcagc

SEQ ID NO: 625200 - DNA, 120 bp, Artificial Sequence
  ENSG00000178607_76 (sequence is synthesized)
ggctccccggaccccgcgggctcgggcgcaacttcgtggcgtcctgcacggcacttgggggtcccagaaggccccggcctgaggaggccgcccacctgcgggaccctcctcctcgcgggc

SEQ ID NO: 625201 - DNA, 120 bp, Artificial Sequence
  ENSG00000178607_77 (sequence is synthesized)
gggcgccggcgctgcctggcgggggccgcggaggagccgaaagggcgttgggatccaggggaagggtctgtcctgcgcttcgaatccttgtttgaactttttaaaaattcgaaaactttg

SEQ ID NO: 625202 - DNA, 120 bp, Artificial Sequence
  ENSG00000178607_78 (sequence is synthesized)
gggaacgaatgcaacagggagtaaggactctcacccgagagctggcttctgccacttgccctgccggtttcttggtactgggaggctgcaggcttccttctgtgcaccgagacttccttg

SEQ ID NO: 625203 - DNA, 120 bp, Artificial Sequence
  ENSG00000178607_79 (sequence is synthesized)
agcaagtggagctgtgggaattgcactcttggaagatcccgcatgggttcgaggtgaggccgcttcagaacctcaaatgaaagactgtctcctcgtgggagagcacctggggccatcaga

SEQ ID NO: 625204 - DNA, 120 bp, Artificial Sequence
  ENSG00000178607_80 (sequence is synthesized)
aatgtcttttcatctttttctggaggagacgaatgatagggcctggtttacattcatttaactctttatgaccttcactcagctgtggatttgggggcactttgtgggagacttggcttt

SEQ ID NO: 625205 - DNA, 120 bp, Artificial Sequence
  ENSG00000178607_81 (sequence is synthesized)
tttttttcttctggttggaagaacctaaattagcgaatgtttttcacaaaatgtattgttcaggatgtgagcgtggcaaatttgtccgtgttctgtttaatgacctctttaaaggtactg

SEQ ID NO: 625206 - DNA, 120 bp, Artificial Sequence
  ENSG00000178607_82 (sequence is synthesized)
tgtactctttaatagggatatcatgtaccaggtgtcccagtagagcactgacatgtgtgtgcctgagtgccagccaccgtgtgaactctttggaggttttgcattttaggtaaataactg

SEQ ID NO: 625207 - DNA, 120 bp, Artificial Sequence
  ENSG00000178607_83 (sequence is synthesized)
tctgtactcttggagtaacaagaatttggaaacaggagaagtaaataaataaggttgcctttttcaaattcagggtttttttttttaaataaaggaaaatttgtagactctttataatag

SEQ ID NO: 625208 - DNA, 120 bp, Artificial Sequence
  ENSG00000178623_0 (sequence is synthesized)
cctttagtcacttccagctccaggcacagcagttggtgactccttggtgggagccgtgtcccacccggtcctgatactgccgtcttctctttcacagtcctccaggcttgggccagcctt

SEQ ID NO: 625209 - DNA, 120 bp, Artificial Sequence
  ENSG00000178623_1 (sequence is synthesized)
gggggcagcagagcttctgggctgacatgggctcattgctccttctccaagccctctgaggacatcaaaagcgtggacgcatcactttccaccatcttgctgcccactgtccctccatcc

SEQ ID NO: 625210 - DNA, 120 bp, Artificial Sequence
  ENSG00000178623_2 (sequence is synthesized)
tgaggcctcctaagcacatgtgtggggtggcaggcacactgctgatagctgtggatgcggccgtgacatccttcacccctgcccccatggcatgcatgatccattagggaggaccgtctg

SEQ ID NO: 625211 - DNA, 120 bp, Artificial Sequence
  ENSG00000178623_3 (sequence is synthesized)
cacaaaggtctcttgccctgtgcagcttcctgcagactggacttgcaaagtccagcctgtatggctggagttcccatgcctgccaatctcctgtcgactgcgagtcagctccgatacttc

SEQ ID NO: 625212 - DNA, 120 bp, Artificial Sequence
  ENSG00000178623_4 (sequence is synthesized)
accagattcagccacctgggggagctggaagtgaatctcctcgtagctgagccttctgatgagactgcagccccggctgacacctggattgcagactcatgaaagacctgaaactctacc

SEQ ID NO: 625213 - DNA, 120 bp, Artificial Sequence
  ENSG00000178623_5 (sequence is synthesized)
aacagccacctgggggagctggaagtgaatctcctcgtagctgagccttctgatgagactgcagccccggctgacacctggattgcagactcatgaaagaccctgagcagaggacccagt

SEQ ID NO: 625214 - DNA, 120 bp, Artificial Sequence
  ENSG00000178623_6 (sequence is synthesized)
ttggcagagcccgaattcctgacccacaggaactgggagataaaactctgtggttttaatcttctcattttagagtgctcagtgtcctgtggtgtgaacacgcttcattcaacctgggcc

SEQ ID NO: 625215 - DNA, 120 bp, Artificial Sequence
  ENSG00000178623_7 (sequence is synthesized)
cttgggagagatgctgagtggttcccgggctgtccccactccacaccgtggcagtgaagagctgctgaagtacatgcttcatagtccttgcgtctctctgaccatgaatggcacctacaa

SEQ ID NO: 625216 - DNA, 120 bp, Artificial Sequence
  ENSG00000178623_8 (sequence is synthesized)
cacctgtggctccagcgacctcacctggcccccagcgatcaagctgggcttctacgcctacttgggcgtcctgctggtgctaggcctgctgctcaacagcctggcgctctgggtgttctg

SEQ ID NO: 625217 - DNA, 120 bp, Artificial Sequence
  ENSG00000178623_9 (sequence is synthesized)
gctgcactccctgcgagacacctcagacacgccgctgtgccagctctcccagggcatctacctgaccaacaggtacatgagcatcagcctggtcacggccatcgccgtggaccgctatgt

SEQ ID NO: 625218 - DNA, 120 bp, Artificial Sequence
  ENSG00000178623_10 (sequence is synthesized)
ggccgtgcggcacccgctgcgtgcccgcgggctgcggtcccccaggcaggctgcggccgtgtgcgcggtcctctgggtgctggtcatcggctccctggtggctcgctggctcctggggat

SEQ ID NO: 625219 - DNA, 120 bp, Artificial Sequence
  ENSG00000178623_11 (sequence is synthesized)
tcaggagggcggcttctgcttcaggagcacccggcacaatttcaactccatggcgttcccgctgctgggattctacctgcccctggccgtggtggtcttctgctccctgaaggtggtgac

SEQ ID NO: 625220 - DNA, 120 bp, Artificial Sequence
  ENSG00000178623_12 (sequence is synthesized)
tgccctggcccagaggccacccaccgacgtggggcaggcagaggccacccgcaaggctgcccgcatggtctgggccaacctcctggtgttcgtggtctgcttcctgcccctgcacgtggg

SEQ ID NO: 625221 - DNA, 120 bp, Artificial Sequence
  ENSG00000178623_13 (sequence is synthesized)
gctgacagtgcgcctcgcagtgggctggaacgcctgtgccctcctggagacgatccgtcgcgccctgtacataaccagcaagctctcagatgccaactgctgcctggacgccatctgcta

SEQ ID NO: 625222 - DNA, 120 bp, Artificial Sequence
  ENSG00000178623_14 (sequence is synthesized)
ctactacatggccaaggagttccaggaggcgtctgcactggccgtggctcccagtgctaaggcccacaaaagccaggactctctgtgcgtgaccctcgcctaagaggcgtgctgtgggcg

SEQ ID NO: 625223 - DNA, 120 bp, Artificial Sequence
  ENSG00000178623_15 (sequence is synthesized)
ctgtgggccaggtctcgggggctccgggaggtgctgcctgccaggggaagctggaaccagtagcaaggagcccgagatcagccctgaactcactgtgtattctcttggagccttgggtgg

SEQ ID NO: 625224 - DNA, 120 bp, Artificial Sequence
  ENSG00000178623_16 (sequence is synthesized)
gcagggacggcccaggtacctgctctcttgggaagagagagggacagggacaagggcaagaggactgaggccagagcaaggccaatgtcagagacccccgggatggggcctcacacttgc

SEQ ID NO: 625225 - DNA, 120 bp, Artificial Sequence
  ENSG00000178623_17 (sequence is synthesized)
cacccccagaaccagctcacctggccagagtgggttcctgctggccagggtgcagccttgatgacacctgccgctgcccctcggggctggaataaaactccccacccagagtcagtccta

SEQ ID NO: 625226 - DNA, 120 bp, Artificial Sequence
  ENSG00000178623_18 (sequence is synthesized)
agaacaaatgtgtgccctcagcaaggatgctggctcttcagaggtgtcagcacaggcagccggcaccccacttccctcccagaaatcccccacgccctctagctggggctggtgcaggag

SEQ ID NO: 625227 - DNA, 120 bp, Artificial Sequence
  ENSG00000178623_19 (sequence is synthesized)
cagtggggaactcctgttacccctgacctgctgccgtcagtcagccgcccgcccccccaccttaaggaggggcagagtcagggaccagccctgaggggtggctcaccccagcttcacttc

SEQ ID NO: 625228 - DNA, 120 bp, Artificial Sequence
  ENSG00000178623_20 (sequence is synthesized)
tataaacaggaaaatttaaatgttgtagttagagtttttttcttcttcttagagatggggtttcactctgtctcctaaggctggagtgcagtggtgggatcatagctcacttcagcctca

SEQ ID NO: 625229 - DNA, 120 bp, Artificial Sequence
  ENSG00000178623_21 (sequence is synthesized)
ggtgggatcatagctcacttcagcctcaacctcctgggctcaagccgtcttcctgcctcagcctcccgagtagcacgcatcaccagcccagctaattttctgtctttttttttttttttt

SEQ ID NO: 625230 - DNA, 72 bp, Artificial Sequence
  ENSG00000178623_22 (sequence is synthesized)
tttttttttttttttgtagagacggggtctccctgtgatgcccaggttgttcttaaacttctggcctcaagt

SEQ ID NO: 625231 - DNA, 120 bp, Artificial Sequence
  ENSG00000178623_23 (sequence is synthesized)
acaaaatactgggccacaccgaggctagtatgaaagttgcagccctgggtatgtgtgacctgagagccccttggcagccatggggagcgatgggggaagctggggcaatgggaaggggtc

SEQ ID NO: 625232 - DNA, 120 bp, Artificial Sequence
  ENSG00000178623_24 (sequence is synthesized)
taggcacacgagccctcgggtcctcacctcccacgaggcagggtcccaggctgcctctactcaaggtggggcagcaaaagaatcgccctctagctgtgcagaccccctccccctccaggt

SEQ ID NO: 625233 - DNA, 120 bp, Artificial Sequence
  ENSG00000178623_25 (sequence is synthesized)
ctgcacaccgcccaaggctggccctggacttctggtggattcaagtactcaggtggggagagtaggaggccagtcgcacggagccctccccaacgcacagtgcctgcccagctcaggtgc

SEQ ID NO: 625234 - DNA, 120 bp, Artificial Sequence
  ENSG00000178623_26 (sequence is synthesized)
ctctgaggtgtagattctgagcaggttctgggatctcctggcccccagcgggggctgccacaggagtataggcccaacaggaagggaagatcccagcgattggttccagtgggttctggg

SEQ ID NO: 625235 - DNA, 120 bp, Artificial Sequence
  ENSG00000178623_27 (sequence is synthesized)
gatgtcctcggagcctggcctggctcagggtccctccaaaagtccctggaacgagggtgaagtgttgctcatgaatcagagagaaagcaagcaggaccctcaagaagggaggagagagac

SEQ ID NO: 625236 - DNA, 120 bp, Artificial Sequence
  ENSG00000178623_28 (sequence is synthesized)
cactgggcgtgcagcactttgcactcgggggaagggctcctgaaacttggaagtcagcaaatatctgctgtacttcaccagaggtgggatctaaggagacagaatgaagccagggggcag

SEQ ID NO: 625237 - DNA, 120 bp, Artificial Sequence
  ENSG00000178623_29 (sequence is synthesized)
aatgtttcgtttctgtctgaaacctgtgccctccatccctcatggactggggacctggagttcccggggaccaccgtggggaaatgcgtcccagcactaatggtccccagcagctgcagt

SEQ ID NO: 625238 - DNA, 120 bp, Artificial Sequence
  ENSG00000178623_30 (sequence is synthesized)
cacggggtttgggcgctctcccctcctgatttgggggaccttttgtgctcctctgggcagagggaggaggcagagggaggaggaaggcccttcgctgtgggctgagtccttcccaccttc

SEQ ID NO: 625239 - DNA, 120 bp, Artificial Sequence
  ENSG00000178623_31 (sequence is synthesized)
cataccagcccagcaggaagccactgcaggatgccccagaggacagcctgatggttgggggagaggcttctcccgccctcacccctccgggttcttcctggacccactgagtaacccagg

SEQ ID NO: 625240 - DNA, 120 bp, Artificial Sequence
  ENSG00000178623_32 (sequence is synthesized)
tggtgggacgtgtggctgtgagtcctggactctgggcgctcaccagcagctccgtctcacacctgcctgcgtgtgacaccagcaccccttatgatgaggaaacaagtttgcccagctgca

SEQ ID NO: 625241 - DNA, 120 bp, Artificial Sequence
  ENSG00000178623_33 (sequence is synthesized)
ggggtggccgagtcaggatgactctagcccgtgtcctggacaccagaccctgcccaggtccagccggggctggtctcagccttcctgggctatgtcgcggagggtgttggggacagcgag

SEQ ID NO: 625242 - DNA, 120 bp, Artificial Sequence
  ENSG00000178623_34 (sequence is synthesized)
aggctggcgtggacagtggaggggtgactttgtgggtggtcctgatagtgacggagaggaggatactcagctccacccctgggcggcccctgagcagcacgactgggcctgaaggggcag

SEQ ID NO: 625243 - DNA, 120 bp, Artificial Sequence
  ENSG00000178623_35 (sequence is synthesized)
ccagagctcaggactgggtgggtgggctcacagggaggtaggggcaggccagagtcccagctgtcctggactctgctgtggggaagggctgatgcaggtgtggagtcaaatgtgggtgcc

SEQ ID NO: 625244 - DNA, 120 bp, Artificial Sequence
  ENSG00000178623_36 (sequence is synthesized)
tcctgcagccgggtgccaggaggggtggaggggccaccctgggctttgtccgggagcctggtcttcccgtccttgggctgacaggtgctgctgcctctgagccctccctgctaagagctg

SEQ ID NO: 625245 - DNA, 120 bp, Artificial Sequence
  ENSG00000178623_37 (sequence is synthesized)
tgtgctgggtaaggctggtggccctttgggctccctgtccaggatttgcgctctggagggtagggcttgctgggctggggactggaggggaacgtggagctccttctgcctcctttcctg

SEQ ID NO: 625246 - DNA, 120 bp, Artificial Sequence
  ENSG00000178623_38 (sequence is synthesized)
ccccatgacagcaggcagatcccaggagagaagagctcaggagatgggaagaggatctgtccaggggttagacctcaagggtgacttggagttctttacggcacccatgctttctttgag

SEQ ID NO: 625247 - DNA, 120 bp, Artificial Sequence
  ENSG00000178623_39 (sequence is synthesized)
gagttttgtgtttgtgggtgtggggtcggggctcacctcctcccacatccctgcccagaggtgggcagagtgggggcagtgccttgctccccctgctcactctctgctgacctccggctc

SEQ ID NO: 625248 - DNA, 120 bp, Artificial Sequence
  ENSG00000178645_0 (sequence is synthesized)
agcagcgtgtgtttctcccttgcctctgcggcggcggaggcctggcgatgcccaagaacgcagtggtcatcctgcgctatgggccctacagcgcggcaggcctaccggtggagcaccaca

SEQ ID NO: 625249 - DNA, 120 bp, Artificial Sequence
  ENSG00000178645_1 (sequence is synthesized)
ccttccgcctgcagggcctgcaagctgtgttggccatagatggacatgaggtcatcctagagaagatagaagactggaatgtggtggaactcatggtgaatgaagaagtcatcttccact

SEQ ID NO: 625250 - DNA, 120 bp, Artificial Sequence
  ENSG00000178645_2 (sequence is synthesized)
gcaacattaaggacttggagttcggaggcgatggtaaactagacccactgtgtgaaaaggccaggatagccgtgctgaatgcctactgatctcctcatggaacaggcatctcaagtcggc

SEQ ID NO: 625251 - DNA, 120 bp, Artificial Sequence
  ENSG00000178645_3 (sequence is synthesized)
acaacagcagctgccccagccattctatgatgcaggcagaagtggctgtgccacggtgtggacactgggctctgctagtcagaacagggcaactcgggcctgacctccagcttacgcagc

SEQ ID NO: 625252 - DNA, 120 bp, Artificial Sequence
  ENSG00000178645_4 (sequence is synthesized)
ctcaggattgtcacctggctgcacaggagcccacagaaataataaaaaccacatcatttataacatgtctcaatctcaacccatagggagagccctccaatatcaggtacacattgagct

SEQ ID NO: 625253 - DNA, 120 bp, Artificial Sequence
  ENSG00000178645_5 (sequence is synthesized)
gaaggaaacaataaaatgcaatcaaataacaaggtgccattcctgactaataacacatagttgccagaagcatctgagattccattgtttagtactcaaagtgctcagaacaggtgaaat

SEQ ID NO: 625254 - DNA, 120 bp, Artificial Sequence
  ENSG00000178645_6 (sequence is synthesized)
taaagagaggttgggggaagagtgggaataaaggcttttgaaagtctgaaccaaaagcaaatgttaatatttggaaaccttgctattcctacagatttatttctgactcctgagggaata

SEQ ID NO: 625255 - DNA, 120 bp, Artificial Sequence
  ENSG00000178645_7 (sequence is synthesized)
aatattttaaattgctattataaaattagccaaaatcaaatcttcaatttctctcatctaaaacaagaaaatgacctgccttcttttgcattaatatcgtctgaggagggcgcaaaagag

SEQ ID NO: 625256 - DNA, 120 bp, Artificial Sequence
  ENSG00000178645_8 (sequence is synthesized)
tcctcagcagaatgtgagatggttccctggtccctctggagtagaacacagccccatagagttaaagagggttttcactatgttcagtgtgaaaatcagtcatgtcgaaatgatattttt

SEQ ID NO: 625257 - DNA, 120 bp, Artificial Sequence
  ENSG00000178645_9 (sequence is synthesized)
actttccactcttacgcaccaatgtgtagtatatattcttaactatagagtaacagagagggggaaatgcagatattgatctaatgacgtcaaatgggaggtcatggtaagaaggcctca

SEQ ID NO: 625258 - DNA, 120 bp, Artificial Sequence
  ENSG00000178645_10 (sequence is synthesized)
cacctacggggagaaaaccagattccctaacagaaaactctggacccggggcacctgtgctgaaggagcagggctttcaggatcgctcagagacctgcggcttcacctgctctgagagca

SEQ ID NO: 625259 - DNA, 120 bp, Artificial Sequence
  ENSG00000178645_11 (sequence is synthesized)
gtcctaaccatcgccccaggcagcctcaaaccctcctgcaccccagaacttcaaagaccactggggaccatgaaactgcttgcacaagttccttctcacacaggacaaagtaggggatat

SEQ ID NO: 625260 - DNA, 120 bp, Artificial Sequence
  ENSG00000178645_12 (sequence is synthesized)
aatttttaaaaccccagcccaagcttcacttgtcagagttgattcagggattgtgaatcacttagaactctatggaactatttaagcatctccttactgagaaactgaggctcaaaagag

SEQ ID NO: 625261 - DNA, 120 bp, Artificial Sequence
  ENSG00000178645_13 (sequence is synthesized)
ggtgctggttttcacatatcttttgtaaccctacatttagtccctttttttcaaaacccagtttaagttactatagatgtagcattcaatctttgtttcaatataacattttactacaag

SEQ ID NO: 625262 - DNA, 120 bp, Artificial Sequence
  ENSG00000178645_14 (sequence is synthesized)
agaaatccattctcattaaagaaaaatggaaaaatacaggtaaaaataaagtacaactttagtaacatttttatatatttcaatttgggtttcttctgtttatgtctgaatattcataaa

SEQ ID NO: 625263 - DNA, 120 bp, Artificial Sequence
  ENSG00000178645_15 (sequence is synthesized)
gagatagacatatagaaattgacttcatccatttgagatttatgcacaattttgtaagtttttaaaaatttttcaacttttattttagatacagggggtacatgggcaggtatgttgaat

SEQ ID NO: 625264 - DNA, 120 bp, Artificial Sequence
  ENSG00000178645_16 (sequence is synthesized)
ctttttttaaacgtaacattttacatagagcctcttcccgcatgatttgttgactgtctgagcattttatcttgaatcaggaaatctctcccttgagctgtgatttctactttcatggcc

SEQ ID NO: 625265 - DNA, 120 bp, Artificial Sequence
  ENSG00000178645_17 (sequence is synthesized)
aaaactttttcaatgctgagaactgaaattgctagcttcccctgtctgcatttggagtgggaacttcatctccaaacacagtggaatcctgtctcctctagccctgcaaccccggcatta

SEQ ID NO: 625266 - DNA, 120 bp, Artificial Sequence
  ENSG00000178645_18 (sequence is synthesized)
aactggtaacaagtgcttccctcggcagccccatgccctcctccagcatccgcctcaaccccgcaggttgtatttgtgccttcagagtagcactacaagtgaagaagacctgccctcctt

SEQ ID NO: 625267 - DNA, 120 bp, Artificial Sequence
  ENSG00000178645_19 (sequence is synthesized)
ggcttcatgaccagagctgaagggcaggtaaggcgagacagtacacggattctaagaaataccggagaagcttctgggagatgcctgtgcccagagccctatgtttcagtttggatcaga

SEQ ID NO: 625268 - DNA, 120 bp, Artificial Sequence
  ENSG00000178645_20 (sequence is synthesized)
ggcaaatgatgtctgaatcagcattgctgggaaaaatcaccgaggtttcctctgagcagtgggattggggggtgtggggggcaggtgaggtagagggaggaagtttgcagggctattctg

SEQ ID NO: 625269 - DNA, 120 bp, Artificial Sequence
  ENSG00000178645_21 (sequence is synthesized)
ccttccgtattgtaaatgtttttagtggtggaattgattttcactttgtatgtaagtgtgtgttaggggtacttttcagataaaaacttaaaatcagggccgggcactatggcttttgcc

SEQ ID NO: 625270 - DNA, 89 bp, Artificial Sequence
  ENSG00000178645_22 (sequence is synthesized)
taaaaacttaaaatcagggccgggcactatggcttttgcctgtaatcccagcactttgggaatccaaggtgggtggatttgtttgaaca

SEQ ID NO: 625271 - DNA, 120 bp, Artificial Sequence
  ENSG00000178645_23 (sequence is synthesized)
acaaagtgagaccctgtctcagaaaataaaataaagattttgacatagaagccacctgtctatggccttatcctcctctgtcactgattaagaggaactttctctatggaaatctctgaa

SEQ ID NO: 625272 - DNA, 120 bp, Artificial Sequence
  ENSG00000178645_24 (sequence is synthesized)
gaatgtgctgtcatcctcctcctttgcctccctctctcgagcacgcacctccctgcccagaagcaagagacacagcttgctccccatcaaaggcaaaagtgccctgtgcttcaacgtgct

SEQ ID NO: 625273 - DNA, 120 bp, Artificial Sequence
  ENSG00000178645_25 (sequence is synthesized)
agacattcgggcgccttcatgcttttaaaataccactgattaaatcacattttaagttttataagatgtcaagtcaatgtcgttatgattaacatgtaaagaaagtgtattttaaaataa

SEQ ID NO: 625274 - DNA, 120 bp, Artificial Sequence
  ENSG00000178645_26 (sequence is synthesized)
gcaacattaaggacttggagttcggtaagccctttggcgatgcttccagccagcaatttgcctcctctgaggagtccctcaatttctagttgaaatgatcagtgtatcatgcctggattc

SEQ ID NO: 625275 - DNA, 120 bp, Artificial Sequence
  ENSG00000178645_27 (sequence is synthesized)
aaattgggtttctttctgagtttgaaacttgtactgaaagccctgtgctttcagtggcacacacaggagagtatccaaaaccacacagtaaagtgtgtgatgctacgagtttccccaaac

SEQ ID NO: 625276 - DNA, 120 bp, Artificial Sequence
  ENSG00000178645_28 (sequence is synthesized)
attggaaacaggaaggaaaatgaagtgaagccctggacttcgagggatgtgatggaattaagggataataggtttttgtactttaataatatgtattctgttattatttgctttcgaagc

SEQ ID NO: 625277 - DNA, 120 bp, Artificial Sequence
  ENSG00000178645_29 (sequence is synthesized)
tgctttttttccacttgtttattctatctagacttgctaagacactgagttgatatgccagcagtgcatgacactatcagcaacattcaaatgagagcttctggcctggcaggctggcac

SEQ ID NO: 625278 - DNA, 120 bp, Artificial Sequence
  ENSG00000178645_30 (sequence is synthesized)
tgtgcgtgcctctctgtgctcagaagttaaagctttgcaatccactaacactctattaaaaactagttaacattttaccagcccatggcctttgaaaatgcactctgggtggaagccata

SEQ ID NO: 625279 - DNA, 120 bp, Artificial Sequence
  ENSG00000178645_31 (sequence is synthesized)
ccaagtagtgacaagaggaccaccagcagctccaggctgacatttcaccagcttagcagcccgtgtaggatgaaagtttctcctttgcaacagttcccacaaaagacccaggacctgact

SEQ ID NO: 625280 - DNA, 120 bp, Artificial Sequence
  ENSG00000178645_32 (sequence is synthesized)
tgtactgtattggcccagattggatcatgtatccatttccaaaccaatctttgtgacctgggttggccaggcctggatcacatgctcatttctggactagagaagaggggaactcagccc

SEQ ID NO: 625281 - DNA, 120 bp, Artificial Sequence
  ENSG00000178645_33 (sequence is synthesized)
tactgaaatcgacaggacagattgtgggaaaggggttcatttcacaaaaggaaaatggtgggtctgtttccagaataagggtgaatagatgctgagtcccccaaaacaaaaattgtccca

SEQ ID NO: 625282 - DNA, 120 bp, Artificial Sequence
  ENSG00000178645_34 (sequence is synthesized)
catctcccgaacctctccagctagatgtcccacaggcaacctgtggcaaacccaacgtgattctccccagctctgagtctctacaactgtattcccgtgttgaagttatgatcgatgaac

SEQ ID NO: 625283 - DNA, 120 bp, Artificial Sequence
  ENSG00000178645_35 (sequence is synthesized)
tacttactcaatttgggaacttggggacagcccccaccatcttctgaagtgaactgatctgcccttttctcaacaatgccagtgctttcgccctgctttgggatttggcatctcttcccc

SEQ ID NO: 625284 - DNA, 120 bp, Artificial Sequence
  ENSG00000178645_36 (sequence is synthesized)
aagctgtttaactggattcctatctcgttactctgtctccattatctcctcctgcaaaccactcgccacatggctgctaaaatcatctttcccaagcattgatctgcccgtttcttccct

SEQ ID NO: 625285 - DNA, 120 bp, Artificial Sequence
  ENSG00000178645_37 (sequence is synthesized)
gcaagtaacccatgctccaccaggggaatgcactggccctagacctcaactctagggcttgtggcaaaaggatggtaagagaaggaatgatgtgttctgtggctctggcagcggcagcta

SEQ ID NO: 625286 - DNA, 120 bp, Artificial Sequence
  ENSG00000178645_38 (sequence is synthesized)
catccagcttctggggtcagccagggcaatcatgccagctacgacatccagcatctagcaaggttaatggggtaagctgccgtttctggcctcggcagcatgaccatgggctccttccag

SEQ ID NO: 625287 - DNA, 120 bp, Artificial Sequence
  ENSG00000178645_39 (sequence is synthesized)
gcctggttttgtggtatgacacggcctgaacctctggcttcagagcctctccttgtgtccctgtattttatccagcctgcttctccagccttctaggccagtccttgagatcctggtttc

SEQ ID NO: 625288 - DNA, 120 bp, Artificial Sequence
  ENSG00000178645_40 (sequence is synthesized)
ctctcaaacaattccttttgagcccatctcagccagaaccagctctgttgctcacagctataaaccttgactgagacactcctgtgtggtttcaggagaaaatttaaactcttcagccag

SEQ ID NO: 625289 - DNA, 120 bp, Artificial Sequence
  ENSG00000178645_41 (sequence is synthesized)
gcataagagaccctttacgatctgagcctcactcacctgttccctggcccactgcccaccccacagccctaagtgattagcaaagcaggcctttcacatttacaggcctctgccctcctg

SEQ ID NO: 625290 - DNA, 120 bp, Artificial Sequence
  ENSG00000178645_42 (sequence is synthesized)
gcatccccttctccacctggtaaatgctgcccaactcaagcagcaactcctaccataatctttccccttctcccttctctcccagcagaacggtgggctcccctctctggttccctgcag

SEQ ID NO: 625291 - DNA, 78 bp, Artificial Sequence
  ENSG00000178645_43 (sequence is synthesized)
cccagcagaacggtgggctcccctctctggttccctgcagccttgctctgcataggctctgatgaatgcctggcaccc

SEQ ID NO: 625292 - DNA, 120 bp, Artificial Sequence
  ENSG00000178645_44 (sequence is synthesized)
tcttgggagggtcatagagctcctcaaagcagcagcatgtcacctcccccacgccccacgtctttgtgcctcctaccctagagcccaccatagcacttgtcccatagtgagccctcaaca

SEQ ID NO: 625293 - DNA, 120 bp, Artificial Sequence
  ENSG00000178645_45 (sequence is synthesized)
aacacacagttaacaaaggatggcaatcaatgctccatcctgccagccctggacacaacacccaacagttgctcgagggccagtgtggcattcttacttaataaaacatgttggaaaatg

SEQ ID NO: 625294 - DNA, 120 bp, Artificial Sequence
  ENSG00000178662_0 (sequence is synthesized)
attggttggctgccgcctgatggatagacgagggaggagtgtactctcttcagtgtgttctgacggagccgaagtacagaaaccatatttacaggtacatgtgacagcgttgcagctatg

SEQ ID NO: 625295 - DNA, 120 bp, Artificial Sequence
  ENSG00000178662_1 (sequence is synthesized)
agtggaattttaaaggggaagtttgaagaagtcaacggctcctcaccctgctcttcagtgcaggaatcagatgatgaagttttcagctgtgacagtactgagagtgttgatagtgtcaat

SEQ ID NO: 625296 - DNA, 120 bp, Artificial Sequence
  ENSG00000178662_2 (sequence is synthesized)
cgttcagttttaatgattttaccagaaaaaatgaggaaatatcaacagactgaaaatatgttttcagaggcatagaatcttcaggaaaatactggagttcctgagatctcaaggtacatg

SEQ ID NO: 625297 - DNA, 120 bp, Artificial Sequence
  ENSG00000178662_3 (sequence is synthesized)
tgacagcactgcagcgatgagtggaattttaaagaggaagtttgaagaagttgacggctcctcaccctgctcctctgtgagggaatcagatgatgaagtttccagcagtgaaagtgctga

SEQ ID NO: 625298 - DNA, 120 bp, Artificial Sequence
  ENSG00000178662_4 (sequence is synthesized)
cagtggggacagtgtcaatccatccacttctagtcattttaccccttcctccattctcaaaagggagaaacgactgaggacaaagaatgtacattttagttgtgtcaccgtgtactactt

SEQ ID NO: 625299 - DNA, 120 bp, Artificial Sequence
  ENSG00000178662_5 (sequence is synthesized)
caccaggaggcaaggcttcacaagtgtgcccagtcaagggggaagcaccctggggatgtccagccgccataacagcgtgcgccagtacactcttggcgagtttgcaagggagcaggagag

SEQ ID NO: 625300 - DNA, 120 bp, Artificial Sequence
  ENSG00000178662_6 (sequence is synthesized)
gctccaccgggagatgttgagagaacaccttagggaggaaaagctgaactccttaaaactaaagatgactaagaatggcacagtagaatcagaagaagccagcactcttacactggatga

SEQ ID NO: 625301 - DNA, 120 bp, Artificial Sequence
  ENSG00000178662_7 (sequence is synthesized)
catttctgatgatgacattgacctggacaacacagaggtagatgagtacttcttcctacaacctttgccaacaaaaaaacgaagagctctgctgcgtgcctctggagtgaaaaagattga

SEQ ID NO: 625302 - DNA, 120 bp, Artificial Sequence
  ENSG00000178662_8 (sequence is synthesized)
cgtggaagaaaagcacgaactccgagccatccgcctctcacgagaggactgtggctgtgactgccgagtgttctgtgatccagacacgtgcacctgcagcctggctggcattaagtgcca

SEQ ID NO: 625303 - DNA, 120 bp, Artificial Sequence
  ENSG00000178662_9 (sequence is synthesized)
ggtggatcgtatgtctttcccatgcggctgcactaaagaaggatgtagtaacacagcaggtagaattgaatttaatcctatccgtgttcggactcactttttgcacacaataatgaaact

SEQ ID NO: 625304 - DNA, 120 bp, Artificial Sequence
  ENSG00000178662_10 (sequence is synthesized)
tgaactggagaaaaaccgagagcagcaaatccccacgctgaatggctgccacagtgagataagtgctcacagtagttctatgggccctgtcgctcactccgtagaatattcaatcgcaga

SEQ ID NO: 625305 - DNA, 120 bp, Artificial Sequence
  ENSG00000178662_11 (sequence is synthesized)
cagttttgagattgaaactgagccccaggctgcagtgctgcacctgcagtcggctgaagaattagattgccaaggagaggaggaggaagaagaggaggatgggagcagcttttgcagcgg

SEQ ID NO: 625306 - DNA, 120 bp, Artificial Sequence
  ENSG00000178662_12 (sequence is synthesized)
agtcacagattctagcacgcaaagcttggcacctagtgagtcagacgaggaggaggaggaagaagaagaggaagaggaggaggaggatgacgatgatgacaaaggagatggcttcgtgga

SEQ ID NO: 625307 - DNA, 120 bp, Artificial Sequence
  ENSG00000178662_13 (sequence is synthesized)
aggtttgggcacccatgccgaagttgtccctcttccttcagttctttgttattctgatggcaccgccgttcacgaaagccatgcaaagaatgcttctttttatgccaactcttcaactct

SEQ ID NO: 625308 - DNA, 120 bp, Artificial Sequence
  ENSG00000178662_14 (sequence is synthesized)
gtattaccaaatagatagccacattccaggaactccaaatcagatctctgagaactattctgaaagagacactgtcaaaaatggtaccctttcgctggtgccttacaccatgaccccgga

SEQ ID NO: 625309 - DNA, 120 bp, Artificial Sequence
  ENSG00000178662_15 (sequence is synthesized)
gcaattcgttgactatgcccgacaagcagaagaggcctatggtgcctcccactacccagctgccaacccctctgtaatcgtttgctgctcctcttccgaaaatgatagcggtgtgccctg

SEQ ID NO: 625310 - DNA, 120 bp, Artificial Sequence
  ENSG00000178662_16 (sequence is synthesized)
caatagtttatatcctgaacacaggtccaatcaccctcaagtggaatttcactcatacttgaaaggcccctcccaagaagggtttgtctctgcattgaatggtgacagtcacatttcaga

SEQ ID NO: 625311 - DNA, 120 bp, Artificial Sequence
  ENSG00000178662_17 (sequence is synthesized)
gcatcctgctgaaaattctttgagccttgcagaaaagagcatattgcatgaagagtgcatcaaatcacccgtggttgagacagtccctgtttagtagcttaaattattctaggaccaact

SEQ ID NO: 625312 - DNA, 120 bp, Artificial Sequence
  ENSG00000178662_18 (sequence is synthesized)
cttctcttatttaaggcactgtatttaattggatttcctgggctcatcattgtttaaactgaagaccaagaaaacttggacggtggttaatcttccagactgtattttgttttttccttt

SEQ ID NO: 625313 - DNA, 120 bp, Artificial Sequence
  ENSG00000178662_19 (sequence is synthesized)
ctagccacatgactgtggcattgcacaaatacagtctctgtagggattttaaaagatttcagactgttttgatagaaaaagctaaattttaaaatgcatatctcacagttgcctacctgt

SEQ ID NO: 625314 - DNA, 120 bp, Artificial Sequence
  ENSG00000178662_20 (sequence is synthesized)
caaactgtgtgaaacctgccaatctgtgtagatcagagctccaaattttggattatcgggcctgtgcaagattgttaactaaggctgggaaataataagatttagagtcctaattttcaa

SEQ ID NO: 625315 - DNA, 120 bp, Artificial Sequence
  ENSG00000178662_21 (sequence is synthesized)
tatatctgaagataatgatgactttttaatgtaaaagtaattattgtaagaaaaagatttaattgttccatgtgtattttatttatggtagtttagaagacatgttttgatgaaaatgaa

SEQ ID NO: 625316 - DNA, 120 bp, Artificial Sequence
  ENSG00000178662_22 (sequence is synthesized)
cagccgcatgttcattcaagctgaagatgcatagctagttccacagagcatgcccacatggattgcatctggaatccattcacatttttatgatcatgactgatcagatttgcaaattct

SEQ ID NO: 625317 - DNA, 120 bp, Artificial Sequence
  ENSG00000178662_23 (sequence is synthesized)
taagggtgaaataggcctatttttgctattttggacaaataaatgattctatatgtgcaggtccttacacagttttctctaaagttaagagttaggacaatcctctggggagagtctagt

SEQ ID NO: 625318 - DNA, 120 bp, Artificial Sequence
  ENSG00000178662_24 (sequence is synthesized)
tcactgccctccctcagctgactccagagatggaggtagaaggaattgcctttcttttttaaacagcatcatcttgattcttagcttggacagcacctttaagctctaccccctacatca

SEQ ID NO: 625319 - DNA, 120 bp, Artificial Sequence
  ENSG00000178662_25 (sequence is synthesized)
aaatgcactttagtgccccttcacggtacctcgtgtggggtggggactgagaactctttgagatgaaaaaatttaaaaaaaaattaaaaagatctttaactattataaggttcatataat

SEQ ID NO: 625320 - DNA, 120 bp, Artificial Sequence
  ENSG00000178662_26 (sequence is synthesized)
taatatagaggaatcatccaatgatacttatgaagggaaaatgacctattttccttcaccactctgaggacctaactcagtaaatgcagaggaggctgaggaaacatggaagagacacga

SEQ ID NO: 625321 - DNA, 120 bp, Artificial Sequence
  ENSG00000178662_27 (sequence is synthesized)
cctcagcaaccagccttttctccagcgtgatcaatccatctctacaaaatcagtgtataatgagatttccacttagtgactagctgattgaaggggggcctctacccaaatactcaacta

SEQ ID NO: 625322 - DNA, 120 bp, Artificial Sequence
  ENSG00000178662_28 (sequence is synthesized)
ggcctttcttttctgaagcattttgatttgtcttgcctgggacaactagcagaacagtccagaatgcattgcatactttctaattacctcacattctcttattaaagagaacagatagaa

SEQ ID NO: 625323 - DNA, 120 bp, Artificial Sequence
  ENSG00000178662_29 (sequence is synthesized)
ataaaacatgcactccccacctttagattacctgcacttggttcgtcggaggacttctaggatcccgtttccctgtaaattaatttaggtaactaaatagtgtaattctgcctttttttt

SEQ ID NO: 625324 - DNA, 120 bp, Artificial Sequence
  ENSG00000178662_30 (sequence is synthesized)
tccaatgcaatatgactatgctaaacctgtttcatatttttgaccttctattgttatatcacttcacatgttttataactatttgaaatgcggacatgacttgctattcagtgactgcat

SEQ ID NO: 625325 - DNA, 120 bp, Artificial Sequence
  ENSG00000178662_31 (sequence is synthesized)
gcatcgctacttattttttatgtcttttagacttgggtgtttagaattatggatataaatatattgtagatctcaatttctaaaaaaaatattttatttaattgaacttaaaaatgcttg

SEQ ID NO: 625326 - DNA, 120 bp, Artificial Sequence
  ENSG00000178662_32 (sequence is synthesized)
agagaaagtcctccagtggaaaagtttctactaaactttgttttggggaaaaaatgtttacttggcagctcttccactgtgcagttggtttctgccccttctcttcccccctacattggg

SEQ ID NO: 625327 - DNA, 120 bp, Artificial Sequence
  ENSG00000178662_33 (sequence is synthesized)
ccaaatttataactcttaatattaacattaaaagagctttgggtttgtctttatgtaggttgcagtaatgagagcagggttgttccttttgaatgattggccctttgggctaatcagaat

SEQ ID NO: 625328 - DNA, 120 bp, Artificial Sequence
  ENSG00000178662_34 (sequence is synthesized)
tgtgtgtgtgtatatatatatatcccatgttgtctgcaaagtgacagtttttagtgcttaatctccaaaattttccccctactgatacaatctaaagagcacaggcccaaagagaaaatg

SEQ ID NO: 625329 - DNA, 120 bp, Artificial Sequence
  ENSG00000178662_35 (sequence is synthesized)
acaagaggctattgttccttcattcaagcacatgaaaggatcatgtgtactgtatttgctggaccattacaagctcttgaaggatctgcttgtgaagtactctgaggttattcttggaac

SEQ ID NO: 625330 - DNA, 120 bp, Artificial Sequence
  ENSG00000178662_36 (sequence is synthesized)
acagagtgtgggagagtggggaagagccagctccagcctgagcaaagctgaagggtagaatgacagtccagtttctgaaaagagatattttaattttagttcagctttattttcctaaga

SEQ ID NO: 625331 - DNA, 120 bp, Artificial Sequence
  ENSG00000178662_37 (sequence is synthesized)
cgatatgaagcctacttttttatttttggctaggtctttgttttctagctttgtttccaaaaggatgcttaagaaaacagagtttttttcccctatccatttatctagggtagaaagtca

SEQ ID NO: 625332 - DNA, 120 bp, Artificial Sequence
  ENSG00000178662_38 (sequence is synthesized)
ctgccctgtgagaagaattacccttccaatcatgacagcttctattccaacttttcatatacctgactaacctgtaaacatatcccacaaaccacatacacaggctacctattaaaactc

SEQ ID NO: 625333 - DNA, 120 bp, Artificial Sequence
  ENSG00000178662_39 (sequence is synthesized)
tcccatatacctaacacatacacatgcacacacatacaaaatatatacatatcacacacttagagaatgacagatttcaggcaatggccaatagtcagtattgagtttttctaaccccag

SEQ ID NO: 625334 - DNA, 120 bp, Artificial Sequence
  ENSG00000178662_40 (sequence is synthesized)
aatctggttgggctttatgatctaaaaaaatgtggtttagaaaagaggataattggtagagctgtagtttgaaaatatcaggtcaaagttgcaaacatacttatgatggaatcatttcat

SEQ ID NO: 625335 - DNA, 120 bp, Artificial Sequence
  ENSG00000178662_41 (sequence is synthesized)
ttttagttcctttcccagaaaagctgagagagcacactgttccagctgacttttttttccattaatagccgttctattcaacaaagagctgcccacatgccaggaaagtgctacagtcct

SEQ ID NO: 625336 - DNA, 120 bp, Artificial Sequence
  ENSG00000178662_42 (sequence is synthesized)
tctaagcttttaaaaatggggatcaagctacatgcagccagttggaatacttaagatctttatgccaagacacaataacctgacctgcagctgttgtattgcctccatagtatatctagc

SEQ ID NO: 625337 - DNA, 120 bp, Artificial Sequence
  ENSG00000178662_43 (sequence is synthesized)
caaactgtagtctttgacacacaactttttagtcattcactatcaattgcaaagcttcatgctccagccctggctattctagtaccagtcctatacctttaaatgggacttaattcccag

SEQ ID NO: 625338 - DNA, 120 bp, Artificial Sequence
  ENSG00000178662_44 (sequence is synthesized)
ttataatcctggccgaattgatttgaaagtcaagtggctgaagcagcttgcatctcctttgtcattcccaatttcctttgggagaagtcaatgaaagagatttacttaagtttttcctcc

SEQ ID NO: 625339 - DNA, 120 bp, Artificial Sequence
  ENSG00000178662_45 (sequence is synthesized)
ttatctcttgatcattaattattaagacatgggtaaaattcatttgtctcatgtcttttggttgattgaataatatagttactttttgaaagcccatcatttctttgtgataaaaccatt

SEQ ID NO: 625340 - DNA, 120 bp, Artificial Sequence
  ENSG00000178662_46 (sequence is synthesized)
ttctcaatgtgacagccacatgtaaaatgtgaaactaatgtttcttagtatgtttaaaatcttcacaatcatatatggccctgcaatactccctgaattccttccctccaaaaaaaaact

SEQ ID NO: 625341 - DNA, 120 bp, Artificial Sequence
  ENSG00000178662_47 (sequence is synthesized)
atgagttgcaaaaacactagttacgaattaatcaagaagcaaagagagtatgttaagtggctatgttctttaaaattttacattctaatagatgacttctaggcaaaattttggtatgat

SEQ ID NO: 625342 - DNA, 120 bp, Artificial Sequence
  ENSG00000178662_48 (sequence is synthesized)
tttactttctataacttgctaatcactgtttcttttatttcaatttttgatattgttgcacaagtttatgactctttggtctttatattcaaaatttattaagtatcaattctttctttc

SEQ ID NO: 625343 - DNA, 120 bp, Artificial Sequence
  ENSG00000178662_49 (sequence is synthesized)
aacaaatatgtactgaacacatgctgtgttagaacaactgtcttgggtagtaaaaagaggggaacactacaaattataatggataatattaatgaagggtggcatgaaataatcaagctt

SEQ ID NO: 625344 - DNA, 120 bp, Artificial Sequence
  ENSG00000178662_50 (sequence is synthesized)
tctcaaatcctcttaatatgtgattttatcaagtgacattagaaaaactgacatcagttcttgtctaattatatgtgagctgcaactaaaagatgcttcctttacctaaattatagaact

SEQ ID NO: 625345 - DNA, 120 bp, Artificial Sequence
  ENSG00000178662_51 (sequence is synthesized)
cactggatcgcccttcatctctctccctccatctgaaatgtatgaattaaatcaggactcagctaggactgaatcaaatgaaaaagaaattttcgattaattgcttcttcaatgttagac

SEQ ID NO: 625346 - DNA, 120 bp, Artificial Sequence
  ENSG00000178662_52 (sequence is synthesized)
ctatataagtgatgctaaatttacaccagcaaactcctatcagacagtttcaaggaggatttgactcatgcataacccaggaaacatttcaggaaacttttaagacaacagtgtggaaca

SEQ ID NO: 625347 - DNA, 120 bp, Artificial Sequence
  ENSG00000178662_53 (sequence is synthesized)
caatcactcttacttctatttataaaaagcctatcaaaacagcaaaatcctgttgcaaattccaaagacatcactttgcagcaggtggaaaacagagaggttgttagactccatcacttt

SEQ ID NO: 625348 - DNA, 120 bp, Artificial Sequence
  ENSG00000178662_54 (sequence is synthesized)
cagctggagttacaaaccatcaaattagcaggtggaaaatttatattctcagaagccaacaggagactgcctttttaaaaggtgtcatgaagccttctatttctccaaacaactcaatat

SEQ ID NO: 625349 - DNA, 120 bp, Artificial Sequence
  ENSG00000178662_55 (sequence is synthesized)
ttctctttaaaatggcatctctgttccttattctcttgatgacagtttgcagtgccattatagccagtgtattaaataccaggctttaatgggaagcacctttgtgctttcaaaggcaag

SEQ ID NO: 625350 - DNA, 120 bp, Artificial Sequence
  ENSG00000178662_56 (sequence is synthesized)
acttgtctgtaattttaaattagaactgttggttgtattcttaccacaaccaaaacccaaagtttaaaggcttgattactctatattaggtctaatatgaattttcaccttctgattgca

SEQ ID NO: 625351 - DNA, 120 bp, Artificial Sequence
  ENSG00000178662_57 (sequence is synthesized)
ttactttttctgaaatctgctaactagtgctggaataacaaaaatgcctaagccaaaatgctgtagctctgcaccaacagcacagctcatcagatgttttctatagtagtaaagaatttg

SEQ ID NO: 625352 - DNA, 120 bp, Artificial Sequence
  ENSG00000178662_58 (sequence is synthesized)
attgacttaattgaatatcagcaattttaatacccactagaattatggaagtatcagagtggaagtgaggacgcaataaaagcttaataagtggtggtgtcttctaggaattatgaaaaa

SEQ ID NO: 625353 - DNA, 120 bp, Artificial Sequence
  ENSG00000178662_59 (sequence is synthesized)
aaaagctcagcagagctaagccagatcttattacatcataaagactagagttacaaatggcagccccaaacctagaaggggcagttacaatgtggacaccctttcagcccagttggtgct

SEQ ID NO: 625354 - DNA, 120 bp, Artificial Sequence
  ENSG00000178662_60 (sequence is synthesized)
cacatctgctgaccaacattcatatcaattacatttttacagtctgtaagtcatttgatgctttagaaaataaaaacacacacctacagcattctaaagaaactattttgttaaaaaatt

SEQ ID NO: 625355 - DNA, 120 bp, Artificial Sequence
  ENSG00000178662_61 (sequence is synthesized)
taaacacattttatattaaaataagtgatcaatgactttcatgattgtcaaaagtaaaaagtgcagacatttaaaaaagctcttctttcacattttacctaccaaatctagatattcaac

SEQ ID NO: 625356 - DNA, 120 bp, Artificial Sequence
  ENSG00000178662_62 (sequence is synthesized)
gtgagtccttaaaacagtcacttctaaattttattttgactcctttcttggctttttcaaactggaccatgagacccccttcctaaacaatgcagttgttttgttttattctttttttcc

SEQ ID NO: 625357 - DNA, 120 bp, Artificial Sequence
  ENSG00000178662_63 (sequence is synthesized)
agaaattcaagctgaaacatttgatatgacctgtgttttacctggtgatcagttctcaggctagtctaagtctgtgctgtcttggcatgccttgggtttcctatcctgagagtggtaatg

SEQ ID NO: 625358 - DNA, 120 bp, Artificial Sequence
  ENSG00000178662_64 (sequence is synthesized)
ccagtagaatgatgggaaccaggagagtgaatacgaccagattcaaagcctaaaacaatatgtttcagtttacttttatatgtagattttttaaatattcacatctagcctggaatttta

SEQ ID NO: 625359 - DNA, 120 bp, Artificial Sequence
  ENSG00000178662_65 (sequence is synthesized)
gtaaatacagatacttgttgtatccatgggaaatgaggtcatttcaaagatgtaagtcacgttggtgactactttcttttacttgtgataaatatatcactatacagggtaattgctttt

SEQ ID NO: 625360 - DNA, 120 bp, Artificial Sequence
  ENSG00000178662_66 (sequence is synthesized)
ataaatttgatcctttgcattggcttataattcaagaaatgtcaacttcactgtgtcactttatgtcatctctcataaaagtttctggcaggactaaagtttcaaaggaatgtgatagaa

SEQ ID NO: 625361 - DNA, 120 bp, Artificial Sequence
  ENSG00000178662_67 (sequence is synthesized)
tttattttggataacatttgtattcagcatgctaatgatgtaactcctctctttatcattaccacggtgatagttaagttcattcgttaactcattttagtgacatgtgaggccatttaa

SEQ ID NO: 625362 - DNA, 120 bp, Artificial Sequence
  ENSG00000178662_68 (sequence is synthesized)
atatttttaagataatgtatattgattagaaagggttagaaggagacaaatttatggtagaaattagccttgccattgtctaagttaatttatgtgacctgattgaacagttttagttgt

SEQ ID NO: 625363 - DNA, 120 bp, Artificial Sequence
  ENSG00000178662_69 (sequence is synthesized)
aactttagagtagcttctttgttagaggatctctttcctttctcttttggttttctcccaatatttttatctgtcttgggattatcttaaaaggtatttattaatgagtatttggaagaa

SEQ ID NO: 625364 - DNA, 120 bp, Artificial Sequence
  ENSG00000178662_70 (sequence is synthesized)
aattgacctagaaaatgtctcttttaaatttatctaggtacttgtatcaccagagaccttcatcaagtcctactgccacactggataaggccactacccccgacccttcttgtcagggac

SEQ ID NO: 625365 - DNA, 120 bp, Artificial Sequence
  ENSG00000178662_71 (sequence is synthesized)
atggcttcctaataatggttttgctgttgtctctacataggggacctatggaaaaggagtttgaaatttctacctttgtagtacattgtatccaattttgttttgctcctccttttcatg

SEQ ID NO: 625366 - DNA, 120 bp, Artificial Sequence
  ENSG00000178662_72 (sequence is synthesized)
tggtcaccaagcttttttccttagccattaaaaaagccacccctctttaaaacaaatttaaagatctatatacatttttgcaactttatttaataaaaaagagaagaaaaaataaaatct

SEQ ID NO: 625367 - DNA, 120 bp, Artificial Sequence
  ENSG00000178662_73 (sequence is synthesized)
aaatctcaattaccctaaagtggaaaaacctaagtatctaacctaggaacttgttgcctggtggtggttgttgttgttgttgttttttaatttatttagtgttgatccttgagttattta

SEQ ID NO: 625368 - DNA, 120 bp, Artificial Sequence
  ENSG00000178662_74 (sequence is synthesized)
atggtatccaaatgatatctgaaagtgattgattttaagatgtaatagttggcaaagtcatttcatttgtgtctcaaacaaataaagcccactgccatgggttaccatctgaaccctgat

SEQ ID NO: 625369 - DNA, 120 bp, Artificial Sequence
  ENSG00000178662_75 (sequence is synthesized)
tcattaggcactagtcatgccaaatggggatctcagaatagtttaatcttttcaaagatactcacaatggccaactgtgtgtgaatactggaaagtttgagattcttctatattcttcaa

SEQ ID NO: 625370 - DNA, 120 bp, Artificial Sequence
  ENSG00000178662_76 (sequence is synthesized)
atttatggtcctgagactaggagggatctccagaggtcatatggctcatcgatctaccaccagggaagactgtcacttaggcatgcccaacaggagagatcgccatctattcttaacatc

SEQ ID NO: 625371 - DNA, 120 bp, Artificial Sequence
  ENSG00000178662_77 (sequence is synthesized)
tctagggaaggcagtttccttggcaacacaattcagctctcttaggttttctcacaataagaaaatatcttggccagtctttgagggttaggcacctggcaacagttgtggtgatttggg

SEQ ID NO: 625372 - DNA, 120 bp, Artificial Sequence
  ENSG00000178662_78 (sequence is synthesized)
ccattgtactaggggattcaagggaagttgggtttccccctacatttggtgattattacattaatatatgatcattccataagtctcctaagaaatcagatttttaaagaaagacacgga

SEQ ID NO: 625373 - DNA, 120 bp, Artificial Sequence
  ENSG00000178662_79 (sequence is synthesized)
ttcagagacaatggtctgtaacatgaccaacttttgacaaatatggctgtactaggttttcatttttgctgttgttgttgtttgtttttgtgattgctcttatgtcggtaggtaatgtca

SEQ ID NO: 625374 - DNA, 120 bp, Artificial Sequence
  ENSG00000178662_80 (sequence is synthesized)
ggaaaagtgactgtttcagatccccagtacaaacatcagaactaggatcaaatgacttgacttttaagctgttccattttctaagaagttacaattacaaaaagtaagcattttctacat

SEQ ID NO: 625375 - DNA, 120 bp, Artificial Sequence
  ENSG00000178662_81 (sequence is synthesized)
tcttacttctaagtaatgaccttctcattaatctttccttggcttaaaatgacaaataagaatccaaagtttttccactcctcctgtgggagataggaatagttgtgaagagtctgatgg

SEQ ID NO: 625376 - DNA, 120 bp, Artificial Sequence
  ENSG00000178662_82 (sequence is synthesized)
aataaaatgactccagagatttacacagccaccatttgatcccagcctttgtccttgtgttatttaaacaatggcttcctgctttctcaggggtcaggaaaatgatttaaaaatttgtct

SEQ ID NO: 625377 - DNA, 120 bp, Artificial Sequence
  ENSG00000178662_83 (sequence is synthesized)
tcttgacaaggcctgaaaacgaagggaggtgtcgtggagaaatggtgatttttctggttacatcacttgattcaagcactccctggagctttcaaagccttttttatctgctcagagttg

SEQ ID NO: 625378 - DNA, 120 bp, Artificial Sequence
  ENSG00000178662_84 (sequence is synthesized)
acacccaactcagagtcagaactcaccagaagatgaggaacacccccgaaatcaatgtttcctttctccatgggatttttttcaatcttggtacagctgcatatctcccaaactcggatg

SEQ ID NO: 625379 - DNA, 120 bp, Artificial Sequence
  ENSG00000178662_85 (sequence is synthesized)
ctcttgtgaaatgacagccacatcagtgtggttactccccacaaataacactagggggaaatgaccttttttatttaaaaaaaaaaaaaaggctaatgctatagaatgatcatgtaaaga

SEQ ID NO: 625380 - DNA, 120 bp, Artificial Sequence
  ENSG00000178662_86 (sequence is synthesized)
atgttgaataaaatttggcccatgttttaattgactctaggcacctctattgaaataagtctgaggcatagtttgtgaaacatgtttcaaaagtgtttgatgtataataaatgctagaaa

SEQ ID NO: 625381 - DNA, 120 bp, Artificial Sequence
  ENSG00000178662_87 (sequence is synthesized)
tttacagtacagaaatagtaaaaaaataaaataaaaataaacctgtagattacagctctgttcctaagaacctcagcctttattgtgtcttagtaaagttgatctgctttatttttagtt

SEQ ID NO: 625382 - DNA, 120 bp, Artificial Sequence
  ENSG00000178662_88 (sequence is synthesized)
tattgaatttctggtgtactagcctcttaagatagaacttttaatacatatgtactggttaatgcctgtttacgcagaaaatggcactttgttctttcagtgtgtttccctcagtgtcac

SEQ ID NO: 625383 - DNA, 120 bp, Artificial Sequence
  ENSG00000178662_89 (sequence is synthesized)
agggtatatcaatttgatagatcatttgacatttgtcaaaaatacgtttcccattttaaaaatatgtataattggttgcatagacatatgtcactttttgcagtgtcttcatcttgatca

SEQ ID NO: 625384 - DNA, 120 bp, Artificial Sequence
  ENSG00000178662_90 (sequence is synthesized)
tagttttagacatcaactatgtctcactttccaactgccatagaaatttggtacatttgcaaattctggtggaatctagtgagctgaatgtattggtagatcaaatgatccaaaggactt

SEQ ID NO: 625385 - DNA, 120 bp, Artificial Sequence
  ENSG00000178662_91 (sequence is synthesized)
gggtgttatccttcagtctgtgttgaaccattcagatattgggaatggtccttacacaagggaagtcttttgagaatatttgttctcttattttttgtttgtttgttgctggcaaaaaaa

SEQ ID NO: 625386 - DNA, 120 bp, Artificial Sequence
  ENSG00000178662_92 (sequence is synthesized)
aaagtaactttaaaaactcagaaaagccactgaactgtattttgtgaccttatgattagttttatctttcaactgatttttattgttacttttactcaatatcaacagtacttcaataga

SEQ ID NO: 625387 - DNA, 120 bp, Artificial Sequence
  ENSG00000178662_93 (sequence is synthesized)
tatttattagttatgttcaatctaatgacttaaaacagttgaaaaggaggaaaatcaactccagtccacacatacagtcatgttacattaagatgtcatgttgtatgtcacacagtttct

SEQ ID NO: 625388 - DNA, 120 bp, Artificial Sequence
  ENSG00000178662_94 (sequence is synthesized)
agattgatttctcttgtgtataagttataacatcaaaaatgccaaagggtatataaaataagctacaataatattcaacagaacttaacctggaccttatgttgtaataatttattcata

SEQ ID NO: 625389 - DNA, 120 bp, Artificial Sequence
  ENSG00000178662_95 (sequence is synthesized)
ttagctgtagtcttctgtatttatattttcagtatttattatgaatgacatggaaattcgtgtatttattgtggctttttattgcagtgtgtatatatatataacaaataagcattttta

SEQ ID NO: 625390 - DNA, 120 bp, Artificial Sequence
  ENSG00000178662_96 (sequence is synthesized)
agtcttatccttaagtttcttttattagtggcacttgtattatgctgtactttttattacatattgtacaatatcttgtccatttgtttgcagcagagtaaaaccggtttctaagttgta

SEQ ID NO: 625391 - DNA, 120 bp, Artificial Sequence
  ENSG00000178662_97 (sequence is synthesized)
ctcagtgaggctgatgccgtgcagcaagcagtaggtaatgagtctttgtgcagagtgaagctcttgttgctgaacaataaagcatatggtacaagcaataaaacacagggctgggaaatt

SEQ ID NO: 625392 - DNA, 120 bp, Artificial Sequence
  ENSG00000178662_98 (sequence is synthesized)
taagaagattcctctgaaccaggaagaactgtgtcttcggtgatgctgacacatatgataaaatgatcatttattttggatcctaatgaataaagagtgcaaggactaagactacagtta

SEQ ID NO: 625393 - DNA, 120 bp, Artificial Sequence
  ENSG00000178662_99 (sequence is synthesized)
tcctgctctcccgtgattcaggtagcctggcagaaccgcagttccacaattccttacccagcattccgtttcagctgctggaggactgcctgagccttatgcaaatgagaccagctcgga

SEQ ID NO: 625394 - DNA, 120 bp, Artificial Sequence
  ENSG00000178662_100 (sequence is synthesized)
ggctttgactgcagaagcgagaggagggggcagaagggagttcaaaggtcacagggctggtggaaagctggatcagttgcctgaaaaaaatgtactggggttctctgcagcagtgttttg

SEQ ID NO: 625395 - DNA, 120 bp, Artificial Sequence
  ENSG00000178662_101 (sequence is synthesized)
atgtaaaatggatgaatgtatgaattaatgcataaatcaataaatgaacccagatgaataatatgccaaagttgtttctgtatatctctgtgatacaaataaacatatgctcattctatt

SEQ ID NO: 625396 - DNA, 120 bp, Artificial Sequence
  ENSG00000178665_0 (sequence is synthesized)
agcgtcttgcgccgccattgcggggaggctgtcctcagagcaggtctggcgcgccggtggctggaccggccccaggagcccagtcaccgggcgtcattggctcaggctgcggggccctcg

SEQ ID NO: 625397 - DNA, 120 bp, Artificial Sequence
  ENSG00000178665_1 (sequence is synthesized)
ggcggcggcggcggcggcggcggcggcgtcagggggcggagcctgccgaagcgccctttgtctgcggaggtcaacatacctggcctaaggaggcaggattgagtgactctcactcaccac

SEQ ID NO: 625398 - DNA, 120 bp, Artificial Sequence
  ENSG00000178665_2 (sequence is synthesized)
ctaaggaggcaggattgagtgactctcactcaccactggtgttgctctttgaaagtggcgcttggcaccagcatgaactccccatcctcagcaatcccatcaggtgttttgggtcttcaa

SEQ ID NO: 625399 - DNA, 120 bp, Artificial Sequence
  ENSG00000178665_3 (sequence is synthesized)
cctaaaattctatcttacaagatccttgccaggatgcagatttgaatactatagtgaagtctgtacatgaagaaatgatgcttttagggaggaaaaaaaaaggtaataacaaccttcaag

SEQ ID NO: 625400 - DNA, 120 bp, Artificial Sequence
  ENSG00000178665_4 (sequence is synthesized)
agccccttcatctcaactcggcataaacaaggcaagattctgagagtggccgcccctggaagcagaaattattcttgtggctatccattggctcctgaggctctaatcagagatggggca

SEQ ID NO: 625401 - DNA, 120 bp, Artificial Sequence
  ENSG00000178665_5 (sequence is synthesized)
cctttagtaccaggggagtgactgttgcccataaggtactggacatcaactttcaagagcagccccagctccttaagctgctggtcctggtgcatctgctgactttcatgtagaagatag

SEQ ID NO: 625402 - DNA, 120 bp, Artificial Sequence
  ENSG00000178665_6 (sequence is synthesized)
cagagctttggcgacattacaacataagaactgcagagaggtgtaatcccagtggaagactgaatcgagagactcaaaaaggaagttatgccttctcagaatgctgttttttctcaggag

SEQ ID NO: 625403 - DNA, 120 bp, Artificial Sequence
  ENSG00000178665_7 (sequence is synthesized)
gggaacatggaggaggaagaaatgaatgatggctcacagatggtgagatctcaggaatcactgacgtttcaggatgtggccgtggacttcaccagagaggagtgggaccagctgtaccct

SEQ ID NO: 625404 - DNA, 120 bp, Artificial Sequence
  ENSG00000178665_8 (sequence is synthesized)
gcccaaaagaacctctatcgagacgtgatgctggagaactacaggaatctagttgcactggggtatcagctttgtaagccagaggtaatcgcgcagttggagctagaggaagaatgggtg

SEQ ID NO: 625405 - DNA, 120 bp, Artificial Sequence
  ENSG00000178665_9 (sequence is synthesized)
atagaaagagacagcctgctggatactcatccagatggagaaaacagacccgaaatcaaaaagtcaaccacaagccagaatatttctgatgaaaatcaaacccatgagatgataatggag

SEQ ID NO: 625406 - DNA, 120 bp, Artificial Sequence
  ENSG00000178665_10 (sequence is synthesized)
agactcgcaggagacagcttctggtactccatcctaggaggactctgggattttgattaccatccagagtttaaccaagaaaaccacaagagatatttaggacaagtaactttgacccac

SEQ ID NO: 625407 - DNA, 120 bp, Artificial Sequence
  ENSG00000178665_11 (sequence is synthesized)
aaaaagatcacacaggagagaagccttgagtgtaataaatttgcagaaaactgtaatctgaactcaaaccttatgcagcagagaattccttccattaaaatacccctgaattctgacaca

SEQ ID NO: 625408 - DNA, 120 bp, Artificial Sequence
  ENSG00000178665_12 (sequence is synthesized)
cagggaaacagcatcaaacataattcagacttgatttactatcagggaaattatgtaagagagactccctatgaatatagtgagtgtggaaaaatcttcaatcaacatattcttcttact

SEQ ID NO: 625409 - DNA, 120 bp, Artificial Sequence
  ENSG00000178665_13 (sequence is synthesized)
gatcatattcatactgcagagaaacccagtgagtgtgggaaggccttcagccacacctcatctcttagccagcctcagatgttgcttacaggagagaagccctataagtgtgatgaatgt

SEQ ID NO: 625410 - DNA, 120 bp, Artificial Sequence
  ENSG00000178665_14 (sequence is synthesized)
ggaaaaagattcagccagaggatacatctcattcaacatcagagaattcacacaggagaaaagccttttatatgcaatggatgtgggaaagccttccgtcagcattcatcctttactcaa

SEQ ID NO: 625411 - DNA, 120 bp, Artificial Sequence
  ENSG00000178665_15 (sequence is synthesized)
catctgaggattcatactggagaaaagccctataaatgtaatcaatgtggtaaagcttttagccgcatcacatcccttactgaacatcatagacttcataccggagagaaaccttacgaa

SEQ ID NO: 625412 - DNA, 120 bp, Artificial Sequence
  ENSG00000178665_16 (sequence is synthesized)
tgtggtttctgtggcaaagccttcagtcagaggacacatctgaatcaacatgaaagaactcatacaggagagaaaccctataaatgtaatgaatgcgggaaagcctttagccagagtgca

SEQ ID NO: 625413 - DNA, 120 bp, Artificial Sequence
  ENSG00000178665_17 (sequence is synthesized)
caccttaatcaacacaggaaaatccatactcgggagaaattatgtgaatataaatgtgagcaaactgttcgccacagtccttcatttagcagcacataacttatggtgggggaaatcaga

SEQ ID NO: 625414 - DNA, 120 bp, Artificial Sequence
  ENSG00000178665_18 (sequence is synthesized)
tggtcagacctttttatcccattcaatatcaaattattcatagtggagagaaagcttatacataaatttttgttttgttttgtttttgagactgagtctcactctgtcacccaggctgaa

SEQ ID NO: 625415 - DNA, 120 bp, Artificial Sequence
  ENSG00000178665_19 (sequence is synthesized)
aaactttcaatgcgtagaaaccaaattaatttagaccttaaactagcagcatattacattcccaggaggggttataaaaagaaaaaataatttattttacaaatgagattatatttggag

SEQ ID NO: 625416 - DNA, 120 bp, Artificial Sequence
  ENSG00000178665_20 (sequence is synthesized)
aaataatttattttacaaatgagattatatttggagtcatgttccaaatctgatataaaactttttaaaaaatcagaagtccttatccaggcatggtggtgcacacctgcaatcccagct

SEQ ID NO: 625417 - DNA, 80 bp, Artificial Sequence
  ENSG00000178665_21 (sequence is synthesized)
aaaaaaagaaagaaagcctataggcaacaacttgtaattactcacctgtaagttttatggtataaaaccacccaggctgg

SEQ ID NO: 625418 - DNA, 81 bp, Artificial Sequence
  ENSG00000178665_22 (sequence is synthesized)
gcctggctaactttttttttgtattttttagtagagacacggtttcaccatattgactaggctggtctcgaactcctgacc

SEQ ID NO: 625419 - DNA, 79 bp, Artificial Sequence
  ENSG00000178665_23 (sequence is synthesized)
actgcacctggcaggttatggtataaaacttttaaatcagaaattttgattaattaaagacaatgctggctgggggcgg

SEQ ID NO: 625420 - DNA, 75 bp, Artificial Sequence
  ENSG00000178665_24 (sequence is synthesized)
aactgcacctggcaggttatggtataaaacttttaaatcagaaattttgattaattaaagacaatgctggctggg

SEQ ID NO: 625421 - DNA, 77 bp, Artificial Sequence
  ENSG00000178665_25 (sequence is synthesized)
taaaatttaaaaataaaggcgatgctgtagtgcagccagtcacattaacttgaaataaacataaaagaggaatattt

SEQ ID NO: 625422 - DNA, 120 bp, Artificial Sequence
  ENSG00000178665_26 (sequence is synthesized)
agtcacattaacttgaaataaacataaaagaggaatatttcacgaacgtcagttatttgtatgctttctttacagtttttaccatatctagtatttacttaatattctttataaagggat

SEQ ID NO: 625423 - DNA, 120 bp, Artificial Sequence
  ENSG00000178665_27 (sequence is synthesized)
gcaagatttttagccttctcctaggaaatactatttagcatataaaataagttatatgctagttttatatgctaattaaatttattctactcttcatcaaaatagatacataaccttgaa

SEQ ID NO: 625424 - DNA, 120 bp, Artificial Sequence
  ENSG00000178665_28 (sequence is synthesized)
attaaaaatattcgttgatgtccccccaaaaatcttgtgtgccgttgtttgagaaacagtgtgatagtttgtggcaatatcctgtgatgattctttttgcaatcttgacattattttcat

SEQ ID NO: 625425 - DNA, 120 bp, Artificial Sequence
  ENSG00000178665_29 (sequence is synthesized)
caaatgaatcctaggatcactttgagaagagccttgaagaagacttgagggtcctattgatgaactttgaaatattgattcagagaagtctgcttttctattttgttttagctttaaatt

SEQ ID NO: 625426 - DNA, 120 bp, Artificial Sequence
  ENSG00000178665_30 (sequence is synthesized)
tccctgtggcaagtctagattttttttcagttaaaattatttctgctgtatttgtagaacagaagttttgggattttgtaaaataatgaccagagactaagaattcccatgccaccccgt

SEQ ID NO: 625427 - DNA, 120 bp, Artificial Sequence
  ENSG00000178665_31 (sequence is synthesized)
atcactgtggaagatggagaagtgaggaactgtacctgcgggtgagccctggtgccatgttgagggtgggaatcaggagagctgcagtggcttatataaacacctgacgaagtagtctaa

SEQ ID NO: 625428 - DNA, 120 bp, Artificial Sequence
  ENSG00000178665_32 (sequence is synthesized)
gatatgtccccaattcctacctctactactaacattgttttcttggagattaccactaatttccttccagtcaaatccagtggctacaaagccagttaggattgtgttgactttcccttc

SEQ ID NO: 625429 - DNA, 120 bp, Artificial Sequence
  ENSG00000178665_33 (sequence is synthesized)
gatctcggcaaggctgtgactggaggatgcaaagctttgtgactttcaaggcagatcataaatggcagtaagacttctacctcattctgttgggatgcttactctaaacccgaccacctt

SEQ ID NO: 625430 - DNA, 120 bp, Artificial Sequence
  ENSG00000178665_34 (sequence is synthesized)
gtcaggaggaaacccagacagcccatggagaagcccatatggagaggagccaaggcccacagccctagccgagctcccagctgaaagccagtaccaatttgccagccttgaatcactgac

SEQ ID NO: 625431 - DNA, 120 bp, Artificial Sequence
  ENSG00000178665_35 (sequence is synthesized)
agacgtgatgctggagaactacaggaatctagttgcactgggtgaggatggcatccctgtgaaaccggaagccgttcacgtgggtttatttcctgaactagtagaagcctgcaaagtttt

SEQ ID NO: 625432 - DNA, 120 bp, Artificial Sequence
  ENSG00000178665_36 (sequence is synthesized)
tgtgaatatagtttgggctgggatagaagaatgctaatcagttttggagtcaaagacctttgttttctgctctttctcctccaatggaatgtcttgattgagtttgagatgagtggcttt

SEQ ID NO: 625433 - DNA, 120 bp, Artificial Sequence
  ENSG00000178665_37 (sequence is synthesized)
tttgttcccagtacaaactcctaagatgtatgttactcctgtgaatagggtatcagctttgtaagccagaggtaatcgcgcagttggagctagaggaagaatgggtgatagaaagagaca

SEQ ID NO: 625434 - DNA, 120 bp, Artificial Sequence
  ENSG00000178665_38 (sequence is synthesized)
gcctgctggatactcatccaggtaagtgcacactcttgggcactgctacttaatgagggaaaacagccacttctgaaccactcagtggagtgttccaaaaatctccctctgggatataag

SEQ ID NO: 625435 - DNA, 120 bp, Artificial Sequence
  ENSG00000178665_39 (sequence is synthesized)
gaatactaagccttttgaaaaaaatcagttcatattttatatttttctgaatttgaaatggctgtcttattttttctcattgaacagataatatacacttatattgttttaaaaatgcac

SEQ ID NO: 625436 - DNA, 120 bp, Artificial Sequence
  ENSG00000178665_40 (sequence is synthesized)
acaaaccaaaggttattttgaaggtatccatttaaacacccataaatatcttgatattacagatatccacacagcactttctttgtattttttatttacacatcccttatcagtattctt

SEQ ID NO: 625437 - DNA, 120 bp, Artificial Sequence
  ENSG00000178665_41 (sequence is synthesized)
taaatctttcttttccatgagaggtgatccgagaagaaattttttaaaaagctttcttttccatatcaaaaatcttctgccattttaatctatttttcatcttttctttttccttttatc

SEQ ID NO: 625438 - DNA, 120 bp, Artificial Sequence
  ENSG00000178665_42 (sequence is synthesized)
tctctctgtatctccctctgtccctttcctgcattttctttctccttattctcctaaaaatatgtatccctatggactggctgttccactctgcagtaaagtgcttttaagtagtccttc

SEQ ID NO: 625439 - DNA, 120 bp, Artificial Sequence
  ENSG00000178665_43 (sequence is synthesized)
gtgcttttaagtagtccttctgtatcattttcccatttctccatttctagtcccagtatttcacccacattctcctgtcagaattgagattatggctggtcatggtggctcacgcctgta

SEQ ID NO: 625440 - DNA, 120 bp, Artificial Sequence
  ENSG00000178685_0 (sequence is synthesized)
acttttgttttcctgctcccagcagggttaggcttgctgaggggcaggcacaggagtcctggctgagctcatggcctgaggctgcctagcggccacggggaatggttgcaatggcggagg

SEQ ID NO: 625441 - DNA, 120 bp, Artificial Sequence
  ENSG00000178685_1 (sequence is synthesized)
cagaggcaggggtggcagtggaggtccgtggactgccccctgccgtgcccgacgagctgctcactctctactttgaaaaccgccgacgctctggagggggacctgtgttgagctggcaga

SEQ ID NO: 625442 - DNA, 120 bp, Artificial Sequence
  ENSG00000178685_2 (sequence is synthesized)
gactgggctgtgggggcgtcctcaccttcagagagcctgcagacgccgagagggtcttggcccaggcagatcacgaactacatggtgcccagctgagcctgcggccagctccaccacgag

SEQ ID NO: 625443 - DNA, 120 bp, Artificial Sequence
  ENSG00000178685_3 (sequence is synthesized)
cccctgcacgcctgctgctccaaggactgccccctggcaccacgccccagcgcttggagcagcatgtccaggccttgctgcgggcctcggggctcccagtacagccttgctgtgccttgg

SEQ ID NO: 625444 - DNA, 120 bp, Artificial Sequence
  ENSG00000178685_4 (sequence is synthesized)
ccagcccccggccagaccgggctctggtccagttgcccaagcccctttctgaggcagatgtccgtgtcctggaggagcaggcccagaatctgggcctggaggggaccttggtgtccctgg

SEQ ID NO: 625445 - DNA, 120 bp, Artificial Sequence
  ENSG00000178685_5 (sequence is synthesized)
cccgggttccccaggcccgagcggtgcgtgtggtgggggatggtgcctctgtggacctgctgttgctggagttgtacctggagaatgagcgccgcagtggtggggggcccctggaggacc

SEQ ID NO: 625446 - DNA, 120 bp, Artificial Sequence
  ENSG00000178685_6 (sequence is synthesized)
tgcaacgcctacccgggcccctgggcactgttgcctccttccagcagtggcaagtggcagaacgagtgttgcagcaggagcaccggttgcagggctcagagctgagccttgtcccccact

SEQ ID NO: 625447 - DNA, 120 bp, Artificial Sequence
  ENSG00000178685_7 (sequence is synthesized)
acgacatcctggagcccgaggagctggctgagaacaccagtggaggggaccacccgtccacccaggggcctagggctaccaagcatgctctcctgaggaccggagggttggtgacggctc

SEQ ID NO: 625448 - DNA, 120 bp, Artificial Sequence
  ENSG00000178685_8 (sequence is synthesized)
tgcagggtgcagggactgtgacaatgggctctggcgaggaaccagggcagtcaggggcctctctgaggacaggtcccatggtgcagggtagagggattatgacaacaggctctggccagg

SEQ ID NO: 625449 - DNA, 120 bp, Artificial Sequence
  ENSG00000178685_9 (sequence is synthesized)
aaccagggcagtcagggacctctctgaggacaggtcccatggggtctctgggacaggcagagcaagtcagctcgatgcccatggggtctctggaacatgaggggctggtaagcctgaggc

SEQ ID NO: 625450 - DNA, 120 bp, Artificial Sequence
  ENSG00000178685_10 (sequence is synthesized)
ctgtggggttgcaggaacaggaggggcccatgagcctggggcctgtggggtctgcaggcccagtggagacctctaaggggttgctggggcaggagggcctggtggaaattgccatggact

SEQ ID NO: 625451 - DNA, 120 bp, Artificial Sequence
  ENSG00000178685_11 (sequence is synthesized)
caccagagcaagaggggctggtgggtcccatggagatcaccatggggtctctggagaaggcagggcctgtgagcccaggatgtgtgaagctggcagggcaggagggcctggtggagatgg

SEQ ID NO: 625452 - DNA, 120 bp, Artificial Sequence
  ENSG00000178685_12 (sequence is synthesized)
tgctattgatggagccaggggcgatgcgcttcctgcagctctaccatgaggaccttcttgcgggcctgggagacgtcgctctcttgccacttgaaggaccggatatgactggctttcggc

SEQ ID NO: 625453 - DNA, 120 bp, Artificial Sequence
  ENSG00000178685_13 (sequence is synthesized)
tctgtggagcccaggcttcctgccaggcggctgaggagtttctgcggagcctgctgggcagcattagctgccatgtgttgtgcctggagcacccgggcagcgccaggtttctcctgggcc

SEQ ID NO: 625454 - DNA, 120 bp, Artificial Sequence
  ENSG00000178685_14 (sequence is synthesized)
gctggaggctcagttccagtgtgtctttgggacagagcgcctggccacagccacgttggacacaggccttgaagaggtggaccctaccgaggccctcccagtgctccctggcaacgccca

SEQ ID NO: 625455 - DNA, 120 bp, Artificial Sequence
  ENSG00000178685_15 (sequence is synthesized)
caccctgtggaccccagacagtacaggtggtgaccaggaggacgtgagcctggaggaggtccgagaactgctggccaccctggagggcctagacctagacggggaggactggctgcctcg

SEQ ID NO: 625456 - DNA, 120 bp, Artificial Sequence
  ENSG00000178685_16 (sequence is synthesized)
ggagctggaggaggaagggcctcaggagcagccagaggaggaggtgaccccagggcatgaggaggaggagcctgtggcccccagcactgtggcacccaggtggctggaggaggaggccgc

SEQ ID NO: 625457 - DNA, 120 bp, Artificial Sequence
  ENSG00000178685_17 (sequence is synthesized)
tctgcagctggccctccaccggtcactggagcctcaaggtcaggtggctgagcaggaggaggctgctgccctgcggcaagccctaaccctctccctgctggagcagcccccgttggaggc

SEQ ID NO: 625458 - DNA, 120 bp, Artificial Sequence
  ENSG00000178685_18 (sequence is synthesized)
agaagagcccccagatggggggactgatggcaaggcccagctggtggtgcactcggcctttgagcaggatgtggaggagctggaccgggcgctcagggctgccttggaggtccacgtcca

SEQ ID NO: 625459 - DNA, 120 bp, Artificial Sequence
  ENSG00000178685_19 (sequence is synthesized)
ggaggagacggtggggccctggcgccgcacactgcctgcagagctgcgtgctcgcctggagcggtgccatggtgtgagtgttgccctgcgtggtgactgcaccatcctccgtggcttcgg

SEQ ID NO: 625460 - DNA, 120 bp, Artificial Sequence
  ENSG00000178685_20 (sequence is synthesized)
ggcccaccctgcccgtgctgcccgccacttggtggcacttctggctggcccctgggatcagagtttggcctttcccttggcagcttcaggccctaccttggcggggcagacgctgaaggg

SEQ ID NO: 625461 - DNA, 120 bp, Artificial Sequence
  ENSG00000178685_21 (sequence is synthesized)
gccctggaacaacctggagcgtctggcagagaacaccggggagttccaggaggtggtgcgggccttctacgacaccctggacgctgcccgcagcagcatccgcgtcgttcgtgtggagcg

SEQ ID NO: 625462 - DNA, 120 bp, Artificial Sequence
  ENSG00000178685_22 (sequence is synthesized)
cgtgtcgcacccgctgctgcagcagcagtatgagctgtaccgggagcgcctgctgcagcgatgcgagcggcgcccggtggagcaggtgctgtaccacggcacgacggcaccggcagtgcc

SEQ ID NO: 625463 - DNA, 120 bp, Artificial Sequence
  ENSG00000178685_23 (sequence is synthesized)
tgacatctgcgcccacggcttcaaccgcagcttctgcggccgcaacgccacggtctacgggaagggcgtgtatttcgccaggcgcgcctccctgtcggtgcaggaccgctactcgccccc

SEQ ID NO: 625464 - DNA, 120 bp, Artificial Sequence
  ENSG00000178685_24 (sequence is synthesized)
caacgccgatggccataaggcggtgttcgtggcacgggtgctgactggcgactacgggcagggccgccgcggtctgcgggcgccccctctgcggggtcctggccacgtgctcctgcgcta

SEQ ID NO: 625465 - DNA, 120 bp, Artificial Sequence
  ENSG00000178685_25 (sequence is synthesized)
cgacagcgccgtggactgcatctgccagcccagcatcttcgtcatcttccacgacacccaggcgctgcccacccacctcatcacctgcgagcacgtgccccgcgcttcccccgacgaccc

SEQ ID NO: 625466 - DNA, 120 bp, Artificial Sequence
  ENSG00000178685_26 (sequence is synthesized)
ctctgggctcccgggccgctccccagacacttaaccgaaggggccaccctctggcctcctgcttcccaggctcccagctccgcacaggctgatgctccccgcccccaactgtggccgcct

SEQ ID NO: 625467 - DNA, 120 bp, Artificial Sequence
  ENSG00000178685_27 (sequence is synthesized)
gagctgtccccggggacgcccctgcctccctctgcgggctccagaaggcggtgtgggggatggcggtcagcagcggccgaggggggccgggctaggtcccagcctgggccgaccccacca

SEQ ID NO: 625468 - DNA, 120 bp, Artificial Sequence
  ENSG00000178685_28 (sequence is synthesized)
ccaggggtcagcagagcccaggaggcgacaccgcccgcccgccgctcccagacctcgcccgagtcggctctgttgtttgaataaacgtgaacgtgaacccaggcggaagggacccgggaa

SEQ ID NO: 625469 - DNA, 120 bp, Artificial Sequence
  ENSG00000178685_29 (sequence is synthesized)
acttttgttttcctgctcccagcagggttaggcttgctgaggggcaggcacaggagtcctggctgagctcatggcctgaggctgcctagcggccacggggaatgtaagtgctgtatgtgg

SEQ ID NO: 625470 - DNA, 120 bp, Artificial Sequence
  ENSG00000178685_30 (sequence is synthesized)
ggccacccataatgggggagcattgaggacacaccttggaggggcctggggaggggcaggaggggtggaatgggctgtttccctacccacctgatgccccgtcccagggttgcaatggcg

SEQ ID NO: 625471 - DNA, 120 bp, Artificial Sequence
  ENSG00000178685_31 (sequence is synthesized)
gcgcaactccacctgcttctgggaacccagggggaagcaagggaagaccgtgacctttgccccgggctgtggggagccccggagcctgggcccggagaagcgccagggttaggcttgctg

SEQ ID NO: 625472 - DNA, 120 bp, Artificial Sequence
  ENSG00000178685_32 (sequence is synthesized)
agtctgcttgtggtgtgagtggtgcctgtggcaggccctctgcagccagggtcggcgtaatggataacctgtgatgagttccattagagaaaacgtggaaaaagcagggatggatttacc

SEQ ID NO: 625473 - DNA, 120 bp, Artificial Sequence
  ENSG00000178685_33 (sequence is synthesized)
cagccacgttggacacaggccttgaagaggtagagatggagtcccacccctgccctcccctttctcacgcctctgccccaggcctcctctgcccttgcccagaggctagtggtcctgaca

SEQ ID NO: 625474 - DNA, 120 bp, Artificial Sequence
  ENSG00000178685_34 (sequence is synthesized)
cctgggagccctcagcacatcctgtggccctcacttgacctcaccccctgccctgctctgtgctcccatctgtctactgacccatcttaggcccaccctgtaccctaaaaacttgctccc

SEQ ID NO: 625475 - DNA, 120 bp, Artificial Sequence
  ENSG00000178685_35 (sequence is synthesized)
attaccttgtcaccttctgaggttacttgtgacgatgccaatgatggtgtgagatggggaggtgcaggcaggacagaaagctgcaggaatgggcaggcaagacctgaggcgggaggaagg

SEQ ID NO: 625476 - DNA, 120 bp, Artificial Sequence
  ENSG00000178685_36 (sequence is synthesized)
tgtgggggcgtcctcaccttcagagagcctgcaggtgagagggctggctgaagggacagcctgggtgccctgatattctaatgcctgacatcctgccccgcccctgcccacagacgccga

SEQ ID NO: 625477 - DNA, 120 bp, Artificial Sequence
  ENSG00000178685_37 (sequence is synthesized)
ttctgaggcaggtgagaggcagggttggggttgaggtgctggctaggggggattccctgagctgacctgcacataccccacagatgtccgtgtcctggaggagcaggcccagaatctggg

SEQ ID NO: 625478 - DNA, 120 bp, Artificial Sequence
  ENSG00000178685_38 (sequence is synthesized)
ggacccctcccgctgcgccgccttgcgtgttcctcttcgctccggccagaggcccgcctctcactgtctgccgaggggtggggtcgggcggtgggcgctgaagacccctggaggcagaag

SEQ ID NO: 625479 - DNA, 120 bp, Artificial Sequence
  ENSG00000178685_39 (sequence is synthesized)
tctggtctggccaatttgactggccgttcggtagttaagaaatttattcctaaatgcgggatttgctgaagctgcccgggactgaccgtccgttctcggccttaaaacccgacgttcact

SEQ ID NO: 625480 - DNA, 120 bp, Artificial Sequence
  ENSG00000178685_40 (sequence is synthesized)
tggtttaattgccccatttgctctgtcagcccaaactctgccaggcctgctactagagacccttttttatttttttaattcttgtggatacatagtaggtgtatatttacgggctacatg

SEQ ID NO: 625481 - DNA, 120 bp, Artificial Sequence
  ENSG00000178685_41 (sequence is synthesized)
ggatgttttgatacaggcatgccatggataataatcacatcaagcagggttaggcttgctgaggggcaggcacaggagtcctggctgagctcatggcctgaggctgcctagcggccacgg

SEQ ID NO: 625482 - DNA, 120 bp, Artificial Sequence
  ENSG00000178685_42 (sequence is synthesized)
gttttcctgctcccagcagggttaggcttgctgaggggcaggcacaggagtcctggctgagctcatggcctgaggctgcctagcggccacggggaatacgccgagagggtcttggcccag

SEQ ID NO: 625483 - DNA, 120 bp, Artificial Sequence
  ENSG00000178685_43 (sequence is synthesized)
gatttggggcttgggtcgtttctcacaagcaaccggaggcctgcgccgctgccggcgtctcccgggtgggagctcagcgcggaggctggggtctcggccggggacgtgtggggtgtgccc

SEQ ID NO: 625484 - DNA, 120 bp, Artificial Sequence
  ENSG00000178685_44 (sequence is synthesized)
ggaccctcccctccgcatcccgccccttaagcagctttaaggggccggagccggcggctatttctatcccaggaaatccccgggccatctgtgaccaacaaaggcccgagcccccccacc

SEQ ID NO: 625485 - DNA, 120 bp, Artificial Sequence
  ENSG00000178685_45 (sequence is synthesized)
agacaaggaacagtggaacagttggcttgacgacagcgtcgggacccagccctgcgcaactccacctgcttctgggaacccagggggaagcaagggaagaccgtgacctttgccccgggc

SEQ ID NO: 625486 - DNA, 120 bp, Artificial Sequence
  ENSG00000178685_46 (sequence is synthesized)
cagtccccacttccctcctcactctcttgggagcgaggcctcttaccattgttctggcgtgaggaaaggcctgctgttgcctcaccaagcccactcgtgaacccgctgatgccgagcccg

SEQ ID NO: 625487 - DNA, 120 bp, Artificial Sequence
  ENSG00000178685_47 (sequence is synthesized)
cctgcctgagtcttgatcgctgacttgagctcgtgattctcccgaatgagccgcaccaacttcttcagttcctcattttcccgcaccagcctctctatctgatgccgaagcccttcataa

SEQ ID NO: 625488 - DNA, 120 bp, Artificial Sequence
  ENSG00000178685_48 (sequence is synthesized)
atgctcagcacctggcaggtgtgagggaccaggagcagggttgagaaggttgctgggggcgttgaaggccagccttggccgggggcgggcctggagacccagcactttgtgtgcagaggg

SEQ ID NO: 625489 - DNA, 120 bp, Artificial Sequence
  ENSG00000178685_49 (sequence is synthesized)
tgttttgatacaggcatgccatggataataatcacatcaagggttaggcttgctgaggggcaggcacaggagtcctggctgagctcatggcctgaggctgcctagcggccacggggaatg

SEQ ID NO: 625490 - DNA, 120 bp, Artificial Sequence
  ENSG00000178690_0 (sequence is synthesized)
gtactgatgcatcatagttgacttccaccagtgttttaattgtttcatggttgcagatataaagggcaatgaacaaattgaaaaatattcttggagagaagcttgtgatactggcagctc

SEQ ID NO: 625491 - DNA, 120 bp, Artificial Sequence
  ENSG00000178690_1 (sequence is synthesized)
aagaatggacagaaagcatggaaaatacatattgaacgttgagcactctgaaaaccagccgccaatcacacatccaaatgaccaagaggctcacagttccatatgctggtgtctaccttc

SEQ ID NO: 625492 - DNA, 120 bp, Artificial Sequence
  ENSG00000178690_2 (sequence is synthesized)
aaatgatataaccagtgatgtctctcccaacttaactggggtctgcgtgaacccaggaatccttgcacattcaagatgtctacagtcagaatcctgtaacacacaggtaaaagaatattg

SEQ ID NO: 625493 - DNA, 120 bp, Artificial Sequence
  ENSG00000178690_3 (sequence is synthesized)
ccgcaatgactggtctatgtggaaagtcttcctggcttgtctcttagcctgtgtgataatgacagcaattggagtacttataatatgcttggtgaataacaaaggatcggccaattcctc

SEQ ID NO: 625494 - DNA, 120 bp, Artificial Sequence
  ENSG00000178690_4 (sequence is synthesized)
cattgttatccagctatccacaaatgatggagagtgtgtgactgtcaaacctggaacaccctctcctgcttgtccacctacaatgaccaccacttcaactgtacctgcaagtacagccac

SEQ ID NO: 625495 - DNA, 120 bp, Artificial Sequence
  ENSG00000178690_5 (sequence is synthesized)
tgaatctacaacttcaacagctacagctgccaccacttccacagaacctataactgttgcacctaccgatcatttataatttgaacagccatagccatcacttcaactgaaacttcaacc

SEQ ID NO: 625496 - DNA, 120 bp, Artificial Sequence
  ENSG00000178690_6 (sequence is synthesized)
tctaccacttcaactcagtttgcaactataatagctactcctatcacttcaagtggaatcatggctgcagtcactttaacagactctataaccgttacaacttcaacaaaatcaagtcct

SEQ ID NO: 625497 - DNA, 120 bp, Artificial Sequence
  ENSG00000178690_7 (sequence is synthesized)
acttcaacttaaacttacttgacaactcaaataatcaccacttcgaccatctctttgactgaatcaacaactacattcccttcaactgaatctgcaaccacttccacttaacctataact

SEQ ID NO: 625498 - DNA, 74 bp, Artificial Sequence
  ENSG00000178690_8 (sequence is synthesized)
gtgacttactttctaatctgactctggcataacaagggaaaaaaatcaaaatgttttaccccaaaatatatttc

SEQ ID NO: 625499 - DNA, 85 bp, Artificial Sequence
  ENSG00000178690_9 (sequence is synthesized)
aattgtcctgcaaagtctcttgtggagaaactccacattctgtagagaatatcctttcccctttgttttccttcctttctttcca

SEQ ID NO: 625500 - DNA, 120 bp, Artificial Sequence
  ENSG00000178690_10 (sequence is synthesized)
aagagccaggcacccttttaggtctaataagaaacactttacaacctgctctctctctgaagtctgctttctgagagattcctctgcacaataaaacttgatctccacaatcctttatct

SEQ ID NO: 625501 - DNA, 88 bp, Artificial Sequence
  ENSG00000178690_11 (sequence is synthesized)
cttgacctttccatggatctcaggtcttcagataaactaaaccaattgtcaaccagaacatgtttaaatttacctatagcctggaagc

SEQ ID NO: 625502 - DNA, 69 bp, Artificial Sequence
  ENSG00000178690_12 (sequence is synthesized)
tctgaaccaaatatataaaaccaaactgtaccttagccactttggacacatgttctcaggacctcctga

SEQ ID NO: 625503 - DNA, 120 bp, Artificial Sequence
  ENSG00000178690_13 (sequence is synthesized)
accttagccactttggacacatgttctcaggacctcctgagggctatgtcatgagccatggtcactcatatttggctcagaattaatctcttaaaatattttacagagtttgactctttt

SEQ ID NO: 625504 - DNA, 120 bp, Artificial Sequence
  ENSG00000178690_14 (sequence is synthesized)
tgtcaacacatccgaacctgcaactacaaatgccaccattaccacttaaaacttgatagaactagcatcagtcatcaaaataacctgttctatattaagttaacttttagttatcaccag

SEQ ID NO: 625505 - DNA, 120 bp, Artificial Sequence
  ENSG00000178690_15 (sequence is synthesized)
taatactagcctacaactactcgccacactggctcttccccaaaattgaaattgtacaatatgtgagtctaattcttgctaacataacattattgcctacattaaaagcttctgcaaagc

SEQ ID NO: 625506 - DNA, 120 bp, Artificial Sequence
  ENSG00000178690_16 (sequence is synthesized)
aggaggatcagggtgtaagtcagccagagagacaaggaaaattttggatctataggagaaagaactttcaaacagcaaaagtcacccaaaaatggaataccaacttctagatataaaggg

SEQ ID NO: 625507 - DNA, 120 bp, Artificial Sequence
  ENSG00000178691_0 (sequence is synthesized)
ggagcgaggccagggtagggtgagcggcctccgaagcggagcggggctctgaggagacactttttttttcctccctccttccctcctctcctcctcccttcccttcccctctcctcccct

SEQ ID NO: 625508 - DNA, 120 bp, Artificial Sequence
  ENSG00000178691_1 (sequence is synthesized)
ctctcctccttcccccctcggtccgccggagcctgctggggcgagcggttggtattgcaggcgcttgctctccggggccgcccggcgggtagctggcggggggaggaggcaggaaccgcg

SEQ ID NO: 625509 - DNA, 80 bp, Artificial Sequence
  ENSG00000178691_2 (sequence is synthesized)
cgcgatggcgcctcagaagcacggcggtgggggagggggcggctcggggcccagcgcggggtccgggggaggcggcttcg

SEQ ID NO: 625510 - DNA, 120 bp, Artificial Sequence
  ENSG00000178691_3 (sequence is synthesized)
tccggcggcgggagctgtggagggggtggcagttactcggcctcctcctcctcctccgcggcggcagcggcgggggctgcggtgttaccggtgaagaagccgaaaatggagcacgtccag

SEQ ID NO: 625511 - DNA, 120 bp, Artificial Sequence
  ENSG00000178691_4 (sequence is synthesized)
gctgaccacgagcttttcctccaggcctttgagaagccaacacagatctatagatttcttcgaactcggaatctcatagcaccaatatttttgcacagaactcttacttacatgtctcat

SEQ ID NO: 625512 - DNA, 120 bp, Artificial Sequence
  ENSG00000178691_5 (sequence is synthesized)
cgaaactccagaacaaacatcaaaaggaaaacatttaaagttgatgatatgttatcaaaagtagagaaaatgaaaggagagcaagaatctcatagcttgtcagctcatttgcagcttacg

SEQ ID NO: 625513 - DNA, 120 bp, Artificial Sequence
  ENSG00000178691_6 (sequence is synthesized)
tttactggtttcttccacaaaaatgataagccatcaccaaactcagaaaatgaacaaaattctgttaccctggaagtcctgcttgtgaaagtttgccacaaaaaaagaaaggatgtaagt

SEQ ID NO: 625514 - DNA, 120 bp, Artificial Sequence
  ENSG00000178691_7 (sequence is synthesized)
tgtccaataaggcaagttcccacaggtaaaaagcaggtgcctttgaatcctgacctcaatcaaacaaaacccggaaatttcccgtcccttgcagtttccagtaatgaatttgaacctagt

SEQ ID NO: 625515 - DNA, 120 bp, Artificial Sequence
  ENSG00000178691_8 (sequence is synthesized)
aacagccatatggtgaagtcttactcgttgctatttagagtgactcgtccaggaagaagagagtttaatggaatgattaatggagaaaccaatgaaaatattgatgtcaatgaagagctt

SEQ ID NO: 625516 - DNA, 120 bp, Artificial Sequence
  ENSG00000178691_9 (sequence is synthesized)
ccagccagaagaaaacgaaatcgtgaggatggggaaaagacatttgttgcacaaatgacagtatttgataaaaacaggcgcttacagcttttagatggggaatatgaagtagccatgcag

SEQ ID NO: 625517 - DNA, 120 bp, Artificial Sequence
  ENSG00000178691_10 (sequence is synthesized)
gaaatggaagaatgtccaataagcaagaaaagagcaacatgggagactattcttgatgggaagaggctgcctccattcgaaacattttctcagggacctacgttgcagttcactcttcgt

SEQ ID NO: 625518 - DNA, 120 bp, Artificial Sequence
  ENSG00000178691_11 (sequence is synthesized)
tggacaggagagaccaatgataaatctacggctcctattgccaaacctcttgccactagaaattcagagagtctccatcaggaaaacaagcctggttcagttaaacctactcaaactatt

SEQ ID NO: 625519 - DNA, 120 bp, Artificial Sequence
  ENSG00000178691_12 (sequence is synthesized)
gctgttaaagaatcattgactacagatctacaaacaagaaaagaaaaggatactccaaatgaaaaccgacaaaaattaagaatattttatcagtttctctataacaacaatacaaggcaa

SEQ ID NO: 625520 - DNA, 120 bp, Artificial Sequence
  ENSG00000178691_13 (sequence is synthesized)
caaactgaagcaagagatgacctgcattgcccttggtgtactctgaactgccgcaaactttatagtttactcaagcatcttaaactctgccatagcagatttatcttcaactatgtttat

SEQ ID NO: 625521 - DNA, 120 bp, Artificial Sequence
  ENSG00000178691_14 (sequence is synthesized)
catccaaaaggtgctaggatagatgtttctatcaatgagtgttatgatggctcctatgcaggaaatcctcaggatattcatcgccaacctggatttgcttttagtcgcaacggaccagtt

SEQ ID NO: 625522 - DNA, 120 bp, Artificial Sequence
  ENSG00000178691_15 (sequence is synthesized)
aagagaacacctatcacacatattcttgtgtgcaggccaaaacgaacaaaagcaagcatgtctgaatttcttgaatctgaagatggggaagtagaacagcaaagaacatatagtagtggc

SEQ ID NO: 625523 - DNA, 120 bp, Artificial Sequence
  ENSG00000178691_16 (sequence is synthesized)
cacaatcgtctgtatttccatagtgatacctgcttacctctccgtccacaagaaatggaagtagatagtgaagatgaaaaggatcctgaatggctaagagaaaaaaccattacacaaatt

SEQ ID NO: 625524 - DNA, 120 bp, Artificial Sequence
  ENSG00000178691_17 (sequence is synthesized)
gaagagttttctgatgttaatgaaggagagaaagaagtgatgaaactctggaatctccatgtcatgaagcatgggtttattgctgacaatcaaatgaatcatgcctgtatgctgtttgta

SEQ ID NO: 625525 - DNA, 120 bp, Artificial Sequence
  ENSG00000178691_18 (sequence is synthesized)
atctagtcagcatgcatgactttaatcttattagcataatgtcaatagataaagctgttaccaagctccgtgaaatgcagcaaaaattagaaaagggggaatctgcttcccctgcaaacg

SEQ ID NO: 625526 - DNA, 120 bp, Artificial Sequence
  ENSG00000178691_19 (sequence is synthesized)
aagaaataactgaagaacaaaatgggacagcaaatggatttagtgaaattaactcaaaagagaaagctttggaaacagatagtgtctcaggggtttcaaaacagagcaaaaaacaaaaac

SEQ ID NO: 625527 - DNA, 120 bp, Artificial Sequence
  ENSG00000178691_20 (sequence is synthesized)
tctgaaaagctctaaccccatgttatggacaaacactgaaattacattttagggaattcatcctctaagaattatgtttttgtttttaatcatatgttccaaacaggcactgttagatga

SEQ ID NO: 625528 - DNA, 120 bp, Artificial Sequence
  ENSG00000178691_21 (sequence is synthesized)
agtaaatgatttcaacaaggatatttgtatcagggttctacttcacttcattatgcagcattacatgtatatcacttttattgatgtcattaaaacattctgtactttaagcatgaaaag

SEQ ID NO: 625529 - DNA, 120 bp, Artificial Sequence
  ENSG00000178691_22 (sequence is synthesized)
caatatttcaaagtatttttaaactcaacaaatgtcatcaaatatgttgaattgatctagaaattatttcatatataaatcagaatttttttgcatttatgaacggctgtttttctactt

SEQ ID NO: 625530 - DNA, 120 bp, Artificial Sequence
  ENSG00000178691_23 (sequence is synthesized)
tgtaattgtgagacattttcttggggagggaaaattggaatggttcccttttttagaaattgaagtggtcttcatatgtcaactacagaaaaggaaaaaaatagaaattgaaggattttt

SEQ ID NO: 625531 - DNA, 120 bp, Artificial Sequence
  ENSG00000178691_24 (sequence is synthesized)
atgaaattatattgcattactatttgcagtcaaactttgatccttgtttttgaaatcatttgtcaattcggaatgaaaaattataatgtaattttacattacataagttccttttacaat

SEQ ID NO: 625532 - DNA, 120 bp, Artificial Sequence
  ENSG00000178691_25 (sequence is synthesized)
taaaaaatagcacttcttcatcttatgcctgtttgagaagatattaaattttcacattgttgacagtgaaatgctatgttggtttataagattacagaccatttgttttcatgtggataa

SEQ ID NO: 625533 - DNA, 120 bp, Artificial Sequence
  ENSG00000178691_26 (sequence is synthesized)
ttttagtgcattgctcacccggtatgttttttttttttaacttgaacattttgcttgttttgtttttcttttttaattagataatcacacggaaaattaagctgttcatatctttaaatt

SEQ ID NO: 625534 - DNA, 120 bp, Artificial Sequence
  ENSG00000178691_27 (sequence is synthesized)
aggattgcaaaccaaggaaagaacgcatttgagattttaagatgtcacttataaggggagaagtgttcttaaaaagtcaaccagaaaactgttatgccttttatttgtttgcaaggatgt

SEQ ID NO: 625535 - DNA, 120 bp, Artificial Sequence
  ENSG00000178691_28 (sequence is synthesized)
ctttgtaatgtgtttcatgaatagaatatccaatagagataagctgacttgaatcattttgagcaattttgccctgtgttatatgtgtttcacgcacatatttgcagttggattttctcc

SEQ ID NO: 625536 - DNA, 120 bp, Artificial Sequence
  ENSG00000178691_29 (sequence is synthesized)
aacagaaagtggattcactactggcacattaacaagcaccaataggtttttattccaactccgagcactgtggttgagtaacatcacctcaattttttattatccttaaagatattgcat

SEQ ID NO: 625537 - DNA, 120 bp, Artificial Sequence
  ENSG00000178691_30 (sequence is synthesized)
tttcatattctttatttataaaggatcaatgctgctgtaaatacaggtatttttaattttaaaatttcattccaccaccatcagatgcagttccctattttgtttaatgaagggatatat

SEQ ID NO: 625538 - DNA, 120 bp, Artificial Sequence
  ENSG00000178691_31 (sequence is synthesized)
aagctttctaatggtgtcttcagaaatttataaaatgtaaatactgatttgactggtctttaagatgtgtttaactgtgaggctatttaacgaatagtgtggatgtgatttgtcatccag

SEQ ID NO: 625539 - DNA, 120 bp, Artificial Sequence
  ENSG00000178691_32 (sequence is synthesized)
tattaagttcttagtcattgatttttgtgtttaaaaaaaaataggaaagagggaaactgcagctttcattacagattccttgattggtaagctctccaaatgatgagttctagtaaactc

SEQ ID NO: 625540 - DNA, 120 bp, Artificial Sequence
  ENSG00000178691_33 (sequence is synthesized)
tgatttttgcctctggatagtagatctcgagcgtttatctcgggctttaatttgctaaagctgtgcacatatgtaaaaaaaaaaaaaaaaagattattttaggggagatgtaggtgtaga

SEQ ID NO: 625541 - DNA, 120 bp, Artificial Sequence
  ENSG00000178691_34 (sequence is synthesized)
attattgcttatgtcatttcttaagcagttatgctcttaatgcttaaaagaaggctagcattgtttgcacaaaaagttggtgattcccaccccaaatagtaataaaattacttctgttga

SEQ ID NO: 625542 - DNA, 120 bp, Artificial Sequence
  ENSG00000178691_35 (sequence is synthesized)
gtaaactttttatgtcatcgtaaaagctgaaaaaatccctttgtttctatttataaaaaaagtgcttttctatatgtacccttgataacagattttgaagaaatcctgtaagatgataaa

SEQ ID NO: 625543 - DNA, 120 bp, Artificial Sequence
  ENSG00000178691_36 (sequence is synthesized)
gcatttgaatggtacagtagatgtaaaaaaaattcagtttaaaagaacatttgtttttacattaaatgtttatttgaaatcaaatgattttgtacataaagttcaataatataaaagctg

SEQ ID NO: 625544 - DNA, 120 bp, Artificial Sequence
  ENSG00000178691_37 (sequence is synthesized)
ttgtacaaagtcaccaagcaataaatgacatagttaagattttaacacattttgttgaccccaggtcttctgactgcctgtttaccatgctggtgtgcctggcctattttagttttctaa

SEQ ID NO: 625545 - DNA, 120 bp, Artificial Sequence
  ENSG00000178691_38 (sequence is synthesized)
aaatttccttttgatgaagtcattgactaaagcgtcattaaaacaaaacaaaaaaagaattccaaaaaccctccaaaattcctttttaaagataggaaggcatacctgctgtcattttat

SEQ ID NO: 625546 - DNA, 120 bp, Artificial Sequence
  ENSG00000178691_39 (sequence is synthesized)
aggtagaacactaaaacacagtaaattacctggcctccaacttggtagtctgatttttttctgccttggtctggtgtttttgtggttttgttcttactttttgtgagttgtgaggggttt

SEQ ID NO: 625547 - DNA, 120 bp, Artificial Sequence
  ENSG00000178691_40 (sequence is synthesized)
tttgttgtttattttttgttaggtgtatagacacacttttggatgtcatatttaacagggaaagcatagagtcatgggcctgaataacagttgagtacaaatatttataaattggttgaa

SEQ ID NO: 625548 - DNA, 120 bp, Artificial Sequence
  ENSG00000178691_41 (sequence is synthesized)
gtaactttgatttcaatgttatattttaaagtctaggttattttactacagagcattacaatgataaaatatttccttttttttttttttagcttgtcagctcatttgcagcttacgttt

SEQ ID NO: 625549 - DNA, 120 bp, Artificial Sequence
  ENSG00000178691_42 (sequence is synthesized)
actggtttcttccacaaaaatggtatgtatttaaaagtaaataaagtggcattttaatagcaagatacctttgtgaatgtaaaaaaagtggggcttctgagtgtaaatttataaaattaa

SEQ ID NO: 625550 - DNA, 120 bp, Artificial Sequence
  ENSG00000178691_43 (sequence is synthesized)
gtttaatggaaaatatgttggttctgatgtttttgaactttaaggtatgaaggctaatgatgaaatttgtttttggtggatgggggtgcagagtgaaggctggagtgcaatgttatgatc

SEQ ID NO: 625551 - DNA, 120 bp, Artificial Sequence
  ENSG00000178691_44 (sequence is synthesized)
ggctaatgatgaagattttaacaaattgtcttagaacttcaataggtaaagaatctcctcagtagaaccttttatgcataaacattttgaattaatgatactgtatcatgttttaaaaaa

SEQ ID NO: 625552 - DNA, 120 bp, Artificial Sequence
  ENSG00000178691_45 (sequence is synthesized)
acacagtaaaacaactgaaataaccactattaccaatggcatatattaatattttagatattattcaaaggaaattatatggtatattactccagtaaaagctcaaagcatgctggaaag

SEQ ID NO: 625553 - DNA, 73 bp, Artificial Sequence
  ENSG00000178691_46 (sequence is synthesized)
tgtatcatgaggtcaggagttcaggatgttcaggagttcaggagttcagctggccaatatgatgaaaccccat

SEQ ID NO: 625554 - DNA, 83 bp, Artificial Sequence
  ENSG00000178691_47 (sequence is synthesized)
ctctactaaaaatataaacttacttgggagacttaggcagaagaatcacttgaacctgagagtcggaggttgcaatgagctga

SEQ ID NO: 625555 - DNA, 87 bp, Artificial Sequence
  ENSG00000178691_48 (sequence is synthesized)
gtgcctgtagtcccagttacttgggagacttaggcagaagaatcacttgaacctgagagtcggaggttgcaatgagctgagattgcg

SEQ ID NO: 625556 - DNA, 120 bp, Artificial Sequence
  ENSG00000178691_49 (sequence is synthesized)
agcttatccatcataagtctgtgtatatggcatatctttttattatgcaatggaataaaaccattattagaaacatgccaggttggttgtcttggtatcgtttagtaagaaacaaagatt

SEQ ID NO: 625557 - DNA, 75 bp, Artificial Sequence
  ENSG00000178691_50 (sequence is synthesized)
aaccccgtctctactaaaatacaaaaaaactagctgggtgtcgtggtgcacacctgtagtgtcaccagtgaaaaa

SEQ ID NO: 625558 - DNA, 120 bp, Artificial Sequence
  ENSG00000178694_0 (sequence is synthesized)
agttccctggaggctttttgatactgattcgcgtacacctgttgtttgaaagctctcagcgggacaatgctgacccagctgaaagcaaaatcagaggggaagcttgcaaaacagatttgc

SEQ ID NO: 625559 - DNA, 120 bp, Artificial Sequence
  ENSG00000178694_1 (sequence is synthesized)
aaagttgtgttggatcattttgaaaaacagtattccaaagaactcggagatgcctggaatacagtaagggagatactaacatctccatcatgctggcaatatgctgtcctgcttaaccga

SEQ ID NO: 625560 - DNA, 120 bp, Artificial Sequence
  ENSG00000178694_2 (sequence is synthesized)
ttcaattatccttttgaactggaaaaggatttacatttgaagggctatcacacactctctcagggatctttacccaactatcctaaatcagtgaagtgttaccttagcagaactccgggc

SEQ ID NO: 625561 - DNA, 120 bp, Artificial Sequence
  ENSG00000178694_3 (sequence is synthesized)
cgaatcccttcagaaagacaccaaattggaaacctgaaaaaatattatctcctaaatgctgcttctcttctcccagtgttggctctggaattaagggatggggagaaggttctggatctc

SEQ ID NO: 625562 - DNA, 120 bp, Artificial Sequence
  ENSG00000178694_4 (sequence is synthesized)
tgtgctgctcctggagggaaatcaatagctctgctgcagtgtgcttgtccaggttatcttcattgtaatgaatatgatagtctgagattgaggtggctaaggcagacgttggaatctttc

SEQ ID NO: 625563 - DNA, 120 bp, Artificial Sequence
  ENSG00000178694_5 (sequence is synthesized)
atcccacagcctttgataaatgtaattaaagtgtctgaattggatggcagaaaaatgggagatgcccagcctgaaatgtttgacaaggtgttagtggatgctccgtgttcaaatgatcga

SEQ ID NO: 625564 - DNA, 120 bp, Artificial Sequence
  ENSG00000178694_6 (sequence is synthesized)
agctggttgttttcttctgactctcagaaggcatcctgtaggataagtcaaaggaggaatttgcctcttctacagatagagctgttaaggtctgcaattaaggccttacgtcctggaggg

SEQ ID NO: 625565 - DNA, 120 bp, Artificial Sequence
  ENSG00000178694_7 (sequence is synthesized)
atacttgtatactctacatgcacgctttccaaggcagaaaatcaagatgtgatcagtgaaattttaaactcccacggtaacatcatgcctatggacattaaaggaatagcaaggacttgc

SEQ ID NO: 625566 - DNA, 120 bp, Artificial Sequence
  ENSG00000178694_8 (sequence is synthesized)
tcccacgacttcacatttgctcccactggccaggaatgtgggctcttagtgattccagataagggcaaagcctggggcccaatgtatgtagccaaattgaagaaatcatggagcacagga

SEQ ID NO: 625567 - DNA, 120 bp, Artificial Sequence
  ENSG00000178694_9 (sequence is synthesized)
aaatggtgacatgaatttgtaaactgtgtttatgtgttattatatttatatttctgaactcagtacatgttaatatttaaataattatgcagtaactttctctgggtctgtttggaatcc

SEQ ID NO: 625568 - DNA, 120 bp, Artificial Sequence
  ENSG00000178694_10 (sequence is synthesized)
tatttagttaatactttagcatcttagaatctaggcttgagaattgttcaggtgtatttttttcctagaaatatatctgtaacaatgatttaaggtggtgcagatggtgtttgttctata

SEQ ID NO: 625569 - DNA, 120 bp, Artificial Sequence
  ENSG00000178694_11 (sequence is synthesized)
ttataaatctgctgtctttgcttggcattttatagttaaattaattagaatatgtggttttatgcataacgtgtttagttctgtattctttctatgatagtgctttgaaccttcaaaaat

SEQ ID NO: 625570 - DNA, 120 bp, Artificial Sequence
  ENSG00000178694_12 (sequence is synthesized)
tcacattttccagcgctccgaccattttcccgcttatcaaatgtacaaatttgttcaaggtttttttttccccccaacttttgtaactgattgtctcagaactgattggtattctgagac

SEQ ID NO: 625571 - DNA, 120 bp, Artificial Sequence
  ENSG00000178694_13 (sequence is synthesized)
taactttttaagcagcactatttctagttctggcaaaatagtttttttatttgcaatgttgttttctgttaaagactatattatgtttactgcaaaggtcagtgactctactgacaccag

SEQ ID NO: 625572 - DNA, 120 bp, Artificial Sequence
  ENSG00000178694_14 (sequence is synthesized)
ctttatttcccccactttttttgcattcacaaatacaaattgaaagggtaaattatattgaaaggcctttagaacagcagattcacatgcacatgtttgactttcgacattcagcttata

SEQ ID NO: 625573 - DNA, 120 bp, Artificial Sequence
  ENSG00000178694_15 (sequence is synthesized)
gaattatggagtctatccagcaggctataaagcaagtacttgagacaaaaccggaatgattaataactgcaatcactgaactatatttggagagttttgttacataattgcagtcataat

SEQ ID NO: 625574 - DNA, 120 bp, Artificial Sequence
  ENSG00000178694_16 (sequence is synthesized)
gagcactacagaatctgattatcttacattcacaatctggaggggctttttatttcactttgttataaaatgttctctgagaatatgatgccacatattaatgcacaagagggagatgcc

SEQ ID NO: 625575 - DNA, 120 bp, Artificial Sequence
  ENSG00000178694_17 (sequence is synthesized)
taatgagagtggactgtgtgattaccagaacccagtgccatttactaagtggctctccatgtttacataaatcctgggaatactgtatacatttcttcttatgtacttagggttttagct

SEQ ID NO: 625576 - DNA, 120 bp, Artificial Sequence
  ENSG00000178694_18 (sequence is synthesized)
tcagtcagcatcacactttttctccagaaattacttcacttagagtacaaacatatttttccaactattaagaaaaattatgcagcacatctcaaaaaatagcatctctttggaaaatag

SEQ ID NO: 625577 - DNA, 120 bp, Artificial Sequence
  ENSG00000178694_19 (sequence is synthesized)
cctttaaaaaaaaacaactttatctgattatagaaatacaaaattctgctaaagctgaatacttttgaattgttcattatgttctgtgcctttaaactagagactatttgcttattaata

SEQ ID NO: 625578 - DNA, 120 bp, Artificial Sequence
  ENSG00000178694_20 (sequence is synthesized)
ttttttgttttgcaagcatatgtaacccggtttatatcatcaggaagtcttaggaagaatttttttttctgtaccttcagtctgttaatcatttgttttcctttatgtccaattgatatg

SEQ ID NO: 625579 - DNA, 120 bp, Artificial Sequence
  ENSG00000178694_21 (sequence is synthesized)
cttatgcctgtaatcccagcactttgtcaggccgaggcagggggcatctcctgaggtcagaagttcgagactagcctgcccaacatggtaaaaccccgactctactaaaaatgcaaaaaa

SEQ ID NO: 625580 - DNA, 120 bp, Artificial Sequence
  ENSG00000178694_22 (sequence is synthesized)
tcagaagttcgagactagcctgcccaacatggtaaaaccccgactctactaaaaatgcaaaaaaattagacaggcatggtggctggcaccagcaatcccagctacttaggaggctgaggc

SEQ ID NO: 625581 - DNA, 120 bp, Artificial Sequence
  ENSG00000178694_23 (sequence is synthesized)
ctccagcctgggcgacaagagtgaaaccccgtagcaaaaaaataataataatagtaattaaataaaaataaagtaacgctagaactgttggaccaaatcaagtatatgggtaaatacaga

SEQ ID NO: 625582 - DNA, 120 bp, Artificial Sequence
  ENSG00000178694_24 (sequence is synthesized)
ccaaatcaagtatatgggtaaatacagaagaataatgatggtggaaaagatgttttcttttttaagttatcattattagtttgttttttttatcttcagacactataggttttaaaaata

SEQ ID NO: 625583 - DNA, 120 bp, Artificial Sequence
  ENSG00000178694_25 (sequence is synthesized)
ggtttcttttatgtaggttaatcacagagtaaatctgcacactgtactttgttaaatgtcggtattttcccagtataatgcgatgaagcttaatctgaatacttggtatgctattgaatt

SEQ ID NO: 625584 - DNA, 88 bp, Artificial Sequence
  ENSG00000178694_26 (sequence is synthesized)
gtgtgtgtatatatatatatatatataattttattaaaagcaattgccccaaaagcagaaattgacaagcgggacctaaactatcaac

SEQ ID NO: 625585 - DNA, 90 bp, Artificial Sequence
  ENSG00000178694_27 (sequence is synthesized)
tgcacagcaaactaaactatcaacagagtagcagacaacttacaggatgggagaaatatttgcaaattatgcatctgccaaaggttcagc

SEQ ID NO: 625586 - DNA, 80 bp, Artificial Sequence
  ENSG00000178694_28 (sequence is synthesized)
gaacagacatttctcaaaagaagacattcacatggccaacaaacatatgaaaaagtgctcctgagataatattttacacc

SEQ ID NO: 625587 - DNA, 120 bp, Artificial Sequence
  ENSG00000178694_29 (sequence is synthesized)
agtcagaatggctattattaaaaagtcaataaaataaaaaataacagacgctgatgaggctgtggagaaaaggaactgcttatgaactgttggtggaaatgtaaattacttcagcctcta

SEQ ID NO: 625588 - DNA, 120 bp, Artificial Sequence
  ENSG00000178694_30 (sequence is synthesized)
aagcagtttggagatttctcaaagaactttataacagaattgccatttgagctagcaatcccattagtgggtatatacccacaggaaaataaattgtcctacaaaaaaagacataaacgc

SEQ ID NO: 625589 - DNA, 120 bp, Artificial Sequence
  ENSG00000178694_31 (sequence is synthesized)
ataaacgcttgtgtgttcatcacagtaatatttacaatagtaaagatacggaatcaacctaaccgcccatcagcagttgattgaataaaggaaatgtggtacatatacctcgtgtaatat

SEQ ID NO: 625590 - DNA, 120 bp, Artificial Sequence
  ENSG00000178694_32 (sequence is synthesized)
tacacagtgataaaaaagaatgaaataatgtcttttgcaacaacatggatgcagctggatgcttttatcctaagcaaattcaggaacagaaaactaaatacatattctcacttacaaatg

SEQ ID NO: 625591 - DNA, 120 bp, Artificial Sequence
  ENSG00000178694_33 (sequence is synthesized)
ggagctaaatatcgagtacacatggacataaaggaacaatagacactggtgactactagagtggggaggggaggagggggatgtaggctgaaaaactacctattgggtactgcactcact

SEQ ID NO: 625592 - DNA, 120 bp, Artificial Sequence
  ENSG00000178694_34 (sequence is synthesized)
acctgggtgacgggatcgtctgtaccccaaacctcagcatcatccagtatacccatgtaacacacctgttcatgtatcccctgaatctaaaaagctgaaattattttttaatgagaagat

SEQ ID NO: 625593 - DNA, 83 bp, Artificial Sequence
  ENSG00000178694_35 (sequence is synthesized)
aacctctgcctcccgggttcaagcagttttctgcctcagcctcccaagtaactgagatcacaggcacccgccaccatgcttcc

SEQ ID NO: 625594 - DNA, 83 bp, Artificial Sequence
  ENSG00000178694_36 (sequence is synthesized)
cacccgccaccatgcttccaccatcttggccaggttgatcttgaactcctgaccttgtcatccacctgcctcagcctcccaaa

SEQ ID NO: 625595 - DNA, 120 bp, Artificial Sequence
  ENSG00000178694_37 (sequence is synthesized)
cgtgagccaccacacccactgtgtatgttgtctttattgatgcttaaaacaaactcaggaataagtattataacccccttttgtgaatgagaaaaccaaagctcagttctgtttatagtt

SEQ ID NO: 625596 - DNA, 120 bp, Artificial Sequence
  ENSG00000178694_38 (sequence is synthesized)
tgccaaggctacactggtaagtaaagggttcagccaatgtatagacagactgtatagatatatgaagtgggggtgggggccaaggagctattactgctgtttggaaatacttgcctcttg

SEQ ID NO: 625597 - DNA, 120 bp, Artificial Sequence
  ENSG00000178694_39 (sequence is synthesized)
tagatccagctttaacatttttatgacatcctagtaatagcagaccctgcacaaagtggatatcagagttaatactgtgaagagacaaaataatgagaatacttttaccaaagataatga

SEQ ID NO: 625598 - DNA, 120 bp, Artificial Sequence
  ENSG00000178694_40 (sequence is synthesized)
aatcttgcataatgtctgcatttttccattgattggagtgcatccttagaaaactgaaaataacaaaaacccaggacatttttggaaattgtatgctctctagcaactttgcgtgaattt

SEQ ID NO: 625599 - DNA, 120 bp, Artificial Sequence
  ENSG00000178694_41 (sequence is synthesized)
ttatacaaacacttatgagttatataaaatgttctaaaactagaaaaaacatggtcttgtaacatgttattttcttagatcactggtttctcagaacatgtctttctgcatggcctcctc

SEQ ID NO: 625600 - DNA, 120 bp, Artificial Sequence
  ENSG00000178694_42 (sequence is synthesized)
atccccatcccaggggagaacgtgaatgttccaagggacttcggcctctggggcttccacactctgggtgtcaggggtacagctcacaggctttcagtttggccacagctgaatgattga

SEQ ID NO: 625601 - DNA, 120 bp, Artificial Sequence
  ENSG00000178694_43 (sequence is synthesized)
gaattaccagataaatcctccaaatccatttctccagaaacctcttcctagccacacagtgggagccttgtttgaccttttttaacctttcctggtcaggtgccaggccagtcctgcaaa

SEQ ID NO: 625602 - DNA, 120 bp, Artificial Sequence
  ENSG00000178694_44 (sequence is synthesized)
gccagcaaagtttcattttcattcaaccctttttttttcactttgaatcaaatggaatttagttcctcccactgtccccaacccagctagagtgcagtggtgtcatcatggctcactgca

SEQ ID NO: 625603 - DNA, 120 bp, Artificial Sequence
  ENSG00000178694_45 (sequence is synthesized)
gcctcgacttcctgggttcaagttatcttttcgcctcagcctcctaagtagcctggactacaggcccacaataccatgcctggctaatttttaaattattattattattattattgtaga

SEQ ID NO: 625604 - DNA, 79 bp, Artificial Sequence
  ENSG00000178694_46 (sequence is synthesized)
tggctaatttttaaattattattattattattattgtagagatgtgacctcaccaggctggtttcaaacattgggatta

SEQ ID NO: 625605 - DNA, 120 bp, Artificial Sequence
  ENSG00000178694_47 (sequence is synthesized)
tgtaaaaaaggatgcatgttttccctcaccttctctttggctaattataaatcattttacttaatatttcatagttaaagggtagagccgcgatcaaaactggctccgaggtccaggccc

SEQ ID NO: 625606 - DNA, 120 bp, Artificial Sequence
  ENSG00000178694_48 (sequence is synthesized)
ttttcccaacactatgctgtctcacagagtgtaggttgtttgaaccctcaagattattaactgactttacccctattttccattgttcagtttcctccttttgtgtcataccctattccc

SEQ ID NO: 625607 - DNA, 120 bp, Artificial Sequence
  ENSG00000178694_49 (sequence is synthesized)
aggggatgaaaggattaatcaatacttgggaaaaaaacaacaacctttgaactgtttcaggccatattgtaaagaagtgtgtcttgtgattttgatacccagaaatctccagtggagggt

SEQ ID NO: 625608 - DNA, 120 bp, Artificial Sequence
  ENSG00000178694_50 (sequence is synthesized)
attctctgccttccttttctttgcagatgctgagctgaagaatggaaatttggagcagacttgcagtgtcaattgtaaagcaaagagtaattgatattactttctgtgacactgagttac

SEQ ID NO: 625609 - DNA, 120 bp, Artificial Sequence
  ENSG00000178694_51 (sequence is synthesized)
tttcaaaatagctttataaaaatttaggttgcttaccaacacattaacttctccctgccgtccacacgctgaacagccactactttcagaaatagactgaataaatgtaatgcatttaaa

SEQ ID NO: 625610 - DNA, 120 bp, Artificial Sequence
  ENSG00000178694_52 (sequence is synthesized)
caggtagtgtgctttcctttcagtatttgacaactttttaatatctgtatgttatagagaattctgaaagtatatatggggagaaacgtaagactgagtttgcaaactcaggaagcctga

SEQ ID NO: 625611 - DNA, 120 bp, Artificial Sequence
  ENSG00000178694_53 (sequence is synthesized)
gaacaaaacttcaacatttcgcaaatacaaatctgtcagataatatgaatgctgataagcctgataggtattttttattgtttacctttatacttgagagtcttatgtagatatccctgt

SEQ ID NO: 625612 - DNA, 120 bp, Artificial Sequence
  ENSG00000178694_54 (sequence is synthesized)
catacttttctgcaacaaaaacatatacatttaaaataatttttgatgtcaatagactataaggttccaaggcaattctttccagtagaaatataatgtgaagtatatatatacccttaa

SEQ ID NO: 625613 - DNA, 120 bp, Artificial Sequence
  ENSG00000178694_55 (sequence is synthesized)
ttaagtagttccattttaaaaagtagaagcaggtgaaattaatttgaataatacattgaaccaatacattcaaaatattgtttcaatatgtaatcaaaatagaaataatgagatatttta

SEQ ID NO: 625614 - DNA, 120 bp, Artificial Sequence
  ENSG00000178694_56 (sequence is synthesized)
tttacattctctcttttttttacaggtctttaaaattggttacgttacagttacatcacatttcagttgagactagccacatttcaggtgttcatagccacatgtgagaagagggtatag

SEQ ID NO: 625615 - DNA, 120 bp, Artificial Sequence
  ENSG00000178694_57 (sequence is synthesized)
tattggacaatccaaaaagtcttttcaagtgactttttcattaatattattattagaaccaaagtgatacacaggtttacaaatatttgttaaaagtaacaagtcaacatttacaatttt

SEQ ID NO: 625616 - DNA, 120 bp, Artificial Sequence
  ENSG00000178694_58 (sequence is synthesized)
tacaatatttacaaaatttacaatttttttcttaataatttttcttttaaagctaattctttttttaaaaaactgatacaggcttccccgaataaatattacctactactagaagaggca

SEQ ID NO: 625617 - DNA, 120 bp, Artificial Sequence
  ENSG00000178694_59 (sequence is synthesized)
gctgacccagagacacgtccttgatatgttttccagtctggtcttgaactgggaaatgatcctctcgcctcgtccctgcaaagcatgagccagctggagtacagtggcgcgatctcggct

SEQ ID NO: 625618 - DNA, 120 bp, Artificial Sequence
  ENSG00000178694_60 (sequence is synthesized)
gagttcaagcgattctcccacctcagccccctgagtagctgaaagcaaaatcagaggggaagcttgcaaaacagatttgcaaagttgtgttggatcattttgaaaaacagtattccaaag

SEQ ID NO: 625619 - DNA, 75 bp, Artificial Sequence
  ENSG00000178694_61 (sequence is synthesized)
tgtatttttagtagagacgggtttcccgtgttggccaacctggtcttgaactccagacctcatgtgatcctcccc

SEQ ID NO: 625620 - DNA, 120 bp, Artificial Sequence
  ENSG00000178694_62 (sequence is synthesized)
aattaattttgttccttttgacagtttcttcagccccagtagattctgttttaacctttgcttcacatttggaaaataattatttggaaaaaccttgctttttcataattagataatgta

SEQ ID NO: 625621 - DNA, 120 bp, Artificial Sequence
  ENSG00000178694_63 (sequence is synthesized)
cagttttggtacatgtaaggtattgcttccatttcaagaactagtaattatccaaaaaaagtgttcttgtcttaaaaaaagaccttgctaatgttgacgttcagtaaatttgtaatatca

SEQ ID NO: 625622 - DNA, 120 bp, Artificial Sequence
  ENSG00000178694_64 (sequence is synthesized)
aaggcagttcacttcagcagtgtgagcgtcaactgagtggcttggtttggaagtattgtttgaacaagtatcccaaatcataagtttctgatgatcagcaactgacccaaacagagactt

SEQ ID NO: 625623 - DNA, 120 bp, Artificial Sequence
  ENSG00000178694_65 (sequence is synthesized)
agatggtgtgatcatctgaagcactaaataatttcttctcatccttcaagatttaacatattggataatatacaaaagctaatgttgttcctgaattaataatcctcttaaacaataagc

SEQ ID NO: 625624 - DNA, 120 bp, Artificial Sequence
  ENSG00000178694_66 (sequence is synthesized)
ttaaaaggaaacatgcaggatttaacctttctaagagataggaaagaaaatgtgaataaatggagaaacatattgtgatcaggattggaaaaattgactgcaataaagatgtgaaatatc

SEQ ID NO: 625625 - DNA, 120 bp, Artificial Sequence
  ENSG00000178694_67 (sequence is synthesized)
atctgaaagaataaacattcaagatagctttgaaaattctgaagaaaaaaagaagaacgaatagagatttgtcctgtctgatgttaactaattgaaagtgttctactcctttttagctga

SEQ ID NO: 625626 - DNA, 120 bp, Artificial Sequence
  ENSG00000178694_68 (sequence is synthesized)
tgggtaggcacatgatgcaagccaagccgctccttctgtataactgtgtttccgatcatttttttattacacatgactcaacactggatagatttttcagcctgtttggaggtaagatta

SEQ ID NO: 625627 - DNA, 120 bp, Artificial Sequence
  ENSG00000178695_0 (sequence is synthesized)
actcgcctggagcgcgcgggcaaggcgggcggagcgcactggaactcaagggggcgcacagcggcgcgctcgcaccgctcggctccgcgcggctctaggaggtggcggcggtggcggtgg

SEQ ID NO: 625628 - DNA, 120 bp, Artificial Sequence
  ENSG00000178695_1 (sequence is synthesized)
ggcggcggcggggcgcagggctgagcgagcgtccgggttccggggctccggggaaggcggttgcagctcctgagtgcagcgcggcttcctgccactgtcccggcccggccacctctctgt

SEQ ID NO: 625629 - DNA, 120 bp, Artificial Sequence
  ENSG00000178695_2 (sequence is synthesized)
ccggccacctctctgtcatggctctggcggacagcacacgtggattacccaacgggggcggcggcgggggcggcagtggctcctcgtcgtcctccgcggagccaccgctcttccccgaca

SEQ ID NO: 625630 - DNA, 120 bp, Artificial Sequence
  ENSG00000178695_3 (sequence is synthesized)
tcgtggagctgaacgtggggggccaggtgtacgtgacccggcgctgcacggtggtgtcggtgcccgactcgctgctctggcgcatgttcacgcagcagcagccgcaggagctggcccggg

SEQ ID NO: 625631 - DNA, 120 bp, Artificial Sequence
  ENSG00000178695_4 (sequence is synthesized)
acagcaaaggccgcttctttctggaccgggacggcttcctcttccgctacatcctggattacctgcgggacttgcagctcgtgctgcccgactacttccccgagcgcagccggctgcagc

SEQ ID NO: 625632 - DNA, 120 bp, Artificial Sequence
  ENSG00000178695_5 (sequence is synthesized)
gagtacttcgagctgccagagctcgtgcgccgcctcggggcgccccagcagcccggcccggggccgccgccctcgcggcgcggggtgcacaaggagggctcgctgggtgacgagctgctg

SEQ ID NO: 625633 - DNA, 120 bp, Artificial Sequence
  ENSG00000178695_6 (sequence is synthesized)
gacgagctgctgccgcttggctactcggagcccgaacagcaggagggcgcctctgccggggcgccgtcgcccacgctggagctggctagccgcagtccgtccgggggcgcggcgggcccg

SEQ ID NO: 625634 - DNA, 120 bp, Artificial Sequence
  ENSG00000178695_7 (sequence is synthesized)
tcacgccgtcccagtcgctggacggcagccggcgctcgggctacatcaccatcggctaccgcggctcctacaccatcgggcgggacgcgcaggcggacgccaagttccggcgagtggcgc

SEQ ID NO: 625635 - DNA, 120 bp, Artificial Sequence
  ENSG00000178695_8 (sequence is synthesized)
gcatcaccgtttgcggaaagacgtcgctggccaaggaggtgtttggggacaccctgaacgaaagccgggaccccgaccgtcccccggagcgctacacctcgcgctattacctcaagttca

SEQ ID NO: 625636 - DNA, 120 bp, Artificial Sequence
  ENSG00000178695_9 (sequence is synthesized)
acttcctggagcaggccttcgacaagctgtccgagtcgggcttccacatggtggcgtgcagctccacgggcacctgcgcctttgccagcagcaccgaccagagcgaggacaagatctgga

SEQ ID NO: 625637 - DNA, 120 bp, Artificial Sequence
  ENSG00000178695_10 (sequence is synthesized)
ccagctacaccgagtacgtcttctgcagggagtgagctccccagaccccctcgccactccagcgcccagtccttctcctgcccgagagatgattacagagcctcttgtcccacctttgtc

SEQ ID NO: 625638 - DNA, 120 bp, Artificial Sequence
  ENSG00000178695_11 (sequence is synthesized)
ccctggctgctgccctcccattctccccctccagtagtagctgggtgagacctgtccgcccaccttccctccactacagaacctgcagccgcaaatcctctgggctgcttcgtcttcttt

SEQ ID NO: 625639 - DNA, 120 bp, Artificial Sequence
  ENSG00000178695_12 (sequence is synthesized)
ggacctcctgaaccgagagaacccagaggaacccccaccccacccccacctaccactccatgctttctctactccctgcctcaaaccacccctcccccagatggtacttcagtttggatc

SEQ ID NO: 625640 - DNA, 120 bp, Artificial Sequence
  ENSG00000178695_13 (sequence is synthesized)
tattgggggagtgtggccacagaccgggggatgattgaattgttcagaacctgattggaccgtgtccaatgtgcggaagatttccttgaaatcttctcaagctcttatgactcactgggg

SEQ ID NO: 625641 - DNA, 120 bp, Artificial Sequence
  ENSG00000178695_14 (sequence is synthesized)
gtttaagagatcaggattggttccactgtctggggttagtgttttacaaggtcattacacagtctttttgacctcttttgaaggtagagttttagaaggctggatggaagattctgagcc

SEQ ID NO: 625642 - DNA, 120 bp, Artificial Sequence
  ENSG00000178695_15 (sequence is synthesized)
tggaattaggaccccatggaggcagttcagtaactaaactaataaagttttgaaaagttacacgtaaagtagaagaatctagtgcgtgggacagtaaaggatcctttctcgtacagaata

SEQ ID NO: 625643 - DNA, 120 bp, Artificial Sequence
  ENSG00000178695_16 (sequence is synthesized)
aaaggtctcagcctgtagcttaaacttatagaaagtgatccgcctgcctgcagaggcgcccttttcagctgctgctcgccagaagcccttgattccactggttgacatggcagcagttac

SEQ ID NO: 625644 - DNA, 120 bp, Artificial Sequence
  ENSG00000178695_17 (sequence is synthesized)
tggcaagagggagaaaggacgctgccgcctaagagtgcaaggctgctcaggtctccaagcgccgtaggaggtcacctggcagtgactgtagggagctgggtcatagtgcacgtcgtgggt

SEQ ID NO: 625645 - DNA, 120 bp, Artificial Sequence
  ENSG00000178695_18 (sequence is synthesized)
attaggaaagcctgtattctttcaatgaatgtcagtaggaccttcctttagctgtaagacttggtgggcggggtggggtggggagggaggaaagggtaggaagggtgggaagggagaagc

SEQ ID NO: 625646 - DNA, 120 bp, Artificial Sequence
  ENSG00000178695_19 (sequence is synthesized)
agacatagtcatttatgatttgaaagttggaagtttgtaccatctgtttgagtatatgcacatttaaaaaatatcatatagtaaatgcaaacatgccaagtattttataaagattaataa

SEQ ID NO: 625647 - DNA, 120 bp, Artificial Sequence
  ENSG00000178695_20 (sequence is synthesized)
cagacctactcttacctggcagtttacttaacttactgttttgagtcctaaacttagagttgttaatgcttatatataatctaaccaaagagttacccagtagggttttagtttttgaac

SEQ ID NO: 625648 - DNA, 120 bp, Artificial Sequence
  ENSG00000178695_21 (sequence is synthesized)
ttttattttcttgttgattataaatcctgattttggaatctattgcgcaaaagaagtttcattttggttacttagacctaagatcacttattaaaaatccttattttctccaagcccagc

SEQ ID NO: 625649 - DNA, 120 bp, Artificial Sequence
  ENSG00000178695_22 (sequence is synthesized)
aaacgttgacttctgggcaaacctgaaaacctgaaaatgccactttcatgcagtttgtttgaagttaagtggaatcctttcaaatgacgagctgcagagaactcagcaccaagggctgcc

SEQ ID NO: 625650 - DNA, 120 bp, Artificial Sequence
  ENSG00000178695_23 (sequence is synthesized)
tatctgtagatagctgtaaaatggaatatttttaaatgaaggcaaataagtacttaaaagtgagctgagcaataaaatggtccaataataggtaaatgcaacagaaacagaaggagacct

SEQ ID NO: 625651 - DNA, 120 bp, Artificial Sequence
  ENSG00000178695_24 (sequence is synthesized)
ggttgccttatgcctttactcttacatggaataaattcccaatgcatatcctatgtaaaccataagtgaagggaaataaacctcgtcatgctccatgctgtgaggtgtcctttggatatt

SEQ ID NO: 625652 - DNA, 120 bp, Artificial Sequence
  ENSG00000178695_25 (sequence is synthesized)
cttgtttttaaaaatgaatctcgtactgtatcttactatgtccatacagatgttacaaatcgacagttttattcttagactcatgtgatccaagctgtatataccatatataaacatttt

SEQ ID NO: 625653 - DNA, 120 bp, Artificial Sequence
  ENSG00000178695_26 (sequence is synthesized)
acatgaatcatttagttttttaattcatttactaatgctataaaatttcctatattaccccagtaatttgcatcagctggtttatatactaaagcaacatgttttgatgagtttcttaca

SEQ ID NO: 625654 - DNA, 120 bp, Artificial Sequence
  ENSG00000178695_27 (sequence is synthesized)
tccttatcgaggaattgggttaggaaaaaatacataattgtaaaactgagtttgctgtattatactttttttcttgagtattagttgtattactaatcatatgttgattaactgtctact

SEQ ID NO: 625655 - DNA, 120 bp, Artificial Sequence
  ENSG00000178695_28 (sequence is synthesized)
taaagtcaaggtacctgtatttttaatccactaatttttttttagttgggaaatagatttcaggtcttttattagactaacattttttgagaagtaaaattgacttcatatacaaagcct

SEQ ID NO: 625656 - DNA, 120 bp, Artificial Sequence
  ENSG00000178695_29 (sequence is synthesized)
gtaattttaggcgaaatggaagcagaaatctaggaagttgtgcttgcttgtatgttgagtttggtctcagactaagtaatgcatcagaattcatctgtttgaagcctgaaataatttagg

SEQ ID NO: 625657 - DNA, 120 bp, Artificial Sequence
  ENSG00000178695_30 (sequence is synthesized)
actctgattcactgaccaaaagtcagtgttgcagagatttctctaccccgtatggtattttgttagattgttcaacaggaagcacatgattgagaacatcttgggacagaccaaaaccac

SEQ ID NO: 625658 - DNA, 120 bp, Artificial Sequence
  ENSG00000178695_31 (sequence is synthesized)
tgacagatggcaaggctcggcgattctgatttcccttctcaaatctgctcaactccaagagtcttgagaaactgctaaaattttgcctctgtcactcaagtcttacaaatgttatcttgt

SEQ ID NO: 625659 - DNA, 120 bp, Artificial Sequence
  ENSG00000178695_32 (sequence is synthesized)
aaacctttgaggtgaactattccactgtcttgtacataggcatcttattcactgcaccctgtcacacccagcaccccccgccccgcacattatttgaaagactgggaatttaatggttag

SEQ ID NO: 625660 - DNA, 120 bp, Artificial Sequence
  ENSG00000178695_33 (sequence is synthesized)
ggacagtaaatctacttctttttccagggacgactgtcccctctaaagttaaagtcaatacaagaaaactgtctatttttagcctaaagtaaaggctgtgaagaaaattcattttacatt

SEQ ID NO: 625661 - DNA, 120 bp, Artificial Sequence
  ENSG00000178695_34 (sequence is synthesized)
gggtagacagtaaaaaacaagtaaaataacttgacatgagcacctttagatcccttcccctccatgggctttgggccacagaatgaacctttgaggcctgtaaagtggattgtaatttcc

SEQ ID NO: 625662 - DNA, 120 bp, Artificial Sequence
  ENSG00000178695_35 (sequence is synthesized)
tataagctgtaatagtggaggtattgtgggttcatttgagtaagccctccaaagataccattcaaataacctgggagaatgtcataaattattcagataattaacactgcatgaatctga

SEQ ID NO: 625663 - DNA, 120 bp, Artificial Sequence
  ENSG00000178695_36 (sequence is synthesized)
ttcagaggcatgcatttacatatgttgccctaattaccatttgatgatcataaatacaagtgaatgacattggacttttagtaacaaacttaatttttaaaaaggtgtagacaatggtgg

SEQ ID NO: 625664 - DNA, 120 bp, Artificial Sequence
  ENSG00000178695_37 (sequence is synthesized)
ttaaaaaaaaaaaaaaaacaggtaccaggttctgtgtgtttgcaccaagtaattgacatgttttttaatacatgtggaccatgaacagtattcattctactttttcaaatgatatgctgt

SEQ ID NO: 625665 - DNA, 120 bp, Artificial Sequence
  ENSG00000178695_38 (sequence is synthesized)
agaaaatattccttgaagatgtgagatttaaaaatttttccctttcaatgttgttatgtattctactggtttttgattgatagcacagtgataaatcataatactagacaaaattgtctt

SEQ ID NO: 625666 - DNA, 120 bp, Artificial Sequence
  ENSG00000178695_39 (sequence is synthesized)
ctctttcaaaccagagccatatatatgtctgtatatatgggacctactgcttctctgaggaaatgcataatctgttaatatcagacaaaatgagcaattggcagtgctcataatatattc

SEQ ID NO: 625667 - DNA, 120 bp, Artificial Sequence
  ENSG00000178695_40 (sequence is synthesized)
caatttttattggaattttcgatggaatgttatttcaataaagccatgtaaggtgaaactttgataactttttactcttcaagttagggtaaattctgatccaatattcaattcatttgt

SEQ ID NO: 625668 - DNA, 120 bp, Artificial Sequence
  ENSG00000178695_41 (sequence is synthesized)
gtactcccacatgcaaaatgctaaattacaatgcagacattaagaaaaagtattgactggaggggttgaattccttgagaatttattttatagtctaaatcacaaatactttactcaatt

SEQ ID NO: 625669 - DNA, 120 bp, Artificial Sequence
  ENSG00000178695_42 (sequence is synthesized)
tagtttttaaaatagtaaactgaatatttttgttgtaagcctatcagagtcaatccttcgtttggaattgttttcctgtttttccttactataaatcatttaaaaactgaattcattttc

SEQ ID NO: 625670 - DNA, 120 bp, Artificial Sequence
  ENSG00000178695_43 (sequence is synthesized)
ttagatggcataagtctgtctcttgagaaataagtaaaatactcctattttcagtatctgtagcacctgaaataggtctttgtatagccagaaacaagttatgttgaagttagcttttct

SEQ ID NO: 625671 - DNA, 120 bp, Artificial Sequence
  ENSG00000178695_44 (sequence is synthesized)
ttgtcaacagttttggacaataaaaatctgaaagtattaacacttgattttctactggggcccttcaaacttggttggaagaaattcaaccagaatatctacattagagtataatcatgt

SEQ ID NO: 625672 - DNA, 120 bp, Artificial Sequence
  ENSG00000178695_45 (sequence is synthesized)
gtggtaggaagatggactagttaatcaagatttgttgtcacttaaattttttgtgatttttttccaagccagtttttttaaattctaaatgtgttttgaggtatgggtacattaattgta

SEQ ID NO: 625673 - DNA, 120 bp, Artificial Sequence
  ENSG00000178695_46 (sequence is synthesized)
atgtaaactattatacaactgtttttgcgactttataggcaggtaaattttgctattactattgaatacaaatgacaattcatttatgaccactcaaacagcgttagtaaccatttagtg

SEQ ID NO: 625674 - DNA, 120 bp, Artificial Sequence
  ENSG00000178695_47 (sequence is synthesized)
acaaaggattaaaacatccatctggatgttaattttgaagatgtaaattatatgttgtttaaatttttccaggcatctgaaaaccttatctgctagacaatgtaagattcacacagagtt

SEQ ID NO: 625675 - DNA, 120 bp, Artificial Sequence
  ENSG00000178695_48 (sequence is synthesized)
atctgggattctgattttttaaatagtacatatcattaaaccattttctctaaatgtaagaagagcagaaaaaatcttataagattatcagatttttctaatgacacagaaatgtaagaa

SEQ ID NO: 625676 - DNA, 120 bp, Artificial Sequence
  ENSG00000178695_49 (sequence is synthesized)
aaaaatccctttatattgaaaaaagatgcagtcaaagtcttttcagacatgcccaaactttgagaatttcttcaaccatctaatgctataaagatttttgttcttcctgttcacaaccag

SEQ ID NO: 625677 - DNA, 120 bp, Artificial Sequence
  ENSG00000178695_50 (sequence is synthesized)
ttgtataacagaaatactagctactgttttccttcctgtgtgtgaagtaatgaatcattgattatgtgacttgttatgtattcaattaaacactaaagaataaaacattcactcctttaa

SEQ ID NO: 625678 - DNA, 120 bp, Artificial Sequence
  ENSG00000178700_0 (sequence is synthesized)
gagatactgatttgctcgcgctatagaattcttgtcgaagaggcttagctcccgcgggagatttcgtgcgcagttacttccggtagctggtaaaggctgatacttcccaggacgcggagg

SEQ ID NO: 625679 - DNA, 120 bp, Artificial Sequence
  ENSG00000178700_1 (sequence is synthesized)
taacgggccagggccaaagcgactttcgctacttggattggtcggcgtagctttgggcggccggaccttagaaagtcacacatctgcgcgcctgtgcggcccctgcttctgcggatgctg

SEQ ID NO: 625680 - DNA, 120 bp, Artificial Sequence
  ENSG00000178700_2 (sequence is synthesized)
aggcacgtaaaaaaatttgaagaagggaatttcgcggcattcttggcctggcttcctggcgtagccagcaagttcggaggtgttaaccgctgctgtcatgtttcttttgctaaactgcat

SEQ ID NO: 625681 - DNA, 120 bp, Artificial Sequence
  ENSG00000178700_3 (sequence is synthesized)
cgtcgctgtgtcccaaaacatgggcatcggcaagaacggggacctgcccaggccgccgctcaggaatgaattcaggtatttccagagaatgaccacaacttcttcagtagagggtaaaca

SEQ ID NO: 625682 - DNA, 120 bp, Artificial Sequence
  ENSG00000178700_4 (sequence is synthesized)
gaatctggtgattatgggtaggaagacctggttctccattcctgagaagaatcgacctttaaaggatagaattaatttagttctcagcagagaactcaaggaacctccacaaggagctca

SEQ ID NO: 625683 - DNA, 120 bp, Artificial Sequence
  ENSG00000178700_5 (sequence is synthesized)
ttttcttgccagaagtttggatgatgccttaaaacttactgaacgaccagaattagcaaataaagtagacatgatttggatagttggtggcagttctgtttataaggaagccatgaatca

SEQ ID NO: 625684 - DNA, 120 bp, Artificial Sequence
  ENSG00000178700_6 (sequence is synthesized)
cctaggccatcttaaactatttgtgacaaggatcatgcaggactttgaaagtgacacgtttttttcagaaattgacttggagaaatataaacttctgcctgaatacccaggtgttctctc

SEQ ID NO: 625685 - DNA, 120 bp, Artificial Sequence
  ENSG00000178700_7 (sequence is synthesized)
tgatgtccaggaggggaaacacatcaagtacaaatttgaagtatgtgagaaggatgattaatatgaaggtgttttctggtttaagttgttccccctccctctgagaaaagtatgcatttt

SEQ ID NO: 625686 - DNA, 120 bp, Artificial Sequence
  ENSG00000178700_8 (sequence is synthesized)
tacattagaaaagggacttttgttgacttcagatctatggataattatttctaagcaacgtgtttttattcctcactaatcttggctatatcagataccatttatgaaacattcttgcta

SEQ ID NO: 625687 - DNA, 120 bp, Artificial Sequence
  ENSG00000178700_9 (sequence is synthesized)
taactgtctctccaagaccccgactgagtccccagcacctgctacagtgagctgccattccacacccatcacatgtggcactcttgccactccttgacattgtcaggcttttctaatgtt

SEQ ID NO: 625688 - DNA, 120 bp, Artificial Sequence
  ENSG00000178700_10 (sequence is synthesized)
ggtagtatttattaaagatgaagatgcacatacccttcagctgagcagtttcactagtaggaaataccaaaagcttcgtacatgtatatccagaggtttgtagacaaatgttgcagcctt

SEQ ID NO: 625689 - DNA, 120 bp, Artificial Sequence
  ENSG00000178700_11 (sequence is synthesized)
ttttgtaacagtgaaaaactgaaaacaacctggaagtccagtgatgggaaaatgaatatatttctgtcttagattggggaacccaaagcagattccaagactgaaatttaagtgaaagca

SEQ ID NO: 625690 - DNA, 120 bp, Artificial Sequence
  ENSG00000178700_12 (sequence is synthesized)
gtttatttgctaggtcataccagaagtcatcaatcgaagtatggagaaatggaactgagaaggtaaaaaccagttcaaaatcagtgaggaggttctcaatggtaacgagctccatactgc

SEQ ID NO: 625691 - DNA, 120 bp, Artificial Sequence
  ENSG00000178700_13 (sequence is synthesized)
tgagatacagggaaacggaggggagaaagctagagtatttaacccccactccttggttgtcagctccctgtcctgtgtgtgggcagaacgtactccacctactcaatagcaagttccagg

SEQ ID NO: 625692 - DNA, 120 bp, Artificial Sequence
  ENSG00000178700_14 (sequence is synthesized)
tgtttgctgaaagaagctgctgtaatgtacgggaacggtgaatgccaaacacttaaagcaattccatgtttaagtatgtaaactcttcatacttttttttttttttctttttaagacaga

SEQ ID NO: 625693 - DNA, 120 bp, Artificial Sequence
  ENSG00000178700_15 (sequence is synthesized)
atacttttttttttttttctttttaagacagaatttcactcttgttgcccaggcggagtgcaatggaacaaccttggctcacggcaacttcagccttcccaggttcaagcaattctcctg

SEQ ID NO: 625694 - DNA, 120 bp, Artificial Sequence
  ENSG00000178700_16 (sequence is synthesized)
atcctcctgcctcggccttcaggggtgctgggattacaggcatcagccactgcacttggcagatcttcattcttttagtaaaaagtataaagccacacatggtttatttgaaatatttta

SEQ ID NO: 625695 - DNA, 120 bp, Artificial Sequence
  ENSG00000178700_17 (sequence is synthesized)
taatttaaaaaagtacagaagcaggaaaaccaattctaggttcaagtgagggatgatggtagtttgaaccaaaggattgcatgtggtaagaaattgtgatttaagatatattttaaagtt

SEQ ID NO: 625696 - DNA, 120 bp, Artificial Sequence
  ENSG00000178700_18 (sequence is synthesized)
ggaagtagcaggatattctgatggagtttgactttggttttgggcccactgagtttgagatgcctttgagaaatgaaagaagtagagagagaattaaaaactggccaggagtggtggctc

SEQ ID NO: 625697 - DNA, 120 bp, Artificial Sequence
  ENSG00000178700_19 (sequence is synthesized)
ggggctgaggtgggtggatcacctgagaccagcttgggcaacatggtggagccctgtctctacagaagatacaaaaattggctgggcattgtggcacacacctgtagtctcgtctactca

SEQ ID NO: 625698 - DNA, 120 bp, Artificial Sequence
  ENSG00000178700_20 (sequence is synthesized)
cacacctgtagtctcgtctactcacggggctgagatggaggattcaattgagcccatgagttcaaggctgcagtgagtcgtgattttgccactgcactcctgcctgggtgacagaagaga

SEQ ID NO: 625699 - DNA, 120 bp, Artificial Sequence
  ENSG00000178700_21 (sequence is synthesized)
ccctgtctcaaaaaagaatctgaaaacaacggaaccatgccttcagaattctataaagttattttcaactgataaatctatattcaggcaaagaatcaagggtgaaggtaaaataataca

SEQ ID NO: 625700 - DNA, 120 bp, Artificial Sequence
  ENSG00000178700_22 (sequence is synthesized)
tttttagacaagcaaagactcaggggttacatgtaccctttcttgggaagctatcggagaaaatactccagcaaaatgaaggcgtacacaaaccagagaatgacgtggatccagcaaata

SEQ ID NO: 625701 - DNA, 120 bp, Artificial Sequence
  ENSG00000178700_23 (sequence is synthesized)
aatagtatccaacacaggcaatattccagctatggagctagctttaaaaagaaacagtaaaaatactaatagattagctgggtgggatggcccatgcttgtagtcccagctactcaggag

SEQ ID NO: 625702 - DNA, 120 bp, Artificial Sequence
  ENSG00000178700_24 (sequence is synthesized)
agcaaaaggatggcttgagcccaagagttcagagcagcctggccaccatagtgagatcccttctcttaaaaataataggttattgccagatttggggcatttggaaagaagtgcattgaa

SEQ ID NO: 625703 - DNA, 120 bp, Artificial Sequence
  ENSG00000178700_25 (sequence is synthesized)
aaaaaaaaaaaaacaaaaaaaaacaagggggaagggttggttaggcaataattaattctagggcaggaagaagtacaggataggaagtaagagcatcatacgctgtttttctcaacaatg

SEQ ID NO: 625704 - DNA, 120 bp, Artificial Sequence
  ENSG00000178700_26 (sequence is synthesized)
gtttttctcaacaatgggcaatatgtacatagtcataatgatgtggtgactgactgcttagcccctaaatctggtaactactttgggacaatatggggggaaaagtgaagatagtgatgg

SEQ ID NO: 625705 - DNA, 120 bp, Artificial Sequence
  ENSG00000178700_27 (sequence is synthesized)
tgtaagagctaaatcctcatctgtcatatcaagaaatcactatataatgtataacataatcaagaaatgactaagtagttatgtgaagaaaagaatggaacattgctagaagagttagaa

SEQ ID NO: 625706 - DNA, 120 bp, Artificial Sequence
  ENSG00000178700_28 (sequence is synthesized)
gtcattgctccagagaattaggagggatggggcaggggactgttaggatgcattataaactgaagaggcttttaaagattacatgtattaatatatgtattcacttgaaaaactaaaaaa

SEQ ID NO: 625707 - DNA, 120 bp, Artificial Sequence
  ENSG00000178700_29 (sequence is synthesized)
atagtaattttttaaaacccatggaggtaactaccagaaggaaaaactaagagaatgaaaagtgctttcctctggaaagaacaagtcgcaggactgttttcattgtaagacttttggagc

SEQ ID NO: 625708 - DNA, 120 bp, Artificial Sequence
  ENSG00000178700_30 (sequence is synthesized)
actgttttcattgtaagacttttggagccatttgattttacttaaccattttcatatatttctttaataaaaataattctatcttaataaaaagttacactcattcattaaaaaaagaat

SEQ ID NO: 625709 - DNA, 120 bp, Artificial Sequence
  ENSG00000178700_31 (sequence is synthesized)
atttctgttagagaaaggcaatgtgttatacttggaaagaggtcatattaattttatcacatttttgggactcagcatctttatattttctgattttaaataaacaactttgcttatgaa

SEQ ID NO: 625710 - DNA, 120 bp, Artificial Sequence
  ENSG00000178700_32 (sequence is synthesized)
aaaacaaatctcagccctccaagagctggagggagtgggtactagaagtctgcgagctggacggaagggactcagcattacagcactcagcattatttcagggcttgacagtaaagccaa

SEQ ID NO: 625711 - DNA, 120 bp, Artificial Sequence
  ENSG00000178700_33 (sequence is synthesized)
cctgcccaggccgccgctcaggaatgaattcagagatgggcttttgccatgttgcacagactggttttgaactcctgaccaagtgatctgcactccttggcttcccaaagtgctgggatt

SEQ ID NO: 625712 - DNA, 71 bp, Artificial Sequence
  ENSG00000178700_34 (sequence is synthesized)
ctgggattacagatgtgagccaccctgcccagccaatgtaactgcaatatttcaaacaatgtactttctaa

SEQ ID NO: 625713 - DNA, 120 bp, Artificial Sequence
  ENSG00000178700_35 (sequence is synthesized)
tatatacaatatctgtgaagcctaaaaagcaataaaaaatacaatcacacttagaaacaaattattattctaaataaattagtgttgtttgaaacatttcacttcatataaaaacaaata

SEQ ID NO: 625714 - DNA, 120 bp, Artificial Sequence
  ENSG00000178718_0 (sequence is synthesized)
cttttcagaagaggtcacgcccgcttccccacgcgcctcggggaacagcctggcccaaagcctcactcctcacgtcccaggggtggacgggggtccgggagcctcgagctccgggcaggc

SEQ ID NO: 625715 - DNA, 120 bp, Artificial Sequence
  ENSG00000178718_1 (sequence is synthesized)
gtggcgaggctgaagtctgggtcttccgcgccccgcgaggaccacgccgcgacgtaatcgcccgcggggaggcgcggagtggagccgcagccagctcctcccgcactctgctgaccgcgc

SEQ ID NO: 625716 - DNA, 120 bp, Artificial Sequence
  ENSG00000178718_2 (sequence is synthesized)
actagctgtccttgaggcaagaatacttgggagcggaaaaaaggtgggggtgttccccggggcgggggaggaggggcaaggccccagcaagcctcttggaaatctctccctgggagggga

SEQ ID NO: 625717 - DNA, 120 bp, Artificial Sequence
  ENSG00000178718_3 (sequence is synthesized)
cgaggggcggccttcagttgcaaatgggaagggctcggataccggatttgaagcagtgtttgcacggcaagcgcagcttttatttagactgccggtttgtgagggttggctctcagagcg

SEQ ID NO: 625718 - DNA, 120 bp, Artificial Sequence
  ENSG00000178718_4 (sequence is synthesized)
ctgatggcgattatagtggaacttcaccttcacctgctcatgcgccccgcagcgcgcccgctcccacgcccgcgtagctgaggacccagactcgccaggaaaggctagtgaggctggggc

SEQ ID NO: 625719 - DNA, 120 bp, Artificial Sequence
  ENSG00000178718_5 (sequence is synthesized)
gcccggccgggccgggtcaggggaggggcctggcggcaggggcggggcctcagctaaaggcgcggagcacccggcgccgagagcgctgagtagagcggcgcccgctcgagagaagtgggg

SEQ ID NO: 625720 - DNA, 120 bp, Artificial Sequence
  ENSG00000178718_6 (sequence is synthesized)
ctcgagagaagtggggccgagatcgcgccgtcccagcccgcccgccggcgtctgcgctgctccggcgcccttacccctgctggcccttgcaaggcgcgaccggcggccatgcagccccgg

SEQ ID NO: 625721 - DNA, 120 bp, Artificial Sequence
  ENSG00000178718_7 (sequence is synthesized)
ccgccccatggcaaagccggcggtcccggcgacgacggcgcatggagaacttccgtaaggtgcgctccgaagaggcgccagcggggtgcggggccgagggaggcggcccgggctccggcc

SEQ ID NO: 625722 - DNA, 120 bp, Artificial Sequence
  ENSG00000178718_8 (sequence is synthesized)
ccttcgcagacctggcgccgggcgcggtgcacatgcgggtcaaggaaggcagcaagatccggaacctgatggccttcgccaccgccagcatggcgcagccagccacgcgcgccatcgtct

SEQ ID NO: 625723 - DNA, 120 bp, Artificial Sequence
  ENSG00000178718_9 (sequence is synthesized)
tcagcggctgcggccgggccaccaccaaaaccgtcacgtgcgccgagatcctcaagcgccgcctggcgggcctgcaccaggtcacgcggctgcgctaccggagcgtacgcgaggtgtggc

SEQ ID NO: 625724 - DNA, 120 bp, Artificial Sequence
  ENSG00000178718_10 (sequence is synthesized)
agagcctcccgcctgggcccacgcagggtcagacgcctggcgagccggccgctagtctcagcgtacttaagaacgtgcccggcctcgccatcctactttccaaggacgcgctggatccgc

SEQ ID NO: 625725 - DNA, 120 bp, Artificial Sequence
  ENSG00000178718_11 (sequence is synthesized)
gacagcccggctaccagcccccgaatccccatcctggtccctcgtccccgccagccgcgccagcgtccaagaggagcctaggggaacccgcagctggagaaggctccgcgaagcgatcgc

SEQ ID NO: 625726 - DNA, 120 bp, Artificial Sequence
  ENSG00000178718_12 (sequence is synthesized)
actgtgggccacctagtccggcaggatcttccgccagcgcctccaccttcagatgtacctccagcctttcactcctcggtcctccggagcccacaacctggacacagctcctcaagacag

SEQ ID NO: 625727 - DNA, 120 bp, Artificial Sequence
  ENSG00000178718_13 (sequence is synthesized)
gtagcatggaccttaaggcgacaagagaggggccccaggagtggcaggagaggatccccgaccaccctagggaaacttcgtgcgataattgctgcttatgcccgtgttgcgtgaagacac

SEQ ID NO: 625728 - DNA, 120 bp, Artificial Sequence
  ENSG00000178718_14 (sequence is synthesized)
ggaacttcaccttttctgggaccttctttgggggagaatggtggacagtgggattctggaaacttgtttgggacccccaagggttaaagccacccagcattcacgaagagcacctgaagt

SEQ ID NO: 625729 - DNA, 120 bp, Artificial Sequence
  ENSG00000178718_15 (sequence is synthesized)
atggaagctgagaagagttattggaatcacccccaccgttgacagaggaaggcagggggtgagaattaactgcttgagggtaggagagtctgagatgtgggggccctattccgctccccg

SEQ ID NO: 625730 - DNA, 120 bp, Artificial Sequence
  ENSG00000178718_16 (sequence is synthesized)
ccctgggacagttttcctttctagttttctttcccctgcttcagaggagcatctctgagggttctagctcttttaacaccccttttccccctgctggcccagagggagacccaggactga

SEQ ID NO: 625731 - DNA, 120 bp, Artificial Sequence
  ENSG00000178718_17 (sequence is synthesized)
actctccaggcctcctcccctgagccctgcagctggctggagtcttgcttccaataaaacaagcacaaaaatggctgtgtcccccattttttttctaaccacccgcctgtgcagagacag

SEQ ID NO: 625732 - DNA, 120 bp, Artificial Sequence
  ENSG00000178718_18 (sequence is synthesized)
ctctcgcctggccccttgtgtctcccctcccctccagccttgcgtcctgagtctttggagtcttcagggtcaggcacagagactgaacagcttcaaaatggtgcaaggcactgcccagtc

SEQ ID NO: 625733 - DNA, 120 bp, Artificial Sequence
  ENSG00000178718_19 (sequence is synthesized)
cctggcttcttcctctctcctcccccactccgccctcccgggctggccctggcctcagaggctgttgcaaatgggggcccgtgtacccctgtacatcgccactaagggaaagggagcggc

SEQ ID NO: 625734 - DNA, 120 bp, Artificial Sequence
  ENSG00000178718_20 (sequence is synthesized)
acattgtttttctgggaggggaaggaaggagtggaaggacagcatcgatgaactctcctggaggtcactgcaaagggtggcagaccctgctgaggtccctgaatctgcagcctccagaca

SEQ ID NO: 625735 - DNA, 120 bp, Artificial Sequence
  ENSG00000178718_21 (sequence is synthesized)
ataaactgaaccttacccagaaggctggcacaaagcccccagctctgtgggtaggatctccccttcactgccctctctctgagaaaggacagcacacccttgggaaagggggaggagaga

SEQ ID NO: 625736 - DNA, 120 bp, Artificial Sequence
  ENSG00000178718_22 (sequence is synthesized)
gactgagcacaaatccactgctggaaattactattcagcagagaagctgggtcttgggctgtgaatcactgcaggcctcctgataagctgctgcctccagccctgcacagctgtctgttg

SEQ ID NO: 625737 - DNA, 120 bp, Artificial Sequence
  ENSG00000178718_23 (sequence is synthesized)
agagataacagcctcataagcttctctgcccaactccaagccagctggggggtgggggtgctgctgtgtgctggaagagctctggtgagttgggggtggcatacagccccaggatctcag

SEQ ID NO: 625738 - DNA, 120 bp, Artificial Sequence
  ENSG00000178718_24 (sequence is synthesized)
aagcagatctcatcccatgcaactcagcagcacccctggaaagggggagatgcggaagaatgtatttataagtcattttgctggcagaaccctgaaataaatcctgctggtgacaagaga

SEQ ID NO: 625739 - DNA, 80 bp, Artificial Sequence
  ENSG00000178719_0 (sequence is synthesized)
aaggccccgctgcgtcttccgagccgcaggcgcaggcccagctgagcggccgccgagcgggtgcgggtgcgggcgcatcg

SEQ ID NO: 625740 - DNA, 80 bp, Artificial Sequence
  ENSG00000178719_1 (sequence is synthesized)
cccaggagcgcctctgacccgctgcgccgcgcggcctgccgcccccgcccccgcccccacgcggatcttgcgcatccgag

SEQ ID NO: 625741 - DNA, 120 bp, Artificial Sequence
  ENSG00000178719_2 (sequence is synthesized)
cgtggccgcctcgggggcggaccgcggaacccgaggccatgtcccatgaaaagagttttttggtgtctggggacaactatcctccccccaaccctggatatccgggggggccccagccac

SEQ ID NO: 625742 - DNA, 120 bp, Artificial Sequence
  ENSG00000178719_3 (sequence is synthesized)
ccatgcccccctatgctcagcctccctaccctggggccccttacccacagccccctttccagccctccccctacggtcagccagggtacccccatggccccagcccctacccccaagggg

SEQ ID NO: 625743 - DNA, 120 bp, Artificial Sequence
  ENSG00000178719_4 (sequence is synthesized)
gctacccacagggtccctacccccaagggggctacccacagggcccctacccacaagagggctacccacagggcccctacccccaagggggctacccccaggggccatatccccagagcc

SEQ ID NO: 625744 - DNA, 120 bp, Artificial Sequence
  ENSG00000178719_5 (sequence is synthesized)
ccttcccccccaacccctatggacagccacaggtcttcccaggacaagaccctgactcaccccagcatggaaactaccaggaggagggtcccccatcctactatgacaaccaggacttcc

SEQ ID NO: 625745 - DNA, 120 bp, Artificial Sequence
  ENSG00000178719_6 (sequence is synthesized)
ctgccaccaactgggatgacaagagcatccgacaggccttcatccgcaaggtgttcctagtgctgaccttgcagctgtcggtgaccctgtccacggtgtctgtgttcacttttgttgcgg

SEQ ID NO: 625746 - DNA, 120 bp, Artificial Sequence
  ENSG00000178719_7 (sequence is synthesized)
aggtgaagggctttgtccgggagaatgtctggacctactatgtctcctatgctgtcttcttcatctctctcatcgtcctcagctgttgtggggacttccggcgaaagcacccctggaacc

SEQ ID NO: 625747 - DNA, 120 bp, Artificial Sequence
  ENSG00000178719_8 (sequence is synthesized)
tgatcgccagcttctacaacaccgaggcagtcatcatggccgtgggcatcaccacagccgtctgcttcaccgtcgtcatcttctccatgcagacccgctacgacttcacctcatgcatgg

SEQ ID NO: 625748 - DNA, 120 bp, Artificial Sequence
  ENSG00000178719_9 (sequence is synthesized)
gcgtgctcctggtgagcatggtggtgctcttcatcttcgccattctctgcatcttcatccggaaccgcatcctggagatcgtgtacgcctcactgggcgctctgctcttcacctgcttcc

SEQ ID NO: 625749 - DNA, 120 bp, Artificial Sequence
  ENSG00000178719_10 (sequence is synthesized)
tcgcagtggacacccagctgctactggggaacaagcagctgtccctgagcccagaagagtatgtgtttgctgcgctgaacctgtacacagacatcatcaacatcttcctgtacatcctca

SEQ ID NO: 625750 - DNA, 120 bp, Artificial Sequence
  ENSG00000178719_11 (sequence is synthesized)
ccatcattggccgcgccaaggagtagccgagctccagctcgctgtgcccgctcaggtggcacggctggcctggaccctgcccctggcacggcagtgccagctgtacttcccctctctctt

SEQ ID NO: 625751 - DNA, 120 bp, Artificial Sequence
  ENSG00000178719_12 (sequence is synthesized)
gtccccaggcacagcctagggaaaaggatgcctctctccaaccctcctgtatgtacactgcagatacttccatttggacccgctgtggccacagcatggcccctttagtcctcccgcccc

SEQ ID NO: 625752 - DNA, 120 bp, Artificial Sequence
  ENSG00000178719_13 (sequence is synthesized)
cgccaaggggcaccaaggccacgtttccgtgccacctcctgtctactcattgttgcatgagccctgtctgccagcccaccccagggactgggggcagcaccaggtcccggggagagggat

SEQ ID NO: 625753 - DNA, 120 bp, Artificial Sequence
  ENSG00000178719_14 (sequence is synthesized)
tgagccaagaggtgagggtgcacgtcttccctcctgtcccagctccccagcctggcgtagagcacccctcccctcccccccacccccctggagtgctgccctctggggacatgcggagtg

SEQ ID NO: 625754 - DNA, 120 bp, Artificial Sequence
  ENSG00000178719_15 (sequence is synthesized)
ggggtcttatccctgtgctgagccctgagggcagagaggatggcatgtttcaggggagggggaagccttcctctcaatttgttgtcagtgaaattccaataaatgggatttgctctctgc

SEQ ID NO: 625755 - DNA, 120 bp, Artificial Sequence
  ENSG00000178719_16 (sequence is synthesized)
gttgttgggctcgcgggggtgggggggctcgggcctttgttggtcacagatggcccggggatttcctgggatagaaatagccgccggctccggccccttaaagctgcttaaggggcggga

SEQ ID NO: 625756 - DNA, 120 bp, Artificial Sequence
  ENSG00000178719_17 (sequence is synthesized)
gggatgcggaggggagggtccgggcacaccccacacgtccccggccgagaccccagcctccgcgctgagctcccacccgggagacgccggcagcggcgcaggcctccggttgcttgggcg

SEQ ID NO: 625757 - DNA, 120 bp, Artificial Sequence
  ENSG00000178726_0 (sequence is synthesized)
ccttccttttcccgaacgtccagggagggagggccgggcacttataaactcgagccctggccgatccgcatgtcagaggctgcctcgcaggggctgcgcgcagcggcaagaagtgtctgg

SEQ ID NO: 625758 - DNA, 120 bp, Artificial Sequence
  ENSG00000178726_1 (sequence is synthesized)
gctgggacggacaggagaggctgtcgccatcggcgtcctgtgcccctctgctccggcacggccctgtcgcagtgcccgcgctttccccggcgcctgcacgcggcgcgcctgggtaacatg

SEQ ID NO: 625759 - DNA, 120 bp, Artificial Sequence
  ENSG00000178726_2 (sequence is synthesized)
cttggggtcctggtccttggcgcgctggccctggccggcctggggttccccgcacccgcagagccgcagccgggtggcagccagtgcgtcgagcacgactgcttcgcgctctacccgggc

SEQ ID NO: 625760 - DNA, 120 bp, Artificial Sequence
  ENSG00000178726_3 (sequence is synthesized)
cccgcgaccttcctcaatgccagtcagatctgcgacggactgcggggccacctaatgacagtgcgctcctcggtggctgccgatgtcatttccttgctactgaacggcgacggcggcgtt

SEQ ID NO: 625761 - DNA, 120 bp, Artificial Sequence
  ENSG00000178726_4 (sequence is synthesized)
ggccgccggcgcctctggatcggcctgcagctgccacccggctgcggcgaccccaagcgcctcgggcccctgcgcggcttccagtgggttacgggagacaacaacaccagctatagcagg

SEQ ID NO: 625762 - DNA, 120 bp, Artificial Sequence
  ENSG00000178726_5 (sequence is synthesized)
tgggcacggctcgacctcaatggggctcccctctgcggcccgttgtgcgtcgctgtctccgctgctgaggccactgtgcccagcgagccgatctgggaggagcagcagtgcgaagtgaag

SEQ ID NO: 625763 - DNA, 120 bp, Artificial Sequence
  ENSG00000178726_6 (sequence is synthesized)
gccgatggcttcctctgcgagttccacttcccagccacctgcaggccactggctgtggagcccggcgccgcggctgccgccgtctcgatcacctacggcaccccgttcgcggcccgcgga

SEQ ID NO: 625764 - DNA, 120 bp, Artificial Sequence
  ENSG00000178726_7 (sequence is synthesized)
gcggacttccaggcgctgccggtgggcagctccgccgcggtggctcccctcggcttacagctaatgtgcaccgcgccgcccggagcggtccaggggcactgggccagggaggcgccgggc

SEQ ID NO: 625765 - DNA, 120 bp, Artificial Sequence
  ENSG00000178726_8 (sequence is synthesized)
gcttgggactgcagcgtggagaacggcggctgcgagcacgcgtgcaatgcgatccctggggctccccgctgccagtgcccagccggcgccgccctgcaggcagacgggcgctcctgcacc

SEQ ID NO: 625766 - DNA, 120 bp, Artificial Sequence
  ENSG00000178726_9 (sequence is synthesized)
gcatccgcgacgcagtcctgcaacgacctctgcgagcacttctgcgttcccaaccccgaccagccgggctcctactcgtgcatgtgcgagaccggctaccggctggcggccgaccaacac

SEQ ID NO: 625767 - DNA, 120 bp, Artificial Sequence
  ENSG00000178726_10 (sequence is synthesized)
cggtgcgaggacgtggatgactgcatactggagcccagtccgtgtccgcagcgctgtgtcaacacacagggtggcttcgagtgccactgctaccctaactacgacctggtggacggcgag

SEQ ID NO: 625768 - DNA, 120 bp, Artificial Sequence
  ENSG00000178726_11 (sequence is synthesized)
tgtgtggagcccgtggacccgtgcttcagagccaactgcgagtaccagtgccagcccctgaaccaaactagctacctctgcgtctgcgccgagggcttcgcgcccattccccacgagccg

SEQ ID NO: 625769 - DNA, 120 bp, Artificial Sequence
  ENSG00000178726_12 (sequence is synthesized)
cacaggtgccagatgttttgcaaccagactgcctgtccagccgactgcgaccccaacacccaggctagctgtgagtgccctgaaggctacatcctggacgacggtttcatctgcacggac

SEQ ID NO: 625770 - DNA, 120 bp, Artificial Sequence
  ENSG00000178726_13 (sequence is synthesized)
atcgacgagtgcgaaaacggcggcttctgctccggggtgtgccacaacctccccggtaccttcgagtgcatctgcgggcccgactcggcccttgcccgccacattggcaccgactgtgac

SEQ ID NO: 625771 - DNA, 120 bp, Artificial Sequence
  ENSG00000178726_14 (sequence is synthesized)
tccggcaaggtggacggtggcgacagcggctctggcgagcccccgcccagcccgacgcccggctccaccttgactcctccggccgtggggctcgtgcattcgggcttgctcataggcatc

SEQ ID NO: 625772 - DNA, 120 bp, Artificial Sequence
  ENSG00000178726_15 (sequence is synthesized)
tccatcgcgagcctgtgcctggtggtggcgcttttggcgctcctctgccacctgcgcaagaagcagggcgccgccagggccaagatggagtacaagtgcgcggccccttccaaggaggta

SEQ ID NO: 625773 - DNA, 120 bp, Artificial Sequence
  ENSG00000178726_16 (sequence is synthesized)
gtgctgcagcacgtgcggaccgagcggacgccgcagagactctgagcggcctccgtccaggagcctggctccgtccaggagcctgtgcctcctcacccccagctttgctaccaaagcacc

SEQ ID NO: 625774 - DNA, 120 bp, Artificial Sequence
  ENSG00000178726_17 (sequence is synthesized)
tccccgcaccccccaagctgttttcttctattccatggctaactggcgagggggtgattagagggaggagaatgagcctcggcctcttccgtgacgtcactggaccactgggcaatgatg

SEQ ID NO: 625775 - DNA, 120 bp, Artificial Sequence
  ENSG00000178726_18 (sequence is synthesized)
gcaattttgtaacgaagacacagactgcgatttgtcccaggtcctcactaccgggcgcaggagggtgagcgttattggtcggcagccttctgggcagaccttgacctcgtgggctaggga

SEQ ID NO: 625776 - DNA, 120 bp, Artificial Sequence
  ENSG00000178726_19 (sequence is synthesized)
tgactaaaatatttattttttttaagtatttaggtttttgtttgtttcctttgttcttacctgtatgtctccagtatccactttgcacagctctccggtctctctctctctacaaactcc

SEQ ID NO: 625777 - DNA, 120 bp, Artificial Sequence
  ENSG00000178726_20 (sequence is synthesized)
cacttgtcatgtgacaggtaaactatcttggtgaatttttttttcctagccctctcacatttatgaagcaagccccacttattccccattcttcctagttttctcctcccaggaactggg

SEQ ID NO: 625778 - DNA, 120 bp, Artificial Sequence
  ENSG00000178726_21 (sequence is synthesized)
ccaactcacctgagtcaccctacctgtgcctgaccctacttcttttgctcttagctgtctgctcagacagaacccctacatgaaacagaaacaaaaacactaaaaataaaaatggccatt

SEQ ID NO: 625779 - DNA, 120 bp, Artificial Sequence
  ENSG00000178726_22 (sequence is synthesized)
tgctttttcaccagatttgctaatttatcctgaaatttcagattcccagagcaaaataattttaaacaaaggttgagatgtaaaaggtattaaattgatgttgctggactgtcatagaaa

SEQ ID NO: 625780 - DNA, 120 bp, Artificial Sequence
  ENSG00000178726_23 (sequence is synthesized)
ttacacccaaagaggtatttatctttacttttaaacagtgagcctgaattttgttgctgttttgatttgtactgaaaaatggtaattgttgctaatcttcttatgcaatttccttttttg

SEQ ID NO: 625781 - DNA, 120 bp, Artificial Sequence
  ENSG00000178726_24 (sequence is synthesized)
ttattattacttatttttgacagtgttgaaaatgttcagaaggttgctctagattgagagaagagacaaacacctcccaggagacagttcaagaaagcttcaaactgcatgattcatgcc

SEQ ID NO: 625782 - DNA, 120 bp, Artificial Sequence
  ENSG00000178726_25 (sequence is synthesized)
aattagcaattgactgtcactgttccttgtcactggtagaccaaaataaaaccagctctactggtcttgtggaattgggagcttgggaatggatcctggaggatgcccaattagggccta

SEQ ID NO: 625783 - DNA, 120 bp, Artificial Sequence
  ENSG00000178726_26 (sequence is synthesized)
gccttaatcaggtcctcagagaatttctaccatttcagagaggccttttggaatgtggcccctgaacaagaattggaagctgccctgcccatgggagctggttagaaatgcagaatccta

SEQ ID NO: 625784 - DNA, 120 bp, Artificial Sequence
  ENSG00000178726_27 (sequence is synthesized)
ggctccaccccatccagttcatgagaatctatatttaacaagatctgcagggggtgtgtctgctcagtaatttgaggacaaccattccagactgcttccaattttctggaatacatgaaa

SEQ ID NO: 625785 - DNA, 120 bp, Artificial Sequence
  ENSG00000178726_28 (sequence is synthesized)
tatagatcagttataagtagcaggccaagtcaggcccttattttcaagaaactgaggaattttctttgtgtagctttgctctttggtagaaaaggctaggtacacagctctagacactgc

SEQ ID NO: 625786 - DNA, 120 bp, Artificial Sequence
  ENSG00000178726_29 (sequence is synthesized)
cacacagggtctgcaaggtctttggttcagctaagctaggaatgaaatcctgcttcagtgtatggaaataaatgtatcatagaaatgtaacttttgtaagacaaaggttttcctcttcta

SEQ ID NO: 625787 - DNA, 120 bp, Artificial Sequence
  ENSG00000178726_30 (sequence is synthesized)
ttttgtaaactcaaaatatttgtacatagttatttatttattggagataatctagaacacaggcaaaatccttgcttatgacatcacttgtacaaaataaacaaataacaatgtgctctc

SEQ ID NO: 625788 - DNA, 120 bp, Artificial Sequence
  ENSG00000178726_31 (sequence is synthesized)
gggttgtgtgtctgttcacttttcctccctcagtgccctcattttatgtcattaaatggggctcacaaaccatgcaaatgctatgagatgcatggagggctgccctgtaccccagcactt

SEQ ID NO: 625789 - DNA, 120 bp, Artificial Sequence
  ENSG00000178726_32 (sequence is synthesized)
gtgttgtctggtggtggcaccatctctgattttcaaagctttttccagaggctattattttcactgtagaatgatttcatgctatctctgtgtgcacaaatatttattttctttctgtaa

SEQ ID NO: 625790 - DNA, 120 bp, Artificial Sequence
  ENSG00000178726_33 (sequence is synthesized)
ccataacaacttcatatatgaggacttgtgtctctgtgcttttaaatgcataaatgcattataggatcatttgttggaatgaattaaataaacccttcctggggcatctggcgaatccca

SEQ ID NO: 625791 - DNA, 120 bp, Artificial Sequence
  ENSG00000178732_0 (sequence is synthesized)
ggatcccagggttcagtacaggcgcgaacgctcctgtgtgttgaccacactcccacggttgctttttcagacatgctgagggggactctactgtgcgcggtgctcgggcttctgcgcgcc

SEQ ID NO: 625792 - DNA, 120 bp, Artificial Sequence
  ENSG00000178732_1 (sequence is synthesized)
cagcccttcccctgtccgccagcttgcaagtgtgtcttccgggacgccgcgcagtgctcggggggcgacgtggcgcgcatctccgcgctaggcctgcccaccaacctcacgcacatcctg

SEQ ID NO: 625793 - DNA, 120 bp, Artificial Sequence
  ENSG00000178732_2 (sequence is synthesized)
ctcttcggaatgggccgcggcgtcctgcagagccagagcttcagcggcatgaccgtcctgcagcgcctcatgatctccgacagccacatttccgccgttgcccccggcaccttcagtgac

SEQ ID NO: 625794 - DNA, 120 bp, Artificial Sequence
  ENSG00000178732_3 (sequence is synthesized)
ctgataaaactgaaaaccctgaggctgtcgcgcaacaaaatcacgcatcttccaggtgcgctgctggataagatggtgctcctggagcagttgtttttggaccacaatgcgctaaggggc

SEQ ID NO: 625795 - DNA, 120 bp, Artificial Sequence
  ENSG00000178732_4 (sequence is synthesized)
attgaccaaaacatgtttcagaaactggttaacctgcaggagctcgctctgaaccagaatcagctcgatttccttcctgccagtctcttcacgaatctggagaacctgaagttgttggat

SEQ ID NO: 625796 - DNA, 120 bp, Artificial Sequence
  ENSG00000178732_5 (sequence is synthesized)
ttatcgggaaacaacctgacccacctgcccaaggggttgcttggagcacaggctaagctcgagagacttctgctccactcgaaccgccttgtgtctctggattcggggctgttgaacagc

SEQ ID NO: 625797 - DNA, 120 bp, Artificial Sequence
  ENSG00000178732_6 (sequence is synthesized)
ctgggcgccctgacggagctgcagttccaccgaaatcacatccgttccatcgcacccggggccttcgaccggctcccaaacctcagttctttgacgctttcgagaaaccaccttgcgttt

SEQ ID NO: 625798 - DNA, 120 bp, Artificial Sequence
  ENSG00000178732_7 (sequence is synthesized)
ctcccctctgcgctctttcttcattcgcacaatctgactctgttgactctgttcgagaacccgctggcagagctcccgggggtgctcttcggggagatggggggcctgcaggagctgtgg

SEQ ID NO: 625799 - DNA, 120 bp, Artificial Sequence
  ENSG00000178732_8 (sequence is synthesized)
ctgaaccgcacccagctgcgcaccctgcccgccgccgccttccgcaacctgagccgcctgcggtacttaggggtgactctgagcccgcggctgagcgcgcttccgcagggcgccttccag

SEQ ID NO: 625800 - DNA, 120 bp, Artificial Sequence
  ENSG00000178732_9 (sequence is synthesized)
ggccttggcgagctccaggtgctcgccctgcactccaacggcctgaccgccctccccgacggcttgctgcgcggcctcggcaagctgcgccaggtgtccctgcgccgcaacaggctgcgc

SEQ ID NO: 625801 - DNA, 120 bp, Artificial Sequence
  ENSG00000178732_10 (sequence is synthesized)
gccctgccccgtgccctcttccgcaatctcagcagcctggagagcgtccagctcgaccacaaccagctggagaccctgcctggcgacgtgtttggggctctgccccggctgacggaggtc

SEQ ID NO: 625802 - DNA, 120 bp, Artificial Sequence
  ENSG00000178732_11 (sequence is synthesized)
ctgttggggcacaactcctggcgctgcgactgtggcctggggcccttcctggggtggctgcggcagcacctaggcctcgtgggcggggaagagcccccacggtgcgcaggccctggggcg

SEQ ID NO: 625803 - DNA, 120 bp, Artificial Sequence
  ENSG00000178732_12 (sequence is synthesized)
ctgccggggggtgacgcggagtgcccgggcccccggggcccgcctccccgccccgctgcggacagctcctcggaagcccctgtccacccagccttggctcccaacagctcagaaccctgg

SEQ ID NO: 625804 - DNA, 120 bp, Artificial Sequence
  ENSG00000178732_13 (sequence is synthesized)
gctcccaacagctcagaaccctgggtgtgggcccagccggtgaccacgggcaaaggtcaagatcatagtccgttctgggggttttattttctgcttttagctgttcaggccatgatcacc

SEQ ID NO: 625805 - DNA, 120 bp, Artificial Sequence
  ENSG00000178732_14 (sequence is synthesized)
agagagagagcccttgggtaaaccaatgggaaaatcttctaattacttagaacctgaccagatgtggctcggaggggaatccagacccgctgctgtcttgctctccctcccctccccact

SEQ ID NO: 625806 - DNA, 120 bp, Artificial Sequence
  ENSG00000178732_15 (sequence is synthesized)
cctcctctcttcttcctcttctctctcactgccacgccttcctttccctcctcctccccctctccgctctgtgctcttcattctcacaggcccgcaacccctcctctctgtgtcccccgc

SEQ ID NO: 625807 - DNA, 120 bp, Artificial Sequence
  ENSG00000178732_16 (sequence is synthesized)
ccgttcctggaaactgagcttgacgtttgtaaactgtggttgcctgccttccccagctcccacgcgggtgtgcgctgacactgccgggggcgctggactgtgttggacccatccgtgctc

SEQ ID NO: 625808 - DNA, 120 bp, Artificial Sequence
  ENSG00000178732_17 (sequence is synthesized)
cgctgtgcctggcttggcgtctggtggagagaggggcctcttcagtgtctactgagtaaggggacagctccaggccggggcctgtctcctgcacagagtaagccggtaaatgtttgtgaa

SEQ ID NO: 625809 - DNA, 120 bp, Artificial Sequence
  ENSG00000178732_18 (sequence is synthesized)
atcaatgcgtggataaaggaacacatgccatccaagtgatgatggcttttcctggagggaaaggataggctgttgctctatctaattttttgtttttgtttttggacagtctagctctgt

SEQ ID NO: 625810 - DNA, 79 bp, Artificial Sequence
  ENSG00000178732_19 (sequence is synthesized)
gttctgagtagctgggattagaggcgtgtgccactacacccggctaatttttgtactttttaaagtagagacggggctt

SEQ ID NO: 625811 - DNA, 120 bp, Artificial Sequence
  ENSG00000178732_20 (sequence is synthesized)
ccggctaatttttgtactttttaaagtagagacggggctttgccatattggcctggctgatctcaaactcctggtcttgaactcctggccacaagtgatctgcccgccttggcctcccaa

SEQ ID NO: 625812 - DNA, 120 bp, Artificial Sequence
  ENSG00000178732_21 (sequence is synthesized)
ctgggattacaggcgtaagccactacacctggccctcttcatcgaattttatttgagaagtagagctcttgccattttttcccttgctccatttttctcactttatgtctctctgaccta

SEQ ID NO: 625813 - DNA, 120 bp, Artificial Sequence
  ENSG00000178732_22 (sequence is synthesized)
cctatgggctacttgggagagcactggactccattcatgcatgagcattttcaggataagcgacttctgtgaggctgagagaggaagaaaacacggagccttccctccaggtgcccagtg

SEQ ID NO: 625814 - DNA, 120 bp, Artificial Sequence
  ENSG00000178732_23 (sequence is synthesized)
taggtccagcgtgtttcctgagcctcctgtgagtttccacttgctttacatccatgcaacatgtcattttgaaactggattgatttgcatttcctggaactctgccacctcatttcacaa

SEQ ID NO: 625815 - DNA, 120 bp, Artificial Sequence
  ENSG00000178732_24 (sequence is synthesized)
gcatttatggagcagttaacatgtgactggtattcatgaatataatgataagcttgattctagttcagctgctgtcacagtctcatttgttcttccaactgaaagccgtaaaacctttgt

SEQ ID NO: 625816 - DNA, 120 bp, Artificial Sequence
  ENSG00000178732_25 (sequence is synthesized)
tgctttaattgaatgtctgtgcttatgagaggcagtggttaaaacaggggctggcgagttgacaactgtgggttcaaatcccagctctaccacttactaactgcatgggactttgggtaa

SEQ ID NO: 625817 - DNA, 120 bp, Artificial Sequence
  ENSG00000178732_26 (sequence is synthesized)
gacacctgcttacattctctaagccttggtttcctgaaccttaaaacaggataacatagtacctgcttcgtagagtttttgtgagaattaaaggcaataaagcatataatgacttagccc

SEQ ID NO: 625818 - DNA, 120 bp, Artificial Sequence
  ENSG00000178732_27 (sequence is synthesized)
agcggcctgcaggcaatacatgttaatgaatgttagctattattactaaaggatgagcaattattattggcatcatgatttctaaagaagagctttgagttggtatttttctctgtgtat

SEQ ID NO: 625819 - DNA, 120 bp, Artificial Sequence
  ENSG00000178732_28 (sequence is synthesized)
aagggtaagtccgaactttctcagactggaggttacattcacatcagtctgtcttcccctgcggatggcctcagccctgggtggccagactctgtgctcacaatccagagcaatggatcc

SEQ ID NO: 625820 - DNA, 120 bp, Artificial Sequence
  ENSG00000178741_0 (sequence is synthesized)
aacccgcgagcttacaccggcttctctctgtcctcagcccgcgcgccgccatcgccgtcatgctgggcgccgctctccgccgctgcgctgtggccgcaaccacccgggccgaccctcgag

SEQ ID NO: 625821 - DNA, 120 bp, Artificial Sequence
  ENSG00000178741_1 (sequence is synthesized)
gcctcctgcactccgcccggacccccggccccgccgtggctatccagtcagttcgctgctattcccatgggtcacaggagacagatgaggagtttgatgctcgctgggtaacatacttca

SEQ ID NO: 625822 - DNA, 120 bp, Artificial Sequence
  ENSG00000178741_2 (sequence is synthesized)
acaagccagatatagatgcctgggaattgcgtaaagggataaacacacttgttacctatgatatggttccagagcccaaaatcattgatgctgctttgcgggcatgcagacggttaaatg

SEQ ID NO: 625823 - DNA, 120 bp, Artificial Sequence
  ENSG00000178741_3 (sequence is synthesized)
attttgctagtacagttcgtatcctagaggttgttaaggacaaagcaggacctcataaggaaatctacccctatgtcatccaggaacttagaccaactttaaatgaactgggaatctcca

SEQ ID NO: 625824 - DNA, 120 bp, Artificial Sequence
  ENSG00000178741_4 (sequence is synthesized)
ctggaaatactgatgataacatattaccttatttgaacaagttttcctttattgagtaccaagccatgtaatggtaacttggactttaataaaagggaaatgagtttgaactgaaattag

SEQ ID NO: 625825 - DNA, 120 bp, Artificial Sequence
  ENSG00000178741_5 (sequence is synthesized)
gtatttgtttcatgtgtttgcattaataagcagaaaattaagtgctgtattggtttcatggttttgctgccctcttacatgctgagagaactgtgttaattctctggaaaccatctgaca

SEQ ID NO: 625826 - DNA, 120 bp, Artificial Sequence
  ENSG00000178741_6 (sequence is synthesized)
tgaaaatcagcttcattaatatgtttgggtgccctagcttgtaaattagctgaaggctagaagtcatttatatagaattttcttgttgacaccctaggcttaggggactggttgtctgtg

SEQ ID NO: 625827 - DNA, 120 bp, Artificial Sequence
  ENSG00000178741_7 (sequence is synthesized)
gggatagatcaaattgtgtacctttccaaaacaggttttaatgatgtttaaaagtggtcactgagatagtcttgaggatgtgctatgcagtagccaagccctcttacggtgtgttcctct

SEQ ID NO: 625828 - DNA, 120 bp, Artificial Sequence
  ENSG00000178741_8 (sequence is synthesized)
cttagtgcccctttcctttcctacctgttcttcccttgcagtggtgtattagccttggacattaaaacatttgctttgtaaatttggaggcattctgattaaacagctgagtaaaacaaa

SEQ ID NO: 625829 - DNA, 120 bp, Artificial Sequence
  ENSG00000178741_9 (sequence is synthesized)
ctgcccgccgcctcgagtagtggaggacctgaaagcgcgcccccggggcctccccccgcgcaacttcctggctgtgccaccgcggacagctatccagtcagttcgctgctattcccatgg

SEQ ID NO: 625830 - DNA, 120 bp, Artificial Sequence
  ENSG00000178750_0 (sequence is synthesized)
aatctattttcacttgctattaacagcaaacgtacaactttatctcttatttgacttcattatttggctttcaaattaacaacatgaaaactatacagaaattagtctgtgccctataag

SEQ ID NO: 625831 - DNA, 120 bp, Artificial Sequence
  ENSG00000178750_1 (sequence is synthesized)
acagagatttagataatttgttcaaaacatgagatgatattcagatattctctcaaaggcaggactccaacaccgcaggtggaaaaccaacaaaaggaagaaaacagaaaggaggaaagg

SEQ ID NO: 625832 - DNA, 120 bp, Artificial Sequence
  ENSG00000178750_2 (sequence is synthesized)
gaagatgaaagaccgacttcaagaactaaagcagagaacaaaggaaattgaactctctagagacagtcatgtatcaactacagaaacagaggaacaaggggtgtttctacagcaagctgt

SEQ ID NO: 625833 - DNA, 120 bp, Artificial Sequence
  ENSG00000178750_3 (sequence is synthesized)
tatttatgaaagagagcctgtagctgagagacacctacatgaaatccaaaaactacaggaaagtattaacaatttggcagataatgttcaaaaatttgggcagcaacagaaaagtctggt

SEQ ID NO: 625834 - DNA, 120 bp, Artificial Sequence
  ENSG00000178750_4 (sequence is synthesized)
agaatacatcaacagaagtttgaatgatttagttaaagaagttaaaaagtcagaggttgaaaatggtccatcttcagtggtcacaaggatacttaaatctcagcatgctgcaatgttccg

SEQ ID NO: 625835 - DNA, 120 bp, Artificial Sequence
  ENSG00000178750_5 (sequence is synthesized)
ccattttcagcaaatcatgtttatatacaatgacacaatagcagcaaagcaagagaagtgcaagacatttattttacgtcagcttgaagttgctggaaaagagatgtctgaagaagatgt

SEQ ID NO: 625836 - DNA, 120 bp, Artificial Sequence
  ENSG00000178750_6 (sequence is synthesized)
aaatgatatgcttcatcaaggaaaatgggaagtttttaatgaaagcttacttacagaaatcaatatcactaaagcacaactttcagagattgaacagagacacaaggaacttgttaattt

SEQ ID NO: 625837 - DNA, 120 bp, Artificial Sequence
  ENSG00000178750_7 (sequence is synthesized)
ggagaaccaaataaaggatttaagggatcttttcattcagatatctcttttagtagaggaacaaggagagagcatcaacaatattgaaatgacagtgaatagtacaaaagagtatgttaa

SEQ ID NO: 625838 - DNA, 120 bp, Artificial Sequence
  ENSG00000178750_8 (sequence is synthesized)
caatactaaagagaaatttggactagctgtaaaatacaaaaaaagaaatccttgcagagtactgtgttgttggtgctgtccatgctgtagctcaaaataaagaagctattttaaaacttt

SEQ ID NO: 625839 - DNA, 80 bp, Artificial Sequence
  ENSG00000178752_0 (sequence is synthesized)
ccccggggagagccgcgcggggccggccgctcgtccgccggagcccaccgctgagcgtgcacacagcgtcgacccccggg

SEQ ID NO: 625840 - DNA, 120 bp, Artificial Sequence
  ENSG00000178752_1 (sequence is synthesized)
ccaccgctgagcgtgcacacagcgtcgacccccgggacgcctggatgctcttcgtcaggcagagtgacaagggtgtcaatggcaagaagaggagcaggggcaaggccaagaagctgaagt

SEQ ID NO: 625841 - DNA, 120 bp, Artificial Sequence
  ENSG00000178752_2 (sequence is synthesized)
tcggcttgccagggccccctgggcctcccggtccccagggccccccaggccccatcatcccacccgaggcgctgctgaaggagttccagctgctgctgaaaggtgcggtgcggcagcggg

SEQ ID NO: 625842 - DNA, 120 bp, Artificial Sequence
  ENSG00000178752_3 (sequence is synthesized)
agcgcgcggagcccgaaccctgtacgtgtggccccgccgggccggtcgctgcgagcctcgccccggtctcggccaccgccggggaggacgacgacgacgtggtgggggacgtgctggcac

SEQ ID NO: 625843 - DNA, 120 bp, Artificial Sequence
  ENSG00000178752_4 (sequence is synthesized)
ccctggccccggggccgcgggcgccgcgcgtggaggccgctttcctctgccgcctgcgccgggacgcgttggtggagcggcgcgcgctgcacgagcttggcgtctactacctgcccgacg

SEQ ID NO: 625844 - DNA, 120 bp, Artificial Sequence
  ENSG00000178752_5 (sequence is synthesized)
acctgcccgacgccgagggtgccttccgccgcggcccgggcctgaacttgaccagcggccagtacagggcgcccgtggctggcttctacgctctcgccgccacgctgcacgtggcgctcg

SEQ ID NO: 625845 - DNA, 120 bp, Artificial Sequence
  ENSG00000178752_6 (sequence is synthesized)
gggagccgccgaggagggggccgccgcgcccccgggaccacctgcgcctgctcatctgcatccagtcccggtgccagcgcaacgcctccctggaggccatcatgggcctggagagcagca

SEQ ID NO: 625846 - DNA, 120 bp, Artificial Sequence
  ENSG00000178752_7 (sequence is synthesized)
gtgagctcttcaccatctctgtgaatggcgtcctgtacctgcagatggggcagtggacctccgtgttcttggacaacgccagcggctgctccctcacagtgcgcagtggctcccacttca

SEQ ID NO: 625847 - DNA, 120 bp, Artificial Sequence
  ENSG00000178752_8 (sequence is synthesized)
gtgctgtcctcctgggcgtgtgagcggccaccacaggcccttcctctcaggggcaaatggagcacagatctagacaatgtgtggacagtgtcagagtagcagtggccacatggaggagga

SEQ ID NO: 625848 - DNA, 120 bp, Artificial Sequence
  ENSG00000178752_9 (sequence is synthesized)
ggcccacccggaactctgcccacactggccactgcagttcagcccacagagccactgcaggcaggcctacggacgtgacacgcacgctggtggtcccggagccagggttgattcaggaca

SEQ ID NO: 625849 - DNA, 120 bp, Artificial Sequence
  ENSG00000178752_10 (sequence is synthesized)
ccatcttgggctcttatccaggaaagaaagagtcggcgtgcctgggggcacctgctagtctccagctgcaggccgactctttcctggcctgctcagcacctgcccagatggcctctgcgt

SEQ ID NO: 625850 - DNA, 120 bp, Artificial Sequence
  ENSG00000178752_11 (sequence is synthesized)
tgcaccagccagggcccctacctgggagagggtcagctgacgcagggctgagggggctgccacagggacgtacgctgtgtgttcttactgcttagaagggacggggtcactcaccactcc

SEQ ID NO: 625851 - DNA, 120 bp, Artificial Sequence
  ENSG00000178752_12 (sequence is synthesized)
cctggtctccatctgggctccttggtcttccctgcccctcccctaaccgtgttctacctgccagtggagctgagcactgcctagcctgggccagaggggcactggacaagggcctttggg

SEQ ID NO: 625852 - DNA, 120 bp, Artificial Sequence
  ENSG00000178752_13 (sequence is synthesized)
ggacagtaagtctgggcccagcttctagttctaatgtgtgcaagattaactcacaaattcacctcagaaggcctttccaaatgggagctccactcttcccctcctctgcaaatcttcaca

SEQ ID NO: 625853 - DNA, 120 bp, Artificial Sequence
  ENSG00000178752_14 (sequence is synthesized)
gccaaggccccttccaccctctccagaggtggatgagatcccttttcccctcccctctgaggtgctgactcactggtaggagccacccaccagaggaaagatctagaacgtctttacaga

SEQ ID NO: 625854 - DNA, 120 bp, Artificial Sequence
  ENSG00000178752_15 (sequence is synthesized)
ttggagacagccgggcctgctgacccatcatccgaatagctgaagcagagtcttccaccaggggtgccagggcctggctgggtccagcggctctgggatgagcctcccaagcatctttcc

SEQ ID NO: 625855 - DNA, 120 bp, Artificial Sequence
  ENSG00000178752_16 (sequence is synthesized)
cacttgggtggccatgcggcgctgacattggacaggtggtggacgagagatggtcccgagaaagggtggtcttgggagggctggtcccaagcctgctgtgctcctgtggcagtgatgggg

SEQ ID NO: 625856 - DNA, 120 bp, Artificial Sequence
  ENSG00000178752_17 (sequence is synthesized)
cctggggatggggacggcagctctcatgaggacacacaggctgtgagcccgcagcctcctcaaatgtagcctcccacattttccccaaagtacaggactgtcccagagtaggtagtgaag

SEQ ID NO: 625857 - DNA, 120 bp, Artificial Sequence
  ENSG00000178752_18 (sequence is synthesized)
aggacaaggccctcggcagcgacctccagggcctcctacctgctgaggaagagttaacccactgcctccccacacaacaggctacgaagaacctggtgcctcaggacctcctgggagcca

SEQ ID NO: 625858 - DNA, 120 bp, Artificial Sequence
  ENSG00000178752_19 (sequence is synthesized)
agctggtctggcaagggcgctcaggcctgggagagaagggagcaatggccagtcaccttcaccttctaactaactagcctccggatgaggtggctgccaccaggcccgaatgatccccag

SEQ ID NO: 625859 - DNA, 120 bp, Artificial Sequence
  ENSG00000178752_20 (sequence is synthesized)
gagcccagcttccaaaccccaacatcgaatcaaacatctccatccccaagtgcagtaacacacaaaaaccaaacactctgccctgggaaaggcctggtgcgattctcagtaggactcaca

SEQ ID NO: 625860 - DNA, 120 bp, Artificial Sequence
  ENSG00000178752_21 (sequence is synthesized)
cccaccctacctagaagtactgggctggcctgggtactgcatccgtgtgttttgataagggggtgatgtggccacgcccttatctagatttcactttgtatccactgggcacagatattc

SEQ ID NO: 625861 - DNA, 120 bp, Artificial Sequence
  ENSG00000178752_22 (sequence is synthesized)
tagagaacttatctttcactcttgtaaaagccacatatccacatctctttcatttttctcagtgtgttatgcagcaatttattaaagtatttattgtctaataaatactgccaagtggaa

SEQ ID NO: 625862 - DNA, 120 bp, Artificial Sequence
  ENSG00000178752_23 (sequence is synthesized)
gtaccccggcccggaccccacacccgcattcgctcggcctccacaagctggaggtggttaaacaggcactggacggggcttccgcccgttcacaccccaccgtggcctaggtgaccccac

SEQ ID NO: 625863 - DNA, 120 bp, Artificial Sequence
  ENSG00000178752_24 (sequence is synthesized)
gaccccacaccttcttccaggtctcccggtctacttctgcccctatcaggccttcccttcacagcaactgggagctgttaaaaatgacctttccagctgggcgcggtggctcacgcctgt

SEQ ID NO: 625864 - DNA, 120 bp, Artificial Sequence
  ENSG00000178752_25 (sequence is synthesized)
gcatccagtcccggtgccagcgcaacgcctccctggaggccatcatgggcctggagagcagcagtgagctcttcaccatctctgtgaatggcgtcctgtacctgcaggctacgaagaacc

SEQ ID NO: 625865 - DNA, 80 bp, Artificial Sequence
  ENSG00000178761_0 (sequence is synthesized)
actctttcgccacgggcggggttgcaccatccggcagggcggggcccggccatggcgaccgcggagcccagcgggcgcgc

SEQ ID NO: 625866 - DNA, 120 bp, Artificial Sequence
  ENSG00000178761_1 (sequence is synthesized)
cgggaccgcgcgccgggagctgcggggccaccctccgggcagatcggtaatagagccctccgtctgggggagcgcacccccgcggccgtggaaaagcgggggccatacatggtgacgcgc

SEQ ID NO: 625867 - DNA, 120 bp, Artificial Sequence
  ENSG00000178761_2 (sequence is synthesized)
gcaccctccattcaagccaagctgcagaagcaccgggacctggccaaggccgttctgcggagaaaaggcatgctgggggcctcgccgaaccgcccagactcttcagggaaaaggtcagtg

SEQ ID NO: 625868 - DNA, 120 bp, Artificial Sequence
  ENSG00000178761_3 (sequence is synthesized)
aagtttaacaagggctatactgctcttagccagagtccagatgaaaacctggtgtccctcgactctgacagtgatggggagctgggatccagatactcctccgggtattcatctgcagag

SEQ ID NO: 625869 - DNA, 120 bp, Artificial Sequence
  ENSG00000178761_4 (sequence is synthesized)
caggtgaaccaggatgtgagccggcagctgcttcaggatgggtatcacctggatgagattccagatgacgaggacttggacctcatcccccctaagcccatggcctcttcaacatgctcc

SEQ ID NO: 625870 - DNA, 120 bp, Artificial Sequence
  ENSG00000178761_5 (sequence is synthesized)
tgctgctggtgctgtcttggggactcttcttcctgtaccctccagtagacattaccctccaaggtgggccctgctcaccatgaggcctacagagccctgttggccactcatagctcacac

SEQ ID NO: 625871 - DNA, 120 bp, Artificial Sequence
  ENSG00000178761_6 (sequence is synthesized)
agtgcagtgagcactgaagtcactgacccctagaaagtgacctgcaggtagcccttacctgttgcttctcaggccagaggcccccatctgggctgtgggctgataggtagaattctgtag

SEQ ID NO: 625872 - DNA, 120 bp, Artificial Sequence
  ENSG00000178761_7 (sequence is synthesized)
ttttcctctgctgttggagcagagtttggagaagtcactttaataagggcaagacagaaaattctggttcttatggtgggtgacaaaggtggctaaggaaaacacttgcagacagcttga

SEQ ID NO: 625873 - DNA, 120 bp, Artificial Sequence
  ENSG00000178761_8 (sequence is synthesized)
ttggtatttgtcatagtgcttcagggaggcaaaaagggagctcttgtgcccaggctgtgctagatagtgttgaatggaggcagaaaatagcactttatggtttattatagctggcaatcc

SEQ ID NO: 625874 - DNA, 120 bp, Artificial Sequence
  ENSG00000178761_9 (sequence is synthesized)
aaaaaagaaactgtttgagaccagttcgagaaattccgtttgctctattcttcctagctctaagatggtttgcaggcttgaccttcaagacagcataaagtgagtccttttgtccctctt

SEQ ID NO: 625875 - DNA, 120 bp, Artificial Sequence
  ENSG00000178761_10 (sequence is synthesized)
caggttgcacctgtctaactatgacagggatcatagcaggttgcttaatgatacagcaggatcctggcttccagaatccctggacctggggcatccccaactggtccaaccgtccgggtg

SEQ ID NO: 625876 - DNA, 120 bp, Artificial Sequence
  ENSG00000178761_11 (sequence is synthesized)
agtttagtgattctggtttgcccttccctagttagagaaaaactgctctgacatgttcatatttatttatttgtatttccttggtctgggtgagtttcttcacccagtctttgagctaaa

SEQ ID NO: 625877 - DNA, 120 bp, Artificial Sequence
  ENSG00000178761_12 (sequence is synthesized)
gattaggtcgaaggtactggggctggccccagaagcctgcagtttttattattaccagcagagggagctacagggagcagtccggtgccttcctattgtttactttttaaacttttgaga

SEQ ID NO: 625878 - DNA, 120 bp, Artificial Sequence
  ENSG00000178761_13 (sequence is synthesized)
gtgtgggctttgtcctagactgaggcttacagacaggaagggtaagagagacctaagccagctcctagacccttgcctgaggaaatcagtccaccagtgtagagggcctcccttcactcc

SEQ ID NO: 625879 - DNA, 120 bp, Artificial Sequence
  ENSG00000178761_14 (sequence is synthesized)
agcatggaccattctattgccagattcttctggtcacagcatgggccttactggatactcaggattgggctttaagcagacctctgggtgtgacacagcctctttcagcccccagcccaa

SEQ ID NO: 625880 - DNA, 120 bp, Artificial Sequence
  ENSG00000178761_15 (sequence is synthesized)
acagcagaaataggcataatttctgctgtgacaccccctacccacaaattggagagtatatcttgctatactctataccaagcctctttctagaatttttccaacaggttttgttttgtt

SEQ ID NO: 625881 - DNA, 87 bp, Artificial Sequence
  ENSG00000178761_16 (sequence is synthesized)
agcctctttctagaatttttccaacaggttttgttttgttttttggcttaactcagaaccatggtgagcgttctgctttgttttgtt

SEQ ID NO: 625882 - DNA, 120 bp, Artificial Sequence
  ENSG00000178761_17 (sequence is synthesized)
ggcccaagcagtcctcccacatggtgagctttgaatgggcatagacagggttcccagcccaatagtcgggattggggtataggttctacatgggaaagtatccagtctcttgctttactc

SEQ ID NO: 625883 - DNA, 120 bp, Artificial Sequence
  ENSG00000178761_18 (sequence is synthesized)
agtgtcctgtgaccaccagaggcatgagagggacaacacactcttttcgctctaccacaaggggtgactagaagatgagcaagtctaataaaaagatacggccttatttgttatttgtct

SEQ ID NO: 625884 - DNA, 120 bp, Artificial Sequence
  ENSG00000178761_19 (sequence is synthesized)
gacaaccatccttacgatggtaatcctgtgagtgcctgatggacatctatctttgtgtttttctcaaaccatggaaggttgagaggaatatacagtatctgggggctgacttactctact

SEQ ID NO: 625885 - DNA, 120 bp, Artificial Sequence
  ENSG00000178761_20 (sequence is synthesized)
agctaggagcatcacagcagagagataggacagagaccagagtcatgccagcttggggtcttgggaagagaggcagatggttactctgttctggaatgggactctgcagctctatgcagt

SEQ ID NO: 625886 - DNA, 120 bp, Artificial Sequence
  ENSG00000178761_21 (sequence is synthesized)
ggccaacattctgagcactttgtgcaaatgcttgtagagctcaagaacatctccatccagaaccccttccccatctgcagagaccatgtccaggcctttcttgtgtctgcagaggtgaag

SEQ ID NO: 625887 - DNA, 120 bp, Artificial Sequence
  ENSG00000178761_22 (sequence is synthesized)
tgcacatgtggaaagggatcaaatgtagcacagtgtaaagaaagacagcaacacaggtagagggacccagtgtgtgctgggaggtggctgtggaaggtaagtatagacctacatctctgt

SEQ ID NO: 625888 - DNA, 120 bp, Artificial Sequence
  ENSG00000178761_23 (sequence is synthesized)
tggggaggtggtcagggcagaatggcctgggtgtttagcagcttctaggggtgagggtggcaggaccccaaaaccaaggccctctgcatcgttgttgtaataatcagctctggcatattc

SEQ ID NO: 625889 - DNA, 120 bp, Artificial Sequence
  ENSG00000178761_24 (sequence is synthesized)
agctgcaactgtccctgaagaagaggtttctgagctggctgaccccatgtaggagggtgttaccttgtagaaaaagctggagggacctggtgggacagtgcagtgaggcagggtagaaat

SEQ ID NO: 625890 - DNA, 120 bp, Artificial Sequence
  ENSG00000178761_25 (sequence is synthesized)
ggtcagttgtttagggccagtggccacataccaaaataccaccaatgtgcccagggccaaactgccttaattctgagtgctgtgtgttctgcaggtgacagtttcctgaggagaggggtg

SEQ ID NO: 625891 - DNA, 120 bp, Artificial Sequence
  ENSG00000178761_26 (sequence is synthesized)
tatccaggcttacctcccagcaggagtggtaccatatggtgtttatgtactactctatagaactcttggcttgcacttctacagctctgtacatttataagaataaatgcaatcacacta

SEQ ID NO: 625892 - DNA, 120 bp, Artificial Sequence
  ENSG00000178761_27 (sequence is synthesized)
tgaagatcgcctgatgcctttgcttgttccctgtctcctccaaggcccttcatgtacattccagggccgttctcttctgaacaatatcccttcccaggatggcttggttagaagactcat

SEQ ID NO: 625893 - DNA, 120 bp, Artificial Sequence
  ENSG00000178761_28 (sequence is synthesized)
ccagaaccaattgagggaaccagtattattcaaggcctgttcggacttgagttctgttgtgtgtggcctttgcttcaaaagtcttccagatgcccttgcatgctctccgcctgatgattt

SEQ ID NO: 625894 - DNA, 120 bp, Artificial Sequence
  ENSG00000178761_29 (sequence is synthesized)
ggaggcagggtgctctggtttaaggccgagctagcgattcccctgatgcaacctgtcaggttcactatctttaaaatgggaagaggaacaatctctcttttcctttaaggatgtgatagg

SEQ ID NO: 625895 - DNA, 120 bp, Artificial Sequence
  ENSG00000178761_30 (sequence is synthesized)
atcagataaagggcttcggaataagggagttctgtgagtgcacaggctcattcactatcattctcctcctctgttagggaggagaatggtggctggagtccccagcaatgaggacgaaga

SEQ ID NO: 625896 - DNA, 120 bp, Artificial Sequence
  ENSG00000178761_31 (sequence is synthesized)
gcagtgtgggaatggctagacctgtttttgtttgtttgtttttaacagaatagtaaactcggagctgcatagaaccttattcagtgcctccttttacagatgagggttgaaactcggaga

SEQ ID NO: 625897 - DNA, 120 bp, Artificial Sequence
  ENSG00000178761_32 (sequence is synthesized)
agtgaaggttaaccctaaccttttacccaaagacttgcagtttttgtgtcctctgattaaataagtggggagagggtgcttttcctagatcaggcaaggggaggtgtgcttttttccaag

SEQ ID NO: 625898 - DNA, 89 bp, Artificial Sequence
  ENSG00000178761_33 (sequence is synthesized)
tttcctagatcaggcaaggggaggtgtgcttttttccaagacctatgggaggagtagaatacaggccgggcgtggtggctcacgagggt

SEQ ID NO: 625899 - DNA, 120 bp, Artificial Sequence
  ENSG00000178761_34 (sequence is synthesized)
ccactgcactgcagcctgggtgacagggccagactctgtctccaaaaaaagaaaaaaagaatgagaacatacacattctgaggcactgtagccaggtacatggagctgcaggcagtggtg

SEQ ID NO: 625900 - DNA, 120 bp, Artificial Sequence
  ENSG00000178761_35 (sequence is synthesized)
caggcagtggtggctgtgaccagggagaaggcaagtcagtagtgcagtcaattctttctccttcagggcgaggactctgcctatccctgtgaaatgcctatgctttcatctatgtttggt

SEQ ID NO: 625901 - DNA, 120 bp, Artificial Sequence
  ENSG00000178761_36 (sequence is synthesized)
gcgcaccctccattcaagccaagctgcgtgagtgtggcccgatggtcgggggaggtttctccctgggcgggcggccgcgtccccagggcgggttccggagctccgctgggcctcggcccc

SEQ ID NO: 625902 - DNA, 120 bp, Artificial Sequence
  ENSG00000178761_37 (sequence is synthesized)
ggagggaaggggttagctgcagcctgctctcgcccctcaaaatccgttcggaaagagcggcctcccagccttcgggagacgcggcggagtggggaagacccggctgacccgggtccttta

SEQ ID NO: 625903 - DNA, 89 bp, Artificial Sequence
  ENSG00000178764_0 (sequence is synthesized)
cttttaaaaattttggccatcgttctccgtacgggggctttttctgtctgtctgtctggctggcaggctggctttccccctctttccca

SEQ ID NO: 625904 - DNA, 120 bp, Artificial Sequence
  ENSG00000178764_1 (sequence is synthesized)
gtctgtctggctggcaggctggctttccccctctttcccacggagcccgagccgggcgcccggtggggagtggggagtgggtggggggagccagcagagttccattttggaacgcccgtg

SEQ ID NO: 625905 - DNA, 120 bp, Artificial Sequence
  ENSG00000178764_2 (sequence is synthesized)
ccgcgtctccgcgttcccagcccgggtccccgcgttcacagccccagcgcaggtctggatgtaccgactgcttttggaataaaaagattcccaggatgtgagcaacacgggaccgatatg

SEQ ID NO: 625906 - DNA, 120 bp, Artificial Sequence
  ENSG00000178764_3 (sequence is synthesized)
atgcttcctggtgtgtttagtggttggtgccattccaattttctgtgctgaaatcattctgaaaactcaaacagtagacttcagcacacaaggaaagccaaagccatttgagggggaata

SEQ ID NO: 625907 - DNA, 120 bp, Artificial Sequence
  ENSG00000178764_4 (sequence is synthesized)
aagccaaaagcctttcaccttattcgttccaagaatctcaccgccccctccttatccccctccaaaaataagccattgcacacagacaggcagcatggctagcaaacgaaaatctacaac

SEQ ID NO: 625908 - DNA, 120 bp, Artificial Sequence
  ENSG00000178764_5 (sequence is synthesized)
tccatgcatggttcggacatcacaagtagtagaacaagatgtgcccgaggaagtagacagggccaaagagaaaggaatcggcacaccacagcctgacgtggccaaggacagttgggcagc

SEQ ID NO: 625909 - DNA, 120 bp, Artificial Sequence
  ENSG00000178764_6 (sequence is synthesized)
agaacttgaaaactcttccaaagaaaacgaagtgatagaggtgaaatctatgggggaaagccagtccaaaaaactccaaggtggttatgagtgcaaatactgcccctactccacgcaaaa

SEQ ID NO: 625910 - DNA, 120 bp, Artificial Sequence
  ENSG00000178764_7 (sequence is synthesized)
cctgaacgagttcacggagcatgtcgacatgcagcatcccaacgtgattctcaaccccctctacgtgtgtgcagaatgtaacttcacaaccaaaaagtacgactccctatccgaccacaa

SEQ ID NO: 625911 - DNA, 120 bp, Artificial Sequence
  ENSG00000178764_8 (sequence is synthesized)
ctccaagttccatcccggggaggccaacttcaagctgaagttaattaaacgcaataatcaaactgtcttggaacagtccatcgaaaccaccaaccatgtcgtgtccatcaccaccagtgg

SEQ ID NO: 625912 - DNA, 120 bp, Artificial Sequence
  ENSG00000178764_9 (sequence is synthesized)
ccctggaactggtgacagtgattctgggatctcggtgagtaaaacccccatcatgaagcctggaaaaccaaaagcggatgccaagaaggtgcccaagaagcccgaggagatcacccccga

SEQ ID NO: 625913 - DNA, 120 bp, Artificial Sequence
  ENSG00000178764_10 (sequence is synthesized)
gaaccacgtggaagggaccgcccgcctggtgacagacacagctgagatcctctcgagactcggcggggtggagctcctccaagacacattaggacacgtcatgccttctgtacagctgcc

SEQ ID NO: 625914 - DNA, 120 bp, Artificial Sequence
  ENSG00000178764_11 (sequence is synthesized)
accaaatatcaaccttgtgcccaaggtccctgtcccactaaatactaccaaatacaactctgccctggatacaaatgccacgatgatcaactctttcaacaagtttccttacccgaccca

SEQ ID NO: 625915 - DNA, 120 bp, Artificial Sequence
  ENSG00000178764_12 (sequence is synthesized)
ggctgagttgtcctggctgacagctgcctccaaacacccagaggagcacatcagaatctggtttgccacccagcgcttaaagcatggcatcagctggtccccagaagaggtggaggaggc

SEQ ID NO: 625916 - DNA, 120 bp, Artificial Sequence
  ENSG00000178764_13 (sequence is synthesized)
ccggaagaagatgttcaacggcaccatccagtcagtacccccgaccatcactgtgctgcccgcccagttggcccccacaaaggtgacgcagcccatcctccagacggctctaccgtgcca

SEQ ID NO: 625917 - DNA, 120 bp, Artificial Sequence
  ENSG00000178764_14 (sequence is synthesized)
gatcctcggccagactagcctggtgctgactcaggtgaccagcgggtcaacaaccgtctcttgctcccccatcacacttgccgtggcaggagtcaccaaccatggccagaagagaccctt

SEQ ID NO: 625918 - DNA, 120 bp, Artificial Sequence
  ENSG00000178764_15 (sequence is synthesized)
ggtgactccccaagctgcccccgaacccaagcgtccacacatcgctcaggtgccagagcccccacccaaggtggccaaccccccgctcacaccagccagtgaccgcaagaagacaaagga

SEQ ID NO: 625919 - DNA, 120 bp, Artificial Sequence
  ENSG00000178764_16 (sequence is synthesized)
gcagatagcacatctcaaggccagctttctccagagccagttccctgacgatgccgaggtttaccggctcatcgaggtgactggccttgccaggagcgagatcaagaagtggttcagtga

SEQ ID NO: 625920 - DNA, 120 bp, Artificial Sequence
  ENSG00000178764_17 (sequence is synthesized)
ccaccgatatcggtgtcaaaggggcatcgtccacatcaccagcgaatcccttgccaaagaccagttggccatcgcggcctcccgacacggtcgcacgtatcatgcgtacccagactttgc

SEQ ID NO: 625921 - DNA, 120 bp, Artificial Sequence
  ENSG00000178764_18 (sequence is synthesized)
tcttggaagacagctttttgaaaagttcttttcctacccaagcagaactggatcggctaagggtggagaccaagctgagcaggagagagatcgactcctggttctcggagaggcggaagc

SEQ ID NO: 625922 - DNA, 120 bp, Artificial Sequence
  ENSG00000178764_19 (sequence is synthesized)
ttcgagacagcatggaacaagctgtcttggattccatggggtctggcaaaaaaggccaagatgtgggagcccccaatggtgctctgtctcgactcgaccagctctccggtgcccagttaa

SEQ ID NO: 625923 - DNA, 120 bp, Artificial Sequence
  ENSG00000178764_20 (sequence is synthesized)
caagttctctgcccagcccttcgccagcaattgcaaaaagtcaagaacaggttcatctcctgaggagcacgtttgcaagaacccagtggcctactccccaggagtacgaccagttagcgg

SEQ ID NO: 625924 - DNA, 120 bp, Artificial Sequence
  ENSG00000178764_21 (sequence is synthesized)
ccaagactggcctggtccgaactgagattgtgcgttggttcaaggagaacagatgcttgctgaaaacgggaaccgtgaagtggatggagcagtaccagcaccagcccatggcagatgatc

SEQ ID NO: 625925 - DNA, 120 bp, Artificial Sequence
  ENSG00000178764_22 (sequence is synthesized)
acggctacgatgccgtagcaaggaaagcaacaaaacccatggccgagagcccaaagaacgggggtgatgtggttccacaatattacaaggaccccaaaaagctctgcgaagaggacttgg

SEQ ID NO: 625926 - DNA, 120 bp, Artificial Sequence
  ENSG00000178764_23 (sequence is synthesized)
agaagttggtgaccagggtaaaagtaggcagcgagccagcaaaagactgtttgccagcaaagccctcagaggccacctcagaccggtcagagggcagcagccgggacggccagggtagcg

SEQ ID NO: 625927 - DNA, 120 bp, Artificial Sequence
  ENSG00000178764_24 (sequence is synthesized)
acgagaacgaggagtcgagcgttgtggattacgtggaggtgacggtcggggaggaggatgcgatctcagatagatcagatagctggagtcaggctgcggcagaaggtgtgtcggaactgg

SEQ ID NO: 625928 - DNA, 120 bp, Artificial Sequence
  ENSG00000178764_25 (sequence is synthesized)
ctgaatcagactccgactgcgtccctgcagaggctggccaggcctagacagggaagtctgttagaactgctgtgctgatcaacgggacgctccgtctttgaagaaagaagagatggtctc

SEQ ID NO: 625929 - DNA, 120 bp, Artificial Sequence
  ENSG00000178764_26 (sequence is synthesized)
tccccagccatgggccacccttgccagtgactccaagtggaactacttagctcgcgtgtgcctggagggtgcgggaagtccagcgactctcagacgcacctcccagaggaccggtgggaa

SEQ ID NO: 625930 - DNA, 120 bp, Artificial Sequence
  ENSG00000178764_27 (sequence is synthesized)
ttgttcatagtgccaaagtcctactactgcgttttcaatgggtccttgtacatagtttgctcctctgccctagccctcacctcttgctatactggaaccgatttgtacaatgtgggaatt

SEQ ID NO: 625931 - DNA, 120 bp, Artificial Sequence
  ENSG00000178764_28 (sequence is synthesized)
ttgttacctttttaatcaagggcaacttccttttccagcactaccattgtaaggtttttttcaggagggagggctaaccaccttgcttttctcttttctctttttcttttttttattttt

SEQ ID NO: 625932 - DNA, 120 bp, Artificial Sequence
  ENSG00000178764_29 (sequence is synthesized)
gttttattaatttggggaaaggggtgttagcattagtgccatgatatctactggattttaagtagggagactttatttttaaaggtaggttgaaatttgggagatttctcggcaggaagg

SEQ ID NO: 625933 - DNA, 120 bp, Artificial Sequence
  ENSG00000178764_30 (sequence is synthesized)
gctgaaatccaggcccctgtctcaacttggagagaggtgacagacggcagatcttccaaatcaaattcctttccagttcttcccctggctgcctttttgggggtccctgccttagcccca

SEQ ID NO: 625934 - DNA, 120 bp, Artificial Sequence
  ENSG00000178764_31 (sequence is synthesized)
cacaaggctttctgaactgccaagaggggatctggcttctcaactgctcggcctcttgggccaggctgtgcccagccagccctgggagaactgggtagcaggtggctgacttctttaagc

SEQ ID NO: 625935 - DNA, 120 bp, Artificial Sequence
  ENSG00000178764_32 (sequence is synthesized)
acctttctaaataccagcagaagaggctcccgcctctgttagcatgatcagtactattgtgacattaaaacaacaacaataagatcttcctatctggagggtacagaggtgaatggcttt

SEQ ID NO: 625936 - DNA, 120 bp, Artificial Sequence
  ENSG00000178764_33 (sequence is synthesized)
ggttttcatttctcttcttcactgccttttctcggtgtggtatttgacaagattttagctcaaagcctcaccatgaattgattttttttgtttgtgtgtgtgtttgttttgggacaattt

SEQ ID NO: 625937 - DNA, 120 bp, Artificial Sequence
  ENSG00000178764_34 (sequence is synthesized)
tagatacctgagtgcactttttcagttagtcctaacttttaaaagaaggaaaaccaagagacatatctggtgtacgtgttgcagtatgaactctggttgcaatccctccccgtcccacac

SEQ ID NO: 625938 - DNA, 120 bp, Artificial Sequence
  ENSG00000178764_35 (sequence is synthesized)
tgccccccatttgagtacaccgcacaagtcaaacgctaggaagtttgaataaaaccaatttttctaacttgttgctcatttgttgtaactcaataaagcaaagactaaacatttttataa

SEQ ID NO: 625939 - DNA, 120 bp, Artificial Sequence
  ENSG00000178764_36 (sequence is synthesized)
cccagtcccccattgactccatcctgctagaaaagagatggacacccaattgctctgccctgcttttgatactgagtttctgtcccctgtaggtctggatgtaccgactgcttttggaat

SEQ ID NO: 625940 - DNA, 120 bp, Artificial Sequence
  ENSG00000178772_0 (sequence is synthesized)
ggattgagctgaccacaggccacaccagactcctctctgctcctgaggaagacagggcagcccggcgccacccgctcggccctcacgaagatgctccctggagcctggctgctctggacc

SEQ ID NO: 625941 - DNA, 120 bp, Artificial Sequence
  ENSG00000178772_1 (sequence is synthesized)
tccctcctgctcctggccaggcctgcccagccctgtcccatgggttgtgactgcttcgtccaggaggtgttctgctcagatgaggagcttgccaccgtcccactggacatcccgccatat

SEQ ID NO: 625942 - DNA, 120 bp, Artificial Sequence
  ENSG00000178772_2 (sequence is synthesized)
acgaaaaacatcatctttgtggagacctcgttcaccacattggaaaccagagcttttggcagtaaccccaacttgaccaaggtggtcttcctcaacactcagctctgccagtttaggccg

SEQ ID NO: 625943 - DNA, 120 bp, Artificial Sequence
  ENSG00000178772_3 (sequence is synthesized)
gatgccttcggggggctgcccaggctggaggacctggaggtcacaggcagtagcttcttgaacctcagcaccaacatcttctccaacctgacctcgctgggcaagctcaccctcaacttc

SEQ ID NO: 625944 - DNA, 120 bp, Artificial Sequence
  ENSG00000178772_4 (sequence is synthesized)
aacatgctggaggctctgcccgagggtcttttccagcacctggctgccctggagtccctccacctgcaggggaaccagctccaggccctgcccaggaggctcttccagcctctgacccat

SEQ ID NO: 625945 - DNA, 120 bp, Artificial Sequence
  ENSG00000178772_5 (sequence is synthesized)
ctgaagacactcaacctggcccagaacctcctggcccagctcccggaggagctgttccacccactcaccagcctgcagaccctgaagctgagcaacaacgcgctctctggtctcccccag

SEQ ID NO: 625946 - DNA, 120 bp, Artificial Sequence
  ENSG00000178772_6 (sequence is synthesized)
ggtgtgtttggcaaactgggcagcctgcaggagctcttcctggacagcaacaacatctcggagctgccccctcaggtgttctcccagctcttctgcctagagaggctgtggctgcaacgc

SEQ ID NO: 625947 - DNA, 120 bp, Artificial Sequence
  ENSG00000178772_7 (sequence is synthesized)
aacgccatcacgcacctgccgctctccatctttgcctccctgggtaatctgacctttctgagcttgcagtggaacatgcttcgggtcctgcctgccggcctctttgcccacaccccgtgc

SEQ ID NO: 625948 - DNA, 120 bp, Artificial Sequence
  ENSG00000178772_8 (sequence is synthesized)
ctggttggcctgtctctgacccataaccagctggagactgtcgctgagggcacctttgcccacctgtccaacctgcgttccctcatgctctcatacaatgccattacccacctcccagct

SEQ ID NO: 625949 - DNA, 120 bp, Artificial Sequence
  ENSG00000178772_9 (sequence is synthesized)
ggcatcttcagagacctggaggagttggtcaaactctacctgggcagcaacaaccttacggcgctgcacccagccctcttccagaacctgtccaagctggagctgctcagcctctccaag

SEQ ID NO: 625950 - DNA, 120 bp, Artificial Sequence
  ENSG00000178772_10 (sequence is synthesized)
aaccagctgaccacacttccggagggcatcttcgacaccaactacaacctgttcaacctggccctgcacggtaacccctggcagtgcgactgccacctggcctacctcttcaactggctg

SEQ ID NO: 625951 - DNA, 120 bp, Artificial Sequence
  ENSG00000178772_11 (sequence is synthesized)
cagcagtacaccgatcggctcctgaacatccagacctactgcgctggccctgcctacctcaaaggccaggtggtgcccgccttgaatgagaagcagctggtgtgtcccgtcacccgggac

SEQ ID NO: 625952 - DNA, 120 bp, Artificial Sequence
  ENSG00000178772_12 (sequence is synthesized)
cggacgaaagcaaggcagggggcagctgggatctggctgtgcaggaaagggcagcccggagccagtgcacctacagcaaccccgagggcaccgtggtgctcgcctgtgaccaggcccagt

SEQ ID NO: 625953 - DNA, 120 bp, Artificial Sequence
  ENSG00000178772_13 (sequence is synthesized)
gtcgctggctgaacgtccagctctctcctcagcagggctccctgggactgcagtacaatgctagtcaggagtgggacctgaggtcgagctgcggttctctgcggctcaccgtgtctatcg

SEQ ID NO: 625954 - DNA, 120 bp, Artificial Sequence
  ENSG00000178772_14 (sequence is synthesized)
aggctcgggcagcagggccctagtagcagcgcatacaggagctggggaagggggcctctggggcctgaccaggcgacaggtaggggcggaggggagctgagtctccgaagccttggcttt

SEQ ID NO: 625955 - DNA, 120 bp, Artificial Sequence
  ENSG00000178772_15 (sequence is synthesized)
tcacatgcaagggacagggttacatccccaaggtgagggggtggagtctggtctgctccactaaccagggtctcctcctcctcttccttcatcgcttctcctggagtgtgcggcctaaca

SEQ ID NO: 625956 - DNA, 120 bp, Artificial Sequence
  ENSG00000178772_16 (sequence is synthesized)
aggccatccttatgccttgcaaagcaccctcaaaagctgcaccacagcctggagaataaaatatcctcagccctgatgcctccccattatgtaacacccaaccgctctcacctacaccct

SEQ ID NO: 625957 - DNA, 120 bp, Artificial Sequence
  ENSG00000178772_17 (sequence is synthesized)
gaggtctattcactgcatcccagtgatacaaagtggaggccactgccttctgacatctggctcaaaagcccagtgtctgtttccatttatttccctggaatttcatttaaaattggtata

SEQ ID NO: 625958 - DNA, 120 bp, Artificial Sequence
  ENSG00000178772_18 (sequence is synthesized)
gagaaaaaaaggatgtgacagaagcagagatgaccagaaagcacaggggcagggttctgactggcgtgtgggagaccctgtggccggcacccacctccacacgaggactaagctctgatt

SEQ ID NO: 625959 - DNA, 120 bp, Artificial Sequence
  ENSG00000178772_19 (sequence is synthesized)
cggcacccacctccacacgaggactaagctctgatttttttatcttgcccaaattcctacctaaggggtctagggagtcgcgccttacaaatcataaattctcatcagatgggttttatt

SEQ ID NO: 625960 - DNA, 120 bp, Artificial Sequence
  ENSG00000178772_20 (sequence is synthesized)
atggcataacattacaagacgaggcaaaaatatttaacccccaaatatatttccttgccctaccttgaacttgccctgcagagtctcttgtgaggagaatccacatcctataaagaagcc

SEQ ID NO: 625961 - DNA, 120 bp, Artificial Sequence
  ENSG00000178772_21 (sequence is synthesized)
cctttcccctttgttttccttcctttctttccagtccaggagatcatcaactaagagccaggcaccccttttaagtcgataagaaacagtttacaacctgctctctctctctctgaagtc

SEQ ID NO: 625962 - DNA, 120 bp, Artificial Sequence
  ENSG00000178772_22 (sequence is synthesized)
tgctgagagcttcccctgcacaataaaacttggcctccacgatcctttatcttaacctgaacattcctttccattgatcccaggtcttcagctaagctcaaccaattgtcaaccagaaaa

SEQ ID NO: 625963 - DNA, 86 bp, Artificial Sequence
  ENSG00000178772_23 (sequence is synthesized)
tcaaccagaaaatgtttaaatttacctacagcctggaagcacccacccccgctgcttcgagttgtcctgcctttctgaactccctc

SEQ ID NO: 625964 - DNA, 120 bp, Artificial Sequence
  ENSG00000178772_24 (sequence is synthesized)
cctcattcctccctaaaatgtataaaaccaagctgtacctcgaccaccttgggcacatgttcccaggccctcctgaggtctgtgtcacgggccatggccactcatatttggctcagaata

SEQ ID NO: 625965 - DNA, 80 bp, Artificial Sequence
  ENSG00000178773_0 (sequence is synthesized)
gcgcccggcaggcgttcagggaagcgcggccacgcctgggccggccaccatttcccgggcgccgcggcggcgccgactcg

SEQ ID NO: 625966 - DNA, 120 bp, Artificial Sequence
  ENSG00000178773_1 (sequence is synthesized)
cgaacgccgggagcatgagcgcgggctcggagcgcggggcggcggcaacccccgggggtttgcccgcgccctgcgcctcgaaggtggagctgcggctcagctgccggcacctgctggacc

SEQ ID NO: 625967 - DNA, 120 bp, Artificial Sequence
  ENSG00000178773_2 (sequence is synthesized)
cccgctcaccaagtccgaccccagcgtggcgttgctgcagcaggcgcagggccagtgggtgcaggtgggcagaaccgaggtggtccggagcagcctgcatcccgtgttctccaaggtctt

SEQ ID NO: 625968 - DNA, 120 bp, Artificial Sequence
  ENSG00000178773_3 (sequence is synthesized)
cacggtggactactacttcgaggaggtgcagaggctgcgctttgaggtgtacgacacgcatgggcccagcggcttcagctgtcaggaggacgatttcctggggggcatggagtgcaccct

SEQ ID NO: 625969 - DNA, 120 bp, Artificial Sequence
  ENSG00000178773_4 (sequence is synthesized)
ggggcagccagcccaaaagtggcttctgcaagtcgtgatgagagtgtctgttgatgtgctgggccctgctggacactgcgctaagcacttcctgtgctgcacggaatcctcacaccttgc

SEQ ID NO: 625970 - DNA, 120 bp, Artificial Sequence
  ENSG00000178773_5 (sequence is synthesized)
caggacgggtccttcttttttattgaggtatgatgacctctgcctcccctgggcgactgctggcgccgtgaggtggtggacgtgcaggggtggccacacgcagggatggcagattgtggc

SEQ ID NO: 625971 - DNA, 120 bp, Artificial Sequence
  ENSG00000178773_6 (sequence is synthesized)
ccagaagaaggtgacccgcccgctgctgctcaagtttggcaggaacgctggcaagtccaccatcacggtgatcgccgaggacatctcggggaacaacggctacgtggagctctccttccg

SEQ ID NO: 625972 - DNA, 120 bp, Artificial Sequence
  ENSG00000178773_7 (sequence is synthesized)
ggccaggaagctggacgacaaggacctcttcagcaagtccgaccccttcctggagctctacagggtcaacgacgaccagggcttgcagctggtgtacaggacggaggtggtgaagaacaa

SEQ ID NO: 625973 - DNA, 120 bp, Artificial Sequence
  ENSG00000178773_8 (sequence is synthesized)
cctgaacccggtgtgggaggccttcaaagtctctctgagttccctctgcagctgcgaggagacaaggcctctaaagtgcctggtctgggattacgactctcgaggaaagcacgacttcat

SEQ ID NO: 625974 - DNA, 120 bp, Artificial Sequence
  ENSG00000178773_9 (sequence is synthesized)
cggagaattctctaccaccttcgaggagatgcagaaggcctttgaggaggggcaggcccagtgggactgtgtgaaccccaaatacaagcagaagagacgcagttataagaactcaggagt

SEQ ID NO: 625975 - DNA, 120 bp, Artificial Sequence
  ENSG00000178773_10 (sequence is synthesized)
ggtcgtcctggctgacctcaagttccacagggtgtactccttcctggactatatcatgggcggctgccagatccacttcaccgtggccattgacttcaccgcctccaatggagacccgcg

SEQ ID NO: 625976 - DNA, 120 bp, Artificial Sequence
  ENSG00000178773_11 (sequence is synthesized)
actacatcaacccctaccagccgaacgagtacctgaaggcactggtgtccgtgggcgagatctgccaggactatgacagtgacaagaggttttccgctttggggtttggagcccggatcc

SEQ ID NO: 625977 - DNA, 120 bp, Artificial Sequence
  ENSG00000178773_12 (sequence is synthesized)
ctcccaagtatgaggtgtcccatgactttgccatcaatttcaaccctgaggacgatgagtgtgaaggcatccagggcgtggtggaggcctaccagaactgcctgcccagggtccagctct

SEQ ID NO: 625978 - DNA, 120 bp, Artificial Sequence
  ENSG00000178773_13 (sequence is synthesized)
acggccccaccaacgtggcgcccatcatctccaaggtggcacgcgtggcggcggccgaggagagcaccgggaaagcctctcaatactacatcctgctgatcctgacggacggcgtggtga

SEQ ID NO: 625979 - DNA, 120 bp, Artificial Sequence
  ENSG00000178773_14 (sequence is synthesized)
ccgacatggccgacacacgggaggccattgtgcgtgcctcacgcctgcccatgtccatcatcatcgtgggcgtgggcaacgccgacttcaccgacatgcaggtcctggacggcgacgacg

SEQ ID NO: 625980 - DNA, 120 bp, Artificial Sequence
  ENSG00000178773_15 (sequence is synthesized)
gcgtcctgcgctccccacggggtgagcccgcgctccgggacatcgtacagttcgtgcccttccgggagctcaagaacgcatcccctgcggcgctggccaagtgcgtgctggccgaggtcc

SEQ ID NO: 625981 - DNA, 120 bp, Artificial Sequence
  ENSG00000178773_16 (sequence is synthesized)
cgaagcaggtggtggagtactacagccacagaggcctgcccccgagaagcctgggtgtccctgccggagaggccagcccaggctgcacaccgtgaagatgtggagggcgtagggtggggg

SEQ ID NO: 625982 - DNA, 120 bp, Artificial Sequence
  ENSG00000178773_17 (sequence is synthesized)
cagtgaggaatgggtccgtacagcctctgtctgcaacatgcttggggtcccttaagctccctccgacctcccagaagcctccagtccccaccaggccccactcccagtcctcctgggatc

SEQ ID NO: 625983 - DNA, 120 bp, Artificial Sequence
  ENSG00000178773_18 (sequence is synthesized)
ctgctggcttgggcccggctctggggcccccaaggccgaagggtgacaaaatacaggcccccatgcctggccctgcctgagccaggtgggtggagggagggagatcatgagggacttgga

SEQ ID NO: 625984 - DNA, 120 bp, Artificial Sequence
  ENSG00000178773_19 (sequence is synthesized)
gggagctgggagttcatccacgggagaccctgccccgatgagaaggggcagggactgggggctctgctttgcgtctaacctttgtgggggagggccagcaaggcagtccccccacgcccg

SEQ ID NO: 625985 - DNA, 120 bp, Artificial Sequence
  ENSG00000178773_20 (sequence is synthesized)
agaaagcctgggggacccagacacctgtccccacagtcaaagcctggggacccagacatcctgtccccacagtcagcctcctgtccctgctggtgcccccacacccacctaccctgtgct

SEQ ID NO: 625986 - DNA, 120 bp, Artificial Sequence
  ENSG00000178773_21 (sequence is synthesized)
ttttgccgtcgggcctctgcacctgggtccatggggtctgcggggtctgcggggtctgcctggcctgtgggttctgccggtggggcttcaggagtaataaagtgtcaccctatccttgta

SEQ ID NO: 625987 - DNA, 120 bp, Artificial Sequence
  ENSG00000178773_22 (sequence is synthesized)
gacagtgacaagaggttttccgctttggggtttggagcccggatccctcccaagtatgaggtgtcccatgactttgccatcaatttcaaccctgaggacgatgagtgtgaagcaatacta

SEQ ID NO: 625988 - DNA, 120 bp, Artificial Sequence
  ENSG00000178773_23 (sequence is synthesized)
ctacgtgtcatccaaggagcccggcacagaccccgtgtcacccccatgtcacccgcagaccccgcgtcacccatagatacgcacaccccgtgtcacccccatagcacccccgtgtcaccc

SEQ ID NO: 625989 - DNA, 120 bp, Artificial Sequence
  ENSG00000178773_24 (sequence is synthesized)
gttcgtgcccttccgggagctcaagaaccagagaacagcacaaggggctcctgggatccaccacgcggcttcccccgttgctgccaacctctgcgacccggcgagacacgcacagcacac

SEQ ID NO: 625990 - DNA, 120 bp, Artificial Sequence
  ENSG00000178773_25 (sequence is synthesized)
ttccacagggtgtactccttcctggactatatcatgggcggctgccagatccacttcaccacaaaacgtgaacgaggagaaactggagtggccattgacttcaccgcctccaatggagac

SEQ ID NO: 625991 - DNA, 120 bp, Artificial Sequence
  ENSG00000178776_0 (sequence is synthesized)
gaacaatttatctgcacgaataccccgtgctaccagaatggctgtctcagtacttcgcctgacagttgtcctgggactgcttgtcttattcctgacctgctatgcagacgacaaaccaga

SEQ ID NO: 625992 - DNA, 120 bp, Artificial Sequence
  ENSG00000178776_1 (sequence is synthesized)
caagccagacgacaagccagacgactcgggcaaagacccaaagccagacttccccaaattcctaagcctcctgggcacagagatcattgagaatgcagtcgagttcatcctccgctccat

SEQ ID NO: 625993 - DNA, 120 bp, Artificial Sequence
  ENSG00000178776_2 (sequence is synthesized)
ttcatcaaagtgacatcctcaggacacacccatgtggctcctggacaatccaagagcagccaaatcctgcttttccagtttggctccacaagtcctccaggacagagccctcaaagcaac

SEQ ID NO: 625994 - DNA, 120 bp, Artificial Sequence
  ENSG00000178776_3 (sequence is synthesized)
tcccaacgagttctcaggattcaggctctggcttcaaccaaacagaactcattttgaacaccctgactgcatttttgcttttagaaagttagaataaatatggcgctttgggatcacata

SEQ ID NO: 625995 - DNA, 120 bp, Artificial Sequence
  ENSG00000178776_4 (sequence is synthesized)
atgagaaacaaaatttgtggcataagtaaatgtgttatttttcattgaaaaatgttgccctacttaaaatatattttgcatctgaatcaactgccctgagctttttgggggaaaggacat

SEQ ID NO: 625996 - DNA, 120 bp, Artificial Sequence
  ENSG00000178776_5 (sequence is synthesized)
tcccatcaagtggttccatacaggatttttttttttttttctttttaatctcaggagcaaatagggaggaggaagaacactagactaaggaacaaaaagccaagttctgatcctaactca

SEQ ID NO: 625997 - DNA, 120 bp, Artificial Sequence
  ENSG00000178776_6 (sequence is synthesized)
gactgtctccacagctcacagctttgaggctaaaggagagatgctatagtgaatctccacataaagacaggaatggacccaaccacagcccaagaaactgctcccaaccaattcaactca

SEQ ID NO: 625998 - DNA, 120 bp, Artificial Sequence
  ENSG00000178776_7 (sequence is synthesized)
acgctacaaacataattgagcaccaactctatctagtctgtgcagatacatagacaaataagacaaggatgcccattcagagacttcacacagtccagttggtgatagaagatctgtgta

SEQ ID NO: 625999 - DNA, 120 bp, Artificial Sequence
  ENSG00000178789_0 (sequence is synthesized)
caaaggcggtctagatgtgcagaaggtgcaagccagagctcaggcagaacttccagagtgcatctgggatctgcatttgccactggttgcagatcaggcggacgaggagccgggaaggca

SEQ ID NO: 626000 - DNA, 120 bp, Artificial Sequence
  ENSG00000178789_1 (sequence is synthesized)
gagccatgtggctgccccctgctctgctccttctcagcctctcaggctgtttctccatccaaggcccagagtctgtgagagccccagagcaggggtccctgacggttcaatgccactata

SEQ ID NO: 626001 - DNA, 120 bp, Artificial Sequence
  ENSG00000178789_2 (sequence is synthesized)
agcaaggatgggagacctacattaagtggtggtgccgaggggtgcgctgggatacatgcaagatcctcattgaaaccagagggtcggagcaaggagagaagagtgaccgtgtgtccatca

SEQ ID NO: 626002 - DNA, 120 bp, Artificial Sequence
  ENSG00000178789_3 (sequence is synthesized)
aggacaatcagaaagaccgcacgttcactgtgaccatggaggggctcaggcgagatgacgcagatgtttactggtgtgggattgaaagaagaggacctgaccttgggactcaagtgaaag

SEQ ID NO: 626003 - DNA, 120 bp, Artificial Sequence
  ENSG00000178789_4 (sequence is synthesized)
tgatcgttgacccagagggagcggcttccacaacagcaagctcacctaccaacagcaatatggcagtgttcatcggctcccacaagaggaaccactacatgctcctggtatttgtgaagg

SEQ ID NO: 626004 - DNA, 120 bp, Artificial Sequence
  ENSG00000178789_5 (sequence is synthesized)
tgcccatcttgctcatcttggtcactgccatcctctggttgaaggggtctcagagggtccctgaggagccaggggaacagcctatctacatgaacttctccgaacctctgactaaagaca

SEQ ID NO: 626005 - DNA, 120 bp, Artificial Sequence
  ENSG00000178789_6 (sequence is synthesized)
tggccacttagagagatggatctgcagagccttcctgccctggccacgtttccagaagagactcgggctgtggaaggaacatctacgagtcctcgggatgcagtgactgagataggggcc

SEQ ID NO: 626006 - DNA, 120 bp, Artificial Sequence
  ENSG00000178789_7 (sequence is synthesized)
ctgggcctccgccctggccttggagctggtgggcacctccctgttctgcacagctcagggacttagccaggtcctctcctgagccaccatcacctcctggggtgccagcacctgttctct

SEQ ID NO: 626007 - DNA, 120 bp, Artificial Sequence
  ENSG00000178789_8 (sequence is synthesized)
tggtcaggagctgtagagatggagctcaagcactggacgactctgtccccactgctggaataactcgggcacagagcatgggaccaaagtacagaaagaggttgggggagacccccccag

SEQ ID NO: 626008 - DNA, 120 bp, Artificial Sequence
  ENSG00000178789_9 (sequence is synthesized)
attccggagaccaactcaacaccgtctttgcctgagaacctgatatatccgtgtttttaaatttttttttttctagcaaagttgggttttaatgacttatgttcataggaaacctctctg

SEQ ID NO: 626009 - DNA, 120 bp, Artificial Sequence
  ENSG00000178789_10 (sequence is synthesized)
atcccacacacaaggagggtgattctgggatgagttcctggttctagggcatgaggggctggatggaccctgtccccagggaggacatggctctgagtccacagggctgaggaggcaatg

SEQ ID NO: 626010 - DNA, 120 bp, Artificial Sequence
  ENSG00000178789_11 (sequence is synthesized)
ggaacctccctggcccggcccggtgcttgtcctccccctcccacctcttcctcctcctagctccccaagctccctgcctattcccccacctccgaggggctgcagcttgggagcctcctc

SEQ ID NO: 626011 - DNA, 120 bp, Artificial Sequence
  ENSG00000178789_12 (sequence is synthesized)
agcatgacagcttgggtctcctccccaaaagagcctgtcaggcctcaagaaccacctccaggtggggagggcagtaacgaaaaccatcgcaggaaatggcaccctcccttttcggtgatg

SEQ ID NO: 626012 - DNA, 120 bp, Artificial Sequence
  ENSG00000178789_13 (sequence is synthesized)
ttgaaatcatgttactaatgaaaactgtcctagggaagtggttctgtctcctcacaggcttcacccacggcgatgaggcccttgaatgtggtcactttgtgctgtatggttgagggaccc

SEQ ID NO: 626013 - DNA, 120 bp, Artificial Sequence
  ENSG00000178789_14 (sequence is synthesized)
tcacaccaaagggaccttcccatgtgagatgtgctcccgcccccacctgcccacaagcaaacacaccacacatgttcggcatgttgccctttgaacacccatgaggacgcctccaacctg

SEQ ID NO: 626014 - DNA, 120 bp, Artificial Sequence
  ENSG00000178789_15 (sequence is synthesized)
ctcttggttctaatagggagtactgactgtcagcagtggataaaggagaggggaccctctggtccctagcatggcacccagagcctcccctcttcttgtccttcagccaaagagaaactt

SEQ ID NO: 626015 - DNA, 120 bp, Artificial Sequence
  ENSG00000178789_16 (sequence is synthesized)
tctctgactttgaactgaatttaggtctctggccaatgatgggcctgaaaattccataatggccagagaggagagttcgagcccggctaagatcccctgagtcattctgtgagggaccaa

SEQ ID NO: 626016 - DNA, 120 bp, Artificial Sequence
  ENSG00000178789_17 (sequence is synthesized)
gacccacagtccaccagccccagggccctacctcctggaatgctttcctggatccagcttcccgaagatccgaccagacccagggaggacggcaccgctccgcgggagggaaagccaaag

SEQ ID NO: 626017 - DNA, 120 bp, Artificial Sequence
  ENSG00000178789_18 (sequence is synthesized)
catggtgcttcaccagctggactcaggggcgaggggacatgggcgcttgtcaacgtgatgtcattcttttcccaccgtttcttcctgttgatattcaatgaatccgtcaatctctctgga

SEQ ID NO: 626018 - DNA, 120 bp, Artificial Sequence
  ENSG00000178789_19 (sequence is synthesized)
aactcctgcctgtcaccaaatgccagcacctgttctagccagagtcaaggccccaagcccaccctccatctctctcctgcccccatcactgcaatccaccatctccccactctagctctc

SEQ ID NO: 626019 - DNA, 120 bp, Artificial Sequence
  ENSG00000178789_20 (sequence is synthesized)
accagaaaaccgctctgcagaactcttctcagtgagcatcattctcccagtcaatcagtcaaccttgcattggtggcctaatgggtgccagggggagataagataccaccctctgtggtg

SEQ ID NO: 626020 - DNA, 120 bp, Artificial Sequence
  ENSG00000178789_21 (sequence is synthesized)
caagacatcaagggacacagaacaggaagggtgatttaccagcctggagctagcattagcaggaacagaggcaggaaacacaacctgtatttggtgacctctggcgcttctgttgagctg

SEQ ID NO: 626021 - DNA, 120 bp, Artificial Sequence
  ENSG00000178795_0 (sequence is synthesized)
aaagggtgaatcatgtttaagaaggtcaacaggattgagcacaagaggaataagacagaaaaaccaaaaaagcttaatccatggattccacgcatcttcaaccacaaatgctttgtcacc

SEQ ID NO: 626022 - DNA, 120 bp, Artificial Sequence
  ENSG00000178795_1 (sequence is synthesized)
ttccttactggctgctatagttgcctctggaaattcagacaatgggaaaaaactaaagttggattttgttgctgcacttggaaagagcaattattttgccgtgcctggtaatttcatttg

SEQ ID NO: 626023 - DNA, 120 bp, Artificial Sequence
  ENSG00000178795_2 (sequence is synthesized)
tcttgtctctgatgttgctgttcctgtggatagaaacatccagtgaatactttaactttgactgggtcacttttctaggaacaggatactggtttttctggtctatttttattctgagtt

SEQ ID NO: 626024 - DNA, 120 bp, Artificial Sequence
  ENSG00000178795_3 (sequence is synthesized)
tagctaggatcctgactgcctactcttcattgctgttgttacttggatttttgttgctttgggaaaggattgaactatacctgcacttgtgtcataagatcctgattctgctagtgattc

SEQ ID NO: 626025 - DNA, 120 bp, Artificial Sequence
  ENSG00000178795_4 (sequence is synthesized)
ttctgtgtgtcattttaatgttcattatatgcaaattctggaaagaaaggtggctggtagctgggctgtcaatgcagatctttgctccctacgtgcacctggtcagcataactgtgatgg

SEQ ID NO: 626026 - DNA, 120 bp, Artificial Sequence
  ENSG00000178795_5 (sequence is synthesized)
ttatccttttctggcctgtggccttctacgtggcatgtttggaaagagaagttagaatgagaagatacaggatgacacattctgagaaaaaaagactcaagcaatgtaatgtaatcacaa

SEQ ID NO: 626027 - DNA, 120 bp, Artificial Sequence
  ENSG00000178795_6 (sequence is synthesized)
ggttaagaggtctacaagtgcctgttggattaccctttcttcttatccttttaggtctctatttgatgccactggggatttattctccctgcattcaggagaaggagaatttggggccca

SEQ ID NO: 626028 - DNA, 120 bp, Artificial Sequence
  ENSG00000178795_7 (sequence is synthesized)
agccaaccatctttggacatagaggtgcacccatgttggggcctgagaataccatgatgtcctttgagaaagctgttgaacatggagcccatggattggagactgatatacacttaagtt

SEQ ID NO: 626029 - DNA, 120 bp, Artificial Sequence
  ENSG00000178795_8 (sequence is synthesized)
atgatcatgtgcctttcctcatgcatgactttgacctgaaaagaacaaccaatattggggaagttcagccagaatctgcctgcgagaaccctgccttcttcaactgggatttcctatcga

SEQ ID NO: 626030 - DNA, 120 bp, Artificial Sequence
  ENSG00000178795_9 (sequence is synthesized)
ctctgaatgcaggcaaatggtttgtaaaaccagagctcaggccattttacaatatgaaacctctatcagaggcagataaagaaagagcaagaaatcagtcaattccaacactagctgatt

SEQ ID NO: 626031 - DNA, 120 bp, Artificial Sequence
  ENSG00000178795_10 (sequence is synthesized)
agagaaggaaagaaaatttgtgatatttgatcttcatcgccctccaccaaaacatcctctcagacacacatttgtccgccaagtagtaagcgtgatccttgcctctaaaatcgagcaaca

SEQ ID NO: 626032 - DNA, 120 bp, Artificial Sequence
  ENSG00000178795_11 (sequence is synthesized)
tctgattttttggttgccagctcatgataggcaatacgtcaggtccgtggctcctggttttcagcatgtgggccgtttagtatccattgaaacccttgctaaaaacaatatcagtataat

SEQ ID NO: 626033 - DNA, 120 bp, Artificial Sequence
  ENSG00000178795_12 (sequence is synthesized)
aaatgttgactacaagaagttgttccctaatgggttaagagattataaagcagctaacatccatatcaacgtatacaccgtcaatgagccttggcttttctcactggcctggtgctccag

SEQ ID NO: 626034 - DNA, 120 bp, Artificial Sequence
  ENSG00000178795_13 (sequence is synthesized)
gattaactcagtgaccacagacaacattgggctcctgagtcagcttgatcaccctcacttcttcatgacaccaaagttctatgtgttcatgtggctccttgcagatatcatttctgtgct

SEQ ID NO: 626035 - DNA, 120 bp, Artificial Sequence
  ENSG00000178795_14 (sequence is synthesized)
ttttattgttgccatattttgttttcactggcggagagagactgaaaaagaaaaattgtttgaaacctccagcactcgcacagatactcagagtggaagtaagaatgaggaagatagata

SEQ ID NO: 626036 - DNA, 120 bp, Artificial Sequence
  ENSG00000178795_15 (sequence is synthesized)
gatagatagatttgcacatagccatgaaacctcctgtccgagttgtggaaggtccttggactctagcagccctctacccggctctacccaagagtggaaaggaacaccaaggccatttca

SEQ ID NO: 626037 - DNA, 120 bp, Artificial Sequence
  ENSG00000178795_16 (sequence is synthesized)
attttgcagcaccatccaagaaactactacctatcaagaatgctgtcacacctttgaagcctggcaagcatgagattcaaccaccgatgcccaccgtggtctttgaactcacccaagcac

SEQ ID NO: 626038 - DNA, 120 bp, Artificial Sequence
  ENSG00000178795_17 (sequence is synthesized)
ccaccaggcaggctacaagtgaggctacctttcaaactacattgcccaccctgaaggtggataagccaaccatgccctccatagaggtcccctatccttaaataagagacctctaagaga

SEQ ID NO: 626039 - DNA, 120 bp, Artificial Sequence
  ENSG00000178795_18 (sequence is synthesized)
tccccatggctgaatactccaaataatcctatgtcacaatatattccattgcatctgacatagccttctgtgtttccaaagaagaattagccacatctcccctgcttcttcctctctctg

SEQ ID NO: 626040 - DNA, 120 bp, Artificial Sequence
  ENSG00000178795_19 (sequence is synthesized)
cctaagggtggtgatggtggggagtggttgataaaggcacacagaagggccacggaggctctcaggggaaccattgtgctctcgctatcaagaatgcatctcaaggggctaggcaagggg

SEQ ID NO: 626041 - DNA, 120 bp, Artificial Sequence
  ENSG00000178795_20 (sequence is synthesized)
aaaactgctgtgtgtggtcttggaactggttgctgtcaggtttatctcatcctaacacctccataatattttctgctaaaggagtgactgtgcatataagtaaaggcaacctctcaggaa

SEQ ID NO: 626042 - DNA, 120 bp, Artificial Sequence
  ENSG00000178795_21 (sequence is synthesized)
tctccaggactggggatgctagggctccatttcttccataaaaagcaattattttgccgtgcctggtaatttcatttgtcttgtctctgatgttgctgttcctgtggatagaaacatcca

SEQ ID NO: 626043 - DNA, 120 bp, Artificial Sequence
  ENSG00000178795_22 (sequence is synthesized)
gtgaatactttaactttgactgttacttggatttttgttgctttgggaaaggattgaactatacctgcacttgtgtcataagatcctgattctgctagtgattcttctgtgtgtcatttt

SEQ ID NO: 626044 - DNA, 120 bp, Artificial Sequence
  ENSG00000178795_23 (sequence is synthesized)
ccttctacgtggcatgtttggaaagagaaggtatgtcacatagggcagaaccctgcctatttcttcagctctggctttagcttgcatactccactcaggaaaacagaagcttgggaacta

SEQ ID NO: 626045 - DNA, 120 bp, Artificial Sequence
  ENSG00000178795_24 (sequence is synthesized)
gccacccctatgcctcgttgaaattcatttagcttgttactcaggcatgctcctgtgctttcactcactaccctgttatagtggccaatggcctgtcatagtatttctgtggccaaacag

SEQ ID NO: 626046 - DNA, 120 bp, Artificial Sequence
  ENSG00000178795_25 (sequence is synthesized)
gactgctgggccccatgagggctctttatggtctccaggactggggatgctagggctccatttcttccataaaagtattgcaccaatgttaaacttactgaaacatgtacttgctttctt

SEQ ID NO: 626047 - DNA, 120 bp, Artificial Sequence
  ENSG00000178795_26 (sequence is synthesized)
cattttctttccttcacttcatttttcacttttattctttacttttccttactacctcttttatgtttattcattaattcacttttgcatttattcattcagtgaatcttgaagaaaaag

SEQ ID NO: 626048 - DNA, 120 bp, Artificial Sequence
  ENSG00000178796_0 (sequence is synthesized)
gacgaccgcagcaagatggagacgctgccaggcttgctgcagcggcccgaccccggggcgcttagcgcagcgcagctggagcagctgcgaaaattcaagattcagactcggattgctaac

SEQ ID NO: 626049 - DNA, 120 bp, Artificial Sequence
  ENSG00000178796_1 (sequence is synthesized)
gaaaagtacctaaggacccacaaagaagtagagtggctcataagtggtttcttcagagaaatatttttgaaaagaccagacaacatcctagaatttgctgcagactacttcacggatcca

SEQ ID NO: 626050 - DNA, 120 bp, Artificial Sequence
  ENSG00000178796_2 (sequence is synthesized)
tgctcagctgttgggagagaccagacggaatccagcctcgggggtcatctggaggcatgagagccctactgccatcagtgtgggtttccaagctgccttgggctctgtctactgtcgcaa

SEQ ID NO: 626051 - DNA, 120 bp, Artificial Sequence
  ENSG00000178796_3 (sequence is synthesized)
aagcttttaaagatattcattaaacacggaccttcctgctctctctgctttatttcactcaagaggaggaagccatccttcaggggagggctgctgtgccccactttgacgtgtgaggca

SEQ ID NO: 626052 - DNA, 120 bp, Artificial Sequence
  ENSG00000178796_4 (sequence is synthesized)
gccggcctgtttctgctttcagggcggccaggggcctcttgctgggtcagtgggctgtcgtgcccaccccctgggaagaacacagctgatcacgggggcacagaaacaagcaagtccatg

SEQ ID NO: 626053 - DNA, 120 bp, Artificial Sequence
  ENSG00000178796_5 (sequence is synthesized)
ggctctctgtgcgtcagcaggcggaggagcaaacggtgcgactcgggactacttcacggatccaagacttcccaacaagattcacatgcagctaattaaagacaagaaagcggcttaatt

SEQ ID NO: 626054 - DNA, 120 bp, Artificial Sequence
  ENSG00000178796_6 (sequence is synthesized)
atcacttctgctgctccacacacccagagaaggagtggggtggggggtggttaacagggtatgctgggggtggaggatttggtgggggctgggaggtgggggaggggcccagaaaacctt

SEQ ID NO: 626055 - DNA, 120 bp, Artificial Sequence
  ENSG00000178796_7 (sequence is synthesized)
cctgattctggagggaggcttgcagagcaggccctgcaggggccatcccatcccttctcctgcctccctcctccagagcaaatccttggtgcctggagggctctaaaggaggagttgctg

SEQ ID NO: 626056 - DNA, 120 bp, Artificial Sequence
  ENSG00000178796_8 (sequence is synthesized)
tcccgtgctccttcgcaatttaccctgtgcacggaagtcctccagagctctaacctctccccgacccctgcagtatctccctttgttcagtcttcagtggaaatggagaaattcctagtt

SEQ ID NO: 626057 - DNA, 120 bp, Artificial Sequence
  ENSG00000178796_9 (sequence is synthesized)
ccactctccatgttcttgtctggtgagaggacttggaaattactcctgcaggttgattttcttaaccagggtggggagtattataggaactggagaaagaggagaaggacttagtattta

SEQ ID NO: 626058 - DNA, 120 bp, Artificial Sequence
  ENSG00000178796_10 (sequence is synthesized)
gtgtctgaaaatattttgctcttgaggactctgacagctggaaccacacctggttgccccactcatctgatggtggggcagtagttccagtgaccagaaaaattaaacctcaatttacat

SEQ ID NO: 626059 - DNA, 120 bp, Artificial Sequence
  ENSG00000178796_11 (sequence is synthesized)
tctgagggtgaggctagaggtaccctcaggaaaggtactggactgggagtcaggagacctggatttgaggactagccctgccctgccacttactagctgggcgaccttggacaagccact

SEQ ID NO: 626060 - DNA, 120 bp, Artificial Sequence
  ENSG00000178796_12 (sequence is synthesized)
agtcccctctggacctcaacttccttatctgtaaaacaagggggtgggccaggcgatgtctaatcaggttccggtcagctccaggctccagcatgtggagatcctgtgtgtggcatcact

SEQ ID NO: 626061 - DNA, 120 bp, Artificial Sequence
  ENSG00000178796_13 (sequence is synthesized)
gactccaccaatggagatgggaacctgggacccagagagaaaggatgcagttccctcctggcataggctcccaggcacaaaaatagcatctcgagaaatacccacggctgatgtggattc

SEQ ID NO: 626062 - DNA, 120 bp, Artificial Sequence
  ENSG00000178796_14 (sequence is synthesized)
gcacaaagagacacacaagtgtacagaccacagcaaggaccgtgctgacggggctctgagatagggagacaacagaaaaagacaaacagcgatggagatgaaaactgttgatttgtgagg

SEQ ID NO: 626063 - DNA, 120 bp, Artificial Sequence
  ENSG00000178796_15 (sequence is synthesized)
ggcctccacagagaaaaacagggaaggtaacaagaaatgcatgcatctacagcaagaaagatggatgctacagagagagagggggacttcctggtgatgagaggaggtggaaattatgct

SEQ ID NO: 626064 - DNA, 120 bp, Artificial Sequence
  ENSG00000178796_16 (sequence is synthesized)
cagtgtcaggagggtgagtgaagacatctgcagcagaatttatgagagtgcacaaagaattgattctataaccttcctgccctcaagtggcttccacctcaagtggaagattcagactcg

SEQ ID NO: 626065 - DNA, 120 bp, Artificial Sequence
  ENSG00000178796_17 (sequence is synthesized)
tttgggccccaagatgggcctggagcagaaaacccagagaatccctgagccctctgatggctctctgtgcgtcagcaggcggaggagcaaacgactacttcacggatccaagacttccca

SEQ ID NO: 626066 - DNA, 120 bp, Artificial Sequence
  ENSG00000178796_18 (sequence is synthesized)
cagggactcggccagagaaatgggccgaaattactgccagacacatccgaccttagtaaaggcccctcatcctgaacaagcggcagaatgatattttatctattcagactcggattgcta

SEQ ID NO: 626067 - DNA, 120 bp, Artificial Sequence
  ENSG00000178802_0 (sequence is synthesized)
atacgtgcttaatcctggtgcagggggcgagcatggccgctccgcgagtattcccactttcctgtgcggtgcagcagtatgcctgggggaagatgggttccaacagcgaagtggcgcggc

SEQ ID NO: 626068 - DNA, 120 bp, Artificial Sequence
  ENSG00000178802_1 (sequence is synthesized)
tgttggccagcagtgatccactggcccagatcgcagaggacaagccttatgcagagttgtggatggggactcacccccgaggggatgccaagatccttgacaaccgcatctcacagaaga

SEQ ID NO: 626069 - DNA, 120 bp, Artificial Sequence
  ENSG00000178802_2 (sequence is synthesized)
ccctaagccagtggattgctgagaaccaggacagcttgggctcaaaggtcaaggacacctttaatggcaacctgcccttcctcttcaaagtgctctcagttgaaacacccctgtccatcc

SEQ ID NO: 626070 - DNA, 120 bp, Artificial Sequence
  ENSG00000178802_3 (sequence is synthesized)
aggcacaccctaacaaggagctggcagagaagctgcacctccaggctccgcagcactaccccgatgccaaccacaagccagagatggccattgccctcacccccttccagggcttgtgtg

SEQ ID NO: 626071 - DNA, 120 bp, Artificial Sequence
  ENSG00000178802_4 (sequence is synthesized)
gcttccggccagttgaggagattgtaacctttctaaagaaggtgcctgagtttcagttcctgattggagatgaggcagcaacacacctgaagcagaccatgagccatgactcccaggctg

SEQ ID NO: 626072 - DNA, 120 bp, Artificial Sequence
  ENSG00000178802_5 (sequence is synthesized)
tggcctcctctctgcagagctgtttctcccacctgatgaagagtgagaagaaggtggtggtggaacagctcaacctgttggtgaagcggatctcccagcaagcggctgccggaaacaaca

SEQ ID NO: 626073 - DNA, 120 bp, Artificial Sequence
  ENSG00000178802_6 (sequence is synthesized)
tggaggacatctttggggagcttttgctacagctgcaccagcagtacccaggtgatatcggctgctttgccatctacttcctgaacctgcttaccctgaagcctggggaggccatgtttc

SEQ ID NO: 626074 - DNA, 120 bp, Artificial Sequence
  ENSG00000178802_7 (sequence is synthesized)
tggaggccaacgtaccccatgcctacctgaaaggagactgcgtggagtgcatggcgtgttcagacaacacagttcgtgctggcctgacacccaagttcattgatgtgccaaccctgtgtg

SEQ ID NO: 626075 - DNA, 120 bp, Artificial Sequence
  ENSG00000178802_8 (sequence is synthesized)
aaatgctcagctatacccctagctccagcaaggacaggctctttctcccaacacggagtcaggaagacccctacctctcaatctatgacccccctgtaccagacttcaccattatgaaga

SEQ ID NO: 626076 - DNA, 120 bp, Artificial Sequence
  ENSG00000178802_9 (sequence is synthesized)
cggaggtccctggctctgtcactgaatacaaggtcttggcactggactctgccagcatcctcctgatggtacaggggacagtaatagccagcacacccacaacccagacaccaatccctc

SEQ ID NO: 626077 - DNA, 120 bp, Artificial Sequence
  ENSG00000178802_10 (sequence is synthesized)
tgcaacgtggtggcgtgctcttcattggggccaatgagagtgtctcactgaagcttactgagccgaaggacctgctgatattccgtgcctgctgtctgctgtaaaggctgcagcctcccc

SEQ ID NO: 626078 - DNA, 120 bp, Artificial Sequence
  ENSG00000178802_11 (sequence is synthesized)
agctctcctctgccagccaccctaaattccagccaacctcacctcctcgggcccagctcaagcccccttccttgctctggaccccttaggtataccctggaagagctggggtgggggagg

SEQ ID NO: 626079 - DNA, 120 bp, Artificial Sequence
  ENSG00000178802_12 (sequence is synthesized)
agggagcgtgaaggtagtgactcctgaacacacccaggtggaaccatctttggggaggagaggcccgtgtgaggggtctgatactccctttgtcttccctctctactcctcgctacacct

SEQ ID NO: 626080 - DNA, 120 bp, Artificial Sequence
  ENSG00000178802_13 (sequence is synthesized)
gagccaggctcttgccaactctgttccagcctatggctttaggctagctgttaaatatgtgacccagcattagctcagcatctgtcagagcaagagaccaggtaatttctaagaacaggg

SEQ ID NO: 626081 - DNA, 120 bp, Artificial Sequence
  ENSG00000178802_14 (sequence is synthesized)
ttctagcgatgggactgcccatttcctcagctgcagaggaggaaagggaaagggtaggcctgtagactaacgctgtttacacccttgttctgtcaaagcaattaaagatcacttgtgttg

SEQ ID NO: 626082 - DNA, 120 bp, Artificial Sequence
  ENSG00000178802_15 (sequence is synthesized)
aggctgtggggtaatgagcactcagcctttggggtacctgttcctaaagtgggccaaaagagccctccctacatgatgccccagtttttgctttattcctatttcatacagcttctcggg

SEQ ID NO: 626083 - DNA, 120 bp, Artificial Sequence
  ENSG00000178802_16 (sequence is synthesized)
ggagtgagcaggctacactccagaacaccggtatgggaaggagtgggagaggaagccagctttggcctcacaggcacagcttgcaagcaggccttgggtctgcccagaggcacagcttgc

SEQ ID NO: 626084 - DNA, 120 bp, Artificial Sequence
  ENSG00000178802_17 (sequence is synthesized)
tgcccagaggcacagcttgcaagcagccctacagagaaggtgactcaaaggatacaccagtcaccagtgcaagactcttcgctcctgtttttctcttttttttttttttgagacggagtc

SEQ ID NO: 626085 - DNA, 120 bp, Artificial Sequence
  ENSG00000178802_18 (sequence is synthesized)
ccacgcctggcccggctcctgtttttcaactggccctagaggaggggtccgcaaaccaggctggcaggccagttctggccatacctgttcatttccatactgtctggctgctttcaagcc

SEQ ID NO: 626086 - DNA, 120 bp, Artificial Sequence
  ENSG00000178802_19 (sequence is synthesized)
acagtggcaaagttgaagagttgcactagactgtacggcctgcaaaactgaaaccattgactgtcaaccacttctctacaacatactcaactgttgcagattacagggactcaggaaccg

SEQ ID NO: 626087 - DNA, 120 bp, Artificial Sequence
  ENSG00000178802_20 (sequence is synthesized)
aattagacaattttcatggcgaggagaagcccagttagctttcctaaacgggcaggaagtgtgaaggagggaatctcctgatgccctgctccaggggtggcacacacctgcaagaggctg

SEQ ID NO: 626088 - DNA, 120 bp, Artificial Sequence
  ENSG00000178802_21 (sequence is synthesized)
tcggctgtctgctgctgctgaggtttctgacctgcaatcgtagatcctgtcaccacagactaatcacttagtccactggctccttcctgtgggataaaggtttaaattcatgcaaaagaa

SEQ ID NO: 626089 - DNA, 120 bp, Artificial Sequence
  ENSG00000178802_22 (sequence is synthesized)
atacaatggagttccaggaaaccaccttcaaaaatctcctgggttttcttgcctccaaattttcttcagctaaaaaacaataaagatgagctggaaagaaaaggtctgctaaagggaacc

SEQ ID NO: 626090 - DNA, 120 bp, Artificial Sequence
  ENSG00000178802_23 (sequence is synthesized)
cattctacagaagtgacttgcaagagcctatttcactcatgccgtccagtgaaacaggcccgaaagtgatgcccagtgggaacagcagaaaggggagggagtttccagaaggaattgctg

SEQ ID NO: 626091 - DNA, 120 bp, Artificial Sequence
  ENSG00000178802_24 (sequence is synthesized)
tagtcagctgttaagctatttcttcatttcaggatatccaggatattcttaacttttatttttttgagacggagtctcgcactgtctcccgggctggagtgcagtggcgcgatagctcac

SEQ ID NO: 626092 - DNA, 83 bp, Artificial Sequence
  ENSG00000178802_25 (sequence is synthesized)
actgtctcccgggctggagtgcagtggcgcgatagctcactgcaacctccgcccactgggttcaagcgattcttctgcctcag

SEQ ID NO: 626093 - DNA, 85 bp, Artificial Sequence
  ENSG00000178802_26 (sequence is synthesized)
gtatttttagtagagacggggtttcagtagagacggggtgacaggatctacaattccaggtaaggtttgcctcagcctctgaaag

SEQ ID NO: 626094 - DNA, 120 bp, Artificial Sequence
  ENSG00000178802_27 (sequence is synthesized)
ttgtgcctggccaaggcctttaaaatccactgcaacacagacacagctcaactagtgtgattgcatttattcttataaatgtacagagctgtagaagtgcaagccaagagttctatagag

SEQ ID NO: 626095 - DNA, 120 bp, Artificial Sequence
  ENSG00000178802_28 (sequence is synthesized)
tagtacataaacaccatatggtaccactcctgctgggaggtaagcctggatacacccctctcctcaggaaactgtcacctgcagaacacacagcactcagaattaaggcagtttggccct

SEQ ID NO: 626096 - DNA, 120 bp, Artificial Sequence
  ENSG00000178802_29 (sequence is synthesized)
gggcacattggtggtattttggtatgtggccactggccctaaacaactgaccatttctaccctgcctcactgcactgtcccaccaggtccctccagctttttctacaaggtaacaccctc

SEQ ID NO: 626097 - DNA, 120 bp, Artificial Sequence
  ENSG00000178802_30 (sequence is synthesized)
ctacatggggtcagccagctcagaaacctcttcttcagggacagttgcagctgaatatgccagagctgattattacaacaacgatgcagagggccttggttttggggtcctgccaccctc

SEQ ID NO: 626098 - DNA, 120 bp, Artificial Sequence
  ENSG00000178802_31 (sequence is synthesized)
acccctagaagctgctaaacacccaggccattctgccctgaccacctccccaacagagatgtaggtctatacttaccttccacagccacctcccagcacacactgggtccctctacctgt

SEQ ID NO: 626099 - DNA, 120 bp, Artificial Sequence
  ENSG00000178802_32 (sequence is synthesized)
gttgctgtctttctttacactgtgctacatttgatccctttccacatgtgcacttcacctctgcagacacaagaaaggcctggacatggtctctgcagatggggaaggggttctggatgg

SEQ ID NO: 626100 - DNA, 120 bp, Artificial Sequence
  ENSG00000178802_33 (sequence is synthesized)
agatgttcttgagctctacaagcatttgcacaaagtgctcagaatgttggccactgcatagagctgcagagtcccattccagaacagagtaaccatctgcctctcttcccaagaccccaa

SEQ ID NO: 626101 - DNA, 120 bp, Artificial Sequence
  ENSG00000178802_34 (sequence is synthesized)
gctggcatgactctggtctctgtcctatctctctgctgtgatgctcctagctagtagagtaagtcagcccccagatactgtatattcctctcaaccttccatggtttgagaaaaacacaa

SEQ ID NO: 626102 - DNA, 120 bp, Artificial Sequence
  ENSG00000178802_35 (sequence is synthesized)
agatagatgtccatcaggcactcacaggattaccatcgtaaggatggttgtcagacaaataacaaataaggccgtatctttttattagacttgctcatcttctagtcaccccttgtggta

SEQ ID NO: 626103 - DNA, 120 bp, Artificial Sequence
  ENSG00000178802_36 (sequence is synthesized)
gagcgaaaagagtgtgttgtccctctcatgcctctggtggtcacaggacactgagtaaagcaagagactggatactttcccatgtagaacctataccccaatcccgactattgggctggg

SEQ ID NO: 626104 - DNA, 89 bp, Artificial Sequence
  ENSG00000178802_37 (sequence is synthesized)
catgtagaacctataccccaatcccgactattgggctgggaaccctgtctatgcccattcaaagctcaccatgtgggaggactgcttgg

SEQ ID NO: 626105 - DNA, 120 bp, Artificial Sequence
  ENSG00000178802_38 (sequence is synthesized)
tctccaacaaaacaaagcagaacgctcaccatggttctgagttaagccaaaaaacaaaacaaaacctgttggaaaaattctagaaagaggcttggtatagagtatagcaagatatactct

SEQ ID NO: 626106 - DNA, 120 bp, Artificial Sequence
  ENSG00000178802_39 (sequence is synthesized)
ccaatttgtgggtagggggtgtcacagcagaaattatgcctatttctgctgtttgggctgggggctgaaagaggctgtgtcacacccagaggtctgcttaaagcccaatcctgagtatcc

SEQ ID NO: 626107 - DNA, 120 bp, Artificial Sequence
  ENSG00000178802_40 (sequence is synthesized)
agtaaggcccatgctgtgaccagaagaatctggcaatagaatggtccatgctggagtgaagggaggccctctacactggtggactgatttcctcaggcaagggtctaggagctggcttag

SEQ ID NO: 626108 - DNA, 120 bp, Artificial Sequence
  ENSG00000178802_41 (sequence is synthesized)
gtctctcttacccttcctgtctgtaagcctcagtctaggacaaagcccacacagctgtatacccactctcacgagtccattgctacttctcaaaagtttaaaaagtaaacaataggaagg

SEQ ID NO: 626109 - DNA, 120 bp, Artificial Sequence
  ENSG00000178802_42 (sequence is synthesized)
caccggactgctccctgtagctccctctgctggtaataataaaaactgcaggcttctggggccagccccagtaccttcgacctaatctttagctcaaagactgggtgaagaaactcaccc

SEQ ID NO: 626110 - DNA, 120 bp, Artificial Sequence
  ENSG00000178802_43 (sequence is synthesized)
agaccaaggaaatacaaataaataaatatgaacatgtcagagcagtttttctctaactagggaagggcaaaccagaatcactaaactcacccggacggttggaccagttggggatgcccc

SEQ ID NO: 626111 - DNA, 120 bp, Artificial Sequence
  ENSG00000178802_44 (sequence is synthesized)
aggtccagggattctggaagccaggatcctgctgtatcattaagcaacctgctatgatccctgtcatagttagacaggtgcaacctgaagagggacaaaaggactcactttatgctgtct

SEQ ID NO: 626112 - DNA, 120 bp, Artificial Sequence
  ENSG00000178802_45 (sequence is synthesized)
tgaaggtcaagcctgcaaaccatcttagagctaggaagaatagagcaaacggaatttctcgaactggtctcaaacagtttcttttttggattgccagctataataaaccataaagtgcta

SEQ ID NO: 626113 - DNA, 120 bp, Artificial Sequence
  ENSG00000178802_46 (sequence is synthesized)
gatctcccagcaaggtggacacagttatattcctggttgggtgcaatgctctggcctgggcttcccagcagacaccagactctggggacagttctcaacccccttgcccaagtggaacac

SEQ ID NO: 626114 - DNA, 120 bp, Artificial Sequence
  ENSG00000178802_47 (sequence is synthesized)
taaaaggggccccacttagatgacctgttggcaacttagcattgcttgcctagtctttgtggagcagggcccttcttagttgagtgctgcttcccaactggtcatcttctccagatggtt

SEQ ID NO: 626115 - DNA, 120 bp, Artificial Sequence
  ENSG00000178802_48 (sequence is synthesized)
ggaggcagactggcatagaggactcttaggatgccttccacctaggcattctgagattttccctagccctgcagctgccctccatggatggacttgtatctcggggctaaagaggcagga

SEQ ID NO: 626116 - DNA, 120 bp, Artificial Sequence
  ENSG00000178802_49 (sequence is synthesized)
aggggacacgagcatcctccctctcctggaaaggactgatgcctccagcactcagtcatttgatctttcctttaccttctgtgtgcccaaccttgtgctaagaagagttcaggaaatgac

SEQ ID NO: 626117 - DNA, 120 bp, Artificial Sequence
  ENSG00000178802_50 (sequence is synthesized)
gccgctccgcgaggtgagccattggctggggtgtcggcgagtgtgttcgtggagcgcgtcctggggacgactcccggcattatcggccaggttgagtccgctcctggcattccgcggaaa

SEQ ID NO: 626118 - DNA, 120 bp, Artificial Sequence
  ENSG00000178802_51 (sequence is synthesized)
cctggggaaccaagatgataggaacagtggctgagaacgggtcacatgtcacaggaactgaagggcctcatgaagcagtttttggagccagtgagccaggccagtgagaccaggctcagg

SEQ ID NO: 626119 - DNA, 120 bp, Artificial Sequence
  ENSG00000178802_52 (sequence is synthesized)
tgtggtagtcaagggctggtggtgagtgattggtttccactgcaaagtttacttagcattgccggctctttggttagggctgggatggaaaggtgtcctccaactccccacttgtgtggg

SEQ ID NO: 626120 - DNA, 120 bp, Artificial Sequence
  ENSG00000178802_53 (sequence is synthesized)
caccctgcctcagatcagcacaaggtccttactgctgcccatctgacagttgggaacatcgaggcctgcagcggaggggggtctcatccaacagcctacaaaacccttatttgactctgt

SEQ ID NO: 626121 - DNA, 120 bp, Artificial Sequence
  ENSG00000178802_54 (sequence is synthesized)
agctcttgcctggtttcccgggacactagggtggggcctgaggagtggagtggcagctgaccctgtctgtgcccctagtattcccactttcctgtgcggtgcagcagtatgcctggggga

SEQ ID NO: 626122 - DNA, 120 bp, Artificial Sequence
  ENSG00000178802_55 (sequence is synthesized)
acgtaccccatgcctacctgaaaggaggtgagccacatttcagcagtgagccccactgccatccctgctgggccctgtttccctatctggacaaaggaaggagaagggtggtcaaggaga

SEQ ID NO: 626123 - DNA, 120 bp, Artificial Sequence
  ENSG00000178802_56 (sequence is synthesized)
cccccaaggaccttgcagctctgacctctgagggttcctgggctcagcaagcaacagctggtagggatgatgaatgcatttagcattgaacacgccttgaatcctgacaccaaccctgtg

SEQ ID NO: 626124 - DNA, 120 bp, Artificial Sequence
  ENSG00000178802_57 (sequence is synthesized)
cgcaggctatattggatcaaagctgttgttctgtcacagcctttgtatgtctgtcctacctaccagggatttttacactaaaatatgcatgttgccatggaaggatgccacctttcgact

SEQ ID NO: 626125 - DNA, 120 bp, Artificial Sequence
  ENSG00000178802_58 (sequence is synthesized)
gttggctgcttatccacacatgcctcatgcacaggattctggggtagaagtgggagactacagagttggggctccccaacccccaggggttaacatgactcccctctgacaataatgggt

SEQ ID NO: 626126 - DNA, 120 bp, Artificial Sequence
  ENSG00000178802_59 (sequence is synthesized)
gacctgtcacctgtttttggtatttgatatcttaaccccattctcccagagaatacaattcatggaaatttttacctaacttggcatggggttcatggagctcaggttaggaggcccaga

SEQ ID NO: 626127 - DNA, 86 bp, Artificial Sequence
  ENSG00000178802_60 (sequence is synthesized)
gggcatggtggcatgcacgtgtggttctcgtcctggacagttgaggctgcagtgaggtatgatcgtgccactgcactccagcctgg

SEQ ID NO: 626128 - DNA, 120 bp, Artificial Sequence
  ENSG00000178802_61 (sequence is synthesized)
actccagcctgggtgacagcgagaccccgtctcaaaaaaaaaaaagggaaagctcgggcatgttggttacccttcatgaaactcttttgcgttatctccctagattttgagctccaaggg

SEQ ID NO: 626129 - DNA, 120 bp, Artificial Sequence
  ENSG00000178802_62 (sequence is synthesized)
agggcagtggttctcatacaggggacatttggctgttgtctggagccattttttgattgtcaaaacccagataggggttgctagtggcatcttgtgggtggaggccagggaagctgctac

SEQ ID NO: 626130 - DNA, 120 bp, Artificial Sequence
  ENSG00000178802_63 (sequence is synthesized)
acatccatcagtacacaggacagcccccacaataaagaattacctagcccaaatgtcagtagcgccaaggctgagaaatcccatcctgaaaggaccatactctagctcttttagtggcta

SEQ ID NO: 626131 - DNA, 120 bp, Artificial Sequence
  ENSG00000178802_64 (sequence is synthesized)
gtatagtcctgggcatatgaatagtcaagatatgatgaaagatggtatttgtatggactggagtatcaagcaaggctcgacccccaaagggctggaggcgtggccagaaggacagggcca

SEQ ID NO: 626132 - DNA, 120 bp, Artificial Sequence
  ENSG00000178802_65 (sequence is synthesized)
ctttggcttctggattcctgtggcagggaccttttcctaggactccctggccaatgtggggctatgaacagcactgagtatccccctaagtgaccttggggtgctctgtgaccctcagcg

SEQ ID NO: 626133 - DNA, 120 bp, Artificial Sequence
  ENSG00000178802_66 (sequence is synthesized)
ggcaagggtcacgatgtggaggacacctggggctgggtttcctgtcaagcccacttggcggagggtggccccagggcctgcccattccttcctgtaccagggaccaggcctctatgctga

SEQ ID NO: 626134 - DNA, 120 bp, Artificial Sequence
  ENSG00000178802_67 (sequence is synthesized)
ctgagcctgggttgtgcgagaaggtggcagagctctccctcgtgccctggggactgtcctgggcccatgagctgatgagagcagagtctgagctgcactgccttatcatttcttcctgcc

SEQ ID NO: 626135 - DNA, 120 bp, Artificial Sequence
  ENSG00000178802_68 (sequence is synthesized)
tgttggccagcagtgatccactggcccagatcgcagaggacaagccttatgcagagtggagaaaaagccaaagcataggaaggctttcgcctctgcttctgaaactggaagatttgtgga

SEQ ID NO: 626136 - DNA, 120 bp, Artificial Sequence
  ENSG00000178802_69 (sequence is synthesized)
gggaagggtgaggcagcaaggagggaggagacccacttggctcttcaggctaatggactagatagtgttatcaaaaagaagagaggttttgtcataataggctgggatttccagcactct

SEQ ID NO: 626137 - DNA, 120 bp, Artificial Sequence
  ENSG00000178802_70 (sequence is synthesized)
ccttcccccaaccactcttagcacttagtgaattttaattcagccctctttgacaattaagtttttttactttgactatttttttgcatttttattaacctaaaatatttctcctgccta

SEQ ID NO: 626138 - DNA, 120 bp, Artificial Sequence
  ENSG00000178802_71 (sequence is synthesized)
ctgggcgcagagggccgcgggggctgccgggaaaggcatacgtgcttaatcctggtgcagggggcgagcatggccgctccgcgagcagtatgcctgggggaagatgggttccaacagcga

SEQ ID NO: 626139 - DNA, 120 bp, Artificial Sequence
  ENSG00000178804_0 (sequence is synthesized)
gtctcatggctcctgggagcgtcaccagcgacatctcaccctcctcgacttccacagcaggatcatccaggtctcctgaatctgaaaagccaggcccgagccacggcggtgtcccaccag

SEQ ID NO: 626140 - DNA, 120 bp, Artificial Sequence
  ENSG00000178804_1 (sequence is synthesized)
gaggcccgagccacagcagcctcccggtgggacgccgccaccccccggtgctacgcatggtgctggaggcgctgcaggctggggagcagcgccggggcacgtcggtggcagctatcaagc

SEQ ID NO: 626141 - DNA, 120 bp, Artificial Sequence
  ENSG00000178804_2 (sequence is synthesized)
tctacatcctgcacaagtacccaacagtggacgtcctccgcttcaagtacctgctgaagcaggcgctggccactggcatgcgccgtggcctcctcgccaggcccctcaactccaaagcca

SEQ ID NO: 626142 - DNA, 120 bp, Artificial Sequence
  ENSG00000178804_3 (sequence is synthesized)
ggggggccactggcagcttcaaattagttcccaagcacaagaagaaaatccagcccaggaagatggcccccgcgacggctcccaggagagcgggtgaggccaaggggaagggccccaaga

SEQ ID NO: 626143 - DNA, 120 bp, Artificial Sequence
  ENSG00000178804_4 (sequence is synthesized)
gagaaggctcgcaagcaaggcggcgcggccaaggacaccagggcacagtcgggagaggctaggaaggtgccccccaagccagacaaggccatgcgggcaccttccagtgctggtgggctc

SEQ ID NO: 626144 - DNA, 120 bp, Artificial Sequence
  ENSG00000178804_5 (sequence is synthesized)
agcaggaaggcaaaggccaaaggcagcaggagcagccaaggagatgctgaggcctacaggaaaaccaaagctgagagtaagagttcaaaacccacggccagcaaggtcaagaatggtgct

SEQ ID NO: 626145 - DNA, 120 bp, Artificial Sequence
  ENSG00000178804_6 (sequence is synthesized)
gcttccccgaccaaaaagaaggtggtggccaaggccaaggcccctaaagctgggcaggggccaaacaccaaggctgctgctcctgctaagggcagtgggtccaaggtggtacctgcacat

SEQ ID NO: 626146 - DNA, 120 bp, Artificial Sequence
  ENSG00000178804_7 (sequence is synthesized)
ttgtccaggaagacagaggcccccaagggccctagaaaggctgggctgcccatcaaggcctcatcatccaaagtgtccagccagagggctgaagcttagggccagaggcaggggcggaga

SEQ ID NO: 626147 - DNA, 120 bp, Artificial Sequence; identical to SEQ ID NO: 448983
  ENSG00000178809_0 (sequence is synthesized)

SEQ ID NO: 626148 - DNA, 120 bp, Artificial Sequence
  ENSG00000178809_1 (sequence is synthesized)
atggggcatctaactggagcgacagagagcacgatggggcacttacaggggccggaggctggcccgggcagtgagtgtggatggcttggcaggtgagcctgctggagctggaggaccggc

SEQ ID NO: 626149 - DNA, 120 bp, Artificial Sequence; identical to SEQ ID NO: 448985
  ENSG00000178809_2 (sequence is synthesized)

SEQ ID NO: 626150 - DNA, 120 bp, Artificial Sequence; identical to SEQ ID NO: 448986
  ENSG00000178809_3 (sequence is synthesized)

SEQ ID NO: 626151 - DNA, 120 bp, Artificial Sequence; identical to SEQ ID NO: 448987
  ENSG00000178809_4 (sequence is synthesized)

SEQ ID NO: 626152 - DNA, 120 bp, Artificial Sequence
  ENSG00000178809_5 (sequence is synthesized)
cagaagaaggtggatgagctcatcgccaaactggtgaaaaaccggacccgaatcgtcaatgagtcggatgtcttcagctgggtgatccgccgcgagttccaggagctgcgccacccggtg

SEQ ID NO: 626153 - DNA, 120 bp, Artificial Sequence
  ENSG00000178809_6 (sequence is synthesized)
gacgaggagaaggcccgctgcctggaggggatagggggtcacacccgtggcctggtggcctccctggacatgcagctggagcaggcccagggaacccgggagcggctggcccaagccgag

SEQ ID NO: 626154 - DNA, 120 bp, Artificial Sequence
  ENSG00000178809_7 (sequence is synthesized)
tgtgtgctggaacagttcggcaatgaggaccaccatgagttcatctggaagttccactccatggcctccaggtaataaccttggagagagctcagccagggtctggtggctgcgggcacg

SEQ ID NO: 626155 - DNA, 120 bp, Artificial Sequence
  ENSG00000178809_8 (sequence is synthesized)
ggcatctcagctccactggttcctccattcagcttaaccagcgcctcccaagcagctgcctatagctggctctataactgagcctggggaagatagaggaaagtcacgtccctgccttca

SEQ ID NO: 626156 - DNA, 120 bp, Artificial Sequence
  ENSG00000178809_9 (sequence is synthesized)
agggtctcgcagacaggtggggaggcagatggtgaactgtgggtacctagaacagcagaagttcactcaagctacagaaatactagaggagggtagctcatgcctgcaatcccagtactt

SEQ ID NO: 626157 - DNA, 90 bp, Artificial Sequence
  ENSG00000178809_10 (sequence is synthesized)
tgggaggccaaggcaggagtattgctggaggccgaacacccccgtctctacaaaaaatacaaaaataaaaaaattagttgggcatggtgg

SEQ ID NO: 626158 - DNA, 120 bp, Artificial Sequence
  ENSG00000178809_11 (sequence is synthesized)
ctggagaagaagtggcgaaacgggctcgcagcgtcgcattccctaccccagcaggtgcgcccgcagcgtcgcactccctagcccggcagaacgtgaagcagctgtacgcgctggtgtgcg

SEQ ID NO: 626159 - DNA, 120 bp, Artificial Sequence
  ENSG00000178809_12 (sequence is synthesized)
aaacgcagcgctactccgccgtgctggatgccgtgatctccagcgccggcctcctcagtgcgaagaagctgcagccgcacctggccaagggtaggggcggggcggggaagtgaaccccga

SEQ ID NO: 626160 - DNA, 120 bp, Artificial Sequence
  ENSG00000178809_13 (sequence is synthesized)
cggtcagcgctttgtcatctggtttcagccccgctgccgtgcacggcgggactggagcaagtcgctcacctgaaatgagtatgagcagaccttccctgggttacgaattgagatgggatg

SEQ ID NO: 626161 - DNA, 120 bp, Artificial Sequence
  ENSG00000178809_14 (sequence is synthesized)
aaaatgctttaacttcgagtgttttgaaggattaaataaccgaagtacaaagtagtagtagcggagacagtaaggaagtcgggcgtggcggcgcgcacctgtggtcccagctactcggaa

SEQ ID NO: 626162 - DNA, 120 bp, Artificial Sequence; identical to SEQ ID NO: 448994
  ENSG00000178809_15 (sequence is synthesized)

SEQ ID NO: 626163 - DNA, 120 bp, Artificial Sequence
  ENSG00000178809_16 (sequence is synthesized)
tcttgagatgctcgattgatgggtgcattgatttgcataacttagttcttctcacggggaaggaatgagtcccgtctgtctgcctggggagggtgacattggaatgctgttcttaggcct

SEQ ID NO: 626164 - DNA, 120 bp, Artificial Sequence
  ENSG00000178809_17 (sequence is synthesized)
ctgtgagatgttctgatgcctcattctccagagcaaggactctgtccgtttatgccagcaagtgcttgattctttacccaactcccttcctgaaagccccttacagctctctggtgcttg

SEQ ID NO: 626165 - DNA, 120 bp, Artificial Sequence
  ENSG00000178809_18 (sequence is synthesized)
ggcacgatccaagccaaaaattctgtacattgcatgggtataaaccgacgggggctctggtcaagtcatggagtagatggtggtccaggagtcctggttggcacccccaaggctaggtca

SEQ ID NO: 626166 - DNA, 120 bp, Artificial Sequence
  ENSG00000178809_19 (sequence is synthesized)
gatttggggcccgggcagtccaggagaagtgcatttatgtcagcttggggaggtcgcaaatccgtgctgtgtccaagcccaccaggaatggattcaggtgtttataggtgtggggattca

SEQ ID NO: 626167 - DNA, 120 bp, Artificial Sequence
  ENSG00000178809_20 (sequence is synthesized)
ccaggttaaacccaggcccgtgtgagcaccactggccctagaattagcctcacctggcgccggcctttttgtgatggctcctgattaaatacccactaattctggatctgctggtgacca

SEQ ID NO: 626168 - DNA, 120 bp, Artificial Sequence
  ENSG00000178809_21 (sequence is synthesized)
cagagttcacctgatgggtcccctacaggcagcattcaatccaggaagtgccagcatcacatggtgacttctggtagctgtaacatttagtgactgtctccatgtcatgcacaggggtga

SEQ ID NO: 626169 - DNA, 89 bp, Artificial Sequence
  ENSG00000178809_22 (sequence is synthesized)
taacatttagtgactgtctccatgtcatgcacaggggtgacatcgagaccctcttatgcctgggaagttcctgctgtcaatgcagaata

SEQ ID NO: 626170 - DNA, 120 bp, Artificial Sequence
  ENSG00000178809_23 (sequence is synthesized)
ccaccgcgcccggcccagaatattctttgaagaaaaaaaaaacattagagatgggatttcactgtgttgcccagtctggtctcaaattcctagcctcaagtgatcctcccatcttggcct

SEQ ID NO: 626171 - DNA, 62 bp, Artificial Sequence
  ENSG00000178809_24 (sequence is synthesized)
ctggctaatttttgtattttcaaagtcccacctcagtctcccaaagtgctggaattacaggc

SEQ ID NO: 626172 - DNA, 120 bp, Artificial Sequence
  ENSG00000178809_25 (sequence is synthesized)
aaagtgctggaattacaggcgtgagctactgcgcccagactattcttgaacaatttaacctgttttggactcaagggtacctgggtggctctggttcccgccctggtttccctgggagtg

SEQ ID NO: 626173 - DNA, 120 bp, Artificial Sequence
  ENSG00000178809_26 (sequence is synthesized)
aagaaggtgatccaaggagctgagaaggggagggatcagctgctcatggggccatggcctgttgcctccaggaggagctcgcagccctcttctctgagctgaagcaggagcagaagaagg

SEQ ID NO: 626174 - DNA, 120 bp, Artificial Sequence
  ENSG00000178809_27 (sequence is synthesized)
tggatgagctcatcgccaaactggtgaaaaaccggacccgaatcgtcgtgagtgccccttccctctgcccctgcctgggaccggccaccttcactttcctgtagagctcagttctcattg

SEQ ID NO: 626175 - DNA, 120 bp, Artificial Sequence
  ENSG00000178809_28 (sequence is synthesized)
gtcctttacagaaaaccatgccttccatataaagccagaactcaaagcattccggggcggggtggggaaagcgcaaatcctctcaggggaattcaacccagttgtcgttaggactggctc

SEQ ID NO: 626176 - DNA, 120 bp, Artificial Sequence
  ENSG00000178809_29 (sequence is synthesized)
caagttggcttttgccctctgtgtccttgagactgagataacccaggacttgagtctcgggggtaaacagctgaaagcatgggcgtgactcctccgcccctgtgccacctgtgtctgctt

SEQ ID NO: 626177 - DNA, 120 bp, Artificial Sequence
  ENSG00000178809_30 (sequence is synthesized)
gaccttgccagcctgtcatggtgccctcccagtacctgggtgcgcaggcgtggagaggctggcagccctgggccctggctgatctcctgaactgagaggcacatggggctgggacgcata

SEQ ID NO: 626178 - DNA, 120 bp, Artificial Sequence
  ENSG00000178809_31 (sequence is synthesized)
gtgccccggccctggaggtggctgtgaaacagaaacaggagccgagcaagatccagaagcacttggcctccctcatttaccctcctcacccttgcgcggcaggcggtatcagccctgcct

SEQ ID NO: 626179 - DNA, 120 bp, Artificial Sequence
  ENSG00000178809_32 (sequence is synthesized)
ggtggaggcggagctcagggttctgcagggagttctggctccctcacagcaaagcccgctcgcccagggccttcctgctttccttcagttgtggaactctgggatatgcacatttaatag

SEQ ID NO: 626180 - DNA, 74 bp, Artificial Sequence
  ENSG00000178809_33 (sequence is synthesized)
tccttcagttgtggaactctgggatatgcacatttaatagctgaaataggcaaagtggggtgtggtggcgtgca

SEQ ID NO: 626181 - DNA, 120 bp, Artificial Sequence
  ENSG00000178809_34 (sequence is synthesized)
cctgggcaacagagtgagaccctgtctgttaaaaaaaaaattaaaaattaaaacaggccaaagcagagcctctccatttgaaatgggagctggggccaccctccccacggccaccgccag

SEQ ID NO: 626182 - DNA, 120 bp, Artificial Sequence
  ENSG00000178809_35 (sequence is synthesized)
ggccaccgccagggctccccatgcatggggtgaactccctgcccggcgccaggccatgcagcctcccctgagactcaggtcccaggaccaacccggtcaggaaggccctggggacaccga

SEQ ID NO: 626183 - DNA, 120 bp, Artificial Sequence
  ENSG00000178809_36 (sequence is synthesized)
ggccagccagacagagcctggcagctcggctgtgactctgcagtgagcagccctccctgtcccagaatgagtcggatgtcttcagctgggtgatccgccgcgagttccaggagctgcgcc

SEQ ID NO: 626184 - DNA, 120 bp, Artificial Sequence
  ENSG00000178809_37 (sequence is synthesized)
ggatgacgtccttcagcacgccccggtcccccgagatgtccagcatcctctgacttaaccgctcgtacagggactgatggagaatgaaagccaggcctcagagccgcagacccacccggc

SEQ ID NO: 626185 - DNA, 120 bp, Artificial Sequence
  ENSG00000178809_38 (sequence is synthesized)
cacccctcagcgtctacgcccccgaaacgtctgggccctcacctggccgggggcgtcgtccccttccaggactccctggtttaacgcgcttccccccatgtcctagctgccctccctgtg

SEQ ID NO: 626186 - DNA, 120 bp, Artificial Sequence
  ENSG00000178809_39 (sequence is synthesized)
gcgtgagccttcggcctggtgcgccccgctgcccttcctggctgtgactctggtggggttccgaaggcccctttatgcccggcagacccctaccgacggcggcattacattctggggcca

SEQ ID NO: 626187 - DNA, 120 bp, Artificial Sequence
  ENSG00000178809_40 (sequence is synthesized)
gcacgcccgggcagtgagtgtggatggcttggcaggtgagcctgctggagctggaggaccggcttcagtgtcccatctgcctggaggtcttcaaggagtccctaatgctacagtgcggcc

SEQ ID NO: 626188 - DNA, 120 bp, Artificial Sequence
  ENSG00000178814_0 (sequence is synthesized)
agagccgaccgcgagcgaccgagccggagccgagcgccagtttttccagggctaccagctgaagagctcctgtgggactccagccccaccaccatgggcagccccgagggccgcttccac

SEQ ID NO: 626189 - DNA, 120 bp, Artificial Sequence
  ENSG00000178814_1 (sequence is synthesized)
tttgccatcgaccgtgggggtaccttcacagacgtctttgcccagtgcccaggggggcacgtgcgggtcttaaaactgctctcagaggaccctgccaactatgcggacgcgccaaccgaa

SEQ ID NO: 626190 - DNA, 120 bp, Artificial Sequence
  ENSG00000178814_2 (sequence is synthesized)
ggcatccgccgcatcctggagcaggaggccggcatgctcctgccccgggaccagccgctggactccagtcatatcgccagcatccgcatgggcaccacagtggccaccaacgcactgctg

SEQ ID NO: 626191 - DNA, 120 bp, Artificial Sequence
  ENSG00000178814_3 (sequence is synthesized)
gagcggaagggggagcgggtggcgctgctggtgacacgtggcttccgagacctgctgcacattggcacccaagcccgtggggacctctttgacctggccgtgcccatgcctgaggtgctg

SEQ ID NO: 626192 - DNA, 120 bp, Artificial Sequence
  ENSG00000178814_4 (sequence is synthesized)
tatgaagaggtgctggaggtggacgaacgcgtggtgctgcaccgtggagaggcgggcaccgggacgcctgtgaaaggccgcacgggggacctgctggaagtgcagcagcctgtggacctg

SEQ ID NO: 626193 - DNA, 120 bp, Artificial Sequence
  ENSG00000178814_5 (sequence is synthesized)
ggggccctgcgtgggaagctggaggggctgctatctcgaggcatccgcagcctggctgtggtgctcatgcactcgtacacgtgggcccagcatgagcagcaggtgggtgtgctggcccgg

SEQ ID NO: 626194 - DNA, 120 bp, Artificial Sequence
  ENSG00000178814_6 (sequence is synthesized)
gagctgggcttcacgcacgtgtcactgtcctcggaggccatgcccatggtgcgcatcgtccctcgggggcacacggcctgtgccgacgcctacctcacgcccgccatccagcgctacgtg

SEQ ID NO: 626195 - DNA, 120 bp, Artificial Sequence
  ENSG00000178814_7 (sequence is synthesized)
cagggcttctgccgtggcttccagggccaactcaaggatgtgcaggtgttgttcatgcgctccgatggcggcctggcgcccatggacaccttcagcggctccagtgctgtgctctcgggc

SEQ ID NO: 626196 - DNA, 120 bp, Artificial Sequence
  ENSG00000178814_8 (sequence is synthesized)
ccggccggcggcgtggtgggctactcagccaccacctaccagcaggagggtggccagcctgtcatcggctttgacatgggaggcacgtccacggatgtgagccgctatgctggggaattc

SEQ ID NO: 626197 - DNA, 120 bp, Artificial Sequence
  ENSG00000178814_9 (sequence is synthesized)
gagcacgtcttcgaggccagcacagctggcgtcaccctccaggccccgcagctggacatcaacaccgtggcagcgggagggggttcccgcctcttcttcaggtctggcctctttgtggtt

SEQ ID NO: 626198 - DNA, 120 bp, Artificial Sequence
  ENSG00000178814_10 (sequence is synthesized)
gggcccgagtcagcaggagcccacccaggacccgcctgctaccgcaaagggggccctgtgacagtgacggatgctaatctggtcctgggtcgcctgctgcctgcctccttcccctgcatt

SEQ ID NO: 626199 - DNA, 120 bp, Artificial Sequence
  ENSG00000178814_11 (sequence is synthesized)
tttgggccgggagagaaccaaccactttcccctgaggcctcccgcaaagccctggaggctgtggccactgaggtcaacagcttcctgaccaacgggccctgcccggcctccccgctgagc

SEQ ID NO: 626200 - DNA, 120 bp, Artificial Sequence
  ENSG00000178814_12 (sequence is synthesized)
ctggaggaggtggccatggggttcgtgcgcgtggccaacgaggccatgtgccggcccatccgtgcactcacgcaggcaagaggccatgacccctcagcccatgtgctggcctgctttggg

SEQ ID NO: 626201 - DNA, 120 bp, Artificial Sequence
  ENSG00000178814_13 (sequence is synthesized)
ggagctggtgggcagcatgcatgtgccatcgcccgggccctgggcatggacacggtgcacatccacaggcacagtgggctgctgtcggccctggggctggccctggctgacgtggtgcat

SEQ ID NO: 626202 - DNA, 120 bp, Artificial Sequence
  ENSG00000178814_14 (sequence is synthesized)
gaggcacaggaaccctgctccctgctctacgcgcctgagaccttcgtgcagctggaccagaggctgagccgcctggaggagcagtgtgtggatgctctgcaggcccagggcttccccagg

SEQ ID NO: 626203 - DNA, 120 bp, Artificial Sequence
  ENSG00000178814_15 (sequence is synthesized)
tcccagatcagcactgagagcttcctgcacctgcgctaccagggcacggactgtgctctgatggtgtctgcccaccagcacccagccacagcccgctcgccccgtgcgggggacttcggg

SEQ ID NO: 626204 - DNA, 120 bp, Artificial Sequence
  ENSG00000178814_16 (sequence is synthesized)
gtcgtggacgatgtgcgagtgcggggcaccggccgcagtggtcttcgcctcgaggatgcccccaaagcccagaccgggcctccccgggtggacaagatgacccagtgctactttgagggg

SEQ ID NO: 626205 - DNA, 120 bp, Artificial Sequence
  ENSG00000178814_17 (sequence is synthesized)
ggctaccaggagacccctgtgtacctgctggcagagctgggctatgggcacaagctccatgggccctgcctcatcatcgacagtaacagcaccatcctggtggagccaggttgccaggca

SEQ ID NO: 626206 - DNA, 120 bp, Artificial Sequence
  ENSG00000178814_18 (sequence is synthesized)
gaggtgaccaagacaggggacatctgcatctccgtgggggccgaagtccccggcacagtgggcccccagctggaccctatccagctgtccatcttctcacaccgcttcatgagcattgct

SEQ ID NO: 626207 - DNA, 120 bp, Artificial Sequence
  ENSG00000178814_19 (sequence is synthesized)
gagcagatgggccgcatcctgcagcgcacagccatctccaccaacatcaaggagcgtctggacttctcctgtgccctctttgggcccgatggggggctggtgtccaatgccccccacatc

SEQ ID NO: 626208 - DNA, 120 bp, Artificial Sequence
  ENSG00000178814_20 (sequence is synthesized)
cctgtgcacctgggtgccatgcaggagacggtgcagttccagattcagcacctgggggccgatctccaccctggcgacgtgctactgagcaaccatcccagtgccgggggcagccacctg

SEQ ID NO: 626209 - DNA, 120 bp, Artificial Sequence
  ENSG00000178814_21 (sequence is synthesized)
ccagacctgactgttatcacaccggtgttttggccgggtcagacgcggcctgtgttctatgtggccagccgagggcaccacgcagacatcgggggcatcacaccaggctccatgcccccc

SEQ ID NO: 626210 - DNA, 120 bp, Artificial Sequence
  ENSG00000178814_22 (sequence is synthesized)
cactccaccatgctgcaacaggagggtgccgtctttctgtccttcaaacttgtccaggggggcgtcttccaggaggaggcggtgacggaggccctgcgggcgccaggcaaggtccccaac

SEQ ID NO: 626211 - DNA, 120 bp, Artificial Sequence
  ENSG00000178814_23 (sequence is synthesized)
tgcagcggaaccagaaacctgcacgacaacctgtcggacctccgtgcccaggtggcagccaaccagaagggcatccagctggtgggggagctcattgggcagtacggcctggacgtggtg

SEQ ID NO: 626212 - DNA, 120 bp, Artificial Sequence
  ENSG00000178814_24 (sequence is synthesized)
caggcctacatgggccatattcaggcaaacgctgagctggccgtgcgagacatgttgcgtgcctttggaacctcccggcaggcccggggcctgcccctggaggtgtcctcggaagaccac

SEQ ID NO: 626213 - DNA, 120 bp, Artificial Sequence
  ENSG00000178814_25 (sequence is synthesized)
atggacgacggttcccccatccgcctccgtgtgcagatcagcctgagtcagggcagcgccgtgtttgacttcagcggcactgggccggaggtgtttggtaatctcaacgcaccgcgggcc

SEQ ID NO: 626214 - DNA, 120 bp, Artificial Sequence
  ENSG00000178814_26 (sequence is synthesized)
gtaaccctgtccgccctcatctactgcctgcgctgtctggtgggccgcgacatcccactcaaccagggctgcctggcgccagtgcgcgtggtcattccccgaggctccatcctggacccg

SEQ ID NO: 626215 - DNA, 120 bp, Artificial Sequence
  ENSG00000178814_27 (sequence is synthesized)
tcgcccgaggcggcggtggtgggcggcaacgtgctcacgtcgcagcgcgtggtggatgtcatcctgggggcctttggggcctgcgccgcctcccagggctgcatgaacaacgtgaccctg

SEQ ID NO: 626216 - DNA, 120 bp, Artificial Sequence
  ENSG00000178814_28 (sequence is synthesized)
ggcaacgcccacatgggctactacgagacggtggcgggcggcgcgggcgcgggtcccagctggcacgggcgcagcggtgtgcacagccacatgaccaacacacgcatcaccgaccctgag

SEQ ID NO: 626217 - DNA, 120 bp, Artificial Sequence
  ENSG00000178814_29 (sequence is synthesized)
atcctggagagccggtacccggtcatcctgcgccgcttcgagctgcggcggggctcggggggcagaggccgcttccgaggcggcgacggcgtcacccgcgagctgctctttcgtgaggag

SEQ ID NO: 626218 - DNA, 120 bp, Artificial Sequence
  ENSG00000178814_30 (sequence is synthesized)
gcgctgctgtcagtgctgaccgagcgccgcgccttccggccatacgggctccacgggggcgagcctggcgcccgcggcctaaacctgctgatccgcaaaaacggccggacggtgaatctg

SEQ ID NO: 626219 - DNA, 120 bp, Artificial Sequence
  ENSG00000178814_31 (sequence is synthesized)
ggcggcaagacgtcggtgaccgtgtaccccggggatgtgttctgtctccacacgcccggcggcggtggctatggggacccggaggaccccgccccaccgccggggtcgcccccgcaagca

SEQ ID NO: 626220 - DNA, 120 bp, Artificial Sequence
  ENSG00000178814_32 (sequence is synthesized)
ctggcctttcccgagcacggcagcgtctatgagtatcgccgggcccaggaggccgtgtgaggatcccgcaataaagatgccttaagtctcccggttctggggacgcagctacggcgccta

SEQ ID NO: 626221 - DNA, 120 bp, Artificial Sequence
  ENSG00000178814_33 (sequence is synthesized)
acgtgctactgagcaaccatcccagtgccgggggcagccacctgccagacctgactgttatcacaccggtgaggggtgctgcccgcctgcctctgctggggcagtggtggccgatgcagc

SEQ ID NO: 626222 - DNA, 120 bp, Artificial Sequence
  ENSG00000178814_34 (sequence is synthesized)
ccccgccagctgccgccgctggctgccaggcatgtccctcctcagcagctatgagggcctgcggcaggagatccagcggctggcacaggagaacgaagagctgcggcggctggtgcagct

SEQ ID NO: 626223 - DNA, 120 bp, Artificial Sequence
  ENSG00000178814_35 (sequence is synthesized)
catccaggagaaccaggagctgaagctggtgctcaggaaccgcggcagcagcctgggcttctgcagctccgggttcctggctgaggtggctgccagtccctggctacccaggcggagaac

SEQ ID NO: 626224 - DNA, 80 bp, Artificial Sequence
  ENSG00000178821_0 (sequence is synthesized)
aacctcctcagagcatggcccgggggccgctggccgcccgcggactgcggctgctgctgccgctcctgccgctcctgccg

SEQ ID NO: 626225 - DNA, 120 bp, Artificial Sequence
  ENSG00000178821_1 (sequence is synthesized)
gcagctgcgacccctcggaccagtgcccgccccaggcccgctggagcagcctgtggcacgtggggctcatcctgctggcggtcctcctgcttctgctgtgtggtgtcacagctggttgtg

SEQ ID NO: 626226 - DNA, 120 bp, Artificial Sequence
  ENSG00000178821_2 (sequence is synthesized)
tccggttctgctgcctccggaagcaggcacaggcccagccacatctgccaccagcacggcagccctgcgacgtggcagtcatccctatggacagtgacagccctgtacacagcactgtga

SEQ ID NO: 626227 - DNA, 120 bp, Artificial Sequence
  ENSG00000178821_3 (sequence is synthesized)
ctgtacaccccggagcctccaccctcctacgatgaagctgtcaagatggccaagcccagagaggaaggaccagcactctcccagaaacccagccctctccttggggcctcgggcctagag

SEQ ID NO: 626228 - DNA, 120 bp, Artificial Sequence
  ENSG00000178821_4 (sequence is synthesized)
accactccagtgccccaggagtcgggccccaatactcaactaccaccttgtagccctggtgccccttgaaggaggtaggagaacggaccagagcttggagaactaatgcttggagccaag

SEQ ID NO: 626229 - DNA, 120 bp, Artificial Sequence
  ENSG00000178821_5 (sequence is synthesized)
ggccccagcccaccccaccgtcccacacattgctgtggccccaacctcggtgccatgttacaccggcccctggcgtcacccactaggcaggctgctgctttcagcctcagcccctggccc

SEQ ID NO: 626230 - DNA, 120 bp, Artificial Sequence
  ENSG00000178821_6 (sequence is synthesized)
agccccagcaggccctcagcctggaagaggccccttgggcctaagcctcgggtgggagctcagggccacctgtgacgtctgcatcttcttggagagagaataaagtttgtatttaagtgg

SEQ ID NO: 626231 - DNA, 120 bp, Artificial Sequence
  ENSG00000178821_7 (sequence is synthesized)
tccgctgtcgcccagtcccggccgctggcgggaactgacctggagcaagcaggaccttccctcccacctctcccgcctggcctccgcgggagtcccctacgatcccgctcagcagtgggg

SEQ ID NO: 626232 - DNA, 120 bp, Artificial Sequence
  ENSG00000178821_8 (sequence is synthesized)
cactcgctgaggacagcgagtcctgggagtgagcccaaggccacccctggccagcccaggagagatagccagggcaggcccagcagcccgaggccaggctctggccacggcggtctccga

SEQ ID NO: 626233 - DNA, 120 bp, Artificial Sequence
  ENSG00000178821_9 (sequence is synthesized)
catggagagacattgtctgctttttatcctgttaacctgtcttcggtggttgtgccacgacattccccagggtgcaggtgcccggtggccgagggtcagtccagtggtagagccttgctc

SEQ ID NO: 626234 - DNA, 120 bp, Artificial Sequence
  ENSG00000178821_10 (sequence is synthesized)
ccgcggactgcggctgctgctgccgctcctgccgctcctgccgctcctgccgctgccgcaggtgggtcgggcggcgttctctctcggttcggccaccgcggggcgggtccctgctcggac

SEQ ID NO: 626235 - DNA, 120 bp, Artificial Sequence
  ENSG00000178821_11 (sequence is synthesized)
tgcgacccctcggaccagtaagtcgggggggagggagccggggcctggccccgccctatggggaggcacgggtggcgaggtcggccgtcccatgccccgcctgctccaggtgccgccgtc

SEQ ID NO: 626236 - DNA, 120 bp, Artificial Sequence
  ENSG00000178821_12 (sequence is synthesized)
cccctcggaccagtgcccgccccaggcccgctggagcagcctgtggcacgtggggtaagtggaggccgcggcggagccgtgcgtccgacggttctggggcgggggtcaccggggccaggc

SEQ ID NO: 626237 - DNA, 120 bp, Artificial Sequence
  ENSG00000178826_0 (sequence is synthesized)
acagtctgtggagacaggtgagcgacgaacttctgagacaggtgtgggtgcgagggtcgggagggtcatgggattgggaccgaggtgtgaggagggaatctgcaattccttgctacacag

SEQ ID NO: 626238 - DNA, 120 bp, Artificial Sequence
  ENSG00000178826_1 (sequence is synthesized)
agcgctggcaacttctgacaggctgtttctggggtatgggctgcctcgggttgttgctgttacaaggaaagaaaagagttcccctgcccaccgcctcccagccactgggctacctcctgg

SEQ ID NO: 626239 - DNA, 120 bp, Artificial Sequence
  ENSG00000178826_2 (sequence is synthesized)
caggaaatttgcaaactgagtttaacaagttaggatcagcagagggtagaggagggccctggcagatgtggggtctagaagaggacaggagttatcagggcctccggccattgtgctggg

SEQ ID NO: 626240 - DNA, 120 bp, Artificial Sequence
  ENSG00000178826_3 (sequence is synthesized)
cctttgcctgtacaattgtttctcaagcagttgtgtccctgtggctttggtgcgcctgtgtgcactttctccctccacctggagcatgggctaacaccggaggaaaggaaaagacagagt

SEQ ID NO: 626241 - DNA, 120 bp, Artificial Sequence
  ENSG00000178826_4 (sequence is synthesized)
cagacagggagcctggggaggggccatggtgccaatgcacttactggggagactggagaagccgcttctcctcctgtgctgcgcctccttcctactggggctggctttgctgggcataaa

SEQ ID NO: 626242 - DNA, 120 bp, Artificial Sequence
  ENSG00000178826_5 (sequence is synthesized)
gacggacatcacccccgttgcttatttctttctcacattgggtggcttcttcttgtttgcctatctcctggtccggtttctggaatgggggcttcggtcccagctccaatcaatgcagac

SEQ ID NO: 626243 - DNA, 120 bp, Artificial Sequence
  ENSG00000178826_6 (sequence is synthesized)
tgagagcccagggccctcaggcaatgcacgggacaatgaagcctttgaagtgccagtctatgaagaggccgtggtgggactagaatcccagtgccgcccccaagagttggaccaaccacc

SEQ ID NO: 626244 - DNA, 120 bp, Artificial Sequence
  ENSG00000178826_7 (sequence is synthesized)
cccctacagcactgttgtgatacccccagcacctgaggaggaacaacctagccatccagaggggtccaggagagccaaactggaacagaggcgaatggcctcagaggggtccatggccca

SEQ ID NO: 626245 - DNA, 120 bp, Artificial Sequence
  ENSG00000178826_8 (sequence is synthesized)
ggaaggaagccctggaagagctccaatcaaccttcggcttcggggaccacgggctgtgtccactgctcctgatctgcagagcttggcggcagtccccacattagagcctctgactccacc

SEQ ID NO: 626246 - DNA, 120 bp, Artificial Sequence
  ENSG00000178826_9 (sequence is synthesized)
tcttctctccacaccagacctcgttcatttgactaacattttccagcgcctactatgtgtcagaaacaagtgtttctgcctggacatcataaatggggacttggaccctgaggagagtca

SEQ ID NO: 626247 - DNA, 120 bp, Artificial Sequence
  ENSG00000178826_10 (sequence is synthesized)
ggccacggtaagcccttcccagctgagatatgggtggcataatttgagtcttctggcaacatttggtgacctaccccatatccaatatttccagcgttagattgaggatgaggtagggag

SEQ ID NO: 626248 - DNA, 120 bp, Artificial Sequence
  ENSG00000178826_11 (sequence is synthesized)
gtgatccagagaaggcggagaaggaagaagtaacctctgagtggcggctattgcttctgttccaggtgctgttcgagctgttagaacccttaggcttgacagctttgtgagttattattg

SEQ ID NO: 626249 - DNA, 120 bp, Artificial Sequence
  ENSG00000178826_12 (sequence is synthesized)
aaaaatgaggattccaagagtcagaggagtttgataatgtgcacgagggcacactgctagtaaataacattaaaataactggaatgaactcctgatcccaaagcctattgtgttttcaac

SEQ ID NO: 626250 - DNA, 120 bp, Artificial Sequence
  ENSG00000178826_13 (sequence is synthesized)
acaaggtaataggaagccaagcaacttgcatgtctcccaatccctgtctagggacagctgctggtgcaggatggaagacttcctataaacagaatgggcgaccaattgtgtctacagagg

SEQ ID NO: 626251 - DNA, 120 bp, Artificial Sequence
  ENSG00000178826_14 (sequence is synthesized)
gggtgggctgagcatgggcacgcatgtccccagcctcctggacgagcaaagtcagtcaaagcgctggtgatccctgctccgcgtgcgtagcagtgtctgtgcctctcctgcccaggggct

SEQ ID NO: 626252 - DNA, 120 bp, Artificial Sequence
  ENSG00000178826_15 (sequence is synthesized)
agagagcagtctccagtgcagggtccccatcctatctgaaaacagtggagtcagtgaccccaggtggagggacttccagttttaacaatgggttggtatgaaggccagaaggagtgaaac

SEQ ID NO: 626253 - DNA, 120 bp, Artificial Sequence
  ENSG00000178826_16 (sequence is synthesized)
atgtgaactttctggcgaggagactccctcttgaatcatccatatgtagccccggggtcacttgcgaagagtctctaacagcttctgcctcactcctaagctctgaccgctaggctttca

SEQ ID NO: 626254 - DNA, 120 bp, Artificial Sequence
  ENSG00000178826_17 (sequence is synthesized)
ccccagccgccggtcctgattcctgagatcccaatattgagcaccaggtttcctggaattgtgtgctgcggctgtgatgtaggtttcggtcgctggaagctgctaaaccatagctgacgc

SEQ ID NO: 626255 - DNA, 120 bp, Artificial Sequence
  ENSG00000178826_18 (sequence is synthesized)
cccctcctaagccagccttccttccccgcgcgggcatctgtccagggccttgtcgcgctctcagtctccttcgcagcctggccccaaccgttcaacttcaataaagcaaaactccagcca

SEQ ID NO: 626256 - DNA, 120 bp, Artificial Sequence
  ENSG00000178826_19 (sequence is synthesized)
tacagtctgtggagacaggtgagcgacgaacttctgagacagttgtgtccctgtggctttggtgcgcctgtgtgcactttctccctccacctggagcatgggctaacaccggaggaaagg

SEQ ID NO: 626257 - DNA, 120 bp, Artificial Sequence
  ENSG00000178828_0 (sequence is synthesized)
aagccaagaaacaagctgggcagctctgggagagaggagtgtcagacagctgttgtcaacaggcacctggccagagtgaaaaggaggggcagattccatccaagtcccagcggcgccagc

SEQ ID NO: 626258 - DNA, 120 bp, Artificial Sequence
  ENSG00000178828_1 (sequence is synthesized)
tgacactctctgccaatgcccaggtgctgagcgacagtgtcccaccggtccctgtgcccagaatggcctgcaccaagaccctgcaacagtcccagcccatctccgcaggagccaccacaa

SEQ ID NO: 626259 - DNA, 120 bp, Artificial Sequence
  ENSG00000178828_2 (sequence is synthesized)
ccaccaccgctgtggcccctgctgggggtcattctggctccacagaatgtgacctggagtgtctggtgtgccgggagccctacagctgtccccggttgcccaagctgctggcctgccagc

SEQ ID NO: 626260 - DNA, 120 bp, Artificial Sequence
  ENSG00000178828_3 (sequence is synthesized)
atgccttctgcgccatctgcctgaagctcctgctgtgcgtgcaggacaacacctggtccatcacctgcccgctgtgccgcaaggtcaccgccgtccccgggggcctcatctgcagcctgc

SEQ ID NO: 626261 - DNA, 120 bp, Artificial Sequence
  ENSG00000178828_4 (sequence is synthesized)
gcgaccatgaggcggtggtggggcagctggcccagccatgcacagaggtatcgctctgtcctcaggggctggtggatcctgctgacttggcagcaggacaccccagcttggtgggagagg

SEQ ID NO: 626262 - DNA, 120 bp, Artificial Sequence
  ENSG00000178828_5 (sequence is synthesized)
cctactcctgctggccttgctcattatcctcatcgggcccttcatctacccgggtgtcttacgatgggtgctcaccttcatcatcgccctggccctgctgatgtccaccctcttctgctg

SEQ ID NO: 626263 - DNA, 120 bp, Artificial Sequence
  ENSG00000178828_6 (sequence is synthesized)
tctccccagcacccggggcagctgctggccctcctccaggactctcttctgcagagagcagaaacacagccacatctcttccattgcctgagtgccctctgatgaggctatccctgcagc

SEQ ID NO: 626264 - DNA, 120 bp, Artificial Sequence
  ENSG00000178828_7 (sequence is synthesized)
cctttctgcccttgggcccccggacttccacaatgaacagggtaaggggttacggactaagactggctcctttgggaaatcacatgccagcgggacttgcaagccacaaccgagatggcc

SEQ ID NO: 626265 - DNA, 120 bp, Artificial Sequence
  ENSG00000178828_8 (sequence is synthesized)
agcctgggtcaagaattacacgcttggatgacaggcttgcacttgcccttgggatagcatagctaaaactgttggtggctaggggagcagacacaaactacttgaacatgacaagatggg

SEQ ID NO: 626266 - DNA, 120 bp, Artificial Sequence
  ENSG00000178828_9 (sequence is synthesized)
ggaagctcctgttcctcttattccaatgttcttggtttttctttatataacttgatgaaagtattgcagtattgatgccattgtagaatagaactggaattccattctttttgcaattta

SEQ ID NO: 626267 - DNA, 120 bp, Artificial Sequence
  ENSG00000178852_0 (sequence is synthesized)
gcggcgcgggatcctgggaaggctgcagagctagagcagcgccgcccgaggggcggcaggggctgaccacagagagcgcgggggcctccagccgagaggaagggagggcagctcgggccg

SEQ ID NO: 626268 - DNA, 120 bp, Artificial Sequence
  ENSG00000178852_1 (sequence is synthesized)
aagtcgttggcttcgtaagagcagggtctatgggaagcctcctcagcgtgggttcttggaagaggtggagtttggagaggcttatgcggtacctgattcatccagcaaattaagacctgc

SEQ ID NO: 626269 - DNA, 120 bp, Artificial Sequence
  ENSG00000178852_2 (sequence is synthesized)
caactttttgataatctcgtcaataaattacagaacaattgttcctttcaagatttattcaaaacgtgtcaactctgcttaattaagcactttgatgatttaagaaatcttggaaatcct

SEQ ID NO: 626270 - DNA, 120 bp, Artificial Sequence
  ENSG00000178852_3 (sequence is synthesized)
tttgtactattgctcattcatacttgttcatcaaagcctggagtccttaaggacagaatttacctctaaacagaaagatggaaactaaagtacatttattctgccaggcagaggaaaata

SEQ ID NO: 626271 - DNA, 120 bp, Artificial Sequence
  ENSG00000178852_4 (sequence is synthesized)
ttgacttattagatgatggctctaattcttttgcaactgacttgtcatcaggaactattaaccacaagaaatacatcaagttttctaaaacaatagagaaggaaatttcaccggaaatta

SEQ ID NO: 626272 - DNA, 120 bp, Artificial Sequence
  ENSG00000178852_5 (sequence is synthesized)
ggagtttgagcccagaatataaaaaaatatttgaaacatcaataatcttttgtggagaagaaaagtcctctgatttttcaggagaaaaaaaagttgggagaaagagtttacaagtacaac

SEQ ID NO: 626273 - DNA, 120 bp, Artificial Sequence
  ENSG00000178852_6 (sequence is synthesized)
agcacagtaaaagaactgagattatccctccttttctgaagctgtcaaaggagaaggtgacaaggaaagaaaactctttatgcaagttgccgaatcagtacagcgttcacaagacttcat

SEQ ID NO: 626274 - DNA, 120 bp, Artificial Sequence
  ENSG00000178852_7 (sequence is synthesized)
cacctctttgtacatcttctgcaattactcgggaaaaggaaatgctgtctaacctctacatgacattatatgatgaagtaacccatggatatttacactcaaaagaattaagtgcacttc

SEQ ID NO: 626275 - DNA, 120 bp, Artificial Sequence
  ENSG00000178852_8 (sequence is synthesized)
ataaagcctgtaaaatttttagtaaaattcgaagtggtaagatttatgtgaatgatcttccagtgatcctttgcatcttgagaatttctataagtgatttagaaatgcgacaggcactaa

SEQ ID NO: 626276 - DNA, 120 bp, Artificial Sequence
  ENSG00000178852_9 (sequence is synthesized)
agactgttgatattgatgcattccaggatgccttgaagattttctgtaggataaaaggtggtcgagtttcaactgatgacgtgtttgctgttttggatagcatgggtatccctataaacc

SEQ ID NO: 626277 - DNA, 120 bp, Artificial Sequence
  ENSG00000178852_10 (sequence is synthesized)
gtgaaattttagaagaagtgacaaaacatacctatattgacagtaaccacatggtggatattggggatattatatttactttgaatgagctacaggaacagtatgaggatgtttcaatta

SEQ ID NO: 626278 - DNA, 120 bp, Artificial Sequence
  ENSG00000178852_11 (sequence is synthesized)
cagaaggatcacctttgaatgaaattacttcagacagaaagttatcaagtgtagcaggatgctatctaaaatataagaagaaaaatagtttgtcttccaaactccctgaaccttcaatat

SEQ ID NO: 626279 - DNA, 120 bp, Artificial Sequence
  ENSG00000178852_12 (sequence is synthesized)
ccaaaaagttaaataaaaaaagcaaccaatattatagcaaaattatggagaatgatgaccttgaatctaaaagaccaaaaaatacttggcaaataagaaaatttctgggtggggttggca

SEQ ID NO: 626280 - DNA, 120 bp, Artificial Sequence
  ENSG00000178852_13 (sequence is synthesized)
gcagtaatgtaggagtccaagaaccatattcaaagaatggcataaactttaaaaaacattcagagaagggtgaaattcatgactcaaagtctaaaccacaaagcttgaagagtagtacaa

SEQ ID NO: 626281 - DNA, 120 bp, Artificial Sequence
  ENSG00000178852_14 (sequence is synthesized)
gcctcagtaagtctctggataaaagtgatatttctagtatcccaaaacttcagaagccagctgtaagaaagcattccagtctccaaaaacaggtttcgtctacggaaaaaactgcaatta

SEQ ID NO: 626282 - DNA, 120 bp, Artificial Sequence
  ENSG00000178852_15 (sequence is synthesized)
gtactctggaaaacttctgtgaagctatcagtaaacttcaagaaaattacattgcagcagaagaacttcagtctattttgccttcaacaggaattaatttattagatgaagaattccaga

SEQ ID NO: 626283 - DNA, 120 bp, Artificial Sequence
  ENSG00000178852_16 (sequence is synthesized)
aagccattgataaaattaaagataaaaatgtggattatgaggatctaaatacttgtcttcaaaattttggtatttacctttctaagccagaatttaagaagatcacagaactgactgaag

SEQ ID NO: 626284 - DNA, 120 bp, Artificial Sequence
  ENSG00000178852_17 (sequence is synthesized)
ctggtgaaacaaaaaaagtgaattttaaagaattcattgatactatgatgagcaacacggaatgcttctctgaaaaattagtattgcctgatgctattgaaaccctcgacgatctcagaa

SEQ ID NO: 626285 - DNA, 120 bp, Artificial Sequence
  ENSG00000178852_18 (sequence is synthesized)
aggagacgatgagtgtttctgacctgtggaatactctgtctagtttgaatagtaatttaaaaaaggatgaatttctagctgcattggaactagtgacagttgatgaaggtgacaaagtac

SEQ ID NO: 626286 - DNA, 120 bp, Artificial Sequence
  ENSG00000178852_19 (sequence is synthesized)
aatttgaagaatttgcaaaagtagtaaggaatatgcgtgatgctgccaggttagaagagttacaggaagttgtcttagctgctgatttgctggaaggtgacatgatagctgggaagaact

SEQ ID NO: 626287 - DNA, 120 bp, Artificial Sequence
  ENSG00000178852_20 (sequence is synthesized)
tggaagactttctaagaaatgttgggattaagtcacctaaagaagaggtagagaaaattcttcaatcagattttgtttctgaagataacatggtgaacattaaagactgtatgagggctt

SEQ ID NO: 626288 - DNA, 120 bp, Artificial Sequence
  ENSG00000178852_21 (sequence is synthesized)
tgagggacacccagaaattttccaattatattgatttcaggaaagaggcttcaaatctaaaattaccaaaggtaaacgagattaaagaagctgctaacatcttgtcacatgtcgataatg

SEQ ID NO: 626289 - DNA, 120 bp, Artificial Sequence
  ENSG00000178852_22 (sequence is synthesized)
gcaagattggtatacctgatttggagcatgccttgaaatgtttgaatgttaatttaactgaggaggacttcaatgaagcccttaactgttgtaacgtcagtgataatatggaggtggatt

SEQ ID NO: 626290 - DNA, 120 bp, Artificial Sequence
  ENSG00000178852_23 (sequence is synthesized)
taaaagatttcttaatgaaaatgaaagaaagtccacatttccaaaagtccaaggctacacagatactcttagctactacccaaattctccagaatgatctagttgatgtctctgacctca

SEQ ID NO: 626291 - DNA, 120 bp, Artificial Sequence
  ENSG00000178852_24 (sequence is synthesized)
agacattattgatggacaaggaccttcatacagctaatgctatacttactgtaatgttaagacatgtacctgaacatgaaagtggcaaggttagcattcaagaatttatgactaaattat

SEQ ID NO: 626292 - DNA, 120 bp, Artificial Sequence
  ENSG00000178852_25 (sequence is synthesized)
ccgatatattgacaattcctaaagctgcaggtaagttttatttaatatgtacttattgcccagatctagaaaggcaagcagtggtttacatgttaaaaacaatacaggattcgatagtta

SEQ ID NO: 626293 - DNA, 120 bp, Artificial Sequence
  ENSG00000178852_26 (sequence is synthesized)
aagcacaggtaagtaagaagcaatacaatatgaatataaaacaacacaagattagtttacataacttctgtttgaattctaaggcaaatattgctaagcttaacccaaactcaaaatttt

SEQ ID NO: 626294 - DNA, 120 bp, Artificial Sequence
  ENSG00000178852_27 (sequence is synthesized)
aggtagtcttacttgatagtgctagaaaattactagattatatattattcagtatgcatatttgacttctgaaattattagaaaataatttttaaaacttttgacaaatccagtagaatt

SEQ ID NO: 626295 - DNA, 120 bp, Artificial Sequence
  ENSG00000178852_28 (sequence is synthesized)
tttatcactatctgttatgttctcatgtatcttcagcgactctcttgatcacactttttaaacattcatgctttttgaggtataatgtacatatggcaaaattcactctttttaggtata

SEQ ID NO: 626296 - DNA, 120 bp, Artificial Sequence
  ENSG00000178852_29 (sequence is synthesized)
cagttctttggattcttaaaaataatgtaatgtaacccttactatacacaacatatagactatattatcccccagaagtctcttatgcccttttggtaatccatttcttcctctaccctg

SEQ ID NO: 626297 - DNA, 120 bp, Artificial Sequence
  ENSG00000178852_30 (sequence is synthesized)
agcccctggcaactactgattcattctttgtccctctagttttgccttttgtggaatatcatgtaaatgattaaatatgaagtggtttgagtttggcagtcattgcatgcatataccttg

SEQ ID NO: 626298 - DNA, 120 bp, Artificial Sequence
  ENSG00000178852_31 (sequence is synthesized)
aatttactttgtttatactctcatttatactaccaaccctccctagaaaaaatggattctgattggttctggttgcagtattacaaattccaaataaagctttatttgaggacccccaaa

SEQ ID NO: 626299 - DNA, 120 bp, Artificial Sequence
  ENSG00000178852_32 (sequence is synthesized)
aggaccatcctctaccacaggggtggaaggtctatgggtaggacatgcagggatggagggtatcctgtggaagctgaggtgggatgactgctggacactggtactgcccctacaggtgtg

SEQ ID NO: 626300 - DNA, 120 bp, Artificial Sequence
  ENSG00000178852_33 (sequence is synthesized)
ccaaccctgagcttcatggggccaaacaaatggggaagtcagagctcatcttatccctgtgtgagtccactgacagtacctaggaggtgagattattttgtgaactgactgacatgcaca

SEQ ID NO: 626301 - DNA, 120 bp, Artificial Sequence
  ENSG00000178852_34 (sequence is synthesized)
gtggtcaatcagaatgccatccatagagtaaaacagggtcctggaggcccttttggtttttggaaggtaaattatgatgatatccagggataccagggggtgttgcacatagtggtggct

SEQ ID NO: 626302 - DNA, 120 bp, Artificial Sequence
  ENSG00000178852_35 (sequence is synthesized)
cagggcagcagatatttataaatataaaaaataattttactattttaatgacaggtatagctgaatattatccatgatgggttcttaaaatgagttggggagtatttttttgttttgttt

SEQ ID NO: 626303 - DNA, 120 bp, Artificial Sequence
  ENSG00000178852_36 (sequence is synthesized)
tttaaaagagacttttttcttccttgaatgttgagtagaattcataggtgaagccatgtgggccaagagtttttttgtgaaaggctttggattatttatttaatgtctttaaatgaatag

SEQ ID NO: 626304 - DNA, 120 bp, Artificial Sequence
  ENSG00000178852_37 (sequence is synthesized)
gattaacaaggtattctattttcttgttagttttggcaagctatgtttttagaggaattcgttcattagatctgccttttcaaatgtattgaataaagttgttctctttttgacatctga

SEQ ID NO: 626305 - DNA, 120 bp, Artificial Sequence
  ENSG00000178852_38 (sequence is synthesized)
tcagttttcacttatgcatattattgaacagttgatttcttatgaatagactgaagaaaaaaccatcactattatagataagtaaattttcagtctttttcatcttggatggcaagcaaa

SEQ ID NO: 626306 - DNA, 120 bp, Artificial Sequence
  ENSG00000178852_39 (sequence is synthesized)
atcaaatatatggaggcaagaactattgggcaaagcattttctacctctgtgcacaattgaaatgacattattcaaggtgactgcatctgaacacatcctcaatcatgcattatccaaga

SEQ ID NO: 626307 - DNA, 120 bp, Artificial Sequence
  ENSG00000178852_40 (sequence is synthesized)
gaggtggatttaaaagatttcttaatgaaaatgaaagaaagtccacatttccaaaagtccaagggtaagtgaatacttcttgttcaagagaatggctagaaaataaatatttaaaaatga

SEQ ID NO: 626308 - DNA, 120 bp, Artificial Sequence
  ENSG00000178852_41 (sequence is synthesized)
gtattttgcccaactgcatacgataaatacataggaaaaacaaacacacagaagaaaaccaaaccaaccaaagtatctctttcaaaaggaaacgacagtctccttaaaggcaacccgaga

SEQ ID NO: 626309 - DNA, 120 bp, Artificial Sequence
  ENSG00000178852_42 (sequence is synthesized)
caaaggacggaccgaaggaaatccttttgtactattgctcattcatacttgttcatcaaagcctggagtccttaaggacagaatttacctctaaacagaaagatggaaactaaagtacat

SEQ ID NO: 626310 - DNA, 120 bp, Artificial Sequence
  ENSG00000178852_43 (sequence is synthesized)
aggacggaccgaaggtaagattgaagtggggtcagaccatggcgggacagcgcaccggagaatgaacagcgattagggaagagtggcgagcgggtggcaaggacggagggcggaatcccg

SEQ ID NO: 626311 - DNA, 120 bp, Artificial Sequence
  ENSG00000178852_44 (sequence is synthesized)
gccggggctgcgggaggaaagcgcacggacaggagccccaccgctcgaatgcagcgcccggcggctggcctcgtgaggtcacaggcccttacgagtttggagaggcttatgcggtacctg

SEQ ID NO: 626312 - DNA, 120 bp, Artificial Sequence
  ENSG00000178852_45 (sequence is synthesized)
tttattctgccagatttgaaacatcaataatcttttgtggagaagaaaagtcctctgatttttcaggagaaaaaaaagttgggagaaagagtttacaagtacaacagcacagtaaaagaa

SEQ ID NO: 626313 - DNA, 120 bp, Artificial Sequence
  ENSG00000178852_46 (sequence is synthesized)
ttctcaaaccacaaaaggtaaagttaaggaattggatgatctgtgatttatagtctactaactgctttttctagtgtttgcccacatatctgtgttggtgaaatgttgtgtatcataccc

SEQ ID NO: 626314 - DNA, 120 bp, Artificial Sequence
  ENSG00000178852_47 (sequence is synthesized)
aaaaaatgctgtttagagaaatgctgattgcatgtctgtgaaaggaaatgtaaagtaagcctggaacatcttgtcttccggagataaggaaactattaataaaaaagactactatcaggg

SEQ ID NO: 626315 - DNA, 120 bp, Artificial Sequence
  ENSG00000178852_48 (sequence is synthesized)
attcatcagaaggactcaagagcctactggaagagtctcccaccttttcctataaaagatgagaaaattagagcatcaataagtataataatttcagggaattaaactgcatcaaatata

SEQ ID NO: 626316 - DNA, 120 bp, Artificial Sequence
  ENSG00000178852_49 (sequence is synthesized)
agtcagcgcggaggcggtattgagttcagccgctccccacagccccggagcccctgggcggtggcggtggccgcggcagcaccggctcgacagccgatagggtcctgggcccgctccgct

SEQ ID NO: 626317 - DNA, 120 bp, Artificial Sequence
  ENSG00000178852_50 (sequence is synthesized)
ataattattgcaagagaaaaaagggactattgaaattggaagaggaggaggactattgcaatggaaagaatgctgtgaccgtaagatctgtaggtgtctcaagggttgggcagaagtttt

SEQ ID NO: 626318 - DNA, 120 bp, Artificial Sequence
  ENSG00000178860_0 (sequence is synthesized)
tttgttccaaggagtacagatagccttttcaaaaggcgcagcttaccgcggtgcgcgcggattctggacttgggcgccaactcgtagtccacgctccccggggtcagcagaggggcgctc

SEQ ID NO: 626319 - DNA, 120 bp, Artificial Sequence
  ENSG00000178860_1 (sequence is synthesized)
acgctctcgccacccacctcgctttctcaccccgcgcttcccggcctgggtttttagtcttccttggagcgctctctggcctccgcctccgccagggagcggaaggcggagacagcgaga

SEQ ID NO: 626320 - DNA, 120 bp, Artificial Sequence
  ENSG00000178860_2 (sequence is synthesized)
ctggccaggggggaggaaagaggacgcgtgtgggcaagggggacaacgggatgtccacgggctcggtgagtgatccggaggagatggagcttcgggggctgcagcgggagtacccggtcc

SEQ ID NO: 626321 - DNA, 120 bp, Artificial Sequence
  ENSG00000178860_3 (sequence is synthesized)
ccgcctccaagaggccgcccctccgcggcgtagagcgcagctacgcctcgcccagtgacaactcgtcggcagaggaggaggaccccgacggcgaggaggagcgctgcgctctgggcacag

SEQ ID NO: 626322 - DNA, 120 bp, Artificial Sequence
  ENSG00000178860_4 (sequence is synthesized)
ccggcagcgcggaaggctgcaagaggaagcggccccgtgtggctgggggcggcggcgcaggtggtagcgcgggcggtggtggcaagaagcccctcccggccaagggctcagccgcagagt

SEQ ID NO: 626323 - DNA, 120 bp, Artificial Sequence
  ENSG00000178860_5 (sequence is synthesized)
gcaagcagtcgcagcggaacgcggccaacgcccgtgagcgtgcccggatgcgcgtgctgagcaaagccttctccaggctcaagaccagcctgccctgggtgccccccgacactaagctct

SEQ ID NO: 626324 - DNA, 120 bp, Artificial Sequence
  ENSG00000178860_6 (sequence is synthesized)
ccaagctggacacgctccggctggcttccagttacatcgctcacctgcggcagctgttgcaggaggaccgctatgagaacggctacgtgcacccagtgaacctgacatggccattcgtgg

SEQ ID NO: 626325 - DNA, 120 bp, Artificial Sequence
  ENSG00000178860_7 (sequence is synthesized)
tctcgggaagaccggactctgacaccaaagaagtttccgcagccaacagactatgtggaaccaccgcttaaatcggactggaactcacttgatgggattattcgttaaatgcgagtgttt

SEQ ID NO: 626326 - DNA, 120 bp, Artificial Sequence
  ENSG00000178860_8 (sequence is synthesized)
cgggtgtggctgtcactgcacagcgcccacggctacagctgcgccggatctgggcgaccacgttttgcctctccaaaaagagcttcctttcgtgacgagacgcggacgcaggtccaccct

SEQ ID NO: 626327 - DNA, 120 bp, Artificial Sequence
  ENSG00000178860_9 (sequence is synthesized)
cgggccctagctctgtagactaactctcggctgctgccccagcccgcgccagacagcccacggatccgttctcagcggagccagattcatcgcacacgtgcgggacggttccacacagcc

SEQ ID NO: 626328 - DNA, 120 bp, Artificial Sequence
  ENSG00000178860_10 (sequence is synthesized)
ccggcctttcgcggtgacacaatggttagggaacggttagaacgcgctctacatccgctttaaagacagaggtctagacgtgagatccgcgtcgggacagggttttaagtgacaaagaag

SEQ ID NO: 626329 - DNA, 120 bp, Artificial Sequence
  ENSG00000178860_11 (sequence is synthesized)
ggcgagtggcttctctgggccgggttcgtactccagcacagcgcccttctaacgggcgggaggaaggccgctgctcgcagggctaggtggagacacacttcccagatcaccgcaggcggg

SEQ ID NO: 626330 - DNA, 120 bp, Artificial Sequence
  ENSG00000178860_12 (sequence is synthesized)
ttttacccggagagctctgggccgttcggcctccctgccgggtggcttcttcaatcccgtctccttcccaagctcccggctttttctaatcaggcaggcgtctgtcaaccctctccactt

SEQ ID NO: 626331 - DNA, 120 bp, Artificial Sequence
  ENSG00000178860_13 (sequence is synthesized)
ctgggctgaagcctccccaagccccgctgcgccaacctgtgtggggtcttcttcgggcctccctctccgccccgctcctgctcctacctgcagcacccccagctccgactccagactctc

SEQ ID NO: 626332 - DNA, 120 bp, Artificial Sequence
  ENSG00000178860_14 (sequence is synthesized)
tgcatcaggtctccccactccacgctccgggcgccccaactccaacaccacgtcctgccgcgcaggttcttccccgcgcggaggagcgcgcagggtgggcggcttaccatagcaagtgat

SEQ ID NO: 626333 - DNA, 120 bp, Artificial Sequence
  ENSG00000178860_15 (sequence is synthesized)
cctgcgatagggaacgcgcccttgccccgaggctgcactaccacaggaaataacatatgtaaataaatttatttttttatgaataataaaacgcgctgtaaaaaccgtgtgccccttgga

SEQ ID NO: 626334 - DNA, 120 bp, Artificial Sequence
  ENSG00000178878_0 (sequence is synthesized)
gcagccattggttctctggaactataaagcacactcatccagaaacagcctcagattttactttcctggaggcagacagaagtgaatgggaatggagaggccggcggcccgggagccgca

SEQ ID NO: 626335 - DNA, 120 bp, Artificial Sequence
  ENSG00000178878_1 (sequence is synthesized)
gctgcggcgcttccagggactgctgctggaccgccgaggccggctgcacggccaggtgctgcgcctgcgcgaggtggcccggcgcctggagcgcctgcgcaggcgctccctcgtagccaa

SEQ ID NO: 626336 - DNA, 120 bp, Artificial Sequence
  ENSG00000178878_2 (sequence is synthesized)
cctcgtagccaacgtggccggcagctcgctgagcgcaacgggcgccctcgccgccatcgtggggctctcgctcagcccggtcaccctggggacctcgctgctggtgtcggccgtggggct

SEQ ID NO: 626337 - DNA, 120 bp, Artificial Sequence
  ENSG00000178878_3 (sequence is synthesized)
gggggtggccacagccggaggggccgtcaccatcacgtccgatctctcgctgatcttctgcaactcccgggagctgcggagggtgcaggagatcgcggccacctgccaggaccagatgcg

SEQ ID NO: 626338 - DNA, 120 bp, Artificial Sequence
  ENSG00000178878_4 (sequence is synthesized)
agagatcctgagctgcctcgagtttttctgccgctggcagggctgcggggaccgccagctgctgcagtgcgggaggaacgcctccatcgccctgtacaattctgtctacttcatcgtctt

SEQ ID NO: 626339 - DNA, 120 bp, Artificial Sequence
  ENSG00000178878_5 (sequence is synthesized)
ctttggctcacgtggcttcctcatccccaggcgggcggagggggacaccaaggttagccaggccgtgctgaaggccaagattcagaaactggccgagagcctggagtcctgcaccggggc

SEQ ID NO: 626340 - DNA, 120 bp, Artificial Sequence
  ENSG00000178878_6 (sequence is synthesized)
tctggacgaactcagcgagcagctggagtctcgggttcagctctgcaccaagtccagtcgtggccacgacctcaagatctctgctgaccagcgtgcagggctgtttttctgagaacatcc

SEQ ID NO: 626341 - DNA, 120 bp, Artificial Sequence
  ENSG00000178878_7 (sequence is synthesized)
tttccccctaatgaccgaggccagcaaatcatcctcatgggatgctccagaatttgtagctcccttaggaaaacaccaagctgggttaggagccgaaggcaaaggatgagaaaaactgtt

SEQ ID NO: 626342 - DNA, 120 bp, Artificial Sequence
  ENSG00000178878_8 (sequence is synthesized)
tttgaagtgggcaggtccccaaagcccttcttttcccatcactgtgacatctgcctgggcttgagtgctacggacttttcagtcttcctagtggaaaaatgtgacccaaaaactcttttt

SEQ ID NO: 626343 - DNA, 120 bp, Artificial Sequence
  ENSG00000178878_9 (sequence is synthesized)
cctttatcaaaaactttctgtctaaacacagctgggcaggcactcctgttttaaagttatttcggggtccctgaccctgccctggtggcttggcctgagactggagagagtgccatcctc

SEQ ID NO: 626344 - DNA, 120 bp, Artificial Sequence
  ENSG00000178878_10 (sequence is synthesized)
tgggtcctctccaagtcctactagtctttgaagtcctcaaaatgtgcgtgaggaaggcgtttgcctctattccagaatttctgatacaaagaactccagaatccagagcaaatcagccct

SEQ ID NO: 626345 - DNA, 120 bp, Artificial Sequence
  ENSG00000178878_11 (sequence is synthesized)
tctctgaacgttgtaggatggttcagaacccagagaggaccctggtgctgatatctcctcctcttccctttcccctcagcttacttactcccagatgcggcctgggtatgaagtaggcct

SEQ ID NO: 626346 - DNA, 120 bp, Artificial Sequence
  ENSG00000178878_12 (sequence is synthesized)
ttcctgagtggctcccaatccagtcctccaagtactcagaggggaagcccgtgaagccgtcatctaagtcctgctccctcacatgaagctgagggccagatagatggagcgactgccaac

SEQ ID NO: 626347 - DNA, 120 bp, Artificial Sequence
  ENSG00000178878_13 (sequence is synthesized)
ttcatttcccgacatcattgtgttcagaagagagtgatgggttttgagttagacagtcctgggcttgagacaggctttgtcactactgtgtgagtgtagccacctaatctctctgagact

SEQ ID NO: 626348 - DNA, 120 bp, Artificial Sequence
  ENSG00000178878_14 (sequence is synthesized)
gtgtaaaacaaagatgataaaatctcaccctgttgtgagatattaaatgagccaaagtgcctagcatgatggtgctggctcatatagtgtagtccctggaatggcaaattaacatcaccc

SEQ ID NO: 626349 - DNA, 120 bp, Artificial Sequence
  ENSG00000178878_15 (sequence is synthesized)
aggaacttgttagaaaggcaaattcttggacacaaccctcctgatttatggaatcagaaactctggctgtggggcccagcaacctgagtttaaacaatttctctgggtggttctgcggca

SEQ ID NO: 626350 - DNA, 120 bp, Artificial Sequence
  ENSG00000178878_16 (sequence is synthesized)
cactaaggtttgaaaatcactgcaacaaatgctaacttctaatccccttgatgagctttcacgaagtctcacggcttctctagggactccatggtcttcagagtcgttcacagatgacca

SEQ ID NO: 626351 - DNA, 120 bp, Artificial Sequence
  ENSG00000178878_17 (sequence is synthesized)
aggacagactgtgtcccagaagccaaaatgagagagagagagagagagcacgcgtacgtgcaccctggggcagtgtctcaccgtatgaacaagggatgtaacactaaaagcccattaggg

SEQ ID NO: 626352 - DNA, 120 bp, Artificial Sequence
  ENSG00000178878_18 (sequence is synthesized)
ggcagtgtttcccgcctgttgtagaaactggtacagaaaggaatatgaagttcctgaaactgacctttgtctattattaccttctctgaaaagtgccagtccatgtattttttatttatt

SEQ ID NO: 626353 - DNA, 120 bp, Artificial Sequence
  ENSG00000178878_19 (sequence is synthesized)
agtttctaaatgggagactgctgaggctctttgcaagagatgagattaagtttgagtttctaaggcagggcatgagctggaaatagcattgctttccttgattgtctctctccttcaggg

SEQ ID NO: 626354 - DNA, 120 bp, Artificial Sequence
  ENSG00000178878_20 (sequence is synthesized)
agattctttttctctagtgttttaagtgatcctttgaagtaagtgtggagagtcttgaatggcaagaccaggagctgagtttaagcttgtaatggaagcttgcattgtgggatatataac

SEQ ID NO: 626355 - DNA, 120 bp, Artificial Sequence
  ENSG00000178878_21 (sequence is synthesized)
tgaggaagcatatttatcctgaaggtattttgccagaaggtatcacttgacctggaaaaggaatctatttagttcaggaaagataaaaagtttagaggtatgtgaaggaagcacttagaa

SEQ ID NO: 626356 - DNA, 120 bp, Artificial Sequence
  ENSG00000178878_22 (sequence is synthesized)
cttgcaagcctgatgtcctatcaagttatgtcttctgggtgacagacaaaatcgcttgtcttatggtggtgatgtgttgcattttcactttggggtctgtaagaaactgtcagtgaaaat

SEQ ID NO: 626357 - DNA, 120 bp, Artificial Sequence
  ENSG00000178878_23 (sequence is synthesized)
atgtacaattccttcaatttccattcttaacaactgtaatgttgaaaaataagttgaaaagtctttgggaccatacatgcaaaaacggtgcctctgttacttaattatttaatattctat

SEQ ID NO: 626358 - DNA, 120 bp, Artificial Sequence
  ENSG00000178878_24 (sequence is synthesized)
aaatgtacccaatctgtccgcacccttcccagtgatggggcagtatgtctgaggaagtataatttcagtactggggtcggggagaggaggtgatgtttctacatttttattttttctata

SEQ ID NO: 626359 - DNA, 120 bp, Artificial Sequence
  ENSG00000178878_25 (sequence is synthesized)
aattgcaattggtctgtatgctggtttattttgaaatttatattggtttcttttcaagctggtgtcatctcctagactgtttcacccagatgctagcattttttttttttttttgagaca

SEQ ID NO: 626360 - DNA, 120 bp, Artificial Sequence
  ENSG00000178878_26 (sequence is synthesized)
acaggcatgagccacctcgcctggccagatgctagcattttagatcaaacaattcattttagatgaattgttttgtttcacaatcattttaaatcattttagaatgtacttcacattatt

SEQ ID NO: 626361 - DNA, 120 bp, Artificial Sequence
  ENSG00000178878_27 (sequence is synthesized)
cttcacattattagttgtgttatggcataaaggtacaaccattccctaactccatcttttattaatgcttaagtttaaattatattcttccaatgcctaagctattccctagaattaaac

SEQ ID NO: 626362 - DNA, 120 bp, Artificial Sequence
  ENSG00000178878_28 (sequence is synthesized)
tgggcacttttggaagcagcaacagtaacagcagcagcaaacttttcctctcatattttgggtgtatcaaaagttctagacttttgaagttatgatttcagtggcccactttatttctaa

SEQ ID NO: 626363 - DNA, 120 bp, Artificial Sequence
  ENSG00000178878_29 (sequence is synthesized)
ggaagagtgtctactttggaacgatactttgcacatagtaggaactcaagaaatacatttgaataattataattaactgtttagctatcttaatgagaatttgttgacaacaaaagatca

SEQ ID NO: 626364 - DNA, 120 bp, Artificial Sequence
  ENSG00000178878_30 (sequence is synthesized)
tccatcgccttatgtgtgagtaagattggagcctctatcaagatttagtcaagttcagttagattgattctagaaacaaatatttatttctttcttttacggggatgtgaataaggcttt

SEQ ID NO: 626365 - DNA, 120 bp, Artificial Sequence
  ENSG00000178878_31 (sequence is synthesized)
tccttaaggccttcattctttaaacaaacaggttgaaatggtatgttgtaaaagagaagacgggagagaggtatttagatgataagtgtacttcacaaaaatgccaaagtttgaaaaata

SEQ ID NO: 626366 - DNA, 120 bp, Artificial Sequence
  ENSG00000178878_32 (sequence is synthesized)
ggtatgtttgttctaaatgtttaagtgcttctctgttaggttctggggcttgcaatcatttgaattgttctgtttcacaataaaggagattcactgggttctgcattttcaggattcaat

SEQ ID NO: 626367 - DNA, 120 bp, Artificial Sequence
  ENSG00000178878_33 (sequence is synthesized)
agaactgctccattaaaaaaataatccttagcaagcattcgaatcctaactgctttgatgcacttgccctcgggcacctgtcatttccaatatggtaggtgtcaaagtcaaaagtattta

SEQ ID NO: 626368 - DNA, 120 bp, Artificial Sequence
  ENSG00000178878_34 (sequence is synthesized)
ctgggagaaaaaagagaggagtggttgtagaagtctccctaaatcagacatgtcaagcaatcagccaacgtggtgtatttctcattcaatattttagtgtgaattgagacactgagataa

SEQ ID NO: 626369 - DNA, 120 bp, Artificial Sequence
  ENSG00000178878_35 (sequence is synthesized)
agacatcgtgcagagataaatggggatacagttaaatgtagcaactcttgagttcattttttcccactgtagcaaaattaatgctttctctttattgaaataaattgctcattcctcaaa

SEQ ID NO: 626370 - DNA, 120 bp, Artificial Sequence
  ENSG00000178878_36 (sequence is synthesized)
tgcgggccaggggtactcggaaggcgcgggcaggagcctggcgaggatgcaccttcccctgccttggaaagtgacggacaccagattgcccccaacttcccatcctcaggaataaaactg

SEQ ID NO: 626371 - DNA, 120 bp, Artificial Sequence
  ENSG00000178878_37 (sequence is synthesized)
cagaatagccttagtagcttcacagtcttggtacttggaattctctcactctggaatgattatctcctgggatcttaaagcgttttctcctgctcaacagtgaggtcttaactcaaatat

SEQ ID NO: 626372 - DNA, 120 bp, Artificial Sequence
  ENSG00000178878_38 (sequence is synthesized)
taactcaaatatcactgtctcagagaggccttcccaatctcacagttatccccacaacccaccctccccaggttactctgtaatttttatgtgaacagggtttcactctgttgcccaggc

SEQ ID NO: 626373 - DNA, 120 bp, Artificial Sequence
  ENSG00000178878_39 (sequence is synthesized)
cgggggtgcgcggggcggtcagcgatctgcagcttcgcggggacagagatgtaacccaactcgttcacggatgttccgcgcgccgtgtcaccggctgcgggccaggggtactcggaaggc

SEQ ID NO: 626374 - DNA, 120 bp, Artificial Sequence
  ENSG00000178878_40 (sequence is synthesized)
ggcatgcaacatacagctctgaatttgctgctttccagaatagccttagtagcttcacagtcttgcctacgcgcccatattcactgggccccacctgcctagcggacgggtgcaatcccc

SEQ ID NO: 626375 - DNA, 120 bp, Artificial Sequence
  ENSG00000178878_41 (sequence is synthesized)
ggcaagcccgcagggggcgcgcagagcacgtcgtccggggagaactaaaactacatttcccagcatcccgcgcgccgcagacccacttccggagacctcacacaagatggcggcacccga

SEQ ID NO: 626376 - DNA, 120 bp, Artificial Sequence
  ENSG00000178878_42 (sequence is synthesized)
ggaacacgattctccgaccgaagcgtcccagccgattgtggaagaggaggaaactaaaacatttaaagacctgggtgtgacagatgtgttgtgtgaagcttgtgaccagttgggatggac

SEQ ID NO: 626377 - DNA, 120 bp, Artificial Sequence
  ENSG00000178878_43 (sequence is synthesized)
aaaacccaccaagatccagattgaagctattcctttggccttacaaggtcgtgatatcattgggcttgcagaaactggctctggaaagacaggcgcctttgctttgcccattctaaacgc

SEQ ID NO: 626378 - DNA, 120 bp, Artificial Sequence
  ENSG00000178878_44 (sequence is synthesized)
actgctggagaccccgcagcgtttgtttgccctagttcttaccccgactcgggagctggcctttcagatctcagagcagtttgaagccctggggtcctctattggagtgcagagtgctgt

SEQ ID NO: 626379 - DNA, 120 bp, Artificial Sequence
  ENSG00000178878_45 (sequence is synthesized)
gattgtaggtggaattgattcaatgtctcaatctttggcccttgcaaaaaaaccacatataataatagcaactcctggtcgactgattgaccacttggaaaatacgaaaggtttcaactt

SEQ ID NO: 626380 - DNA, 120 bp, Artificial Sequence
  ENSG00000178878_46 (sequence is synthesized)
gagatcggaaaacattcctcttctctgccaccatgaccaagaaggttcaaaaacttcagcgagcagctctgaagaatcctgtgaaatgtgccgtttcctctaaataccagacagttgaaa

SEQ ID NO: 626381 - DNA, 120 bp, Artificial Sequence
  ENSG00000178878_47 (sequence is synthesized)
aattacagcaatattatatttttattccctctaaattcaaggatacctacctggtttatattctaaatgaattggctggaaactcctttatgatattctgcagcacctgtaataataccc

SEQ ID NO: 626382 - DNA, 120 bp, Artificial Sequence
  ENSG00000178878_48 (sequence is synthesized)
agagaacagctttgctactgcgaaatcttggcttcactgccatccccctccatggacaaatgagtcagagtaagcgcctaggatcccttaataagtttaaggccaaggcccgttccattc

SEQ ID NO: 626383 - DNA, 120 bp, Artificial Sequence
  ENSG00000178878_49 (sequence is synthesized)
ttctagcaactgacgttgccagccgaggtttggacatacctcatgtagatgtggttgtcaactttgacattcctacccattccaaggattacatccatcgagtaggtcgaacagctagag

SEQ ID NO: 626384 - DNA, 120 bp, Artificial Sequence
  ENSG00000178878_50 (sequence is synthesized)
ctgggcgctccggaaaggctattacttttgtcacacagtatgatgtggaactcttccagcgcatagaacacttaattgggaagaaactaccaggttttccaacacaggatgatgaggtta

SEQ ID NO: 626385 - DNA, 120 bp, Artificial Sequence
  ENSG00000178878_51 (sequence is synthesized)
tgatgctgacagaacgcgtcgctgaagcccaaaggtttgcccgaatggagttaagggagcatggagaaaagaagaaacgctcgcgagaggatgctggagataatgatgacacagagggtg

SEQ ID NO: 626386 - DNA, 120 bp, Artificial Sequence
  ENSG00000178878_52 (sequence is synthesized)
ctattggtgtcaggaacaaggtggctggaggaaaaatgaagaagcggaaaggccgttaatcacttttatgaaggctcgagttctgctgttctgtaaaagagaattggagaatgaaacctg

SEQ ID NO: 626387 - DNA, 120 bp, Artificial Sequence
  ENSG00000178878_53 (sequence is synthesized)
ctccaacagagatcatgagactgaaattggtcagaattgtgtccagaatgtgctcagctaattcagtattcttccccattctgggttggagtttactgcagagtaattcttacagtgctg

SEQ ID NO: 626388 - DNA, 120 bp, Artificial Sequence
  ENSG00000178878_54 (sequence is synthesized)
atgtcaagactgttactgttcttcgactttgattccttgctcatgacatgagtagggtgtgctcttctgtcacttcacacagaccttttgccttttttagctgcaagtcaaggactaggt

SEQ ID NO: 626389 - DNA, 120 bp, Artificial Sequence
  ENSG00000178878_55 (sequence is synthesized)
tgatgatgcccatgacctgtaattgtaaagaagcttggacatctgcaaatgatatttaaaccatcttggcttgtgctttattcaaactaatgtgaaacaataaatttaaatattattttt

SEQ ID NO: 626390 - DNA, 120 bp, Artificial Sequence
  ENSG00000178882_0 (sequence is synthesized)
acactcagtctctgattttatccctgccctggcttaattaagtgctctgaagacataaataggttttttgtttactcaagcttgggagaagctggcagaaaaggccttttcagctaaaag

SEQ ID NO: 626391 - DNA, 120 bp, Artificial Sequence
  ENSG00000178882_1 (sequence is synthesized)
ctccttacagccggaaggtgtgaagcggcaagtttccagccgggaagaagcctctcagccgtaggcgtctttgcccggagctgtgagcccccctcccaactcccaaatcccccggcgtcg

SEQ ID NO: 626392 - DNA, 120 bp, Artificial Sequence
  ENSG00000178882_2 (sequence is synthesized)
gagatgaggccccggatgctgccagtgttctttggggagagcatcaaggtgaacccggaacccacgcatgagatccgctgcaactctgaggtcaagtacgcctcggagaagcatttccag

SEQ ID NO: 626393 - DNA, 120 bp, Artificial Sequence
  ENSG00000178882_3 (sequence is synthesized)
gacaaggtcttctatgcgcccgtacccaccgtcacggcctacagcgagaccatcgtggcagcacccaactgcacgtggcgcaactaccgcagccagctgaccctggagccacgcccgcgc

SEQ ID NO: 626394 - DNA, 120 bp, Artificial Sequence
  ENSG00000178882_4 (sequence is synthesized)
gccctgcgcttccgcagcaccaccatcatcttccccaagcatgccaggagcactttccggaccaccctgcactgcagcctgggccggcccagccgctggttcaccgccagcgtgcagctg

SEQ ID NO: 626395 - DNA, 120 bp, Artificial Sequence
  ENSG00000178882_5 (sequence is synthesized)
cagctttgccaggaccctgcccccagcctcctgggccctgccacgctctgacggggctggggccggcccggggtgctggaggagccgggagccctggggagaagccgggaggatggacac

SEQ ID NO: 626396 - DNA, 120 bp, Artificial Sequence
  ENSG00000178882_6 (sequence is synthesized)
gatgagctcggcctggcactcgggcaggaggcgggaagggaggctgccagaccaaggacccgtgtggaaggaggcggctccccgctgcctgccctgacctacaggctaggtggtggtctc

SEQ ID NO: 626397 - DNA, 120 bp, Artificial Sequence
  ENSG00000178882_7 (sequence is synthesized)
cttgttttggtgtcaaggactcagtaaaagcatctatttttttagcacttaagctggcaaggcggtaggggcatgcactgttaggtggtggccacccccagggtcaggggaaaagaatgg

SEQ ID NO: 626398 - DNA, 120 bp, Artificial Sequence
  ENSG00000178882_8 (sequence is synthesized)
cccatgtgtcctaggctggtggccaaggccatgtgtgagggaagaggggtacctctcttccctgctgctggcctggggtatttccaaaacagccttttcgcacacatgcaggttgcaccg

SEQ ID NO: 626399 - DNA, 120 bp, Artificial Sequence
  ENSG00000178882_9 (sequence is synthesized)
agaggtctggagctgtggctgagccacctctggcggatgttgagccaggaggttgggcaaaggccggatgctgatgccagcgctggaggtggtgatactgggggcggggaaggcctagaa

SEQ ID NO: 626400 - DNA, 120 bp, Artificial Sequence
  ENSG00000178882_10 (sequence is synthesized)
atactttgagccatggccttgccagtgtcccgtgccctccagtgtcaaagatttggggcactgcccgtcgaaatggaaaggttggtgctcagcctctggagcctcacctgcagggcgtcc

SEQ ID NO: 626401 - DNA, 120 bp, Artificial Sequence
  ENSG00000178882_11 (sequence is synthesized)
ccagctaacacccatccacgcaccacctccaggacgagaacccttgatgtcaaaaccaagtgcccagtggaggcggtgaagctctcggaaatgctgccacctgtgtgaggccgggtctga

SEQ ID NO: 626402 - DNA, 120 bp, Artificial Sequence
  ENSG00000178882_12 (sequence is synthesized)
actcgagggagtcggagctcagctgtcggtttaaagagacactgaggggaccgggctgccgccctcagcctgcattcctgtgcgcaatcgattccgcaatgacagcaccttactccttcc

SEQ ID NO: 626403 - DNA, 120 bp, Artificial Sequence
  ENSG00000178882_13 (sequence is synthesized)
tgcggcaggctcacccctgcctgtgggatgttgtgagaggaacatgagccagacaaagacttggctcagggctccgtggaacaagccaggatgcacggggagctgggggagcccccagcc

SEQ ID NO: 626404 - DNA, 120 bp, Artificial Sequence
  ENSG00000178882_14 (sequence is synthesized)
tggggcagcccagcaggccgctgaacaaacaccccagaagccagcactgtggcagggtgctggggagatgcccctctgagccttcctcccccctcagacctgaatgcactccacagttgg

SEQ ID NO: 626405 - DNA, 120 bp, Artificial Sequence
  ENSG00000178882_15 (sequence is synthesized)
gggctgcccctgccactcccctggtaatgcataaaaggggaggggaaggttccctggggcttgagctccctctgtggaggtgaggaggggagattccgttcacatccaggaggggcaaaa

SEQ ID NO: 626406 - DNA, 120 bp, Artificial Sequence
  ENSG00000178882_16 (sequence is synthesized)
tgactgatgtatttttatgtatctacacagagagtgcattttctctccagagatgctgtctggttaacaaaggaataacttaagaaattgattgattatcttaataaactgtgcaaaccc

SEQ ID NO: 626407 - DNA, 120 bp, Artificial Sequence
  ENSG00000178882_17 (sequence is synthesized)
cagaccaagccagggccagagggtgtcaggtggtcctgtgtgcccagcagggagctgaggccactgcaacaaggggctgcataaccccgtgtccctggctctccccacagcccccctccc

SEQ ID NO: 626408 - DNA, 120 bp, Artificial Sequence
  ENSG00000178882_18 (sequence is synthesized)
gtgcggagcgcgcgcgcgcgcggctcggaggcgcacctgtgaggtgtccctgaggagagggaggtgggtgcgcggcgcccgcggcctggggcgctgactcccctcacttggaggcgccct

SEQ ID NO: 626409 - DNA, 120 bp, Artificial Sequence
  ENSG00000178882_19 (sequence is synthesized)
gcgtccggcagaggaggcgagcatcccgctcaggtgatgaggaacccctcgcgcacccagcgcagaaggctgctgccgccggacgcctccattgtttgaccacaacaagggccggattct

SEQ ID NO: 626410 - DNA, 120 bp, Artificial Sequence
  ENSG00000178882_20 (sequence is synthesized)
cacccaggccgcacttggtgagagtcttcacggaccacagtgttgcacgaggtgattgtgtttgcagaggtttttttgtccttgaagagcacttagggctggagagcaagacacatgctg

SEQ ID NO: 626411 - DNA, 80 bp, Artificial Sequence
  ENSG00000178882_21 (sequence is synthesized)
ggagagggccgggcggcaacgtgcgcctcggggctgggccggcctgcgggatcgcagcgcagcgcagaggcgaggctggg

SEQ ID NO: 626412 - DNA, 120 bp, Artificial Sequence
  ENSG00000178882_22 (sequence is synthesized)
cccgggccccggagcgcggtggagaagcccccggaggagcggggggcccgcgccccgcgccccccagacatggtgggccacctgcatctgcagggcatggaggacagcctgaaggagcag

SEQ ID NO: 626413 - DNA, 120 bp, Artificial Sequence
  ENSG00000178882_23 (sequence is synthesized)
gggcatggaggacagcctgaaggagcagggccgggagggcttgctggacagccccgactccgggctgccccccagccccagccccagcccgcccttctactccctggcgcccggcatcct

SEQ ID NO: 626414 - DNA, 120 bp, Artificial Sequence
  ENSG00000178882_24 (sequence is synthesized)
gctgccatgtgggaaagtccttggacgagttgtctgcttgcggagaggtgtctgcggctcagcacttaaggaagacccaaaattcagtgagtgagtccccatcaaccaccagaaacagaa

SEQ ID NO: 626415 - DNA, 120 bp, Artificial Sequence
  ENSG00000178896_0 (sequence is synthesized)
gtagttctcccgcggctcagagaagtaggcagagagcggacctggcggccgggcagcatggcggggctggagctcttgtcggaccagggctaccgggtggacgggcggcgcgccggggag

SEQ ID NO: 626416 - DNA, 120 bp, Artificial Sequence
  ENSG00000178896_1 (sequence is synthesized)
ctgcgcaagatccaggcgcggatgggcgtgttcgcgcaggctgacggctcggcctacattgagcagggcaacaccaaggcactggctgtggtctacggcccgcacgagatccggggctcc

SEQ ID NO: 626417 - DNA, 120 bp, Artificial Sequence
  ENSG00000178896_2 (sequence is synthesized)
cgggctcgagccctgccggacagggccctagtgaactgtcaatatagttcagcgaccttcagcacaggtgagcgcaagcgacggccacatggggaccgtaagtcctgtgagatgggcctg

SEQ ID NO: 626418 - DNA, 120 bp, Artificial Sequence
  ENSG00000178896_3 (sequence is synthesized)
gctccgccagactttcgaagcagccatcctcacacagctgcacccacgctcccagattgatatctatgtgcaggtgctacaggcagatggtgggacctatgcagcttgtgtgaatgcagc

SEQ ID NO: 626419 - DNA, 120 bp, Artificial Sequence
  ENSG00000178896_4 (sequence is synthesized)
cacgctggcagtgctggatgccgggatacccatgagagactttgtgtgtgcgtgctcagctggcttcgtggacggcacagccctggcggacctcagccatgtggaggaagcagctggtgg

SEQ ID NO: 626420 - DNA, 120 bp, Artificial Sequence
  ENSG00000178896_5 (sequence is synthesized)
cccccagctggccctggccctgctgccagcctcaggacagattgcgctgcttgagatggatgcccggctgcacgaggaccacctggagcgggtgttggaggctgctgcccaggctgcccg

SEQ ID NO: 626421 - DNA, 120 bp, Artificial Sequence
  ENSG00000178896_6 (sequence is synthesized)
agatgtgcacaccctcttagatcgagtggtccggcagcatgtgcgtgaggcctctatcttgctgggggactgaccacccagccacccatgtccagaataaaaccctcctctgcccacaca

SEQ ID NO: 626422 - DNA, 120 bp, Artificial Sequence
  ENSG00000178896_7 (sequence is synthesized)
tgcttagcgcatgagtgtgggagctctgctttccaggcggagggaaccagaagggcgaagaccacggtggtgaaaacaagcaaggcacttatgcagagcagaaagactgctggtggggaa

SEQ ID NO: 626423 - DNA, 120 bp, Artificial Sequence
  ENSG00000178896_8 (sequence is synthesized)
agaggggataactccaaatcaggttgagggttcccggggaggtgaggacttagggttttgtagagtagggaaatgatttgggatcttatttcatatgtaatgtgaaacctttgtaaggta

SEQ ID NO: 626424 - DNA, 120 bp, Artificial Sequence
  ENSG00000178896_9 (sequence is synthesized)
gttaggatttgagtgtgtaggtgagacagaagcagcgttgatgtttgtaaacttgggttggcagggaatggggcaaggatggacacaaggaagccaattaaaaggtgccagagggcgaca

SEQ ID NO: 626425 - DNA, 120 bp, Artificial Sequence
  ENSG00000178896_10 (sequence is synthesized)
catgcaagacagagagcgcaaaacagggggctttgttttggaggtaacgcagttgccccttgctgaggcattgaaagtggagggagaggcagacccacagaggacagtggagtgtgagct

SEQ ID NO: 626426 - DNA, 120 bp, Artificial Sequence
  ENSG00000178904_0 (sequence is synthesized)
aagtttgcggagcggcttctgctcgtcggccgtgcggcgaggcagggcctgggctgcgaccccggcggccgctcgcggtcttgggagagctggggcgcgtgcctgaacttcccggctgcc

SEQ ID NO: 626427 - DNA, 120 bp, Artificial Sequence
  ENSG00000178904_1 (sequence is synthesized)
cctgtccttggagacctacctgatggggacgccaggtgtgcaggggcgtggcgcgtaggagtgatttggagaacaatgcatgtaagtctgacatcatgatgtccatccggcaaagaagag

SEQ ID NO: 626428 - DNA, 120 bp, Artificial Sequence
  ENSG00000178904_2 (sequence is synthesized)
aaataagagccacagaagtttctgaagactttccagcccaagaagaaaatgtgaagttggaaaataaattgccatctggttgtaccagtagaagattatggaagattttgtcattgacaa

SEQ ID NO: 626429 - DNA, 120 bp, Artificial Sequence
  ENSG00000178904_3 (sequence is synthesized)
ttggtggaaccattgccctttgcattggacttcttacatctgtctaccttgccacgttacatgaaaatgatttatggttttctaatattaaggaagtggagcgagaaatctcattcagaa

SEQ ID NO: 626430 - DNA, 120 bp, Artificial Sequence
  ENSG00000178904_4 (sequence is synthesized)
cagagtgtggcctgtattactcctactacaagcagatgctgcaggctccaaccctcgtgcaaggttttcatggcctaatatatgataataaaactgaatctatgaagacaattaacctcc

SEQ ID NO: 626431 - DNA, 120 bp, Artificial Sequence
  ENSG00000178904_5 (sequence is synthesized)
ttcagcgaatgaatatttaccaagaggtttttctcagtattttatatagagttctacccatacagaaatatttagagccagtttatttttatatttacaccttatttgggctccaggcga

SEQ ID NO: 626432 - DNA, 120 bp, Artificial Sequence
  ENSG00000178904_6 (sequence is synthesized)
tctatgtcacagctctctacataaccagctggctactcagtggtacatggctgtcaggactgttggcagctttctggtatgtcacaaatagaatagataccacaagagttgagtttacca

SEQ ID NO: 626433 - DNA, 120 bp, Artificial Sequence
  ENSG00000178904_7 (sequence is synthesized)
tcccactgagggagaactgggcgctgccattctttgcaattcagatagcagcaattacatatttcctgagaccaaacttacagcctctttctgaaaggctgacacttcttgccattttca

SEQ ID NO: 626434 - DNA, 120 bp, Artificial Sequence
  ENSG00000178904_8 (sequence is synthesized)
tatcaacttttctctttagtctgacatggcaatttaatcaatttatgatgctgatgcaagcattagtgctgttcacactggactccctggacatgctgccagcagtgaaggcgacatggc

SEQ ID NO: 626435 - DNA, 120 bp, Artificial Sequence
  ENSG00000178904_9 (sequence is synthesized)
tgtatggaatacagataacaagtttactcctggtctgcattcttcagttttttaattccatgattcttggatcactgcttatcagttttaacctttcagtattcattgcaagaaaacttc

SEQ ID NO: 626436 - DNA, 120 bp, Artificial Sequence
  ENSG00000178904_10 (sequence is synthesized)
agaaaaatctgaaaactggaagcttccttaataggcttgggaaacttttgttacatttatttatggttttatgtttgacactttttctcaacaacataattaagaaaattcttaacctga

SEQ ID NO: 626437 - DNA, 120 bp, Artificial Sequence
  ENSG00000178904_11 (sequence is synthesized)
agtcagatgaacacatatttaaatttctgaaggcaaaatttgggcttggagcaacaagggattttgatgcaaatctctatctgtgtgaagaagcttttggcctcctgccttttaatacat

SEQ ID NO: 626438 - DNA, 120 bp, Artificial Sequence
  ENSG00000178904_12 (sequence is synthesized)
ttggaaggctttcagatactctgcttttttatgcttacatattcgttctgtccatcacagtgattgtagcattcgttgttgcctttcataatctcagtgattctacaaatcaacaatccg

SEQ ID NO: 626439 - DNA, 120 bp, Artificial Sequence
  ENSG00000178904_13 (sequence is synthesized)
tgggtaaaatggaaaaaggcacagttgacctgaaaccagaaactgcctacaacttaatacataccattctgtttggattcttggcattgagtacaatgagaatgaagtacctctggacgt

SEQ ID NO: 626440 - DNA, 120 bp, Artificial Sequence
  ENSG00000178904_14 (sequence is synthesized)
cacacatgtgtgtgttcgcatcattcggcctatgtagccctgaaatatgggagttacttctgaagtcagtccatctttataacccaaagaggatatgtataatgcgatattcagtaccga

SEQ ID NO: 626441 - DNA, 120 bp, Artificial Sequence
  ENSG00000178904_15 (sequence is synthesized)
tattaatactgctgtatctatgctataagttctggccaggaatgatggatgaactctccgagttgagagaattctatgatccagatacagtggagctgatgaactggattaactctaaca

SEQ ID NO: 626442 - DNA, 120 bp, Artificial Sequence
  ENSG00000178904_16 (sequence is synthesized)
ctccaagaaaggctgtgtttgcgggaagcatgcagttgctggccggagtcaagctgtgcacgggaaggaccctaaccaaccacccgcactatgaagacagcagcctgagagagcggacca

SEQ ID NO: 626443 - DNA, 120 bp, Artificial Sequence
  ENSG00000178904_17 (sequence is synthesized)
gagcggtttatcagatatatgccaagagggcaccagaggaagtgcatgccctcctaaggtccttcggcactgactacgtaatcctggaagacagcatctgctacgagcggaggcaccgcc

SEQ ID NO: 626444 - DNA, 120 bp, Artificial Sequence
  ENSG00000178904_18 (sequence is synthesized)
ggggctgccgactccgggacctgctggacattgccaacggccacatgatggatggcccaggagagaatgatcctgatttgaaacctgcagaccaccctcgcttctgtgaagagatcaaaa

SEQ ID NO: 626445 - DNA, 120 bp, Artificial Sequence
  ENSG00000178904_19 (sequence is synthesized)
gaaacctgcctccctacgtggcctacttcaccagagtgttccagaacaaaaccttccacgtttacaagctgtccagaaacaagtagcgcagatttctgcccagtgtctatttttgatacg

SEQ ID NO: 626446 - DNA, 120 bp, Artificial Sequence
  ENSG00000178904_20 (sequence is synthesized)
gagaaactgcatcatgatgaaactcaatagatgacgtttcctatgtaagtaggtagcccaaaccttcaagctgtgatatgagtaagttctacagatgtttacacaagtgttgccatcttt

SEQ ID NO: 626447 - DNA, 120 bp, Artificial Sequence
  ENSG00000178904_21 (sequence is synthesized)
gaaagcatcttctacaagcagaagtctttttcgttgtgtgtctatctttctcattaatgttctttagcctaaatgttaacaactttctaagagtgacctagaattatgttgttggagaga

SEQ ID NO: 626448 - DNA, 120 bp, Artificial Sequence
  ENSG00000178904_22 (sequence is synthesized)
atgatgtgtgttccatggatacctggataggcacataacatgttggaagatgagcacctgctcaggatttgaaatacgtttaattttcaggtgacttaagacagctatgattgaatcaac

SEQ ID NO: 626449 - DNA, 120 bp, Artificial Sequence
  ENSG00000178904_23 (sequence is synthesized)
tagagatgatgatcgacttatttaatatgatttcactggtgaagaccaattggtagctttttaaaaagcactttagtgtcctgttttaccttaaaatgttataatattttccagttgtca

SEQ ID NO: 626450 - DNA, 120 bp, Artificial Sequence
  ENSG00000178904_24 (sequence is synthesized)
tgctgtcaacattaacaaaaaaaatcatgttaaggctttgtatcaaacattttgttacactctgtctgaaatgtaatgtggagtacttcagcagtatgtgtcatgtattgtgtgtgtctg

SEQ ID NO: 626451 - DNA, 120 bp, Artificial Sequence
  ENSG00000178904_25 (sequence is synthesized)
acacatgtgttttaatgctgggcacagaaaagtgttacaagttccatatcgtaagtccttaaaggggcagaaatatatgtagccaagtagaatttattacattttagtgttattatttta

SEQ ID NO: 626452 - DNA, 120 bp, Artificial Sequence
  ENSG00000178904_26 (sequence is synthesized)
aaacttactgatactctttaacctctcctgcagtaatagttttgctttatttcttactcatttcaatttattgggtttgcaaaattttgtaaactttttgtgtttttagcctttgtattt

SEQ ID NO: 626453 - DNA, 120 bp, Artificial Sequence
  ENSG00000178904_27 (sequence is synthesized)
tttacagcctagaatcttgcaaagtctgaatattttttaaatgttctatcttaactagttcactaatacagtatttttagcagacagcattttcagacagcattttcataccaagtttga

SEQ ID NO: 626454 - DNA, 120 bp, Artificial Sequence
  ENSG00000178904_28 (sequence is synthesized)
cttgtggtctccaatcttactgggaaggccctggtagtgtaattcttttccttattaaaaggtaaccaagtgcctctaagtcatgcttatttgtaaacaacaaagaagagtatatgtacc

SEQ ID NO: 626455 - DNA, 120 bp, Artificial Sequence
  ENSG00000178904_29 (sequence is synthesized)
tgctcaaaatttttttgataatcgcttatataattaatttctaatgatgaggacatgtaaaagttgccagtaagaacatagtatgcatttaattaaatcaagatggctaatggaattaac

SEQ ID NO: 626456 - DNA, 120 bp, Artificial Sequence
  ENSG00000178904_30 (sequence is synthesized)
tttctcccctgttcttgccaggtggaaatgatttaagcatttctccttgcagttgtattgaagtaaattaccataggcatcaagatggctgcatcacattttcaaatgattttatattca

SEQ ID NO: 626457 - DNA, 120 bp, Artificial Sequence
  ENSG00000178904_31 (sequence is synthesized)
gttgctacttataaagcagcattcaaaaagtcttttacactgtcatgttggacacaagcagactcagcttttatcaaaacttgtttaaataaaaaattgacagtagctgggttattaaat

SEQ ID NO: 626458 - DNA, 120 bp, Artificial Sequence
  ENSG00000178904_32 (sequence is synthesized)
tatgcaactgaaactcctgaattatatcttttctgtatcccttaataagattggagaccactgccgtttaggataatacaataataaaacgttttaatcagtactaaaactttaattaag

SEQ ID NO: 626459 - DNA, 120 bp, Artificial Sequence
  ENSG00000178904_33 (sequence is synthesized)
ccaataatgatgcatgcctgttgtagctgacagcatgggtcagtacatccttcagcgagtgccttactctaattgaaaccaagcacacgtaaggtacaatatgttagactctgtgatttt

SEQ ID NO: 626460 - DNA, 120 bp, Artificial Sequence
  ENSG00000178904_34 (sequence is synthesized)
gttttcaaaatcctctgttatggctatatttaaatttattttaaatattcctgtatgtattcatctaagcatttgggcatttggagtcttaatatacaagaaacacgtacttaaattttt

SEQ ID NO: 626461 - DNA, 120 bp, Artificial Sequence
  ENSG00000178904_35 (sequence is synthesized)
atgcttatcaccgcaatgatggcaaacagtgattttttttttcatagtttaggtgtcattgttgccagcacctttagtgctcagtcttcagtgaaaaatataaagtgccaaaaaaatctt

SEQ ID NO: 626462 - DNA, 120 bp, Artificial Sequence
  ENSG00000178904_36 (sequence is synthesized)
gcaagacagaatccatacttaacactctttccaagacactgtgaccatgtacagtagctatttcctgatgaccaaatctctcaacgaatcatgttattaataaatatttttagcactcat

SEQ ID NO: 626463 - DNA, 120 bp, Artificial Sequence
  ENSG00000178904_37 (sequence is synthesized)
cagtattctccaatgtgaccttctcattggagtacacagaaggaaagcaaagaagagcatctgacttctagctctggcttacagcctctctaccaggccgaagcaagagacccgcggcag

SEQ ID NO: 626464 - DNA, 120 bp, Artificial Sequence
  ENSG00000178904_38 (sequence is synthesized)
cagctccccgccactcagacctgggtggtgataacctcaaagaatggctctgttttctattgacagaaaacccacttgattttgcttctgagttagcagtcagaagaccctctaagtaca

SEQ ID NO: 626465 - DNA, 120 bp, Artificial Sequence
  ENSG00000178904_39 (sequence is synthesized)
atagaagtgctcttaacggactctgcctgtgtgactcccaggccccggagtctccatctctctcgtaagccacctgccacagcacagctggaggctgttctctggtgttctcagcgctcc

SEQ ID NO: 626466 - DNA, 120 bp, Artificial Sequence
  ENSG00000178904_40 (sequence is synthesized)
ggctccctccctggagttgtgcacccgtcccaaactcctccatgcaagttctgcttcctcttataagtacacaactcagttaagtattcacatacacacagaaaatacgggtgtgaaaag

SEQ ID NO: 626467 - DNA, 120 bp, Artificial Sequence
  ENSG00000178904_41 (sequence is synthesized)
aaagaattttctgtaaaaattaagttgaatactttggtaaaaagtgataaaggctgagttgccaataaaagttgcttttaaattaggtgtggctgggaatattataagatattggggaaa

SEQ ID NO: 626468 - DNA, 120 bp, Artificial Sequence
  ENSG00000178904_42 (sequence is synthesized)
atatacaaatcaagaaaatttctgagcttagattgcttcatagatttatttaagtactcatcccacctttaaaacctctaaactgagaagaagggacccaaatcatgttattggtgtgat

SEQ ID NO: 626469 - DNA, 120 bp, Artificial Sequence
  ENSG00000178904_43 (sequence is synthesized)
ttatgtgagaagtagaactgtagtcattggacccttaggcaaaggaaaatccgtgtctttatatcagaagatcggcaaacgaatgtatattacacagtttaggttatgattccctacttt

SEQ ID NO: 626470 - DNA, 120 bp, Artificial Sequence
  ENSG00000178904_44 (sequence is synthesized)
aacctacttactttattaaatgaccaactactgatactgatcacaatagttattagagattctaatttagttggaaggttctaatcactttcattacaggcatttgaaaaatagggattc

SEQ ID NO: 626471 - DNA, 120 bp, Artificial Sequence
  ENSG00000178904_45 (sequence is synthesized)
atttcgaatatattagccaggagcatagttagatgttacccaggccatttatcatcctgttaatgatgattttcccgacccttgtgagatcagcgtgacaggagtgtgtgtgtgtgtgtg

SEQ ID NO: 626472 - DNA, 120 bp, Artificial Sequence
  ENSG00000178904_46 (sequence is synthesized)
tgtttctgtgggtgtgtggttttggttgggtgctgccaggtggcaaaggcatatgtaaatacatctgatctgcatctttatttcacagttaactaaaagtaaaaatgtctattctgattc

SEQ ID NO: 626473 - DNA, 120 bp, Artificial Sequence
  ENSG00000178904_47 (sequence is synthesized)
catattgattttgtctaagatgtaaaaatttgagttcatctttggccaaaacctacctgaattaacatacaaaatatttgatttttaaaatttaattcaaatctcaaaatcaattaagta

SEQ ID NO: 626474 - DNA, 120 bp, Artificial Sequence
  ENSG00000178904_48 (sequence is synthesized)
ttctcagatcctatatcttggttaatatgctcccagatactttaaacatggcaaccttttggcctaagagaatgtttgttcatggaaaaaagcttttgagatgagagggtgtcttacttt

SEQ ID NO: 626475 - DNA, 120 bp, Artificial Sequence
  ENSG00000178904_49 (sequence is synthesized)
cttgtggcaattgattttctgttttaacaccctttgggtaaaatcttgcaaagagcttttataatttgttttactgaattgtatggagattgtataccaagtaaagctcttttaaattac

SEQ ID NO: 626476 - DNA, 120 bp, Artificial Sequence
  ENSG00000178904_50 (sequence is synthesized)
atttccacaaagctccgcggcggttctgccctccttgtacccgcggcgcgctgcggcccgtggcgcggccccgttcccgcctagccccgtcggcctccttcccctcccggagccgcgcgt

SEQ ID NO: 626477 - DNA, 120 bp, Artificial Sequence
  ENSG00000178904_51 (sequence is synthesized)
cggccgcgctcagagtctccggaacagaccggactcaatgcggaccaggcaagcggaagtgtgccgcttccttccggccagcgcagcacgagacgaggcggggaaccgcgggaggaggcg

SEQ ID NO: 626478 - DNA, 120 bp, Artificial Sequence
  ENSG00000178904_52 (sequence is synthesized)
aacacagttttgccataaagaatccaatctctagaaaggttggactatagagtgaaataacttttgtgtttattattttaaaataacatattagaatctttttttaaatttttctttatt

SEQ ID NO: 626479 - DNA, 89 bp, Artificial Sequence
  ENSG00000178904_53 (sequence is synthesized)
acaggcgtgagccactgcgtccagccagaatctttatttttcattttaattttttgagatagggtatgcaaacatgggtcactgcagcc

SEQ ID NO: 626480 - DNA, 120 bp, Artificial Sequence
  ENSG00000178904_54 (sequence is synthesized)
agcctcaacctcctgggctcaagtgagtatcctgcctaagcttcctgtgtcactgggaccccaggcatgcaccacctcaccaagctaaatttgatttttttgtagagacagggtctcact

SEQ ID NO: 626481 - DNA, 120 bp, Artificial Sequence
  ENSG00000178904_55 (sequence is synthesized)
tcaagcgatcctactgccctggtcttccaaaatatgagaatgagccatagcacccagcccagaatttttataatcaagtgagttttttctttttcattaacttattccatttatttagca

SEQ ID NO: 626482 - DNA, 120 bp, Artificial Sequence
  ENSG00000178904_56 (sequence is synthesized)
gttattctaaattagtatttttcaagttatagattgtgaaattagtgcagtaggtcatgagtaacatttttcttaatgaaatcaaaaagaaagaatactatcacatctagtagggttgag

SEQ ID NO: 626483 - DNA, 120 bp, Artificial Sequence
  ENSG00000178904_57 (sequence is synthesized)
gattgttttgtgaaacttttaattttatatatatatatatatgcacaaactgggtcacagtatacaaggtacttccttttcttttttttcttgttggctacaacaggaaaaaaaaaaaac

SEQ ID NO: 626484 - DNA, 120 bp, Artificial Sequence
  ENSG00000178904_58 (sequence is synthesized)
agaaaaggaaataaaaaagccactgctttaaatcatggggtctaaatgtggctccacagagggtcctcagcatgttcatgactatctaatactctgtgcaagtggttttgcagggcatag

SEQ ID NO: 626485 - DNA, 120 bp, Artificial Sequence
  ENSG00000178904_59 (sequence is synthesized)
gttttgcagggcatagggcgatggggaagccatatgtttccagggaaaggaactgtaattttaatcagattttcaggagggttagccgggcgtcacgcctgtaatcccagcactttggga

SEQ ID NO: 626486 - DNA, 64 bp, Artificial Sequence
  ENSG00000178904_60 (sequence is synthesized)
tttatcaaaaaaaaaaagaaaaaagttgagggggtggtctgtgactctttaaacacgtttcctt

SEQ ID NO: 626487 - DNA, 120 bp, Artificial Sequence
  ENSG00000178904_61 (sequence is synthesized)
gttgagggggtggtctgtgactctttaaacacgtttccttgttttctttctctctctctttttcaacatttctagaactcctcttggcattgttttcagaactcgtatataacttacatg

SEQ ID NO: 626488 - DNA, 120 bp, Artificial Sequence
  ENSG00000178904_62 (sequence is synthesized)
tggaaatttgcatccaaatataccttacattttaatctaatatgtcatgatctttaacctaaactgtggtgtctaatgactagttgcttgtaaaaataaacaaacaccttcaaagccaaa

SEQ ID NO: 626489 - DNA, 120 bp, Artificial Sequence
  ENSG00000178904_63 (sequence is synthesized)
gaatgagcagtaaaaatggccaaagatgagatgaccaaaaaaacagtgataggtctcaaacacagccagagatcaatcaggtgctgctttgattctactagtggttcttaaataaaagta

SEQ ID NO: 626490 - DNA, 120 bp, Artificial Sequence
  ENSG00000178904_64 (sequence is synthesized)
ttatattttctacgtcagtggagcatacatacattgtcattggtcttctatgctaatatgtgaagtgaattctacctttgaccttagaatgtatatagatatgatcaagtctttttagtc

SEQ ID NO: 626491 - DNA, 120 bp, Artificial Sequence
  ENSG00000178904_65 (sequence is synthesized)
aactgtcatttgataaaaacaattaagatttagttaattgttgaattaaatggacttaagatattagataagtgggtaattcagagagtaatttttacattttatttagaaaaccttaag

SEQ ID NO: 626492 - DNA, 120 bp, Artificial Sequence
  ENSG00000178904_66 (sequence is synthesized)
tactcaagttgaccaggaggcaccaagtggtataaatacagccagatgtaccagatattcctggagagccctacatttaaatattattctctttcattgtaccagcaattatattaatat

SEQ ID NO: 626493 - DNA, 120 bp, Artificial Sequence
  ENSG00000178904_67 (sequence is synthesized)
atgtcaaaccatttgaccagatttctagtacaaaaatacaatcatgctattttgaaatgaaaagggggctggatttggagccagggtccaggttgtagctctgccgcttgtgacttggtc

SEQ ID NO: 626494 - DNA, 120 bp, Artificial Sequence
  ENSG00000178904_68 (sequence is synthesized)
aagtcagatacctctctgagcctcagtttccacacttctaaatgaaaaataaatcccagtgggtgatgctgcctgttgcgtcatccatgtcatgggttattgtgaggataaaacaaggcc

SEQ ID NO: 626495 - DNA, 120 bp, Artificial Sequence
  ENSG00000178904_69 (sequence is synthesized)
gtattctaaagcatttttgcagcagtaaaatggctctgtcttctacaggatacattctacttttaggggtaaattgcatggtattagttaattacatattcctaacggattgtgaacttt

SEQ ID NO: 626496 - DNA, 120 bp, Artificial Sequence
  ENSG00000178904_70 (sequence is synthesized)
ctcatggttggcattcttgtcatgtcaaaataatgttttgccaggtattatcatcacatacaatagcatttctattggagcaaaataaaaagctcattttttaaagttggcgatacctca

SEQ ID NO: 626497 - DNA, 120 bp, Artificial Sequence
  ENSG00000178904_71 (sequence is synthesized)
catcctaattagtttcagctgaagataatttcagaaacttcccaggcgctagttcccttgtattaggagggttgctgcagaggtgaaatagttgtatattccagtagctatgtttattta

SEQ ID NO: 626498 - DNA, 120 bp, Artificial Sequence
  ENSG00000178904_72 (sequence is synthesized)
gttcacacattatatgcagtttatctttttttcatttaatcttagtgatagttgtgggtgtaggggtggattttgtttttgttttgttttgtttttaatttcagttctggccaggaatga

SEQ ID NO: 626499 - DNA, 120 bp, Artificial Sequence
  ENSG00000178904_73 (sequence is synthesized)
tccagctatatctcatgaagaaaggaaaatacccatttggagaggaaaaccgattcaataaataaatttcaaaccactgacagaaatggcaataaaagtttataatatctgttgaaactt

SEQ ID NO: 626500 - DNA, 120 bp, Artificial Sequence
  ENSG00000178904_74 (sequence is synthesized)
cgccggctttcagaggctaagttgcactccagagcagaaaagcagcaagccgcttctcccttctcccttctgaggaaagtgttcttggagctatgccaggtctcagtagagcaaacagat

SEQ ID NO: 626501 - DNA, 120 bp, Artificial Sequence
  ENSG00000178904_75 (sequence is synthesized)
tttcaccctttagaggtgtgatgtgtgctgtaattaatggtatgaaagccaatagatatttgtaaacaagttggacaaagtgacaaacctagcctaaatttgaaaaaaaaaaatcttgac

SEQ ID NO: 626502 - DNA, 79 bp, Artificial Sequence
  ENSG00000178904_76 (sequence is synthesized)
ttttcagcactctgtcactcagactggaatgcagtggcgtgatcttggcttactgcagcctcaaccttccaggctcaag

SEQ ID NO: 626503 - DNA, 120 bp, Artificial Sequence
  ENSG00000178904_77 (sequence is synthesized)
cccaagtagctgggaccacaggcatacatcaccatacccagctaattttgtttattttttgtaaagatggagtctggctatgttgcccagatgagtctcagactcctgatccaagcgatc

SEQ ID NO: 626504 - DNA, 79 bp, Artificial Sequence
  ENSG00000178904_78 (sequence is synthesized)
tggcctaaatgtgactttttctgatgagttagagagctttctctgatcactgtagttctctgtatttcatttctatgag

SEQ ID NO: 626505 - DNA, 120 bp, Artificial Sequence
  ENSG00000178904_79 (sequence is synthesized)
tctctgatcactgtagttctctgtatttcatttctatgagagagacagtatagtatgttcctgagagcaagcagacctgagttctagttctggctttcccgttaatgggatcatcgtgtg

SEQ ID NO: 626506 - DNA, 120 bp, Artificial Sequence
  ENSG00000178904_80 (sequence is synthesized)
caattattgagaaccagtggccagaatcttaagtatacttgtccttaatgtaatatatctttcgttgaggaagtcttcgaggaaattattgtaaaaactatcactttggccatttgtgtt

SEQ ID NO: 626507 - DNA, 120 bp, Artificial Sequence
  ENSG00000178913_0 (sequence is synthesized)
acttccgtttttgctgggtaggcgacccggacggagggccggcgaggtgcggggtctggtgatgcgagctgcgcctctcggcaagatttcgcgctgcccatcccgggccctttcatcagt

SEQ ID NO: 626508 - DNA, 120 bp, Artificial Sequence
  ENSG00000178913_1 (sequence is synthesized)
aatcggtagtggatcactctgccaagcggcaggaagaattaaggaaacgacaaggagacgctcggctctctcccgcttggctccttgcggcctcctcttcccttcgctccggcccggtga

SEQ ID NO: 626509 - DNA, 120 bp, Artificial Sequence
  ENSG00000178913_2 (sequence is synthesized)
aactgaacttataatcgtcactggattgtaagtacccgaggcgaagagagctcgctgagccctgattttttgagtgtctttgttccgggagagtttgtgagttgaaagtatctctgctgg

SEQ ID NO: 626510 - DNA, 120 bp, Artificial Sequence
  ENSG00000178913_3 (sequence is synthesized)
gctttctgggccgaaaaccgttccgggggagccgccatttgctttcctgttccctagctagctagctagctctctccgcgttgtccggcagcggcacctagaggttgggacttggcattg

SEQ ID NO: 626511 - DNA, 120 bp, Artificial Sequence
  ENSG00000178913_4 (sequence is synthesized)
catctgatttaatgaacttaagtctgtgaataagcctttgtgttaacgactggtattcggtcacagcatatttagagaaaagacttggagcttaaataaaaactaaggcaaaatagacgc

SEQ ID NO: 626512 - DNA, 120 bp, Artificial Sequence
  ENSG00000178913_5 (sequence is synthesized)
ttagctgctgatctacagagaacttcttgtaattaaaagatttcaattcatagcaaactggtgttttaaactattgcagtagctggaactttttagtgtaaccagcatttattggagaag

SEQ ID NO: 626513 - DNA, 120 bp, Artificial Sequence
  ENSG00000178913_6 (sequence is synthesized)
tgaatcacaaggaaataaagatgagtaaaagcaaagatgatgctcctcacgaactggagagccagtttatcttacgtctgcctccagaatatgcctctactgtgagaagggcagtacagt

SEQ ID NO: 626514 - DNA, 120 bp, Artificial Sequence
  ENSG00000178913_7 (sequence is synthesized)
ctggtcatgtcaacctcaaggacagactgacaattgagttacatcctgatgggcgtcatggaatcgtcagagtggaccgtgttccattggcctcaaaattagtagacctgccctgtgtta

SEQ ID NO: 626515 - DNA, 120 bp, Artificial Sequence
  ENSG00000178913_8 (sequence is synthesized)
tggaaagcttgaaaaccattgataaaaaaactttttacaagacagctgatatctgtcagatgcttgtatccacagttgatggtgatctctatcctcctgtggaggagccagttgctagca

SEQ ID NO: 626516 - DNA, 120 bp, Artificial Sequence
  ENSG00000178913_9 (sequence is synthesized)
gcaagaaaaaggataaggacaaagagaaaaagtttatctggaaccacggaattactctgcctctaaagaatgtcaggaagagaaggttccggaagacagcaaagaagaaatatattgaat

SEQ ID NO: 626517 - DNA, 120 bp, Artificial Sequence
  ENSG00000178913_10 (sequence is synthesized)
ctccagatgttgaaaaagaagtgaaacgattgctgagtacagatgctgaagctgttagtactcggtgggaaataattgccgaagatgaaacaaaggaggcagaaaatcaaggcctggata

SEQ ID NO: 626518 - DNA, 120 bp, Artificial Sequence
  ENSG00000178913_11 (sequence is synthesized)
tctcttctccaggaatgtctggtcacaggcagggccatgactcattagaacatgatgagcttcgggagatattcaatgacctcagcagcagcagtgaggatgaagatgagacccagcatc

SEQ ID NO: 626519 - DNA, 120 bp, Artificial Sequence
  ENSG00000178913_12 (sequence is synthesized)
aagatgaagaagatataaacatcattgacacggaggaagatctggagagacagctacaggacaagctaaatgaatcagatgaacagcaccaggaaaatgaaggaaccaatcagctggtta

SEQ ID NO: 626520 - DNA, 120 bp, Artificial Sequence
  ENSG00000178913_13 (sequence is synthesized)
tgggaattcagaagcagattgacaacatgaaaggcaagctccaagagacccaggacagggcaaaacgacaagaggatctcatcatgaaagtggaaaatctggctctcaagaacagatttc

SEQ ID NO: 626521 - DNA, 120 bp, Artificial Sequence
  ENSG00000178913_14 (sequence is synthesized)
aggctgtactggatgagctcaaacaaaaggaagaccgagaaaaggagcaactcagctctttgcaagaggagctagaatcactcctagagaagtaaaaagaactgatatttaatttcagtc

SEQ ID NO: 626522 - DNA, 120 bp, Artificial Sequence
  ENSG00000178913_15 (sequence is synthesized)
ttcagactggtcagcattagaaaattcttggctttattgtactgggtattaagaccttgctcttcctagtccttttaatgctgtgtgttctgttaagttctttcatttgtttgtaatttt

SEQ ID NO: 626523 - DNA, 120 bp, Artificial Sequence
  ENSG00000178913_16 (sequence is synthesized)
gtttttcagcaaatttatattgttttgctaggtgttcatcctataagaagcaggattgtataggcagaaaaatgattgtaggaaagttgcaggattagcggaatgtatggttcaacctta

SEQ ID NO: 626524 - DNA, 120 bp, Artificial Sequence
  ENSG00000178913_17 (sequence is synthesized)
attatagcttcattgcaggactttactgtttctccattttctagaagctgctgttgctgctttgtgatgacgtgagatcaataagaagaacctagtctagagacaatgatgctagtttgc

SEQ ID NO: 626525 - DNA, 120 bp, Artificial Sequence
  ENSG00000178913_18 (sequence is synthesized)
atatgttttcctatgcaataattgttttcccagttattcaaagcagctttctatatgtagagatgcaaattattaagttgtttccaatacaataaataaaagcatctgtttttcacttta

SEQ ID NO: 626526 - DNA, 67 bp, Artificial Sequence
  ENSG00000178913_19 (sequence is synthesized)
cccttcgctccggcccggtgaaactgaacttataatcgtcactggattatggagtctcgcactgtcg

SEQ ID NO: 626527 - DNA, 120 bp, Artificial Sequence
  ENSG00000178913_20 (sequence is synthesized)
ccacgctggatgaggcctgatcttccttactcaacctacggattccaatgtcaatctgttctggactaccctcacagatatatccaaaattaatgctttaccaggtacctgagtatcctt

SEQ ID NO: 626528 - DNA, 120 bp, Artificial Sequence
  ENSG00000178913_21 (sequence is synthesized)
aacccagtcaaattgacccataaagttaaccatcacacagtgtttctccaatgtgtattatcacatgagtggtaaaatatgaagaataaatgaaggatttttcatattgtttacaattat

SEQ ID NO: 626529 - DNA, 120 bp, Artificial Sequence
  ENSG00000178917_0 (sequence is synthesized)
gcaactggggaagctgggaggtaggcgcggggcggtcggctgcggtggcggcgtttggatgattgtctctcggcggcggagtcgctcaatgtacttctccagttcctacccttcctcaag

SEQ ID NO: 626530 - DNA, 120 bp, Artificial Sequence
  ENSG00000178917_1 (sequence is synthesized)
tggggaactcaggagaccaagcaggggcaactgtacttcggatggtcaggccccaggatactgtggcgtatgaggacctgtctgaggactatactcagaagaaatggaaaggtctcgcac

SEQ ID NO: 626531 - DNA, 120 bp, Artificial Sequence
  ENSG00000178917_2 (sequence is synthesized)
tcagtcagagagccctgcactggaacatgatgctggaaaatgaccgtagcatggcttctttgggtaggaacatgatggagagttcagagctgactccgaagcaggaaatttttaaaggat

SEQ ID NO: 626532 - DNA, 120 bp, Artificial Sequence
  ENSG00000178917_3 (sequence is synthesized)
cagagtcatctaatagcacatcagggggactctttggggtggttcctgggggaacagagactggagatgtttgtgaagataccttcaaagagttagaaggacaaccctcaaatgaagaag

SEQ ID NO: 626533 - DNA, 120 bp, Artificial Sequence
  ENSG00000178917_4 (sequence is synthesized)
ggagcagactagaaagtgatttcttggaaataatagatgaggataagaaaaaatccacaaaagacagatatgaggaatataaggaagttgaggaacatccacctctgtcttccagtcctg

SEQ ID NO: 626534 - DNA, 120 bp, Artificial Sequence
  ENSG00000178917_5 (sequence is synthesized)
ttgaacatgaaggagttttaaagggacagaaatcctatcgatgtgatgaatgtggcaaagctttttattggagttcgcacctcattggtcatcggagaatccacactggagagaaaccct

SEQ ID NO: 626535 - DNA, 120 bp, Artificial Sequence
  ENSG00000178917_6 (sequence is synthesized)
atgagtgtaatgagtgtgggaagaccttcaggcaaacctcccagctcattgttcatctcagaacccacacaggggaaaagccctatgaatgcagtgagtgtggaaaggcctataggcaca

SEQ ID NO: 626536 - DNA, 120 bp, Artificial Sequence
  ENSG00000178917_7 (sequence is synthesized)
gctcccatctcattcaacaccagagactccataatggggagaaaccctataaatgtaatgaatgtgcaaaagcttttaatcagagctccaaactcttcgaccaccagagaacccatactg

SEQ ID NO: 626537 - DNA, 120 bp, Artificial Sequence
  ENSG00000178917_8 (sequence is synthesized)
gtaaaaatcttgttcgacatcagtttctgcacactggtaagaaaccttataagtgtaatgaatgtgggagagcattctgttccaatagaaatctcattgaccatcagagaacccacactg

SEQ ID NO: 626538 - DNA, 120 bp, Artificial Sequence
  ENSG00000178917_9 (sequence is synthesized)
gggagaagccttataaatgtaatgaatgtggcaaagccttcagtcggagtaaatgtcttattcgacatcagagcctccacactggggaaaagccatacaaatgtagtgaatgtgggaaag

SEQ ID NO: 626539 - DNA, 120 bp, Artificial Sequence
  ENSG00000178917_10 (sequence is synthesized)
ccttcaatcagatctctcaacttgttgaacatgagcgaattcatactggagaaaaaccatttaagtgtagtgagtgtggtaaggcattcggtctgagtaaatgtcttattcggcaccaga

SEQ ID NO: 626540 - DNA, 120 bp, Artificial Sequence
  ENSG00000178917_11 (sequence is synthesized)
ggcttcacacaagtgaaaagccctataaatgcaatgagtgtggaaaatccttcaatcaaaactcatacctcattatacaccagagaattcacactggtgagaaaccctatgaatgtaatg

SEQ ID NO: 626541 - DNA, 120 bp, Artificial Sequence
  ENSG00000178917_12 (sequence is synthesized)
agtgtgggaaggtcttcagttataattctagtcttatggtacatcagagaacccatactggggaaaaaccctataaatgcaatagttgtgggaaagcctttagtgacagctcacagctta

SEQ ID NO: 626542 - DNA, 120 bp, Artificial Sequence
  ENSG00000178917_13 (sequence is synthesized)
ctgtgcaccagagagtccacactggagagaaaaaccttatgaatgtattgagtgtgggaaagcctttagtcagcgttccacttttaatcaccaccagcgaactcatgctggagagaagcc

SEQ ID NO: 626543 - DNA, 120 bp, Artificial Sequence
  ENSG00000178917_14 (sequence is synthesized)
ctcaggtctggctcggtcatcttcttaaggcatggttttctgagacagacagcaaagacctttgagttaagctgtctttataagaaggatgttcatcatggtctccttggagaccactaa

SEQ ID NO: 626544 - DNA, 120 bp, Artificial Sequence
  ENSG00000178917_15 (sequence is synthesized)
tcacagtggagaccatacctacttgcttttccttgggtcactaaggtgggagagtaggtgcaacttagtctgatccttacttagtaggaaattggggattacatctgtcattaacttgta

SEQ ID NO: 626545 - DNA, 120 bp, Artificial Sequence
  ENSG00000178917_16 (sequence is synthesized)
tcaggctggagtgtagtgatgtgaccataggtcacctcagccttgaactcctgggctcaagagatgctcctgcctcaacctcccctatagttaggaatacaggcatgtgccaccatgccc

SEQ ID NO: 626546 - DNA, 120 bp, Artificial Sequence
  ENSG00000178917_17 (sequence is synthesized)
gactaagtttttatttttattttttgtaaacatggggtttcactattttgctcaggctggtcttgcggtcctggcctcaagcgatcatcctgcctcagcttctctaagtgctgggaatac

SEQ ID NO: 626547 - DNA, 120 bp, Artificial Sequence
  ENSG00000178917_18 (sequence is synthesized)
gcaactggggaagctgggaggtaggcgcggggcggtcggctgcggtggcggcgtttggatgattgtctctcggcggcggagtcggatactgtggcgtatgaggacctgtctgaggactat

SEQ ID NO: 626548 - DNA, 120 bp, Artificial Sequence
  ENSG00000178917_19 (sequence is synthesized)
tatgggagccagaagcagggcttgtcccactcatagctttctttcctccctcagctcaatgtacttctccagttcctacccttcctcaagtggggaactcaggagaccaagcaggggcaa

SEQ ID NO: 626549 - DNA, 120 bp, Artificial Sequence
  ENSG00000178917_20 (sequence is synthesized)
ctgtacttcggatggtcaggccccaggtgagcttggttctttgtgtttttaccaagtccccatgagtctggtccaagaatggctagaggtctcacccccaggactctgccccatctaaga

SEQ ID NO: 626550 - DNA, 120 bp, Artificial Sequence
  ENSG00000178917_21 (sequence is synthesized)
ctattcctgtggctctcctgcctcattgcttcccctggaggtaatggactctatcttgcactggactttcgaggtgttatctcagctcctctctcccatacttttgcccacgaagaggcc

SEQ ID NO: 626551 - DNA, 120 bp, Artificial Sequence
  ENSG00000178917_22 (sequence is synthesized)
ataccctgtgccctctgtacccttgatgactctgcccttcagggtgtgaatgttcctgagcaatcggagcttgtcattccaggatactgtggcgtatgaggacctgtctgaggactatac

SEQ ID NO: 626552 - DNA, 120 bp, Artificial Sequence
  ENSG00000178917_23 (sequence is synthesized)
ctgcatgctgccattctcttttttatattccttttctttttaaactttttactacgaaaatttccaaacggagataagctagagtgaataagagtcagtgtgtatggagctgcctgggtc

SEQ ID NO: 626553 - DNA, 120 bp, Artificial Sequence
  ENSG00000178917_24 (sequence is synthesized)
ctcttgaataggaccttctctgcattcagcttgaacaatgatcagcattctcttcacctcattattgattgacataaggtggtttaggtagagtttttttagttgtaaggaatagagagc

SEQ ID NO: 626554 - DNA, 120 bp, Artificial Sequence
  ENSG00000178917_25 (sequence is synthesized)
cactcaagttattgtaagtaaggagctgtgagtcataggcttaaaggaatgagaacccagaagaaactgatcgctagaccagactgtgggaagtagggccttgactcagggcagcctggg

SEQ ID NO: 626555 - DNA, 120 bp, Artificial Sequence
  ENSG00000178917_26 (sequence is synthesized)
agcctgaacagcaaaagcaaatgcatgttgatgcctgtgttctggtgtgaatgtaatgcagctgctcgcagtgtatctgttttctctctgcttgtactcctcctgctgcccattttcttc

SEQ ID NO: 626556 - DNA, 120 bp, Artificial Sequence
  ENSG00000178917_27 (sequence is synthesized)
actgtgaatcttttgtccttttcgtagctctttcctaattgtacttcctgttcccttatatttgttgcttgctgtgtctcctaatggcttggcttctctccatgtatcacttcagattcc

SEQ ID NO: 626557 - DNA, 120 bp, Artificial Sequence
  ENSG00000178917_28 (sequence is synthesized)
attaccactcgtaattttgccctacttccagttccgaatttccttagagacagattcccattgctatagccattactcatcatctcggttgggcagagctttggcccaggccatggcaga

SEQ ID NO: 626558 - DNA, 120 bp, Artificial Sequence
  ENSG00000178917_29 (sequence is synthesized)
ggctgaagactaacctacagataagctgcccttgggtctggtacctggtactggtccaatcacttgcagtccatcatgggatgatgttcaggatcacttgccacagagcatggttgccta

SEQ ID NO: 626559 - DNA, 120 bp, Artificial Sequence
  ENSG00000178917_30 (sequence is synthesized)
agtgttgctctctgcaaagactggggcagtgcagtttcctggaagggcttcttggcagtgcaggtgctatgattgatgcatatagggcagtagccaactctggaaagggtgggcttagga

SEQ ID NO: 626560 - DNA, 120 bp, Artificial Sequence
  ENSG00000178917_31 (sequence is synthesized)
atctttcacccagacatcttaaactttccataggctaactgacatgatggctgtagccccaattcagatgtgattgaaaggaacccacattttggtgtttttccatggccatgattactc

SEQ ID NO: 626561 - DNA, 120 bp, Artificial Sequence
  ENSG00000178917_32 (sequence is synthesized)
atttcctttatattctagataatcaaaggcattttaatttatatttcaaatgattgatgtccctgttatcttttctgggagtgcacaactggctcctaccgggccagtgctctgagggcc

SEQ ID NO: 626562 - DNA, 120 bp, Artificial Sequence
  ENSG00000178917_33 (sequence is synthesized)
agtggcatccccacttttagaactctgctgtctccttcaatactgctgtccagcttttctcaactgatagcttctccaaatcttgttactgtcctgtcatacaacatctctcctttttgt

SEQ ID NO: 626563 - DNA, 120 bp, Artificial Sequence
  ENSG00000178917_34 (sequence is synthesized)
acgctttcctaatcatacactcatagtagaaatttctcaactcattcccatcttttccttgtctctttcttatatttgacttgaggtatttgccagccttccctctcccaacatcttttc

SEQ ID NO: 626564 - DNA, 120 bp, Artificial Sequence
  ENSG00000178917_35 (sequence is synthesized)
tgagaaccatggaaccatataatgtcatggttggaagggaactcaaagtttaccattttgctaaagagacatagtgtgagagtgacttatataagatcacagcatgctttgcaatccagt

SEQ ID NO: 626565 - DNA, 120 bp, Artificial Sequence
  ENSG00000178917_36 (sequence is synthesized)
ctcttgctttccagtgacccttctgacttggctgtgctggctcaatatcttttttccaccctcctccactgaccgtcttcttcttccttgtttttctatccctaagatacaattgagcat

SEQ ID NO: 626566 - DNA, 120 bp, Artificial Sequence
  ENSG00000178917_37 (sequence is synthesized)
tttgctcttgttctcaatgtgtcatctcatttcttaaccataatgtgactttttttcaggtacattagctctttatgattctgtttcttcaacaggaaaagaaatgagtaaaagttgttg

SEQ ID NO: 626567 - DNA, 120 bp, Artificial Sequence
  ENSG00000178919_0 (sequence is synthesized)
gagccggtccggtgtgtgcaggggagcgcctcgccagcggtccgcagggctggagacccacgccgtggagaggaccagcctcaggtcgccccgcctgggcccgcgccccgacctcgctgc

SEQ ID NO: 626568 - DNA, 120 bp, Artificial Sequence
  ENSG00000178919_1 (sequence is synthesized)
ccccgcctcgcctctctgcccgtggcgcttacggccaccttggcctcgggggcagggcatgggcggcccccgccagatcgcccagcgccagtactaactgccctcgctctggccttcgag

SEQ ID NO: 626569 - DNA, 120 bp, Artificial Sequence
  ENSG00000178919_2 (sequence is synthesized)
cccgaagcctcttctgcgcgcacaacctaggcagtaatcctaaactagcgggcaccacagaccagctgcagccaccccaacccagggatcacttccggacccctcgaccgcccggcacca

SEQ ID NO: 626570 - DNA, 120 bp, Artificial Sequence
  ENSG00000178919_3 (sequence is synthesized)
gcgcgcaagggacccttcagccggagaccagagtccagtcccggtcacgaggccaccgccgctgcccgcctcgagaagcaccacgcgggctgagccgtcggctagcgggtcactcccgag

SEQ ID NO: 626571 - DNA, 120 bp, Artificial Sequence
  ENSG00000178919_4 (sequence is synthesized)
cctctgtctgcaccgcgccagccccagaccacggacgctgagcctccagcgcgtgccagcctgggccgctgggctctcggggccagcccgcgacgatcccctgagctctccgcagaaggg

SEQ ID NO: 626572 - DNA, 120 bp, Artificial Sequence
  ENSG00000178919_5 (sequence is synthesized)
gccccccgacagccgcggggatccagagcccgggggtgcgggacgcccgcgccatgactgccgagagcgggccgccgccgccgcagccggaggtgctggctaccgtgaaggaagagcgcg

SEQ ID NO: 626573 - DNA, 80 bp, Artificial Sequence
  ENSG00000178919_6 (sequence is synthesized)
agccggaggtgctggctaccgtgaaggaagagcgcggcgagacggcagcaggggccggggtcccaggggaggccacgggc

SEQ ID NO: 626574 - DNA, 120 bp, Artificial Sequence
  ENSG00000178919_7 (sequence is synthesized)
gcgggaagccgccctacagctacatcgcgctcatcgccatggccatcgcgcacgcgcccgagcgccgcctcacgctgggcggcatctacaagttcatcaccgagcgcttccccttctacc

SEQ ID NO: 626575 - DNA, 120 bp, Artificial Sequence
  ENSG00000178919_8 (sequence is synthesized)
gcgacaaccccaaaaagtggcagaacagcatccgccacaacctcacactcaacgactgcttcctcaagatcccgcgcgaggccggccgcccgggtaagggcaactactgggcgcttgacc

SEQ ID NO: 626576 - DNA, 120 bp, Artificial Sequence
  ENSG00000178919_9 (sequence is synthesized)
ccaacgcggaggacatgttcgagagcggcagcttcctgcgccgccgcaagcgcttcaagcgctcggacctctccacctacccggcttacatgcacgacgcggcggctgccgcagccgccg

SEQ ID NO: 626577 - DNA, 80 bp, Artificial Sequence
  ENSG00000178919_10 (sequence is synthesized)
cccgccgcgcgccccccctacccgggcgccgtctatgcaggctacgcgccgccgtcgctggccgcgccgcctccagtcta

SEQ ID NO: 626578 - DNA, 120 bp, Artificial Sequence
  ENSG00000178919_11 (sequence is synthesized)
tctactaccccgcggcgtcgcccggcccttgccgcgtcttcggcctggttcctgagcggccgctcagcccagagctggggcccgcaccgtcggggcccggcggctcttgcgcctttgcct

SEQ ID NO: 626579 - DNA, 120 bp, Artificial Sequence
  ENSG00000178919_12 (sequence is synthesized)
ctaccagcccgcaggctgcaccggggcccggccggccaacccctccgcctatgcggctgcctacgcgggccccgacggcgcgtacccgcagggcgccggcagtgcgatctttgccgctgc

SEQ ID NO: 626580 - DNA, 120 bp, Artificial Sequence
  ENSG00000178919_13 (sequence is synthesized)
gcgccggcagtgcgatctttgccgctgctggccgcctggcgggacccgcttcgcccccagcgggcggcagcagtggcggcgtggagaccacggtggacttctacgggcgcacgtcgcccg

SEQ ID NO: 626581 - DNA, 120 bp, Artificial Sequence
  ENSG00000178919_14 (sequence is synthesized)
cgctgggagcctgctacaaccctggcgggcagctcggaggggccagtgcaggcgcctaccatgctcgccatgctgccgcttatcccggtgggatagatcggttcgtgtccgccatgtgag

SEQ ID NO: 626582 - DNA, 120 bp, Artificial Sequence
  ENSG00000178919_15 (sequence is synthesized)
ccagcgtagggacgaaaactcatagacacatcggctgttcacacgttccccgcaatctgagaacgaacaggaatggagagaggactcaactgggacccacgtggaaaagaccgagcaggc

SEQ ID NO: 626583 - DNA, 120 bp, Artificial Sequence
  ENSG00000178919_16 (sequence is synthesized)
cacagaggctcggtctccccgcgcacagcgtaggcacccggtgtactctgtaaacgggaggaggtggggcgaggcagccagagcccttggactggcacagggaccctcgatggagcgaag

SEQ ID NO: 626584 - DNA, 120 bp, Artificial Sequence
  ENSG00000178919_17 (sequence is synthesized)
ccctcaaacgggatgctttctggtattctatcggggagggtccttggcggtaaccagagggcagcgtagtgtcaacaccagagaccaggatccaaattgtggggaatcagtttcagcctt

SEQ ID NO: 626585 - DNA, 120 bp, Artificial Sequence
  ENSG00000178919_18 (sequence is synthesized)
ccatgtgctgccggaactcgggcctttttacgcggttcgtcctctagtgcctttaactgcgttactacaataaaaggctgcggcagcgcctttcttcttaaagtgaggaggacaaatttg

SEQ ID NO: 626586 - DNA, 120 bp, Artificial Sequence
  ENSG00000178919_19 (sequence is synthesized)
caaaagaaataggcttttcttcttttttaaattggagaaatctctgctctggttgacctgggctggttttccctgtctctgagaacttgagacctagctccgagttgaactgtgcgtcag

SEQ ID NO: 626587 - DNA, 120 bp, Artificial Sequence
  ENSG00000178919_20 (sequence is synthesized)
cactccagtcccatcacctgaaccttcagtctcccccatctgttacactagagggctgcaggactctatccaccgcccccgggttatcattcagggccccatcatcttggatgctgccct

SEQ ID NO: 626588 - DNA, 120 bp, Artificial Sequence
  ENSG00000178919_21 (sequence is synthesized)
gcgtatttggcagcaatggtgggccacccagggcctctgagtagccacccaaagcctagccgctgttctagggaacggaaaagagttcatggccaagcgtctaacctaaagtcccaggat

SEQ ID NO: 626589 - DNA, 120 bp, Artificial Sequence
  ENSG00000178919_22 (sequence is synthesized)
tggctccaggcagcaattatatcataacttattgaacttttgagcaggacgtgctggtaatttcatggctgttactgcccagtcataaatctgcttttccattataaggcagagagaagt

SEQ ID NO: 626590 - DNA, 120 bp, Artificial Sequence
  ENSG00000178919_23 (sequence is synthesized)
acattcgttcatttgtccactgtttcttgtcatcacgcagccctggacccaaagggtgaactaaagtttaaggagatgagaggattcaaggagcccgttggtgacgcctttcagtagctg

SEQ ID NO: 626591 - DNA, 120 bp, Artificial Sequence
  ENSG00000178919_24 (sequence is synthesized)
gggagggctcttccatccccagcaccccctgctacacctcagcagcctcccccatgcaaaaaggaaagagaaaaattaagttagggcagtcagtaaagtgagctttagaaagaaactgga

SEQ ID NO: 626592 - DNA, 120 bp, Artificial Sequence
  ENSG00000178919_25 (sequence is synthesized)
attttaacttcattttgtatcttgcttaagtagcaggctcactaaaattagagaaagtccaataactctccccctttcccttgagaaatctttaagtttcgattctggagcaaaaacttt

SEQ ID NO: 626593 - DNA, 120 bp, Artificial Sequence
  ENSG00000178919_26 (sequence is synthesized)
cagcattaaatatttcagaggctccattcacagctttcagataaactggagtgttcagatggactgttttaataaaaatctttgagcaagtgagttatggcaagagaaactcagcctctt

SEQ ID NO: 626594 - DNA, 120 bp, Artificial Sequence
  ENSG00000178919_27 (sequence is synthesized)
tctgtataaacttaacagggaagggctggggtgtgaaaaagaagattgtatgaaaaccattggtaatttttattttttatttttgggactgcactatcctgttcacgaagacatgtgaac

SEQ ID NO: 626595 - DNA, 120 bp, Artificial Sequence
  ENSG00000178919_28 (sequence is synthesized)
ttggttcagtccaaatggggatttgtataaaccagtgctctccattagaaatatggtgcaagccacatatgtaattttaaatattctagtagccacattaataaagtaaaaagaaacagg

SEQ ID NO: 626596 - DNA, 120 bp, Artificial Sequence
  ENSG00000178921_0 (sequence is synthesized)
aaacgcgcgcgacgattcgaggtgctctgtggccgcgagtgcatcttccacgaacctaattcatctctccagcaaaggacacatctctccagcaaaggacacctctctccagcaaaggac

SEQ ID NO: 626597 - DNA, 120 bp, Artificial Sequence
  ENSG00000178921_1 (sequence is synthesized)
acctgcagagatgtccccagtccttcacttctatgttcgtccctctggccatgagggggcagcccctggacacactcggaggaaactgcaagggaaactgccagagctgcagggcgtcga

SEQ ID NO: 626598 - DNA, 120 bp, Artificial Sequence
  ENSG00000178921_2 (sequence is synthesized)
gactgaactgtgctacaacgtgaactggacagctgaggccctccccagtgctgaggagacaaagaagctgatgtggctgtttggttgccccttactgctggatgatgttgctcgggagtc

SEQ ID NO: 626599 - DNA, 120 bp, Artificial Sequence
  ENSG00000178921_3 (sequence is synthesized)
ctggctccttcctggctccaatgacctgctgctggaggtcgggcccaggctgaacttctccaccccaacatccaccaacatcgtgtcagtgtgccgcgccactgggctggggcctgtgga

SEQ ID NO: 626600 - DNA, 120 bp, Artificial Sequence
  ENSG00000178921_4 (sequence is synthesized)
tcgtgtggagaccacccggcgctaccggctctcgtttgcccaccccccgtcagctgaggtggaagccattgctctggctaccctgcacgaccggatgacagagcagcacttcccccatcc

SEQ ID NO: 626601 - DNA, 120 bp, Artificial Sequence
  ENSG00000178921_5 (sequence is synthesized)
catccagagtttctcccctgagagcatgccggaacccctcaatggccctatcaatatactgggtgagggccggcttgcgctggagaaggccaaccaggagcttggtctggctttagactc

SEQ ID NO: 626602 - DNA, 120 bp, Artificial Sequence
  ENSG00000178921_6 (sequence is synthesized)
ttgggacctagacttctacaccaagcgcttccaggagctacagcggaacccgagcactgtggaggcctttgacttggcgcagtccaatagcgagcacagccgacactggttcttcaaggg

SEQ ID NO: 626603 - DNA, 120 bp, Artificial Sequence
  ENSG00000178921_7 (sequence is synthesized)
ccagctccacgtggatgggcagaagctggtgcactcactgtttgagtccatcatgagcacccaggaatcctcgaaccccaacaacgtcctcaaattctgtgataacagcagtgcaatcca

SEQ ID NO: 626604 - DNA, 120 bp, Artificial Sequence
  ENSG00000178921_8 (sequence is synthesized)
gggaaaggaagtccgattcctacggcctgaggaccccacacggccaagccgcttccagcaacagcaagggctgagacatgttgtcttcacagcagagactcacaactttcccacaggagt

SEQ ID NO: 626605 - DNA, 120 bp, Artificial Sequence
  ENSG00000178921_9 (sequence is synthesized)
atgcccctttagtggtgcaaccactggcacagggggccggattcgagatgtccagtgcacaggccgcggggcccacgtggtggctggcactgccggctattgctttggaaatctgcatat

SEQ ID NO: 626606 - DNA, 120 bp, Artificial Sequence
  ENSG00000178921_10 (sequence is synthesized)
tccaggttacaatctgccctgggaggatccaagcttccagtatcctgggaattttgcccggcccctggaggttgccattgaagccagtaatggagcttctgactatggcaacaagtttgg

SEQ ID NO: 626607 - DNA, 120 bp, Artificial Sequence
  ENSG00000178921_11 (sequence is synthesized)
ggaaccagtgctggctggcttcgcccgctccttgggcctccagctcccagacggccagcggcgtgagtggatcaagcccatcatgtttagtgggggcattgggtccatggaagctgacca

SEQ ID NO: 626608 - DNA, 120 bp, Artificial Sequence
  ENSG00000178921_12 (sequence is synthesized)
cataagcaaggaggccccagagccaggcatggaagttgtaaaggttggaggtcccgtctacaggattggagttggaggtggagctgcttcatctgtgcaggtgcagggagataacaccag

SEQ ID NO: 626609 - DNA, 120 bp, Artificial Sequence
  ENSG00000178921_13 (sequence is synthesized)
tgacctggactttggggctgtgcagcgaggagacccggagatggaacagaagatgaaccgtgtgatcagggcttgtgtggaggcccccaagggaaaccccatctgcagccttcatgatca

SEQ ID NO: 626610 - DNA, 120 bp, Artificial Sequence
  ENSG00000178921_14 (sequence is synthesized)
gggcgctggtggcaatggcaatgtcctaaaagagctgagtgacccagctggagccatcatttacaccagccgcttccagcttggggacccaaccctgaatgccctggaaatctggggggc

SEQ ID NO: 626611 - DNA, 120 bp, Artificial Sequence
  ENSG00000178921_15 (sequence is synthesized)
tgagtaccaggaatcaaatgctcttctgctgaggtcccccaaccgggacttcctgactcatgtcagtgcccgtgaacgttgcccggcttgcttcgtgggcaccatcactggagaccggag

SEQ ID NO: 626612 - DNA, 120 bp, Artificial Sequence
  ENSG00000178921_16 (sequence is synthesized)
aatagtgctggtggacgatcgggagtgtcctgtcagaagaaatggccagggggatgcccccccgacacccctgccaacccctgtggacctggagctcgaatgggtgctgggcaagatgcc

SEQ ID NO: 626613 - DNA, 120 bp, Artificial Sequence
  ENSG00000178921_17 (sequence is synthesized)
tcggaaggagttcttcctgcagaggaagccccccatgctgcagcctctggccttgcccccagggctgagcgtgcaccaggctctggagagggttctgaggctgcccgccgtggccagcaa

SEQ ID NO: 626614 - DNA, 120 bp, Artificial Sequence
  ENSG00000178921_18 (sequence is synthesized)
gcgctacctcaccaataaggtggaccgctctgtgggaggcctggtggcccagcagcagtgcgtggggcccctgcaaactcctctggcagatgtagcggttgtggcactgagccatgagga

SEQ ID NO: 626615 - DNA, 120 bp, Artificial Sequence
  ENSG00000178921_19 (sequence is synthesized)
gctcataggggctgccacagccttgggagaacagccagtcaagagcctgctggacccaaaagtcgccgcccggctggccgtggccgaagccctcaccaacctggtgtttgctctggtcac

SEQ ID NO: 626616 - DNA, 120 bp, Artificial Sequence
  ENSG00000178921_20 (sequence is synthesized)
tgacctccgggatgtgaagtgtagcgggaactggatgtgggcagccaagctcccaggggagggcgcagctttggcggatgcctgtgaggctatggtggcagtgatggcagccctgggtgt

SEQ ID NO: 626617 - DNA, 120 bp, Artificial Sequence
  ENSG00000178921_21 (sequence is synthesized)
ggcagtggatggtggcaaggactccctcagcatggctgctcgggttggcactgagaccgtgcgggctcctgggtcactggtcatctcagcctatgccgtctgcccagacatcacagccac

SEQ ID NO: 626618 - DNA, 120 bp, Artificial Sequence
  ENSG00000178921_22 (sequence is synthesized)
ctctggcccagtgcttctcccagcttggggaacaccctccagacctggaccttcctgagaacttggtgcgggccttcagcatcactcaggggctgctgaaagaccgcctcctctgctcag

SEQ ID NO: 626619 - DNA, 120 bp, Artificial Sequence
  ENSG00000178921_23 (sequence is synthesized)
gccacgatgtcagtgacggaggcctcgtcacatgcctgctggagatggcctttgctggaaattgcgggctacaggtggatgtgcctgtccccagggttgatgtcctgtctgtgctgttcg

SEQ ID NO: 626620 - DNA, 120 bp, Artificial Sequence
  ENSG00000178921_24 (sequence is synthesized)
ctgaggagccaggcctcgtgctggaggtgcaggagccagacctggcccaggtgctgaagcgttaccgggatgctggcctccattgcctggagctgggccacacaggcgaggccgggcccc

SEQ ID NO: 626621 - DNA, 120 bp, Artificial Sequence
  ENSG00000178921_25 (sequence is synthesized)
acgccatggtccgggtgtcagtgaacggggctgtggttctggaggagcctgttggggagctgcgagccctctgggaggagacgagtttccagctggaccggctacaggcagagcctcgct

SEQ ID NO: 626622 - DNA, 120 bp, Artificial Sequence
  ENSG00000178921_26 (sequence is synthesized)
gtgtggcagaggaggaacggggcctgagggagcggatggggcccagctattgcctgccccccacctttcccaaagcctccgtgccccgtgagcctggtggtcccagcccccgagtcgcca

SEQ ID NO: 626623 - DNA, 120 bp, Artificial Sequence
  ENSG00000178921_27 (sequence is synthesized)
tcttgcgagaggagggcagtaatggagaccgggagatggccgatgccttccacttagctgggtttgaggtatgggacgtgaccatgcaggacctctgctctggggcaattgggctggaca

SEQ ID NO: 626624 - DNA, 120 bp, Artificial Sequence
  ENSG00000178921_28 (sequence is synthesized)
ctttccgtggcgtggccttcgtgggcggcttcagctatgcagatgtcctgggctctgccaaagggtgggcagctgctgtgacctttcatcccagggctggggctgagctgaggcgcttcc

SEQ ID NO: 626625 - DNA, 120 bp, Artificial Sequence
  ENSG00000178921_29 (sequence is synthesized)
ggaagcggccagacaccttcagcctgggcgtgtgtaatggctgtcaactgctggctctgctcggctgggtgggaggcgaccccaatgaggatgctgcagagatgggccctgactcccagc

SEQ ID NO: 626626 - DNA, 120 bp, Artificial Sequence
  ENSG00000178921_30 (sequence is synthesized)
cagcccggccaggccttctgctacgccacaacctgtctgggcgctacgagtctcgctgggccagcgtgcgtgtggggcctgggccagccctgatgctgcgagggatggagggcgccgtgc

SEQ ID NO: 626627 - DNA, 120 bp, Artificial Sequence
  ENSG00000178921_31 (sequence is synthesized)
tgcccgtgtggagtgcgcacggggaaggttacgtagcattttcttctccggaactccaagctcagattgaggccaggggcttggctccactgcactgggctgatgatgacgggaacccca

SEQ ID NO: 626628 - DNA, 120 bp, Artificial Sequence
  ENSG00000178921_32 (sequence is synthesized)
cagagcagtaccctctgaatcccaatgggtccccagggggcgtggctggcatctgctcctgtgatggccgccacctggctgtcatgcctcaccctgagcgggccgttaggccttggcagt

SEQ ID NO: 626629 - DNA, 120 bp, Artificial Sequence
  ENSG00000178921_33 (sequence is synthesized)
gggcatggcgaccccctccatttgatactctgaccacctccccctggctccagctctttatcaatgcccgaaactggaccctggaagggagctgctgactggccacaggggctcacctgg

SEQ ID NO: 626630 - DNA, 120 bp, Artificial Sequence
  ENSG00000178921_34 (sequence is synthesized)
gccccatggcttttcacctaagtgggtcctgccccctcccccatgaccttcaggagcaccccatattatttccaaaaatatcttggacagacaaggaccaaaatgccaaaatctcagcgg

SEQ ID NO: 626631 - DNA, 120 bp, Artificial Sequence
  ENSG00000178921_35 (sequence is synthesized)
actcgataatctgcctgctgatgttccttctgtggctgtgtctattttcagttctgctctaacatggcatgccctttctcagcccaggaaacagcatgtggttcagagaaaagagcgaca

SEQ ID NO: 626632 - DNA, 120 bp, Artificial Sequence
  ENSG00000178921_36 (sequence is synthesized)
aggaaaagttaggactcctgaggtccgaacaggggcttctgttgcccacttcacaacacccagtgatcaccggtgtgcaattgcctccttggctctgagggatgttttgcgctccctttt

SEQ ID NO: 626633 - DNA, 120 bp, Artificial Sequence
  ENSG00000178921_37 (sequence is synthesized)
ctcatcattggggttagcgggtgcagacaaattcagcaatagtatgcagatcagcccctcaccacctcattgttctcatctggaactgaaactttctggatttctcttgaagtgctacac

SEQ ID NO: 626634 - DNA, 120 bp, Artificial Sequence
  ENSG00000178921_38 (sequence is synthesized)
tgcactgaatgtaaggaattgttgcttgtggaagtttctcagcgtttctggctgtcttagggctggcctcagaacccagcattcctgttatttgcttctaaattagcagctctctttttt

SEQ ID NO: 626635 - DNA, 120 bp, Artificial Sequence
  ENSG00000178921_39 (sequence is synthesized)
aagtgctgggattacaggtgggagccactacagctggcccagcagctctgtttctgatagaggtggttggggctctcatccctagatcctaaccctttagtatgctggaattctactctt

SEQ ID NO: 626636 - DNA, 120 bp, Artificial Sequence
  ENSG00000178921_40 (sequence is synthesized)
aattctactcttcacttactgcattgactgttgttgattagttattattgcaaagcactgtcaccggcctcagggagtttatgtgtaatagaattaaaaataatagctgtgtataacact

SEQ ID NO: 626637 - DNA, 120 bp, Artificial Sequence
  ENSG00000178921_41 (sequence is synthesized)
tagctcaagccacgcatgtgtgaggcatttggtatgtatctgaattaattctcactaaaattcagcaaaggacttgatagcccctccccgccttttcaataaaggatgaatgaaggttga

SEQ ID NO: 626638 - DNA, 120 bp, Artificial Sequence
  ENSG00000178921_42 (sequence is synthesized)
aacaaacgcgcgcgacgattcgaggtgctctgtggccgcgagtgcatcttccacttaatgttattttttaggaacctaattcatctctccagcaaaggacacatctctccagcaaaggac

SEQ ID NO: 626639 - DNA, 120 bp, Artificial Sequence
  ENSG00000178921_43 (sequence is synthesized)
tccatgatgaaacatcctcagtcctgccgtcctagccctcatcctccctgatccctaccctactctctggctgcatccctctgaccctcaccctggcccttcctgcatttccctgatccc

SEQ ID NO: 626640 - DNA, 120 bp, Artificial Sequence
  ENSG00000178921_44 (sequence is synthesized)
gctttttgccttctacacgcacttcgggtctcagacgcttttacttattatggttgcccttttcccctacagctccgtcaagggtcttctccaggaacccacagccccatagttccccca

SEQ ID NO: 626641 - DNA, 120 bp, Artificial Sequence
  ENSG00000178921_45 (sequence is synthesized)
ttaacctgctcctggtttcccaccaggattaaaccctagagagtgaacggagaccagtttaaggctcacagcgggcgccgcgtgaatgagggaataaacattcgcagaaccagtaagagg

SEQ ID NO: 626642 - DNA, 120 bp, Artificial Sequence
  ENSG00000178921_46 (sequence is synthesized)
gagtatagttaccgcgtgcggacctggatcctcctccaggtgcagcgtttcgtcatctagcccaagcttggtctggcggcttcagtatccccaccgggccgagctgtgtctacttggtgc

SEQ ID NO: 626643 - DNA, 120 bp, Artificial Sequence
  ENSG00000178922_0 (sequence is synthesized)
gtgatccctctctcgctaaccgtaggcgcttttcgtgaaggcccgggtttttacagcacttcgcttttctaaccacgaacagtgctcgttcgttcgcagggccagcaaggagagccccgc

SEQ ID NO: 626644 - DNA, 120 bp, Artificial Sequence
  ENSG00000178922_1 (sequence is synthesized)
gccgcccgccgcccgccgcccgccgcctttggatcccgcggactccgcccggcccggcctccccaggcatggcgccgctgcgcttctccgccaatctgtcctggctattccccgagctct

SEQ ID NO: 626645 - DNA, 120 bp, Artificial Sequence
  ENSG00000178922_2 (sequence is synthesized)
ctattccccgagctctccggcctccccgcgcgggtgcgggccgcgggcagctcgggcttcgaggccgtcgaggtggcctggccgtacgcggagacgcctgaggcgctggcgcgcgccgcg

SEQ ID NO: 626646 - DNA, 120 bp, Artificial Sequence
  ENSG00000178922_3 (sequence is synthesized)
ggggctgcggcttgtactgatcaacacgcccccgggagaccaagagaagggggaaatggggctgggggccgtccccgggagacaggcggccttccgagagggactggagcaggccgtgcg

SEQ ID NO: 626647 - DNA, 120 bp, Artificial Sequence
  ENSG00000178922_4 (sequence is synthesized)
gtatgccaaagccctgggctgtcccaggatccacctgatggctggccgagtaccccagggagctgatcgaatagcagtcaaggctgagatggaggccgtttttctggagaacctgaggca

SEQ ID NO: 626648 - DNA, 120 bp, Artificial Sequence
  ENSG00000178922_5 (sequence is synthesized)
ctgacccccagtacttcctggacacgccccagcaggcggcagccatcttacagaaggtaggaagacccaacctccaattacaaatggacatattccactggcagatcatggatgggaacc

SEQ ID NO: 626649 - DNA, 120 bp, Artificial Sequence
  ENSG00000178922_6 (sequence is synthesized)
tgacaggaaacatccgggagttcctgcccattgttgggcatgtgcaggtggcacaggtcccaggccgaggggagcccagcagccccggagagctgaatttcccctatctgtttcaactgc

SEQ ID NO: 626650 - DNA, 120 bp, Artificial Sequence
  ENSG00000178922_7 (sequence is synthesized)
tggaagatgaaggctacaaaggcttcgtgggctgtgagtatcagcctcgaggagacacagtagagggcttgagttggctacgttcatactgggataggcggggccacccagaggctggcc

SEQ ID NO: 626651 - DNA, 120 bp, Artificial Sequence
  ENSG00000178922_8 (sequence is synthesized)
agtgagggcccgcacaccacccacgtgcctccagacagcgagtgacatcccatctcctcctctgcattaaagatgacctgctgaacattgtcatatgtctctgtaatggggtggtgggac

SEQ ID NO: 626652 - DNA, 120 bp, Artificial Sequence
  ENSG00000178922_9 (sequence is synthesized)
acatagtgtctaacacttcagtttctctgctgcttccctcccattgagaagccagtgccagggttgctgtgaagatgggagagcttctgaacccacctcattaaaggatgagaaacccag

SEQ ID NO: 626653 - DNA, 120 bp, Artificial Sequence
  ENSG00000178922_10 (sequence is synthesized)
cctgggctgtcccaggtaccccgctccaccccacccccacccctgtgacccatgaccctgatgcaggttcagggagtcgaggacgccagatctgagacgctcagaagtctgagcccactg

SEQ ID NO: 626654 - DNA, 120 bp, Artificial Sequence
  ENSG00000178922_11 (sequence is synthesized)
gtttatctctgcctctgcggtcctggtcctttgtaaattgccttttgtattttatctgtcttatgccactctgtttgccactctttcatgctcaccccatgctgggatcccatgctggga

SEQ ID NO: 626655 - DNA, 120 bp, Artificial Sequence
  ENSG00000178922_12 (sequence is synthesized)
gcacctaaccctgtctggatcagagaaagctgcttacaggtagtgatgcttggactgtcttcaaggagtgggcattgcttgatgggcaggaagttgagtgttccttgcaagggtgctgtg

SEQ ID NO: 626656 - DNA, 120 bp, Artificial Sequence
  ENSG00000178922_13 (sequence is synthesized)
gcaagaggaggcctggtgtatttggcagcgttcctgaggctggacatgtatgtagcctgttgggatggggaggcctggaatgtctgcttggagctggatgtggctaagatcaggggatga

SEQ ID NO: 626657 - DNA, 120 bp, Artificial Sequence
  ENSG00000178922_14 (sequence is synthesized)
acggctcaaagtggggctgattcaaatgtcaaatcctgcagaggccaaacaggctcagaaggaactggcaagaggggatcactactggtcaatggtgggggcagaaaacagatgggaaaa

SEQ ID NO: 626658 - DNA, 120 bp, Artificial Sequence
  ENSG00000178922_15 (sequence is synthesized)
ggctaagtagatgcgaggagaggaagtagagacagcagcatggaatacctgagaagggcaagcaaaggtcaggacaatttttaaaggtgagaatttagcaggttacaggttgcggagaag

SEQ ID NO: 626659 - DNA, 120 bp, Artificial Sequence
  ENSG00000178922_16 (sequence is synthesized)
gaccgagggaaggaaaggttttggaaagtactggaggcaggaggcggtgggtggacactgagatgtctgggaaagggcttgcccctcagccatcactgaagtgtctctgaaagtgctggg

SEQ ID NO: 626660 - DNA, 120 bp, Artificial Sequence
  ENSG00000178922_17 (sequence is synthesized)
atacctgggcatcgtgacccaggtgccatggactggagacctggggagacggacgagggctggcacagtcagggaatcctggaagaggtgcagagagagccaagggaggcaaggcctcca

SEQ ID NO: 626661 - DNA, 120 bp, Artificial Sequence
  ENSG00000178922_18 (sequence is synthesized)
gagtgggcattgcttgatgggcaggaagttgagtgttccttgcaagggtgctgtggcaagaggaggcctggtgtatttggcagcgttcctgaggctggacatgatccacctgatggctgg

SEQ ID NO: 626662 - DNA, 120 bp, Artificial Sequence
  ENSG00000178922_19 (sequence is synthesized)
ggggttttggctcaggtgagaaaggtggaaacacacacgtacttacatgtctctgtgggtgtgcggagaagggggtgcacagtggggacagcacgtgaggctgccagcctaggtcagagg

SEQ ID NO: 626663 - DNA, 120 bp, Artificial Sequence
  ENSG00000178922_20 (sequence is synthesized)
ggaagggagctctggagggacccggacaggggctgttttctccttgtgggctgaggtgccgaggcctccctctccctgcaggagacacagtagagggcttgagttggctacgttcatact

SEQ ID NO: 626664 - DNA, 120 bp, Artificial Sequence
  ENSG00000178927_0 (sequence is synthesized)
gcccccgccggttcgcgtctctctgctgcggcgcggggaccgctgtgctctcgacccctcctcctgtagagagtggtgctgccctctcgggatgtacctgcaggtggagacccgcaccag

SEQ ID NO: 626665 - DNA, 120 bp, Artificial Sequence
  ENSG00000178927_1 (sequence is synthesized)
ctcccgcctccatctgaagagggctccaggcatccggtcctggtccctgctggttggaatcttgtcgattggcctggctgctgcctactacagcggagatagcctgggctggaagctctt

SEQ ID NO: 626666 - DNA, 120 bp, Artificial Sequence
  ENSG00000178927_2 (sequence is synthesized)
ctacgtcacaggctgcctgtttgtggctgtgcagaacttggaggactgggaggaagccatcttcgacaagagcacagggaaggttgttttgaagacgttcagcctctacaagaagctgct

SEQ ID NO: 626667 - DNA, 120 bp, Artificial Sequence
  ENSG00000178927_3 (sequence is synthesized)
gactcttttcagagctggccacgaccaggtggtggtcctgctccatgatgtccgtgatgtgagcgtggaggaggagaaggtccggtacttcgggaaaggctacatggtggtgctccggct

SEQ ID NO: 626668 - DNA, 120 bp, Artificial Sequence
  ENSG00000178927_4 (sequence is synthesized)
tgcgacgggcttctcccaccccctcacgcagagtgcagtcatgggccaccgcagtgatgtggaagccatcgccaagctcatcaccagcttcctggagctgcactgccttgagagccccac

SEQ ID NO: 626669 - DNA, 120 bp, Artificial Sequence
  ENSG00000178927_5 (sequence is synthesized)
agagctgtctcagagcagcgacagtgaggccggtgaccctgcaagccagagctgacagccccactgtgcctgagcccgtgcaccgcccacaggacccatggcacattcccggtgtgcctg

SEQ ID NO: 626670 - DNA, 120 bp, Artificial Sequence
  ENSG00000178927_6 (sequence is synthesized)
agcccgtgcaccgcccacaggacccgtggcacattcccggtgtgcctgagcccgtgcaccgcccacaggacccgtggcacattcccggtgtgcctgagcccgtgcaccgcccacaggacc

SEQ ID NO: 626671 - DNA, 120 bp, Artificial Sequence
  ENSG00000178927_7 (sequence is synthesized)
cgtggcacattcccggtgtgcctgagcccgtgcaccgcccacaggacccgtggccttggcttcagttggtgcctccagccgagttggcctattgcctgctcatgctgctgcttgcacact

SEQ ID NO: 626672 - DNA, 120 bp, Artificial Sequence
  ENSG00000178927_8 (sequence is synthesized)
actttctccatcgtgaggcctgggcctgcctttctgcagccggaggtctcgccagccctggactcctgctttgggccacagcaagacctcgggcgagtggagaggcggggccaggccggg

SEQ ID NO: 626673 - DNA, 120 bp, Artificial Sequence
  ENSG00000178927_9 (sequence is synthesized)
cccttgtgggtgctgatgctgcatgttgtccccgacacagcgtcctctccctggtggacatccccagcggtcaggtgcttccccaagggcagtgaggggtgaacatccagggcctacctg

SEQ ID NO: 626674 - DNA, 120 bp, Artificial Sequence
  ENSG00000178927_10 (sequence is synthesized)
gctgtgcacgctgcagccacactgtggaagctgcccctccccgaggacccgcctcccttgctgatgccaggatctcggcgcatagaccactctgccccagcggtcgtcacagaaaggtct

SEQ ID NO: 626675 - DNA, 120 bp, Artificial Sequence
  ENSG00000178927_11 (sequence is synthesized)
ctctgttcctcacactcagcttcagcataagctgtgaggccagaaaaaaggtcagctcttctagtatcgtgcagtgcttaaaaaccgggagctccagccgggcgcagtggttcatgccag

SEQ ID NO: 626676 - DNA, 74 bp, Artificial Sequence
  ENSG00000178927_12 (sequence is synthesized)
gtctttgtaaaaaaactaaccaaacaggaaaaactgggagattttctgcagaaattgagttccagcctctctcg

SEQ ID NO: 626677 - DNA, 120 bp, Artificial Sequence
  ENSG00000178927_13 (sequence is synthesized)
tgggagattttctgcagaaattgagttccagcctctctcgaacctgggaagacctggcaggagggggctgggctctcggctacagacttctccccaccccgtaggagctgaacgccaacc

SEQ ID NO: 626678 - DNA, 120 bp, Artificial Sequence
  ENSG00000178927_14 (sequence is synthesized)
atcctgacccgccagtgctcttggtctcctgagtgtacccaggtcctcccaggtgcggtgtgcaccgagcgcgcctggcctgatgccctggcctgtgagctggggactcctgggccctgt

SEQ ID NO: 626679 - DNA, 120 bp, Artificial Sequence
  ENSG00000178927_15 (sequence is synthesized)
gagcccctaggcggcaggcccaggaatggctgggtaggacagggaacacctttgccccacgtctggctgtgacctcggtgaaagccgacaggagagagatgggaccctcctcctcagtag

SEQ ID NO: 626680 - DNA, 120 bp, Artificial Sequence
  ENSG00000178927_16 (sequence is synthesized)
tggctgccagtccctcgttgcaggacagggtcatcataaccataaataacccttcacgtgtcacctgcagcttccactctttatttccaaagaatcagtgtcacacatgcagatcacaaa

SEQ ID NO: 626681 - DNA, 120 bp, Artificial Sequence
  ENSG00000178927_17 (sequence is synthesized)
tgtgctctcggtaggcggctgggctgggtgggctccgcacttccttcccgctccgtgccgcgcgtcccggcacccttaggcccactccgggaggggtctgcgtcctgggcccgcctgccg

SEQ ID NO: 626682 - DNA, 120 bp, Artificial Sequence
  ENSG00000178927_18 (sequence is synthesized)
gctgttccgtgtcccgccgtgcccgtcgcgggcggcctcgcgcctgttccgctgcaggttggccccggcggcgggagcgcccccgatccggacaaagaaacgagcgctcggaaacggggt

SEQ ID NO: 626683 - DNA, 120 bp, Artificial Sequence
  ENSG00000178927_19 (sequence is synthesized)
gccagtacggccggaagccatgatgggactttcagttcctttcttggtggaggccagcacaggggagagggggtgcccacagatgctagaagcttaaaggctgctgggggctagcggcct

SEQ ID NO: 626684 - DNA, 120 bp, Artificial Sequence
  ENSG00000178927_20 (sequence is synthesized)
caggacataaggtttccagacaggacggggcaggtggtgatgcagctgtagctcgtgagtctgagcgggaaacagcccccgcgcagtcggtgtcgctgtgaacggaaaagggccttcctt

SEQ ID NO: 626685 - DNA, 120 bp, Artificial Sequence
  ENSG00000178927_21 (sequence is synthesized)
aatcccggaagtgcgcgcggccccgcccccgccggttcgcgtctctctgctgcggcgcggggaccgctgtgctctcggaaacggggtctctgggggatccagtgacgtgcccaaccacag

SEQ ID NO: 626686 - DNA, 120 bp, Artificial Sequence
  ENSG00000178927_22 (sequence is synthesized)
atcccggaagtgcgcgcggccccgcccccgccggttcgcgtctctctgctgcggcgcggggaccgctgtgctctcggctggagtccagtggcacgatttctgctcactgcagcctccacc

SEQ ID NO: 626687 - DNA, 120 bp, Artificial Sequence
  ENSG00000178927_23 (sequence is synthesized)
ctcaggtgatcctcccagctcagcctcctgaataactaggaccacaggcgtacaccaccacaccgggctgttttatgtattttctgtggagacggggtttcgccacgttgccctggctgg

SEQ ID NO: 626688 - DNA, 85 bp, Artificial Sequence
  ENSG00000178927_24 (sequence is synthesized)
tgaaccccctacttaatgtcagaaatttgatttgacttcacagggaaagccctgagaaactaccagaacggggtccctggggcca

SEQ ID NO: 626689 - DNA, 120 bp, Artificial Sequence
  ENSG00000178927_25 (sequence is synthesized)
aaagccctgagaaactaccagaacggggtccctggggccagtgttgggagcgtacggtgaagtggcagggctgctgcgcccgtgcggaactccgctgtggaagattagcccctttggtga

SEQ ID NO: 626690 - DNA, 78 bp, Artificial Sequence
  ENSG00000178927_26 (sequence is synthesized)
ccccgccggttcgcgtctctctgctgcggcgcggggaccgctgtgctctcgtaatgaggtctcctcttccttcctcgg

SEQ ID NO: 626691 - DNA, 120 bp, Artificial Sequence
  ENSG00000178927_27 (sequence is synthesized)
cagtcttcaggcctcaccacgtgctactggagtaacacccgtgtcagttatggagcctcacacagcagatgtgtctagtaaatactgtgaatagcgtatactgtgttttgcttttgtttt

SEQ ID NO: 626692 - DNA, 120 bp, Artificial Sequence
  ENSG00000178927_28 (sequence is synthesized)
gctggtctcaaactcctgagctcaagcgctcttccttcctcggcctcccaggtagctgggattacaagtgtgtgatactacgcccagctatactgcattattgaaccagcttcctggctg

SEQ ID NO: 626693 - DNA, 120 bp, Artificial Sequence
  ENSG00000178927_29 (sequence is synthesized)
tatactgcattattgaaccagcttcctggctgtttcccctactctgaacctggtggtctgtaacccctgaccacagctgttcctacagtgggaagggcctgctcatcaggggctgtggct

SEQ ID NO: 626694 - DNA, 120 bp, Artificial Sequence
  ENSG00000178927_30 (sequence is synthesized)
cctggtcccgctgcaccagggaggtggggtcttaccgggatcaataggcaggcagtcactttctcttcataggaatcttgtcgattggcctggctgctgcctactacagcggaggtaaag

SEQ ID NO: 626695 - DNA, 120 bp, Artificial Sequence
  ENSG00000178927_31 (sequence is synthesized)
caccccccgccccacccccccatgactgtctcagctgtttggaaaacagagaaaagaaggaaaaactgtcatttgtgactgtccatggggcggcctttaggatcggcacctctgcccctt

SEQ ID NO: 626696 - DNA, 120 bp, Artificial Sequence
  ENSG00000178927_32 (sequence is synthesized)
cctctgccccttgattgctggcgggcaccgcgccctccatgcgctgctgttcttccgcacgcccatcctgcccagcgctcagcccacatttcacttcttttttttttttttttgagacgg

SEQ ID NO: 626697 - DNA, 120 bp, Artificial Sequence
  ENSG00000178927_33 (sequence is synthesized)
gcgtgagccactgcgcccggccacatttcacttcttaagtcttctgtgtttttgggtcatcaaatattcccggagagatgctcttgaggatctaagatccagctgtgggatgaggtgtac

SEQ ID NO: 626698 - DNA, 120 bp, Artificial Sequence
  ENSG00000178927_34 (sequence is synthesized)
ttcccaccctgccacaatcactgggcctgcccagacgggcagaggccctgtgcgccccacctgcctctctcacgtggactctgggggtcagagctgggtggggtgtgccgcgtgtgggtc

SEQ ID NO: 626699 - DNA, 120 bp, Artificial Sequence
  ENSG00000178927_35 (sequence is synthesized)
ctgagtggccagggcagggtcagcagcacaggaagctgcccagggggtccttgcaagcgtgggctctggccagcgtctgggggaggctgtgctaggcggggcctcccgtgggcatgtccc

SEQ ID NO: 626700 - DNA, 120 bp, Artificial Sequence
  ENSG00000178927_36 (sequence is synthesized)
aaggctgtgggactttgatctggccggagctgcagccgtagcaggtcactcccgttcctgactgcccagagctatggggcagctgggagaggagatgagtttgtggacgggacacagagg

SEQ ID NO: 626701 - DNA, 120 bp, Artificial Sequence
  ENSG00000178927_37 (sequence is synthesized)
ggcccacgggaagcgtgtgcaggctcaggggcagccccactgtgacggggaggctgggagcaggccaggaagtgctgggtccagtttgggagctccagggtctgcgggaggtaggtggtc

SEQ ID NO: 626702 - DNA, 120 bp, Artificial Sequence
  ENSG00000178927_38 (sequence is synthesized)
gcttggtgaccagggttgtgtcctgcccgctggaagcaggatcccacggatacgccccacctgctcacctgctcagcagggtcctagagcctcctgggttctttagaggtttggcccctg

SEQ ID NO: 626703 - DNA, 120 bp, Artificial Sequence
  ENSG00000178927_39 (sequence is synthesized)
gggagagtgggaggagcaggggtctgaggagcaggggtctggcagagcaggggtctgaggagcaggggtctggcccacccgggctcgggcagcctctgtttagctgcattctcccgtctg

SEQ ID NO: 626704 - DNA, 120 bp, Artificial Sequence
  ENSG00000178927_40 (sequence is synthesized)
ttgggggacctgctcttggcctccagactgggcctgatggcgtgggcgcctgcctgtgtgcaggcccaagggctcagctgcctctgtctgttcccagacccctcctcctgtagagagtgg

SEQ ID NO: 626705 - DNA, 120 bp, Artificial Sequence
  ENSG00000178927_41 (sequence is synthesized)
ccccagaaccccagaaccggaagcctgactttcaaaaaggatgaaaatgaaacaaaatattttctcttttttctattaccttgaaatctaatggctattttgtttctttgtatccattca

SEQ ID NO: 626706 - DNA, 120 bp, Artificial Sequence
  ENSG00000178927_42 (sequence is synthesized)
aattctatctggtgtacttggttttacagataatgcatgtctgttttgtccccttttaatcactaacacccagcgtatttaatatactctatgagcttttctgaggtcaccatattttcc

SEQ ID NO: 626707 - DNA, 120 bp, Artificial Sequence
  ENSG00000178927_43 (sequence is synthesized)
tttgtacttgttttgaaccacgtgatgggtgatcgtgggttcccatgtctcctcctccctggtcctcagacctcttcgtaggactcacagtccactaaccacgtgatgggtgatcgtggg

SEQ ID NO: 626708 - DNA, 120 bp, Artificial Sequence
  ENSG00000178927_44 (sequence is synthesized)
ttcccatgtctcctcctccctggtcctcagacctcttcgtaggactcacagtccactaaccacgtgatgggtgatcgtgggttcccatgtctcctcctccctggtcctcagacctcttcg

SEQ ID NO: 626709 - DNA, 120 bp, Artificial Sequence
  ENSG00000178927_45 (sequence is synthesized)
taggactcacagtccactaaccacgtgatgggtgatcgtgggttcccatgtctcctcctccctggtcctcagacctcttcgtaggactcacagtccactaaccacgtgatgggtgatcgt

SEQ ID NO: 626710 - DNA, 120 bp, Artificial Sequence
  ENSG00000178927_46 (sequence is synthesized)
gggttcccatgtctcctcctccctggtcctcagacctcttcgtaggactcacagtccactaaccacgtgatgggtgatcgtgggttcccatgtctcctcctccctggtcctcagacctct

SEQ ID NO: 626711 - DNA, 120 bp, Artificial Sequence
  ENSG00000178927_47 (sequence is synthesized)
tcgtaggactcacagtccactaaccacgtgatgggtgatcgtgggttcccatgtctcctcctccctggtcctcagacctcttcgtaggactcacagtccactaaccacgtgatgggtgat

SEQ ID NO: 626712 - DNA, 120 bp, Artificial Sequence
  ENSG00000178927_48 (sequence is synthesized)
cgtgggttcccatgtctcctcctccctggtcctcagacctcttcgtaggactcacagtccacttagcctcccgtcctccatcgctacccaccagtagggtcctgtacccttggggacagc

SEQ ID NO: 626713 - DNA, 120 bp, Artificial Sequence
  ENSG00000178927_49 (sequence is synthesized)
tgcacttgtgttgacgggacaccgtgtgaggagtggtgctggctgtacctcagcagctggggcccaccttttttgtgacacgccacagcctcctgtgtgttttgcatgacacgctgtgtt

SEQ ID NO: 626714 - DNA, 120 bp, Artificial Sequence
  ENSG00000178927_50 (sequence is synthesized)
ggaagtgcgcgcggccccgcccccgccggttcgcgtctctctgctgcggcgcggggaccgctgtgctctcggaagccatcttcgacaagagcacagggaaggttgttttgaagacgttca

SEQ ID NO: 626715 - DNA, 120 bp, Artificial Sequence
  ENSG00000178927_51 (sequence is synthesized)
ctcttttcagagctggccacgaccagggtgagtcgtggggagcgtggggacatgggacacggccacagaggcggcgcacttgggcgtctgggtgactcacggggcctagaggggggcctg

SEQ ID NO: 626716 - DNA, 120 bp, Artificial Sequence
  ENSG00000178927_52 (sequence is synthesized)
gtccgcaggtgcagtctggccccagcggcaggtcacaggacggggcagggagagccatggcagcccgtgggcgttctggagtggggccacctggcttcttgcgggccttggcgctgctcc

SEQ ID NO: 626717 - DNA, 120 bp, Artificial Sequence
  ENSG00000178927_53 (sequence is synthesized)
agctttcctgtgggttctactgggcctgcagtaggggctggatggtccgaggaactccccacccttgagcctgggcactggcccagctgtggtcagtaccagtttcctgtagatgctgcc

SEQ ID NO: 626718 - DNA, 120 bp, Artificial Sequence
  ENSG00000178927_54 (sequence is synthesized)
ctgttccgtgtcccgccgtgcccgtcgcgggcggcctcgcgcctgttccgctgcaggaaacggggtctctgggggatccagtgacgtgcccaaccacagagaccagacccctcctcctgt

SEQ ID NO: 626719 - DNA, 120 bp, Artificial Sequence
  ENSG00000178927_55 (sequence is synthesized)
gttcgcgtctctctgctgcggcgcggggaccgctgtgctctcggctggagtccagtggcacgatttctgctcactgcagcctccacctcccggcctcaggaaacggggtctctgggggat

SEQ ID NO: 626720 - DNA, 120 bp, Artificial Sequence
  ENSG00000178927_56 (sequence is synthesized)
ggcgaccagagttgctgggcagtcttgggtttagtgccgcaatgctgcacttctgacaggctgcttcctggatccctgcagggacctggccagggcattggccccaggtcacctgtggct

SEQ ID NO: 626721 - DNA, 120 bp, Artificial Sequence
  ENSG00000178927_57 (sequence is synthesized)
ttggggagagcagttgcagggctggcctgggctgtgggaggcagctgtgccgttttctgacagccattgggaccgccccagtacccgaagaggtggctgccctgagttgccacgggaaac

SEQ ID NO: 626722 - DNA, 120 bp, Artificial Sequence
  ENSG00000178927_58 (sequence is synthesized)
tgcagggtggccctggctcagcagccaaccttggggagacctggaggaacagtgcagtgtaaagatggcctcgcgctgagcgggtccccgcagtcggcactcccaggagaaccagcgggc

SEQ ID NO: 626723 - DNA, 120 bp, Artificial Sequence
  ENSG00000178927_59 (sequence is synthesized)
tgtgcatgtgacccgccagcctgcaccgcgggcacgtccttcccacccagaggaccctgcactgccttcagggccacagcagtcctccggggcccagcctcaggcaggaaacagcaaatg

SEQ ID NO: 626724 - DNA, 120 bp, Artificial Sequence
  ENSG00000178927_60 (sequence is synthesized)
cttttgctgccaaccaagtgtggctgtcgctttcgatgatgccagtggcgctggtgcgactgccgggcagcatgtgtgggcggggatggctcggccactgaccgtctccccgcagtggtg

SEQ ID NO: 626725 - DNA, 88 bp, Artificial Sequence
  ENSG00000178928_0 (sequence is synthesized)
gctcataggaggatggggccctgtctgtcttgttctcagctgtattcccagtacctaggactgtcccagacacacagcagccctcccc

SEQ ID NO: 626726 - DNA, 120 bp, Artificial Sequence
  ENSG00000178928_1 (sequence is synthesized)
cagtacctaggactgtcccagacacacagcagccctcccctggccctggaccctccaaggagacagcggcaggagcgcacggtctacactgaaagccagcagaaagtgctagaattttac

SEQ ID NO: 626727 - DNA, 120 bp, Artificial Sequence
  ENSG00000178928_2 (sequence is synthesized)
tttcagaaggaccagtacccgaactacgaccagcgactgaatctggcggagatgctcagcctcagggagcaacagctgcaggtgtggttcaagaatcgccgcgccaaactagctcgggag

SEQ ID NO: 626728 - DNA, 120 bp, Artificial Sequence
  ENSG00000178928_3 (sequence is synthesized)
cggcggctccagcagcagccccagcgcgtccctgggcagagaggccgaggagcccgcgctgcgcccctagtccctgcagcctctgcctccgcacctcagcggggcccctcgggaatcctt

SEQ ID NO: 626729 - DNA, 120 bp, Artificial Sequence
  ENSG00000178928_4 (sequence is synthesized)
ccagcggcggaacccacgatctgcagcctccaccaggcctggggtggccctgggtgcagagcccagaagggcatcccagctgccctgagtccaggccctggcccgatccctgccccaatc

SEQ ID NO: 626730 - DNA, 120 bp, Artificial Sequence
  ENSG00000178928_5 (sequence is synthesized)
ccaggcccagcccagatcccaggcccactccctggctcaattccaggcccaattccaggcccagctcagatcccaagcccgatcccagccccaatcccaggcccaatttcaggcccagtc

SEQ ID NO: 626731 - DNA, 120 bp, Artificial Sequence
  ENSG00000178928_6 (sequence is synthesized)
cagatcccaggcccattccgtggcccaatcccaggcccaatttcaggcccagccccgatcccaggcccaatctcaggcccattctcaggcccaaacccaggcccgatcccaggcccaaac

SEQ ID NO: 626732 - DNA, 120 bp, Artificial Sequence
  ENSG00000178928_7 (sequence is synthesized)
ccaggcccgatcccaggcccaatctcaggcccgatcccaggcccaatctcagtcccgatcccaggcccgatcccaggcccaatctcaggcccaatctcaggcccaaacccaggcccgatc

SEQ ID NO: 626733 - DNA, 120 bp, Artificial Sequence
  ENSG00000178928_8 (sequence is synthesized)
caatctcaggcccgaacccaggcccgatcccaggcccaatctcaggcccgaacccaggcctgatcccaggcccaatcccaggcccaatctcaggcccaggcccaattataggcccgattc

SEQ ID NO: 626734 - DNA, 120 bp, Artificial Sequence
  ENSG00000178928_9 (sequence is synthesized)
ccagcccagcccagatcccaggcccaggcagactccaaggcccaggtcccatcttaagtcctggccggatgcgaagccctggctcacttccaggcctagccccgattttaggcccaggct

SEQ ID NO: 626735 - DNA, 120 bp, Artificial Sequence
  ENSG00000178928_10 (sequence is synthesized)
caggcccaggctcaggctcagtcccagctccaatcccaggcccaggatcactcccagccccagcccccttatggcctcagagccccgatgcctccgacttcttgccagacacccagttat

SEQ ID NO: 626736 - DNA, 120 bp, Artificial Sequence
  ENSG00000178928_11 (sequence is synthesized)
tccctcacttcacagagctgctcctacccctagaccccttggagggatcctcagtctccaccatgacctctcagtaccaagaaggggatgactctatgggcaaaaaacactcagggtctc

SEQ ID NO: 626737 - DNA, 120 bp, Artificial Sequence
  ENSG00000178928_12 (sequence is synthesized)
agccccaagaggagggtggctctgtgaatgaaaatcactcaggccccaggttattactggatttatagggggcctgtgcctgcaaagttcttcagatcccagagggcctggagtggctga

SEQ ID NO: 626738 - DNA, 120 bp, Artificial Sequence
  ENSG00000178928_13 (sequence is synthesized)
tctacactgctggtgactttctgcagtgaatgcatcaccctttacccaccctgctgcaggtggacatttgctgtcttcactgtgcagctatcacaggtggctctgctgtgaatgtgcctg

SEQ ID NO: 626739 - DNA, 120 bp, Artificial Sequence
  ENSG00000178928_14 (sequence is synthesized)
cctgtcatttgaattgagcctgagcgtttctctgctgggattggagtcgctgctcactgggatatctggcattagtggatgctgctcgagagctttctaaagggcttttcccagggcttc

SEQ ID NO: 626740 - DNA, 120 bp, Artificial Sequence
  ENSG00000178928_15 (sequence is synthesized)
tgatggtcagcatcttccccaacacttaggattgtgagactttttaatgtttgtcgatccaatgacttgtggttttgttgtggttgtaatatccatttccctgatgattgagaagttaaa

SEQ ID NO: 626741 - DNA, 120 bp, Artificial Sequence
  ENSG00000178928_16 (sequence is synthesized)
ccctcacatgttaattgaaccttagatatcttcataatgtgtatttgtttaccccttttccttcatttatttgaatgtattcttatattctcttggcaattaaagttctgcagacacctt

SEQ ID NO: 626742 - DNA, 120 bp, Artificial Sequence
  ENSG00000178934_0 (sequence is synthesized)
ccacggctgcccaacccggtcccagccatgtccaacgtcccccacaagtcctcactgcccgagggcatccgccctggcacggtgctgagaattcgcggcttggttcctcccaatgccagc

SEQ ID NO: 626743 - DNA, 120 bp, Artificial Sequence
  ENSG00000178934_1 (sequence is synthesized)
aggttccatgtaaacctgctgtgcggggaggagcagggctccgatgccgccctgcatttcaacccccggctggacacgtcggaggtggtcttcaacagcaaggagcaaggctcctggggc

SEQ ID NO: 626744 - DNA, 120 bp, Artificial Sequence
  ENSG00000178934_2 (sequence is synthesized)
gcgttcctttccagcgcgggcagcccttcgaggtgctcatcatcgcgtcagacgacggcttcaaggccgtggttggggacgcccagtaccaccacttccgccaccgcctgccgctggcgc

SEQ ID NO: 626745 - DNA, 120 bp, Artificial Sequence
  ENSG00000178934_3 (sequence is synthesized)
gcgtgcgcctggtggaggtgggcggggacgtgcagctggactccgtgaggatcttctgagcagaagcccaggcgggcccggggccttggctggcaaataaagcgttagcccgcagcgcga

SEQ ID NO: 626746 - DNA, 120 bp, Artificial Sequence
  ENSG00000178934_4 (sequence is synthesized)
ctcccagagtgctgggattacagggtgagccactgcacccagccaacatttcatttacttattcattcaaagtaaattgtagacatcggtattcctcaccctcaacatttcttggtctgg

SEQ ID NO: 626747 - DNA, 120 bp, Artificial Sequence
  ENSG00000178935_0 (sequence is synthesized)
agtagcgaccatttccattggcgttagggagtccttggagcgctgtgttgggaccgtggtggtgactggatccaggaggtcgagagtcgttcttctctttgcacagacgtgactctgcag

SEQ ID NO: 626748 - DNA, 120 bp, Artificial Sequence
  ENSG00000178935_1 (sequence is synthesized)
ctctttaacggcgcccgctgctctcaacccagcttaccccacgtggtcccatggcggcggccgcgctaaggttccccgttcagggcacagtgacttttgaagacgtggctgtgaaattta

SEQ ID NO: 626749 - DNA, 120 bp, Artificial Sequence
  ENSG00000178935_2 (sequence is synthesized)
cccaggaggaatggaatctccttagtgaggctcagagatgcctgtaccgtgatgtgacgctggagaacctggcacttatgtcctccctgggttgttggtgtggagtggaagatgaggcgg

SEQ ID NO: 626750 - DNA, 120 bp, Artificial Sequence
  ENSG00000178935_3 (sequence is synthesized)
caccttctaagcagagtatttatatacaaagagagactcaggtcaggactcctatggcaggtgtgtctcccaagaaggcccacccctgtgagatgtgtggcccgatcttgggagacattt

SEQ ID NO: 626751 - DNA, 120 bp, Artificial Sequence
  ENSG00000178935_4 (sequence is synthesized)
tgcatgtggcagatcatcagggaacacatcacaagcagaaactgcacaggtgtgaggcctgggggaataaattgtatgacagtggaaactttcatcagcaccagaatgagcacattggag

SEQ ID NO: 626752 - DNA, 120 bp, Artificial Sequence
  ENSG00000178935_5 (sequence is synthesized)
agaaaccctacagagggagtgttgaggaggcgttgtttgcgaagaggtgtaagttgcatgtgtcaggggagtcatctgtcttcagtgagagtgggaaagactttttgctcaggtcaggat

SEQ ID NO: 626753 - DNA, 120 bp, Artificial Sequence
  ENSG00000178935_6 (sequence is synthesized)
tactccagcaagaggccactcacactgggaagtcaaacagcaaaactgagtgtgtgtctctgtttcatgggggaaaaagccattacagctgtggaggatgcatgaaacattttagcacca

SEQ ID NO: 626754 - DNA, 120 bp, Artificial Sequence
  ENSG00000178935_7 (sequence is synthesized)
aagatatactcagtcagcacgagagactgctccctacagaagaaccttctgtgtggtgtgaatgtgggaaatcctctagcaaatatgacagcttcagtaatcatcaaggagttcacacta

SEQ ID NO: 626755 - DNA, 120 bp, Artificial Sequence
  ENSG00000178935_8 (sequence is synthesized)
gagaaaaaccttatacgtgtgggatatgtgggaaattatttaacagtaagtcccacctccttgtacaccagagaattcacactggagagaagccatatgagtgtgaggtttgtcagaaat

SEQ ID NO: 626756 - DNA, 120 bp, Artificial Sequence
  ENSG00000178935_9 (sequence is synthesized)
attgtgggaagtcatttacccacagctctacattccgtgttcataagagagttcacactggtcagaagccttatgagtgcagtgaatgtgggaaatcttttgccgaaagctccagtctca

SEQ ID NO: 626757 - DNA, 120 bp, Artificial Sequence
  ENSG00000178935_10 (sequence is synthesized)
ctaaacacaggagagttcacactggagaaaagccttacgggtgcagtgaatgtgaaaaaaaatttaggcaaatctcttcacttcgtcatcatcagagagttcacaaaagaaagggcttat

SEQ ID NO: 626758 - DNA, 120 bp, Artificial Sequence
  ENSG00000178935_11 (sequence is synthesized)
gagtgcagtgagtccagtctcattaaatattggagaatacacacctgagtaagatcctgtgattgcagcaaatgtggaaaatgtttacccaaaggtctgctctccttggatattggagag

SEQ ID NO: 626759 - DNA, 120 bp, Artificial Sequence
  ENSG00000178935_12 (sequence is synthesized)
ttcacactagagaagagtccttacaagtaaaataaatttgggcagttttgtagccacacctctgtattccttcaggattatagttaacactgaatgaaggccttactagtgtgacaaata

SEQ ID NO: 626760 - DNA, 120 bp, Artificial Sequence
  ENSG00000178935_13 (sequence is synthesized)
actagtgtgacaaatacaggatatttatccagaagtctggctgcataactcacaggagagctgtcatgtgggaggattgctacatgggaggatttgcttgagcctgggaggcagaggttg

SEQ ID NO: 626761 - DNA, 120 bp, Artificial Sequence
  ENSG00000178935_14 (sequence is synthesized)
caacactgcagtccagtctggaccacagagtgagaccctgtttcaaaaataaaatatataaatgacatccaataaagtatgcatatttgagctgtaggataagtcttgaattttcttttt

SEQ ID NO: 626762 - DNA, 67 bp, Artificial Sequence
  ENSG00000178935_15 (sequence is synthesized)
gcatatttgagctgtaggataagtcttgaattttctttttcttttttttgagacagcgccctgcctc

SEQ ID NO: 626763 - DNA, 72 bp, Artificial Sequence
  ENSG00000178935_16 (sequence is synthesized)
cctccctaatagctgggactacaggcaaccaccaccactcctacagttctcaatctcctgacctcgtgatct

SEQ ID NO: 626764 - DNA, 120 bp, Artificial Sequence
  ENSG00000178935_17 (sequence is synthesized)
gtgttgggattgcaggcgtgagccactgctcctggcttgaattttcttataatcccatgaaaccatcatcagagtcacaataatgaatttatctaatctatcacctttgtattcacctgg

SEQ ID NO: 626765 - DNA, 120 bp, Artificial Sequence
  ENSG00000178935_18 (sequence is synthesized)
tcacctggagcctttataaagtttttctctatgcagacaaccattgatttactctgctgtataatactttccattttctagaattttctgactgatgtaataaagtgtttcctcttataa

SEQ ID NO: 626766 - DNA, 120 bp, Artificial Sequence
  ENSG00000178935_19 (sequence is synthesized)
tagtcacacaagtcctaaagcagcgagggagcggcacctgtttacggctctgcaacccggacccggcgtcgggacactgaggcgctctcgggagggatccctgtttcagacacccgtggg

SEQ ID NO: 626767 - DNA, 120 bp, Artificial Sequence
  ENSG00000178935_20 (sequence is synthesized)
cctgggtaagttgcccacactcacccctgtgacctgagctagtctctgtctttccccctctttttctattggcaagactttctcatgtcaggagcatggacacagcttcctacttcagtt

SEQ ID NO: 626768 - DNA, 120 bp, Artificial Sequence
  ENSG00000178935_21 (sequence is synthesized)
cttggttggtaggactgaggtatgcatactgccctctccattcttggagcagccccaacacctgctattgagctcccagggaagaattcagagtcagaagtcttacaggcaacttaatgc

SEQ ID NO: 626769 - DNA, 120 bp, Artificial Sequence
  ENSG00000178935_22 (sequence is synthesized)
aagacgtggctgtgaaatttacccaggaggaatggaatctccttagtgaggctcagagatgcctgtaccgtgatgtgacgctggagaacctggcacttatgtcctccctggggaaagaaa

SEQ ID NO: 626770 - DNA, 120 bp, Artificial Sequence
  ENSG00000178935_23 (sequence is synthesized)
agtagaagagaaagaaaccaaaaacagcaagcgcagagccaaacagccaggcaggcaggccaaaggttaagtccctctccccagccctgcggtttgtgaaaaagagggtgggcaccggct

SEQ ID NO: 626771 - DNA, 120 bp, Artificial Sequence
  ENSG00000178947_0 (sequence is synthesized)
gcctgagccccgctcggccttgggaacacgggggcggggcggccgcggctctgggcgacccgctgggtgcactagtgctcgggtcccaccgccctgaggctcgcgctcgagcgggtcagt

SEQ ID NO: 626772 - DNA, 120 bp, Artificial Sequence
  ENSG00000178947_1 (sequence is synthesized)
gggtgcactagtgctcgggtcccaccgccctgaggctcgcgctcgagcgggtcagtcggtcggcggggcctgcgcggggcccgggcccatggcggcgtcggcggctctgtctgcagcggc

SEQ ID NO: 626773 - DNA, 120 bp, Artificial Sequence
  ENSG00000178947_2 (sequence is synthesized)
gcctggcggtgcggctgtcgcgctcagctgcggcccgaggctcgtacggcgccttctgcaaggggctcacgcgcacgctgctcaccttcttcgacctggcctggcggctgcgcatgaact

SEQ ID NO: 626774 - DNA, 120 bp, Artificial Sequence
  ENSG00000178947_3 (sequence is synthesized)
tcccctacttctacatcgtggcctcggtgatgcttaacgtccgcctgcaggtgcggatcgagtgagcgccggcggcggcggcggcgaaggcccggctgaaggggcgcccgtgtccccgcc

SEQ ID NO: 626775 - DNA, 120 bp, Artificial Sequence
  ENSG00000178947_4 (sequence is synthesized)
gccggcatgaaggaaagctgggccgcggcggggggcggaggcggggcggctcggacccctggactctagacctacgccgccagggcacgacggcccagccctggccccggctgcggtctc

SEQ ID NO: 626776 - DNA, 120 bp, Artificial Sequence
  ENSG00000178947_5 (sequence is synthesized)
ccccggctgcggtctcagcccgggggccctggatcgcgcagaaacgcactgaatgggcccctgccatcgggctccagaaactacctgggctcggccgacctgttgcctcatattggccaa

SEQ ID NO: 626777 - DNA, 120 bp, Artificial Sequence
  ENSG00000178947_6 (sequence is synthesized)
agagggggaaaccagaaggagggaattctgctgcggcgacttgactttccaggcccggagcagaaaggcattggcatttgtaggcggtgacccgccccttctctggccttgccaagagtc

SEQ ID NO: 626778 - DNA, 120 bp, Artificial Sequence
  ENSG00000178947_7 (sequence is synthesized)
acatccctgcccaggggcacctctggccctggaacttgcctgggcagaggcagcgtgaagggcctgaacaagaggagaagaagggccttcctagtagaggcacagcatggacaaaggctc

SEQ ID NO: 626779 - DNA, 120 bp, Artificial Sequence
  ENSG00000178947_8 (sequence is synthesized)
acaggggtgggggtgcccagtgatcgagtcctggcttgggaaggaaggtctgagttccctgggaactgaaatctgctagcagcactgtgagagaggtgtatttccccctcctaatgacag

SEQ ID NO: 626780 - DNA, 120 bp, Artificial Sequence
  ENSG00000178947_9 (sequence is synthesized)
aggaaactgaggcttcagggaggggtggatttgcccttgacatgcagataggaggaggaggaactgcgtgtgcccctgggcctgcaggcccccacacccctccccagtcttcttcaagac

SEQ ID NO: 626781 - DNA, 120 bp, Artificial Sequence
  ENSG00000178947_10 (sequence is synthesized)
ctggcatggtgggaggagggagggggaagtggagaggggagcatagggctcctggggcaccaagggagagaggggcccaggggtagggaatctaggaatgtcgctttccttggagcagta

SEQ ID NO: 626782 - DNA, 120 bp, Artificial Sequence
  ENSG00000178947_11 (sequence is synthesized)
cggaaagtcacagggaagatcaggaggacggacagctgagatgggagacaggagagatgagccccaggacccctggggagccaagctgtcccccacatcctagcctctcaccccacctgg

SEQ ID NO: 626783 - DNA, 120 bp, Artificial Sequence
  ENSG00000178947_12 (sequence is synthesized)
agcttcaccaagggctcctcagcagtgaagtggcacaagcctcccagtttggtgggcaagtgggggtgatcttggtgttgtggctcctggagacacgacataaccaggagggtgaaggga

SEQ ID NO: 626784 - DNA, 120 bp, Artificial Sequence
  ENSG00000178947_13 (sequence is synthesized)
taaacctggggtgggctggggctgagacccatggcatgaccccaattctctctcctcaagctcgaccccccatccccaggatcacacaggagaatctcatcctcacggcttggattgctc

SEQ ID NO: 626785 - DNA, 120 bp, Artificial Sequence
  ENSG00000178947_14 (sequence is synthesized)
ctgggggccccctggtgtgctgctaactggtgtacaatgctcaggagcagcccagaggggagccgggaagggaccctcgcccttaccatctatccccatttccgcatctcttgcactggt

SEQ ID NO: 626786 - DNA, 120 bp, Artificial Sequence
  ENSG00000178947_15 (sequence is synthesized)
accccgggcgccacgttctcagttcctgggactgaaaactgcagcagtctggccagctccagggacagagtggcccagccacctactatgtaccctcctcagctgcccactggactcagg

SEQ ID NO: 626787 - DNA, 120 bp, Artificial Sequence
  ENSG00000178947_16 (sequence is synthesized)
tcctgaatgaagctgtccgcctgcctcatgccagaagcggctggacagtggctgcctcatgacccttgcagtctcccacatccagggcctgatgacatgcccccttgtcccaagtttctt

SEQ ID NO: 626788 - DNA, 120 bp, Artificial Sequence
  ENSG00000178947_17 (sequence is synthesized)
gggaacccctgaccctgctggcccctctcatccaccccaaccctatccaccctggaccacctctgggggtctgtcagcctgctggtccccccaacagatctttgggggcagcctctatgg

SEQ ID NO: 626789 - DNA, 120 bp, Artificial Sequence
  ENSG00000178947_18 (sequence is synthesized)
gacaagagtgacacagggctggagaagaggagtgaggagcctccttgtgtctgatgcacagatgtggccctttcaaaccctggtgtcaccctctgggtgactggatccccagctccagcc

SEQ ID NO: 626790 - DNA, 120 bp, Artificial Sequence
  ENSG00000178947_19 (sequence is synthesized)
tcttcctgggccagccaggaaggctggaggaaagctctttgctgagtgcatgcatgggagtgtggggggtgactgagccctccccatgcaaggggcttggcctgggaccctggaagctgt

SEQ ID NO: 626791 - DNA, 120 bp, Artificial Sequence
  ENSG00000178947_20 (sequence is synthesized)
ttccctactgggataaagttgcgtcagccgcaggggtctctgccctcaaagaccccccactgcagggagccccaccccataagagggtcacggaagtccatgtccgcccacccccagtgg

SEQ ID NO: 626792 - DNA, 120 bp, Artificial Sequence
  ENSG00000178947_21 (sequence is synthesized)
tcctgtccctgctttttcacccctgctgcctgaagtggtagccccgcctgctgcttctccacctcccctccccacctcttctctcccagatggggcccttgctgcgtgacggggtctcca

SEQ ID NO: 626793 - DNA, 120 bp, Artificial Sequence
  ENSG00000178947_22 (sequence is synthesized)
tgcgctttatttatttgcagtctgttttctaggcggtggagctagacactgaccggaatgacatacttttctgtgtgtgattcactgtgtactggtcagcacaggctggccagagagctg

SEQ ID NO: 626794 - DNA, 120 bp, Artificial Sequence
  ENSG00000178947_23 (sequence is synthesized)
ttcttgtttctggtgttgtcacgtcttcttgttttctctaagtttaaaaaaaagtccttggtttaatacactaaaatcccaactggaggcctcccgtgtctggtgggggtgatgcagtgg

SEQ ID NO: 626795 - DNA, 120 bp, Artificial Sequence
  ENSG00000178947_24 (sequence is synthesized)
ccccgggtggagaggccccatggtgaggtcaccagctcccatggccaggagttggcagggagaagcctctgagggctagggctgggggaggctgtggcagggaccgtgtttcctgttcag

SEQ ID NO: 626796 - DNA, 120 bp, Artificial Sequence
  ENSG00000178947_25 (sequence is synthesized)
aggctgtgctgagaaccgacttgacctggaccactgccccatgagaagcaggcagcatcctagcctggccccgagaggtagctgcttgttctgttgacaacctttgttcaacgacccaaa

SEQ ID NO: 626797 - DNA, 120 bp, Artificial Sequence
  ENSG00000178947_26 (sequence is synthesized)
acataagtccctttcctttttagagtctggcgatcaaaagtgtcttaagtcagtagaatcctgagggtggactagggtgaagtgaactgaaacagactcgacacaggtcattttgtgtag

SEQ ID NO: 626798 - DNA, 120 bp, Artificial Sequence
  ENSG00000178947_27 (sequence is synthesized)
cactgagactcctctccctgcctgaggccacctcccactgcctccctaccagcaaggttactgcagaatcttggagaagataaaggacctggccctggaagcctgcttccctttcccaac

SEQ ID NO: 626799 - DNA, 120 bp, Artificial Sequence
  ENSG00000178947_28 (sequence is synthesized)
cttggaagcaaattctgtcccatcagagcccccctccctagtggctcccaccagagacctccctagtggctgctgtaagggttggcaagcaggcaaaaggcgggggagggagggcagagg

SEQ ID NO: 626800 - DNA, 120 bp, Artificial Sequence
  ENSG00000178947_29 (sequence is synthesized)
gtagtgttagaggaagccccatagggcccctgggtgggggtggggaggcatcctgaggacacagggctatgctcagacttaggagtgaagactgggtttaggggccctgggggcactcct

SEQ ID NO: 626801 - DNA, 120 bp, Artificial Sequence
  ENSG00000178947_30 (sequence is synthesized)
gttgccaagggctacccaggggtcagagcatcctgacaaggaggacccgtccaaacgcactggtgctaatgccctatggcatctgccaccacaggagaaatggaccccagtccttgatct

SEQ ID NO: 626802 - DNA, 120 bp, Artificial Sequence
  ENSG00000178947_31 (sequence is synthesized)
tccctcccctttgtctagatggtcctctttatccccactccagggatcacatgacttggcaaagcaagatgggaaatgatcctcccagagcctggctccaaggcttcttgaagagggagg

SEQ ID NO: 626803 - DNA, 120 bp, Artificial Sequence
  ENSG00000178947_32 (sequence is synthesized)
atcacccctcccatccctgctacagaggaaaaggcaggaaggccggttctgctccgatgggactccaggagaccaaagccctgagccctgagcccagctcttccacttactactgtgtgg

SEQ ID NO: 626804 - DNA, 120 bp, Artificial Sequence
  ENSG00000178947_33 (sequence is synthesized)
tgccaggcaagctgtgcacaacctggagtttttagtaaggttccgttgggatgcttgtaagcagtgaatacgatgatgtctgttcattgtttgtcatcaggtctcacctggagcagcctt

SEQ ID NO: 626805 - DNA, 120 bp, Artificial Sequence
  ENSG00000178947_34 (sequence is synthesized)
gttactgtggggaaaaggaaccaagtgaagggaatcggcctctgatgagagcctgccatgtgccaggcaccatactaggtgctttgcattcctaatctcatcattatcacacaaccacct

SEQ ID NO: 626806 - DNA, 120 bp, Artificial Sequence
  ENSG00000178947_35 (sequence is synthesized)
aaccattatccctgttttacagagaaaccaaagacaggaaccaagtctgaaacagagccccaagaagaagctcttttcctgagctaccagtgccccttggagaggcagggaattgggctg

SEQ ID NO: 626807 - DNA, 120 bp, Artificial Sequence
  ENSG00000178947_36 (sequence is synthesized)
gaagaatggtggaatggaatagcaaagatggaagatgaccctgtcctttctgggtgaggtccagaagaaatccagggcttggatgaggggtagacctgagagccttctccaaatggaact

SEQ ID NO: 626808 - DNA, 120 bp, Artificial Sequence
  ENSG00000178947_37 (sequence is synthesized)
ccccagtgggagcagctgtggccaccctgagatgggtctacctgtcttccttccattccacctccagagattgattgggacctaagagactgagtcaggagagggcaagaaagcagctaa

SEQ ID NO: 626809 - DNA, 120 bp, Artificial Sequence
  ENSG00000178947_38 (sequence is synthesized)
gtgggaagtttcaggggcactagagcaaatacattgagaaatgggaaatacaaacagcatgcaaaatcacatcctactcctacccaccccactcccaagggaaattgctgggttttggac

SEQ ID NO: 626810 - DNA, 120 bp, Artificial Sequence
  ENSG00000178947_39 (sequence is synthesized)
gaattttcactttgtgtgcaccttttatgtatgtaaaactacaaacatactactttgaaatctgattccgctatttcatgtttgtcttaccatgttattatgtattttcctacatccaaa

SEQ ID NO: 626811 - DNA, 120 bp, Artificial Sequence
  ENSG00000178947_40 (sequence is synthesized)
gctacctagtatctcttttgtatgaaggtttcatcatgtatcccccagtgccctttggttgtttttctttgttgtcatttattttggtgggggttggtttgctttttgttgttgtttttc

SEQ ID NO: 626812 - DNA, 120 bp, Artificial Sequence
  ENSG00000178947_41 (sequence is synthesized)
cttgtttttataaatgatacagtgacagatgccgttgtggataaatgctgtggcatagtcatcaattccttgatatatattcctagaaagtgcaccaaagggtatgcatggcttagggct

SEQ ID NO: 626813 - DNA, 120 bp, Artificial Sequence
  ENSG00000178947_42 (sequence is synthesized)
tttgatactctccagagttgggataccaagtcacactactcactggagtcaggatgagagttttttgagacaatggtggcaattctgattcaatagattaaaaaatttattactaccttt

SEQ ID NO: 626814 - DNA, 120 bp, Artificial Sequence
  ENSG00000178950_0 (sequence is synthesized)
cgtcacggcgtcgaggcggaagatggtgcacctccgggccggcggttgctgagctgacccggacggcgagggagcgggagcccgagcccgaccactccggctgccgcggggtgcggcgca

SEQ ID NO: 626815 - DNA, 120 bp, Artificial Sequence
  ENSG00000178950_1 (sequence is synthesized)
gccaccgccatgtcgctgctgcagtcggcgctcgacttcttggcgggtccaggctccctgggcggtgcttccggccgcgaccagagtgacttcgtggggcagacggtggaactgggcgag

SEQ ID NO: 626816 - DNA, 120 bp, Artificial Sequence
  ENSG00000178950_2 (sequence is synthesized)
ctgcggctgcgggtgcggcgggtcctggccgaaggagggtttgcatttgtgtatgaagctcaagatgtggggagtggcagagagtatgcattaaagaggctattatccaatgaagaggaa

SEQ ID NO: 626817 - DNA, 120 bp, Artificial Sequence
  ENSG00000178950_3 (sequence is synthesized)
aagaacagagccatcattcaagaagtttgcttcatgaaaaagctttccggccacccgaacattgtccagttttgttctgcagcgtctataggaaaagaggagtcagacacggggcaggct

SEQ ID NO: 626818 - DNA, 120 bp, Artificial Sequence
  ENSG00000178950_4 (sequence is synthesized)
gagttcctcttgctcacagagctctgtaaagggcagctggtggaatttttgaagaaaatggaatctcgaggccccctttcgtgcgacacggttctgaagatcttctaccagacgtgccgc

SEQ ID NO: 626819 - DNA, 120 bp, Artificial Sequence
  ENSG00000178950_5 (sequence is synthesized)
gccgtgcagcacatgcaccggcagaagccgcccatcatccacagggacctcaaggttgagaacttgttgcttagtaaccaagggaccattaagctgtgtgactttggcagtgccacgacc

SEQ ID NO: 626820 - DNA, 120 bp, Artificial Sequence
  ENSG00000178950_6 (sequence is synthesized)
atctcgcactaccctgactacagctggagcgcccagaggcgagccctggtggaggaagagatcacgaggaatacaacaccaatgtatagaacaccagaaatcatagacttgtattccaac

SEQ ID NO: 626821 - DNA, 120 bp, Artificial Sequence
  ENSG00000178950_7 (sequence is synthesized)
ttcccgatcggcgagaagcaggatatctgggccctgggctgcatcttgtacctgctgtgcttccggcagcacccttttgaggatggagcgaaacttcgaatagtcaatgggaagtactcg

SEQ ID NO: 626822 - DNA, 120 bp, Artificial Sequence
  ENSG00000178950_8 (sequence is synthesized)
atccccccgcacgacacgcagtacacggtcttccacagcctcatccgcgccatgctgcaggtgaacccggaggagcggctgtccatcgccgaggtggtgcaccagctgcaggagatcgcg

SEQ ID NO: 626823 - DNA, 120 bp, Artificial Sequence
  ENSG00000178950_9 (sequence is synthesized)
gccgcccgcaacgtgaaccccaagtctcccatcacagagctcctggagcagaatggaggctacgggagcgccacactgtcccgagggccaccccctcccgtgggccccgctggcagtggc

SEQ ID NO: 626824 - DNA, 120 bp, Artificial Sequence
  ENSG00000178950_10 (sequence is synthesized)
tacagtggaggcctggcgctggcggagtacgaccagccgtatggcggcttcctggacattctgcggggtgggacagagcggctcttcaccaacctcaaggacacctcctccaaggtcatc

SEQ ID NO: 626825 - DNA, 120 bp, Artificial Sequence
  ENSG00000178950_11 (sequence is synthesized)
cagtccgtcgctaattatgcaaagggtgacctggacatatcttacatcacatccagaattgcagtgatgtcattcccagcagaaggtgtggagtcagcgctcaaaaacaacatcgaagat

SEQ ID NO: 626826 - DNA, 120 bp, Artificial Sequence
  ENSG00000178950_12 (sequence is synthesized)
gtgcggttgttcctggactccaagcacccagggcactatgccgtctacaacctgtccccgaggacctaccggccctccaggttccacaaccgggtctccgagtgtggctgggcagcacgg

SEQ ID NO: 626827 - DNA, 120 bp, Artificial Sequence
  ENSG00000178950_13 (sequence is synthesized)
cgggccccacacctgcacaccctgtacaacatctgcaggaacatgcacgcctggctgcggcaggaccacaagaacgtctgcgtcgtgcactgcatggacgggagagccgcgtctgctgtg

SEQ ID NO: 626828 - DNA, 120 bp, Artificial Sequence
  ENSG00000178950_14 (sequence is synthesized)
gccgtctgctccttcctgtgcttctgccgtctcttcagcaccgcggaggccgccgtgtacatgttcagcatgaagcgctgcccaccaggcatctggccatcccacaaaaggtacatcgag

SEQ ID NO: 626829 - DNA, 120 bp, Artificial Sequence
  ENSG00000178950_15 (sequence is synthesized)
tacatgtgtgacatggtggcggaggagcccatcacaccccacagcaagcccatcctggtgagggccgtggtcatgacacccgtgccgctgttcagcaagcagaggagcggctgcaggccc

SEQ ID NO: 626830 - DNA, 120 bp, Artificial Sequence
  ENSG00000178950_16 (sequence is synthesized)
ttctgcgaggtctacgtgggggacgagcgtgtggccagcacctcccaggagtacgacaagatgcgggactttaagattgaagatggcaaagcggtgattcccctgggcgtcacggtgcaa

SEQ ID NO: 626831 - DNA, 120 bp, Artificial Sequence
  ENSG00000178950_17 (sequence is synthesized)
ggagacgtgctcatcgtcatctatcacgcccggtccactctgggcggccggctgcaggccaagatggcatccatgaagatgttccagattcagttccacacggggtttgtgcctcggaac

SEQ ID NO: 626832 - DNA, 120 bp, Artificial Sequence
  ENSG00000178950_18 (sequence is synthesized)
aagtatgacctggacgcgtgtgacattcaagaaaaatacccggatttatttcaagtgaacctggaagtggaggtggagcccagggacaggccgagccgggaagccccaccatgggagaac

SEQ ID NO: 626833 - DNA, 120 bp, Artificial Sequence
  ENSG00000178950_19 (sequence is synthesized)
tcgagcatgagggggctgaaccccaaaatcctgttttccagccgggaggagcagcaagacattctgtctaagtttgggaagccggagcttccccggcagcctggctccacggctcagtat

SEQ ID NO: 626834 - DNA, 120 bp, Artificial Sequence
  ENSG00000178950_20 (sequence is synthesized)
gatgctggggcagggtccccggaagccgaacccacagactctgactcaccgccaagcagcagcgcggacgccagtcgcttcctgcacacgctggactggcaggaagagaaggaggcagag

SEQ ID NO: 626835 - DNA, 120 bp, Artificial Sequence
  ENSG00000178950_21 (sequence is synthesized)
actggtgcagaaaatgcctcttccaaggagagcgagtctgccctgatggaggacagagacgagagtgaggtgtcagatgaagggggatccccgatctccagcgagggccaggaacccagg

SEQ ID NO: 626836 - DNA, 120 bp, Artificial Sequence
  ENSG00000178950_22 (sequence is synthesized)
gccgacccagagccccccggcctggcagcagggctggtgcagcaggacttggtttttgaggtggagacaccggctgtgctgccagagcctgtgccacaggaagacggggtcgacctcctg

SEQ ID NO: 626837 - DNA, 120 bp, Artificial Sequence
  ENSG00000178950_23 (sequence is synthesized)
ggcctgcactccgaggtgggcgcagggccagctgtacccccgcaggcctgcaaggccccctccagcaacaccgacctgctcagctgcctccttgggccccctgaggccgcctcccagggg

SEQ ID NO: 626838 - DNA, 120 bp, Artificial Sequence
  ENSG00000178950_24 (sequence is synthesized)
cccccggaggatctgctcagcgaggacccgctgctcctggcaagcccggcccctcccctgagcgtgcagagcaccccaagaggagggccccctgccgctgctgacccctttggcccgctt

SEQ ID NO: 626839 - DNA, 120 bp, Artificial Sequence
  ENSG00000178950_25 (sequence is synthesized)
ctgccgtcttcaggcaacaactcccagccctgctccaatcctgatctcttcggcgaatttctcaattcggactctgtgaccgtcccaccatccttcccgtctgcccacagtgctccgccc

SEQ ID NO: 626840 - DNA, 120 bp, Artificial Sequence
  ENSG00000178950_26 (sequence is synthesized)
ccatcctgcagcgccgacttcctgcacctgggggatctgccaggagagcccagcaagatgacagcctcgtccagcaacccagacctgctgggaggatgggctgcctggaccgagactgca

SEQ ID NO: 626841 - DNA, 120 bp, Artificial Sequence
  ENSG00000178950_27 (sequence is synthesized)
gcatcggcagtggcccccacgccagccacagaaggccccctcttctctcctggaggtcagccggccccttgtggctctcaggccagctggaccaagtctcagaacccggacccatttgct

SEQ ID NO: 626842 - DNA, 120 bp, Artificial Sequence
  ENSG00000178950_28 (sequence is synthesized)
gaccttggcgacctcagctccggcctccaaggctcaccagctggattccctcctgggggcttcattcccaaaacggccaccacgcccaaaggcagcagctcctggcagacaagtcggccg

SEQ ID NO: 626843 - DNA, 120 bp, Artificial Sequence
  ENSG00000178950_29 (sequence is synthesized)
ccagcccagggcgcctcatggccccctcaggccaagccgccccccaaagcctgcacacagccaaggcctaactatgcctcgaacttcagtgtgatcggggcgcgggaggagcggggggtc

SEQ ID NO: 626844 - DNA, 120 bp, Artificial Sequence
  ENSG00000178950_30 (sequence is synthesized)
cgcgcacccagctttgctcaaaagccaaaagtctctgagaacgactttgaagatctgttgtccaatcaaggcttctcctccaggtctgacaagaaagggccaaagaccattgcagagatg

SEQ ID NO: 626845 - DNA, 120 bp, Artificial Sequence
  ENSG00000178950_31 (sequence is synthesized)
aggaagcaggacctggctaaagacacggacccactcaagctgaagctcctggactggattgagggcaaggagcggaacatccgggccctgctgtccacgctgcacacagtgctgtgggac

SEQ ID NO: 626846 - DNA, 120 bp, Artificial Sequence
  ENSG00000178950_32 (sequence is synthesized)
ggggagagccgctggacgcccgtgggcatggccgacctggtggctccggagcaagtgaagaagcactatcgccgcgcggtgctggctgtgcaccccgacaaggctgcggggcagccgtac

SEQ ID NO: 626847 - DNA, 120 bp, Artificial Sequence
  ENSG00000178950_33 (sequence is synthesized)
gagcagcacgccaagatgatcttcatggagctgaatgacgcctggtcggagtttgagaaccagggctcccggcccctcttctgaggccgcagtggtggtggctgcgcacacagctccaca

SEQ ID NO: 626848 - DNA, 120 bp, Artificial Sequence
  ENSG00000178950_34 (sequence is synthesized)
ggttgggagccgtcgtgggacctgggtccccaccgtgaggaccccgtgggcgacagcaggtgtggccagggtggggctccgagccccgggtcaccgcccgcccagcgttccaggcacatg

SEQ ID NO: 626849 - DNA, 120 bp, Artificial Sequence
  ENSG00000178950_35 (sequence is synthesized)
aagagaaagcattccaaagcctctgattgttgtttcctttttctcctcccgaaggaacagctgattcatgctcctcccgcaattgtcacgtctgtgatttatttggtgtttcgggcgtgg

SEQ ID NO: 626850 - DNA, 120 bp, Artificial Sequence
  ENSG00000178950_36 (sequence is synthesized)
cctctggagccccggcacgtggtgggccacgctgctggcgctcatgggccctggtgtttgcaccgcactttgtaatcagtcccgtggttgtctgtacagaattaaactattttccgatga

SEQ ID NO: 626851 - DNA, 120 bp, Artificial Sequence
  ENSG00000178950_37 (sequence is synthesized)
agacctcattgtgccctcagcgccaggctgggtgagccgagcctgcaggcccagtgcccagggccatctcaaggggcagctgggggagggaggctgggcatgagcggcactccctctggg

SEQ ID NO: 626852 - DNA, 120 bp, Artificial Sequence
  ENSG00000178950_38 (sequence is synthesized)
gctgcccaagttcggtctgtcccaggacccaagcccgtctggccgacctggctccctgcacactccctccctccgtgcccctcccactgtgcctctccgccctcggtcgtggccggtctg

SEQ ID NO: 626853 - DNA, 120 bp, Artificial Sequence
  ENSG00000178950_39 (sequence is synthesized)
agcctccgctgcggtggccgtcggattctctgctggtgcctgcaggctcctctgcagacgttgcctcctccacatctccacgccagctgtgccaccgctgtgcagtccctgccacccctg

SEQ ID NO: 626854 - DNA, 120 bp, Artificial Sequence
  ENSG00000178950_40 (sequence is synthesized)
acgacagacagcggcacgcaaagaggctcgggcgcagggggaagctcgtgttggccccggctggagtgcacatcagtcccggcttcggccgtggccacctccgcccagagccttgagtgg

SEQ ID NO: 626855 - DNA, 120 bp, Artificial Sequence
  ENSG00000178950_41 (sequence is synthesized)
ggttgcaccaccagaaccagggtttgtgtcctcggtgaacatctggctgagacgagggtccctctggccccaggccctgaaacatgaagaccacctggccctgtgtcgtccggagtgggc

SEQ ID NO: 626856 - DNA, 120 bp, Artificial Sequence
  ENSG00000178950_42 (sequence is synthesized)
tctatatagttgagggcagggcgtgcagtgggacagtgtctgtgagccgggctgagcccaccccacgtgaccaggcacttcctcagcgtcgtgcctcagtttccgcggtgcagaggagga

SEQ ID NO: 626857 - DNA, 120 bp, Artificial Sequence
  ENSG00000178950_43 (sequence is synthesized)
tttcttcatctcagagcccagtcctgggacaggcacggccaagccactcagagaacgacgcggtttccgatgtgtgttcactggtctctctctgggtcaggcctctgggtccctcttgtt

SEQ ID NO: 626858 - DNA, 120 bp, Artificial Sequence
  ENSG00000178950_44 (sequence is synthesized)
ccagtgacaccttcttgacctgtttttaacaaatggcctttgcaaccctgtcttgtcttccctcttctttactctggaggcatcaggatggtagccctgttcccgggggcagcaggtgga

SEQ ID NO: 626859 - DNA, 88 bp, Artificial Sequence
  ENSG00000178950_45 (sequence is synthesized)
catcaggatggtagccctgttcccgggggcagcaggtggaattgggcctgtgtgtctctgcagaaagtttctgttcttaactgggctt

SEQ ID NO: 626860 - DNA, 120 bp, Artificial Sequence
  ENSG00000178950_46 (sequence is synthesized)
gccgggaggcaaaggctgcagagagctgagatcacgccattgcactctggcctgggtgacagagtggagaccctgtctcaaacaaaaaaaagtttctgttcttttctagctcaaaagcca

SEQ ID NO: 626861 - DNA, 120 bp, Artificial Sequence
  ENSG00000178950_47 (sequence is synthesized)
gacccactcaagctgaaggtgggtgggtgggcagctcttcctgggagcccagaggcctcaacccatggcccctggagcatctgctgtgccttatggagccggcgtctccagacagcaacc

SEQ ID NO: 626862 - DNA, 120 bp, Artificial Sequence
  ENSG00000178950_48 (sequence is synthesized)
tttcacccctggagcatctgctgtaccacatggagccggcgtctccagacagggacctgtcactgccgatgggcctggcagccctcaaggacagggtggcctgaggccaggggggcaggg

SEQ ID NO: 626863 - DNA, 120 bp, Artificial Sequence
  ENSG00000178950_49 (sequence is synthesized)
cagagtcaggccccaggctgtgctgctccccacgtgcccagatggctcagcgctggtgggggtggggtgggcgggcgttacaggagtgagtgccccggggtgtttgcagagactgttgag

SEQ ID NO: 626864 - DNA, 120 bp, Artificial Sequence
  ENSG00000178950_50 (sequence is synthesized)
gcaggcgtctcttgggggctgctctgggtactgagcctcccaacccaggacgctcactggggggtgaggatgcagcggtcaggctgtcactgtgccggccctgagacacgccctgctctg

SEQ ID NO: 626865 - DNA, 120 bp, Artificial Sequence
  ENSG00000178950_51 (sequence is synthesized)
tggctttggcaggcacaggcctgcgtcaagctgtgaccgccagtggccaagaggctgctccgtgacgttgtctttcatgtgttaaaatcggctttttgcttttaccaaacctagttgtag

SEQ ID NO: 626866 - DNA, 120 bp, Artificial Sequence
  ENSG00000178950_52 (sequence is synthesized)
gcgacttctaggaagaagcagttttttctgttttttttttactgccagggtaatagtagaagattcagaagtgttgggaatgaagttgttcctacccaagaggtctccctgcccagtgga

SEQ ID NO: 626867 - DNA, 120 bp, Artificial Sequence
  ENSG00000178950_53 (sequence is synthesized)
accgtccatttgtgtgtgtgcatgcatgtgtactgtgcatccgagtgtgtgcatgtgtgtgtaccgtgcatctgtgtgcgtgcattcatgtgtaccctgcatctatgtgtgctgtgtgca

SEQ ID NO: 626868 - DNA, 120 bp, Artificial Sequence
  ENSG00000178950_54 (sequence is synthesized)
ttcatgtgtactgtgcctgtgtgtgtgcatttgtgtgtaccatgcatctctgctgtgtgtgcattcgtgtgtactgtgcatctgtgtgtactgtgtgcattcatgtgtactgtgcatctg

SEQ ID NO: 626869 - DNA, 120 bp, Artificial Sequence
  ENSG00000178950_55 (sequence is synthesized)
tgtgtgctgtgtgtgcattcatgtgtaccctgcatgtgtgtatgtgctgtgtgtgcattcgtgtgtactgtgcatctgtgtgtgtgcattcatgtgtaccctgcatgtgtgtatgtgctg

SEQ ID NO: 626870 - DNA, 120 bp, Artificial Sequence
  ENSG00000178950_56 (sequence is synthesized)
tgtgtgcattcgtgtgtactgtgcatctgtgtgtgtgcattcatgtgtaccctgcatgtgtgtatgtgctgtgtgtgcattcgtgtgtactgtgcatctgtgtgtgtgcattcctgtgta

SEQ ID NO: 626871 - DNA, 120 bp, Artificial Sequence
  ENSG00000178950_57 (sequence is synthesized)
ccatgcatctgtgtgtgctgtgtgtgcattcctgtgtactgtgcatttgtgctgtgtgtgcattcatgtgtaccgtgcatctgtgtgtgctttgcattcgtgtgtaccctgcatgtgtgt

SEQ ID NO: 626872 - DNA, 120 bp, Artificial Sequence
  ENSG00000178950_58 (sequence is synthesized)
atgtgctgtgtgtgcattcgtgtgtactgtgcatctgtgtgctgtgtgtgcattcatgtgtactgtgcatctgtgtgtgtgctgtgtgtgcattcatgtgtaccctgcatctgtgtgtgt

SEQ ID NO: 626873 - DNA, 120 bp, Artificial Sequence
  ENSG00000178950_59 (sequence is synthesized)
gctgtctgtgcatccgtgtgtaccatgcatctgtgtgtgcattcatgtgtactgtgcatctgtgtgtgctgtgtgtattcatgtgtaccctgcatctatgtgtgtgctgtctgtgcattc

SEQ ID NO: 626874 - DNA, 120 bp, Artificial Sequence
  ENSG00000178950_60 (sequence is synthesized)
gtgtatactgtgcatctgtgtgtgctgtgtgtgcattcgtgtgtaccctgcatctgtgtgtgtgcatttgtgtgtactgtgcgcctgtgtgtgtgctctatgcattcgtgtgtaccgtgc

SEQ ID NO: 626875 - DNA, 120 bp, Artificial Sequence
  ENSG00000178950_61 (sequence is synthesized)
agctgtgtgtgtgcattcatgtgtaccctgcatatgtgtggcgtttgatgcctcagtggtgggttccttgtgcgtgttcatgtgtgcgtgtgctgtgcccaagtgtgcacgcatggccca

SEQ ID NO: 626876 - DNA, 120 bp, Artificial Sequence
  ENSG00000178950_62 (sequence is synthesized)
gagtggcatccgagtggatagcaggaatctgttcagagagcccctccccgtcatgtcattggtctgctttaccgatggcctggcctgccacggtgctggcgcccgcctggctgcacttcc

SEQ ID NO: 626877 - DNA, 120 bp, Artificial Sequence
  ENSG00000178950_63 (sequence is synthesized)
tgtgggttcgggtggacacagccacgccgcagcctccctgcgcacagccccctgagggccctgcctcctcctgccacgcgcgggatggactttggtgtcgctgtggtcagtgcacagaac

SEQ ID NO: 626878 - DNA, 120 bp, Artificial Sequence
  ENSG00000178950_64 (sequence is synthesized)
agatgccgtctatcaggctggggaggtttctttctgtcctcgtttgctgagagttttaaatttcatgatgtagtttttccactgcagaaacctaaaagaaaactaagcaaattagacccc

SEQ ID NO: 626879 - DNA, 120 bp, Artificial Sequence
  ENSG00000178950_65 (sequence is synthesized)
aaaacaatagaattaaattgattttcaaatgttaaaccaactctgctcctgatgtcttggtgggcttggtttgctgttttatgaagaattcttgggtccacattcgtgagtgatgttgga

SEQ ID NO: 626880 - DNA, 120 bp, Artificial Sequence
  ENSG00000178950_66 (sequence is synthesized)
tctgtctcaaaaaaaaaaaaagaaaatgggcaagagacatgaagagacctccagcacattgacatccgatggccaggaagcacaggctgagacacccagcatcaccgaatgctggcgcgg

SEQ ID NO: 626881 - DNA, 120 bp, Artificial Sequence
  ENSG00000178950_67 (sequence is synthesized)
gcggaggaggccggagcgcggaggaggcccgaacacggaggaggctggagcgtgtgtctcacgcattgcccggggggcgagccgcgtgcctcatgccttgccggggggacttgccggggg

SEQ ID NO: 626882 - DNA, 120 bp, Artificial Sequence
  ENSG00000178950_68 (sequence is synthesized)
acgagccgcgtgcctcacgccttgccggggggacgagccgcgtgtctcgcgcattgccccgggggcgagctgtgtctcatgcattgccagggttgagccgtgtctctcaggcattcccag

SEQ ID NO: 626883 - DNA, 120 bp, Artificial Sequence
  ENSG00000178950_69 (sequence is synthesized)
ggagtgacaagtggcagggccgctctggagaacaggtggtcggtttcctacgaagctaaacacacagctactgagctaccgtgggacatttatcccagagaaacggaaactctcattcac

SEQ ID NO: 626884 - DNA, 120 bp, Artificial Sequence
  ENSG00000178950_70 (sequence is synthesized)
acacaagtccgtaacaggcgttcagagacgtgtctgttgtagccaaacagtggcatcaacccaggtgtcctacaggtgaacggttcaataggtggtctgcacaccacgagatggcccttg

SEQ ID NO: 626885 - DNA, 120 bp, Artificial Sequence
  ENSG00000178950_71 (sequence is synthesized)
gcagggagggggagtggcggatgccccgagccctagtgaagagtgccagtccagaggctgcagctgttggtccccttctagaacataactaagatgacagtctgggcatggtggctcaca

SEQ ID NO: 626886 - DNA, 120 bp, Artificial Sequence
  ENSG00000178950_72 (sequence is synthesized)
cctaccatcccagccctgtgggaggtgaggccagcgggtctcttaagcctaggagtttgagaccagccatagtgagaccatctccaaaaaaaaaaaaagatgacagaactgtagtgaagc

SEQ ID NO: 626887 - DNA, 120 bp, Artificial Sequence
  ENSG00000178950_73 (sequence is synthesized)
attcaggtcgtgattgctgtggtgctgagaggaatccgtggtgcggtcagtggcgcggccccgcactcacacacacgagtccagctggccacgtctggtgcatctgtaggtggcgcggct

SEQ ID NO: 626888 - DNA, 120 bp, Artificial Sequence
  ENSG00000178950_74 (sequence is synthesized)
gcccgggctcagtgcttctctgaggttatgagagacgccctccctgggggatgctgggcgcaggtgctcagggtatttacagcttcctgctattctgattattccaaaataaaaagttaa

SEQ ID NO: 626889 - DNA, 62 bp, Artificial Sequence
  ENSG00000178950_75 (sequence is synthesized)
accatcctggctaacatggtgaaatcccacctctactaaaaaatacaaaaaaaattaaccgt

SEQ ID NO: 626890 - DNA, 120 bp, Artificial Sequence
  ENSG00000178950_76 (sequence is synthesized)
gcgagattccgtctcaaaaaaaaaaagttacgggatcagccctgatttgatgtgctgcgagaggcagtggccacgtgacagatggtggtggccctctaggacgctacagacgtggggaca

SEQ ID NO: 626891 - DNA, 120 bp, Artificial Sequence
  ENSG00000178950_77 (sequence is synthesized)
gtggtggccctctaggacgctacagacgtggggacactgccccaacccccgtggacaagccccgggtctgccttggctcctgggggtgacgtggggacactgccccaacccccgtggaca

SEQ ID NO: 626892 - DNA, 120 bp, Artificial Sequence
  ENSG00000178950_78 (sequence is synthesized)
agccctgggtctgccttggctcctgggggtggggtgctgcctccacagctgccctgtcctggtgtctgccctccatccagagtgttcccgtcgccccagcacctggcctgtgctccagcc

SEQ ID NO: 626893 - DNA, 120 bp, Artificial Sequence
  ENSG00000178950_79 (sequence is synthesized)
gtgcctccctggagagcgcaggggaaggggcagtcagacagcggatgtctctcctgtctcacccatgcctccaccagctgcaggctgtcatttccatccgtttctgatgtaggggtcagc

SEQ ID NO: 626894 - DNA, 120 bp, Artificial Sequence
  ENSG00000178950_80 (sequence is synthesized)
tccacagcacgcacacagccgggaagctgcccacacgcctgtgcacacacacgttcctcctgggatgcggcctctacagtgagagccccacggcttctccaggcctcgggctctggctta

SEQ ID NO: 626895 - DNA, 120 bp, Artificial Sequence
  ENSG00000178950_81 (sequence is synthesized)
tcagctccggcctccaagacccccaagcccagagcacagtgagcccaaggggacagcgtgtctgcacctgttccaggcgactgccaactggcaagctaaaaccgggagttgctgacactg

SEQ ID NO: 626896 - DNA, 120 bp, Artificial Sequence
  ENSG00000178950_82 (sequence is synthesized)
actaccctgactacagctggagcgcccagaggcgagccctggtggaggaagaggccctgggctgcatcttgtacctgctgtgcttccggcagcacccttttgaggatggagcgaaacttc

SEQ ID NO: 626897 - DNA, 120 bp, Artificial Sequence
  ENSG00000178950_83 (sequence is synthesized)
gtgcacgctggggctgtgtgtgtggggccgtgcacgctggggctgtgtgtgtgggggccgtgcacgctggggctgtgtgtgtgtggggccgtgcacgctggggctgtgtgtgtgtgtggg

SEQ ID NO: 626898 - DNA, 120 bp, Artificial Sequence
  ENSG00000178950_84 (sequence is synthesized)
gccgtgcacgctggggctgtgtgtgtgtgggggggccgtgcacgctggggctgtgtgtgtgggggcatgtatgctggggctgtgtttgcggggggcgtgtacgctggggccattatgttt

SEQ ID NO: 626899 - DNA, 120 bp, Artificial Sequence
  ENSG00000178950_85 (sequence is synthesized)
cccggcctgaacggaactttttaatcttaagagcctagagtccgtttaacactgtcacctggacagttctttgcggtgaatagaagtggagcatccaggcctccccgtgccgtgggaagc

SEQ ID NO: 626900 - DNA, 120 bp, Artificial Sequence
  ENSG00000178950_86 (sequence is synthesized)
acgccgccagctccgcacagtcaagtgatgtttgtgtaaccaccgactatacccctaggatccccaaggaaggagccacccctcggccagtcaccatgtctgcggtgctcctctcacgcc

SEQ ID NO: 626901 - DNA, 120 bp, Artificial Sequence
  ENSG00000178950_87 (sequence is synthesized)
cttgtccccttgggctcgggcatcacccctgctctcccctcagacctgggagtcacccctgcactccccgcaggcccaggagtcacccctgcgctccccacggctccgacgtcacccctg

SEQ ID NO: 626902 - DNA, 120 bp, Artificial Sequence
  ENSG00000178950_88 (sequence is synthesized)
cattccccgcaggcctgggtgtcacccctgcactccccacaggcccaggcgtcacccctgcgctccccacggccccaacgtcacccctgcgctccccgcggcccgggtgtcacccctgtt

SEQ ID NO: 626903 - DNA, 120 bp, Artificial Sequence
  ENSG00000178950_89 (sequence is synthesized)
gttcccgcaggccccggtgtcacccctgcatttcccatgttcccgatatcacccctgtgttccctgcagtccccagtgtcacccctgcgctccccacggctccgatgtcacccctgcatt

SEQ ID NO: 626904 - DNA, 120 bp, Artificial Sequence
  ENSG00000178950_90 (sequence is synthesized)
ccccgtgggcctgggcatcacccctgctctccccgcaggcccaggcgtcacccctgcgctccccgtgggcctaggcatcacccctgctctccccgcaggccctgggctgcatcttgtacc

SEQ ID NO: 626905 - DNA, 120 bp, Artificial Sequence
  ENSG00000178950_91 (sequence is synthesized)
ctcgttccaggctgcagccccggcccttgcttcctggctgcggtggaacagctggtcatcaggccccacaggggcccctgaggcagtgggacagcatcacccgcttctcccagggagtcg

SEQ ID NO: 626906 - DNA, 120 bp, Artificial Sequence
  ENSG00000178950_92 (sequence is synthesized)
gaatgagcccagcatcccacagagccaggcagatccctttcctttcatcgcctggggggcaaggccctgctgaggagatgcctgggccctcccctcccttgctgcaatgtcgcccctcac

SEQ ID NO: 626907 - DNA, 120 bp, Artificial Sequence
  ENSG00000178950_93 (sequence is synthesized)
tctggggcgttcctggcttgttcccgggactctgtaaattgggtgaaacctcggtggtggcgcctcactgagccagtccttgagttaaagccctagttactcagacttagaccaggtgag

SEQ ID NO: 626908 - DNA, 120 bp, Artificial Sequence
  ENSG00000178950_94 (sequence is synthesized)
tcccagcctgtggtgggagaaagtctccctctgggtgggctgtccaagggcgcgtctgtgcgggggtggccccgacatcggcccacaggcccggcagcctctgctcacggaacactggga

SEQ ID NO: 626909 - DNA, 120 bp, Artificial Sequence
  ENSG00000178950_95 (sequence is synthesized)
atgttccagagtgcggcccctctgcgttgcggggtccatgcgctggctcttctgaggagctgaacgcccaggagcacgctggctgctcatctggccctgcggtcgcaccagctcaagggc

SEQ ID NO: 626910 - DNA, 120 bp, Artificial Sequence
  ENSG00000178950_96 (sequence is synthesized)
gtcggctatgtcaggaaacagcctaggagctgggctggactggtgcccgtgatgcaggaactgcggcccctggtgggcccacgttccttccacagctggcgacaccttcgggctttttct

SEQ ID NO: 626911 - DNA, 120 bp, Artificial Sequence
  ENSG00000178950_97 (sequence is synthesized)
tatgttttttgttctgtgctgtgatcactgttttgtgtccccagcaccaggtagacgtgtgtgcacttgtgcctgcatgtaccgcagcgtctgcacatgtgagcgtgggtgcatgtgtct

SEQ ID NO: 626912 - DNA, 120 bp, Artificial Sequence
  ENSG00000178950_98 (sequence is synthesized)
gggtgtgttaacatacatatgtgaacatgtgtgcatgtgtgtgtaaatgctggtgtgagtatgtgcataggcgtgtgtgattgctggtatgagcatgtgtgctggtgcttgtgagtcctt

SEQ ID NO: 626913 - DNA, 120 bp, Artificial Sequence
  ENSG00000178950_99 (sequence is synthesized)
gtgcttgtgaatccttgtgtgagctgagtgctcgtattgtgtgcaggcacgtgtatgagcacatgtgcatgttggagcatgtatgcgtgtgtgcatgtgtatgcatgtgtaggagtgctt

SEQ ID NO: 626914 - DNA, 120 bp, Artificial Sequence
  ENSG00000178950_100 (sequence is synthesized)
gtgagtgcgcgtgagctgtgtgcatgtgtacacgtgtgcgagtgcctgtgagtgcacgtgaactgcatgcatgtgtacgcatgcgcgcgagtgcctgtatgagccgcgtgcatgtgtacg

SEQ ID NO: 626915 - DNA, 120 bp, Artificial Sequence
  ENSG00000178950_101 (sequence is synthesized)
catgagtaggagtgcctgtgagtgtgcgtgagctgcgtgcatgtgtacacacgcatgcaagtgtgtgtgagccacatgcatgtgtacgcatgcacacaagtgcctgtgtgcgtgagctgc

SEQ ID NO: 626916 - DNA, 120 bp, Artificial Sequence
  ENSG00000178950_102 (sequence is synthesized)
gtgcatgtgtatgcatgtgtgcgagtgcctgtgagtgcatgtgagccgcatgcatgtgtgcacatgcgcgcgagtgcctgtgcctgagctgtgtgcacatgtatgcatgcgtaggagtgc

SEQ ID NO: 626917 - DNA, 120 bp, Artificial Sequence
  ENSG00000178950_103 (sequence is synthesized)
ctgtgagtgagcatgagccgcgtgcatgtgtacacgtgtgagtgcgcgtgagccgcgtgcatgtgtacacgtgagtgcgcgtgagccgcgtgcatgtgtacacgtgagtgcgcgtgagcc

SEQ ID NO: 626918 - DNA, 120 bp, Artificial Sequence
  ENSG00000178950_104 (sequence is synthesized)
gcgtgcatgtgtacgcgtgagtgcgcgagccgcgtgcatgtgtacgcgtgtgtgcgcgtgagccgcgtgcatgtgtacgcatgtgtgtgagccgcgtgcatgtgtaagcgtgtgtaggag

SEQ ID NO: 626919 - DNA, 120 bp, Artificial Sequence
  ENSG00000178950_105 (sequence is synthesized)
tgctgtgcgagcgcctgtgtgtgtgagctgtgtgcctgtgagtgcgtgtgggccgcgtgcatgtgtaggagtgctgtgtgagtgcctgtgtgtgtgagctgtgtgcctctgtgtgtgctg

SEQ ID NO: 626920 - DNA, 120 bp, Artificial Sequence
  ENSG00000178950_106 (sequence is synthesized)
catgtttggctgtgtggttccattacctgtgtgccttgtccttgtgcaaccttttggaaagaaacctgctcttagtgggcctgcatatccccagagcaggacgtgagcccactcgcacct

SEQ ID NO: 626921 - DNA, 120 bp, Artificial Sequence
  ENSG00000178950_107 (sequence is synthesized)
ctgggcacctcctctgtgacgcctcctgcctgagttgtggctgacagaagatcagaggcagctctgtctgtctggtgccagcgcaccgcccactgggcccagggctgtggctcctgcagg

SEQ ID NO: 626922 - DNA, 120 bp, Artificial Sequence
  ENSG00000178950_108 (sequence is synthesized)
gtcctgacaggtgacactgcgtgtggagcgtcagcagggctagccatggacccaggggggtgagagactctccagcgtcatcttggtgagagtgatgttgggatcagagtggaaacaaga

SEQ ID NO: 626923 - DNA, 120 bp, Artificial Sequence
  ENSG00000178950_109 (sequence is synthesized)
cagagaggatgcggcagcaaagccataagtgaaagtcactaggaacggtcactttcggcatcagtgaaaatggtctccatggccgcagcacattgtggggacaggcagagtggagtcagc

SEQ ID NO: 626924 - DNA, 120 bp, Artificial Sequence
  ENSG00000178950_110 (sequence is synthesized)
agagggaggaggcatgtggggcgttcagggagccgggcacagctccagagtcctccctgggggactccaggccacgctccctccccagcagctgtggggatggtgggagctgctgtctgc

SEQ ID NO: 626925 - DNA, 120 bp, Artificial Sequence
  ENSG00000178950_111 (sequence is synthesized)
tggaagcctaaggccgcaggggctggttctagaaatggctctgctgggacccatgggttccaggccctaggaggacacagtttggcttgagcaggcgctgcttgcatggcactcaggcac

SEQ ID NO: 626926 - DNA, 120 bp, Artificial Sequence
  ENSG00000178950_112 (sequence is synthesized)
agctagctgctgcttgttaggggatggtgggaaccctcctgacacccccaggttccagctgagggcagccctgctgtttgttttgctctgccttctgttcacatcacgtgcttgaggcag

SEQ ID NO: 626927 - DNA, 120 bp, Artificial Sequence
  ENSG00000178950_113 (sequence is synthesized)
atgaagctgcataacctcgtgtttgtaaagttgacttagaagcaacagtgagttctggttgggcctggaggctcaaaagatggctgggcacggtggctcgtgtaatcccagcacttcggg

SEQ ID NO: 626928 - DNA, 120 bp, Artificial Sequence
  ENSG00000178950_114 (sequence is synthesized)
gggccgaggagggaggatcacttgaagattgagacgagcctggacaacacaacaacacagcaagaccctgtctctacaaaaataaaaaattagctgggcgaggtggcgtgcacctgtggt

SEQ ID NO: 626929 - DNA, 120 bp, Artificial Sequence
  ENSG00000178951_0 (sequence is synthesized)
ggagaaaccaggaagggagtcgcgagcatcatacggggctttggctgtactgtacagttactgtaggggcagtgacgccgccgccgccgcgcgagggagcgaccagggcagcgcgacgcg

SEQ ID NO: 626930 - DNA, 80 bp, Artificial Sequence
  ENSG00000178951_1 (sequence is synthesized)
cgcgggcagagcgagcgccgcggaccccggaggcgagcggccgagggagcccagtcccaacttcgggccccggccccgcg

SEQ ID NO: 626931 - DNA, 120 bp, Artificial Sequence
  ENSG00000178951_2 (sequence is synthesized)
gcggcgtggacggccccatcgggatcccgttccccgaccacagcagcgacatcctgagtgggctgaacgagcagcggacgcagggcctgctgtgcgacgtggtgatcctggtggagggcc

SEQ ID NO: 626932 - DNA, 120 bp, Artificial Sequence
  ENSG00000178951_3 (sequence is synthesized)
gcgagttccccacgcaccgctcggtgctggccgcctgcagccagtacttcaagaagctgttcacgtcgggcgccgtggtggaccagcagaacgtgtacgagatcgacttcgtcagcgccg

SEQ ID NO: 626933 - DNA, 120 bp, Artificial Sequence
  ENSG00000178951_4 (sequence is synthesized)
aggcgctcaccgcgctcatggacttcgcctacacggccacgctcaccgtcagcacagccaacgtgggtgacatcctcagcgccgcccgcctgctggagatccccgccgtgagccacgtgt

SEQ ID NO: 626934 - DNA, 120 bp, Artificial Sequence
  ENSG00000178951_5 (sequence is synthesized)
gcgccgacctcctggaccggcagatcctggcggccgacgcgggcgccgacgccgggcagctggaccttgtagatcaaattgatcagcgcaacctcctccgcgccaaggagtacctcgagt

SEQ ID NO: 626935 - DNA, 120 bp, Artificial Sequence
  ENSG00000178951_6 (sequence is synthesized)
tcttccagagcaaccccatgaacagcctgccccccgcggccgccgccgccgctgccagcttcccgtggtccgcctttggggcgtccgatgatgacctggatgccaccaaggaggccgtgg

SEQ ID NO: 626936 - DNA, 120 bp, Artificial Sequence
  ENSG00000178951_7 (sequence is synthesized)
cgctgtggccgccgtggccgcgggcgactgcaacggcttagacttctatgggccgggccccccggccgagcggcccccgacgggggacggggacgagggcgacagcaacccgggtctgtg

SEQ ID NO: 626937 - DNA, 120 bp, Artificial Sequence
  ENSG00000178951_8 (sequence is synthesized)
tgtggccagagcgggatgaggacgcccccaccgggggtctctttccgccgccggtggccccgccggccgccacgcagaacggccactacggccgcggcggagaggaggaggccgcctcgc

SEQ ID NO: 626938 - DNA, 120 bp, Artificial Sequence
  ENSG00000178951_9 (sequence is synthesized)
tcgctgtcggaggcggcccccgagccgggcgactctccgggcttcctgtcgggagcggccgagggcgaggacggggacgggcccgacgtggacgggctggcggccagcacgctgctgcag

SEQ ID NO: 626939 - DNA, 120 bp, Artificial Sequence
  ENSG00000178951_10 (sequence is synthesized)
tgatgtcatcggtgggccgggcgggggccgcggcgggggacagcgacgaggagtcgcgggccgacgacaagggcgtcatggactactacctgaagtacttcagcggcgcccacgacggcg

SEQ ID NO: 626940 - DNA, 120 bp, Artificial Sequence
  ENSG00000178951_11 (sequence is synthesized)
acgtctacccggcctggtcgcagaaggtggagaagaagatccgagccaaggccttccagaagtgccccatctgcgagaaggtcatccagggcgccggcaagctgccgcgacacatccgca

SEQ ID NO: 626941 - DNA, 120 bp, Artificial Sequence
  ENSG00000178951_12 (sequence is synthesized)
cccacacgggcgagaagccctacgagtgcaacatctgcaaggtccgcttcaccaggcaggacaagctgaaggtgcacatgcggaagcacacgggcgagaagccgtacctgtgccagcagt

SEQ ID NO: 626942 - DNA, 120 bp, Artificial Sequence
  ENSG00000178951_13 (sequence is synthesized)
gcggcgccgcctttgcccacaactacgacctgaagaaccacatgcgcgtgcacacgggcctgcgcccctaccagtgcgacagctgctgcaagaccttcgtccgctccgaccacctgcaca

SEQ ID NO: 626943 - DNA, 120 bp, Artificial Sequence
  ENSG00000178951_14 (sequence is synthesized)
accttcgtccgctccgaccacctgcacagacacctcaagaaagacggctgcaacggcgtcccctcgcgccgcggccgcaagccccgcgtccggggcggggcgcccgaccccagcccgggg

SEQ ID NO: 626944 - DNA, 120 bp, Artificial Sequence
  ENSG00000178951_15 (sequence is synthesized)
agcccagctcccccgacgcccggcgcaacggccaggagaagcactttaaggacgaggacgaggacgaggacgtggccagccccgacggcttgggccggttgaatgtagcgggcgccggtg

SEQ ID NO: 626945 - DNA, 120 bp, Artificial Sequence
  ENSG00000178951_16 (sequence is synthesized)
gaggaggtgacagcggaggtggccccggggccgccaccgacggtaacttcacagccggactcgcctaaaaaccaaaaagagaaaacagaaacccgagaaagagagagacagagagagaga

SEQ ID NO: 626946 - DNA, 120 bp, Artificial Sequence
  ENSG00000178951_17 (sequence is synthesized)
aaaaaaatcacccaccacccccccaaaaacacaaaaaaagaaaatctatctatatacagatatctatatctatatatatatatacagatatatatatatgacgcgtcacagaatctaggg

SEQ ID NO: 626947 - DNA, 120 bp, Artificial Sequence
  ENSG00000178951_18 (sequence is synthesized)
tagcgctttctcagatttccctcctttctgacgtttttctccctccgcaggggccccggccctccctggctccccttccccccaccaccccatcgctgggtttcggggcttggtttgggg

SEQ ID NO: 626948 - DNA, 120 bp, Artificial Sequence
  ENSG00000178951_19 (sequence is synthesized)
ttttttgtaggacacaaggaatccgagaccccgcacagccccctgggcacccggcatggggcctggggcccgatccgaggccctgggctggggggagggtagacgtgggggcgctggggg

SEQ ID NO: 626949 - DNA, 120 bp, Artificial Sequence
  ENSG00000178951_20 (sequence is synthesized)
gggactggggtgggcttttaatttcctcccctcgctggtttctatgagtctttcagacaagaccttaaatgatttctgtctgctctgagcggacgttaaaatgggcccccgtcccccgac

SEQ ID NO: 626950 - DNA, 120 bp, Artificial Sequence
  ENSG00000178951_21 (sequence is synthesized)
ccgcaccctccttcctcagggcacttactaagggaggggtctccctctccatctccccagtggcctccccgcctccaaccctgcctgcggcctccccccgtcgcccaccccacgtctcct

SEQ ID NO: 626951 - DNA, 120 bp, Artificial Sequence
  ENSG00000178951_22 (sequence is synthesized)
ggccactgagacacaaacctatttatttctaggcctggagaaaggagatcggactggggttcccggtggggcgccaggatggctcctgggggtgctcctgccgccttccttcacggcact

SEQ ID NO: 626952 - DNA, 120 bp, Artificial Sequence
  ENSG00000178951_23 (sequence is synthesized)
tacaaccggcgggacccccagggaccacccctcagggcgcccccccacccccgcccggtccacctagacccccacgtttggagattcaaaacttctgtcttcgtcctctcccccgagccc

SEQ ID NO: 626953 - DNA, 120 bp, Artificial Sequence
  ENSG00000178951_24 (sequence is synthesized)
cctctcccaaatttttaaagcactttttagatttttttttctctttcctccttaaaaacaaaatttatatatagatatatatatatatataaataatatacttttcctcagaggagcagg

SEQ ID NO: 626954 - DNA, 120 bp, Artificial Sequence
  ENSG00000178951_25 (sequence is synthesized)
caacagtgtgggataaacagagtcacgatcagaggaaccccagggtctggtgatggcagggatggggggagagagagaaaatccacaaattccaatgtcacaaaagcaataaaacaaact

SEQ ID NO: 626955 - DNA, 120 bp, Artificial Sequence
  ENSG00000178951_26 (sequence is synthesized)
ttgtaacggaacgggtactacactttatcttaattcttaatttaaaaacatgtttacaagttacaaccaacttctatgaaaagttgaaaagacaaaaaaaaaaaaaaaaagcgagcgaga

SEQ ID NO: 626956 - DNA, 120 bp, Artificial Sequence
  ENSG00000178951_27 (sequence is synthesized)
gagagagcgagagagagagcgagagcagaagaaattcctaaaagtcgatttatttttgtacaaaataataaaaaaaaaaacccaccacaaacgtagaatccacttctgttccccaaaaag

SEQ ID NO: 626957 - DNA, 120 bp, Artificial Sequence
  ENSG00000178951_28 (sequence is synthesized)
cgagaaggggggttcaggaggaagccatcgcaggggacctgggagacgccccgaggtgtttgtgcttcacccccagacgtcagcctcgaaggcaggactgtggggtgttcgtgctgtgtt

SEQ ID NO: 626958 - DNA, 120 bp, Artificial Sequence
  ENSG00000178951_29 (sequence is synthesized)
ccccccgctccccctttctgtccccttttttggttctgacgtgaagaggtcttagcgcccgcttctgtccacggggtctctccttcctcctccctagctcagggatgggccttccagccg

SEQ ID NO: 626959 - DNA, 120 bp, Artificial Sequence
  ENSG00000178951_30 (sequence is synthesized)
gagcaccccgatccccatccggcaccccccaatcccccaacacgcctgtccctcccgcatggccaccaaggagctggaccttggatgcgcctaccctgctgaggtgggtgacaggggccc

SEQ ID NO: 626960 - DNA, 120 bp, Artificial Sequence
  ENSG00000178951_31 (sequence is synthesized)
cccacctccagggccttagaaccaccgcccctctccccaccccaggcacccctctttttactcaaaggcactgactgtaatccagggggactgggacctgcctccccccaacctctggct

SEQ ID NO: 626961 - DNA, 120 bp, Artificial Sequence
  ENSG00000178951_32 (sequence is synthesized)
cccacaaggcccggtgttgaccgagccacaggccacggacaggggccggggttggggagactatgtcgccagatgccaggacgccctcaccccgtttgcatatgcaatgctagcatggga

SEQ ID NO: 626962 - DNA, 120 bp, Artificial Sequence
  ENSG00000178951_33 (sequence is synthesized)
ccccgaaaatagacgctctgctgcactgagacttcttgtcaatgcccaaccggcgggggggtgtctccctgcccccgacccccccatacccccttctctgtgacacacacatcttctcgt

SEQ ID NO: 626963 - DNA, 120 bp, Artificial Sequence
  ENSG00000178951_34 (sequence is synthesized)
ctctttttctttcattgttaaagggaagctttttaagaaggcaattttcatattgtttctacaggatggttttggttcccttcccttcccacccccccttaagcctgtcagccccctcca

SEQ ID NO: 626964 - DNA, 120 bp, Artificial Sequence
  ENSG00000178951_35 (sequence is synthesized)
aatgtctcaggatcccccctctcccctggggctgggtgacagcaccccggctgcgttcacaccccagtgtcacagggcgagctgttctggagagaaaaccatctgtcgtggctgagcggg

SEQ ID NO: 626965 - DNA, 120 bp, Artificial Sequence
  ENSG00000178951_36 (sequence is synthesized)
gagcttgaacacccaggccagggacacccctccccagctcccagagaggccccctgaggggtgagccctctttccaccttcccctatccatgcaccccctcgcaataaaaccaactctaa

SEQ ID NO: 626966 - DNA, 120 bp, Artificial Sequence
  ENSG00000178951_37 (sequence is synthesized)
aatcacagctgtcgtcctagccagtgggggcgaccggacttggggggtggagccctctgggacttccgtaggaacaagggctgcggcccaccgcgacacttacacagacctcggggattg

SEQ ID NO: 626967 - DNA, 120 bp, Artificial Sequence
  ENSG00000178951_38 (sequence is synthesized)
cactaaaccctcgttcctagctccgcactcagcttcgcctgtcctgcccgcccactttgccttaactacccgcccgtcctgggggccacagcctctgcatgggcccagagccgggacccc

SEQ ID NO: 626968 - DNA, 120 bp, Artificial Sequence
  ENSG00000178951_39 (sequence is synthesized)
cccagcccagccccgccctccccagactccgcgcaatcacatactgtatatagacgtgaatcgattttatttttattctttaaattaaggtcgtgataaagtgttgccaaagatacctgc

SEQ ID NO: 626969 - DNA, 120 bp, Artificial Sequence
  ENSG00000178951_40 (sequence is synthesized)
tgaattctcgcgtttcaggaaacaaacaaacaaaaaaaaatgatatttgaggagggtcgtgttgactccatatgaaaggacacagctcaaagcttttttgtttggttgtttggggttttt

SEQ ID NO: 626970 - DNA, 81 bp, Artificial Sequence
  ENSG00000178951_41 (sequence is synthesized)
cacagctcaaagcttttttgtttggttgtttggggttttttgtgttttctttttttggggtgttttttttttaactgcctg

SEQ ID NO: 626971 - DNA, 120 bp, Artificial Sequence
  ENSG00000178951_42 (sequence is synthesized)
gacgcgtgtgtgcgtgtgtgcaagagagcgggagtgaggtccaggctggggttggggggcttcaggcgggggcgcccgggggccggggaggtggccgggccggagcccccgtctgcagtg

SEQ ID NO: 626972 - DNA, 120 bp, Artificial Sequence
  ENSG00000178951_43 (sequence is synthesized)
ccccccagcctgccgggcccaggagagagagagaagcatctttgctactagctgttgctgctacctgcctctgccccccgacgccccccgccttttgagattaaggaaaaaaaaaaaaag

SEQ ID NO: 626973 - DNA, 120 bp, Artificial Sequence
  ENSG00000178951_44 (sequence is synthesized)
tcaaaaaagtttttaaaaatgaaaaaaaaaaattataaaccagtgaatgtaaaatgccggagcaggcccggcctggcatgggtgtggacctgcagccaggcaggctcgagcgggcgatac

SEQ ID NO: 626974 - DNA, 120 bp, Artificial Sequence
  ENSG00000178951_45 (sequence is synthesized)
caaagtctgcccccccaccattgtggccatgcagtcctgtcactgtctttttgcttccttccgaggggggtcccccagcctcttccagggtcttcccctggaagtgggcggctgcaggga

SEQ ID NO: 626975 - DNA, 120 bp, Artificial Sequence
  ENSG00000178951_46 (sequence is synthesized)
aggtgggggacaggggtctttgcacgattcagaccccggggccgtggcaggagcggtcacctcacaggtggtgacactgaggcaggggcctcggggtgccccctcccgcccggcaaccag

SEQ ID NO: 626976 - DNA, 120 bp, Artificial Sequence
  ENSG00000178951_47 (sequence is synthesized)
aatggttggaggcaagacagagagaatgaaaggaaaaacagaagaaaaaaaaatattaaaaaccaacaaaaaaagcaaaaatcctattttttgagaaagaaagatatttatatttgcagt

SEQ ID NO: 626977 - DNA, 120 bp, Artificial Sequence
  ENSG00000178951_48 (sequence is synthesized)
tttattttaaaaagttatttaagttgaagcagccttcctggaggtgggggggggggggtggtgggtggctggcgcaggacgggtcaggggcctggaggctgggggtgccccaggagctac

SEQ ID NO: 626978 - DNA, 120 bp, Artificial Sequence
  ENSG00000178951_49 (sequence is synthesized)
aacctcagagttaagactagctcgcattaaatacatagatttacggggggggggggggggggccgggcccagggggtggagggggccagggagacccccatccctcgccggggctgcctg

SEQ ID NO: 626979 - DNA, 120 bp, Artificial Sequence
  ENSG00000178951_50 (sequence is synthesized)
gaggctgtggaccaggatccgatgcccaggtcccgccccccaccccaccccaggcccagaatcgaggtgccttggactttggaggggccaggcctggtgaatggggggcggggcggcgcc

SEQ ID NO: 626980 - DNA, 120 bp, Artificial Sequence
  ENSG00000178951_51 (sequence is synthesized)
ctcagggtacagagcacagacagatagacattccagagactgtattgagagtctttataaagtgtgggagatttaaaaaaaaaaaaaactgataaaaatgcactttttgggagtggggag

SEQ ID NO: 626981 - DNA, 120 bp, Artificial Sequence
  ENSG00000178951_52 (sequence is synthesized)
ggagaagctttaaaagtaataaaaaacaaacaaaaacacaaaagatgaaaaaacaaaaaaattcatttttcttgtacataaaaaaaaaaaaagaaccactaaacgcagcctgttacgacc

SEQ ID NO: 626982 - DNA, 80 bp, Artificial Sequence
  ENSG00000178951_53 (sequence is synthesized)
gagcccggggatgcgcggcctagcgcaggccgggcccgggcgtgggggaggcgggcgggcggacccagatccggggtaat

SEQ ID NO: 626983 - DNA, 80 bp, Artificial Sequence
  ENSG00000178951_54 (sequence is synthesized)
atccggggtaatttgcatcgccctccccccagcccgggtggggattggccgccggcggcggggggtggcgcggggccagg

SEQ ID NO: 626984 - DNA, 120 bp, Artificial Sequence
  ENSG00000178952_0 (sequence is synthesized)
gccttccagccgcaggcgcccttcttcttctgtgcgctcgggctcctggtcccggctccccggttaccggggcgcgagtatgaccacaatggcggccgccaccctgctgcgcgcgacgcc

SEQ ID NO: 626985 - DNA, 120 bp, Artificial Sequence
  ENSG00000178952_1 (sequence is synthesized)
ccacttcagcggtctcgccgccggccggaccttcctgctgcagggtctgttgcggctgctgaaagccccggcattgcctctcttgtgccgcggcctggccgtggaggccaagaagactta

SEQ ID NO: 626986 - DNA, 120 bp, Artificial Sequence
  ENSG00000178952_2 (sequence is synthesized)
cgtgcgcgacaagccacatgtgaatgtgggtaccatcggccatgtggaccacgggaagaccacgctgactgcagccatcacgaagattctagctgagggaggtggggctaagttcaagaa

SEQ ID NO: 626987 - DNA, 120 bp, Artificial Sequence
  ENSG00000178952_3 (sequence is synthesized)
gtacgaggagattgacaatgccccggaggagcgagctcggggtatcaccatcaatgcggctcatgtggagtatagcactgccgcccgccactacgcccacacagactgcccgggtcatgc

SEQ ID NO: 626988 - DNA, 120 bp, Artificial Sequence
  ENSG00000178952_4 (sequence is synthesized)
agattatgttaagaatatgatcacaggcactgcacccctcgacggctgcatcctggtggtagcagccaatgacggccccatgccccagacccgagagcacttattactggccagacagat

SEQ ID NO: 626989 - DNA, 120 bp, Artificial Sequence
  ENSG00000178952_5 (sequence is synthesized)
tggggtggagcatgtggtggtgtatgtgaacaaggctgacgctgtccaggactctgagatggtggaactggtggaactggagatccgggagctgctcaccgagtttggctataaagggga

SEQ ID NO: 626990 - DNA, 120 bp, Artificial Sequence
  ENSG00000178952_6 (sequence is synthesized)
ggagaccccagtcatcgtaggctctgctctctgtgcccttgagggtcgggaccctgagttaggcctgaagtctgtgcagaagctactggatgctgtggacacttacatcccagtgcccgc

SEQ ID NO: 626991 - DNA, 120 bp, Artificial Sequence
  ENSG00000178952_7 (sequence is synthesized)
ccgggacctggagaagcctttcctgctgcctgtggaggcggtgtactccgtccctggccgtggcaccgtggtgacaggtacactagagcgtggcattttaaagaagggagacgagtgtga

SEQ ID NO: 626992 - DNA, 120 bp, Artificial Sequence
  ENSG00000178952_8 (sequence is synthesized)
ctcggggccctggtccgaggcttgaagcgggaggacttgcggcggggcctggtcatggtcaagccaggttccatcaagccccaccagaaggtggaggcccaggtttacatcctcagcaag

SEQ ID NO: 626993 - DNA, 120 bp, Artificial Sequence
  ENSG00000178952_9 (sequence is synthesized)
gaggaaggtggccgccacaagccctttgtgtcccacttcatgcctgtcatgttctccctgacttgggacatggcctgtcggattatcctgcccccagagaaggagcttgccatgcccggg

SEQ ID NO: 626994 - DNA, 120 bp, Artificial Sequence
  ENSG00000178952_10 (sequence is synthesized)
gaggacctgaagttcaacctaatcttgcggcagccaatgatcttagagaaaggccagcgtttcaccctgcgagatggcaaccggactattggcaccggtctagtcaccaacacgctggcc

SEQ ID NO: 626995 - DNA, 120 bp, Artificial Sequence
  ENSG00000178952_11 (sequence is synthesized)
atgactgaggaggagaagaatatcaaatggggttgagtgtgcagatctctgctcagcttcccttgcgtttaaggcctgccctagccagggctccctcctgcttccagtaccctctcatgg

SEQ ID NO: 626996 - DNA, 120 bp, Artificial Sequence
  ENSG00000178952_12 (sequence is synthesized)
cataggctgcaacccagcagagggcagctagatggacatttcccctgctcggaagggttggcctgcctggctggggaggtcagtaaactttgaatagtaagccagcctgtgtcctgtgtc

SEQ ID NO: 626997 - DNA, 120 bp, Artificial Sequence
  ENSG00000178952_13 (sequence is synthesized)
ctttgtgcaaattggagaggataggggaggacaaaaagggtgttgaaccccagacagatggggagcttgtgagatcccagagcagttttaacggataaatcaagtccagtgagcttagtg

SEQ ID NO: 626998 - DNA, 120 bp, Artificial Sequence
  ENSG00000178952_14 (sequence is synthesized)
attgcctagacacagtaggatgccgttattcagcctcctgggagatagtgggaaagaatgttctatcgctctggagccagcatggcttcagctcaggtgccaaacccatcttgtttcctc

SEQ ID NO: 626999 - DNA, 120 bp, Artificial Sequence
  ENSG00000178952_15 (sequence is synthesized)
ggaatactaagtgaatgtctagcatccattcacattctgtgggaacagggactggacaggcatacctcagatgctgtaggtttgcttccagactaccacaataaagcaggtcacaaattt

SEQ ID NO: 627000 - DNA, 120 bp, Artificial Sequence
  ENSG00000178952_16 (sequence is synthesized)
cgtggcaccgtggtgacaggtacactagagcgtggcattttaaagaagggagacgagtgtgagctcctaggacatagcaagaacatccgcactgtggtgacaggtttgggaagccagtct

SEQ ID NO: 627001 - DNA, 120 bp, Artificial Sequence
  ENSG00000178952_17 (sequence is synthesized)
ggagagcagggcctggctgaagggtggccttaccccggcagatcccttgtgccttccctctgtctcacattcgccttccttctccctgctccttttccctttccgtcctaggcattgaga

SEQ ID NO: 627002 - DNA, 120 bp, Artificial Sequence
  ENSG00000178965_0 (sequence is synthesized)
agtagcgcctccgcttctccagaccctgggcgcttgcctctctcctcccttagcaacagggaagctgtggataccaacggagggtgggagcccgggaggctgcgggtagcccgggcgccc

SEQ ID NO: 627003 - DNA, 120 bp, Artificial Sequence
  ENSG00000178965_1 (sequence is synthesized)
ccaggtgcccgcgcacaggggacctcggtgcggagccacccctcgagcgcgactgtcgcagcgccagcgcgcacggggccccacgcacccaccctccgcacctgccgcggggtccaaaag

SEQ ID NO: 627004 - DNA, 120 bp, Artificial Sequence
  ENSG00000178965_2 (sequence is synthesized)
cctgccgcggggtccaaaagggatcctgcaaaaatgagccattctcaccccgctgggttacttgctgcatataatagccttatggataaacacctggctgggtattttaacaatacaagg

SEQ ID NO: 627005 - DNA, 120 bp, Artificial Sequence
  ENSG00000178965_3 (sequence is synthesized)
ataaggcgtcatctcttaagatcaggactgatcacaagaagtggaagaatactttctgaaaaagaatataaactaaatatgatgaagcgggatcatcaaaaatatatccgggaatgctta

SEQ ID NO: 627006 - DNA, 120 bp, Artificial Sequence
  ENSG00000178965_4 (sequence is synthesized)
gcccaggcaatttttcataaagttcttgatatggagcgttaccatcagcttgaaataaaaaagaaattggagaccttagctaggaaggagcgaatccagaggtttaagggagagcacaca

SEQ ID NO: 627007 - DNA, 120 bp, Artificial Sequence
  ENSG00000178965_5 (sequence is synthesized)
agaaggtctgttgaaaataacatgccaatcctgtctccccacccaccagttggcccaaagagtaatcgtggccatagtgttctggttgatgaaggacattccagtccgttagcactgaca

SEQ ID NO: 627008 - DNA, 120 bp, Artificial Sequence
  ENSG00000178965_6 (sequence is synthesized)
gcccctcgaccatatactgctccaggaaatatgcagcctccaattcgattacagcctcttcccagtaatcctgcagtagaaactgttccaaaggtaacttcaaggtccagatcaaaaacc

SEQ ID NO: 627009 - DNA, 120 bp, Artificial Sequence
  ENSG00000178965_7 (sequence is synthesized)
tcattgctggaaaatgaagctctgtttcccattgggggcaagaaggcagtgatgaagttcaggaactccataggcaattcacagagaatgaattcatatcaacttccaaacattaacagt

SEQ ID NO: 627010 - DNA, 120 bp, Artificial Sequence
  ENSG00000178965_8 (sequence is synthesized)
tacatgatgcctattcctcctccacttcccccaactgggaaaatcacaagagaaaatagatctgaaacatggagaaggagaagatttcgtccaaccactgctccaaatggcttagaacct

SEQ ID NO: 627011 - DNA, 120 bp, Artificial Sequence
  ENSG00000178965_9 (sequence is synthesized)
cttttgacaaaggattcaagaaggattcataaaacatccttacatagtaatgcagctattacaatgatctatttggggaaaaatgtgcacctatcttctgataatcctgacttccgggat

SEQ ID NO: 627012 - DNA, 120 bp, Artificial Sequence
  ENSG00000178965_10 (sequence is synthesized)
gaaattaaagtttatcagcagcactgtggtggggaaaacctttgtgtctacaaaggcaaactacttgaaaaagagacctttcagtttatttccaaaaggcatcatggtttccccttcagt

SEQ ID NO: 627013 - DNA, 120 bp, Artificial Sequence
  ENSG00000178965_11 (sequence is synthesized)
ctcacctttttcctgaatgggatgcaggtgaacaggttaagctcctgttgtgaatacaagcatcggaaaggttccaggcttggaggcaaacgaggctactttgggtttgtgtgtgttgag

SEQ ID NO: 627014 - DNA, 120 bp, Artificial Sequence
  ENSG00000178965_12 (sequence is synthesized)
agatcatctccttgctacaagtgcattattgcaatgggccttgacaaaaaaccgtctttgccgaaatctaggaaagaaaagagcactgagaaaggagaggaactgaagaaggctgagggg

SEQ ID NO: 627015 - DNA, 120 bp, Artificial Sequence
  ENSG00000178965_13 (sequence is synthesized)
aaagtgaggaaagagagagagtatgtgataccaaaaagaaatgagatcaaggagaacaaaacctctgtttcagccaaattttcagctcaagaaataaaaacagggctcaaagaagtggta

SEQ ID NO: 627016 - DNA, 120 bp, Artificial Sequence
  ENSG00000178965_14 (sequence is synthesized)
actgctgtggaggaaatgacaagtaaaggaaaaccaggacaagaagtcttggaagacgaccaggaaaatactttaaaatatgagtatgaagaagactttgaagtagatgaggagaaacaa

SEQ ID NO: 627017 - DNA, 120 bp, Artificial Sequence
  ENSG00000178965_15 (sequence is synthesized)
ggtgaaaaatctaatgaagaaggacaggctgatgttcaaatgaatggaataccgcagtcacctttggatgataaaaaagataatttagaccctgaaaaagagagtgaaacctcatcacag

SEQ ID NO: 627018 - DNA, 120 bp, Artificial Sequence
  ENSG00000178965_16 (sequence is synthesized)
aaggcaccagatgcccgtgacaatgtgaaagatgagaatgatggatgctctgagagtgaactggaagaggataaacaagatatgaaaactgcttcatcaacctcatccagaagtcaccct

SEQ ID NO: 627019 - DNA, 120 bp, Artificial Sequence
  ENSG00000178965_17 (sequence is synthesized)
tattctagtgacagtgaggatgaatctgcagtgggggacagggaagcccacactgacagcagcacagatgaaagtgccagaaggtcatcttctcaggaactgagtgaaaatgataagcca

SEQ ID NO: 627020 - DNA, 120 bp, Artificial Sequence
  ENSG00000178965_18 (sequence is synthesized)
agaaagtctcaccttccaattgaggaatccttagaaattgaaattgaagaccaagaaataacaaaagcagatgtggagaccaagccgatgccaatagacgaaagctttgagaatgttctt

SEQ ID NO: 627021 - DNA, 120 bp, Artificial Sequence
  ENSG00000178965_19 (sequence is synthesized)
aaagaaggaacggagaaaggaacccaagagattgcagagggtttatctgagaagtccgggaaacatgtttctgcagaagaaaaggaaaaggataagagtaagctttgggaagaaagcact

SEQ ID NO: 627022 - DNA, 120 bp, Artificial Sequence
  ENSG00000178965_20 (sequence is synthesized)
gctcaggtgaaggacaaaaaggcaggtctccctgggttggaggaaggtggaaaggattcattgccattagcctatgtcctggctcttggtgcaccaacaatgaatttcatggtggatgaa

SEQ ID NO: 627023 - DNA, 120 bp, Artificial Sequence
  ENSG00000178965_21 (sequence is synthesized)
acagcagcaatcaactcaaacaaggaatcccagcaattggtgcaaaaaacgtatacactggagaagaaagaagcaatggaggaagatgaagcgccccagcacagagatgctgacatagta

SEQ ID NO: 627024 - DNA, 120 bp, Artificial Sequence
  ENSG00000178965_22 (sequence is synthesized)
cagggaaaaggggaggcagcactgtggggagaagcaggagctgttcatgaggctcccttgagggcgtggaagccaacagcagagcagccagaattggcagaagagtttacagaaaaaagg

SEQ ID NO: 627025 - DNA, 120 bp, Artificial Sequence
  ENSG00000178965_23 (sequence is synthesized)
gagatccctccaggcatagaaaggggggcagagggagcagcagaagcagaaggggtcagaaggctgggtgaaggggggtcagaccccataggacaagcagcagcaaaagatgctgtgggt

SEQ ID NO: 627026 - DNA, 120 bp, Artificial Sequence
  ENSG00000178965_24 (sequence is synthesized)
ctgagtaaagatgaggctcctgaaaagcaagccttgatgctcacagtgcttgagacagacaaagcagcttctgaaggggaacagggtttagagaaggcagtgcttgcaaatgaagcagca

SEQ ID NO: 627027 - DNA, 120 bp, Artificial Sequence
  ENSG00000178965_25 (sequence is synthesized)
gccctgaacttggagcatcttcatgaagtagcagccctgagagaggcagcgacatcggaggagggagaggctgagggtggggtggctgtgagtgatgtcggagaaagtgaagaggaagca

SEQ ID NO: 627028 - DNA, 120 bp, Artificial Sequence
  ENSG00000178965_26 (sequence is synthesized)
tccatagacctagaggacacaggacccatggaggacacagcatcaaagagagaggacggttctgaagaggcaattcttgggggagaggaaccagccaaagagagaaaagaggttatgaga

SEQ ID NO: 627029 - DNA, 120 bp, Artificial Sequence
  ENSG00000178965_27 (sequence is synthesized)
acagaaacacgcttgagccccttcacaggagaggcagaggcaagccggatgcaggtttcggagggcagccctgaggaaggaagccttgcaaaggaagccttcctttgcaaggaagatgtg

SEQ ID NO: 627030 - DNA, 120 bp, Artificial Sequence
  ENSG00000178965_28 (sequence is synthesized)
gaaggggaagagatggtgactgaggcagaagctaatagggaagatgataggaaagaaattttacccaaggaattagatttagcaagagagcgaaggaaagctgagaggccaaaaacatct

SEQ ID NO: 627031 - DNA, 120 bp, Artificial Sequence
  ENSG00000178965_29 (sequence is synthesized)
ctgaggaaaactgactctgagagagaagaggtgacaagggcaaatgcactcaaggatgaagatgcttttaaagaagagcaaaaacttaaagcggaagaaggggaaacagagacagaagta

SEQ ID NO: 627032 - DNA, 120 bp, Artificial Sequence
  ENSG00000178965_30 (sequence is synthesized)
gagctgaggaagagacaaaagctcccccaaatgaaatgggatctgatgctgagaacgaagcacctgtggaggcttctgagttgtctgacaatccagggcttctaggagaagattcactaa

SEQ ID NO: 627033 - DNA, 120 bp, Artificial Sequence
  ENSG00000178965_31 (sequence is synthesized)
aagagacagtggttcccatatttgaagcaacgcctggatttgaaaagtcgctggaaaacataacagctctgaggaaagaaggaggaggggaaagactgagtgaagccagagacacagagc

SEQ ID NO: 627034 - DNA, 120 bp, Artificial Sequence
  ENSG00000178965_32 (sequence is synthesized)
acaaagacagagaagagctgtccagcagggagaatagggccctgaaggaagggcaccgccaagatggagagggggccttagcagctcctgaagctgagccagcaggaaaggtgcaggccc

SEQ ID NO: 627035 - DNA, 120 bp, Artificial Sequence
  ENSG00000178965_33 (sequence is synthesized)
ctgaggggctgatcccagccacaggccaggcagaggagctagcagccaaagatcacgactcctgcgcaggactggaggggagagctgaagggcaaggaggagtggatgtcgtgctaagga

SEQ ID NO: 627036 - DNA, 120 bp, Artificial Sequence
  ENSG00000178965_34 (sequence is synthesized)
cccaggaagctgttgctgaggaagatcccataatggcagaaaagttcagggaggaagcggtggatgaggacccagaggaggaagaggacaaagagtgcactctggagacagaagcgatgc

SEQ ID NO: 627037 - DNA, 120 bp, Artificial Sequence
  ENSG00000178965_35 (sequence is synthesized)
aggacaggaactcggaaggggacggggacatggaaggagaaggaaacacacaaaagaatgagggcatgggaggaggaagggttgtggctgtggaagttctacacggaggtggtgaaacgg

SEQ ID NO: 627038 - DNA, 120 bp, Artificial Sequence
  ENSG00000178965_36 (sequence is synthesized)
cagaaacagccgcagaggagagggaggtgttggcaggttcggagacagccgaggagaaaacaatagcaaataaagcctcctccttttcagatgttgctgaggaagaaacctggcaccaac

SEQ ID NO: 627039 - DNA, 120 bp, Artificial Sequence
  ENSG00000178965_37 (sequence is synthesized)
aggatgagttagtaggaaaaacagcagctgcagggaaggtggtggtagaggaattagcacggagtggggaggaagtgccagcagcagaggagatgacagtgacatatacaacagaggctg

SEQ ID NO: 627040 - DNA, 120 bp, Artificial Sequence
  ENSG00000178965_38 (sequence is synthesized)
gggtgggcactccaggagccctggagcggaagacctcagggctaggacaggagcaagaggaagggtcagagggccaggaggcagccactgggagtggcgatgggaggcaggagacaggag

SEQ ID NO: 627041 - DNA, 120 bp, Artificial Sequence
  ENSG00000178965_39 (sequence is synthesized)
cagctgaaaaattccgattaggattatcacgggagggagagagggaattgagtccggagagtctacaggcgatggcaacacttccagtgaagcctgatttcactgaaacccgagagaagc

SEQ ID NO: 627042 - DNA, 120 bp, Artificial Sequence
  ENSG00000178965_40 (sequence is synthesized)
aacagcatatggtgcaaggagaaagcgagactgcagatgtttcccccaacaacgtgcaggtctaggagacttgctggcagacagataatttaaagatgtcttctgaagatgtaaagagtg

SEQ ID NO: 627043 - DNA, 120 bp, Artificial Sequence
  ENSG00000178965_41 (sequence is synthesized)
gagaaagattcacgcaagcatctcaccaggattcttgattttctctctctcctctttagttgctggttgcgcttgtctgagatgattcccaatctgtcagccctggtcagtagctcagta

SEQ ID NO: 627044 - DNA, 120 bp, Artificial Sequence
  ENSG00000178965_42 (sequence is synthesized)
agcaccttgagaatagctcaagtagatctgtaggacccttcttagaagcagtggttcctcatggagaaacttgtgaggctgttacacattctacacacctaacattattttcaaacaaaa

SEQ ID NO: 627045 - DNA, 120 bp, Artificial Sequence
  ENSG00000178965_43 (sequence is synthesized)
atgataattttcagatgcttgacttttaccaaagatcactggaaggcccagtcctaatgttaggggtttgtttaaagtcctttttattttacaatacagagccccagtcaattccacaat

SEQ ID NO: 627046 - DNA, 120 bp, Artificial Sequence
  ENSG00000178965_44 (sequence is synthesized)
ctcaatttcatacatgggaattttatttaaaaatctgtggtttggggctttaatgaattggcctgtgaaaatgagctctaaatttcctcccacgtacactcaaaactcaagattgctcca

SEQ ID NO: 627047 - DNA, 120 bp, Artificial Sequence
  ENSG00000178965_45 (sequence is synthesized)
aatctctaagttcttccagcaaaagatttcttggcatgtatattcacttatacttagaaatattcattcttttaatttatgccagaataacaaagtggaaatcttatttcaaaatgctct

SEQ ID NO: 627048 - DNA, 120 bp, Artificial Sequence
  ENSG00000178965_46 (sequence is synthesized)
ttgtttttttgtgtgtgtttctgtagttctgctttctggggtagactagtaaaatggtagcttccagcattttgtccctggggccttctttatagggccactcaaatttaaataaaagta

SEQ ID NO: 627049 - DNA, 120 bp, Artificial Sequence
  ENSG00000178965_47 (sequence is synthesized)
gtaaataatttagctaagtggaataagtataataattatagtggtaagcatagcacatcagcattatgccaacattctagactctttagttgatgtcattaaatggaaaagaaacttgga

SEQ ID NO: 627050 - DNA, 120 bp, Artificial Sequence
  ENSG00000178965_48 (sequence is synthesized)
ttaaatgagtgtgctgctcaccttcccaagttctgttatttcaaacctgtgaactaaccttgcagttcattataaatcaacagtaacaactgcattctaaattactccctgatattattt

SEQ ID NO: 627051 - DNA, 120 bp, Artificial Sequence
  ENSG00000178965_49 (sequence is synthesized)
tctagttgtgtatcagcctgtctcctaggggttttcatttccctgaagacatacaagtgccccagagcgcatgtatatgtctaccatttctctatatgagaaggtaaaaaaaatttcctt

SEQ ID NO: 627052 - DNA, 120 bp, Artificial Sequence
  ENSG00000178965_50 (sequence is synthesized)
aagcagtgattttccagccagaatatacattagattttcatgggacgcttttataaatgactcaacccttttccccaccccagagattcagacttaattcgttttagatggatctacaca

SEQ ID NO: 627053 - DNA, 120 bp, Artificial Sequence
  ENSG00000178965_51 (sequence is synthesized)
tcagtatatatatatttttaacttttcacttgattcttctctgtagccaaggttgagaaccgctgttctaaatcatcatataatccatgctggccacattacactcaaggtccctaggga

SEQ ID NO: 627054 - DNA, 120 bp, Artificial Sequence
  ENSG00000178965_52 (sequence is synthesized)
ccaggcatattatcatagtaggtattttccattttaatgtgtaatggagccattcaatgatcaaaaatacactggaccagatagtagactggtcccttgatcagaagcatcagcacatca

SEQ ID NO: 627055 - DNA, 120 bp, Artificial Sequence
  ENSG00000178965_53 (sequence is synthesized)
gcatcacctggaaattgttcccagcctttgtctcctacctactaaattagaaactcttggtgggttccagtaatccatagcttaacaagccctgcagttaatactgatgtacactgatgt

SEQ ID NO: 627056 - DNA, 120 bp, Artificial Sequence
  ENSG00000178965_54 (sequence is synthesized)
ccaaaaactgctgtcatggactattgattgtattgaggattagtctcagttggaaagccaactacagaggcattttgaactttctttctttgcctctctatgtctctctgtcttttcctg

SEQ ID NO: 627057 - DNA, 120 bp, Artificial Sequence
  ENSG00000178965_55 (sequence is synthesized)
tcttctgatttatctgtctttctttctctagtaaatggcactcaatataaaagtggtggagtcaatcttaaacttatttttattatgattgtattgatacatgcacgaagtccctctgcc

SEQ ID NO: 627058 - DNA, 120 bp, Artificial Sequence
  ENSG00000178965_56 (sequence is synthesized)
ctactccctattcaaggatattactcactgcacatcataaatctccatcatctgtcttaaagttttatgagtagatttcatctacattatattcaagttcatttattactgagctgtatt

SEQ ID NO: 627059 - DNA, 120 bp, Artificial Sequence
  ENSG00000178965_57 (sequence is synthesized)
actgtggagctctaacagtatttgtttcctgatttcaaactcaatgctacagagcactttgaatacatcacaccttataggaaagatagtaaatgtattaatcccattgaaaaattagtt

SEQ ID NO: 627060 - DNA, 120 bp, Artificial Sequence
  ENSG00000178965_58 (sequence is synthesized)
ttgtacaatgtgctaaatagtattgcattggattacttttatatttaacacactccatcaaaacatcccataacataattttacaatctgcatgtgaatttaactgtgaaattcagtatt

SEQ ID NO: 627061 - DNA, 120 bp, Artificial Sequence
  ENSG00000178965_59 (sequence is synthesized)
gtgatattttgaataagtgaattctttctctgcaaatactatgttgataaaattacttgtatgttcccctgaaatggtttgtttcctgtttcttcattattaaaacataaatcaatcata

SEQ ID NO: 627062 - DNA, 120 bp, Artificial Sequence
  ENSG00000178965_60 (sequence is synthesized)
cctgatacacccatctcatcttgggaatgggctagccaaaggtaccagaaaactcaaaggtctttggctaaaatcctctgtatcctccagcagtaactttgccattaggactagaaatac

SEQ ID NO: 627063 - DNA, 120 bp, Artificial Sequence
  ENSG00000178965_61 (sequence is synthesized)
cactatgccaaagcttgggaaatactactgtgacaatgctttagggattcaagattttttgctgtgtctctctttgtcacataatcatacatgtattttcagtttgctgtttgccttctc

SEQ ID NO: 627064 - DNA, 120 bp, Artificial Sequence
  ENSG00000178965_62 (sequence is synthesized)
ttgcacttaaaaaattactcgataatttctatccagcctgtttcctattttcggtaaattccctcctatgggaattccatctcaggaatgaaataaagcacagtatgtgtctgaaggcaa

SEQ ID NO: 627065 - DNA, 120 bp, Artificial Sequence
  ENSG00000178965_63 (sequence is synthesized)
aggaaagaagttagtttcagaaatactatgttcttaccccagaagacagatctaagtctagttttatttgaaataacttttgttaacaaggaggtgatataatggtaatgtcaggtattt

SEQ ID NO: 627066 - DNA, 120 bp, Artificial Sequence
  ENSG00000178965_64 (sequence is synthesized)
atggaattcacgatatgggtaatcagatgataagcaagggatgtagaaagggaattgtcagaaactaaagacaaatttaattggctttacactttggcctagaatcataccacactgggt

SEQ ID NO: 627067 - DNA, 120 bp, Artificial Sequence
  ENSG00000178965_65 (sequence is synthesized)
agatgctctctctatattatttcatttaatcctctcaagaaccattggatagataactctttttgacagacagataaaccaaggcgttggcttaggccaaagcatttactcaatgtgata

SEQ ID NO: 627068 - DNA, 120 bp, Artificial Sequence
  ENSG00000178965_66 (sequence is synthesized)
tggaatagaatggccagaagtagttgacaggccctaaggagagcttcacagctaacatcaggaaaggattcattgccattagcctatgtcctggctcttggtgcaccaacaatgaatttc

SEQ ID NO: 627069 - DNA, 120 bp, Artificial Sequence
  ENSG00000178965_67 (sequence is synthesized)
caacaaagtgatatgtcacattgctgaaatgggagtctcagcatgcacagtcctcttttactatgggtggaaaacagttgaggttagacaccagccaagttcttgcttttaagtttcagt

SEQ ID NO: 627070 - DNA, 120 bp, Artificial Sequence
  ENSG00000178965_68 (sequence is synthesized)
ttcagaagaacatctgagaaaaaacgaccaagtgaagccttttctggtttcacacctagtaagtccttgatacttaggccagcatcccattcttgctgaatctgaaataggcaacaccta

SEQ ID NO: 627071 - DNA, 120 bp, Artificial Sequence
  ENSG00000178965_69 (sequence is synthesized)
actatacaggctctcatctacttccgaaggctaatcctccaggggcaagccagcagacgtgggcaagtggtgataacatccctgagacagagggactacaagcttcactatcatttctga

SEQ ID NO: 627072 - DNA, 120 bp, Artificial Sequence
  ENSG00000178965_70 (sequence is synthesized)
ttagttatgcaggggcatgaggccttgttcctgttcttcaaatggaactgaattttcatggaaggttttgatacttacttgaggatagcagaaagggccgagaaaccttattaaagtttc

SEQ ID NO: 627073 - DNA, 120 bp, Artificial Sequence
  ENSG00000178966_0 (sequence is synthesized)
aaaaaggaactgggagcgcgccgcggcggttcctgtccttacagttgcgctgcccagggaccgatgttgcgcgaggaaaatgcgggacgcccaggtcggtgctcggcccagacttatgcc

SEQ ID NO: 627074 - DNA, 120 bp, Artificial Sequence
  ENSG00000178966_1 (sequence is synthesized)
cgtgttttcacagcccacactcgtgcccgaagccccttaccccgccccgggctgtggtctgtgggctgtgggacgagctgcggcgcgggccatttctgagcagtggaggtttcaagtaat

SEQ ID NO: 627075 - DNA, 120 bp, Artificial Sequence
  ENSG00000178966_2 (sequence is synthesized)
ccactaacaaccagttccaaattctgtcatcaaatcctgtgctgctgttcctcgtggtaatagatgcatattatttcttttatttaaaagaaatgaatgtgactagtattgcattaagag

SEQ ID NO: 627076 - DNA, 120 bp, Artificial Sequence
  ENSG00000178966_3 (sequence is synthesized)
ctgaaacttggcttttagctgcatggcatgttaaagtacctccgatgtggctggaagcttgtattaactggattcaagaagaaaataataatgttaacttgagtcaggcccaaatgaata

SEQ ID NO: 627077 - DNA, 120 bp, Artificial Sequence
  ENSG00000178966_4 (sequence is synthesized)
aacaagtgtttgagcagtggctccttactgatctgagggatttggagcatcctcttttacccgatggcattttagaaattccaaaaggagaattaaatggattttatgctctgcagatta

SEQ ID NO: 627078 - DNA, 120 bp, Artificial Sequence
  ENSG00000178966_5 (sequence is synthesized)
attccttggttgatgtaagtcagcctgcatactcccagatacagaagttgagaggaaagaatacaacaaatgatctagttacagctgaagcacaagtaaccccaaaaccttgggaagcaa

SEQ ID NO: 627079 - DNA, 120 bp, Artificial Sequence
  ENSG00000178966_6 (sequence is synthesized)
agccttcacgaatgttgatgctgcagctaactgatggaatcgtacaaatacagggaatggaatatcagcctattccaattcttcatagtgatcttcctccaggtacaaaaattttgattt

SEQ ID NO: 627080 - DNA, 120 bp, Artificial Sequence
  ENSG00000178966_7 (sequence is synthesized)
atggaaatatatctttccgtcttggtgttctcttattgaaaccagaaaacgtgaaagtgttaggaggtgaagtagatgctcttttagaagaatatgcccaagaaaaagtacttgcaagat

SEQ ID NO: 627081 - DNA, 120 bp, Artificial Sequence
  ENSG00000178966_8 (sequence is synthesized)
taataggggaacctgatcttgtagtttcagtcataccaaacaattctaacgaaaacattcccagagttacagatgttctagatcctgcattaggtccttctgatgaagaactcttggcaa

SEQ ID NO: 627082 - DNA, 120 bp, Artificial Sequence
  ENSG00000178966_9 (sequence is synthesized)
gtcttgatgaaaatgatgagcttacagcaaataatgacacttcctcagaacgatgtttcaccacaggtagttcctcaaataccattcccacaagacagtcaagttttgagccagaatttg

SEQ ID NO: 627083 - DNA, 120 bp, Artificial Sequence
  ENSG00000178966_10 (sequence is synthesized)
ttatttctccaagaccaaaagaggaaccatcaaacctatctatacatgtaatggatggagaattagatgacttttcactggaggaggccttgcttttagaagaaactgtccagaaagaac

SEQ ID NO: 627084 - DNA, 120 bp, Artificial Sequence
  ENSG00000178966_11 (sequence is synthesized)
agatggaaactaaggaattgcaaccattgacttttaacagaaatgccgatcgaagtatagagagattttcacataatcctaatactacgaataacttttctttgacttgcaaaaatggaa

SEQ ID NO: 627085 - DNA, 120 bp, Artificial Sequence
  ENSG00000178966_12 (sequence is synthesized)
acaataattggagtgaaaaaaatgtatctgaacaaatgactaatgaagacaaatcatttggttgtccatctgttagagaccaaaacaggagtattttttcagttcattgtaatgtaccct

SEQ ID NO: 627086 - DNA, 120 bp, Artificial Sequence
  ENSG00000178966_13 (sequence is synthesized)
tagcccatgattttacaaataaagaaaagaacttagagacagataataaaataaaacaaaccagcagttcagatagccattccttaaataataaaatattaaatagagaggtggtcaact

SEQ ID NO: 627087 - DNA, 120 bp, Artificial Sequence
  ENSG00000178966_14 (sequence is synthesized)
ctttaagatcatcagagaatagcattaatctttctattgccatggatttgtattctccaccctttgtctatttgtctgttctaatggccagcaaaccaaaggaagttacaacagtgaaag

SEQ ID NO: 627088 - DNA, 120 bp, Artificial Sequence
  ENSG00000178966_15 (sequence is synthesized)
tgaaagcatttattgtaaccttaactggaaatctctcaagttctggtggtatttggagtataactgcaaaggtgtctgatggtactgcatatctagatgtagactttgtggatgaaatac

SEQ ID NO: 627089 - DNA, 120 bp, Artificial Sequence
  ENSG00000178966_16 (sequence is synthesized)
ttactagcttgatagggttctcagtaccagaaatgaaacagtcaaaaaaggatcctcttcaataccaaaagttcctggaagggttgcagaaatgtcaaagagatctaatagatttgtgct

SEQ ID NO: 627090 - DNA, 120 bp, Artificial Sequence
  ENSG00000178966_17 (sequence is synthesized)
gtctaatgactatttcatttaatccttccttgtctaaagcaatggtactggcattacaagatgttaatatggaacaccttgagaatctaaagaagcggttaaataaataattaaactaaa

SEQ ID NO: 627091 - DNA, 120 bp, Artificial Sequence
  ENSG00000178966_18 (sequence is synthesized)
atagtattaggaacaattaaaaacaacaaggaaatatttagaatttgttcacaattttacttatgatactttgtgtaaaaaggaaaaatgaaatttcatagcttatttcagtttaatttt

SEQ ID NO: 627092 - DNA, 120 bp, Artificial Sequence
  ENSG00000178966_19 (sequence is synthesized)
cagtttaattttaaagtgtttaatcatgtttgttatatgtggagcttttgaaaataagttaatctttttttttttttttttaatgtcagggtattgctctgttgcccaggctagagtgca

SEQ ID NO: 627093 - DNA, 120 bp, Artificial Sequence
  ENSG00000178966_20 (sequence is synthesized)
taggttattgcatcaacctcttgagctcaagcgatcctcctgccttagcctcttgagttgctgggactataggcatgtaccaccatgcccagctaatttataattactattattgttttg

SEQ ID NO: 627094 - DNA, 120 bp, Artificial Sequence
  ENSG00000178966_21 (sequence is synthesized)
tagggacagagttttgctatgttgcccagattggtctcaaactcctggcctctcactcctgccgtcatggcctccaaagtttactttttttaaaagtaactgttagatggaggaatatgg

SEQ ID NO: 627095 - DNA, 120 bp, Artificial Sequence
  ENSG00000178966_22 (sequence is synthesized)
tgacccactattgttgagaaatttgttttccacttgtcacgtcacataagatgattgctaaaatattgtactggtgttcggtggtgagtcatatttttgaaagttaataattataaatag

SEQ ID NO: 627096 - DNA, 120 bp, Artificial Sequence
  ENSG00000178966_23 (sequence is synthesized)
gtaatttccttctaatatgttggtactgtctatggccataccaccctgaacatgcctgagcttgtcataatatgttgagtacccaaaagatttgtttatattgttaatcttagggaaaaa

SEQ ID NO: 627097 - DNA, 120 bp, Artificial Sequence
  ENSG00000178966_24 (sequence is synthesized)
aaattaaaatccagtagatcagaacatcaggctttcagatacaaattgatttactggtttttattttgctgattataatatttggtatatttaaggtaatctagttaactagatgctatt

SEQ ID NO: 627098 - DNA, 120 bp, Artificial Sequence
  ENSG00000178966_25 (sequence is synthesized)
tcatagattatattgaatgatttaaaactttattttcaaggatagtttattttaaatggcatattgaaaacatcattattaagatccagtaggtaggacatttattggattaaaatgaag

SEQ ID NO: 627099 - DNA, 120 bp, Artificial Sequence
  ENSG00000178966_26 (sequence is synthesized)
catttatctatgtctttaggtgtcattgttccctttctgaattagctgtacatataagccttcctttggttttaagtactgatttttttttaaaaaaaagagggactgtttaccattctt

SEQ ID NO: 627100 - DNA, 120 bp, Artificial Sequence
  ENSG00000178966_27 (sequence is synthesized)
ccactgtgctgttataaagttgtatttgaaaggtaatgttgtttttattaatcttttgtcttaaaataatttaaagtgctttgaattttaaaacattaaacaaatccttaaataacaaaa

SEQ ID NO: 627101 - DNA, 120 bp, Artificial Sequence
  ENSG00000178966_28 (sequence is synthesized)
ggggaaggggcgttttccagccccgaaggagtcctttggggttggaggaggggcgcgagcgcgcggcaaatcgggcgggaagaggtaaaaaaggaactgggagcgcgccgcggcggttcc

SEQ ID NO: 627102 - DNA, 120 bp, Artificial Sequence
  ENSG00000178971_0 (sequence is synthesized)
gggcggagctccggcgcatcatggcggctggccgggcccaggtcccttcctccgaacaagcctggcttgaggatgctcaggtcttcatccaaaagaccctgtgtccagctgtcaaggagc

SEQ ID NO: 627103 - DNA, 120 bp, Artificial Sequence
  ENSG00000178971_1 (sequence is synthesized)
ctaatgtccagttgactccattggtaattgattgtgtgaagactgtctggttgtcccagggaaggaaccaaggttctacactgcccctcagctatagcttcgtctcagtacaggacctca

SEQ ID NO: 627104 - DNA, 120 bp, Artificial Sequence
  ENSG00000178971_2 (sequence is synthesized)
agactcaccagcgtctcccatgctgcagccacctgtcgtggagcagtagtgcataccaggcctgggcccaagaggctggaccaaatgggaaccccctgccccgagagcagctgttacttt

SEQ ID NO: 627105 - DNA, 120 bp, Artificial Sequence
  ENSG00000178971_3 (sequence is synthesized)
tagggacactaacagacctatcggcagacttggaacaagagtgcaggaacggaagcctctatgtgagagataacactggcgtcctgagctgtgagctcatagacctggacctttcttggt

SEQ ID NO: 627106 - DNA, 120 bp, Artificial Sequence
  ENSG00000178971_4 (sequence is synthesized)
tgggccatctttttctgttcccccgttggagttacctccctcctgccaggtggaattcctcaggggaagggcacttggagctgtgggatgcccctgtgccagtgtttcctttgaccatca

SEQ ID NO: 627107 - DNA, 120 bp, Artificial Sequence
  ENSG00000178971_5 (sequence is synthesized)
gtcctggccccgtcacgcctatccctgtcctctacccagagagtgcttcctgcctgctcaggctcagaaacaagctcagaggtgtgcagcgaaacctggctgggagtctagttcgattga

SEQ ID NO: 627108 - DNA, 120 bp, Artificial Sequence
  ENSG00000178971_6 (sequence is synthesized)
gtgctctggtgaaaagtaaacagaaagcttacttcatcctgtctcttggtagatcacacccagctgtcacccacgtgtccatcatcgtgcaggtccctgcccagctggtgtggcacagag

SEQ ID NO: 627109 - DNA, 120 bp, Artificial Sequence
  ENSG00000178971_7 (sequence is synthesized)
cccttcggcctggtacagcctatgtgctgacagaactgcgagtgtccaagatccgtggtcagcgccagcatgtttggatgaccagtcagtcctcccgtctgttgctgctgaaaccagaat

SEQ ID NO: 627110 - DNA, 120 bp, Artificial Sequence
  ENSG00000178971_8 (sequence is synthesized)
gtgtgcaggagctggaactggagctggaaggacccctcttagaggctgaccccaagccactccccatgcccagcaactcggaggacaagaaggatccagaaagtcttgtccggtattcta

SEQ ID NO: 627111 - DNA, 120 bp, Artificial Sequence
  ENSG00000178971_9 (sequence is synthesized)
gactcctatcctattcgggagcagtcactggcgtgttgaatgagcccgctggcctctatgagctggatgggcagctggggctctgccttgcctaccagcagttccgtggccttaggcggg

SEQ ID NO: 627112 - DNA, 120 bp, Artificial Sequence
  ENSG00000178971_10 (sequence is synthesized)
tgatgcgacctggagtgtgtctgcagctccaggatgttcacctgctccagtcagtgggaggggggacaagaaggccagtgctcgccccctgcctccgtggcgccgttctgcttcaaagct

SEQ ID NO: 627113 - DNA, 120 bp, Artificial Sequence
  ENSG00000178971_11 (sequence is synthesized)
tctctcgtcagaagcctggggctcactcatcccgtcaagcctacggggcctccctgtacgagcagctggtgtgggaacgtcagttaggacttcccctctacctgtgggctaccaaggccc

SEQ ID NO: 627114 - DNA, 120 bp, Artificial Sequence
  ENSG00000178971_12 (sequence is synthesized)
tggaggagctggcctgcaagctgtgtccccatgtgctgagacaccaccagttcctgcaacattcctctcctgggagccccagcctgggactgcaactcctggctcctaccctggatcttc

SEQ ID NO: 627115 - DNA, 120 bp, Artificial Sequence
  ENSG00000178971_13 (sequence is synthesized)
tagctccgccaggcagccctgttcggaatgcacacaatgagatccttgaagagccacatcactgtcccctccagaaatacactcggctgcagactccctcctccttccccactctggcca

SEQ ID NO: 627116 - DNA, 120 bp, Artificial Sequence
  ENSG00000178971_14 (sequence is synthesized)
ccctgaaagaagaaggacagcgtaaggcctgggcctcctttgaccctaaggcccttctgcccctcccggaggcctcctacctgcccagctgccaactcaatcgccgcctggcttggtcct

SEQ ID NO: 627117 - DNA, 120 bp, Artificial Sequence
  ENSG00000178971_15 (sequence is synthesized)
ggctctgtctgctgccctctgccttctgcccagcccaggttttacttggggttctggtggcttcatctcataaaggttgtctgcaacttcgggaccaaagtggttccctgccctgcctgc

SEQ ID NO: 627118 - DNA, 120 bp, Artificial Sequence
  ENSG00000178971_16 (sequence is synthesized)
tcctggccaagcactctcaacccctcagtgacccacggctgataggctgcctggtgcgggcagagaggtttcagttgatcgtagagagggacgtgagaagcagcttcccttcctggaagg

SEQ ID NO: 627119 - DNA, 120 bp, Artificial Sequence
  ENSG00000178971_17 (sequence is synthesized)
agctgagcatgccaggcttcatccagaagcagcaggccagagtctatgtccagttctttctggctgatgccctgatcctgcctgtgcccagaccctgccttcattcagcaacaccctcaa

SEQ ID NO: 627120 - DNA, 120 bp, Artificial Sequence
  ENSG00000178971_18 (sequence is synthesized)
cacctcagacagatcccaccggcccagagggaccccacctaggacagagccggctcttcttgctctgccacaaggaggccctcatgaagcgtaatttttgtgtccccccaggagcaagtc

SEQ ID NO: 627121 - DNA, 120 bp, Artificial Sequence
  ENSG00000178971_19 (sequence is synthesized)
cagaggtgcccaagcccgccctcagtttctatgtgttggggagctggcttgggggcacccagaggaaggagggtactggatgggggctgcccgagccccagggaaatgacgacaatgatc

SEQ ID NO: 627122 - DNA, 120 bp, Artificial Sequence
  ENSG00000178971_20 (sequence is synthesized)
agaaggttcacctcattttctttggctcttcagtccgctggtttgagttcttgcacccgggacaggtgtaccgactcatagctcctggccccgctacaccaatgttgtttgaaaaggatg

SEQ ID NO: 627123 - DNA, 120 bp, Artificial Sequence
  ENSG00000178971_21 (sequence is synthesized)
gttcatcctgcatatctcggcgtcctctggagttggctggctgtgcatcctgcctcactgtccaggacaactggactctggagcttgaaagctcccaggatatccaagatgtgctggatg

SEQ ID NO: 627124 - DNA, 120 bp, Artificial Sequence
  ENSG00000178971_22 (sequence is synthesized)
caaacaagtcattgcctgaatcctcactgaccgacctgctcagtgacaatttcacagattccttggtgtctttctccgctgagattttgtcacggacactatgtgaaccccttgtggcgt

SEQ ID NO: 627125 - DNA, 120 bp, Artificial Sequence
  ENSG00000178971_23 (sequence is synthesized)
ctctctggatgaaactggggaacacgggggccatgagaaggtgtgtgaagctaacagtcgctcttgagactgctgaatgtgaattcccccctcacctggatgtatatatagaagacccac

SEQ ID NO: 627126 - DNA, 120 bp, Artificial Sequence
  ENSG00000178971_24 (sequence is synthesized)
acttgcctccctcactaggactacttccaggagcccgggtccacttcagccagttggagaaaagggtttccagatctcacaatgtttattgttgtttccggtcatccacttatgtgcagg

SEQ ID NO: 627127 - DNA, 120 bp, Artificial Sequence
  ENSG00000178971_25 (sequence is synthesized)
tcctgagttttccccctgagaccaccatcagcattcccctgccccacatctacctggctgaacttctgcagggtggtcagtccccattccaggccactgcctcttgccatatcgtctctg

SEQ ID NO: 627128 - DNA, 120 bp, Artificial Sequence
  ENSG00000178971_26 (sequence is synthesized)
tcttcagccttcagctcttctgggtgtgtgcttattgtaccagcatctgccggcagggaaagtgcactcgcctgggctccacttgccctacgcagacagctataagccaggccatcatca

SEQ ID NO: 627129 - DNA, 120 bp, Artificial Sequence
  ENSG00000178971_27 (sequence is synthesized)
ggctcctggtggaggatgggactgccgaagccgtggtgacctgtaggaatcaccatgtggcagcagcactagggctgtgtcctagagagtgggcctccctcctagatttcgtccaagtgc

SEQ ID NO: 627130 - DNA, 120 bp, Artificial Sequence
  ENSG00000178971_28 (sequence is synthesized)
caggcagagtggtcttgcagtttgcagggcctggagcccaacttgagtcttcagccagggttgacgagcccatgaccatgttcctctggacactttgtactagcccctctgtcctccgtc

SEQ ID NO: 627131 - DNA, 120 bp, Artificial Sequence
  ENSG00000178971_29 (sequence is synthesized)
gtgtggagagctccctttcctgactcacgtgaaccccaggctccgattgtcctgcctttctatccgagagtcagagtactccagctctctggggatccttgcttcctcctgttaactgaa

SEQ ID NO: 627132 - DNA, 120 bp, Artificial Sequence
  ENSG00000178971_30 (sequence is synthesized)
ctgcaaggatggcctgagagtccttccttgctgaaaacctgaaggcctaggtcctggctcctctccctacttgttctgtgattgaaccaaggactccagattcacaaactgctactccac

SEQ ID NO: 627133 - DNA, 120 bp, Artificial Sequence
  ENSG00000178971_31 (sequence is synthesized)
tataatttcccttctttggtgttctggtgccagcctgccttggcaaaattgtggcaacaggaaatcatggccctattaatatgtcctctgattgggacaaggcacctgcattcacaggcg

SEQ ID NO: 627134 - DNA, 120 bp, Artificial Sequence
  ENSG00000178971_32 (sequence is synthesized)
gccctgagcacctgggttctgactttgtcgcaggagctgagggaacaaaagacttgctcgctgtggggtgatggtgacaggcctattgacctgcaatgaagccctctggtgtcatttctc

SEQ ID NO: 627135 - DNA, 120 bp, Artificial Sequence
  ENSG00000178971_33 (sequence is synthesized)
actggtactcatctctggggtcccaggcctcctgactcctagttgtccacctcctaggaactcctagtcgttcatcatcatttcagccctttgccgccagggccaaaggtggaaagtgat

SEQ ID NO: 627136 - DNA, 120 bp, Artificial Sequence
  ENSG00000178971_34 (sequence is synthesized)
ttggaagagaagagcttttcgtccagcagaagaaatggtaccaaaatcagtctgtaaaggaagtaaattggggagttggcggcaaggcagagagcatagctatgatggtctcagtcagta

SEQ ID NO: 627137 - DNA, 120 bp, Artificial Sequence
  ENSG00000178971_35 (sequence is synthesized)
aggctgggccctgcaggaagtcaaatatgaatgcctagaggtgttcacaagcacaaagaaggtgtagggggaggcaagtgccaggcacaagcaggggcaggtgaggactctgggtgactg

SEQ ID NO: 627138 - DNA, 120 bp, Artificial Sequence
  ENSG00000178971_36 (sequence is synthesized)
tgctatagggccccaggctacggttagccctgtaggtttcccaagggcctggcctaaggcagatccttgatcgatataccttgagaccagaaggtgctccgaaatcacaaccgtacaatt

SEQ ID NO: 627139 - DNA, 120 bp, Artificial Sequence
  ENSG00000178971_37 (sequence is synthesized)
aggggatctaggaacaattctttggagataccaatgcctttggctggtgttgctgcatttctttactggggactgatagatggagaggtggaaagatgagctgaggcacatctttcagag

SEQ ID NO: 627140 - DNA, 120 bp, Artificial Sequence
  ENSG00000178971_38 (sequence is synthesized)
ctactgggaggccatttcttcctggctgttaggatttgttcgtgtttgggagacctttagagcgtggttaaacccatatgttgggatttatgctgcttttatggtagcaataccctatat

SEQ ID NO: 627141 - DNA, 120 bp, Artificial Sequence
  ENSG00000178971_39 (sequence is synthesized)
taagatttgaagtagacccggaaagttagtggccggttagctcagttggttagagcgtggtgctaataacgccaaggtcgcgggttcgaaccccgtacgggccagtgggtggcttttttt

SEQ ID NO: 627142 - DNA, 120 bp, Artificial Sequence
  ENSG00000178971_40 (sequence is synthesized)
tgtgtgtgttttgttttctgaccctctgctgttatccggaagtttctacccggagccagttgccttctggtaacagaattatattgcacctactgcttcctattccctgaatcactagcg

SEQ ID NO: 627143 - DNA, 120 bp, Artificial Sequence
  ENSG00000178971_41 (sequence is synthesized)
ctcccgaaggcttggagggaggagtctctgggcacccgggtgaaaggaaggttcacgtgcaaccgccgcgtctttttttccctgaagcgctttcatggaggcagatgtttgtcagtcaag

SEQ ID NO: 627144 - DNA, 120 bp, Artificial Sequence
  ENSG00000178971_42 (sequence is synthesized)
ggaagtaagaaaggcattggatgaaaacgaagccctaagcctcgtagtcgtggccgagtggttaaggcgatggactagaaatccattggggtctccccgcgcaggttcgaatcctgccga

SEQ ID NO: 627145 - DNA, 120 bp, Artificial Sequence
  ENSG00000178971_43 (sequence is synthesized)
ctacgtcatatttttttcttcagcatactgaccatatttctctccaggatgggatgatccagtcggcaccctccaaacctctcatctaggaactctagaatcgagaatttgatttagagt

SEQ ID NO: 627146 - DNA, 120 bp, Artificial Sequence
  ENSG00000178971_44 (sequence is synthesized)
ctatgattttggtttgaaatctatgattaacgtctttggacattgaaggaaatccgaggaatggacaagtgatgcaagagccagttgagttaccaaattagttctagaaagatctgaaaa

SEQ ID NO: 627147 - DNA, 120 bp, Artificial Sequence
  ENSG00000178971_45 (sequence is synthesized)
agctcggtccgggttcctagctctatattcttgtagatgaatttcaggaacctttatggcagcttcggcgccgtggcttagttggttaaagcgcctgtctagtaaacaggagatcctggg

SEQ ID NO: 627148 - DNA, 120 bp, Artificial Sequence
  ENSG00000178971_46 (sequence is synthesized)
ttcgaatcccagcggtgcctttattcaattgaaacagcgtgattttgcggctaaatccacatcctttcatgtattgtttttatatcagaacgcgtaagagtttctgttctgcactcatag

SEQ ID NO: 627149 - DNA, 120 bp, Artificial Sequence
  ENSG00000178971_47 (sequence is synthesized)
cacccacatttcctgcagagtcaagctgccactcccatgagatcgccactctaaaaggtggttctctaacttaggggcagaaatgttgcataggcctaagggtcctttgcttaactgatg

SEQ ID NO: 627150 - DNA, 120 bp, Artificial Sequence
  ENSG00000178971_48 (sequence is synthesized)
ccacaccccactggtgcaggtggactgggtcaggcggccgccccaccctcgatggaaggggctgcccaccttccaggcctctttctccaccctaggacgtcccctagaacctgagccact

SEQ ID NO: 627151 - DNA, 120 bp, Artificial Sequence
  ENSG00000178971_49 (sequence is synthesized)
ttgttttgtttggctcttcattatagttctttgggtttggtggctcataatgttatatatatagtatataatataaaaatatatatttaaatatacagtatttaaaatttggcacagctt

SEQ ID NO: 627152 - DNA, 120 bp, Artificial Sequence
  ENSG00000178971_50 (sequence is synthesized)
ccagatgcggtcctctaactggtctttcacttgcagttacctccatccctctccaccagcgggatgtcagggtaaggagtaagcagggatccggctggcctggcctggcctggcaccagg

SEQ ID NO: 627153 - DNA, 120 bp, Artificial Sequence
  ENSG00000178971_51 (sequence is synthesized)
tttcgtgcagcagggtgcagaagggctgaggccatgtgaacagagtccaagaaagcatcattcgggagtcgctagggatcctggtgtggaagggcagggcacttttctggagcactgaag

SEQ ID NO: 627154 - DNA, 120 bp, Artificial Sequence
  ENSG00000178971_52 (sequence is synthesized)
ctaggctggttaaggaagaaataaatgccagagataaggcaagaaataggatctgtgagctcttggcaggacctaaacctccttggaagataggcagaaagctctcgacaccattccatg

SEQ ID NO: 627155 - DNA, 120 bp, Artificial Sequence
  ENSG00000178971_53 (sequence is synthesized)
gcccacgaaccaatgtaagatgagcaaatggcttgaaggaattgctacctccaggtcaagccagggatgcagcactgccgagaccacgtttgtgccaagcactgggctggaccctgtgca

SEQ ID NO: 627156 - DNA, 120 bp, Artificial Sequence
  ENSG00000178971_54 (sequence is synthesized)
gaaccaaatgaacaaggcacgttcccctttcagcactaacggcactgtaagaacagggagaagtggaatctaatctggcctgagggtagagggtgatcagctaagtctgaaacaccatgt

SEQ ID NO: 627157 - DNA, 79 bp, Artificial Sequence
  ENSG00000178971_55 (sequence is synthesized)
gggaggctgaggcaagagaatcgcttcaaccttggaggggggaggaggtgttgtcagccgagatcgcgccactgcatcg

SEQ ID NO: 627158 - DNA, 120 bp, Artificial Sequence
  ENSG00000178971_56 (sequence is synthesized)
cggaatgcacacaatgagatccttgaagagccacatcactgtcccctccagaaagtatgaggatgtgggggaaggatggtggcagaacactggaggacacctggggcccatgggacacac

SEQ ID NO: 627159 - DNA, 120 bp, Artificial Sequence
  ENSG00000178971_57 (sequence is synthesized)
ctcagcctcccaaagtgctgggatttaggggcgtgagccaccttgtgcgggttttgaatgatctgccacaaccctctttttcccataggccctgttactcttagtgtgcagtgtggcaga

SEQ ID NO: 627160 - DNA, 120 bp, Artificial Sequence
  ENSG00000178971_58 (sequence is synthesized)
tgttactcttagtgtgcagtgtggcagagctcaggttttttcaggactttatatatgaagttctagcagatactttagctccattttctgccttgaatctgactgtctccactctgtgct

SEQ ID NO: 627161 - DNA, 68 bp, Artificial Sequence
  ENSG00000178971_59 (sequence is synthesized)
cttaaattctttgcgtgcctcccagtgcatataaagttttacttggggttctggtggcttcatctcat

SEQ ID NO: 627162 - DNA, 120 bp, Artificial Sequence
  ENSG00000178971_60 (sequence is synthesized)
gcgtcctgagctgtgaggtgagtggaaggtggagatcagatgcctcagatcctgacaagaatggtgtccaaggatcaaggcaattaagtctctgaggaaacaaacggggaggtgggtgga

SEQ ID NO: 627163 - DNA, 120 bp, Artificial Sequence
  ENSG00000178971_61 (sequence is synthesized)
agcctgctgggatttactagagatgcagaagtgacacatgtcaatcaacaacttctgggagacttgtatggcaggcagagaacaggagcaagaggacccctagccagaatttccagcatg

SEQ ID NO: 627164 - DNA, 120 bp, Artificial Sequence
  ENSG00000178971_62 (sequence is synthesized)
gtggtcagtccccattccaggccactgcctcttgccatatcgtctctgtcttcagccttcagctcttctgggtgtgtgcttattgtaccagcatctgccggcagtcttcagccagggttg

SEQ ID NO: 627165 - DNA, 120 bp, Artificial Sequence
  ENSG00000178971_63 (sequence is synthesized)
gtttggagagaaggtgtcacccctctaaggtgggggtcaggtgtgggctttcatgtcatgtgagggcagcagctctggcctgggatgggtagtgaggccggtaggatggtttgccttgca

SEQ ID NO: 627166 - DNA, 120 bp, Artificial Sequence
  ENSG00000178971_64 (sequence is synthesized)
agtgtcacctgcctcctcttgctactgatgtggctctctggaatgtgcacccctgcttaactttgctgcagcgaccccttctctttcatacaggtttccatatatcagtctgccatttgt

SEQ ID NO: 627167 - DNA, 120 bp, Artificial Sequence
  ENSG00000178971_65 (sequence is synthesized)
gcccagccagtaccctcacgaggtgttgcaggctggtcctcctcctagtcttcccctagctttggtagagccatggctaggatatgtccctcagggggagtggccactctgtggtgcttg

SEQ ID NO: 627168 - DNA, 120 bp, Artificial Sequence
  ENSG00000178971_66 (sequence is synthesized)
atctctgagtcccagcttctaccccaatttgccttgtcttcctggtcactcactattcctcttccacttgcagatctcacaatgtttattgttgtttccggtcatccacttatgtgcagg

SEQ ID NO: 627169 - DNA, 120 bp, Artificial Sequence
  ENSG00000178974_0 (sequence is synthesized)
cgactcagcggtggggagtgagccaggcctcccgccaccgctgctgccgccaccactgcgtcgggctggtgcagccccgggccaggccgcggccggggcaggagcgcaggggctttgtta

SEQ ID NO: 627170 - DNA, 120 bp, Artificial Sequence
  ENSG00000178974_1 (sequence is synthesized)
ctttgttatgcacctaaagccatattggaagctccagaagaaagagcaccccccggaagtcagcagggaaacgcagagaactcctatgaaccaccaaaaggctgtaaatgatgaaacatg

SEQ ID NO: 627171 - DNA, 120 bp, Artificial Sequence
  ENSG00000178974_2 (sequence is synthesized)
caaagctagccacataacatcaagtgtctttccttcagcctctctcggtaaagcatcatctcgaaagccatttgggatcctttctccaaatgttctgtgcagtatgagtgggaagagtcc

SEQ ID NO: 627172 - DNA, 120 bp, Artificial Sequence
  ENSG00000178974_3 (sequence is synthesized)
tgtagagagcagcttgaatgttaaaaccaaaaagaatgcaccatctgcaacgatccaccagggcgaagaagaaggaccacttgatatctgggctgttgtgaaacctggaaataccaagga

SEQ ID NO: 627173 - DNA, 120 bp, Artificial Sequence
  ENSG00000178974_4 (sequence is synthesized)
aaaaattgcattctttgcatcccaccagtgtagtaacaggataggatctatgaaaataaaaagttcctgggatattgatgggagagctactaagagaaggaaaaaatcaggggatcttaa

SEQ ID NO: 627174 - DNA, 120 bp, Artificial Sequence
  ENSG00000178974_5 (sequence is synthesized)
aaaagccaaggtacaggtggaaaggatgagggaggttaacagcaggtgctaccaacctgagccttttgcatgtggcattgagcactgttctgtgcactatgtgagtgacagtggggatgg

SEQ ID NO: 627175 - DNA, 120 bp, Artificial Sequence
  ENSG00000178974_6 (sequence is synthesized)
agtctatgctgggaggcctctgtcagttatacagatggttgccttcttggagcaaagagccagtgctctgctagctagctgttcaaaaaactgcacaaactcacctgcaattgtgaggtt

SEQ ID NO: 627176 - DNA, 120 bp, Artificial Sequence
  ENSG00000178974_7 (sequence is synthesized)
ttctggccaatccagaggtgtgcctgcagtgtctgagtcctattctgccccaggagcttgtgaagaacccacagaaaggggaaatcttgaggttggtgaaccacagagcgaaccagtccg

SEQ ID NO: 627177 - DNA, 120 bp, Artificial Sequence
  ENSG00000178974_8 (sequence is synthesized)
tgtccttgacatggtagccaagttggagtctgagtgcctgaagcggcagggccagcgtgagcctgggagcctctcaaggaataacagcttccgtcgaaatgtgggcagagtattgcttgc

SEQ ID NO: 627178 - DNA, 120 bp, Artificial Sequence
  ENSG00000178974_9 (sequence is synthesized)
aaatagcactcaggctgatgaaggcaaaacaaagaaaggcgtcttggaggcacctgacactcaggtgaatcctgtggggtctgtatctgtggattgtggcccttcaagagctgatcgttg

SEQ ID NO: 627179 - DNA, 120 bp, Artificial Sequence
  ENSG00000178974_10 (sequence is synthesized)
ttctcctaaggaggaccaggcctgggacggtgcttctcaggactgccccccattgccagcaggagtgagtttccacatagacagtgcagagttagagccgggttcgcaaactgccgtgaa

SEQ ID NO: 627180 - DNA, 120 bp, Artificial Sequence
  ENSG00000178974_11 (sequence is synthesized)
aaacagcaacagatatgatgtggaaatgacagatgaactcgttgggttacctttttcctctcatacctattcccaagcctctgaattgcccacagatgctgttgattgtatgagcagaga

SEQ ID NO: 627181 - DNA, 120 bp, Artificial Sequence
  ENSG00000178974_12 (sequence is synthesized)
gcttgtgtcccttactagccgaaatcctgatcaaagaaaagaatctttgtgcattagtatcactgtgtccaaggtagacaaagaccagccttccattttaaactcctgtgaagacccagt

SEQ ID NO: 627182 - DNA, 120 bp, Artificial Sequence
  ENSG00000178974_13 (sequence is synthesized)
tgctgggggtgacagtgcatctgaggaaaaaagtgggtctgctgagccatttgtactgccagcctcttctgtggaaagtacattaccagtgcttgaggcatccagttggaagaagcaggt

SEQ ID NO: 627183 - DNA, 120 bp, Artificial Sequence
  ENSG00000178974_14 (sequence is synthesized)
gtcgcatgacttcctggagaccaggtttaaaatccagcagcttttggagcctcagcagtacatggcttttctgccccaccacattatggtaaaaatcttcaggttacttcccaccaagag

SEQ ID NO: 627184 - DNA, 120 bp, Artificial Sequence
  ENSG00000178974_15 (sequence is synthesized)
tttagtggcccttaaatgtacctgctgctatttcaagtttatcattgagtactacaatatcaggccagcagattctcgctgggttcgagatccacgctatagagaggatccttgcaaaca

SEQ ID NO: 627185 - DNA, 120 bp, Artificial Sequence
  ENSG00000178974_16 (sequence is synthesized)
gtgcaagaaaaagtatgtgaaaggggatgtgtccctgtgccgatggcaccccaagccctattgccaggcattgccctatgggccagggtattggatgtgctgccaccggtctcagaaagg

SEQ ID NO: 627186 - DNA, 120 bp, Artificial Sequence
  ENSG00000178974_17 (sequence is synthesized)
attccctggctgtaagctggggcttcatgacaatcactgggttcctgcctgccacagctttaatcgggcaatccataagaaagcaaaagggactgaagctgaagaggaatactaaagtcc

SEQ ID NO: 627187 - DNA, 120 bp, Artificial Sequence
  ENSG00000178974_18 (sequence is synthesized)
atgtgagaggcaacaaaaggaccggtttctaaagctgcaaaacacctagatacaccgttcaaatgagcgtagccccctgagtcatcactctagaagaatctgtacatcatcaggactgca

SEQ ID NO: 627188 - DNA, 120 bp, Artificial Sequence
  ENSG00000178974_19 (sequence is synthesized)
ttgctcaggcattttctaaactctaaatttacgagctgtacaaaaaaattggtcttgttgtttatagtggcatctcatgtttgaacccgggtggtatcccacagttggattcagttggct

SEQ ID NO: 627189 - DNA, 120 bp, Artificial Sequence
  ENSG00000178974_20 (sequence is synthesized)
gtgaataactgcctgttttcctaaatcaaacccatcctcaaaggatgaagactcaccaccatccaggacattcagaagagttcactgcagatgctgcaggtagtcctcaaaaatgggttc

SEQ ID NO: 627190 - DNA, 120 bp, Artificial Sequence
  ENSG00000178974_21 (sequence is synthesized)
cagaaatgttttgagcactggcaacatatttgaaataagtgaatattgtcctgtgaaaagaatagcaggacttttagatgaaaagtattcttaaaaagaaaagtcaggcaccccacctta

SEQ ID NO: 627191 - DNA, 120 bp, Artificial Sequence
  ENSG00000178974_22 (sequence is synthesized)
gacctcgtatgcttgatcctgtgagattgatgtttgtggctggaggtggatttcatgccctgtggtgtttacagtgtatataatggttgtgttttcatggggctatgaaagtgcacgtta

SEQ ID NO: 627192 - DNA, 120 bp, Artificial Sequence
  ENSG00000178974_23 (sequence is synthesized)
aacctgagcgcctttacctttagatgagtgctttggcccctctgtgaatagcacgattaaaatccagttgtatataatggacagctaacggaacaatataatcaccacaatgcagctagg

SEQ ID NO: 627193 - DNA, 120 bp, Artificial Sequence
  ENSG00000178974_24 (sequence is synthesized)
atagtgttgcggctataattttgtgttttttttttttaattgtctagtcttaaatttgtacatcttgtataaaatatgaatgtttcccaaataaactatgaatgtttcctgtataatata

SEQ ID NO: 627194 - DNA, 120 bp, Artificial Sequence
  ENSG00000178974_25 (sequence is synthesized)
tgaatgtttctgagaagaaactctaaatagttgaaaggctaacctgctcaaaggataccaaataatggtttaactggacaacctgaaaattagcatagaaaacaatcctttgttatattt

SEQ ID NO: 627195 - DNA, 120 bp, Artificial Sequence
  ENSG00000178974_26 (sequence is synthesized)
tagtgatccacaagattgagaaaatattatatagttagataataacattcttgtctactttatcctgtctggttacaaaattttttaaaacttaaataaaaacatgcatcttaaatggaa

SEQ ID NO: 627196 - DNA, 120 bp, Artificial Sequence
  ENSG00000178974_27 (sequence is synthesized)
gatgtcactgcaggcccgggcggggacctgggctcacggaagggccggggggacccgcagggtagaaaaaggaagttgtcttccacgaacgcttggaatcgcagtggatttgaatcgaaa

SEQ ID NO: 627197 - DNA, 120 bp, Artificial Sequence
  ENSG00000178974_28 (sequence is synthesized)
agagcagagggcacacccttacttgatcatctgaagcaaaaaccagaaccagggaaactagaggaggagtcagggagctgctgctcctattcctggagtggttcacctctcccctgccca

SEQ ID NO: 627198 - DNA, 120 bp, Artificial Sequence
  ENSG00000178974_29 (sequence is synthesized)
gtggatggtccagacccaaggaaggagtgaattgaaagctaaggaggggctcagagacagcttcttacacctcatgagccaacctctgctagcttttgactttccttctgcagcttcctc

SEQ ID NO: 627199 - DNA, 120 bp, Artificial Sequence
  ENSG00000178974_30 (sequence is synthesized)
acttctctcaaccatcagagaattaaagagatagggcgttgttctgggtaaggctttgacttaaggtaatgtggctggtttcatctatctagaccactaaagctttctccgtatcagcaa

SEQ ID NO: 627200 - DNA, 120 bp, Artificial Sequence
  ENSG00000178974_31 (sequence is synthesized)
tccgactcagcggtggggagtgagccaggcctcccgccaccgctgctgccgccaccactgcgtcgggctggtgcagccccgggccaggccgcggccggggcaggagcgcagccatattgg

SEQ ID NO: 627201 - DNA, 120 bp, Artificial Sequence
  ENSG00000178974_32 (sequence is synthesized)
cagggtagaaaaaggaagttgtcttccacgaacgcttggaatcgcagtggatttgaatcgaaagttgttcggtctttggggaaggatcaacaaagagctatgtgtttagtctaccatcct

SEQ ID NO: 627202 - DNA, 120 bp, Artificial Sequence
  ENSG00000178974_33 (sequence is synthesized)
ttcagcctctctcgatcagccactcttgatctggttttcatgtgggacacaaagctgtgactgcgtgaggggttaaagtgaccaagagcagagggcacacccttacttgatcatctgaag

SEQ ID NO: 627203 - DNA, 120 bp, Artificial Sequence
  ENSG00000178980_0 (sequence is synthesized)
atcctttctgcgcaggttcccgccgcactcgcgcagacctagcgcgtccaggtgggaggttagtgtggcccgggcgtccgctcctcagcggatgtggcagccccgagccatggctctcgc

SEQ ID NO: 627204 - DNA, 120 bp, Artificial Sequence
  ENSG00000178980_1 (sequence is synthesized)
cgtccgagtcgtttattgtggcgcttgaggctacaagtccaagtatcttcagctcaagaagaagttagaagatgagttccccggccgcctggacatctgcggcgagggaactccccaggc

SEQ ID NO: 627205 - DNA, 120 bp, Artificial Sequence
  ENSG00000178980_2 (sequence is synthesized)
gacacagaaagcaagtttctgaagttggtggccgccatcaaagccgccttggctcagggctaatgcgccctgaaggcagagattgacgcccccggtctttgcctctgagcgggagagtct

SEQ ID NO: 627206 - DNA, 120 bp, Artificial Sequence
  ENSG00000178980_3 (sequence is synthesized)
gtgtgtatgtgtcttccccggaatccacaccaccccaccctcctcctgtcccgtggtttcatcatatctctttgcataccccatgtcttccccagttgtcccctggagtttggggggaca

SEQ ID NO: 627207 - DNA, 120 bp, Artificial Sequence
  ENSG00000178980_4 (sequence is synthesized)
gccccatgctctgactccttggcccagggtggagagcctgggagatgggggggacatcacgtgtgtccccagagcgagcgggataaagttagacccggttggtggaggacaacaactgag

SEQ ID NO: 627208 - DNA, 120 bp, Artificial Sequence
  ENSG00000178980_5 (sequence is synthesized)
cgcttcatgataggaaggactgaaaagtcttgtggacacctggtctttccctgatgttctcgtggctgctgttgggggcagagattgacgcccccggtctttgcctctgagcgggagagt

SEQ ID NO: 627209 - DNA, 120 bp, Artificial Sequence
  ENSG00000178980_6 (sequence is synthesized)
ccgcctcaggcatccttctcaaggggaagccaagagaggcatcaggatgggtgggtttctgattgtggcaacgtttgcaaccgttcacgattcaataaatattggatgaatttaactgaa

SEQ ID NO: 627210 - DNA, 120 bp, Artificial Sequence
  ENSG00000178980_7 (sequence is synthesized)
atttcgagtaggtcactaattatcaccgggctctgaacctgagaattagttctaggaatattccagacctgatccagctccagaaacttacccactttggaactgaacatgagtccaaga

SEQ ID NO: 627211 - DNA, 120 bp, Artificial Sequence
  ENSG00000178980_8 (sequence is synthesized)
atgctctagaaacaaatgctaactctagaatggattgtctgctccaaaaaaaccctagagctgactcccagttctccccatagagccgagaatgaaatacaccaccagctcccaacacac

SEQ ID NO: 627212 - DNA, 120 bp, Artificial Sequence
  ENSG00000178980_9 (sequence is synthesized)
tgtaaacctgagccccccttcccaacccagcaattgaaaaatgtgaaccagctcctaagcactagaattgaccactagttcctggagttggctactggttccttatcactgtttttcttt

SEQ ID NO: 627213 - DNA, 120 bp, Artificial Sequence
  ENSG00000178980_10 (sequence is synthesized)
attacaggcgtgagccaccgtgcttggcctccttaagcactctgaaccaagtattgtttccagcctaatacattgtggaacaagtggcaatttctatatgaacctcaggaacaaagaact

SEQ ID NO: 627214 - DNA, 120 bp, Artificial Sequence
  ENSG00000178980_11 (sequence is synthesized)
gaacaaagaactactttccagcaccttctgagtctgattttccagtttgtaagccagtatggtccagataagcgtgaaacccaacccattctagaacagttactagccctttttctggtc

SEQ ID NO: 627215 - DNA, 73 bp, Artificial Sequence
  ENSG00000178980_12 (sequence is synthesized)
ccaacccattctagaacagttactagccctttttctggtctctggcactgcagggcctggagcatagtttagt

SEQ ID NO: 627216 - DNA, 120 bp, Artificial Sequence
  ENSG00000178980_13 (sequence is synthesized)
gggttcaagggattcttgtgtctcagcctcgtgagtagctggaattacagatgtctgccaccatgctgggcaaatttttttttttttttctaagacggagtctctgtcgcccaggctgga

SEQ ID NO: 627217 - DNA, 120 bp, Artificial Sequence
  ENSG00000178980_14 (sequence is synthesized)
gtgagccactgcgcctggccatactttttactcccctctaaccttcagcaccagttcccattccatgttgatctagaacagagtatcccatcccaacacactgtggacccaagtaccagc

SEQ ID NO: 627218 - DNA, 120 bp, Artificial Sequence
  ENSG00000178980_15 (sequence is synthesized)
tcccagtgtgccttgtgccagaaaactagttttcaaatgcgttaaactcaagttccatttcctaaaattctttaccagagcagaatgaggtcatgttcaatgtgaattgggacgtgccaa

SEQ ID NO: 627219 - DNA, 120 bp, Artificial Sequence
  ENSG00000178980_16 (sequence is synthesized)
tttgaagtaatgcagaaacgatatcttgccttatgtgcaggtctgaaacaaagcaaatccctctaacataaaggaaaagaaaaatggaattgcctaattccaaagctgcatcagctgaat

SEQ ID NO: 627220 - DNA, 120 bp, Artificial Sequence
  ENSG00000178980_17 (sequence is synthesized)
tggaattgcctaattccaaagctgcatcagctgaatgcattgtggactgttgctgttgagcgtggggtggggtgccaccatgcaggctttgaattcttttttttttttgagacagagtct

SEQ ID NO: 627221 - DNA, 73 bp, Artificial Sequence
  ENSG00000178980_18 (sequence is synthesized)
tcacgcccagctaatttttctagtttttgtagagatgggtttttttcaccatgttgcccagactggtctcaaa

SEQ ID NO: 627222 - DNA, 120 bp, Artificial Sequence
  ENSG00000178980_19 (sequence is synthesized)
tgcaccatcacgcccagctaatttttctagtttttgtagagatgggtttttttcaccatgttgcccagactggtctcaaactcttgggctcaagtgatccgcccgcctcagcctcacaaa

SEQ ID NO: 627223 - DNA, 120 bp, Artificial Sequence
  ENSG00000178980_20 (sequence is synthesized)
tttcttccttttaacatgggccccacgcctggcctctgttcctgcaaactgactccctaccccaaccacctctttttctctccacagtccagggaccttgacccagcccctctcagcaga

SEQ ID NO: 627224 - DNA, 120 bp, Artificial Sequence
  ENSG00000178980_21 (sequence is synthesized)
gcagacctagcgcgtccaggtgggaggttagtgtggcccgggcgtccgctcctcagcggatgtggcagccccgagccatggctctcgccgtccgagtcgtttattggaatcccttaagag

SEQ ID NO: 627225 - DNA, 89 bp, Artificial Sequence
  ENSG00000178980_22 (sequence is synthesized)
gctctcgccgtccgagtcgtttattggaatcccttaagagaggggaattttaggccaggtgccgttgatcacgcctgtaatccaaacac

SEQ ID NO: 627226 - DNA, 88 bp, Artificial Sequence
  ENSG00000178980_23 (sequence is synthesized)
ggagcccggaaggcggaagttgcagtgagctgaaatcgtgccactgcactccatcctggacagcagagcgagactctgtctcaaaaaa

SEQ ID NO: 627227 - DNA, 120 bp, Artificial Sequence
  ENSG00000178980_24 (sequence is synthesized)
gttctatgttacaggtgagaaaactgaggctgggactggggtgggggcaggtcagtagcttcaagtctggactgcaggtgacaggggtaactggaacctgggtttgtcggcagctttcca

SEQ ID NO: 627228 - DNA, 120 bp, Artificial Sequence
  ENSG00000178980_25 (sequence is synthesized)
agagtggatgcccggggggcattcctgggagctggggaggggtagagtgcatattgggagggggctgactggtatgacccctgctgtgacctctcaccgcgttttcagtatcttcagctc

SEQ ID NO: 627229 - DNA, 120 bp, Artificial Sequence
  ENSG00000178980_26 (sequence is synthesized)
aggacatcttagcccctccaacatctcccctaccccctttcctcagtgcggcgagggaactccccaggccaccgggttctttgaagtgatggtagccgggaagttgattcactctaagaa

SEQ ID NO: 627230 - DNA, 120 bp, Artificial Sequence
  ENSG00000178980_27 (sequence is synthesized)
cccctgtatgtgggtggggtgggcgtacggaggggcgaaaaacagagggcggtcgtccctaggccccgtcttcgacttgtgacacgctgggcatctcgggttataaaaggtggggctgag

SEQ ID NO: 627231 - DNA, 120 bp, Artificial Sequence
  ENSG00000178980_28 (sequence is synthesized)
acgagtgtgtgtcaatttcgaacccccgactccggggctccgctggggaaggggctgggggtcagctttgtaaagggacctaaggctcctccaccctaaggcttcccctcccccaatatc

SEQ ID NO: 627232 - DNA, 120 bp, Artificial Sequence
  ENSG00000178980_29 (sequence is synthesized)
ccgaacagtcgcggggtggggacagtgagagcccagaaggttcgagaatgtctcagcctgtgtttcagaagcacttgaattgttggcctctgcccagtgggttcccttggccacgaaccc

SEQ ID NO: 627233 - DNA, 120 bp, Artificial Sequence
  ENSG00000178980_30 (sequence is synthesized)
cactccttttctggcctcagttttccgtctgtggcaagagggaggctctgtgtcaataccgaacacgcttaatttctgcaagtctcaggaagggtataataggataggatataaattacg

SEQ ID NO: 627234 - DNA, 120 bp, Artificial Sequence
  ENSG00000178980_31 (sequence is synthesized)
cctaccaggcctgtacaccagattccagtcccgaaatagcctgctgtgggggttgggtgagcctgtatttcaccctggggactgggaaggtgttcagaatctaggagctgcggggccggg

SEQ ID NO: 627235 - DNA, 90 bp, Artificial Sequence
  ENSG00000178980_32 (sequence is synthesized)
ccagcctggccaacatggtaagaatccaggagccgcagggttttccttggagtgctgcgagggctgtgggtgagggtggtgggcacaggg

SEQ ID NO: 627236 - DNA, 120 bp, Artificial Sequence
  ENSG00000178980_33 (sequence is synthesized)
agtgctgcgagggctgtgggtgagggtggtgggcacagggagtgggtggggaccttacgtgtgctgttcttctcctaatccagttctcctggttttcccccgtccccgtctctcgtattt

SEQ ID NO: 627237 - DNA, 120 bp, Artificial Sequence
  ENSG00000178980_34 (sequence is synthesized)
gtggtctccttgtctcctctctcccctttttcccctcccccttctctgtctcttgcttggtgttggttttctgtgtgtctctgtgtgtccccgcgccaccccctgtgctgtgtcccaaaa

SEQ ID NO: 627238 - DNA, 120 bp, Artificial Sequence
  ENSG00000178980_35 (sequence is synthesized)
ctctgcctggctggtgcctgtcttctctcttgagggcatctgtcacctcttctgcttggtcatctgtgttcctctttatttcttcctggccccatcttgctctctccccacaccgcctgt

SEQ ID NO: 627239 - DNA, 120 bp, Artificial Sequence
  ENSG00000178980_36 (sequence is synthesized)
gcagacctagcgcgtccaggtgggaggttagtgtggcccgggcgtccgctcctcagcggatgtggcagccccgagccatggctctcgccgtccgagtcgtttattgaaacttaaaaagtt

SEQ ID NO: 627240 - DNA, 120 bp, Artificial Sequence
  ENSG00000178982_0 (sequence is synthesized)
ctcttcctgttcccgtccttgaggacgccgtgccgggtcagtgttagcctccagccctggttgtggaaggcgacagaagtcatggcgatgtttgagcagatgagagccaacgtgggcaag

SEQ ID NO: 627241 - DNA, 120 bp, Artificial Sequence
  ENSG00000178982_1 (sequence is synthesized)
ttgctcaagggtatcgacaggtacaatcctgagaacctggccaccctggagcgctatgtagagacgcaggccaaggaaaatgcctatgatctggaagccaacctggctgtcctgaagctg

SEQ ID NO: 627242 - DNA, 120 bp, Artificial Sequence
  ENSG00000178982_2 (sequence is synthesized)
taccagttcaacccagccttctttcagaccacggtcaccgcccagatcctgctgaaggccctcaccaacttgccgcacacagacttcaccctgtgcaagtgcatgatcgaccaggcacat

SEQ ID NO: 627243 - DNA, 120 bp, Artificial Sequence
  ENSG00000178982_3 (sequence is synthesized)
cctgccatttccaggccttctggcaagccctggatgaaaacatggacctcttggaaggtataactggctttgaagactctgtccgaaagtttatctgccatgttgtgggtatcacttacc

SEQ ID NO: 627244 - DNA, 120 bp, Artificial Sequence
  ENSG00000178982_4 (sequence is synthesized)
agcacattgaccgctggctgctggccgagatgctcggggatctgtcggacagccagctaaaggtgtggatgagcaaatacggctggagtgccgacgagtcggggcagatcttcatctgta

SEQ ID NO: 627245 - DNA, 120 bp, Artificial Sequence
  ENSG00000178982_5 (sequence is synthesized)
gccaagaagagagcattaaacccaagaacattgtggagaagattgactttgacagtgtgtccagcatcatggcctcctcccagtaacttcaggtgtttaataaagatgtgttgactcagc

SEQ ID NO: 627246 - DNA, 120 bp, Artificial Sequence
  ENSG00000178982_6 (sequence is synthesized)
ctggagacctgccatttccaggccttctgggtaacttccctggggtccaggggcaggggagatggcagggccatgtggagctgagtgctaaaagtaacaacggtgcacactgactggctt

SEQ ID NO: 627247 - DNA, 120 bp, Artificial Sequence
  ENSG00000178982_7 (sequence is synthesized)
tttggggctaagggggtgcccctcaagggaggccgaggcaggggcccagaggacctgggtagatctgctcgtgttctgggctgggaagtctgcacctgccagattccattcaccttgtgt

SEQ ID NO: 627248 - DNA, 120 bp, Artificial Sequence
  ENSG00000178982_8 (sequence is synthesized)
cttggggctcccgcccaggaggaatagcggggagctgggtgatcttccctggaacttctaggccctgtgtcctgccccatagcactcagcaagacttcctggggcccagcggggcctcac

SEQ ID NO: 627249 - DNA, 120 bp, Artificial Sequence
  ENSG00000178982_9 (sequence is synthesized)
agggggtctctgcacccttatttgtccctgaggcctgtctcgttggccatcttttattcttggggtgcccaagcctcatgtgcagacttggaatccggtgaacagtaggaatcttgattc

SEQ ID NO: 627250 - DNA, 120 bp, Artificial Sequence
  ENSG00000178982_10 (sequence is synthesized)
tctagtttgggtgattccacatttttgtgcctcagttttctcatctaaaaaatggggacgactgcaacagtaactatgataaacactgtgtaggtccttacacttacatcatttgatcct

SEQ ID NO: 627251 - DNA, 120 bp, Artificial Sequence
  ENSG00000178982_11 (sequence is synthesized)
cagttgctaaatgatataaatagtatcatacctacctcatggcatcataagtgtgaatgcatgtataacacttagcaaagagctaagtgaccacacagttcattaaatgttcattatgac

SEQ ID NO: 627252 - DNA, 120 bp, Artificial Sequence
  ENSG00000178982_12 (sequence is synthesized)
taacaatctgatctttcttttccccacacattactgataagaacgttgttgataggtaagattaccagtgtaggctgggagtggtggctcacccctgtaatcccaacgctttgagaggcc

SEQ ID NO: 627253 - DNA, 79 bp, Artificial Sequence
  ENSG00000178982_13 (sequence is synthesized)
gttgttgataggtaagattaccagtgtaggctgggagtggtggctcacccctgtaatcccaacgctttgagaggccagc

SEQ ID NO: 627254 - DNA, 120 bp, Artificial Sequence
  ENSG00000178982_14 (sequence is synthesized)
ccgacagattttgtacctcggggacctgctggagacctgccatttccaggccttctgggcttctctgttccgcttccttctcttaaatcgcatgtgctggctgggcatggtggctcacac

SEQ ID NO: 627255 - DNA, 120 bp, Artificial Sequence
  ENSG00000178982_15 (sequence is synthesized)
gtaagtccctctctgaggctgggctccccaaggggaaggggtagggagtggcagccaggtccggggggacagctgctcaccggttttgtctctgacctccacagttatctgccatgttgt

SEQ ID NO: 627256 - DNA, 120 bp, Artificial Sequence
  ENSG00000178982_16 (sequence is synthesized)
tgctcggggatctgtcgggtaacgccctctgggtcctggtgcacatctgggaggttgggggtggctagggcagtggacctcagtcagctcctccaacaggcctgtctgggtctcatcagg

SEQ ID NO: 627257 - DNA, 120 bp, Artificial Sequence
  ENSG00000178982_17 (sequence is synthesized)
tcagcatggaaggcccagcccaaggaggaaataagaacttggtataagacagtctctgccttgagggagatcctatgccatttgctcatttattttgcattaattgagtgcctaccgtgt

SEQ ID NO: 627258 - DNA, 120 bp, Artificial Sequence
  ENSG00000178982_18 (sequence is synthesized)
gacagattttgtacctcggggacctgctggagacctgccatttccaggccttctgggtgtgtccagcatcatggcctcctcccagtaacttcaggtgtttaataaagatgtgttgactca

SEQ ID NO: 627259 - DNA, 75 bp, Artificial Sequence
  ENSG00000178982_19 (sequence is synthesized)
cagtagttgggattacaggaatgtgccaccacgccctgctaattttgtaattttagtagagtcagggtttctcca

SEQ ID NO: 627260 - DNA, 120 bp, Artificial Sequence
  ENSG00000178982_20 (sequence is synthesized)
agtgctctgcatgtgtgtgtttgtggaattatcatcctctcgcggagcaggtactcacaggtcatccccgtgcccacaggctgaggccgaccctttcccctttctcccatctttccactg

SEQ ID NO: 627261 - DNA, 120 bp, Artificial Sequence
  ENSG00000178988_0 (sequence is synthesized)
gactccattttgtaggccgcttatttgtgtgcatccacggcgattcttcccgcagagttgtgaagcgaaaggcttacaattaaaaggaagaaaaaaaaataaagataattcgggagtaca

SEQ ID NO: 627262 - DNA, 120 bp, Artificial Sequence
  ENSG00000178988_1 (sequence is synthesized)
attgacaaagcgtgtgggtcgctcagcctccagcagtaactgctgatctccagttcttggagggttccggtgagaagaacgcccctactgcggtactgaggaagcggcaggaggagatgc

SEQ ID NO: 627263 - DNA, 120 bp, Artificial Sequence
  ENSG00000178988_2 (sequence is synthesized)
ggcccctggacatagacgaggtggaagcgcctgaggaagtggaggtgctggagcccgaggaggatttcgagcagttcctgctcccggtcatcaacgagatgcgcgaggacatcgcgtctc

SEQ ID NO: 627264 - DNA, 120 bp, Artificial Sequence
  ENSG00000178988_3 (sequence is synthesized)
ttatacgcgagcacgggcgggcgtacctgcggaccaggagcaagctgtgggagatggacaatatgcttatccagatcaaaacgcaggtggaggcctcggaggagagcgccctcaatcacg

SEQ ID NO: 627265 - DNA, 120 bp, Artificial Sequence
  ENSG00000178988_4 (sequence is synthesized)
tgcagcacccgagtggcgaagccgacgagagagtgtcggagttgtgcgagaaggctgaggagaaagccaaggagattgcgaagatggcagagatgctggtcgagctcgtctggcgaatag

SEQ ID NO: 627266 - DNA, 120 bp, Artificial Sequence
  ENSG00000178988_5 (sequence is synthesized)
agagaagcgagtcttcttgaaggaggagatcggtggttcacagctgaggactgtagtcaactggtaaggatgaactgacaccttgaggaaactgaaacagcttgtcattttctctgtttt

SEQ ID NO: 627267 - DNA, 120 bp, Artificial Sequence
  ENSG00000178988_6 (sequence is synthesized)
ccccgatgtaacagtctcccttatggtcagtgattgatgacctcgatatggatttagattatcaaatgtgtttggttttggaaatataacttttgtcaaagaaatactctcagaagagaa

SEQ ID NO: 627268 - DNA, 120 bp, Artificial Sequence
  ENSG00000178988_7 (sequence is synthesized)
atggggcttaattaagttgtttttgtggtcacgtttattcttgttacttcgctgtgtttttgaaatgttgggcatggcctcgtattttgctgttacctttgtgacctgattgttttttgg

SEQ ID NO: 627269 - DNA, 120 bp, Artificial Sequence
  ENSG00000178988_8 (sequence is synthesized)
aacacgtcaagacgtgggatcagaatcttccaactttagaggtgcaatggaagacactacgctacttggttgagcctggtgaagaatgtattaatgagactgctttgcataaaactggga

SEQ ID NO: 627270 - DNA, 120 bp, Artificial Sequence
  ENSG00000178988_9 (sequence is synthesized)
agaaagagaagacagttggagatggaagatggttttgtatatattttggaactttagttcctctgtgagacgaaagaggagagctatgttttgtggcacattgtctgatatatattgtgt

SEQ ID NO: 627271 - DNA, 120 bp, Artificial Sequence
  ENSG00000178988_10 (sequence is synthesized)
aacctgtcaggtgagttgatttagacaacatagctgaccttttatgacaaggcagtttgaatagggactattgtaataccctcacacattataggggcatcagagaatggcatggaagag

SEQ ID NO: 627272 - DNA, 120 bp, Artificial Sequence
  ENSG00000178988_11 (sequence is synthesized)
acagtctacagagagctttaagaggccggagaaaggaaaagacattatcagggcctggaaagtctcttccagttcatcagggtagtagacctgtcagattggaggtcaaagtcaaaagta

SEQ ID NO: 627273 - DNA, 120 bp, Artificial Sequence
  ENSG00000178988_12 (sequence is synthesized)
taataagtgttaatttgccttgaaaaacaaagacctaaaaagccttttttaagaaataaattttttgttcacatgaccaaagcccctcctgtgtgtgttaataaaagaatcataaacaaa

SEQ ID NO: 627274 - DNA, 120 bp, Artificial Sequence
  ENSG00000178988_13 (sequence is synthesized)
aggtcggaaactagctggagcttggatgaaactcagtagtcgccctaagcatggttaaaccgcgccctgtaaaaagttatgttctaggcctgcatcccccattttattgcatcaaaaatt

SEQ ID NO: 627275 - DNA, 120 bp, Artificial Sequence
  ENSG00000178988_14 (sequence is synthesized)
gagcattgggaacaaagttggggtcaagaggaaagaatgcgtgctggttttgttaggcgttagtataccgtttttttgtggcctctccctcccacgctgttaattagagaaagataacag

SEQ ID NO: 627276 - DNA, 120 bp, Artificial Sequence
  ENSG00000178988_15 (sequence is synthesized)
taacttcggttttgtttttgtgaaacataaaagtcaattctaatagggcagtcgccagaagtagacctgtctaggcactaagggagtttggggaaagccaaagaagacctaggccataga

SEQ ID NO: 627277 - DNA, 120 bp, Artificial Sequence
  ENSG00000178988_16 (sequence is synthesized)
atgagacaggtatgtcagaggaccgtgtctcaaagaagtggcattcttctgggtggttcacatttatttttaacatcaggatatggaactttgagagtcaatgtcttcatggtaaatttc

SEQ ID NO: 627278 - DNA, 120 bp, Artificial Sequence
  ENSG00000178996_0 (sequence is synthesized)
agtcggcgctgcgaagtggaggcgctgcgagcggagccgcgcggagggcgcgaccggctggtccgggcagcgtgggtttgccgccttcggggctccagtccgcgcgccagggctcgagca

SEQ ID NO: 627279 - DNA, 120 bp, Artificial Sequence
  ENSG00000178996_1 (sequence is synthesized)
gtaccgcgggcccctcaggtgggcctcggctcgggacgccgggagtcgggaccgccagtcggggcgccgggaccatggcgctgcgcgcccgggcgctgtacgacttcaggtcggagaacc

SEQ ID NO: 627280 - DNA, 120 bp, Artificial Sequence
  ENSG00000178996_2 (sequence is synthesized)
caggagagatctcgctgcgagagcacgaggtgctgagcctgtgcagcgagcaggacatcgagggctggctcgagggggtcaacagccgcggcgaccgcggcctcttcccggcctcctatg

SEQ ID NO: 627281 - DNA, 80 bp, Artificial Sequence
  ENSG00000178996_3 (sequence is synthesized)
tatgtgcaggtgatccgcgcccccgagcctggcccggcgggagacggcggcccgggcgccccggcccgctacgccaatgt

SEQ ID NO: 627282 - DNA, 120 bp, Artificial Sequence
  ENSG00000178996_4 (sequence is synthesized)
ccttcaagccgccgcctgacgccttccaggcgctgctgcagccacagcaggcgccgcctccgagcaccttccagccgcccggcgcgggcttcccgtacggcgggggcgccctgcagccgt

SEQ ID NO: 627283 - DNA, 120 bp, Artificial Sequence
  ENSG00000178996_5 (sequence is synthesized)
cgcctcagcagctctacggcggctaccaggccagccaaggcagcgatgatgactgggacgacgagtgggacgacagctccacggtggcggacgagccgggcgctctgggcagcggagcat

SEQ ID NO: 627284 - DNA, 120 bp, Artificial Sequence
  ENSG00000178996_6 (sequence is synthesized)
acccggacctcgacggctcgtcttcggcgggtgtgggcgcagccggccgctaccgcctgtccacgcgctccgacctgtccctgggttcccgcggcggctcggtccccccgcagcaccacc

SEQ ID NO: 627285 - DNA, 120 bp, Artificial Sequence
  ENSG00000178996_7 (sequence is synthesized)
cgtcggggcccaagagctcggccaccgtgagccgcaacctcaatcgcttctccaccttcgtcaagtccggcggggaggccttcgtgctgggggaggcgtcaggcttcgtgaaggacgggg

SEQ ID NO: 627286 - DNA, 120 bp, Artificial Sequence
  ENSG00000178996_8 (sequence is synthesized)
acaagctgtgcgtggtgctggggccctatggccccgagtggcaggagaacccctacccgttccagtgcaccatcgacgaccccaccaagcagaccaagttcaagggcatgaagagctaca

SEQ ID NO: 627287 - DNA, 120 bp, Artificial Sequence
  ENSG00000178996_9 (sequence is synthesized)
tctcctacaagctggtgcccacgcacacgcaggtgccggtgcatcggcgctacaagcacttcgactggctgtacgcgcgcctggcggagaagttcccggtcatctccgtgccccacctgc

SEQ ID NO: 627288 - DNA, 120 bp, Artificial Sequence
  ENSG00000178996_10 (sequence is synthesized)
ccgagaagcaggccaccggccgcttcgaggaggacttcatctctaagcgcaggaagggcctgatctggtggatgaaccacatggccagccacccagtgctggcgcagtgcgacgtcttcc

SEQ ID NO: 627289 - DNA, 120 bp, Artificial Sequence
  ENSG00000178996_11 (sequence is synthesized)
agcacttcctgacgtgccccagcagcaccgacgagaaagcctggaagcagggcaagaggaaggccgagaaggacgagatggtgggcgccaacttcttcctgacccttagcacgccccccg

SEQ ID NO: 627290 - DNA, 120 bp, Artificial Sequence
  ENSG00000178996_12 (sequence is synthesized)
ccgctgcccttgacctgcaggaggtggagagcaagatcgacggcttcaagtgcttcaccaagaagatggacgacagcgcgctgcagctcaaccacacggccaacgagttcgcgcgcaagc

SEQ ID NO: 627291 - DNA, 120 bp, Artificial Sequence
  ENSG00000178996_13 (sequence is synthesized)
aggtgaccggcttcaaaaaggagtatcagaaggtgggccagtccttccgcggcctcagccaggcctttgagctggaccagcaggccttctcggtgggcctgaaccaggctatcgccttca

SEQ ID NO: 627292 - DNA, 120 bp, Artificial Sequence
  ENSG00000178996_14 (sequence is synthesized)
ccggagatgcctatgacgccattggcgagctcttcgcggagcagcccaggcaggacctggatcccgtcatggacctattagcgctgtatcaggggcatctggctaacttcccggacatca

SEQ ID NO: 627293 - DNA, 120 bp, Artificial Sequence
  ENSG00000178996_15 (sequence is synthesized)
tccacgttcagaaaggagctcttaccaaagtcaaggagagtaggcgacacgtggaggaagggaagatggaggtgcagaaggctgacggcattcaggatcgctgtaacactatttcttttg

SEQ ID NO: 627294 - DNA, 120 bp, Artificial Sequence
  ENSG00000178996_16 (sequence is synthesized)
ccactttggctgaaattcaccacttccatcaaattcgagtgagagactttaaatcacagatgcagcatttcttacaacaacaaataatatttttccaaaaagttacccagaagttggaag

SEQ ID NO: 627295 - DNA, 120 bp, Artificial Sequence
  ENSG00000178996_17 (sequence is synthesized)
aagctcttcacaaatatgatagtgtttaatgactggacgttggattatggactttttcagttcaaggataatttctacagcagaataaaaactgctgtcaaagagctattgccagctatc

SEQ ID NO: 627296 - DNA, 120 bp, Artificial Sequence
  ENSG00000178996_18 (sequence is synthesized)
agtggtggtacaaggacggttttgtgttcatctgaaacccagctgaatttataattatgtaggaaataaacagttaatatggttatataatagaaacagtaccacacattgtaactaaat

SEQ ID NO: 627297 - DNA, 120 bp, Artificial Sequence
  ENSG00000178996_19 (sequence is synthesized)
tatactatgtatgcctacactaccattgtaacttttggaataatgattatactatttgccttattgctttttgaagtatgggtattttagtgcatactttgtagacctcaaaacccatga

SEQ ID NO: 627298 - DNA, 120 bp, Artificial Sequence
  ENSG00000178996_20 (sequence is synthesized)
agggtctcaaagaagctggctggatacaagcctgctgtggatgcctttttactctcatagattgggattacctaaattcaacctattctctgtttacaaactccaactagagcagctatg

SEQ ID NO: 627299 - DNA, 120 bp, Artificial Sequence
  ENSG00000178996_21 (sequence is synthesized)
gtaagccacagcttttctgattgaaagagtgaaaggccagtgcatataatgacaaactgatgataaccttatattggcagtagggggtggggggggcggtggggtgggacgatcagctgt

SEQ ID NO: 627300 - DNA, 120 bp, Artificial Sequence
  ENSG00000178996_22 (sequence is synthesized)
catcaatttgcacagcaagtattatctcctgataagatgctggtgaatgcaggggagtgagattcattgctcatctttggatatgaagtctgttagggaagaaacagtgccactattccc

SEQ ID NO: 627301 - DNA, 120 bp, Artificial Sequence
  ENSG00000178996_23 (sequence is synthesized)
ttagatgcaacagtagcatagcctcttcacccaggcgtcccaaaagcttggcgtgaagatttcagcaaacatgtcttacaacatgaggaggaggagtctaaatcagtcaggggataaaag

SEQ ID NO: 627302 - DNA, 120 bp, Artificial Sequence
  ENSG00000178996_24 (sequence is synthesized)
tatcgaatcattgacaacacacacttggctttagttcttaggagggttttgtttttgtttttgtttttaggttgaagattttcttttaatattcagttttttgaaaaaaaatggatctac

SEQ ID NO: 627303 - DNA, 120 bp, Artificial Sequence
  ENSG00000178996_25 (sequence is synthesized)
actgttaactgattgagactccactgtgattcacttgtttacttaaaaacttttcagggatgtctgtaaatttcagtgttaatatgtcatgaaaagtggtgtggattgatctaaggaggg

SEQ ID NO: 627304 - DNA, 120 bp, Artificial Sequence
  ENSG00000178996_26 (sequence is synthesized)
accagaaataatttttgctattccaaatactgaaggaaaaagataattgatttatactatgttttaaaaaaaaaaaaggtattgatgagccccccccccccaggacatttaaccttaaaa

SEQ ID NO: 627305 - DNA, 120 bp, Artificial Sequence
  ENSG00000178996_27 (sequence is synthesized)
tttattttaaatgtattcttttattattataagggaaatacagatggctgataaataccaaaaagattcaaaagcagcttaatttaaaaagcacaaagagattctggcttacagtgcccc

SEQ ID NO: 627306 - DNA, 120 bp, Artificial Sequence
  ENSG00000178996_28 (sequence is synthesized)
aatctcaatgtttttatagttgctgagctaactaatgtgattattgagtttacagatttaaaaattgtcactgttagagtatctactgtttttatgaagtcaaacttatgctgcctcaga

SEQ ID NO: 627307 - DNA, 120 bp, Artificial Sequence
  ENSG00000178996_29 (sequence is synthesized)
aatccctgggtactgaaatggtaacatggaagtgaagaggtcactttgaaatattggtgagtcacaaagattaaagaaaaggatcagtttgcagatactcagaaaaggttattgaaataa

SEQ ID NO: 627308 - DNA, 120 bp, Artificial Sequence
  ENSG00000178996_30 (sequence is synthesized)
ttactgaacagcacattttctctctaaaaagtagtttcatatgggttgtatttttaagatcagattatcattttgatatttggtcaaaattttgtaccttaggttacttagagccagatt

SEQ ID NO: 627309 - DNA, 120 bp, Artificial Sequence
  ENSG00000178996_31 (sequence is synthesized)
taacatcatgaacattatgtggctttgtctttactacagatatgtggaactgtaaccaaatatgttgtctctaaaacttgttgattgcaaaatacagttctataaacaaaacccatatgt

SEQ ID NO: 627310 - DNA, 120 bp, Artificial Sequence
  ENSG00000178996_32 (sequence is synthesized)
atatataaatgttaattttgcggaagtctggaaattataactatagcatttaagtttgagtctgtattggacaaataagcaccatgcttttcaaatgatttaaaaattacttttatttgc

SEQ ID NO: 627311 - DNA, 120 bp, Artificial Sequence
  ENSG00000178996_33 (sequence is synthesized)
ctctttattttgatggtggttggatttttttttttttaatagtaaaatcactaaacttgtgcaatggtagcatggaaattatctgaggtatattgtatgattgtactttagccagggtgg

SEQ ID NO: 627312 - DNA, 120 bp, Artificial Sequence
  ENSG00000178996_34 (sequence is synthesized)
acatagcttaaattataaaaactaaagatgaaagtacaaggaagtataagttatacttatgtaagtataaattcatgctgcctacttctaagagaaatttcattcttcataaccacataa

SEQ ID NO: 627313 - DNA, 120 bp, Artificial Sequence
  ENSG00000178996_35 (sequence is synthesized)
cattataatgccactgattcatacgggatttacattaattctatgggggaggacactagaattattagtgttcattttcatctaagatctttattctctaacgttcttggtcctattgaa

SEQ ID NO: 627314 - DNA, 120 bp, Artificial Sequence
  ENSG00000178996_36 (sequence is synthesized)
acattgcagtatgcaaaactactgcaatgttaaacccaagagaaaagccattatcatgtgtatgctggtcatcatgatcagtgtggtacaatttttaaaaataaactatcatgcccttca

SEQ ID NO: 627315 - DNA, 120 bp, Artificial Sequence
  ENSG00000178996_37 (sequence is synthesized)
tgccattatttgtctttatttctatgatttataatcctgatatgtgatgtgtttgtaacacagggtgtgcacttgagcctggttttactgtttttattagacagagttgtttatatgctg

SEQ ID NO: 627316 - DNA, 120 bp, Artificial Sequence
  ENSG00000178996_38 (sequence is synthesized)
taactgtaacgcagcgagactggttctacagccatgtgtcgtaatcttgttccccgtccaagctgttgtatctgaaggtacccagtttgcacccaggatgagggaacgcattcaaaagtg

SEQ ID NO: 627317 - DNA, 120 bp, Artificial Sequence
  ENSG00000178996_39 (sequence is synthesized)
aaatgtaaagccagtgcacgaatattatagtaattgagattttcccaggcttcactgatacagttgttttgcatttattcacaataatacagcagattcttaaatgccgatttttaattg

SEQ ID NO: 627318 - DNA, 120 bp, Artificial Sequence
  ENSG00000178996_40 (sequence is synthesized)
tcttaaattttgctgctgttctcataattaaggacttgaaaaatgttttagtctgtcaagtatgtaaagtttgtgtaaaaacttttaaatgtcattcttaagttcattgccatagccatt

SEQ ID NO: 627319 - DNA, 120 bp, Artificial Sequence
  ENSG00000178996_41 (sequence is synthesized)
ttccatttatgtcttcattttccaaaaatcaaatgccatgtctgatacctttaagtccataagcattcaattttctcatttccaccttcatctttggttaacagaataagtaaaacaggg

SEQ ID NO: 627320 - DNA, 120 bp, Artificial Sequence
  ENSG00000178996_42 (sequence is synthesized)
tattatttatttgtagtctagaaatgttgaatattgttttatttccttcaaaatgttatgattagtgcagatcagccatgtttatctttttaaaaaataaacaggttgctttatttctta

SEQ ID NO: 627321 - DNA, 120 bp, Artificial Sequence
  ENSG00000178996_43 (sequence is synthesized)
tggcccttagagcaggtgatatggagtgtattgtgcaggctgaaaggggcgactttgacagcagtaccactgtgggtttcagaatcatattctacaggtgaggaagcgagcagagacgtg

SEQ ID NO: 627322 - DNA, 120 bp, Artificial Sequence
  ENSG00000178996_44 (sequence is synthesized)
gacgcctgggtcttttccctagagtgagctcttaccaaagtcaaggagagtaggcgacacgtggaggaagggaagatggaggtgcagaaggctgacggcattcaggatcgctgtaacact

SEQ ID NO: 627323 - DNA, 120 bp, Artificial Sequence
  ENSG00000178996_45 (sequence is synthesized)
aaagagtacctttgatgacagtgctatcattttagagtttgaatagttgagtaatgagctgctcaaatctgtaatcttgagacgagggtagaattagaaggggacctaaaccatgttagg

SEQ ID NO: 627324 - DNA, 120 bp, Artificial Sequence
  ENSG00000178996_46 (sequence is synthesized)
tatctgtttgaacactgcactgtcacttagtggtgagtttcaaaaagtgaggaaataatggagaagaacggatgtctgtaaatagaaatctgctttcacccttccacacctctcaatctc

SEQ ID NO: 627325 - DNA, 120 bp, Artificial Sequence
  ENSG00000178996_47 (sequence is synthesized)
tgctttggtagaggaattaagatcaattctctgagtttaagaaattcctgcaaagaattcttgcctgcaacctttacgaagtgaagtaatttcaggaaaagcgtactcattttgagtttg

SEQ ID NO: 627326 - DNA, 120 bp, Artificial Sequence
  ENSG00000178996_48 (sequence is synthesized)
aaatctattaatgtactgaaattgagaacgttgtttaggaaaattgtttagggaaactacatagaatgaatataatctgagtattggatctgagagcagcgttgctggtatcccagtgag

SEQ ID NO: 627327 - DNA, 120 bp, Artificial Sequence
  ENSG00000178996_49 (sequence is synthesized)
ttagctgtccaactatcagagttcatgagttattaatagttgttagtgtctctgacctttgctaaagcaccagaatttgcaaattaaaaaaatatatagcagtagtgcttgtcttaacat

SEQ ID NO: 627328 - DNA, 120 bp, Artificial Sequence
  ENSG00000178996_50 (sequence is synthesized)
ttcttactaatgtgcattctcatataatgccttgattgagagaatggggaggtgtgggagttagggaggcagtcttgcctgtgaaagtccagtgtaggggcggctgggcagggaaaccta

SEQ ID NO: 627329 - DNA, 120 bp, Artificial Sequence
  ENSG00000178996_51 (sequence is synthesized)
ctcctgagcagggaaacctactgtccctgtttcctcagcgggtctggcctttactggtgaagtgctcactgcctttctggtgggccagtccgtttatgagcaaccctgatctctggcatg

SEQ ID NO: 627330 - DNA, 120 bp, Artificial Sequence
  ENSG00000178996_52 (sequence is synthesized)
tcttttcttgtattgaactgaagtttgcctcccttgattgtctttctgttccctgggaccgccttcagacatttggagacagcagtctcgcttccttcctctctgcttctctccttcccc

SEQ ID NO: 627331 - DNA, 120 bp, Artificial Sequence
  ENSG00000178996_53 (sequence is synthesized)
ttccaaatgcgtgactggtcttctgactcctatgggggaaggggcttgctgggagaatgatcaaacgttttcagtcttgttgctgccgctgaaagggagtaccctggacatcagtactaa

SEQ ID NO: 627332 - DNA, 120 bp, Artificial Sequence
  ENSG00000178996_54 (sequence is synthesized)
ttttagtagacagtagtaactttcttggcaatttgcgatttgtaaatgcagtctaatattgaattcgttttttgtgcaatcatattgctgttggcctgtattaaacctgtatttacatta

SEQ ID NO: 627333 - DNA, 120 bp, Artificial Sequence
  ENSG00000178997_0 (sequence is synthesized)
gcggacctttctccaggttttcagcctgtgatttgataaccgccgccgggtggcgtggagcgtcccgagacttcttccttcattgcagcccctcttcttttagttctagactgaagttcg

SEQ ID NO: 627334 - DNA, 120 bp, Artificial Sequence
  ENSG00000178997_1 (sequence is synthesized)
aggaacgcaccacttggctgaaattaggatccagatttcccaaacttccttcggaggaaaaagccctaacgatggaggacagtgaattcctagcttatgtggaactactagatgaagtgg

SEQ ID NO: 627335 - DNA, 120 bp, Artificial Sequence
  ENSG00000178997_2 (sequence is synthesized)
aacaaggctcagtgagagcaaaagcatcttctgttagtctacatgcagaaagaacctggatggagaaaatgaaagttgaagacctaaatgtatgtgagcctgcttctcctgcccctgaag

SEQ ID NO: 627336 - DNA, 120 bp, Artificial Sequence
  ENSG00000178997_3 (sequence is synthesized)
caccagctacctctctgctgaatgacctcaagtacagcccatcagaggaagaggaggtgacatacacagtcattaatcaattccagcagaagtttggtgctgcgatactccatatcaaga

SEQ ID NO: 627337 - DNA, 120 bp, Artificial Sequence
  ENSG00000178997_4 (sequence is synthesized)
agcagaatgtcctgagtgtggcagcagaaggagcgaatgtatgtcgccatggcaaactgtgctggctgcaggtggccacaaattgccgagtttacttatttgacattttccttctgggaa

SEQ ID NO: 627338 - DNA, 120 bp, Artificial Sequence
  ENSG00000178997_5 (sequence is synthesized)
gtcgagctttccacaatggacttcagatgatactagaagacaagagaattttgaaggttatccatgattgtcgttggctttctgattgcctctctcatcagtatggaattttgctgaata

SEQ ID NO: 627339 - DNA, 120 bp, Artificial Sequence
  ENSG00000178997_6 (sequence is synthesized)
atgtctttgacacacaggtagcagatgtacttcagttttccatggaaacgggtggctatcttccaaactgcatcactactttgcaggagagtttaatcaaacaccttcaagtagccccta

SEQ ID NO: 627340 - DNA, 120 bp, Artificial Sequence
  ENSG00000178997_7 (sequence is synthesized)
aatatctctcctttctagaaaagagacaaaaactaattcaggaaaatccagaagtatggttcatccgacctgtttcaccctctttactgaaaattttggccctggaagctacctacctgt

SEQ ID NO: 627341 - DNA, 120 bp, Artificial Sequence
  ENSG00000178997_8 (sequence is synthesized)
taccccttcgcttggcactcctagatgagatgatgtctgacctaaccaccctggtggatggttacctaaacacgtatcgcgaagggtctgcagaccggcttggaggcactgagcctacat

SEQ ID NO: 627342 - DNA, 120 bp, Artificial Sequence
  ENSG00000178997_9 (sequence is synthesized)
gtatggagctgccagaggaactgcttcaactcaaggacttccagaagcagcgcagggagaaagctgcaagagaatatagggtgaatgcacagggactcctgataaggacagtgctacagc

SEQ ID NO: 627343 - DNA, 120 bp, Artificial Sequence
  ENSG00000178997_10 (sequence is synthesized)
caaagaaattagtgacagagacagcagggaaagaggagaaagtcaaaggcttcttatttggtaaaaattttaggatagataaagctccaagttttacatctcaagactttcacggggatg

SEQ ID NO: 627344 - DNA, 120 bp, Artificial Sequence
  ENSG00000178997_11 (sequence is synthesized)
tgaatttactgaaagaagaatctttgaataaacaagctacaaatcctcaacatctacctcccacagaggaaggggaaaccagtgaggattccagtaacaaactcatttgcacaaagtcaa

SEQ ID NO: 627345 - DNA, 120 bp, Artificial Sequence
  ENSG00000178997_12 (sequence is synthesized)
caggcaagtttatctttgaaagaggagacagaacagttattgatggtggaaaacaaggaagatttaaaatgcacaaaacaggctgtttcaatgtcttcctttcctcaggaaaccagagtg

SEQ ID NO: 627346 - DNA, 120 bp, Artificial Sequence
  ENSG00000178997_13 (sequence is synthesized)
tctccaagtgacactttttatcctatcagaaagactgtggtttccacactccctccctgtccagccttggagaagatcgattcctggataagtccttttctaaatctgccctagagatgg

SEQ ID NO: 627347 - DNA, 120 bp, Artificial Sequence
  ENSG00000178997_14 (sequence is synthesized)
gcagtttgttcttaaggccatacagatggcttatttcctttgccatcagggctttccacagtgcccaggtttctcatgttgtaaatgtagtaatgcttcagtcacaggggaaaattatat

SEQ ID NO: 627348 - DNA, 120 bp, Artificial Sequence
  ENSG00000178997_15 (sequence is synthesized)
cctcttgcttactcctgtgttcctggtatgcggagaatgagaatgaataagttaaataatggaagaagtataatttctgattatgtcactgtgtagaaatgttctcagtgaccagagtgc

SEQ ID NO: 627349 - DNA, 120 bp, Artificial Sequence
  ENSG00000178997_16 (sequence is synthesized)
attatttttcataatttgggtttagaggatttgaagaaaggaagaatcttgggcttagtatcaggaagactccatcattttcaaattttgttttgcttcttgacttttggattcctttga

SEQ ID NO: 627350 - DNA, 120 bp, Artificial Sequence
  ENSG00000178997_17 (sequence is synthesized)
tgacttttggattcctttgaagagacctggtaaaactattaacaattcatttaaaaaattggtacctgataactttaccagtacttttttcctttttatttatttgttttatttattttt

SEQ ID NO: 627351 - DNA, 120 bp, Artificial Sequence
  ENSG00000178997_18 (sequence is synthesized)
cagggctacaccataggcagtgtgcccagagtaaccacttttttcctttttaaaatataatattaactttatgtttgaatgttgaatgttttgtctgtctcttaggcaaataatgttata

SEQ ID NO: 627352 - DNA, 70 bp, Artificial Sequence
  ENSG00000178997_19 (sequence is synthesized)
ggcaaataatgttataggaatcaataatttaatttttgttttatttaatctctgctcactgcaacctccg

SEQ ID NO: 627353 - DNA, 120 bp, Artificial Sequence
  ENSG00000178997_20 (sequence is synthesized)
aagtgctgggattacaggtgtgaggcacggtgcccagccaatatctttattttaatttgtttttatttcctttatttttagctggttttgtccattttcctaacaaagcagggaccctgg

SEQ ID NO: 627354 - DNA, 120 bp, Artificial Sequence
  ENSG00000178997_21 (sequence is synthesized)
gctggttttgtccattttcctaacaaagcagggaccctgggtttctttttagtctgtctgttatataaacttgaagcctgactccattctatttgcctggagttagtatactttcttagg

SEQ ID NO: 627355 - DNA, 120 bp, Artificial Sequence
  ENSG00000178997_22 (sequence is synthesized)
gtgaaaggaaggcagcttgtattgagccttttaaagtattgaatgcttgcaaattgctaacattcttttgtgtaaaataaccaataaacctgttttgtcatactctacttaaaaaaacaa

SEQ ID NO: 627356 - DNA, 120 bp, Artificial Sequence
  ENSG00000178997_23 (sequence is synthesized)
gaagacggcttttggaatcaattagcatggaccccagcagtgactaccatttcctcagccagattttgtggaagagggtgaaactcacattggtctgtggtgtcttcgagggtgtgcttc

SEQ ID NO: 627357 - DNA, 120 bp, Artificial Sequence
  ENSG00000178997_24 (sequence is synthesized)
agcatgttgaccctaataagattgttgtcctgaagaaagtgaagaatgtggagacaggtcgaagtgtcccaggagtgaagttgttttttgggcatgagattgtgaatgtggaactactag

SEQ ID NO: 627358 - DNA, 120 bp, Artificial Sequence
  ENSG00000178997_25 (sequence is synthesized)
gcatgagccactgtgcccagcctaaaacagttattttctttaaagtcttgcttactgttcagaggaaattgttttattgtctccaggaaaatccagaagtatggttcatccgacctgttt

SEQ ID NO: 627359 - DNA, 120 bp, Artificial Sequence
  ENSG00000178997_26 (sequence is synthesized)
ttaggaatgtgaacaggaagggattgtcttgctaagcaagctacttaaaattcacagtccattcacaattcctcatccaaaaccttggggccaaatgtctcagaatcaagaatttttctg

SEQ ID NO: 627360 - DNA, 120 bp, Artificial Sequence
  ENSG00000178997_27 (sequence is synthesized)
gaattttggaaaagtggaactactagatgaagtggaacaaggctcagtgagagcaaaagcatcttctgttagtctacatgcagaaagaacctggatggagaaaatgaaagttgaagacct

SEQ ID NO: 627361 - DNA, 120 bp, Artificial Sequence
  ENSG00000178999_0 (sequence is synthesized)
agttgtttgcgggcggccgggagagtagcagtgccttggaccccagctctcctccccctttctctctaaggatggcccagaaggagaactcctacccctggccctacggccgacagacgg

SEQ ID NO: 627362 - DNA, 120 bp, Artificial Sequence
  ENSG00000178999_1 (sequence is synthesized)
ctccatctggcctgagcaccctgccccagcgagtcctccggaaagagcctgtcaccccatctgcacttgtcctcatgagccgctccaatgtccagcccacagctgcccctggccagaagg

SEQ ID NO: 627363 - DNA, 120 bp, Artificial Sequence
  ENSG00000178999_2 (sequence is synthesized)
tgatggagaatagcagtgggacacccgacatcttaacgcggcacttcacaattgatgactttgagattgggcgtcctctgggcaaaggcaagtttggaaacgtgtacttggctcgggaga

SEQ ID NO: 627364 - DNA, 120 bp, Artificial Sequence
  ENSG00000178999_3 (sequence is synthesized)
agaaaagccatttcatcgtggcgctcaaggtcctcttcaagtcccagatagagaaggagggcgtggagcatcagctgcgcagagagatcgaaatccaggcccacctgcaccatcccaaca

SEQ ID NO: 627365 - DNA, 120 bp, Artificial Sequence
  ENSG00000178999_4 (sequence is synthesized)
tcctgcgtctctacaactatttttatgaccggaggaggatctacttgattctagagtatgccccccgcggggagctctacaaggagctgcagaagagctgcacatttgacgagcagcgaa

SEQ ID NO: 627366 - DNA, 120 bp, Artificial Sequence
  ENSG00000178999_5 (sequence is synthesized)
ccatgggaagaaggtgattcacagagacataaagccagaaaatctgctcttagggctcaagggagagctgaagattgctgacttcggctggtctgtgcatgcgccctccctgaggaggaa

SEQ ID NO: 627367 - DNA, 120 bp, Artificial Sequence
  ENSG00000178999_6 (sequence is synthesized)
gacaatgtgtggcaccctggactacctgcccccagagatgattgaggggcgcatgcacaatgagaaggtggatctgtggtgcattggagtgctttgctatgagctgctggtggggaaccc

SEQ ID NO: 627368 - DNA, 120 bp, Artificial Sequence
  ENSG00000178999_7 (sequence is synthesized)
accctttgagagtgcatcacacaacgagacctatcgccgcatcgtcaaggtggacctaaagttccccgcttccgtgcccatgggagcccaggacctcatctccaaactgctcaggcataa

SEQ ID NO: 627369 - DNA, 120 bp, Artificial Sequence
  ENSG00000178999_8 (sequence is synthesized)
cccctcggaacggctgcccctggcccaggtctcagcccacccttgggtccgggccaactctcggagggtgctgcctccctctgcccttcaatctgtcgcctgatggtccctgtcattcac

SEQ ID NO: 627370 - DNA, 120 bp, Artificial Sequence
  ENSG00000178999_9 (sequence is synthesized)
tcgggtgcgtgtgtttgtatgtctgtgtatgtataggggaaagaagggatccctaactgttcccttatctgttttctacctcctcctttgtttaataaaggctgaagctttttgtactca

SEQ ID NO: 627371 - DNA, 120 bp, Artificial Sequence
  ENSG00000178999_10 (sequence is synthesized)
ggccaggctggtcttgaactcctgactgcgggagccactgcgcccagccctaggttgtttattaataacccattttaatatgggactatgagcagaggctgggaagcaaaactgtcacat

SEQ ID NO: 627372 - DNA, 120 bp, Artificial Sequence
  ENSG00000178999_11 (sequence is synthesized)
aaactgtcacatcagtgtttctctttgaattgggggtaggtgggtgggtggctctttagcaaggggctgaaatactgcttgcagcacattccaccccggtcatcagacaaaggcaccctc

SEQ ID NO: 627373 - DNA, 120 bp, Artificial Sequence
  ENSG00000178999_12 (sequence is synthesized)
gaaacttgagatcctgcaatgagcaatcctttaagcactttcttccccgttatgctccaaagtacgggtcccaagtttgacgacagaacccgctctggtcatttgtagccacatcctgtc

SEQ ID NO: 627374 - DNA, 120 bp, Artificial Sequence
  ENSG00000178999_13 (sequence is synthesized)
gattgctttctctgtagctatggctagtgagccccatttagctcttagtcctggcaagccttgaatccagaaatctgcctccagtttccccttaccactcccagccctggtgtccccggc

SEQ ID NO: 627375 - DNA, 120 bp, Artificial Sequence
  ENSG00000178999_14 (sequence is synthesized)
cccagctctcctccccctttctctctaaggatggcccagaaggagaactcctacccctggccctacggccgacagacgtacgggtcccaagtttgacgacagaacccgctctggtcattt

SEQ ID NO: 627376 - DNA, 120 bp, Artificial Sequence
  ENSG00000179002_0 (sequence is synthesized)
ctgagaccatcacttcccagccatggggcccagggcaaagaccatctcctccctgttcttcctcctatgggtcctggctgagccggctgagaactcggacttctacctgcctggggatta

SEQ ID NO: 627377 - DNA, 120 bp, Artificial Sequence
  ENSG00000179002_1 (sequence is synthesized)
cctcctgggtggcctcttctccctccatgccaacatgaagggcattgttcaccttaacttcctgcaggtgcccatgtgcaaggagtatgaagtgaaggtgataggctacaacctcatgca

SEQ ID NO: 627378 - DNA, 120 bp, Artificial Sequence
  ENSG00000179002_2 (sequence is synthesized)
ggccatgcgctttgcggtggaggagatcaacaatgacagcagcctgctgcctggtgtgctgctgggctatgagatcgtggatgtgtgctacatctccaacaatgtccagccggtgctcta

SEQ ID NO: 627379 - DNA, 120 bp, Artificial Sequence
  ENSG00000179002_3 (sequence is synthesized)
cttcctggcacacgaggacaacctccttcccatccaagaggactacagtaactacatttcccgtgtggtggctgtcattggccctgacaactccgagtctgtcatgactgtggccaactt

SEQ ID NO: 627380 - DNA, 120 bp, Artificial Sequence
  ENSG00000179002_4 (sequence is synthesized)
cctctccctatttctccttccacagatcacctacagcgccatcagcgatgagctgcgagacaaggtgcgcttcccggctttgctgcgtaccacacccagcgccgaccaccacatcgaggc

SEQ ID NO: 627381 - DNA, 120 bp, Artificial Sequence
  ENSG00000179002_5 (sequence is synthesized)
catggtgcagctgatgctgcacttccgctggaactggatcattgtgctggtgagcagcgacacctatggccgcgacaatggccagctgcttggcgagcgcgtggcccggcgcgacatctg

SEQ ID NO: 627382 - DNA, 120 bp, Artificial Sequence
  ENSG00000179002_6 (sequence is synthesized)
catcgccttccaggagacgctgcccacactgcagcccaaccagaacatgacgtcagaggagcgccagcgcctggtgaccattgtggacaagctgcagcagagcacagcgcgcgtcgtggt

SEQ ID NO: 627383 - DNA, 120 bp, Artificial Sequence
  ENSG00000179002_7 (sequence is synthesized)
cgtgttctcgcccgacctgaccctgtaccacttcttcaatgaggtgctgcgccagaacttcactggcgccgtgtggatcgcctccgagtcctgggccatcgacccggtcctgcacaacct

SEQ ID NO: 627384 - DNA, 120 bp, Artificial Sequence
  ENSG00000179002_8 (sequence is synthesized)
cacggagctgcgccacttgggcaccttcctgggcatcaccatccagagcgtgcccatcccgggcttcagtgagttccgcgagtggggcccacaggctgggccgccacccctcagcaggac

SEQ ID NO: 627385 - DNA, 120 bp, Artificial Sequence
  ENSG00000179002_9 (sequence is synthesized)
cagccagagctatacctgcaaccaggagtgcgacaactgcctgaacgccaccttgtccttcaacaccattctcaggctctctggggagcgtgtcgtctacagcgtgtactctgcggtcta

SEQ ID NO: 627386 - DNA, 120 bp, Artificial Sequence
  ENSG00000179002_10 (sequence is synthesized)
agcctcctcggctgtgacaaaagcacctgcaccaagagggtggtctacccctggcagctgcttgaggagatctggaaggtcaacttcactctcctggaccaccaaatcttcttcgacccg

SEQ ID NO: 627387 - DNA, 120 bp, Artificial Sequence
  ENSG00000179002_11 (sequence is synthesized)
caaggggacgtggctctgcacttggagattgtccagtggcaatgggaccggagccagaatcccttccagagcgtcgcctcctactaccccctgcagcgacagctgaagaacatccaagac

SEQ ID NO: 627388 - DNA, 120 bp, Artificial Sequence
  ENSG00000179002_12 (sequence is synthesized)
atctcctggcacaccatcaacaacacgatccctatgtccatgtgttccaagaggtgccagtcagggcaaaagaagaagcctgtgggcatccacgtctgctgcttcgagtgcatcgactgc

SEQ ID NO: 627389 - DNA, 120 bp, Artificial Sequence
  ENSG00000179002_13 (sequence is synthesized)
cttcccggcaccttcctcaaccacactgaagatgaatatgaatgccaggcctgcccgaataacgagtggtcctaccagagtgagacctcctgcttcaagcggcagctggtcttcctggaa

SEQ ID NO: 627390 - DNA, 120 bp, Artificial Sequence
  ENSG00000179002_14 (sequence is synthesized)
tggcatgaggcacccaccatcgctgtggccctgctggccgccctgggcttcctcagcaccctggccatcctggtgatattctggaggcacttccagacacccatagttcgctcggctggg

SEQ ID NO: 627391 - DNA, 120 bp, Artificial Sequence
  ENSG00000179002_15 (sequence is synthesized)
ggccccatgtgcttcctgatgctgacactgctgctggtggcatacatggtggtcccggtgtacgtggggccgcccaaggtctccacctgcctctgccgccaggccctctttcccctctgc

SEQ ID NO: 627392 - DNA, 120 bp, Artificial Sequence
  ENSG00000179002_16 (sequence is synthesized)
ttcacaatctgcatctcctgtatcgccgtgcgttctttccagatcgtctgcgccttcaagatggccagccgcttcccacgcgcctacagctactgggtccgctaccaggggccctacgtc

SEQ ID NO: 627393 - DNA, 120 bp, Artificial Sequence
  ENSG00000179002_17 (sequence is synthesized)
tctatggcatttatcacggtactcaaaatggtcattgtggtaattggcatgctggccacgggcctcagtcccaccacccgtactgaccccgatgaccccaagatcacaattgtctcctgt

SEQ ID NO: 627394 - DNA, 120 bp, Artificial Sequence
  ENSG00000179002_18 (sequence is synthesized)
aaccccaactaccgcaacagcctgctgttcaacaccagcctggacctgctgctctcagtggtgggtttcagcttcgcctacatgggcaaagagctgcccaccaactacaacgaggccaag

SEQ ID NO: 627395 - DNA, 120 bp, Artificial Sequence
  ENSG00000179002_19 (sequence is synthesized)
ttcatcaccctcagcatgaccttctatttcacctcatccgtctccctctgcaccttcatgtctgcctacagcggggtgctggtcaccatcgtggacctcttggtcactgtgctcaacctc

SEQ ID NO: 627396 - DNA, 120 bp, Artificial Sequence
  ENSG00000179002_20 (sequence is synthesized)
ctggccatcagcctgggctacttcggccccaagtgctacatgatcctcttctacccggagcgcaacacgcccgcctacttcaacagcatgatccagggctacaccatgaggagggactag

SEQ ID NO: 627397 - DNA, 120 bp, Artificial Sequence
  ENSG00000179008_0 (sequence is synthesized)
gagtccagcccagggctccggggaccgtttgtagttaggatccgctgtggcgtcctgagtggagtttgggaccccagggagggagggtgtgggcgttcgggtccagaggagctgtttagt

SEQ ID NO: 627398 - DNA, 120 bp, Artificial Sequence
  ENSG00000179008_1 (sequence is synthesized)
atccaagatgaatgacagcctgtttgtcagtttggacagacttttgctagaatttgtcttccagtatgagcaagacataagtactaaagaagagatgattcaaagaattaataaatgctg

SEQ ID NO: 627399 - DNA, 120 bp, Artificial Sequence
  ENSG00000179008_2 (sequence is synthesized)
tgaagatattaaggaaaacaaagtaactatttgtaggatacacgaaactataaatgcaacagatgaggaaattgatcattactgtaaacatagtgaggagattaaagacaactgtagaaa

SEQ ID NO: 627400 - DNA, 120 bp, Artificial Sequence
  ENSG00000179008_3 (sequence is synthesized)
ctggaagccaacatgtgatgtttttcgtaaacatgaagattatatgcaggaccaatttactgtttatcaaggaactgttgaaaaagacaaagaaatgtatcatgattatatatgtcagta

SEQ ID NO: 627401 - DNA, 120 bp, Artificial Sequence
  ENSG00000179008_4 (sequence is synthesized)
taaagaagttttgaagcagtaccaactaaaatactcagaaacacccttttcacgtgaatattatgagaagaaaagagaacatgaagaaattcaaagcagagtgttggcatgtactgaaca

SEQ ID NO: 627402 - DNA, 120 bp, Artificial Sequence
  ENSG00000179008_5 (sequence is synthesized)
attaaaaatgaatgaaacaatttttatgaaatttcgagtgcctgctccctttccatcacttactaaatggactttaaacattgttaatttgagatgtgaaacacaagatattcttaaaca

SEQ ID NO: 627403 - DNA, 120 bp, Artificial Sequence
  ENSG00000179008_6 (sequence is synthesized)
tgccagcaatcttaccaaaagttcatccgaattgaagaaagaagtagatgaaatggaaatagaaattaattatttaaaccagcagatatctaggcataatgaaactaaggctctttcaga

SEQ ID NO: 627404 - DNA, 120 bp, Artificial Sequence
  ENSG00000179008_7 (sequence is synthesized)
aactctggaagaaaagaacaaaaatacagaaaacagaaaagaactgaaagaaagaatttttggaaaagatgagcatgtacttacattgaataaaactcaaagcagtcaattatttcttcc

SEQ ID NO: 627405 - DNA, 120 bp, Artificial Sequence
  ENSG00000179008_8 (sequence is synthesized)
ttatgaatctcagaaattagtaagaccaataaagatgcattcttcagaaccaagagttgcagatataaaagaagaaagttctgcgaagcagtcaaagcttgccaatattgactttagaca

SEQ ID NO: 627406 - DNA, 120 bp, Artificial Sequence
  ENSG00000179008_9 (sequence is synthesized)
aaaagaaaatgatacacagatatttaatgactctgctgtggataaccattcaaaatgttcacatattacgactatcacaagttcacaaaagtttatgcaagtcagattgttaaccccaca

SEQ ID NO: 627407 - DNA, 120 bp, Artificial Sequence
  ENSG00000179008_10 (sequence is synthesized)
gaaacaatcaaattccaatcagtggtcggaaaaaggggataaagatgctgagtatggagataaagggacagtaagacaagtaagagaatcaaaatgtacttcacaagctatatatactga

SEQ ID NO: 627408 - DNA, 120 bp, Artificial Sequence
  ENSG00000179008_11 (sequence is synthesized)
aaaatgatagtgatgaagtagaagagagagctgagaattttccacgaacgtctgaaattcctatatttttaggaactcccaaagctgtgaaagcacctgagtcattggagaaaataaaat

SEQ ID NO: 627409 - DNA, 120 bp, Artificial Sequence
  ENSG00000179008_12 (sequence is synthesized)
tccctaaaacccccccgttcgaaattaacagaaatagaaatgcagtacctgaagttcaaacagaaaaggaatcccctggactttcttttcttatgagttatacttctagatcacctggat

SEQ ID NO: 627410 - DNA, 120 bp, Artificial Sequence
  ENSG00000179008_13 (sequence is synthesized)
tgaatttatttgattcttctgtatttgatacagaaatctcatcagatcagtttaatgaacattattctgcaagaaatctaaatcctctgtcatcagagcaagagattggaaacttacttg

SEQ ID NO: 627411 - DNA, 120 bp, Artificial Sequence
  ENSG00000179008_14 (sequence is synthesized)
agaagccagaaggagaagatggctttacattttcttttccatcagacacttcaactcatacatttggagctggaaaagatgattttagttttccattttcatttggacagggtcaaaatt

SEQ ID NO: 627412 - DNA, 120 bp, Artificial Sequence
  ENSG00000179008_15 (sequence is synthesized)
caataccttcttcttctttaaaaggtttttcatcttcctcacaaaatacaacacagtttacttttttttgagctagtcattaattccttaaattattttactgttctgtgttcatgaggg

SEQ ID NO: 627413 - DNA, 120 bp, Artificial Sequence
  ENSG00000179008_16 (sequence is synthesized)
cataaatttacattattgcttaaaacatgaagactgctttcttttattgattaaagcagtaatgtttacattatttgattatatttattgaaatattgaaatactgaatattttgggttt

SEQ ID NO: 627414 - DNA, 120 bp, Artificial Sequence
  ENSG00000179008_17 (sequence is synthesized)
tgtgtgtgctattaactaatcattatttattttggttttgattttgcgagccgtggtcaggtagaacttttattaatcttaatagaatttgatgcttttttcattactctttatttaaat

SEQ ID NO: 627415 - DNA, 120 bp, Artificial Sequence
  ENSG00000179008_18 (sequence is synthesized)
attaagcctgcttctccttggaacctaaggtttttttctggaagtattgttggtactttgataagaacaagaactgcagtagtaactccagagttagtgctgaagcgtactttagctact

SEQ ID NO: 627416 - DNA, 120 bp, Artificial Sequence
  ENSG00000179008_19 (sequence is synthesized)
aaaaatttctattaaaattattgggtttcacttctgcttcactatgtagtatacagagtggtactgtaataataatttcaaataatttatgttaataacaaaatctgtgttattttcttc

SEQ ID NO: 627417 - DNA, 120 bp, Artificial Sequence
  ENSG00000179008_20 (sequence is synthesized)
taatataacacatggtacaattctaattttatgagttatgctaatgctttcaatggctaaaaattaaatgtaaagggcaagagtaatttctgaaaattggattgttgtatcagtggtgat

SEQ ID NO: 627418 - DNA, 120 bp, Artificial Sequence
  ENSG00000179008_21 (sequence is synthesized)
cctgttaatattcttttttgcttaaatattttttgaagaacatttacaattttgtctccttcaataacaaaaatttcttctttatgttttgtgttcagtatttgtcaattaattatatag

SEQ ID NO: 627419 - DNA, 120 bp, Artificial Sequence
  ENSG00000179008_22 (sequence is synthesized)
cttaagtgaagatatttaagatttgatgaacttctgtaaacattttgctcaatatcattgtattttgtgctttgtaaattagctgtactgagttaccaagtaataaagggtttgactcca

SEQ ID NO: 627420 - DNA, 120 bp, Artificial Sequence
  ENSG00000179008_23 (sequence is synthesized)
tgaatttatttgattcttctgtatttgatacagaaatctcatcagatcagtttaatgaacattattctgcaagaaatctaaatcctctgtcatcagagcaagagattgaaaagaccaagt

SEQ ID NO: 627421 - DNA, 120 bp, Artificial Sequence
  ENSG00000179008_24 (sequence is synthesized)
ctcatccatggcgaaatcttcgcccccagcctcgtgaagatctagcacgtccgccatctcgccttcgatcgagatctcgtctgtgccgctcagacactagatactcaacatatactatat

SEQ ID NO: 627422 - DNA, 120 bp, Artificial Sequence
  ENSG00000179008_25 (sequence is synthesized)
gctaggccatgcaagatgtagagaataccagaataagaaaataaaaattgatttctacatgatacattaagtgcaagaaatatccctctggcaaattaaagaaagtaaaggtatagtgaa

SEQ ID NO: 627423 - DNA, 120 bp, Artificial Sequence
  ENSG00000179008_26 (sequence is synthesized)
ggggaccgtttgtagttaggatccgctgtggcgtcctgagtggagtttgggaccccagggagggagggtgtgggcgttcgggtccagaggagctgtttagtcttccagtatgagcaagac

SEQ ID NO: 627424 - DNA, 120 bp, Artificial Sequence
  ENSG00000179008_27 (sequence is synthesized)
attctcccacctaggtttaaattgaaccccgtctcggtcccccggttttgagaggtttctctcctcgagccgctgagtcacgcagcccaacagtaggagtggctcgaggcctacacgtcc

SEQ ID NO: 627425 - DNA, 120 bp, Artificial Sequence
  ENSG00000179008_28 (sequence is synthesized)
gcgagttcgcggggcgctggatggaaaagatttgaaacgccacctgtatcacatactaaatttatatacatagaaattattctggatcttctattctgtttcatcgatatgtgtatttat

SEQ ID NO: 627426 - DNA, 120 bp, Artificial Sequence
  ENSG00000179010_0 (sequence is synthesized)
gtctcactctgatgcacaggctggagagcagtggcgcgatatgggctcactgcaacctccgcctcccgttttcaaacgattgtctcagcctcccaagcagctggggttacacgcgtgcaa

SEQ ID NO: 627427 - DNA, 86 bp, Artificial Sequence
  ENSG00000179010_1 (sequence is synthesized)
tgtatttttggtagagacggggtctcgccatgtcatccacccacctcgcctcccaacgtgctgagattacaggcgtgagccaccgc

SEQ ID NO: 627428 - DNA, 120 bp, Artificial Sequence
  ENSG00000179010_2 (sequence is synthesized)
ttacaggcgtgagccaccgcgcctgggaagtgcgggaggcctttttaaaaaatgtaaactcgcgtgctcaagaagccctatcggagggaaacacccagaagaggccaccctccaaacaca

SEQ ID NO: 627429 - DNA, 120 bp, Artificial Sequence
  ENSG00000179010_3 (sequence is synthesized)
gggtaaaacaggggtgacgcacagaggtaacgggaaagcaggaacgagcgagagcgtgcggtcccgtacctgcgcgtgcctgcgtgcgcgtccgtgcggccgcgacgccgccgccggtgc

SEQ ID NO: 627430 - DNA, 120 bp, Artificial Sequence
  ENSG00000179010_4 (sequence is synthesized)
ctctctttctagacgtgcgcgcgcccgcagctcgcccccctgaccgtaaagaggcccggctgtgtcgtgaaaggggccgcaacgcgcagagcgctggttgacggccgggactccattttg

SEQ ID NO: 627431 - DNA, 120 bp, Artificial Sequence
  ENSG00000179010_5 (sequence is synthesized)
ttcgccgttactctgcgcacatcgctattgcggttccgaggcagtgggaagagatgcggcccctggacatcgtcgagctggcggaaccggaggaagtggaggtgctggagcccgaggagg

SEQ ID NO: 627432 - DNA, 120 bp, Artificial Sequence
  ENSG00000179010_6 (sequence is synthesized)
atttcgagcagtttctgctcccggtcatcaacgagatgcgcgaggacatcgcgtcgctgacgcgcgagcacgggcgggcgtacctgcggaaccggagcaagctgtgggagatggacaata

SEQ ID NO: 627433 - DNA, 120 bp, Artificial Sequence
  ENSG00000179010_7 (sequence is synthesized)
tgctcatccagatcaaaacgcaggtggaggcctcggaggagagcgccctcaaccacctccagaacccgggcgacgcggccgagggccgggcggccaagaggtgcgagaaggccgaggaga

SEQ ID NO: 627434 - DNA, 120 bp, Artificial Sequence
  ENSG00000179010_8 (sequence is synthesized)
agattgcgaagatggcagagatgctggtggagctggtccggcggatagagaagagcgagtcgtcgtgagcgcggtcggcggtttccagccaatggattctggtcaactggtggagattgg

SEQ ID NO: 627435 - DNA, 120 bp, Artificial Sequence
  ENSG00000179010_9 (sequence is synthesized)
ctgacaccctggagaagccgaaaccagagagccttttgttttctcttttttcctgtctatgctctgtctcacttaacactacgttttctgctatggtctgtggttgatgacctcaatatg

SEQ ID NO: 627436 - DNA, 120 bp, Artificial Sequence
  ENSG00000179010_10 (sequence is synthesized)
agtttcgattgttaacgtgtttttgtttgggaagtaattttgtttgaaaatgctctcacatacaggaattagggcctagattgtaagctcttgcagcagtcacatttgttcccgggcttt

SEQ ID NO: 627437 - DNA, 120 bp, Artificial Sequence
  ENSG00000179010_11 (sequence is synthesized)
ggtggttatttctaaatttttgaggtgctttgctatttcttgtgtgacctgatagctccctggaactttgggtctgtgtgtgacacatgagactcacagttggagttctccagctctgga
